United States Patent Application Publication US 2025/0320254 A1 - sequence listing, part 6

SEQ ID NO: 18683 - protein, 283 aa, Homo sapiens
MGLGLRGWGRPLLTVATALMLPVKPPAGSWGAQIIGGHEVTPHSRPYMASVRFGGQHHCGGFLLRARWVVSAAHCFSHRDLRTGLVVLGAHVLSTAEPTQQVFGIDALTTHPDYHPMTHANDICLLRLNGSAVLGPAVGLLRPPGRRARPPTAGTRCRVAGWGFVSDFEELPPGLMEAKVRVLDPDVCNSSWKGHLTLTMLCTRSGDSHRRGFCSADSGGPLVCRNRAHGLVSFSGLWCGDPKTPDVYTQVSAFVAWIWDVVRRSSPQPGPLPGTTRPPGEAA

SEQ ID NO: 18684 - protein, 2268 aa, Homo sapiens
MSGLHLVKQGRDRKKIDSQRDFTVASPAEFVTRFGGNKVIEKVLIANNGIAAVKCMRSIRRWSYEMFRNERAIRFVVMVTPEDLKANAEYIKMADHYVPVPGGPNNNNYANVELILDIAKRIPVQAVWAGWGHASENPKLPELLLKNGIAFMGPPSQAMWALGDKIASSIVAQTAGIPTLPWSGSGLRVDWQENDFSKRILNVPQELYEKGYVKDVDDGLQAAEEVGYPVMIKASEGGGGKGIRKVNNADDFPNLFRQVQAEVPGSPIFVMRLAKQSRHLEVQILADQYGNAISLFGRDCSVQRRHQKIIEEAPATIATPAVFEHMEQCAVKLAKMVGYVSAGTVEYLYSQDGSFYFLELNPRLQVEHPCTEMVADVNLPAAQLQIAMGIPLYRIKDIRMMYGVSPWGDSPIDFEDSAHVPCPRGHVIAARITSENPDEGFKPSSGTVQELNFRSNKNVWGYFSVAAAGGLHEFADSQFGHCFSWGENREEAISNMVVALKELSIRGDFRTTVEYLIKLLETESFQMNRIDTGWLDRLIAEKVQAERPDTMLGVVCGALHVADVSLRNSVSNFLHSLERGQVLPAHTLLNTVDVELIYEGVKYVLKVTRQSPNSYVVIMNGSCVEVDVHRLSDGGLLLSYDGSSYTTYMKEEVDRYRITIGNKTCVFEKENDPSVMRSPSAGKLIQYIVEDGGHVFAGQCYAEIEVMKMVMTLTAVESGCIHYVKRPGAALDPGCVLAKMQLDNPSKVQQAELHTGSLPRIQSTALRGEKLHRVFHYVLDNLVNVMNGYCLPDPFFSSKVKDWVERLMKTLRDPSLPLLELQDIMTSVSGRIPPNVEKSIKKEMAQYASNITSVLCQFPSQQIANILDSHAATLNRKSEREVFFMNTQSIVQLVQRYRSGIRGHMKAVVMDLLRQYLRVETQFQNGHYDKCVFALREENKSDMNTVLNYIFSHAQVTKKNLLVTMLIDQLCGRDPTLTDELLNILTELTQLSKTTNAKVALRARQVLIASHLPSYELRHNQVESIFLSAIDMYGHQFCIENLQKLILSETSIFDVLPNFFYHSNQVVRMAALEVYVRRAYIAYELNSVQHRQLKDNTCVVEFQFMLPTSHPNRGNIPTLNRMSFSSNLNHYGMTHVASVSDVLLDNSFTPPCQRMGGMVSFRTFEDFVRIFDEVMGCFSDSPPQSPTFPEAGHTSLYDEDKVPRDEPIHILNVAIKTDCDIEDDRLAAMFREFTQQNKATLVDHGIRRLTFLVAQKDFRKQVNYEVDRRFHREFPKFFTFRARDKFEEDRIYRHLEPALAFQLELNRMRNFDLTAIPCANHKMHLYLGAAKVEVGTEVTDYRFFVRAIIRHSDLVTKEASFEYLQNEGERLLLEAMDELEVAFNNTNVRTDCNHIFLNFVPTVIMDPSKIEESVRSMVMRYGSRLWKLRVLQAELKINIRLTPTGKAIPIRLFLTNESGYYLDISLYKEVTDSRTAQIMFQAYGDKQGPLHGMLINTPYVTKDLLQSKRFQAQSLGTTYIYDIPEMFRQSLIKLWESMSTQAFLPSPPLPSDMLTYTELVLDDQGQLVHMNRLPGGNEIGMVAWKMTFKSPEYPEGRDIIVIGNDITYRIGSFGPQEDLLFLRASELARAEGIPRIYVSANSGARIGLAEEIRHMFHVAWVDPEDPYKGYRYLYLTPQDYKRVSALNSVHCEHVEDEGESRYKITDIIGKEEGIGPENLRGSGMIAGESSLAYNEIITISLVTCRAIGIGAYLVRLGQRTIQVENSHLILTGAGALNKVLGREVYTSNNQLGGIQIMHNNGVTHCTVCDDFEGVFTVLHWLSYMPKSVHSSVPLLNSKDPIDRIIEFVPTKTPYDPRWMLAGRPHPTQKGQWLSGFFDYGSFSEIMQPWAQTVVVGRARLGGIPVGVVAVETRTVELSIPADPANLDSEAKIIQQAGQVWFPDSAFKTYQAIKDFNREGLPLMVFANWRGFSGGMKDMYDQVLKFGAYIVDGLRECCQPVLVYIPPQAELRGGSWVVIDSSINPRHMEMYADRESRGSVLEPEGTVEIKFRRKDLVKTMRRVDPVYIHLAERLGTPELSTAERKELENKLKEREEFLIPIYHQVAVQFADLHDTPGRMQEKGVISDILDWKTSRTFFYWRLRRLLLEDLVKKKIHNANPELTDGQIQAMLRRWFVEVEGTVKAYVWDNNKDLAEWLEKQLTEEDGVHSVIEENIKCISRDYVLKQIRSLVQANPEVAMDSIIHMTQHISPTQRAEVIRILSTMDSPST

SEQ ID NO: 18685 - protein, 235 aa, Homo sapiens
MTLAHIKDQKEGLHSLQEIRVCEIHEDNSTRSSQHFYYDGELFLSQNLETEEWTVPQSSRAQTLAMNVRNFLKEDAMKTKTHYHAMHADCLQELRRYLESGVVLRRTVPPMVNVTRSEASEGNITVTCRASSFYPRNIILTWRQDGVSLSHDTQQWGDVLPDGNGTYQTWVATRICRGEEQRFTCYMEHSGNHSTHPVPSGKVLVLQSHWQTFHVSAVAAGCCYFCYYYFLCPLL

SEQ ID NO: 18686 - protein, 844 aa, Homo sapiens
MAPRRLLLVGEGNFSFAAALSETLDQSTQLTATCLQRPAELARDPLAWENLQCLRERGIDVRFGVDCTQLADVFELHEREFDQIYFIFPHCGRKAGVAKNRELLAKFFQSCADVLAEEGEVHVALCRGQGGTPADKPQREWHNSWQVVAMAALGGLILSDVYPFSCKAVAGYKCTGYRSQDKSFHVEGALNHIFTRSLPFEGSQPRIFRIKLGNQWFSFPEPEALVGKLNRLAMASRGARQRLKGSGASSGDTAPAADKLRELLGSREAGGAEHRTELSGNKAGQVWAPEGSTAFKCLLSARLCAALLSNISDCDETFNYWEPTHYLIYGEGFQTWEYSPAYAIRSYAYLLLHAWPAAFHARILQTNKILVFYFLRCLLAFVSCICELYFYKAVCKKFGLHVSRMMLAFLVLSTGMFCSSSAFLPSSFCMYTTLIAMTGWYMDKTSIAVLGVAAGAILGWPFSAALGLPIAFDLLVMKHRWKSFFHWSLMALILFLVPVVVIDSYYYGKLVIAPLNIVLYNVFTPHGPDLYGTEPWYFYLINGFLNFNVAFALALLVLPLTSLMEYLLQRFHVQNLGHPYWLTLAPMYIWFIIFFIQPHKEERFLFPVYPLICLCGAVALSALQKCYHFVFQRYRLEHYTVTSNWLALGTVFLFGLLSFSRSVALFRGYHGPLDLYPEFYRIATDPTIHTVPEGRPVNVCVGKEWYRFPSSFLLPDNWQLQFIPSEFRGQLPKPFAEGPLATRIVPTDMNDQNLEEPSRYIDISKCHYLVDLDTMRETPREPKYSSNKEEWISLAYRPFLDASRSSKLLRAFYVPFLSDQYTVYVNYTILKPRKAKQIRKKSGG

SEQ ID NO: 18687 - protein, 568 aa, Homo sapiens
MASKPAAGKSRGEKRKRVVLTLKEKIDICTRLEKGESRKALMQEYNVGMSTLYDIRAHKAQLLRFFASSDSNKALEQRRTLHTPKLEHLDRVLYEWFLGKRSEGVPVSGPMLIEKAKDFYEQMQLTEPCVFSGGWLWRFKARHGIKKLDASSEKQSADHQAAEQFCAFFRSLAAEHGLSAEQVYNADETGLFWRCLPNPTPEGGAVPGPKQGKDRLTVLMCANATGSHRLKPLAIGKCSGPRAFKGIQHLPVAYKAQGNAWVDKEIFSDWFHHIFVPSVREHFRTIGLPEDSKAVLLLDSSRAHPQEAELVSSNVFTIFLPASVASLVQPMEQGIRRDFMRNFINPPVPLQGPHARYNMNDAIFSVACAWNAVPSHVFRRAWRKLWPSVAFAEGSSSEEELEAECFPVKPHNKSFAHILELVKEGSSCPGQLRQRQAASWGVAGREAEGGRPPAATSPAEVVWSSEKTPKADQDGRGDPGEGEEVAWEQAAVAFDAVLRFAERQPCFSAQEVGQLRALRAVFRSQQQVRRRRGALGAVVKVEALQEGPGGCGATAQSPLPCSSTAGDN

SEQ ID NO: 18688 - protein, 618 aa, Homo sapiens
MASRGARQRLKGSGASSGDTAPAADKLRELLGSREAGGAEHRTELSGNKAGQVWAPEGSTAFKCLLSARLCAALLSNISDCDETFNYWEPTHYLIYGEGFQTWEYSPAYAIRSYAYLLLHAWPAAFHARILQTNKILVFYFLRCLLAFVSCICELYFYKAVCKKFGLHVSRMMLAFLVLSTGMFCSSSAFLPSSFCMYTTLIAMTGWYMDKTSIAVLGVAAGAILGWPFSAALGLPIAFDLLVMKHRWKSFFHWSLMALILFLVPVVVIDSYYYGKLVIAPLNIVLYNVFTPHGPDLYGTEPWYFYLINGFLNFNVAFALALLVLPLTSLMEYLLQRFHVQNLGHPYWLTLAPMYIWFIIFFIQPHKEERFLFPVYPLICLCGAVALSALQHSFLYFQKCYHFVFQRYRLEHYTVTSNWLALGTVFLFGLLSFSRSVALFRGYHGPLDLYPEFYRIATDPTIHTVPEGRPVNVCVGKEWYRFPSSFLLPDNWQLQFIPSEFRGQLPKPFAEGPLATRIVPTDMNDQNLEEPSRYIDISKCHYLVDLDTMRETPREPKYSSNKEEWISLAYRPFLDASRSSKLLRAFYVPFLSDQYTVYVNYTILKPRKAKQIRKKSGG

SEQ ID NO: 18689 - protein, 117 aa, Homo sapiens
MDMMVPAQLLGLLLLWFPGSRCDIQMTQSPSSVSASVGDRVTITCRASQGISSWLAWYQQKPGKAPKLLIYAASSLQSGVPSRFSGSGSGTDFTLTISSLQPEDFATYYCQQANSFP

SEQ ID NO: 18690 - protein, 337 aa, Homo sapiens
MAPRARRRRPLFALLLLCALLARLQVALQIAPPCTSEKHYEHLGRCCNKCEPGKYMSSKCTTTSDSVCLPCGPDEYLDSWNEEDKCLLHKVCDTGKALVAVVAGNSTTPRRCACTAGYHWSQDCECCRRNTECAPGLGAQHPLQLNKDTVCKPCLAGYFSDAFSSTDKCRPWTNCTFLGKRVEHHGTEKSDAVCSSSLPARKPPNEPHVYLPGLIILLLFASVALVAAIIFGVCYRKKGKALTGNVTGNSNSTFISSGQVMNFKGDIIVVYVSQTSQEGAAAAAEPMGRPVQEETLARRDSFAGNGPRFPDPCGGPEGLREPEKASRPVQEQGGAKA

SEQ ID NO: 18691 - protein, 139 aa, Homo sapiens
MAAAVAAALARLLAAFLLLAAQVACEYGMVHVVSQAGGPEGKDYCILYNPQWAHLPHDLSKASFLQLRNWTASLLCSAADLPARGFSNQIPLVARGNCTFYEKVRLAQGSGARGLLIVSRERLLQRHAGHLHGSVSAAR

SEQ ID NO: 18692 - protein, 139 aa, Homo sapiens
MAGPGWTLLLLLLLLLLLGSMAGYGPQKKLNLSHKGIGEPCRRHEECQSNCCTINSLAPHTLCTPKTIFLQCLPWRKVSPMGTDARTTQSARAAAASATTARRSCARPKASSCSVCPGASPTATSAAAIRSVTASAASS

SEQ ID NO: 18693 - protein, 977 aa, Homo sapiens
MAQVAMSTLPVEDEESSESRMVVTFLMSALESMCKELAKSKAEVACIAVYETDVFVVGTERGRAFVNTRKDFQKDFVKYCVEEEEKAAEMHKMKSTTQANRMSVDAVEIETLRKTVEDYFCFCYGKALGKSTVVPVPYEKMLRDQSAVVVQGLPEGVAFKHPENYDLATLKWILENKAGISFIIKRPFLEPKKHVGGRVMVTDADRSILSPGGSCGPIKVKTEPTEDSGISLEMAAVTVKEESEDPDYYQYNIQAGPSETDDVDEKQPLSKPLQGSHHSSEGNEGTEMEVPAEDDDYSPPSKRPKANELPQPPVPEPANAGKRKVREFNFEKWNARITDLRKQVEELFERKYAQAIKAKGPVTIPYPLFQSHVEDLYVEGLPEGIPFRRPSTYGIPRLERILLAKERIRFVIKKHELLNSTREDLQLDKPASGVKEEWYARITKLRKMVDQLFCKKFAEALGSTEAKAVPYQKFEAHPNDLYVEGLPENIPFRSPSWYGIPRLEKIIQVGNRIKFVIKRPELLTHSTTEVTQPRTNTPVKEDWNVRITKLRKQVEEIFNLKFAQALGLTEAVKVPYPVFESNPEFLYVEGLPEGIPFRSPTWFGIPRLERIVRGSNKIKFVVKKPELVISYLPPGMASKINTKALQSPKRPRSPGSNSKVPEIEVTVEGPNNNNPQTSAVRTPTQTNGSNVPFKPRGREFSFEAWNAKITDLKQKVENLFNEKCGEALGLKQAVKVPFALFESFPEDFYVEGLPEGVPFRRPSTFGIPRLEKILRNKAKIKFIIKKPEMFETAIKESTSSKSPPRKINSSPNVNTTASGVEDLNIIQVTIPDDDNERLSKVEKARQLREQVNDLFSRKFGEAIGMGFPVKVPYRKITINPGCVVVDGMPPGVSFKAPSYLEISSMRRILDSAEFIKFTVIRPFPGLVINNQLVDQSESEGPVIQESAEPSQLEVPATEEIKETDGSSQIKQEPDPTW

SEQ ID NO: 18694 - protein, 403 aa, Homo sapiens
MKYLFFSWLVVFVGSWIIYVQYSTYTELCRGKDCKKIICDKYKTGVIDGPACNSLCVTETLYFGKCLSTKPNNQMYLGIWDNLPGVVKCQMEQALHLDFGTELEPRKEIVLFDKPTRGTTVQKFKEMVYSLFKAKLGDQGNLSELVNLILTVADGDKDGQVSLGEAKSAWALLQLNEFLLMVILQDKEHTPKLMGFCGDLYVMESVEYTSLYGISLPWVIELFIPSGFRRSMDQLFTPSWPRKAKIAIGLLEFVEDVFHGPYGNFLMCDTSAKNLGYNDKYDLKMVDMRKIVPETNLKELIKDRHCESDLDCVYGTDCRTSCDQSTMKCTSEVIQPNLAKACQLLKDYLLRGAPSEIREELEKQLYSCIALKVTANQMEMEHSLILNNLKTLLWKKISYTNDS

SEQ ID NO: 18695 - protein, 221 aa, Homo sapiens
MDHCGALFLCLCLLTLQNATTETWEELLSYMENMQVSRGRSSVFSSRQLHQLEQMLLNTSFPGYNLTLQTPTIQSLAFKLSCDFSGLSLTSATLKRVPQAGGQHARGQHAMQFPAELTRDACKTRPRELRLICIYFSNTHFFKDENNSSLLNNYVLGAQLSHGHVNNLRDPVNISFWHNQSLVLLGAPPFPLHPCPSVTLLLNTGLTRPKPVEPSWKSITL

SEQ ID NO: 18696 - protein, 810 aa, Homo sapiens
MFGFQRRGLGTPRLQLWLLLLEFWEVGSGQLHYSVSEEAKHGTFVGRIAQDLGLELAELVQRLFRVASKTHGDLLEVNLQNGILFVNSRIDREELCGQSAECSIHLEVIVDRPLQVFHVNVEVKDINDNPPVFSLREQKLLIAESKQSDSRFPLEGASDADIEENALLTYRLSKNEYFSLDSPTNGKQIKRLSLILKKSLDREKTPELNLLLTATDGGKPELTGTVRLLVQVLDVNDNDPEFDKSEYKVSLMENAAKETLVLKLNATDRDEGVNGEVTYSLMSIKPNGRHLFTLDQNNGEVRVNGTLDYEENKFYKIEVQATDKGTPPMAGHCTVWVEILDTNDNSPEVAVTSLSLPVREDAQPSTVIALISVSDRDSGVNGQVTCSLTPHVPFKLVSTFKNYYSLVLDSALDRENVWAYELVVTARDGGSPSLWATARVSVEVADVNDNAPAFAQPEYTVFVKENNPPGCHIFTVSARDADAQENALVSYSLVERRLGDRALSSYVSVHAESGKVYALQPLDHEELELLQFQVSARDAGVPPLSSNVTLQVFVLDENDNAPALLATQAGSAGGAVNKLVPRSVGAGHVVAKVRAVDADSGYNAWLSYELQPAAGGSRIPFRVGLYTGEISTTRALDEADSPRHRLLVLVKDHGEPALTATATVLVSLVESGQAPKASSRTLAGAASPEAALVDVNVYLIIAICVVSSLLVLTLLLYTALWWSATPTEGACAPGKPTLVCSRAVGSWSYSQQRRQRVCSEEGPPKTDLMAFSPSLPLGLNKEEEGERQEPGSNHPGQVSFLQIPPIRKCM

SEQ ID NO: 18697 - protein, 154 aa, Homo sapiens
MGKDIRPRSARAACKGVGLWSGCFGKMAGSGVRQATSTASTFVKPIFSRDMNEAKRRVRELYRAWYREVPNTVHQFQLDITVKMGRDKVREMFMKNAHVTDPRVVDLLVIKGKIELEETIKVWKQRTHVMRFFHETEAPRPKDFLSKFYVGHDP

SEQ ID NO: 18698 - protein, 416 aa, Homo sapiens
MSSNCTSTTAVAVAPLSASKTKTKKKHFVCQKVKLFRASEPILSVLMWGVNHTINELSNVPVPVMLMPDDFKAYSKIKVDNHLFNKENLPSRFKFKEYCPMVFRNLRERFGIDDQDYQNSVTRSAPINSDSQGRCGTRFLTTYDRRFVIKTVSSEDVAEMHNILKKYHQFIVECHGNTLLPQFLGMYRLTVDGVETYMVVTRNVFSHRLTVHRKYDLKGSTVAREASDKEKAKDLPTFKDNDFLNEGQKLHVGEESKKNFLEKLKRDVEFLAQLKIMDYSLLVGIHDVDRAEQEEMEVEERAEDEECENDGVGGNLLCSYGTPPDSPGNLLSFPRFFGPGEFDPSVDVYAMKSHESSPKKEVYFMAIIDILTPYDTKKKAAHAAKTVKHGAGAEISTVNPEQYSKRFNEFMSNILT

SEQ ID NO: 18699 - protein, 878 aa, Homo sapiens
MGPKTLPQLAGKWQVLCMLSLCCWGWVSGQLRYSVVEESEPGTLVGNVAQDLGLKMTDLLSRRLQLGSEENGRYFSLSLMSGALAVNQKIDRESLCGASTSCLLPVQVVTEHPLELIRVEVEILDLNDNSPSFATPEREMRISESAASGARFPLDSAQDPDVGTNTVSFYTLSPNSHFSLNVKTLKDGKPFPELVLEQQLDREAQARHQLVLTAVDGGTPARSGTTLISVIVLDINDNAPTFQSSVLRVGIPENAPIGTLLLRLNATDPDEGTNGQLDYSFGDHTSEAVRNLFGLDPSSGAIHVLGPIDFEESRFYEIHARARDQGQPAMEGHCVIQVDVGDVNDNAPEVLLASLANPVLESTPVGTVVGLFNVRDRDSGRNGEVSLDISPDLPFQIKPSENHYSLLTSQPLDREATSHYIIELLASDAGSPSLHKHLTIRLNISDVNDNAPRFNQQLYTAYILENRPPGSLLCTVAASDPDTGDNARLTYSIVGNQVQGAPASSFVYVNPEDGRIFAQRTFDYELLQMLQIVVGVRDSGSPPLHANTSLHVFVLDENDNAPAVLHPRPDWEHSAPQRLPRSAPPGSLVTKVTAVDADAGHNAWLSYSLLPQSTAPGLFLVSTHTGEVRTARALLEDDSDTQQVVVLVRDNGDPSLSSTATVLLVLEDEDPEEMPKSSDFLIHPPERSDLTLYLIVALATVSLLSLVTFTFLSAKCLQGNADGDGGGGQCCRRQDSPSPDFYKQSSPNLQVSSDGTLKYMEVTLRPTDSQSHCYRTCFSPASDGSDFTFLRPLSVQQPTALALEPDAIRSRSNTLRERSQVRGSAPPRATPGGGTGEAARPHKGLNLHPLLSGRLGRWLRSTRFSGSLDRLRETRVAD

SEQ ID NO: 18700 - protein, 214 aa, Homo sapiens
MGRAGAAAVIPGLALLWAVGLGSAAPSPPRLRLSFQELQAWHGLQTFSLERTCCYQALLVDEERGRLFVGAENHVASLNLDNISKRAKKLAWPAPVEWREECNWAGKDIGTECMNFVKLLHAYNRTHLLACGTGAFHPTCAFVEVGHRAEEPVLRLDPGRIEDGKGKSPYDPRHRAASVLVGEELYSGVAADLMGRDFTIFRSLGQRPSLRTEP

SEQ ID NO: 18701 - protein, 429 aa, Homo sapiens
MSQLRATKSGLVVRAVICIFIFLYLRNPTPAESEEEPAQPEVVECGFYPDELCSALFEGKGAAPIAKFCKTPHKSEIHAHLHTPGNCSRISRGLHFITRPLSAEEGDFSLAYIITIHKELAMFVQLLRAIYVPQNVYCIHVDEKAPMKYKTAVQTLVNCFENVFISSKTEKVAYAGFTRLQADINCMKVLVHSKFQWNYVINLCGQDFPIKTNREIIHYIRSKWSDKNITPGVIQPLHIKSKTSQSHLEFVPKGSIYAPPNNRFKDKPPHNLTIYFGSAYYVLTRKFVEFILTDIHAKDMLQWSKDIRSPEQHYWVTLNRLKDAPGATPNAGWEGNVRAIKRKSEEGNVHDGCKGRYVEDICVYGPGDLPWLIQSPSLFANKFEPSTDPLVVTCLERRHRLQVLRQAEVPIEPHWHFQQQSHFNMRLNR

SEQ ID NO: 18702 - protein, 54 aa, Homo sapiens
MFRRLTFAQLLFATVLGIAGGVYIFQPVFEQYAKDQKELKEKMQLVQESEEKKS

SEQ ID NO: 18703 - protein, 28 aa, Homo sapiens
ALLLCIALLSSYSIHLLLTCAGIAGTGS

SEQ ID NO: 18704 - protein, 1294 aa, Homo sapiens
MELLPPLPQSFLLLLLLPAKPAAGEDWQCPRTPYAASRDFDVKYVVPSFSAGGLVQAMVTYEGDRNESAVFVAIRNRLHVLGPDLKSVQSLATGPAGDPGCQTCAACGPGPHGPPGDTDTKVLVLDPALPALVSCGSSLQGRCFLHDLEPQGTAVHLAAPACLFSAHHNRPDDCPDCVASPLGTRVTVVEQGQASYFYVASSLDAAVAASFSPRSVSIRRLKADASGFAPGFVALSVLPKHLVSYSIEYVHSFHTGAFVYFLTVQPASVTDDPSALHTRLARLSATEPELGDYRELVLDCRFAPKRRRRGAPEGGQPYPVLRVAHSAPVGAQLATELSIAEGQEVLFGVFVTGKDGGPGVGPNSVVCAFPIDLLDTLIDEGVERCCESPVHPGLRRGLDFFQSPSFCPNPVFQVPIQGPGCRHFLTCGRCLRAWHFMGCGWCGNMCGQQKECPGSWQQDHCPPKLTEFHPHSGPLRGSTRLTLCGSNFYLHPSGLVPEGTHQVTVGQSPCRPLPKDSSKLRPVPRKDFVEEFECELEPLGTQAVGPTNVSLTVTNMPPGKHFRVDGTSVLRGFSFMEPVLIAVQPLFGPRAGGTCLTLEGQSLSVGTSRAVLVNGTECLLARVSEGQLLCATPPGATVASVPLSLQVGGAQVPGSWTFQYREDPVVLSISPNCGYINSHITICGQHLTSAWHLVLSFHDGLRAVESRCERQLPEQQLCRLPEYVVRDPQGWVAGNLSARGDGAAGFTLPGFRFLPPPHPPSANLVPLKPEEHAIKFEYIGLGAVADCVGINVTVGGESCQHEFRGDMVVCPLPPSLQLGQDGAPLQVCVDGECHILGRVVRPGPDGVPQSTLLGILLPLLLLVAALATALVFSYWWRRKQLVLPPNLNDLASLDQTAGATPLPILYSGSDYRSGLALPAIDGLDSTTCVHGASFSDSEDESCVPLLRKESIQLRDLDSALLAEVKDVLIPHERVVTHSDRVIGKGHFGVVYHGEYIDQAQNRIQCAIKSLSRITEMQQVEAFLREGLLMRGLNHPNVLALIGIMLPPEGLPHVLLPYMCHGDLLQFIRSPQRNPTVKDLISFGLQVARGMEYLAEQKFVHRDLAARNCMLDESFTVKVADFGLARDILDREYYSVQQHRHARLPVKWMALESLQTYRFTTKSDVWSFGVLLWELLTRGAPPYRHIDPFDLTHFLAQGRRLPQPEYCPDSLYQVMQQCWEADPAVRPTFRVLVGEVEQIVSALLGDHYVQLPATYMNLGPSTSHEMNVRPEQPQFSPMPGNVRRPRPLSEPPRPT

SEQ ID NO: 18705 - protein, 202 aa, Homo sapiens
MAVLPGPLQLLGVLLTISLSSIRLIQAGAYYGIKPLPPQIPPQMPPQIPQYQPLGQQVPHMPLAKDGLAMGKEMPHLQYGKEYPHLPQYMKEIQPAPRMGKEAVPKKGKEIPLASLRGEQGPRGEPGPRGPPGPPGLPGHGIPGIKGKPGPQGYPGVGKPGMPGMPGKPGAMGMPGAKGEIGQKGEIGPMGIPGPQGPPGPH

SEQ ID NO: 18706 - protein, 765 aa, Homo sapiens
MLADLGLIGTIGEDDEVPVEPESDSGDEEEEGPIVLGRRQKALGKNRSADFNPDFVFTEKEGTYDGSWALADVMSQLKKKRAATTLDEKIEKVRKKRKTEDKEAKSGKLEKEKEAKEGSEPKEQEDLQENDEEGSEDEASETDYSSADENILTKADTLKVKDRKKKKKKGQEAGGFFEDASQYDENLSFQDMNLSRPLLKAITAMGFKQPTPIQKACIPVGLLGKDICACAATGTGKTAAFALPVLERLIYKPRQAPVTRVLVLVPTRELGIQVHSVTRQLAQFCNITTCLAVGGLDVKSQEAALRAAPDILIATPGRLIDHLHNCPSFHLSSIEVLILDEADRMLDEYFEEQMKEIIRMCSHHRQTMLFSATMTDEVKDLASVSLKNPVRIFVNSNTDVAPFLRQEFIRIRPNREGDREAIVAALLTRTFTDHVMLFTQTKKQAHRMHILLGLMGLQVGELHGNLSQTQRLEALRRFKDEQIDILVATDVAARGLDIEGVKTVINFTMPNTIKHYVHRVGRTARAGRAGRSVSLVGEDERKMLKEIVKAAKAPVKARILPQDVILKFRDKIEKMEKDVYAVLQLEAEEKEMQQSEAQINTAKRLLEKGKEAVVQEPERSWFQTKEERKKEKIAKALQEFDLALRGKKKRKKFMKDAKKKGEMTAEERSQFEILKAQMFAERLAKRNRRAKRARAMPEEEPVRGPAKKQKQGKKSVFDEELTNTSKKALKQYRAGPSFEERKQLGLPHQRRGGNFKSKSRYKRRK

SEQ ID NO: 18707 - protein, 126 aa, Homo sapiens
MTPGTQSPFFLLLLLTVLTVVTGSGHASSTPGGEKETSATQRSSVPSSTEKNAALHQAQLLLWCTTAPLPGLPQPQPARALHSQFPATTLILLPPLPAIAPRLMPVALTIARSQHRLLPRAAERHF

SEQ ID NO: 18708 - protein, 306 aa, Homo sapiens
MELRVLLCWASLAAALEETLLNTKLETADLKWVTFPQVDGQWEELSGLDEEQHSVRTYEVCDVQRAPGQAHWLRTGWVPRRGAVHVYATLRFTMLECLSLPRAGRSCKETFTVFYYESDADTATALTPAWMENPYIKVDTVAAEHLTRKRPGAEATGKVNVKTLRLGPLSKAGFYLAFQDQGACMALLSLHLFYKKCAQLTVNLTRFPETVPRELVVPVAGSCVVDAVPAPGPSPSLYCREDGQWAEQPVTGCSCAPGFEAAEGNTKCRGRRGSQQRAVPEDVRKPGRAAGAEAGSQLPGAGTGAL

SEQ ID NO: 18709 - protein, 618 aa, Homo sapiens
MLENYRNLAFLGIAVSKPDLITCLEQGKEPWNMKRHEMVDEPPGMCPHFAQDLWPEQGMEDSFQKAILRRYGKYGHENLQLRKGCKSVDEYKVNKEGYNGLNQCFTTAQSKVFQCDKYLKVFYKFLNSNRPKIRHTEKKSFKCKKRVKLFCMLSHKTQHKSIYHREKSYKCKECGKTFNWSSTLTNHRKIYTEEKPYKCEEYNKSPKQLSTLTTHEIIHAGEKLYKCEECGEAFNRSSNLTTHKIIHTGEKPYKCEECGKAFIWSSTLTEHKKIHTRKKPYKCEECGKAFIWSSTLTRHKRMHTGEKPYKCEECGKAFSQSSTLTTHKIIHTGEKRYKCLECGKAFKQLSTLTTHKIIHVGEKLYKCEECGKGFNRSSNLTTHKIIHTGEKPYKCEECGKAFIWSSTLTKHKRIHTREKPYKCEECGKAFIWSSTLTRHKRMHTGEKPYKCEECGKSFSQSSTLTTHKIIHTGEKPYKCEECGKAFNWSSTLTKHKIIHTEEKPYKCEKCGKAFKQSSILTNHKRIHTGEKPYKCEECGKSFNRSSTFTKHKVIHTGVKPYKCEECGKAFFWSSTLTKHKRIHTGEQPYKWEKFGKAFNRSSHLTTDKITHWREILQV

SEQ ID NO: 18710 - protein, 260 aa, Homo sapiens
MARPGMERWRDRLALVTGASGGIGAAVARALVQQGLKVVGCARTVGNIEELAAECKSAGYPGTLIPYRCDLSNEEDILSMFSAIRSQHSGVDICINNAGLARPDTLLSGSTSGWKDMFNVNVLALSICTREAYQSMKERNVDDGHIININSMSGHRVLPLSVTHFYSATKYAVTALTEGLRQELREAQTHIRATCISPGVVETQFAFKLHDKDPEKAAATYEQMKCLKPEDVAEAVIYVLSTPAHIQIGDIQMRPTEQVT

SEQ ID NO: 18711 - protein, 505 aa, Homo sapiens
MSSEMEPLLLAWSYFRRRKFQLCADLCTQMLEKSPYDQAAWILKARALTEMVYIDEIDVDQEGIAEMMLDENAIAQVPRPGTSLKLPGTNQTGGPSQAVRPITQAGRPITGFLRPSTQSGRPGTMEQAIRTPRTAYTARPITSSSGRFVRLGTASMLTSPDGPFINLSRLNLTKYSQKPKLAKALFEYIFHHENDVKTALDLAALSTEHSQYKDWWWKVQIGKCYYRLGMYREAEKQFKSALKQQEMVDTFLYLAKVYVSLDQPVTALNLFKQGLDKFPGEVTLLCGIARIYEEMNNMSSAAEYYKEVLKQDNTHVEAIACIGSNHFYSDQPEIALRFYRRLLQMGIYNGQLFNNLGLCCFYAQQYDMTLTSFERALSLAENEEEAADVWYNLGHVAVGIGDTNLAHQCFRLALVNNNNHAEAYNNLAVLEMRKGHVEQARALLQTASSLAPHMYEPHFNFATISDKIGDLQRSYVAAQKSEAAFPDHVDTQHLIKQLRQHFAML

SEQ ID NO: 18712 - protein, 275 aa, Homo sapiens
MLNLLLLALPVLASRAYAAPAPGQALQRVGIVGGQEAPRSKWPWQVSLRVRDRYWMHFCGGSLIHPQWVLTAAHCVGPDVKDLAALRVQLREQHLYYQDQLLPVSRIIVHPQFYTAQIGADIALLELEEPVNVSSHVHTVTLPPASETFPPGMPCWVTGWGDVDNDERLPPPFPLKQVKVPIMENHICDAKYHLGAYTGDDVRIVRDDMLCAGNTRRDSCQGDSGGPLVCKVNGTWLQAGVVSWGEGCAQPNRPGIYTRVTYYLDWIHHYVPKKP

SEQ ID NO: 18713 - protein, 306 aa, Homo sapiens [sequence omitted]

SEQ ID NO: 18714 - protein, 192 aa, Homo sapiens
MIFSLASCIITAKLCTWAICFLTTSEEVQKKLYEEINQVFGNGPVTPEKIEQLRYCQHVLCETVRTAKLTPVSAQLQDIEGKIDRFIIPRETLVLYALGVVLQDPNTWPSPHKFDPDRFDDELVMKTFSSLGFSGTQECPELRFAYMVTTVLLSVLVKRLHLLSVEGQVIETKYELVTSSREEAWITVSKRY

SEQ ID NO: 18715 - protein, 42 aa, Homo sapiens
MASRGVVGIFFLSAVPLVCLELRRGIPDIGKCDFFPSTVTAG

SEQ ID NO: 18716 - protein, 387 aa, Homo sapiens
MAALSGVRWLTRALVSAGNPGAWRGLSTSAAAHAASRSQAEDVRVEGSFPVTMLPGDGVGPELMHAVKEVFKAAAVPVEFQEHHLSEVQNMASEEKLEQVLSSMKENKVAIIGKIHTPMEYKGELASYDMRLRRKLDLFANVVHVKSLPGYMTRHNNLDLVIIREQTEGEYSSLEHESARGVIECLKIVTRAKSQRIAKFAFDYATKKGRGKVTAVHKANIMKLGDGLFLQCCEEVAELYPKIKFETMIIDNCCMQLVQNPYQFDVLVMPNLYGNIIDNLAAGLVGGAGVVPGESYSAEYAVFETGARHPFAQAVGRNIANPTAMLLSASNMLRHLNLEYHSSMIADAVKKVIKVGKVRTRDMGGYSTTTDFIKSVIGHLQTKGSNL

SEQ ID NO: 18717 - protein, 1790 aa, Homo sapiens
MFRQFYLWTCLASGIILGSLFEICLGQYDDDWQYEDCKLARGGPPATIVAIDEESRNGTILVDNMLIKGTAGGPDPTIELSLKDNVDYWVLMDPVKQMLFLNSTGRVLDRDPPMNIHSIVVQVQCINKKVGTIIYHEVRIVVRDRNDNSPTFKHESYYATVNELTPVGTTIFTGFSGDNGATDIDDGPNGQIEYVIQYNPDDPTSNDTFEIPLMLTGNIVLRKRLNYEDKTRYFVIIQANDRAQNLNERRTTTTTLTVDVLDGDDLGPMFLPCVLVPNTRDCRPLTYQAAIPELRTPEELNPIIVTPPIQAIDQDRNIQPPSDRPGILYSILVGTPEDYPRFFHMHPRTAELSLLEPVNRDFHQKFDLVIKAEQDNGHPLPAFAGLHIEILDENNQSPYFTMPSYQGYILESAPVGATISDSLNLTSPLRIVALDKDIEDVPPSGVPTKDPELHLFLNDYTSVFTVTQTGITRYLTLLQPVDREEQQTYTFSITAFDGVQESEPVIVNIQVMDANDNTPTFPEISYDVYVYTDMRPGDSVIQLTAVDADEGSNGEITYEILVGAQGDFIINKTTGLITIAPGVEMIVGRTYALTVQAADNAPPAERRNSICTVYIEVLPPNNQSPPRFPQLMYSLEISEAMRVGAVLLNLQATDREGDSITYAIENGDPQRVFNLSETTGILTLGKALDRESTDRYILIITASDGRPDGTSTATVNIVVTDVNDNAPVFDPYLPRNLSVVEEEANAFVGQVKATDPDAGINGQVHYSLGNFNNLFRITSNGSIYTAVKLNREVRDYYELVVVATDGAVHPRHSTLTLAIKVLDIDDNSPVFTNSTYTVLVEENLPAGTTILQIEAKDVDLGANVSYRIRSPEVKHFFALHPFTGELSLLRSLDYEAFPDQEASITFLVEAFDIYGTMPPGIATVTVIVKDMNDYPPVFSKRIYKGMVAPDAVKGTPITTVYAEDADPPGLPASRVRYRVDDVQFPYPASIFEVEEDSGRVITRVNLNEEPTTIFKLVVVAFDDGEPVMSSSATVKILVLHPGEIPRFTQEEYRPPPVSELATKGTMVGVISAAAINQSIVYSIVSGNEEDTFGINNITGVIYVNGPLDYETRTSYVLRVQADSLEVVLANLRVPSKSNTAKVYIEIQDENNHPPVFQKKFYIGGVSEDARMFTSVLRVKATDKDTGNYSVMAYRLIIPPIKEGKEGFVVETYTGLIKTAMLFHNMRRSYFKFQVIATDDYGKGLSGKADVLVSVVNQLDMQVIVSNVPPTLVEKKIEDLTEILDRYVQEQIPGAKVVVESIGARRHGDAFSLEDYTKCDLTVYAIDPQTNRAIDRNELFKFLDGKLLDINKDFQPYYGEGGRILEIRTPEAVTSIKKRGESLGYTEGALLALAFIIILCCIPAILVVLVSYRQFKVRQAECTKTARIQAALPAAKPAVPAPAPVAAPPPPPPPPPGAHLYEELGDSSMHKYEMPQYGSRRRLLPPAGQEEYGEVVGEAEEEYEEEEEEPKKIKKPKVEIREPSEEEEVVVTIEKPPAAEPTYTTWKRARIFPMIFKKVRGLADKRGIVDLEGEEWQRRLEEEDKDYLKLTLDQEEATESTVESEEESSSDYTEYSEEESEFSESETTEEESESETPSEEEESSTPESEESESTESEGEKARKNIVLARRRPMVEEVKEVKGRKEEPQEEQKEPKMEEEEHSEEEESGPAPVEESTDPEAQDIPEEGSAESASVEGGVESEEESESGSSSSSSESQSGGPWGYQVPAYDRSKNANQKKSPGANSEGYNTAL

SEQ ID NO: 18718 - protein, 969 aa, Homo sapiens
MEGDRVAGRPVLSSLPVLLLLPLLMLRAAALHPDELFPHGESWGDQLLQEGDDESSAVVKLANPLHFYEARFSNLYVGTNGIISTQDFPRETQYVDYDFPTDFPAIAPFLADIDTSHGRGRVLYRVNGKVSGHLHVGHTPVHFTDVDLHAYIVGNDGRAYTAISHIPQPAAQALLPLTPIGGLFGWLFALEKPGSENGFSLAGAAFTHDMEVTFYPGEETVRITQTAEGLDPENYLSIKTNIQGQVPYVSANFTAHISPYKELYHYSDSTVTSTSSRDYSLTFGAINQTWSYRIHQNITYQVCRHAPRHPSFPTTQQLNVDRVFALYNDEERVLRFAVTNQIGPVKEDSDPTPGNPCYDGSHMCDTTARCHPGTGVDYTCECASGYQGDGRNCVDENECATGFHRCGPNSVCINLPGSYRCECRSGYEFADDRHTCILITPPANPCEDGSHTCAPAGQARCVHHGGSTFSCACLPGYAGDGHQCTDVDECSENRCHPAATCYNTPGSFSCRCQPGYYGDGFQCIPDSTSSLTPCEQQQRHAQAQYAYPGARFHIPQCDEQGNFLPLQCHGSTGFCWCVDPDGHEVPGTQTPPGSTPPHCGPSPEPTQRPPTICERWRENLLEHYGGTPRDDQYVPQCDDLGHFIPLQCHGKSDFCWCVDKDGREVQGTRSQPGTTPACIPTVAPPMVRPTPRPDVTPPSVGTFLLYTQGQQIGYLPLNGTRLQKDAAKTLLSLHGSIIVGIDYDCRERMVYWTDVAGRTISRAGLELGAEPETIVNSGLISPEGLAIDHIRRTMYWTDSVLDKIESALLDGSERKVLFYTDLVNPRAIAVDPIRGNLYWTDWNREAPKIETSSLDGENRRILINTDIGLPNGLTFDPFSKLLCWADAGTKKLECTLPDGTGRRVIQNNLKYPFSIVSYADHFYHTDWRRDGVVSVNKHSGQFTDEYLPEQRSHLYGITAVYPYCPTGRK

SEQ ID NO: 18719 - protein, 574 aa, Homo sapiens
MELLPPLPQSFLLLLLLPAKPAAGEDWQCPRTPYAASRDFDVKYVVPSFSAGGLVQAMVTYEGDRNESAVFVAIRNRLHVLGPDLKSVQSLATGPAGDPGCQTCAACGPGPHGPPGDTDTKVLVLDPALPALVSCGSSLQGRCFLHDLEPQGTAVHLAAPACLFSAHHNRPDDCPDCVASPLGTRVTVVEQGQASYFYVASSLDAAVAASFSPRSVSIRRLKADASGFAPGFVALSVLPLLLLVAALATALVFSYWWRRKQLVLPPNLNDLASLDQTAGATPLPILYSGSDYRSGLALPAIDGLDSTTCVHGASFSDSEDESCVPLLRKESIQLRDLDSALLAEVKDVLIPHERVVTHSDRVIGKGHFGVVYHGEYIDQAQNRIQCAIKSLSRITEMQQVEAFLREGLLMRGLNHPNVLALIGIMLPPEGLPHVLLPYMCHGDLLQFIRSPQRNPTVKDLISFGLQVARGMEYLAEQKFVHRDLAARNCMYQVMQQCWEADPAVRPTFRVLVGEVEQIVSALLGDHYVQLPATYMNLGPSTSHEMNVRPEQPQFSPMPGNVRRPRPLSEPPRPT

SEQ ID NO: 18720 - protein, 951 aa, Homo sapiens
MTDSKYFTTNKKGEIFELKAELNNEKKEKRKEAVKKVIAAMTVGKDVSSLFPDVVNCMQTDNLELKKLVYLYLMNYAKSQPDMAIMAVNSFVKDCEDPNPLIRALAVRTMGCIRVDKITEYLCEPLRKCLKDEDPYVRKTAAVCVAKLHDINAQMVEDQGFLDSLRDLIADSNPMVVANAVAALSEISESHPNSNLLDLNPQNINKLLTALNECTEWGQIFILDCLSNYNPKDDREAQSICERVTPRLSHANSAVVLSAVKVLMKFLELLPKDSDYYNMLLKKLAPPLVTLLSGEPEVQYVALRNINLIVQKRPEILKQEIKVFFVKYNDPIYVKLEKLDIMIRLASQANIAQVLAELKEYATEVDVDFVRKAVRAIGRCAIKVEQSAERCVSTLLDLIQTKVNYVVQEAIVVIRDIFRKYPNKYESIIATLCENLDSLDEPDARAAMIWIVGEYAERIDNADELLESFLEGFHDESTQVQLTLLTAIVKLFLKKPSETQELVQQVLSLATQDSDNPDLRDRGYIYWRLLSTDPVTAKEVVLSEKPLISEETDLIEPTLLDELICHIGSLASVYHKPPNAFVEGSHGIHRKHLPIHHGSTDAGDSPVGTTTATNLEQPQVIPSQGDLLGDLLNLDLGPPVNVPQVSSMQMGAVDLLGGGLDSLLGSDLGGGIGGSPAVGQSFIPSSVPATFAPSPTPAVVSSGLNDLFELSTGIGMAPGGYVAPKAVWLPAVKAKGLEISGTFTHRQGHIYMEMNFTNKALQHMTDFAIQFNKNSFGVIPSTPLAIHTPLMPNQSIDVSLPLNTLGPVMKMEPLNNLQVAVKNNIDVFYFSCLIPLNVLFVEDGKMERQVFLATWKDIPNENELQFQIKECHLNADTVSSKLQNNNVYTIAKRNVEGQDMLYQSLKLTNGIWILAELRIQPGNPNYTLSLKCRAPEVSQYIYQVYDSILKN

SEQ ID NO: 18721 - protein, 82 aa, Homo sapiens
MTPLLTLILVVLMGLPLAQALDCHVCAYNGDNCFNPMRCPAMVAYCMTTRTYYTPTRMKVSKSCVPRCFETVYDGYSKHAST

SEQ ID NO: 18722 - protein, 135 aa, Homo sapiens
MLQTKDLIWTLFFLGTAGEPSAPKLEGQMGEDGNSIKVNLIKQDDGGSPIRHYLVRYRALSSEWKPEIRLPSGSDHVMLKSLDWNAEYEVYVVAENQQGKSKAAHFVFRTSAQPTAIPANGSPTSGLSTGAIVGI

SEQ ID NO: 18723 - protein, 276 aa, Homo sapiens
MDILVPLLQLLVLLLTLPLHLMALLGCWQPLCKSYFPYLMAVLTPKSNRKMESKKRELFSQIKGLTGASGKVALLELGCGTGANFQFYPPGCRVTCLDPNPHFEKFLTKSMAENRHLQYERFVVAPGEDMRQLADGSMDVVVCTLVLCSVQSPRKVLQEVRRVLRPGGVLFFWEHVAEPYGSWAFMWQQVFEPTWKHIGDGCCLTRETWKDLENAQFSEIQMERQPPPLKWLPVGPHIMGKAVKSFPSSKALICSFPSLQLEQATHQPIYLPLRGT

SEQ ID NO: 18724 - protein, 62 aa, Homo sapiens
MELALLCGLVVMAGVIPIQGGILNLNKMVKQVTGKMPILSYWPYGCHCGLGGRGQPKDATDC

SEQ ID NO: 18725 - protein, 406 aa, Homo sapiens
MKQNLILLTFVSIFSLYSVHLLLKTANEGGSLLYEQLGYKAFGLVGKLAASGSITMQNIGAMSSYLFIVKYELPLVIQALTNIEDKTGLWYLNGNYLVLLVSLVVILPLSLFRNLGYLGYTSGLSLLCMVFFLIVVICKKFQVPCPVEAALIINETINTTLTQPTALVPALSHNVTENDSCRPHYFIFNSQTVYAVPILIFSFVCHPAVLPIYEELKDRSRRRMMNVSKISFFAMFLMYLLAALFGYLTFYEHVESELLHTYSSILGTDILLLIVRLAVLMAVTLTVPVVIFPIRSSVTHLLCASKDFSWWRHSLITVSILAFTNLLVIFVPTIRDIFGFIGASAASMLIFILPSAFYIKLVKKEPMKSVQKIGALFFLLSGVLVMTGSMALIVLDWVHNAPGGGH

SEQ ID NO: 18726 - protein, 383 aa, Homo sapiens [sequence omitted]

SEQ ID NO: 18727 - protein, 278 aa, Homo sapiens
MALLPVLFLVTVLLPSLPAEGKDPAFTALLTTQLQVQREIVNKHNELRKAVSPPASNMLKMEWSREVTTNAQRWANKCTLQHSDPEDRKTSTRCGENLYMSSDPTSWSSAIQSWYDEILDFVYGVGPKSPNAVVGHYTQLVWYSTYQVGCGIAYCPNQDSLKYYYVCQYCPAMKTYLNKREGINVWKCFLRLRHFQLLRGEQLLTFSGNNMNRKNTPYQQGTPCAGCPDDCDKGLCTNSCQYQDLLSNCDSLKNTAGCEHELLKEKCKATCLCENKIY

SEQ ID NO: 18728 - protein, 737 aa, Homo sapiens
MELGCWTQLGLTFLQLLLISSLPREYTVINEACPGAEWNIMCRECCEYDQIECVCPGKREVVGYTIPCCRNEENECDSCLIHPGCTIFENCKSCRNGSWGGTLDDFYVKGFYCAECRAGWYGGDCMRCGQVLRAPKGQILLESYPLNAHCEWTIHAKPGFVIQLRFVMLSLEFDYMCQYDYVEVRDGDNRDGQIIKRVCGNERPAPIQSIGSSLHVLFHSDGSKNFDGFHAIYEEITACSSSPCFHDGTCVLDKAGSYKCACLAGYTGQRCENLLEAGKSKIKASEDSLSVLEERNCSDPGGPVNGYQKITGGPGLINGRHAKIGTVVSFFCNNSYVLSGNEKRTCQQNGEWSGKQPICIKACREPKISDLVRRRVLPMQVQSRETPLHQLYSAAFSKQKLQSAPTKKPALPFGDLPMGYQHLHTQLQYECISPFYRRLGSSRRTCLRTGKWSGRAPSCIPICGKIENITAPKTQGLRWPWQAAIYRRTSGVHDGSLHKGAWFLVCSGALVNERTVVVAAHCVTDLGKVTMIKTADLKVVLGKFYRDDDRDEKTIQSLQISAIILHPNYDPILLDADIAILKLLDKARISTRVQPICLAASRDLSTSFQESHITVAGWNVLADVRSPGFKNDTLRSGVVSVVDSLLCEEQHEDHGIPVSVTDNMFCASWEPTAPSDICTAETGGIAAVSFPGRASPEPRWHLMGLVSWSYDKTCSHRLSTAFTKVLPFKDWIERNMK

SEQ ID NO: 18729 - protein, 1278 aa, Homo sapiens
MSEAPRFFVGPEDTEINPGNYRHFFHHADEDDEEEDDSPPERQIVVGICSMAKKSKSKPMKEILERISLFKYITVVVFEEEVILNEPVENWPLCDCLISFHSKGFPLDKAVAYAKLRNPFVINDLNMQYLIQDRREVYSILQAEGILLPRYAILNRDPNNPKECNLIEGEDHVEVNGEVFQKPFVEKPVSAEDHNVYIYYPTSAGGGSQRLFRKIGSRSSVYSPESNVRKTGSYIYEEFMPTDGTDVKVYTVGPDYAHAEARKSPALDGKVERDSEGKEVRYPVILNAREKLIAWKVCLAFKQTVCGFDLLRANGQSYVCDVNGFSFVKNSMKYYDDCAKILGNIVMRELAPQFHIPWSIPLEAEDIPIVPTTSGTMMELRCVIAVIRHGDRTPKQKMKMEVRHQKFFDLFEKCDGYKSGKLKLKKPKQLQEVLDIARQLLMELGQNNDSEIEENKPKLEQLKTVLEMYGHFSGINRKVQLTYLPHGCPKTSSEEEDSRREEPSLLLVLKWGGELTPAGRVQAEELGRAFRCMYPGGQGDYAGFPGCGLLRLHSTYRHDLKIYASDEGRVQMTAAAFAKGLLALEGELTPILVQMVKSANMNGLLDSDSDSLSSCQQRVKARLHEILQKDRDFTAEDYEKLTPSGSISLIKSMHLIKNPVKTCDKVYSLIQSLTSQIRHRMEDPKSSDIQLYHSETLELMLRRWSKLEKDFKTKNGRYDISKIPDIYDCIKYDVQHNGSLKLENTMELYRLSKALADIVIPQEYGITKAEKLEIAKGYCTPLVRKIRSDLQRTQDDDTVNKLHPVYSRGVLSPERHVRTRLYFTSESHVHSLLSILRYGALCNTNDSQNEDGGMVKEMESKDEQWKRAMDYLNVVNELNYMTQIVIMLYEDPNKDLSSEERFHVELHFSPGAKGCEEDKNLPSGYGYRPASRENEGRRPFKIDNDDEPHTSKRDEVDRAVILFKPMVSEPIHIHRKSPLPRSRKTATNDEESPLSVSSPEGTGTWLHYTSGVGTGRRRRRSGEQITSSPVSPKSLAFTSSIFGSWQQVVSENANYLRTPRTLVEQKQNPTVGSHCAGLFSTSVLGGSSSAPNLQDYARTHRKKLTSSGCIDDATRGSAVKRFSISFARHPTNEHLHLYRCWSVSSVEFLGSSGFELYSMVPSICPLETLHNALSLKQVDEFLASIASPSSDVPRKTAEISSTALRSSPIMRKKVSLNTYTPAKILPTPPATLKSTKASSKPATSGPSSAVVPNTSSRKKNITSKTETHEHKKNTGKKK

SEQ ID NO: 18730 - protein, 352 aa, Homo sapiens
MAFPRVKPAPDETSFSEALLKRNQDLAPNSAEQASILSLVTKINNVIDNLIVAPGTFEVQIEEVRQVGSYKKGTMTTGHNVADLVVILKILPTLEAVAALGNKVVESLRAQDPSEVLTMLTNETGFEISSSDATVKILITTVPPNLRKLDPELHLDIKVLQSALAAIRHARWFEENASQSTVKVLIRLLKDLRIRFPGFEPLTPWILDLLGHYAVMNNPTRQPLALNVAYRRCLQILAAGLFLPGSVGITDPCESGNFRVHTVMTLEQQDMVCYTAQTLVRILSHGGFRKILGQEGDASYLASEISTWDGVIVTPSEKAYEKPPEKKEGEEEEENTEEPPQGEEEESMETQE

SEQ ID NO: 18731 - protein, 1789 aa, Homo sapiens
MFRQFYLWTCLASGIILGSLFEICLGQYDDDWQYEDCKLARGGPPATIVAIDEESRNGTILVDNMLIKGTAGGPDPTIELSLKDNVDYWVLMDPVKQMLFLNSTGRVLDRDPPMNIHSIVVQVQCINKKVGTIIYHEVRIVVRDRNDNSPTFKHESYYATVNELTPVGTTIFTGFSGDNGATDIDDGPNGQIEYVIQYNPDDPTSNDTFEIPLMLTGNIVLRKRLNYEDKTRYFVIIQANDRAQNLNERRTTTTTLTVDVLDGDDLGPMFLPCVLVPNTRDCRPLTYQAAIPELRTPEELNPIIVTPPIQAIDQDRNIQPPSDRPGILYSILVGTPEDYPRFFHMHPRTAELSLLEPVNRDFHQKFDLVIKAEQDNGHPLPAFAGLHIEILDENNQSPYFTMPSYQGYILESAPVGATISDSLNLTSPLRIVALDKDIEDVPPSGVPTKDPELHLFLNDYTSVFTVTQTGITRYLTLLQPVDREEQQTYTFSITAFDGVQESEPVIVNIQVMDANDNTPTFPEISYDVYVYTDMRPGDSVIQLTAVDADEGSNGEITYEILVGAQGDFIINKTTGLITIAPGVEMIVGRTYALTVQAADNAPPAERRNSICTVYIEVLPPNNQSPPRFPQLMYSLEISEAMRVGAVLLNLQATDREGDSITYAIENGDPQRVFNLSETTGILTLGKALDRESTDRYILIITASDGRPDGTSTATVNIVVTDVNDNAPVFDPYLPRNLSVVEEEANAFVGQVKATDPDAGINGQVHYSLGNFNNLFRITSNGSIYTAVKLNREVRDYYELVVVATDGAVHPRHSTLTLAIKVLDIDDNSPVFTNSTYTVLVEENLPAGTTILQIEAKDVDLGANVSYRIRSPEVKHFFALHPFTGELSLLRSLDYEAFPDQEASITFLVEAFDIYGTMPPGIATVTVIVKDMNDYPPVFSKRIYKGMVAPDAVKGTPITTVYAEDADPPGLPASRVRYRVDDVQFPYPASIFEVEEDSGRVITRVNLNEEPTTIFKLVVVAFDDGEPVMSSSATVKILVLHPGEIPRFTQEEYRPPPVSELATKGTMVGVISAAAINQSIVYSIVSGNEEDTFGINNITGVIYVNGPLDYETRTSYVLRVQADSLEVVLANLRVPSKSNTAKVYIEIQDENNHPPVFQKKFYIGGVSEDARMFTSVLRVKATDKDTGNYSVMAYRLIIPPIKEGKEGFVVETYTGLIKTAMLFHNMRRSYFKFQVIATDDYGKGLSGKADVLVSVVNQLDMQVIVSNVPPTLVEKKIEDLTEILDRYVQEQIPGAKVVVESIGARRHGDAFSLEDYTKCDLTVYAIDPQTNRAIDRNELFKFLDGKLLDINKDFQPYYGEGGRILEIRTPEAVTSIKKRGESLGYTEGALLALAFIIILCCIPAILVVLVSYRQVFKGRQAECTKTARIQAALPAAKPAVPAPAPVAAPPPPPPPPPGAHLYEELGDSSMYEMPQYGSRRRLLPPAGQEEYGEVVGEAEEEYEEEEEEPKKIKKPKVEIREPSEEEEVVVTIEKPPAAEPTYTTWKRARIFPMIFKKVRGLADKRGIVDLEGEEWQRRLEEEDKDYLKLTLDQEEATESTVESEEESSSDYTEYSEEESEFSESETTEEESESETPSEEEESSTPESEESESTESEGEKARKNIVLARRRPMVEEVKEVKGRKEEPQEEQKEPKMEEEEHSEEEESGPAPVEESTDPEAQDIPEEGSAESASVEGGVESEEESESGSSSSSSESQSGGPWGYQVPAYDRSKNANQKKSPGANSEGYNTAL

SEQ ID NO: 18732 - protein, 118 aa, Homo sapiens
MAWALLLLTLLTQGTGSWAQSALTQPPSASGSPGQSVTISCTGTSSDVGGYNYVSWYQQHPGKAPKLMIYEVSKRPSGVPDRFSGSKSGNTASLTVSGLQAEDEADYYCSSYAGSNNF

SEQ ID NO: 18733 - protein, 503 aa, Homo sapiens
MGPADSWGHHWMGILLSASLCTVWSPPAAAQLTLNANPLDATQSEDVVLPVFGTPRTPQIHGRSRELAKPSIAVSPGTAIEQKDMVTFYCTTKDVNITIHWVSNNLSIVFHERMQLSKDGKILTILIVQREDSGTYQCEARDALLSQRSDPIFLDVKYGPDPVEIKLESGVASGEVVEVMEGSSMTFLAETKSHPPCAYTWFLLDSILSHTTRTFTIHAVSREHEGLYRCLVSNSATHLSSLGTLKVRVLETLTMPQVVPSSLNLVENARSVDLTCQTVNQSVNVQWFLSGQPLLPSEHLQLSADNRTLIIHGLQRNDTGPYACEVWNWGSRARSEPLELTINCPQSSSLSSGAIAGIVIGILAVIAVASELGYFLCIRNARRPSRKTTEDPSHETSQPIPKEEHPTEPSSESLSPEYRNISQLQGRIRVELMQPPDLPEETYETKLPSASRRGNSFSPWKPPPKPLMPPLRLVSTVPKNMESIYEELVNPEPNTYIQINPSV

SEQ ID NO: 18734 - protein, 184 aa, Homo sapiens
MEERKVKRRSPKSFSAHCTQVVNAKKNAIPVSKSTGFSNPASQSTSQRPKLKRVMKEKTKPQGGEGKGAQSTPIQHSFLTDVSDVQEMERGLLSLLNDFHSGKLQAFGNECSIEQMEHVRGMQEKLARLNLELYGELEELPEDKRKTASDSNLDRLLSDLEELNSSIQKLHLADAQDVPNTSAS

SEQ ID NO: 18735 - protein, 622 aa, Homo sapiens
MKENVASATVFTLLLFLNTCLLNGQLPPGKPEIFKCRSPNKETFTCWWRPGTDGGLPTNYSLTYHREGETLMHECPDYITGGPNSCHFGKQYTSMWRTYIMMVNATNQMGSSFSDELYVDVTYIVQPDPPLELAVEVKQPEDRKPYLWIKWSPPTLIDLKTGWFTLLYEIRLKPEKAAEWEIHFAGQQTEFKILSLHPGQKYLVQVRCKPDHGYWSAWSPATFIQIPSDFTMNDTTVWISVAVLSAVICLIIVWAVALKGYSMVTCIFPPVPGPKIKGFDAHLLEKGKSEELLSALGCQDFPPTSDYEDLLVEYLEVDDSEDQHLMSVHSKEHPSQGMKPTYLDPDTDSGRGSCDSPSLLSEKCEEPQANPSTFYDPEVIEKPENPETTHTWDPQCISMEGKIPYFHAGGSKCSTWPLPQPSQHNPRSSYHNITDVCELAVGPAGAPATLLNEAGKDALKSSQTIKSREEGKATQQREVESFHSETDQDTPWLLPQEKTPFGSAKPLDYVEIHKVNKDGALSLLPKQRENSGKPKKPGTPENNKEYAKVSGVMDNNILVLVPDPHAKNVACFEESAKEAPPSLEQNQAEKALANFTATSSKCRLQLGGLDYLDPACFTHSFH

SEQ ID NO: 18736 - protein, 148 aa, Homo sapiens
MTKALLIYLVSSFLALNQASLISRCDLAQVLQLEDLDGFEGYSLSDWLCLAFVESKFNISKINENADGSFDYGLFQINSHYWCNDYKSYSENLCHVDCQDLLNPNLLAGIHCAKRIVSGARGMNNWVEWRLHCSGRPLFYWLTGCRLR

SEQ ID NO: 18737 - protein, 191 aa, Homo sapiens
MAQEVDTAQGAEMRRGAGAARGRASWCWALALLWLAVVPGWSRVSGIPSRRHWPVPYKRFDFRPKPDPYCQAKYTFCPTGSPIPVMEGDDDIEVFRLQAPVWEFKYGDLLGHLKIMHDAIGFRSTLTGKNYTMEWYELFQLGNCTFPHLRPEMDAPFWCNQGAACFFEGIDDVHWKENGTLVQVATISGKL

SEQ ID NO: 18738 - protein, 240 aa, Homo sapiens; identical to SEQ ID NO: 10293

SEQ ID NO: 18739 - protein, 1666 aa, Homo sapiens
MHPGLWLLLVTLCLTEELAAAGEKSYGKPCGGQDCSGSCQCFPEKGARGRPGPIGIQGPTGPQGFTGSTGLSGLKGERGFPGLLGPYGPKGDKGPMGVPGFLGINGIPGHPGQPGPRGPPGLDGCNGTQGAVGFPGPDGYPGLLGPPGLPGQKGSKGDPVLAPGSFKGMKGDPGLPGLDGITGPQGAPGFPGAVGPAGPPGLQGPPGPPGPLGPDGNMGLGFQGEKGVKGDVGLPGPAGPPPSTGELEFMGFPKGKKGSKGEPGPKGFPGISGPPGFPGLGTTGEKGEKGEKGIPGLPGPRGPMGSEGVQGPPGQQGKKGTLGFPGLNGFQGIEGQKGDIGLPGPDVFIDIDGAVISGNPGDPGVPGLPGLKGDEGIQGLRGPSGVPGLPALSGVPGALGPQGFPGLKGDQGNPGRTTIGAAGLPGRDGLPGPPGPPGPPSPEFETETLHNKESGFPGLRGEQGPKGNLGLKGIKGDSGFCACDGGVPNTGPPGEPGPPGPWGLIGLPGLKGARGDRGSGGAQGPAGAPGLVGPLGPSGPKGKKGEPILSTIQGMPGDRGDSGSQGFRGVIGEPGKDGVPGLPGLPGLPGDGGQGFPGEKGLPGLPGEKGHPGPPGLPGNGLPGLPGPRGLPGDKGKDGLPGQQGLPGSKGITLPCIIPGSYGPSGFPGTPGFPGPKGSRGLPGTPGQPGSSGSKGEPGSPGLVHLPELPGFPGPRGEKGLPGFPGLPGKDGLPGMIGSPGLPGSKGATGDIFGAENGAPGEQGLQGLTGHKGFLGDSGLPGLKGVHGKPGLLGPKGERGSPGTPGQVGQPGTPGSSGPYGIKGKSGLPGAPGFPGISGHPGKKGTRGKKGPPGSIVKKGLPGLKGLPGNPGLVGLKGSPGSPGVAGLPALSGPKGEKGSVGFVGFPGIPGLPGIPGTRGLKGIPGSTGKMGPSGRAGTPGEKGDRGNPGPVGIPSPRRPMSNLWLKGDKGSQGSAGSNGFPGPRGDKGEAGRPGPPGLPGAPGLPGIIKGVSGKPGPPGFMGIRGLPGLKGSSGITGFPGMPGESGSQGIRGSPGLPGASGLPGLKGDNGQTVEISGSPGPKGQPGESGFKGTKGRDGLIGNIGFPGNKGEDGKVGVSGDVGLPGAPGFPGVAGMRGEPGLPGSSGHQGAIGPLGSPGLIGPKGPSITGVPGPAGLPGPKGEKGYPGIGIGAPGKPGLRGQKGDRGFPGLQGPAGLPGAPGISLPSLIAGQPGDPGRPGLDGERGRPGPAGPPGPPGPSSNQGDTGDPGFPGIPGPKGPKGDQGIPGFSGLPGELGLKGMRGEPGFMGTPGKVGPPGDPGFPGMKGKAGPRGSSGLQGDPGQTPTAEAVQVPPGPLGLPGIDGIPGLTGDPGAQGPVGLQGSKGLPGIPGKDGPSGLPGPPGALGDPGLPGLQGPPGFEGAPGQQGPFGMPGMPGQSMRVGYTLVKHSQSEQVPPCPIGMSQLWVGYSLLFVEGQEKAHNQDLGFAGSCLPRFSTMPFIYCNINEVCHYARRNDKSYWLSTTAPIPMMPVSQTQIPQYISRCSVCEAPSQAIAVHSQDITIPQCPLGWRSLWIGYSFLMHTAAGAEGGGQSLVSPGSCLEDFRATPFIECSGARGTCHYFANKYSFWLTTVEERQQFGELPVSETLKAGQLHTRVSRCQVCMKSL

SEQ ID NO: 18740 - protein, 446 aa, Homo sapiens
MLHPETSPGRGHLLAVLLALLGTTWAEVWPPQLQEQAPMAGALNRKESFLLLSLHNRLRSWVQPPAADMRRLDWSDSLAQLAQARAALCGIPTPSLASGLWRTLQVGWNMQLLPAGLASFVEVVSLWFAEGQRYSHAAGECARNATCTHYTQLVWATSSQLGCGRHLCSAGQTAIEAFVCAYSPRGNWEVNGKTIIPYKKGAWCSLCTASVSGCFKAWDHAGGLCEVPRNPCRMSCQNHGRLNISTCHCHCPPGYTGRYCQVRCSLQCVHGRFREEECSCVCDIGYGGAQCATKVHFPFHTCDLRIDGDCFMVSSEADTYYRARMKCQRKGGVLAQIKSQKVQDILAFYLGRLETTNEVIDSDFETRNFWIGLTYKTAKDSFRWATGEHQAFTSFAFGQPDNHGFGNCVELQASAAFNWNDQRCKTRNRYICQFAQEHISRWGPGS

SEQ ID NO: 18741 - protein, 123 aa, Homo sapiens
MTPGTQSPFFLLLLLTVLTATTAPKPATVVTGSGHASSTPGGEKETSATQRSSVPSSTEKNALSTGVSFFFLSFHISNLQFNSSLEDPSTDYYQELQRDISEMFLQIYKQGGFLGLSNIKFSE

SEQ ID NO: 18742 - protein, 823 aa, Homo sapiens
MAALQKLPHCRKLVLLCFLLATLWEARAGQIRYSVREEIDRGSFVGNIAKDLGLEPLALAEQGVRIVSRGRSQLFALNPRSGSLVTANRIDREELCAQSAPCLLNFNILLEDKLTIYSVEVEITDINDNAPRFGVEELELKISETTTPGFRIPLKNAHDADVGENALQKYALNPNDHFSLDVRRGADGNKYPELVLERSLDREEEAVHHLVLVASDGGDPVLSGTSRICVKVLDANDNAPVFTQPEYRISIPENTLVGTRILTVTATDADEGYYAQVVYFLEKSPGETSEVFELKSTSGELTIIKDLDYEDATFHEIDIEAQDGPGLLTRAKVIVTVLDVNDNAPEFYMTSATSSVSEDSLPGTIIGLFNVHDRDSGQNAFTTCSLPEDLPFKLEKSVDNYYRLVTTRALDREQFSFYNITLTAKDGGNPSLSTDAHILLQVADINDNAPAFSRTSYSTYIPENNPRGASVFSVTAHDPDSNDNAHVTYSFAEDTVQGAPLSSYISINSDTGVLYALRSFDYEQLRDLQVWVIARDSGNPPLSSNVSLSLFVLDQNDNAPEILYPAFPTDGSTGVELAPRSAEPGYLVTKVVAVDRDSGQNAWLSYHLLKASEPGLFSVGLHTGEVRTARALLDRDALKQSLVVAIQDHGQPPLSATVTLTVAVADRIPDILADLGSLEPSAIPNDSDLTLYLVVAVAAVSCVFLAFVIVLLAHRLRRWHKSRLLQASGGSLTGMQSSHFVGVDGVRAFLQTYSHEVSLTADSRKSHLIFPQPNYADTLISQESCEKKDFLSAPQSLLEEEREETFSQVIYLFTTYVLASLLK

SEQ ID NO: 18743 - protein, 250 aa, Homo sapiens [sequence omitted]

SEQ ID NO: 18744 - protein, 390 aa, Homo sapiens
MDDPDCDSTWEEDEEDAEDAEDEDCEDGEAAGARDADAGDEDEESEEPRAARPSSFQSRMTGSRNWRATRDMCRYRHNYPDLVERDCNGDTPNLSFYRNEIRFLPNGCFIEDILQNWTDNYDLLEDNHSYIQWLFPLREPGVNWHAKPLTLREVEVFKSSQEIQERLVRAYELMLGFYGIRLEDRGTGTVGRAQNYQKRFQNLNWRSHNNLRITRILKSLGELGLEHFQAPLVRFFLEETLVRRELPGVRQSALDYFMFAVRCRHQRRQLVHFAWEHFRPRCKFVWGPQDKLRRFKPSSLPHPLEGSRKVEEEGPAGDEPAESPSETPGPSPAGPTRDEPAKAGEAEASGLAVSSHPALPCAPVFVNPFWSGGRRAGLLLSLIPSKAFSE

SEQ ID NO: 18745 - protein, 185 aa, Homo sapiens [sequence omitted]

SEQ ID NO: 18746 - protein, 937 aa, Homo sapiens
MADKVRRQRPRRRVCWALVAVLLADLLALSDTLAVMSVDLGSESMKVAIVKPGVPMEIVLNKESRRKTPVIVTLKENERFFGDSAASMAIKNPKATLRYFQHLLGKQADNPHVALYQARFPEHELTFDPQRQTVHFQISSQLQFSPEEVLGMVLNYSRSLAEDFAEQPIKDAVITVPVFFNQAERRAVLQAARMAGLKVLQLINDNTATALSYGVFRRKDINTTAQNIMFYDMGSGSTVCTIVTYQMVKTKEAGMQPQLQIRGVGFDRTLGGLEMELRLRERLAGLFNEQRKGQRAKDVRENPRAMAKLLREANRLKTVLSANADHMAQIEGLMDDVDFKAKVTRVEFEELCADLFERVPGPVQQALQSAEMSLDEIEQVILVGGATRVPRVQEVLLKAVGKEELGKNINADEAAAMGAVYQAAALSKAFKVKPFVVRDAVVYPILVEFTREVEEEPGIHSLKHNKRVLFSRMGPYPQRKVITFNRYSHDFNFHINYGDLGFLGPEDLRVFGSQNLTTVKLKGVGDSFKKYPDYESKGIKAHFNLDESGVLSLDRVESVFETLVEDSAEEESTLTKLGNTISSLFGGGTTPDAKENGTDTVQKPSEKAEAGPEGVAPAPEGEKKQKPARKRRMVEEIGVELVVLDLPDLPEDKLAQSVQKLQDLTLRDLEKQEREKAANSLEAFIFETQDKLYQPEYQEVSTEEQREEISGKLSAASTWLEDEGVGATTVMLKEKLAELRKLCQGLFFRVEERKKWPERLSALDNLLNHSSMFLKGARLIPEMDQIFTEVEMTTLEKVINETWAWKNATLAEQAKLPATEKPVLLSKDIEAKMMALDREVQYLLNKAKFTKPRPRPKDKNGTRAEPPLNASASDQGEKVIPPAGQTEDAEPISEPEKVETGSEPGDTEPLELGGPGAEPEQKEQSTGQKRPLKNDEL

SEQ ID NO: 18747 - protein, 96 aa, Homo sapiens
MTPGTQSPFFLLLLLTVLTVVTGSGHASSTPGGEKETSATQRSSVPSSTEKNAFNSSLEDPSTDYYQELQRDISEMFLQIYKQGGFLGLSNIKFSE

SEQ ID NO: 18748 - protein, 820 aa, Homo sapiens
MAAPQSRPRRGELILLCALLGTLWEIGRGQIRYSVPEETDKGSFVGNISKDLGLDPRKLAKHGVRIVSRGRTQLFALNPRSGSLITAGRIDREELCAQSPRCLININTLVEDKGKLFGVEIEIIDINDNNPKFQVEDLEVKINEIAVPGARYPLPEAVDPDVGVNSLQSYQLSPNHHFSLDVQTGDNGAINPELVLERALDREEEAAHHLVLTASDGGKPPRSSTVRIHVTVLDTNDNAPVFPHPIYRVKVLENMPPGTRLLTVTASDPDEGINGKVAYKFRKINEKQTPLFQLNENTGEISIAKSLDYEECSFYEMEIQAEDVGALLGRTKLLISVEDVNDNRPEVIITSLFSPVLENSLPGTVIAFLSVHDQDSGKNGQVVCYTRDNLPFKLEKSIGNYYRLVTRKYLDRENVSIYNITVMASDLGTPPLSTETQIALHVADINDNPPTFPHASYSAYILENNLRGASIFSLTAHDPDSQENAQVTYSVTEDTLQGAPLSSYISINSDTGVLYALQSFDYEQIRDLQLLVTASDSGDPPLSSNMSLSLFVLDQNDNAPEILYPALPTDGSTGVELAPRSAERGYLVTKVVAVDRDSGQNAWLSYRLLKASEPGLFSVGLHTGEVRTARALLDRDALKQSLVVAVQDHGQPPLSATVTLTVAVADSIPEVLTELGSLKPSVDPNDSSLTLYLVVAVAAISCVFLAFVAVLLGLRLRRWHKSRLLQDSGGRLVGVPASHFVGVEEVQAFLQTYSQEVSLTADSRKSHLIFPQPNYADMLISQEGCEKNDSLLTSVDFHEYKNEADHGQVSLVLCLLLISR

SEQ ID NO: 18749 - protein, 335 aa, Homo sapiens
MSVKWTSVILLIQLSFCFSSGNCGKVLVWAAEYSHWMNIKTILDELIQRGHEVTVLASSASILFDPNNSSALKIEIYPTSLTKTELENFIMQQIKRWSDLPKDTFWLYFSQVQEIMSIFGDITRKFCKDVVSNKKFMKKVQESRFDVIFADAIFPCSELLAELFNIPFVYSLSFSPGYTFEKHSGGFIFPPSYVPVVMSELTDQMTFMERVKNMIYVLYFDFWFEIFDMKKWDQFYSEVLGRPTTLSETMGKADVWLIRNSWNFQFPYPLLPNVDFVGGLHCKPAKPLPKEMEDFVQSSGENGVVVFSLGSMVSNMTEERANVIASALAQIPQKI

SEQ ID NO: 18750 - protein, 173 aa, Homo sapiens
MCLLLGATGVGKTLLVKRLQEVSSRDGKGDLGEPPPTRPTVGTNLTDIVAQRKITIRELGGCMGPIWSSYYGNCRSLLFVMDASDPTQLSASCVQLLGLLSAEQLAEASVLILFNKIDLPCYMSTEEMKSLIRLPDIIACAKQNITTAEISAREGTGLAGVLAWLQATHRAND

SEQ ID NO: 18751 - protein, 115 aa, Homo sapiens
MRKAYSPLQVLRGCLLLPSLLHALSLQEQPMVWPLTRGPSSASDALSSGGPYHPSECCFTYTTYKIPRQRIMDYYETNSQCSKPGIVFITKRGHSVCTNPSDKWVQDYIKDMKEN

SEQ ID NO: 18752 - protein, 152 aa, Homo sapiens [sequence omitted]

SEQ ID NO: 18753 - protein, 921 aa, Homo sapiens
MNQPGGAAAPQADGASAAGRKSTASRERLKRSQKSTKVEGPEPVPAEASLSAEQGTMTEVKVKTELPDDYIQEVIWQGEAKEEKKAVSKDGTSDVPAEICVVIGGVRNQQTLGSYECGICGKKYKYYNCFQTHVRAHRDTEATSGEGASQSNNFRYTCDICGKKYKYYSCFQEHRDLHAVDVFSVEGAPENRADPFDQGVVATDEVKEEPPEPFQKIGPKTGNYTCEFCGKQYKYYTPYQEHVALHAPISTAPGWEPPDDPDTGSECSHPEVSPSPRFVAAKTQTNQSGKKAPASVVRCATLLHRTPPATQTQTFRTPNSGSPASKATAESAFSRRVEGKAQNHFEETNSSSQNSSEPYTCGACGIQFQFYNNLLEHMQSHAADNENNIASNQSRSPPAVVEEKWKPQAQRNSANNTTTSGLTPNSMIPEKERQNIAERLLRVMCADLGALSVVSGKEFLKLAQTLVDSGARYGAFSVTEILGNFNTLALKHLPRMYNQVKVKVTCALGSNACLGIGVTCHSQSVGPDSCYILTAYQAEGNHIKSYVLGVKGADIRDSGDLVHHWVQNVLSEFVMSEIRTVYVTDCRVSTSAFSKAGMCLRCSACALNSVVQSVLSKRTLQARSMHEVIELLNVCEDLAGSTGLAKETFGSLEETSPPPCWNSVTDSLLLVHERYEQICEFYSRAKKMNLIQSLNKHLLSNLAAILTPVKQAVIELSNESQPTLQLVLPTYVRLEKLFTAKANDAGTVSKLCHLFLEALKENFKVHPAHKVAMILDPQQKLRPVPPYQHEEIIGKVCELINEVKESWAEEADFEPAAKKPRSAAVENPAAQEDDRLGKNEVYDYLQEPLFQATPDLFQYWSCVTQKHTKLAKLAFWLLAVPAVGARSGCVNMCEQALLIKRRRLLSPEDMNKLMFLKSNML

SEQ ID NO: 18754 - protein, 96 aa, Homo sapiens
MKLCVTVLSLLVLVAAFCSLALSAPMGSDPPTACCFSYTARKLPRNFVVDYYETSSLCSQPAVVAAPGRIPSTRAAPHGPWSGRGRCLPQARDKAR

SEQ ID NO: 18755 - protein, 3354 aa, Homo sapiens
MGRHVATSCHVAWLLVLISGCWGQVNRLPFFTNHFFDTYLLISEDTPVGSSVTQLLAQDMDNDPLVFGVSGEEASRFFAVEPDTGVVWLRQPLDRETKSEFTVEFSVSDHQGVITRKVNIQVGDVNDNAPTFHNQPYSVRIPENTPVGTPIFIVNATDPDLGAGGSVLYSFQPPSQFFAIDSARGIVTVIRELDYETTQAYQLTVNATDQDKTRPLSTLANLAIIITDVQDMDPIFINLPYSTNIYEHSPPGTTVRIITAIDQDKGRPRGIGYTIVSGNTNSIFALDYISGVLTLNGLLDRENPLYSHGFILTVKGTELNDDRTPSDATVTTTFNILVIDINDNAPEFNSSEYSVAITELAQVGFALPLFIQVVDKDETQGLNSMFEVYLVGNNSHHFIISPTSVQGKADIRIRVAIPLDYETVDRYDFDLFANESVPDHVGYAKVKITLINENDNRPIFSQPLYNISLYENVTVGTSVLTVLATDNDAGTFGEVSYFFSDDPDRFSLDKDTGLIMLIARLDYELIQRFTLTIIARDGGGEETTGRVRINVLDVNDNVPTFQKDAYVGALRENEPSVTQLVRLRATDEDSPPNNQITYSIVSASAFGSYFDISLYEGYGVISVSRPLDYEQISNGLIYLTVMAMDAGNPPLNSTVPVTIEVFDENDNPPTFSKPAYFVSVVENIMAGATVLFLNATDLDRSREYGQESIIYSLEGSTQFRINARSGEITTTSLLDRETKSEYILIVRAVDGGVGHNQKTGIATVNITLLDINDNHPTWKDAPYYINLVEMTPPDSDVTTVVAVDPDLGENGTLVYSIQPPNKFYSLNSTTGKIRTTHAMLDRENPDPHEAELMRKIVVSVTDCGRPPLKATSSATVFVNLLDLNDNDPTFQNLPFVAEVLEGIPAGVSIYQVVAIDLDEGLNGLVSYRMPVGMPRMDFLINSSSGVVVTTTELDRERIAEYQLRVVASDAGTPTKSSTSTLTIHVLDVNDETPTFFPAVYNVSVSEDVPREFRVVWLNCTDNDVGLNAELSYFITGGNVDGKFSVGYRDAVVRTVVGLDRETTAAYMLILEAIDNGPVGKRHTGTATVFVTVLDVNDNRPIFLQSSYEASVPEDIPEGHSILQLKATDADEGEFGRVWYRILHGNHGNNFRIHVSNGLLMRGPRPLDRERNSSHVLIVEAYNHDLGPMRSSVRVIVYVEDINDEAPVFTQQQYSRLGLRETAGIGTSVIVVQATDRDSGDGGLVNYRILSGAEGKFEIDESTGLIITVNYLDYETKTSYMMNVSATDQAPPFNQGFCSVYITLLNELDEAVQFSNASYEAAILENLALGTEIVRVQAYSIDNLNQITYRFNAYTSTQAKALFKIDAITGVITVQGLVDREKGDFYTLTVVADDGGPKVDSTVQVYITVLDENDNSPRFDFTSDSAVSIPEDCPVGQRVATVKAWDPDAGSNGQVVFSLASGNIAGAFEIVTTNDSIGEVFVARPLDREELDHYILQVVASDRGTPPRKKDHILQVTILDINDNPPVIESPFGYNVSVNENVGGGTAVVQVRATDRDIGINSVLSYYITEGNKDMAFRMDRISGEIATRPAPPDRERQSFYHLVATVEDEGTPTLSATTHVYVTIVDENDNAPMFQQPHYEVLLDEGPDTLNTSLITIQALDLDEGPNGTVTYAIVAGNIVNTFRIDRHMGVITAAKELDYEISHGRYTLIVTATDQCPILSHRLTSTTTVLVNVNDINDNVPTFPRDYEGPFEVTEGQPGPRVWTFLAHDRDSGPNGQVEYSIMDGDPLGEFVISPVEGVLRVRKDVELDRETIAFYNLTICARDRGMPPLSSTMLVGIRVLDINDNDPVLLNLPMNITISENSPVSSFVAHVLASDADSGCNARLTFNITAGNRERAFFINATTGIVTVNRPLDRERIPEYKLTISVKDNPENPRIARRDYDLLLIFLSDENDNHPLFTKSTYQAEVMENSPAGTPLTVLNGPILALDADQDIYAVVTYQLLGAQSGLFDINSSTGVVTVRSGVIIDREAFSPPILELLLLAEDIGLLNSTAHLLITILDDNDNRPTFSPATLTVHLLENCPPGFSVLQVTATDEDSGLNGELVYRIEAGAQDRFLIHLVTGVIRVGNATIDREEQESYRLTVVATDRGTVPLSGTAIVTILIDDINDSRPEFLNPIQTVSVLESAEPGTVIANITAIDHDLNPKLEYHIVGIVAKDDTDRLVPNQEDAFAVNINTGSVMVKSPMNRELVATYEVTLSVIDNASDLPERSVSVPNAKLTVNVLDVNDNTPQFKPFGITYYMERILEGATPGTTLIAVAAVDPDKGLNGLVTYTLLDLVPPGYVQLEDSSAGKVIANRTVDYEEVHWLNFTVRASDNGSPPRAAEIPVYLEIVDINDNNPIFDQPSYQEAVFEDVPVGTIILTVTATDADSGNFALIEYSLGDGESKFAINPTTGDIYVLSSLDREKKDHYILTALAKDNPGDVASNRRENSVQVVIQVLDVNDCRPQFSKPQFSTSVYENEPAGTSVITMMATDQDEGPNGELTYSLEGPGVEAFHVDMDSGLVTTQRPLQSYEKFSLTVVATDGGEPPLWGTTMLLVEVIDVNDNRPVFVRPPNGTILHIREEIPLRSNVYEVYATDKDEGLNGAVRYSFLKTAGNRDWEFFIIDPISGLIQTAQRLDRESQAVYSLILVASDLGQPVPYETMQPLQVALEDIDDNEPLFVRPPKGSPQYQLLTVPEHSPRGTLVGNVTGAVDADEGPNAIVYYFIAAGNEEKNFHLQPDGCLLVLRDLDREREAIFSFIVKASSNRSWTPPRGPSPTLDLVADLTLQEVRVVLEDINDQPPRFTKAEYTAGVATDAKVGSELIQVLALDADIGNNSLVFYSILAIHYFRALANDSEDVGQVFTMGSMDGILRTFDLFMAYSPGYFVVDIVARDLAGHNDTAIIGIYILRDDQRVKIVINEIPDRVRGFEEEFIHLLSNITGAIVNTDNVQFHVDKKGRVNFAQTELLIHVVNRDTNRILDVDRVIQMIDENKEQLRNLFRNYNVLDVQPAISVRLPDDMSALQMAIIVLAILLFLAAMLFVLMNWYYRTVHKRKLKAIVAGSAGNRGFIDIMDMPNTNKYSFDGANPVWLDPFCRNLELAAQAEHEDDLPENLSEIADLWNSPTRTHGTFGREPAAVKPDDDRYLRAAIQEYDNIAKLGQIIREGPIKGSLLKVVLEDYLRLKKLFAQRMVQKASSCHSSISELIQTELDEEPGDHSPGQGSLRFRHKPPVELKGPDGIHVVHGSTGTLLATDLNSLPEEDQKGLGRSLETLTAAEATAFERNARTESAKSTPLHKLRDVIMETPLEITEL

SEQ ID NO: 18756 - protein, 537 aa, Homo sapiens
MPRAPHFMPLLLLLLLLSLPHTQAAFPQDPLPLLISDLQGTSPLSWFRGLEDDAVAAELGLDFQRFLTLNRTLLVAARDHVFSFDLQAEEEGEGLVPNKYLTWRSQDVENCAVRGKLTDECYNYIRVLVPWDSQTLLACGTNSFSPVCRSYGITSLQQEGEELSGQARCPFDATQSNVAIFAEGSLYSATAADFQASDAVVYRSLGPQPPLRSAKYDSKWLREPHFVQALEHGDHVYFFFREVSVEDARLGRVQFSRVARVCKRDMGGSPRALDRHWTSFLKLRLNCSVPGDSTFYFDVLQALTGPVNLHGRSALFGVFTTQTNSIPGSAVCAFYLDEIERGFEGKFKEQRSLDGAWTPVSEDRVPSPRPGSCPAHSSPLGRSLQVLRGSREAPPVPGPARGLPGPRPEKGGRREAPVVPEASPRRALLPPGRPERRPFQLLKGAAHGLQRGERPSPLGHELDALQDVSPPPRPAPPAFPTRRVSRGPFSPRVYLLTVFPPVLDRRVGGEKPVSSVSQHFRGSWRTPTPRSLPAKLP

SEQ ID NO: 18757 - protein, 849 aa, Homo sapiens
MSDTRRRVKVYTLNEDRQWDDRGTGHVSSTYVEELKGMSLLVRAESDGSLLLESKINPNTAYQKQQDTLIVWSEAENYDLALSFQEKAGCDEIWEKICQVQGKDPSVEVTQDLIDESEEERFEEMPETSHLIDLPTCELNKLEEIADLVTSVLSSPIRREKLALALENEGYIKKLLQLFQACENLENTEGLHHLYEIIRGILFLNKATLFEVMFSDECIMDVVGCLEYDPALAQPKRHREFLTKTAKFKEVIPITDSELRQKIHQTYRVQYIQDIILPTPSVFEENFLSTLTSFIFFNKVEIVSMLQEDEKFLSEVFAQLTDEATDDDKRRELVNFFKEFCAFSQTLQPQNRDAFFKTLAKLGILPALEIVMGMDDLQVRSAATDIFSYLVEFSPSMVREFVMQEAQQSDDDILLINVVIEQMICDTDPELGGAVQLMGLLRTLIDPENMLATTNKTEKSEFLNFFYNHCMHVLTAPLLTNTSEDKCEKDFFLKHYRYSWSFICTPSHSHSHSTPSSSISQDNIVGSNKNNTICPDNYQTAQLLALILELLTFCVEHHTYHIKNYIMNKDLLRRVLVLMNSKHTFLALCALRFMRRIIGLKDEFYNRYITKGNLFEPVINALLDNGTRYNLLNSAVIELFEFIRVEDIKSLTAHIVENFYKALESIEYVQTFKGLKTKYEQEKDRQNQKLNSVPSILRSNRFRRDAKALEEDEEMWFNEDEEEEGKAVVAPVEKPKPEDDFPDNYEKFMETKKAKESEDKENLPKRTSPGGFKFTFSHSASAANGTNSKSVVAQIPPATSNGSSSKTTNLPTSVTATKGSLVGLVDYPDDEEEDEEEESSPRKRPRLGS

SEQ ID NO: 18758 - protein, 126 aa, Homo sapiens; identical to SEQ ID NO: 5395

SEQ ID NO: 18759 - protein, 419 aa, Homo sapiens
MSRDVCIHTWPCTYYLEPKRRWVTGQLSLTSLSLRFMTDSTGEILVSFPLSSIVEIKKEASHFIFSSITILEKGHAKHWFSSLRPSRNVVFSIIEHFWRELLLSQPGAVADASVPRTRGEELTGLMAGSQKRLEDTARVLHHQGQQLDSVMRGLDKMESDLEVADRLLTELESPAWWPFSSKLWKTPPETKPREDVSMTSCEPFGKEGILIKIPAVISHRTESHVKPGRLTVLVSGLEIHDSSSLLMHRFEREDVDDIKVHSPYEISIRQRFIGKPDMAYRLISAKMPEVIPILEVQFSKKMELLEDALVLRSARTSSPAEKSCSVWHAASGLMGRTLHREPPAGDQEGTALHLQTSLPALSEADTQELTQILRRMKGLALEAESELERQDEALDGVAAAVDRATLTIDKHNRRMKRLT

SEQ ID NO: 18760 - protein, 136 aa, Homo sapiens; identical to SEQ ID NO: 7651

SEQ ID NO: 18761 - protein, 393 aa, Homo sapiens
MVARVGLLLRALQLLLWGHLDAQPAERGGQELRKEAEAFLEKYGYLNEQVPKAPTSTRFSDAIRAFQWVSQLPVSGVLDRATLRQMTRPRCGVTDTNSYAAWAERISDLFARHRTKMRRKKRFAKQGNKWYKQHLSYRLVNWPEHLPEPAVRGAVRAAFQLWSNVSALEFWEAPATGPADIRLTFFQGDHNDGLGNAFDGPGGALAHAFLPRRGEAHFDQDERWSLSRRRGRNLFVVLAHEIGHTLGLTHSPAPRALMAPYYKRLGRDALLSWDDVLAVQSLYGKPLGGSVAVQLPGKLFTDFETWDSYSPQGRRPETQGPKYCHSSFDAITVDRQQQLYIFKGSHFWEVAADGNVSEPRPLQERWVGLPPNIEAAAVSLNDGDFYFFKVQSV

SEQ ID NO: 18762 - protein, 498 aa, Homo sapiens
MPLVTRNIEPRHLCRQTLPSVRSELECVTNITLANVIRQLGSLSKYAEDIFGELFTQANTFASRVSSLAERVDRLQVKVTQLDPKEEEVSLQGINTRKAFRSSTIQDQKLFDRNSLPVPVLETYNTCDTPPPLNNLTPYRDDGKEALKFYTDPSYFFDLWKEKMLQDTKDIMKEKRKHRKEKKDNPNRGNVNPRKIKTRKEEWEKMKMGQEFVESKEKLGTSGYPPTLVYQNGSIGCVENVDASSYPPPPQSDSASSPSPSFSEDNLPPPPAEFSYPVDNQRGSGLAGPKRSSVVSPSHPPPAPPLGSPPGPKPGFAPPPAPPPPPPPMIGIPPPPPPVGFGSPGTPPPPSPPSFPPHPDFAAPPPPPPPPAADYPTLPPPPLSQPTGGAPPPPPPPPPPGPPPPPFTGADGQPAIPPPLSDTTKPKSSLPAVSDARSDLLSAIRQGFQLRRVEEQREQEKRDVVGNDVATILSRRIAVEYSDSEDDSSEFDEDDWSD

SEQ ID NO: 18763 - protein, 103 aa, Homo sapiens
MKLCVTVLSLLVLVAAFCSLALSAPMGSDPPTACCFSYTARKLPRNFVVDYYETSSLCSQPAVVEWKLQGVCFQCCSGKDPIHQSCPTWTMVRQRKMPTTGKG

SEQ ID NO: 18764 - protein, 168 aa, Homo sapiens
MSLVLNDLLICCRQLEHDRATERKKEVEKFKRLIRDPETIKHLDRHSDSKQGKYLNWDAVFRFLQKYIQKETECLRIAKPNVSASTQASRQKKMQEISSLVKYFIKCANRRAPRLKCQELLNYIMDTVKDSSNGAIYGADCSNILLKDILSVRKYWCEISQQQWLGMF

SEQ ID NO: 18765 - protein, 814 aa, Homo sapiens
MGNSSGWRGPAGQRRMLFLFLLSLLDQALSEPIRYAIPEELDRGSLVGNLAKDLGFGVGDLPTRNLRVIAEKKFFTVSPENGNLLVSDRIDREEICGKKSTCVLEFEMVAEKPLNFFHVTVLIQDINDNPPTFSQNITELEISELALTGATFALESAQDPDVGVNSLQQYYLSPDPHFSLIQKENLDGSRYPELVLKAPLDREEQPHHHLVLTAVDGGEPSRSCTTQIRVIVADANDNPPVFTQDMYRVNVAENLPAGSSVLKVMAIDMDEGINAEIIYAFINIGKEVRQLFKLDSKTGELTTIGELDFEERDSYTIGVEAKDGGHHTAYCKVQIDISDENDNAPEITLASESQHIQEDAELGTAVALIKTHDLDSGFNGEILCQLKGNFPFKIVQDTKNTYRLVTDGALDREQIPEYNVTITATDKGNPPLSSSKTITLHILDVNDNVPVFHQASYTVHVAENNPPGASIAHVRASDPDLGPNGLVSYYIVASDLEPRELSSYVSVSARSGVVFAQRAFDHEQLRAFELTLQARDQGSPTLSANVSLRVLVDDRNDNAPLVLYPALGPEGSALFDMVPRSAEPGYLVTKVVAVDADSGYNAWLSYHIVQASEPGLFSLGLRTGEVRTARTLGDREAARQRLLVTVRDGGQQPLSATVMLHLIFADSLQEIQPDLSDRPTPSDPQAELQFHLVVALALISVLFLLAVILAISLRLRCSSRPATEGYFQPGVCFKTVPGVLPTYSERTLPYSYNPCAASHSSNTEFKFLNIKAENAAPQDLLCDEASWFESNDNPEMPSNSGNLQKVSFFKPFLP

SEQ ID NO: 18766 - protein, 138 aa, Homo sapiens
MGWRPRRARGTPLLLLLLLLLLWPVPGAGVLQGHIPGQPVTPHWVLDGQPWRTVSLEEPVSKPDMGLVALEAEGQELLLELEKNHRLLAPGYIETHYGPDGQPVVLAPNHTVRCFHGLWDAPPEVPPHHSYPYSSLHS

SEQ ID NO: 18767 - protein, 671 aa, Homo sapiens
MPHAFKPGDLVFAKMKGYPHWPARIDDIADGAVKPPPNKYPIFFFGTHETAFLGPKDLFPYDKCKDKYGKPNKRKGFNEGLWEIQNNPHASYSAPPPVSSSDSEAPEANPADGSDADEDDEDRGVMAVTAVTATAASDRMESDSDSDKSSDNSGLKRKTPALKMSVSKRARKASSDLDQASVSPSEEENSESSSESEKTSDQDFTPEKKAAVRAPRRGPLGGRKKKKAPSASDSDSKADSDGAKPEPVAMARSASSSSSSSSSSDSDVSVKKPPRGRKPAEKPLPKPRGRKPKPERPPSSSSSDSDSDEVDRISEWKRRDEARRRELEARRRREQEEELRRLREQEKEEKERRRERADRGEAERGSGGSSGDELREDDEPVKKRGRKGRGRGPPSSSDSEPEAELEREAKKSAKKPQSSSTEPARKPGQKEKRVRPEEKQQAKPVKVERTRKRSEGFSMDRKVEKKKEPSVEEKLQKLHSEIKFALKVDSPDVKRCLNALEELGTLQVTSQILQKNTDVVATLKKIRRYKANKDVMEKAAEVYTRLKSRVLGPKIEAVQKVNKAGMEKEKAEEKLAGEELAGEEAPQEKAEDKPSTDLSAPVNGEATSQKGESAEDKEHEEGRDSEEGPRCGSSEDLHDSVREGPDLDRPGSDRQERERARGDSEALDEES

SEQ ID NO: 18768 - protein, 191 aa, Homo sapiens
MTWRHHVRLLFTVSLALQIINLGNSYQREKHNGGREEVTKVATQKHRQSPLNWTSSHFGEVTGSAEGWGPEEPLPYSWAFGEVNAAPWSTEPGPSAPATSAGASSGPCTASPSRRLTAVTRKTSWPPTLTGRAPGARPACYSCCPAHSCTASCARMRPRTLGPWSLPSSSGSGAPAEGRDLGIAFNFLCCK

SEQ ID NO: 18769 - protein, 645 aa, Homo sapiens
MNWGPTGMDLWQLLLTLALAGSSDAFSGSEATAAILSRAPWSLQSVNPGLKTNSSKEPKFTKCRSPERETFSCHWTDEVHHGTKNLGPIQLFYTRRNTQEWTQEWKECPDYVSAGENSCYFNSSFTSIWIPYCIKLTSNGGTVDEKCFSVDEIVQPDPPIALNWTLLNVSLTGIHADIQVRWEAPRNADIQKGWMVLEYELQYKEVNETKWKMMDPILTTSVPVYSLKVDKEYEVRVRSKQRNSGNYGEFSEVLYVTLPQMSQFTCEEDFYFPWLLIIIFGIFGLTVMLFVFLFSKQQRIKMLILPPVPVPKIKGIDPDLLKEGKLEEVNTILAIHDSYKPEFHSDDSWVEFIELDIDEPDEKTEESDTDRLLSSDHEKSHSNLGVKDGDSGRTSCCEPDILETDFNANDIHEGTSEVAQPQRLKGEADLLCLDQKNQNNSPYHDACPATQQPSVIQAEKNKPQPLPTEGAESTHQAAHIQLSNPSSLSNIDFYAQVSDITPAGSVVLSPGQKNKAGMSQCDMHPEMVSLCQENFLMDNAYFCEADAKKCIPVAPHIKVESHIQPSLNQEDIYITTESLTTAAGRPGTGEHVPGSEMPVPDYTSIHIVQSPQGLILNATALPLPDKEFLSSCGYVSTDQLNKIMP

SEQ ID NO: 18770 - protein, 378 aa, Homo sapiens
MKLLHVFLLFLCFHLRFCKVTYTSQEDLVEKKCLAKKYTHLSCDKVFCQPWQRCIEGTCVCKLPYQCPKNGTAVCATNRRSFPTYCQQKSLECLHPGTKFLNNGTCTAEGKFSVSLKHGNTDSEGIVEVKLVDQDKTMFICKSSWSMREANVACLDLGFQQGADTQRRFKLSDLSINSTECLHVHCRGLETSLAECTFTKRRTMGYQDFADVVCYTQKADSPMDDFFQCVNGKYISQMKACDGINDCGDQSDELCCKACQGKGFHCKSGVCIPSQYQCNGEVDCITGEDEVGCAGFASVTQEETEILTADMDAERRRIKSLLPKLSCGVKNRMHIRRKRIVGGKRAQLGGKMKQISLDIFKGLHRVYAILEFCCIILK

SEQ ID NO: 18771 - protein, 396 aa, Homo sapiens
MKWVTFISLLFLFSSAYSRGVFRRDAHKSEVAHRFKDLGEENFKALVLIAFAQYLQQCPFEDHVKLVNEVTEFAKTCVADESAENCDKSLHTLFGDKLCTVATLRETYGEMADCCAKQEPERNECFLQHKDDNPNLPRLVRPEVDVMCTAFHDNEETFLKKYLYETTLEKCCAAADPHECYAKVFDEFKPLVEEPQNLIKQNCELFEQLGEYKFQNALLVRYTKKVPQVSTPTLVEVSRNLGKVGSKCCKHPEAKRMPCAEDYLSVVLNQLCVLHEKTPVSDRVTKCCTESLVNRRPCFSALEVDETYVPKEFNAETFTFHADICTLSEKERQIKKQTALVELVKHKPKATKEQLKAVMDDFAAFVEKCCKADDKETCFAEEGKKLVAASQAALGL

SEQ ID NO: 18772 - protein, 1314 aa, Homo sapiens
MALRPGAGSGGGGAAGAGAGSAGGGGFMFPVAGGIRPPQAGLMPMQQQGFPMVSVMQPNMQGIMGMNYSSQMSQGPIAMQAGIPMGPMPAAGMPYLGQAPFLGMRPPGPQYTPDMQKQFAEEQQKRFEQQQKLLEEERKRRQFEEQKQKLRLLSSVKPKTGEKSRDDALEAIKGNLDGFSRDAKMHPTPASHPKKPGPSLEEKFLVSCDISTSGQEQIKLNTSEVGHKALGPGSSKKYPSLMASNGVAVDGCVSGTTTAEAENTSDQNLSIEESGVGVFPSQDPAQPRMPPWIYNESLVPDAYKKILETTMTPTGIDTAKLYPILMSSGLPRETLGQIWALANRTTPGKLTKEELYTVLAMIAVTQRGVPAMSPDALNQFPAAPIPTLSGFSMTLPTPVSQPTVIPSGPAGSMPLSLGQPVMGINLVGPVGGAAAQASSGFIPTYPANQVVKPEEDDFQDFQDASKSGSLDDSFSDFQELPASSKTSNSQHGNSAPSLLMPLPGTKALPSMDKYAVFKGIAADKSSENTVPPGDPGDKYSAFRELEQTAENKPLGESFAEFRSAGTDDGFTDFKTADSVSPLEPPTKDKTFPPSFPSGTIQQKQQTQVKNPLNLADLDMFSSVNCSSEKPLSFSAVFSTSKSVSTPQSTGSAATMTALAATKTSSLADDFGEFSLFGEYSGLAPVGEQDDFADFMAFSNSSISSEQKPDDKYDALKEEASPVPLTSNVGSTVKGGQNSTAASTKYDVFRQLSLEGSGLGVEDLKDNTPSGKSDDDFADFHSSKFSSINSDKSLGEKAVAFRHTKEDSASVKSLDLPSIGGSSVGKEDSEDALSVQFDMKLADVGGDLKHVMSDSSLDLPTVSGQHPPAADIEDLKYAAFGSYSSNFAVSTLTSYDWSDRDDATQGRKLSPFVLSAGSGSPSATSILQKKETSFGSSENITMTSLSKVTTFVSEDALPETTFPALASFKDTIPQTSEQKEYENRDYKDFTKQDLPTAERSQEATCPSPASSGASQETPNECSDDFGEFQSEKPKISKFDFLVATSQSKMKSSEEMIKSELATFDLSVQGSHKRSLSLGDKEISRSSPSPALEQPFRDRSNTLNEKPALPVIRDKYKDLTGEVEENERYAYEWQRCLGSALNVIKKANDTLNGISSSSVCTEVIQSAQGMEYLLGVVEVYRVTKRVELGIKATAVCSEKLQQLLKDIDKVWNNLIGFMSLATLTPDENSLDFSSCMLRPGIKNAQELACGVCLLNVDSRSRKEEKPAEEHPKKAFNSETDSFKLAYGGHQYHASCANFWINCVEPKPPGLVLPDLL

SEQ ID NO: 18773 - protein, 339 aa, Homo sapiens [sequence omitted]

SEQ ID NO: 18774 - protein, 220 aa, Homo sapiens
MFQQFQASCLVLFFLVGFAQQTLKPQNRKVDCNKGVTGTIYEYGALTLNGEEYIQFKQFAGKHVLFVNVAAYGLAAQYPELNALQEELKNFGVIVLAFPCNQFGKQEPGTNSEILLGLKYVCPGSGFVPSFQLFEKGDVNGEKEQKVFTFLKNSCPPTSDLLGSSSQLFWEPMKVHDIRWNFEKFLVGPDGVPVMHWFHQAPVSTVKSDILEYLKQFNTH

SEQ ID NO: 18775 - protein, 114 aa, Homo sapiens
MDIWLLCWVTLCLLAAGHSEPGVSQTPRHKVTNMGQEVILRCDPSSGHMFVHWYRQNLRQEMKLLISFQYQNIAVDSGMPKERFTAERPNGTSSTLKIHPAEPRDSAVYLYSSG

SEQ ID NO: 18776 - protein, 189 aa, Homo sapiens
MTPGTQSPFFLLLLLTVLTATTAPKPATVVTGSGHASSTPGGEKETSATQRSSVPSSTEKNAFNSSLEDPSTDYYQELQRDISEMSGAGVPGWGIALLVLVCVLVALAIVYLIALAVCQCRRKNYGQLDIFPARDTYHPMSEYPTYHTHGRYVPPSSTDRSPYEKVSAGNGGSSLSYTNPAVAATSANL

SEQ ID NO: 18777 - protein, 239 aa, Homo sapiens
MTPGTQSPFFLLLLLTVLTATTAPKPATVVTGSGHASSTPGGEKETSATQRSSVPSSTEKNAIPAPTTTKSCRETFLKWPGSVVVQLTLAFREGTINVHDVETQFNQYKTEAASRYNLTISDVSVSDVPFPFSAQSGAGVPGWGIALLVLVCVLVALAIVYLIALAVCQCRRKNYGQLDIFPARDTYHPMSEYPTYHTHGRYVPPSSTDRSPYEKVSAGNGGSSLSYTNPAVAATSANL

SEQ ID NO: 18778 - protein, 260 aa, Homo sapiens
MPQNEYIELHRKRYGYRLDYHEKKRKKESREAHERSKKAKKMIGLKAKLYHKQRHAEKIQMKKTIKMHEKRNTKQKNDEKTPQGAVPAYLLDREGQSRAKVLSNMIKQKRKEKAGKWEVPLPKVRAQGETEVLKVIRTGKRKKKAWKRMVTKVCFVGDGFTRKPPKYERFIRPMGLRFKKAHVTHPELKATFCLPILGVKKNPSSPLYTTLGVITKGTVIEVNVSELGLVTQGGKVIWGKYAQVTNNPENDGCINAVLLV

SEQ ID NO: 18779 - protein, 435 aa, Homo sapiens
MAMGLMCGRRELLRLLQSGRRVHSVAGPSQWLGKPLTTRLLFPAAPCCCRPHYLFLAASGPRSLSTSAISFAEVQVQAPPVVAATPSPTAVPEVASGETADVVQTAAEQSFAELGLGSYTPVGLIQNLLEFMHVDLGLPWWGAIAACTVFARCLIFPLIVTGQREAARIHNHLPEIQKFSSRIREAKLAGDHIEYYKASSEMALYQKKHGIKLYKPLILPVTQAPIFISFFIALREMANLPVPSLQTGGLWWFQDLTVSDPIYILPLAVTATMWAVLELGAETGVQSSDLQWMRNVIRMMPLITLPITMHFPTAVFMYWLSSNLFSLVQVSCLRIPAVRTVLKIPQRVVHDLDKLPPREGFLESFKKGWKNAEMTRQLREREQRMRNQLELAARGPLRQTFTHNPLLQPGKDNPPNIPSSSSKPKSKYPWHDTLG

SEQ ID NO: 18780 - protein, 286 aa, Homo sapiens
MTCSGKSCALARSSLTSSQGIVAASGSETEDEDSMDIPLDLSSSAGSGKRRRRGNLPKESVQILRDWLYEHRYNAYPSEQEKALLSQQTHLSTLQVCNWFINARRRLLPDMLRKDGKDPNQFTISRRGAKISETSSVESVMGIKNFMPALEETPFHSCTAGPNPTLGRPLSPKPSSPGSVLARPSVICHTTVTALKDVPFSLCQSVGVGQNTDIQQIAAKNFTDTSLMYPEDTCKSGPSTNTQSGLFNTPPPTPPDLNQDFSGFQLLVDVALKRAAEMELQAKLTA

SEQ ID NO: 18781 - protein, 742 aa, Homo sapiens
MADILSQSETLASQDLSGDFKKPALPVSPAARSKAPASSSSNPEEVQKEGPTALQDSNSGEPDIPPPQPDCGDFRSLQEEQSRPPTAVSSPGGPARAPPYQEPPWGGPATAPYSLETLKGGTILGTRSLKGTSYCLFGRLSGCDVCLEHPSVSRYHAVLQHRASGPDGECDSNGPGFYLYDLGSTHGTFLNKTRIPPRTYCRVHVGHVVRFGGSTRLFILQGPEEDREAESELTVTQLKELRKQQQILLEKKMLGEDSDEEEEMDTSERKINAGSQDDEMGCTWGMGEDAVEDDAEENPIVLEFQQEREAFYIKDPKKALQGFFDREGEELEYEFDEQGHSTWLCRVRLPVDDSTGKQLVAEAIHSGKKKEAMIQCSLEACRILDTLGLLRQEAVSRKRKAKNWEDEDFYDSDDDTFLDRTGLIEKKRLNRMKKAGKIDEKPETFESLVAKLNDAERELSEISERLKASSQVLSESPSQDSLDAFMSEMKSGSTLDGVSRKKLHLRTFELRKEQQRLKGLIKIVKPAEIPELKKTETQTTGAENKAKKLTLPLFGAMKGGSKFKLKTGTVGKLPPKRPELPPTLMRMKDEPEVEEEEEEEEEEEKEKEEHEKKKLEDGSLSRPQPEIEPEAAVQEMRPPTDLTHFKETQTHENMSQLSEEEQNKDYQDCSKTTSLCAGPSASKNEYEKSRGELKKKKTPGPGKLPPTLSSKYPEDDPDYCVWVPPEGQSGDGRTHLNDKYGY

SEQ ID NO: 18782 - protein, 115 aa, Homo sapiens
MDTRLLCCAVICLLGAGLSNAGVMQNPRHLVRRRGQEARLRCSPMKGHSHVYWYRQLPEEGLKFMVYLQKENIIDESGMPKERFSAEFPKEGPSILRIQQVVRGDSAAYFCASSP

SEQ ID NO: 18783 - protein, 1171 aa, Homo sapiens
MEPLLLGRGLIVYLMFLLLKFSKAIEIPSSVQQVPTIIKQSKVQVAFPFDEYFQIECEAKGNPEPTFSWTKDGNPFYFTDHRIIPSNNSGTFRIPNEGHISHFQGKYRCFASNKLGIAMSEEIEFIVPSVPKFPKEKIDPLEVEEGDPIVLPCNPPKGLPPLHIYWMNIELEHIEQDERVYMSQKGDLYFANVEEKDSRNDYCCFAAFPRLRTIVQKMPMKLTVNSLKHANDSSSSTEIGSKANSIKQRKPKLLLPPTESGSESSITILKGEILLLECFAEGLPTPQVDWNKIGGDLPKGRETKENYGKTLKIENVSYQDKGNYRCTASNFLGTATHDFHVIVEEPPRWTKKPQSAVYSTGSNGILLCEAEGEPQPTIKWRVNGSPVDNHPFAGDVVFPREISFTNLQPNHTAVYQCEASNVHGTILANANIDVVDVRPLIQTKDGENYATVVGYSAFLHCEFFASPEAVVSWQKVEEVKPLEGRRYHIYENGTLQINRTTEEDAGSYSCWVENAIGKTAVTANLDIRNATKLRVSPKNPRIPKLHMLELHCESKCDSHLKHSLKLSWSKDGEAFEINGTEDGRIIIDGANLTISNVTLEDQGIYCCSAHTALDSAADITQVTVLDVPDPPENLHLSERQNRSVRLTWEAGADHNSNISEYIVEFEGNKEEPGRWEELTRVQGKKTTVILPLAPFVRYQFRVIAVNEVGRSQPSQPSDHHETPPAAPDRNPQNIRVQASQPKEMIIKWEPLKSMEQNGPGLEYRVTWKPQGAPVEWEEETVTNHTLRVMTPAVYAPYDVKVQAINQLGSGPDPQSVTLYSGEDYPDTAPVIHGVDVINSTLVKVTWSTVPKDRVHGRLKGYQINWWKTKSLLDGRTHPKEVNILRFSGQRNSGMVPSLDAFSEFHLTVLAYNSKGAGPESEPYIFQTPEGVPEQPTFLKVIKVDKDTATLSWGLPKKLNGNLTGYLLQYQIINDTYEIGELNDINITTPSKPSWHLSNLNATTKYKFYLRACTSQGCGKPITEESSTLGEGKYAGLYDDISTQGWFIGLMCAIALLTLLLLTVCFVKRNRGGKYSVKEKEDLHPDPEIQSVKDETFGEYSDSDEKPLKGSLRSLNRDMQPTESADSLVEYGEGDHGLFSEDGSFIGAYAGSKEKGSVESNGSSTATFPLRA

SEQ ID NO: 18784 - protein, 220 aa, Homo sapiens
MWVPVVFLTLSVTWIGAAPLILSRIVGGWECEKHSQPWQVLVASRGRAVCGGVLVHPQWVLTAAHCIRNKSVILLGRHSLFHPEDTGQVFQVSHSFPHPLYDMSLLKNRFLRPGDDSSIEPEEFLTPKKLQCVDLHVISNDVCAQVHPQKVTKFMLCAGRWTGGKSTCSGDSGGPLVCNGVLQGITSWGSEPCALPERPSLYTKVVHYRKWIKDTIVANP

SEQ ID NO: 18785 - protein, 130 aa, Homo sapiens
MVARVGLLLRALQLLLWGHLDAQPAERGGQELRKEAEAFLEKYGYLNEQVPKAPTSTRFSDAIRAFQWVSQLPVSGVLDRATLRQMTRPRCGVTDTNSYAAWAERISDLFARHRTKMRRKKRFAKQGEHC

SEQ ID NO: 18786 - protein, 551 aa, Homo sapiens
MSRSLLLWFLLFLLLLPPLPVLLADPGAPTPVNPCCYYPCQHQGICVRFGLDRYQCDCTRTGYSGPNCTIPGLWTWLRNSLRPSPSFTHFLLTHGRWFWEFVNATFIREMLMRLVLTGKKQLPDAQLLARRFLLRRKFIPDPQGTNLMFAFFAQHFTHQFFKTSGKMGPGFTKALGHGVDLGHIYGDNLERQYQLRLFKDGKLKYQVLDGEMYPPSVEEAPVLMHYPRGIPPQSQMAVGQEVFGLLPGLMLYATLWLREHNRVCDLLKAEHPTWGDEQLFQTTRLILIGETIKIVIEEYVQQLSGYFLQLKFDPELLFGVQFQYRNRIAMEFNHLYHWHPLMPDSFKVGSQEYSYEQFLFNTSMLVDYGVEALVDAFSRQIAGRIGGGRNMDHHILHVAVDVIRESREMRLQPFNEYRKRFGMKPYTSFQELVGEKEMAAELEELYGDIDALEFYPGLLLEKCHPNSIFGESMIEIGAPFSLKGLLGNPICSPEYWKPSTFGGEVGFNIVKTATLKKLVCLNTKTCPYVSFRVPDASQDDGPAVERPSTEL

SEQ ID NO: 18787 - protein, 3265 aa, Homo sapiens
MQLLGLLGLLWMLKASPWATGTLSTATSISQVPFPRAEAASAVLSNSPHSRDLAGWPLGVPQLASPAPGHRENAPMTLTTSPHDTLISETLLNSPVSSNTSTTPTSKFAFKVETTPPTVLVYSATTECVYPTSFIITISHPTSICVTTTQVAFTSSYTSTPVTQKPVTTVTSTYSMTTTEKGTSAMTSSPSTTTARETPIVTVTPSSVSATDTTFHTTISSTTRTTERTPLPTGSIHTTTSPTPVFTTLKTAVTSTSPITSSITSTNTVTSMTTTASQPTATNTLSSPTRTILSSTPVLSTETITSGITNTTPLSTLVTTLPTTISRSTPTSETTYTTSPTSTVTDSTTKIAYSTSMTGTLSTETSLPPTSSSLPTTETATTPMTNLVTTTTEISSHSTPSFSSSTIYSTVSTSTTAISSLPPTSGTMVTSTTMTPSSLSTDIPFTTPTTITHHSVGSTGFLTTATDLTSTFTVSSSSAMSTSVIPSSPSIQNTETSSLVSMTSATTPNVRPTFVSTLSTPTSSLLTTFPATYSFSSSMSASSAGTTHTESISSPPASTSTLHTTAESTLAPTTTTSFTTSTTMEPPSTTAATTGTGQTTFTSSTATFPETTTPTPTTDMSTESLTTAMTSPPITSSVTSTNTVTSMTTTTSPPTTTNSFTSLTSMPLSSTPVPSTEVVTSGTINTIPPSILVTTLPTPNASSMTTSETTYPNSPTGPGTNSTTEITYPTTMTETSSTATSLPPTSPLVSTAKTAKTPTTNLVTTTTKTTSHSTTSFTSSTVYSTASTYTTAITSVPTTLGTMVTSTSMISSTVSTGIPTSQPTTITPSSVGISGSLPMMTDLTSVYTVSNMSARPTTVIPSSPTVQNTEISISVSMTSATTPSGGPTFTSTENTPTRSLLTSFPMTHSFSSSMSESSAGTTHTESISSPRGTTSTLHTTVESTPSPTTTTSFTTSTMMEPPSSTVSTTGRGQTTFPSSTATFPETTTLTPTTDISTVSLTTAMTSPPPVSSSITPTNTMTSMRTTTYWPTATNTLSPLTSSILSSTPVPSTEMITSHTTNTTPLSTLVTTLLTTITRSTPTSETTYPTSPTSIVSDSTTEITYSTSITGTLSTATTLPPTSSSLPTTETATMTPTTTLITTTPNTTSLSTPSFTSSTIYSTVSTSTTAISSASPTSGTMVTSTTMTPSSLSTDTPSTTPTTITYPSVGSTGFLTTATDLTSTFTVSSSSAMSTSVIPSSPSIQNTETSSLVSMTSATTPSLRPTITSTDSTLTSSLLTTFPSTYSFSSSMSASSAGTTHTETISSLPASTNTIHTTAESALAPTTTTSFTTSPTMEPPSTTVATTGTGQTTFPSSTATFLETTTLTPTTDFSTESLTTAMTSTPPITSSITPTDTMTSMRTTTSWPTATNTLSPLTSSILSSTPVPSTEVTTSHTTNTNPVSTLVTTLPITITRSTLTSETAYPSSPTSTVTESTTEITYPTTMTETSSTATSLPPTSSLVSTAETAKTPTTNLVTTTTKTTSHSTTSFTSSTIYSTASTPTTAITSVPTTLGTMVTSTSMIPSTVSTGIPTSQPTTITPSSVGISGSLPMMTDLTSVYTVSSMSARPTSVIPSSPTVQNTETSIFVSMMSATTPSGGPTFTSTENTPTRSLLTSFPVTHSFSSSMSASSVGTTHTQSISSPPAITSTLHTTAESTPSPTTTMSFTTFTKMETPSSTVATTGTGQTTFTSSTATSPKTTTLTPTSDISTGSFKTAVSSTPPITSSITSTYTVTSMTTTTPLGPTATNTLPSFTSSVSSSTPVPSTEAITSGTTNTTPLSTLVTTFSNSDTSSTPTSETTYPTSLTSALTDSTTRTTYSTNMTGTLSTVTSLRPTSSSLLTTVTATVPTTNLVTTTTKITSHSTPSFTSSIATTETPSHSTPRFTSSITTTETPSHSTPRFTSSITNTKTTSHSSPSFTSSITTTETTSHNTPSLTSSITTTKTTSHSTPSYTSLITTTTTTSHSTPSFTSSITTTETTSHNTPSLTSSITTTETTSHSTPSFTSSITTETTSHSTPSFTSLITITEITSHSTLSYTTSITTTETPSHSTLSFTSSITTTETTSHSTPSFTSSITTSEMPSHSTPSFTSSITTTENATHSTPNFTSSITTTETTSHSTPSFTSLITTTETTSHRWGTTETTSYSTPSFTSSNTITETTSHSTPSYITSITTTETPSSSTPSFSSSITTTETTSHSTPGFTSSITTTETTSHSTPSFTSSITTTETTSHDTPSFTSSITTSETPSHSTPSSTSLITTTKTTSHSTPSFTSSITTTETTSHSAHSFTSSITTTETTSHNTRSFTSSITTTETNSHSTTSFTSSITTTETTSHSTPSFSSSITTTETPLHSTPGLTSWVTTTKTTSHITPGLTSSITTTETTSHSTPGFTSSITTTETTSESTPSLSSSTIYSTVSTSTTAITSHFTTSETAVTPTPVTPSSLSTDIPTTSLRTLTPSSVGTSTSLTTTTDFPSIPTDISTLPTRTHIISSSPSIQSTETSSLVGTTSPTMSTVRMTLRITENTPISSFSTSIVVIPETPTQTPPVLTSATGTQTSPAPTTVTFGSTDSSTSTLHTLTPSTALSTIVSTSQVPIPSTHSSTLQTTPSTPSLQTSLTSTSEFTTESFTRGSTSTNAILTSFSTIIWSSTPTIIMSSSPSSASITPVFSTTIHSVPSSPYIFSTENVGSASITGFPSLSSSATTSTSSTSSSLTTALTEITPFSYISLPSTTPCPGTITITIVPASPTDPCVEMDPSTEATSPPTTPLTVFPFTTEMVTCPTSISIQTTLTTYMDTSSMMPESESSISPNASSSTGTGTVPTNTVFTSTRLPTSETWLSNSSVIPLPLPGVSTIPLTMKPSSSLPTILRTSSKSTHPSPPTTRTSETPVATTQTPTTLTSRRTTRITSQMTTQSTLTTTAGTCDNGGTWEQGQCACLPGFSGDRCQLQTRCQNGGQWDGLKCQCPSTFYGSSCEFAVEQVDLDVVETEVGMEVSVDQQFSPDLNDNTSQAYRDFNKTFWNQMQKIFADMQGFTFKGVEILSLRNGSIVVDYLVLLEMPFSPQLESEYEQVKTTLKEGLQNASQDVNSCQDSQTLCFKPDSIKVNNNSKTELTPAAICRRAAPTGYEEFYFPLVEATRLRCVTKCTSGVDNAIDCHQGQCVLETSGPTCRSWDQDRKWFETWDEEVVGTFSNWGFEDDGTDKDTNFYVALENVDTTMKVHIKRPEMTSSSV

SEQ ID NO: 18788 - protein, 268 aa, Homo sapiens [sequence omitted]

SEQ ID NO: 18789 - protein, 41 aa, Homo sapiens
MPQLYIYIRLLGAYLFIISRVQGQNLDSMLHGTGMKSDSDQ

SEQ ID NO: 18790 - protein, 213 aa, Homo sapiens
MTPGTQSPFFLLLLLTVLTGSGHASSTPGGEKETSATQRSSVPSSTEKNAVSMTSSVLSSHSPGSGSSTTQGQDVTLAPATEPASGSAATWGQDVTSVPVTRPALGSTTPPAGVPGWGIALLVLVCVLVALAIVYLIALAVCQCRRKNYGQLDIFPARDTYHPMSEYPTYHTHGRYVPPSSTDRSPYEKVSAGNGGSSLSYTNPAVAATSANL

SEQ ID NO: 18791 - protein, 71 aa, Homo sapiens
MEKILILLLVALSVAYAAPGPRGIIINLTLYGIYYKCPCERGLTCEGDKTIVGSITNTNFGICHDAGRSKQ

SEQ ID NO: 18792 - protein, 668 aa, Homo sapiens
MAVYRAALGASLAAARLLPLGRCSPSPAPRSTLSGAAMEPAPRWLAGLRFDNRALRALPVEAPPPGPEGAPSAPRPVPGACFTRVQPTPLRQPRLVALSEPALALLGLGAPPAREAEAEAALFFSGNALLPGAEPAAHCYCGHQFGQFAGQLGDGAAMYLGEVCTATGERWELQLKGAGPTPFSRQADGRKVLRSSIREFLCSEAMFHLGVPTTRAGACVTSESTVVRDVFYDGNPKYEQCTVVLRVASTFIRFGSFEIFKSADEHTGRAGPSVGRNDIRVQLLDYVISSFYPEIQAAHASDSVQRNAAFFREVTRRTARMVAEWQCVGFCHGVLNTDNMSILGLTIDYGPFGFLDRYDPDHVCNASDNTGRYAYSKQPEVCRWNLRKLAEALQPELPLELGEAILAEEFDAEFQRHYLQKMRRKLGLVQVELEEDGALVSKLLETMHLTGADFTNTFYLLSSFPVELESPGLAEFLARLMEQCASLEELRLAFRPQMDPRQLSMMLMLAQSNPQLFALMGTRAGIARELERVEQQSRLEQLSAAELQSRNQGHWADWLQAYRARLDKDLEGAGDAAAWQAEHVRVMHANNPKYVLRNYIAQNAIEAAERGDFSEVRRVLKLLETPYHCEAGAATDAEATEADGADGRQRSYSSKPPLWAAELCVTSS

SEQ ID NO: 18793 - protein, 1453 aa, Homo sapiens
MKSCGVSLATAAAAAAAFGDEEKKMAAGKASGESEEASPSLTAEEREALGGLDSRLFGFVRFHEDGARTKALLGKAVRCYESLILKAEGKVESDFFCQLGHFNLLLEDYPKALSAYQRYYSLQSDYWKNAAFLYGLGLVYFHYNAFQWAIKAFQEVLYVDPSFCRAKEIHLRLGLMFKVNTDYESSLKHFQLALVDCNPCTLSNAEIQFHIAHLYETQRKYHSAKEAYEQLLQTENLSAQVKATVLQQLGWMHHTVDLLGDKATKESYAIQYLQKSLEADPNSGQSWYFLGRCYSSIGKVQDAFISYRQSIDKSEASADTWCSIGVLYQQQNQPMDALQAYICAVQLDHGHAAAWMDLGTLYESCNQPQDAIKCYLNATRSKSCSNTSALAARIKYLQAQLCNLPQGSLQNKTKLLPSIEEAWSLPIPAELTSRQGAMNTAQQACKPHHPNTEPVLGLSQTPISQQSLPLHMIPSSQVDDLSSPAKRKRTSSPTKNTSDNWSGGHAVSHPPVQQQAHSWCLTPQKLQHLEQLRANRNNLNPAQKLMLEQLESQFVLMQQHQMRPTGVAQVRSTGIPNGPTADSSLPTNSVSGQQPQLALTRVPSVSQPGVRPACPGQPLANGPFSAGHVPCSTSRTLGSTDTILIGNNHITGSGSNGNVPYLQRNALTLPHNRTNLTSSAEEPWKNQLSNSTQGLHKGQSSHSAGPNGERPLSSTGPSQHLQAAGSGIQNQNGHPTLPSNSVTQGAALNHLSSHTATSGGQQGITLTKESKPSGNILTVPETSRHTGETPNSTASVEGLPNHVHQMTADAVCSPSHGDSKSPGLLSSDNPQLSALLMGKANNNVGTGTCDKVNNIHPAVHTKTDNSVASSPSSAISTATPSPKSTEQTTTNSVTSLNSPHSGLHTINGEGMEESQSPMKTDLLLVNHKPSPQIIPSMSVSIYPSSAEVLKACRNLGKNGLSNSSILLDKCPPPRPPSSPYPPLPKDKLNPPTPSIYLENKRDAFFPPLHQFCTNPNNPVTVIRGLAGALKLDLGLFSTKTLVEANNEHMVEVRTQLLQPADENWDPTGTKKIWHCESNRSHTTIAKYAQYQASSFQESLREENEKRSHHKDHSDSESTSSDNSGRRRKGPFKTIKFGTNIDLSDDKKWKLQLHELTKLPAFVRVVSAGNLLSHVGHTILGMNTVQLYMKVPGSRTPGHQENNNFCSVNINIGPGDCEWFVVPEGYWGVLNDFCEKNNLNFLMGSWWPNLEDLYEANVPVYRFIQRPGDLVWINAGTVHWVQAIGWCNNIAWNVGPLTACQYKLAVERYEWNKLQSVKSIVPMVHLSWNMARNIKVSDPKLFEMIKYCLLRTLKQCQTLREALIAAGKEIIWHGRTKEEPAHYCSICEVEVFDLLFVTNESNSRKTYIVHCQDCARKTSGNLENFVVLEQYKMEDLMQVYDQFTLAPPLPSASS

SEQ ID NO: 18794 - protein, 672 aa, Homo sapiens; identical to SEQ ID NO: 15218

SEQ ID NO: 18795 - protein, 92 aa, Homo sapiens
MKLCVTVLSLLVLVAAFCSLALSAPMGSDPPTACCFSYTARKLPRNFVVDYYETSSLCSQPAVVFQTKRGKQVCADPSESWVQEYVYDLELN

SEQ ID NO: 18796 - protein, 1026 aa, Homo sapiens [sequence omitted]

SEQ ID NO: 18797 - protein, 584 aa, Homo sapiens
MGPADSWGHHWMGILLSASLCTVWSPPAAAQLTLNANPLDATQSEDVVLPVFGTPRTPQIHGRSRELAKPSIAVSPGTAIEQKDMVTFYCTTKDVNITIHWVSNNLSIVFHERMQLSKDGKILTILIVQREDSGTYQCEARDALLSQRSDPIFLDVKYGPDPVEIKLESGVASGEVVEVMEGSSMTFLAETKSHPPCAYTWFLLDSILSHTTRTFTIHAVSREHEGLYRCLVSNSATHLSSLGTLKVRVLETLTMPQVVPSSLNLVENARSVDLTCQTVNQSVNVQWFLSGQPLLPSEHLQLSADNRTLIIHGLQRNDTGPYACEVWNWGSRARSEPLELTINYGPDQVHITRESASEMISTIEAELNSSLTLQCWAESKPGAEYRWTLEHSTGEHLGEQLIIRALTWEHDGIYNCTASNSLTGLARSTSVLVKVVGPQSSSLSSGAIAGIVIGILAVIAVASELGYFLCIRNARRPSRKTTEDPSHETSQPIPKEEHPTEPSSESLSPEYRNISQLQGRIRVELMQPPDLPEETYETKLPSASRRGNSFSPWKPPPKPLMPPLRLVSTVPKNMESIYEVFMPH

SEQ ID NO: 18798 - protein, 72 aa, Homo sapiens
MARLLQASCLLSLLLAGFVSQSRGQEKSKMDCHGGISGTIYEYGALTIDGEEYIPFKQYAGKYVLFVNVASY

SEQ ID NO: 18799 - protein, 400 aa, Homo sapiens
MDFGLALLLAGLLGLLLGQSLQVKPLQVEPPEPVVAVALGASRQLTCRLACADRGASVQWRGLDTSLGAVQSDTGRSVLTVRNASLSAAGTRVCVGSCGGRTFQHTVQLLVYAFPDQLTVSPAALVPGDPEVACTAHKVTPVDPNALSFSLLVGGQELEGAQALGPEVQEEEEEPQGDEDVLFRVTERWRLPPLGTPVPPALYCQATMRLPGLELSHRQAIPVRWVPWRPTRSPALTSTSESHSPTSPEPPDTTSPESPDTTSPESPDTTSQEPPDTTSPEPPDKTSPEPAPQQGSTHTPRSPGSTRTRRPEISQAGPTQGEVIPTGSSKPAGDQLPAALWTSSAVLGLLLLALPTYHLWKRCRHLAEDDTHPPASLRLLPQVSAWAGLRGTGQVGISPS

SEQ ID NO: 18800 - protein, 205 aa, Homo sapiens
MSIMSYNGGAVMAMKGKNCVAIAADRRFGIQAQMVTTDFQKIFPMGDRLYIGLAGLATDVQTVAQRLKFRLNLYELKEGRQIKPYTLMSMVANLLYEKRFGPYYTEPVIAGLDPKTFKPFICSLDLIGCPMVTDDFVVSGTCAEQMYGMCESLWEPNMDPDHLFETISQAMLNAVDRDAVSGMGVIVHIIEKDKITTRTLKARMD

SEQ ID NO: 18801 - protein, 670 aa, Homo sapiens
MPHAFKPGDLVFAKMKGYPHWPARIDDIADGAVKPPPNKYPIFFFGTHETAFLGPKDLFPYDKCKDKYGKPNKRKGFNEGLWEIQNNPHASYSAPPPVSSSDSEAPEANPADGSDADEDDEDRGVMAVTAVTATAASDRMESDSDSDKSSDNSGLKRKTPALKMSVSKRARKASSDLDQASVSPSEEENSESSSESEKTSDQDFTPEKKAAVRAPRRGPLGGRKKKKAPSASDSDSKADSDGAKPEPVAMARSASSSSSSSSSSDSDVSVKKPPRGRKPAEKPLPKPRGRKPKPERPPSSSSSDSDSDEVDRISEWKRRDEARRRELEARRRREQEEELRRLREQEKEEKERRRERADRGEAERGSGGSSGDELREDDEPVKKRGRKGRGRGPPSSSDSEPEAELEREAKKSAKKPQSSSTEPARKPGQKEKRVRPEEKQQAKPVKVERTRKRSEGFSMDRKVEKKKEPSVEEKLQKLHSEIKFALKVDSPDVKRCLNALEELGTLQVTSQILQKNTDVVATLKKIRRYKANKDVMEKAAEVYTRLKSRVLGPKIEAVQKVNKAGMEKEKAEEKLAGEELAGEEAPQEKAEDKPSTDLSAPVNGEATSQKGESAEDKEHEEGRDSEEGPRCGSSEDLHDVREGPDLDRPGSDRQERERARGDSEALDEES

SEQ ID NO: 18802 - protein, 720 aa, Homo sapiens
MELGCWTQLGLTFLQLLLISSLPREYTVINEACPGAEWNIMCRECCEYDQIECVCPGKREVVGYTIPCCRNEENECDSCLIHPGCTIFENCKSCRNGSWGGTLDDFYVKGFYCAECRAGWYGGDCMRCGQVLRAPKGQILLESYPLNAHCEWTIHAKPGFVIQLRFVMLSLEFDYMCQYDYVEVRDGDNRDGQIIKRVCGNERPAPIQSIGSSLHVLFHSDGSKNFDGFHAIYEEITACSSSPCFHDGTCVLDKAGSYKCACLAGYTGQRCENLLEERNCSDPGGPVNGYQKITGGPGLINGRHAKIGTVVSFFCNNSYVLSGNEKRTCQQNGEWSGKQPICIKACREPKISDLVRRRVLPMQVQSRETPLHQLYSAAFSKQKLQSAPTKKPALPFGDLPMGYQHLHTQLQYECISPFYRRLGSSRRTCLRTGKWSGRAPSCIPICGKIENITAPKTQGLRWPWQAAIYRRTSGVHDGSLHKGAWFLVCSGALVNERTVVVAAHCVTDLGKVTMIKTADLKVVLGKFYRDDDRDEKTIQSLQISAIILHPNYDPILLDADIAILKLLDKARISTRVQPICLAASRDLSTSFQESHITVAGWNVLADVRSPGFKNDTLRSGVVSVVDSLLCEEQHEDHGIPVSVTDNMFCASWEPTAPSDICTAETGGIAAVSFPGRASPEPRWHLMGLVSWSYDKTCSHRLSTAFTKVLPFKDWIERNMK

SEQ ID NO: 18803 - protein, 421 aa, Homo sapiens [sequence omitted]

SEQ ID NO: 18804 - protein, 353 aa, Homo sapiens [sequence omitted]

SEQ ID NO: 18805 - protein, 309 aa, Homo sapiens; identical to SEQ ID NO: 6439

SEQ ID NO: 18806 - protein, 1675 aa, Homo sapiens
MFRQFYLWTCLASGIILGSLFEICLGQYDDDCKLARGGPPATIVAIDEESRNGTILVDNMLIKGTAGGPDPTIELSLKDNVDYWVLMDPVKQMLFLNSTGRVLDRDPPMNIHSIVVQVQCINKKVGTIIYHEVRIVVRDRNDNSPTFKHESYYATVNELTPVGTTIFTGFSGDNGATDIDDGPNGQIEYVIQYNPDDPTSNDTFEIPLMLTGNIVLRKRLNYEDKTRYFVIIQANDRAQNLNERRTTTTTLTVDVLDGDDLGPMFLPCVLVPNTRDCRPLTYQAAIPELRTPEELNPIIVTPPIQAIDQDRNIQPPSDRPGILYSILVGTPEDYPRFFHMHPRTAELSLLEPVNRDFHQKFDLVIKAEQDNGHPLPAFAGLHIEILDENNQSPYFTMPSYQGYILESAPVGATISDSLNLTSPLRIVALDKDIEDTKDPELHLFLNDYTSVFTVTQTGITRYLTLLQPVDREEQQTYTFSITAFDGVQESEPVIVNIQVMDANDNTPTFPEISYDVYVYTDMRPGDSVIQLTAVDADEGSNGEITYEILVGAQGDFIINKTTGLITIAPGVEMIVGRTYALTVQAADNAPPAERRNSICTVYIEVLPPNNQSPPRFPQLMYSLEISEAMRVGAVLLNLQATDREGDSITYAIENGDPQRVFNLSETTGILTLGKALDRESTDRYILIITASDGRPDGTSTATVNIVVTDVNDNAPVFDPYLPRNLSVVEEEANAFVGQVKATDPDAGINGQVHYSLGNFNNLFRITSNGSIYTAVKLNREVRDYYELVVVATDGAVHPRHSTLTLAIKVLDIDDNSPVFTNSTYTVLVEENLPAGTTILQIEAKDVDLGANVSYRIRSPEVKHFFALHPFTGELSLLRSLDYEAFPDQEASITFLVEAFDIYGTMPPGIATVTVIVKDMNDYPPVFSKRIYKGMVAPDAVKGTPITTVYAEDADPPGLPASRVRYRVDDVQFPYPASIFEVEEDSGRVITRVNLNEEPTTIFKLVVVAFDDGEPVMSSSATVKILVLHPGEIPRFTQEEYRPPPVSELATKGTMVGVISAAAINQSIVYSIVSGNEEDTFGINNITGVIYVNGPLDYETRTSYVLRVQADSLEVVLANLRVPSKSNTAKVYIEIQDENNHPPVFQKKFYIGGVSEDARMFTSVLRVKATDKDTGNYSVMAYRLIIPPIKEGKEGFVVETYTGLIKTAMLFHNMRRSYFKFQVIATDDYGKGLSGKADVLVSVVNQLDMQVIVSNVPPTLVEKKIEDLTEILDRYVQEQIPGAKVVVESIGARRHGDAFSLEDYTKCDLTVYAIDPQTNRAIDRNELFKFLDGKLLDINKDFQPYYGEGGRILEIRTPEAVTSIKKRGESLGYTEGALLALAFIIILCCIPAILVVLVSYRQFKVRQAECTKTARIQAALPAAKPAVPAPAPVAAPPPPPPPPPGAHLYEELGDSSMYEMPQYGSRRRLLPPAGQEEYGEVVGEAEEEYEEEEWARKRMIKLVVDREYETSSTGEDSAPECQRNRLHHPSIHSNINGNIYIAQNGSVVRTRRACLTDNLKVASPVRLGGPFKKLDKLAVTHEENVPLNTLSKGPFSTEKMNARPTLVTFAPCPVGTDNTAVKPLRNRLKSTVEQESMIDSKNIKEALEFHSDHTQSDDEELWMGPWNNLHIPMTKL

SEQ ID NO: 18807 - protein, 55 aa, Homo sapiens
MPWLLSAPKLVPAVANVRGLSGSYFVTQAGVQWRDPITLQPMSSRLKQSFYQLPE

SEQ ID NO: 18808 - protein, 241 aa, Homo sapiens
MAGSPTCLTLIYILWQLTEHLSKPKVTMGLQSNKNGTCVTNLTCCMEHGEEDVIYTWKALGQAANESHNGSILPISWRWGESDMTFICVARNPVSRNFSSPILARKLCEGDCLSPLHRRLCPGAADDPDSSMVLLCLLLVPLLLSLFVLGLFLWFLKRERQEEYIEEKKRVDICRETPNICPHSGENTEYDTIPHTNRTILKEDPANTVYSTVEIPKKMENPHSLLTMPDTPRLFAYENVI

SEQ ID NO: 18809 - protein, 575 aa, Homo sapiens
MQSPWKILTVAPLFLLLSLQSSASPANDDQSRPSLSNGHTCVGCVLVVSVIEQLAQVHNSTVQASMERLCSYLPEKLFLKTTCYLVIDKFGSDIIKLLSADMNADVVCHTLEFCKQNTGQPLCHLYPLPKETWKFTLQKARQIVKKSPILKYSRSGSDICSLPVLAKICQKIKLAMEQSVPFKDVDSDKYSVFPTLRGYHWRGRDCNDSDESVYPGRRPNNWDVHQDSNCNGIWGVDPKDGVPYEKKFCEGSQPRGIILLGDSAGAHFHISPEWITASQMSLNSFINLPTALTNELDWPQLSGATGFLDSTVGIKEKSIYLRLWKRNHCNHRDYQNISRNGASSRNLKKFIESLSRNKVLDYPAIVIYAMIGNDVCSGKSDPVPAMTTPEKLYSNVMQTLKHLNSHLPNGSHVILYGLPDGTFLWDNLHNRYHPLGQLNKDMTYAQLYSFLNCLQVSPCHGWMSSNKTLRTLTSERAEQLSNTLKKIAASEKFTNFNLFYMDFAFHEIIQEWQKRGGQPWQLIEPVDGFHPNEVALLLLADHFWKKVQLQWPQILGKENPFNPQIKQVFGDQGGH

SEQ ID NO: 18810 - protein, 139 aa, Homo sapiens
MSAVLLLALLGFILPLPGVQALLCQFGTVQHVWKVSDLPRQWTPKNTSCDSGLGCQDTLMLIESGPQVSLVLSKGCTEAKDQEPRVTEHRMGPGLSLISYTFVCRQEDFCNNLVNSLPLWAPQPPAGACGRVGRRGRGC

SEQ ID NO: 18811 - protein, 1267 aa, Homo sapiens
MLVGQGAGPLGPAVVTAAVVLLLSGVGPAHGSEDIVVGCGGFVKSDVEINYSLIEIKLYTKHGTLKYQTDCAPNNGYFMIPLYDKGDFILKIEPPLGWSFEPTTVELHVDGVSDICTKGGDINFVFTGFSVNGKVLSKGQPLGPAGVQVSLRNTGTEAKIQSTVTQPGGKFAFFKVLPGDYEILATHPTWALKEASTTVRVTNSNANAASPLIVAGYNVSGSVRSDGEPMKGVKFLLFSSLVTKEDVLGCNVSPVPGFQPQDESLVYLCYTVSREDGSFSFYSLPSGGYTVIPFYRGERITFDVAPSRLDFTVEHDSLKIEPVFHVMGFSVTGRVLNGPEGDGVPEAVVTLNNQIKVKTKADGSFRLENITTGTYTIHAQKEHLYFETVTIKIAPNTPQLADIIATGFSVCGQISIIRFPDTVKQMNKYKVVLSSQDKDKSLVTVETDAHGSFCFKAKPGTYKVQVMVPEAETRAGLTLKPQTFPLTVTNRPMMDVAFVQFLASVSGKVSCLDTCGDLLVTLQSLSRQGEKRSLQLSGKVNAMTFTFDNVLPGKYKISIMHEDWCWKNKSLEVEVLEDDMSAVEFRQTGYMLRCSLSHAITLEFYQDGNGRENVGIYNLSKGVNRFCLSKPGVYKVTPRSCHRFEQAFYTYDTSSPSILTLTAIRHHVLGTITTDKMMDVTVTIKSSIDSEPALVLGPLKSVQELRREQQLAEIEARRQEREKNGNEEGEERMTKPPVQEMVDELQGPFSYDFSYWARSGEKITVTPSSKELLFYPPSMEAVVSGESCPGKLIEIHGKAGLFLEGQIHPELEGVEIVISEKGASSPLITVFTDDKGAYSVGPLHSDLEYTVTSQKEGYVLTAVEGTIGDFKAYALAGVSFEIKAEDDQPLPGVLLSLSGGLFRSNLLTQDNGILTFSNLSPGQYYFKPMMKEFRFEPSSQMIEVQEGQNLKITITGYRTAYSCYGTVSSLNGEPEQGVAMEAVGQNDCSIYGEDTVTDEEGKFRLRGLLPGCVYHVQLKAEGNDHIERALPHHRVIEVGNNDIDDVNIIVFRQINQFDLSGNVITSSEYLPTLWVKLYKSENLDNPIQTVSLGQSLFFHFPPLLRDGENYVVLLDSTLPRSQYDYILPQVSFTAVGYHKHITLIFNPTRKLPEQDIAQGSYIALPLTLLVLLAGYNHDKLIPLLLQLTSRLQGVRALGQAASDNSGPEDAKRQAKKQKTRRTLRLQGEFQLTWCLVPWRGTLGIHLFSSLPFASEILLETTATCIHY

SEQ ID NO: 18812 - protein, 1207 aa, Homo sapiens
MASVAWAVLKVLLLLPTQTWSPVGAGNPPDCDSPLASALPRSSFSSSSELSSSHGPGFSRLNRRDGAGGWTPLVSNKYQWLQIDLGERMEVTAVATQGGYGSSDWVTSYLLMFSDGGRNWKQYRREESIWGFPGNTNADSVVHYRLQPPFEARFLRFLPLAWNPRGRIGMRIEVYGCAYKSEVVYFDGQSALLYTLDKKPLKPIRDVISLKFKAMQSNGILLHREGQHGNHITLELIKGKLVFFLNSGNAKLPSTIAPVTLTLGSLLDDQHWHSVLIELLDTQVNFTVDKHTHHFQAKGDSSNLDLNFEISFGGILSPGRSRAFTRKSFHGCLENLYYNGVDVTELAKKHKPQILMMGNVSFSCPQPQTVPVTFLSSRSYLALPGNSGEDKVSVTFQFRTWNRAGHLLFGELQRGSGSFVLFLKDGKLKLSLFQAGQSPRNVTAGAGLNDGQWHSVSFSAKWSHMNVVVDDDTAVQPLVAVLIDSGDTYYFGGCLGNSSGSGCKSPLGGFQGCLRLITIGDKAVDPILVQQGALGSFRDLQIDSCGITDRCLPSYCEHGGECSQSWDTFSCDCLGTGYTGETCHSSLYEQSCEAHKHRGNPSGLYYIDADGSGPLGPFLVYCNMTDSAWTVVRHGGPDAVTLRGAPSGHPLSAVSFAYAAGAGQLRAAVNLAERCEQRLALRCGTARRPDSRDGTPLSWWVGRTNETHTSWGGSLPDAQKCTCGLEGNCIDSQYYCNCDAGQNEWTSDTIVLSQKEHLPVTQIVMTDTGQPHSEADYTLGPLLCRGDKSFWNSASFNTETSYLHFPAFHGELTADVCFFFKTTVSSGVFMENLGITDFIRIELRAPTEVTFSFDVGNGPCEVTVQSPTPFNDNQWHHVRAERNVKGASLQVDQLPQKMQPAPADGHVRLQLNSQLFIEISAYFATGSSMTYHFQEHYTLSENSSSLVSSLHRDVTLTREMITLSFRTTRTPSLLLYVSSFYEEYLSVILANNGSLQIRYKLDRHQNPDAFTFDFKNMADGQLHQVKINREEAVVMVEVNQSAKKQVILSSGTEFNAVKSLILGKVLEAAGADPDTRRAATSGFTGCLSAVRFGCAAPLKAALRPSGPSRVTVRGHVAPMARCAAGAASGSPARELAPRLAGGAGRSGPVDEGEPLVNADRRDSAVIGGVIAVEIFILLCITAIAIRIYQQRKLRKENESKVSKKEEC

SEQ ID NO: 18813 - protein, 247 aa, Homo sapiens
MLLWPLRGWAARALRCFGPGSRGSPASGPGPRRVQRRAWPPDKEQEKEKKSVICVEGNIASGKTTCLEFFSNATDVEGLMYHDASRWGLTLQTYVQLTMLDRHTRPQVSSVRLMERSIHSARYIFVENLYRSGKMPEVDYVVLSEWFDWILRNMDVSVDLIVYLRTNPETCYQRLKKRCREEEKVIPLEYLEAIHHLHEEWLIKGSLFPMAAPVLVIEADHHMERMLELFEQNRDRILTPENRKHCP

SEQ ID NO: 18814 - protein, 130 aa, Homo sapiens; identical to SEQ ID NO: 4209

SEQ ID NO: 18815 - protein, 871 aa, Homo sapiens
MLRKVRSWTEIWRWATLLFLFYHLGYVCGQIRYPVPEESQEGTFVGNVAQDFLLDTDSLSARRLQVAGEVNQRHFRVDLDSGALLIKNPIDREALCGLSASCIVPLEFVTEGPLEMYRAEVEIVDVNDHAPRFPRQQLDLEIGEAAPPGQRFPLEKAQDADVGSNSISSYRLSSNEHFALDVKKRSDGSLVPELLLEKPLDREKQSDYRLVLTAVDGGNPPRSGTAELRVSVLDVNDNAPAFQQSSYRISVLESAPAGMVLIQLNASDPDLGPSGNVTFYFSGHTPDRVRNLFSLHPTTGKLTLLGPLDFESENYYEFDVRARDGGSPAMEQHCSLRVDLLDVNDNAPYITVTSELGTLPESAEPGTVVALISVQDPDSGSNGDVSLRIPDHLPFALKSAFRNQFSLVTAGPLDREAKSSYDIMVTASDAGNPPLSTHRTIFLNISDVNDNPPSFFQRSHEVFVPENNRPGDLLCSLAASDPDSGLNALISYSLLEPRNRDVSASSFISLNPQTGAVHATRSFDYEQTQTLQFEVQARDRGNPPLSSTVTVRLFVLDLNDNAPAVLRPRARPGSLCPQALPPSVGAGHLITKVTAVDLDSGYNAWVSYQLLEAPDPSLFAVSRYAGEVRTAVPIPADLPPQKLVIVVKDSGSPPLSTSVTLLVSLEEDTHPVVPDLRESSAPREGESRLTLYLAVSLVAICFVSFGSFVALLSKCLRGAACGVTCFPAGTCACLTRSRRREGLPPSNGILRIQLGSDDPIKFVDVGGHSHGCTPLASAPTRSDSFMMVKSPSAPMAGEPVRPSCPPSDLLYGLEVRPLQAQQMLEGYSDPGIWLGHVLESTGLSVSAHSDVTIFVRGNYVVDAVLCNCFVN

SEQ ID NO: 18816 - protein, 162 aa, Homo sapiens
MDPFVVLVLCLSCLLLLSIWRQSSGRGKLPPGPTPLPVIGNILQIDIKDVSKSLTNLSKIYGPVFTLYFGLERMVVLHGYEVVKEALIDLGEEFSGRGHFPLAERANRGFGIVFSNGKRWKEIRRFSLMTLRNFGMGKRSIEDRVQEEARCLVEELRKTKGG

SEQ ID NO: 18817 - protein, 717 aa, Homo sapiens
MVWCLGLAVLSLVISQGADGRGKPEVVSVVGRAGESVVLGCDLLPPAGRPPLHVIEWLRFGFLLPIFIQFGLYSPRIDPDYVGRVRLQKGASLQIEGLRVEDQGWYECRVFFLDQHIPEDDFANGSWVHLTVNSPPQFQETPPAVLEVQELEPVTLRCVARGSPLPHVTWKLRGKDLGQGQGQVQVQNGTLRIRRVERGSSGVYTCQASSTEGSATHATQLLVLGPPVIVVPPKNSTVNASQDVSLACHAEAYPANLTYSWFQDNINVFHISRLQPRVRILVDGSLRLLATQPDDAGCYTCVPSNGLLHPPSASAYLTVLYPAQVTAMPPETPLPIGMPGVIRCPVRANPPLLFVSWTKDGKALQLDKFPGWSQGTEGSLIIALGNEDALGEYSCTPYNSLGTAGPSPVTRVLLKAPPAFIERPKEEYFQEVGRELLIPCSAQGDPPPAAPPSPLPGPGPLLQYLSLPFFREMNVDGDWPPLEEPSPAAPPDYMDTRRCPTSSFLRSPETPPVSPRESLPGAVVGAGATAEPPYTALADWTLRERLLPGLLPAAPRGSLTSQSSGRGSASFLRPPSTAPSAGGSYLSPAPGDTSSWASGPERWPRREHVVTVSKRRNTSVDENYEWDSEFPGDMELLETLHLGLASSRLRPEAEPELGVKTPEEGCLLNTAHVTGPEARCAALREEFLAFRRRRDATRARLPAYRQPVPHPEQATLL

SEQ ID NO: 18818 - protein, 181 aa, Homo sapiens
MTRTRAALLLFTALATSLGFNLDTEELTAFRVDSAGFGDSVVQYANSWVVVGAPQKITAANQTGGLYQCGYSTGACEPIGLQVPPEAVNMSLGLSLASTTSPSQLLLTQRLPVSRQGECRDHQGFEELTHIQLGVRWARDSLARVDQKEGIWKKSYHVLQWFLTLLPAHPADRPHAAGPFL

SEQ ID NO: 18819 - protein, 584 aa, Homo sapiens
MGPADSWGHHWMGILLSASLCTVWSPPAAAQLTLNANPLDATQSEDVVLPVFGTPRTPQIHGRSRELAKPSIAVSPGTAIEQKDMVTFYCTTKDVNITIHWVSNNLSIVFHERMQLSKDGKILTILIVQREDSGTYQCEARDALLSQRSDPIFLDVKYGPDPVEIKLESGVASGEVVEVMEGSSMTFLAETKSHPPCAYTWFLLDSILSHTTRTFTIHAVSREHEGLYRCLVSNSATHLSSLGTLKVRVLETLTMPQVVPSSLNLVENARSVDLTCQTVNQSVNVQWFLSGQPLLPSEHLQLSADNRTLIIHGLQRNDTGPYACEVWNWGSRARSEPLELTINYGPDQVHITRESASEMISTIEAELNSSLTLQCWAESKPGAEYRWTLEHSTGEHLGEQLIIRALTWEHDGIYNCTASNSLTGLARSTSVLVKVVGPQSSSLSSGAIAGIVIGILAVIAVASELGYFLCIRNARRPSRKTTEDPSHETSQPIPKEEHPTEPSSESLSPEYRNISQLQGRIRVELTKLPSASRRGNSFSPWKPPPKPLMPPLRLVSTVPKNMESIYEELVNPEPNTYIQINPSV

SEQ ID NO: 18820 - protein, 369 aa, Homo sapiens
MYGKGKSNSSAVPSDSQAREKLALYVYEYLLHVGAQKSAQTFLSEIRWEKNITLGEPPGFLHSWWCVFWDLYCAAPERRETCEHSSEAKAFHDYSAAAAPSPVLGNIPPGDGMPVGPVPPGFFQPFMSPRYPGGPRPPLRIPNQALGGVPGSQPLLPSGMDPTRQQGHPNMGGPMQRMTPPRGMVPLGPQSDPWLSLQNYGGAMRPPLNALGGPGMPGMNMGPGGGRPWPNPTNANSIPYSSASPGNYVGPPGGGGPPGTPIMPSPADSTNSGDNMYTLMNAVPPGPNRPNFPMGPGSDGPMGGLGGMESHHMNGSLGSGDMDSISKNSPNNMSLSNQPGTPRDDGEMGGNFLNPFQSESYSPSMTMSV

SEQ ID NO: 18821 - protein, 295 aa, Homo sapiens
MDLWQLLLTLALAGSSDAFSGSEATAAILSRAPWSLQSVNPGLKTNSSKEPKFTKCRSPERETFSCHWTDEVHHGTKNLGPIQLFYTRRNTQEWTQEWKECPDYVSAGENSCYFNSSFTSIWIPYCIKLTSNGGTVDEKCFSVDEIVQPDPPIALNWTLLNVSLTGIHADIQVRWEAPRNADIQKGWMVLEYELQYKEVNETKWKMMDPILTTSVPVYSLKVDKEYEVRVRSKQRNSGNYGEFSEVLYVTLPQMSQFTCEEDFYFPWLLIIIFGIFGLTVMLFVFLFSKQQRKEN

SEQ ID NO: 18822 - protein, 112 aa, Homo sapiens
MEASALTSSAVTSVAKVVRVASGSAVVLPLVVAMAAVPMVLSAMGFTAAGIASSSIAAKMMSAAAIANGGGVASGSLVATLQSLGATGLSGLTKFILGSIGSAIAAVIARFY

SEQ ID NO: 18823 - protein, 61 aa, Homo sapiens [sequence omitted]

SEQ ID NO: 18824 - protein, 80 aa, Homo sapiens
MTPGTQSPFFLLLLLTVLTATTAPKPATVVTGSGHASSTPGGEKETSATQRSSVPSSTEKNAIPAPTTTKSCRETFLKCE

SEQ ID NO: 18825 - protein, 292 aa, Homo sapiens
MAAGRLLLYTGLSLALCALGMLAVAICSDHWYETDARKHRDRCKAFNTRRVDPGFIYNNNNNLPLRASRSRLDRWEGKLLRARNRRQLFAMSPADECSRQYNSTNMGLWRKCHRQGFDPEIAALIRKGEIERCTYIKYHYSSATIPRNLTFNVTKTLRCMYCMYLRRMTAGFMGMAVAIILFGWIIGVLGCCWDRGLMQYVAGLLFLMGGTFCIISLCTCVAGINFELSRYPRYLYGLPDDISHGYGWSMFCAWGGLGLTLISGFFCTLAPSVQPVPRTNYPKSRPENGTVC

SEQ ID NO: 18826 - protein, 211 aa, Homo sapiens
MQAMLHFGGRLAQSLRGTSKEAASDPSDSPNLPTPGSWWEQLTQASRVYASGGTEGFPLSRWAPGRHGTAAEEGAQERPLPTDEMAPGRGLWLGRLFGVPGGPAENENGALKSRRPSSWLPPTVSVLALVKRGAPPEMPSPQELEASAPRMVQTHRAVRALCDHTAARPDQLSFRRGEVLRVITTVDEDWLRCGRDGMEGLVPVGYTSLVL

SEQ ID NO: 18827 - protein, 687 aa, Homo sapiens
MVSYWDTGVLLCALLSCLLLTGSSSGSKLKDPELSLKGTQHIMQAGQTLHLQCRGEAAHKWSLPEMVSKESERLSITKSACGRNGKQFCSTLTLNTAQANHTGFYSCKYLAVPTSKKKETESAIYIFISDTGRPFVEMYSEIPEIIHMTEGRELVIPCRVTSPNITVTLKKFPLDTLIPDGKRIIWDSRKGFIISNATYKEIGLLTCEATVNGHLYKTNYLTHRQTNTIIDVQISTPRPVKLLRGHTLVLNCTATTPLNTRVQMTWSYPDEKNKRASVRRRIDQSNSHANIFYSVLTIDKMQNKDKGLYTCRVRSGPSFKSVNTSVHIYDKAFITVKHRKQQVLETVAGKRSYRLSMKVKAFPSPEVVWLKDGLPATEKSARYLTRGYSLIIKDVTEEDAGNYTILLSIKQSNVFKNLTATLIVNVKPQIYEKAVSSFPDPALYPLGSRQILTCTAYGIPQPTIKWFWHPCNHNHSEARCDFCSNNEESFILDADSNMGNRIESITQRMAIIEGKNKMASTLVVADSRISGIYICIASNKVGTVGRNISFYITDVPNGFHVNLEKMPTEGEDLKLSCTVNKFLYRDVTWILLRTVNNRTMHYSISKQKMAITKEHSITLNLTIMNVSLQDSGTYACRARNVYTGEEILQKKEITIRGEHCNKKAVFSRISKFKSTRNDCTTQSNVKH

SEQ ID NO: 18828 - protein, 524 aa, Homo sapiens
MKVLGRSFFWVLFPVLPWAVQAVEHEEVAQRVIKLHRGRGVAAMQSRQWVRDSCRKLSGLLRQKNAVLNKLKTAIGAVEKDVGLSDEEKLFQVHTFEIFQKELNESENSVFQAVYGLQRALQGDYKDVVNMKESSRQRLEALREAAIKEETEYMELLAAEKHQVEALKNMQHQNQSLSMLDEILEDVRKAADRLEEEIEEHAFDDNKSVKGVNFEAVLRVEEEEANSKQNITKREVEDDLGLSMLIDSQNNQYILTKPRDSTIPRADHHFIKDIVTIGMLSLPCGWLCTAIGLPTMFGYIICGVLLGPSGLNSIKSIVQVETLGEFGVFFTLFLVGLEFSPEKLRKVWKISLQGPCYMTLLMIAFGLLWGHLLRIKPTQSVFISTCLSLSSTPLVSRFLMGSARGDKEGDIDYSTVLLGMLVTQDVQLGLFMAVMPTLIQAGASASSSIVVEVLRILVLIGQILFSLAAVFLLCLVIKKYLIGPYYRKLHMESKGNKEILILGISAFIFLMLTVILKLCVIYVI

SEQ ID NO: 18829 - protein, 403 aa, Homo sapiens
MATGGGAEEERKRGRPQLLPPARPAARGEEADGGREKMGWAQVVKNLAEKKGEFREPRPPRREEESGGGGGSAGLGGPAGLAAPDLGDFPPAGRGDPKGRRRDPAGEAVDPRKKKGAAEAGRRKKAEAAAAAMATPARPGEAEDAAERPLQDEPAAAAGPGKGRFLVRICFQGDEGACPTRDFVVGALILRSIGMDPSDIYAVIQIPGSREFDVSFRSAEKLALFLRVYEEKREQEDCWENFVVLGRSKSSLKTLFILFRNETVDVEDIVTWLKRHCDVLAVPVKVTDRFGIWTGEYKCEIELRQGEGGVRHLPGAFFLGAERGYSWYKGQPKTCFKCGSRTHMSGSCTQDRCFRCGEEGHLSPYCRKGIVCNLCGKRGHAFAQCPKAVHNSVAAQLTGVAGH

SEQ ID NO: 18830 - protein, 151 aa, Homo sapiens
MVRLPLQCVLWGCLLTAVHPEPPTACREKQYLINSQCCSLCQPGQKLVSDCTEFTETECLPCGESEFLDTWNRETHCHQHKYCDPNLGLRVQQKGTSETDTICTCEEGWHCTSEACESCVLHRSCSPGFGVKQIDICQPHFPKDRGLNLLM

SEQ ID NO: 18831 - protein, 153 aa, Homo sapiens
MAAGTAVGAWVLVLSLWGAVVGAQNITARIGEPLVLKCKGAPKKPPQRLEWKLNTGRTEAWKVLSPQGGGPWDSVARVLPNGSLFLPAVGIQDEGILGGLGTAALLIGVILWQRRQRRGEERKAPENQEEEEERAELNQSEEPEAGESSTGGP

SEQ ID NO: 18832 - protein, 3184 aa, Homo sapiens
MEFNNTTQEDVQERLAYAEQLVVELKDIIRQKDVQLQQKDEALQEERKAADNKIKKLKLHAKAKLTSLNKYIEEMKAQGGTVLPTEPQSEEQLSKHDKSSTEEEMEIEKIKHKLQEKEELISTLQAQLTQAQAEQPAQSSTEMEEFVMMKQQLQEKEEFISTLQAQLSQTQAEQAAQKLRVLQRKLEEHEESLVGRAQVVDLLQQELTAAEQRNQILSQQLQQMEAEHNTLRNTVETEREESKILLEKMELEVAERKLSFHNLQEEMHHLLEQFEQAGQAQAELESRYSALEQKHKAEMEEKTSHILSLQKTGQELQSACDALKDQNSKLLQDKNEQAVQSAQTIQQLEDQLQQKSKEISQFLNRLPLQQHETASQTSFPDVYNEGTQAVTEENIASLQKRVVELENEKGALLLSSIELEELKAENEKLSSQITLLEAQNRTGEADREVSEISIVDIANKRSSSAEESGQDVLENTFSQKHKELSVLLLEMKEAQEEIAFLKLQLQGKRAEEADHEVLDQKEMKQMEGEGIAPIKMKVFLEDTGQDFPLMPNEESSLPAVEKEQASTEHQSRTSEEISLNDAGVELKSTKQDGDKSLSAVPDIGQCHQDELERLKSQILELELNFHKAQEIYEKNLDEKAKEISNLNQLIEEFKKNADNNSSAFTALSEERDQLLSQVKELSMVTELRAQVKQLEMNLAEAERQRRLDYESQTAHDNLLTEQIHSLSIEAKSKDVKIEVLQNELDDVQLQFSEQSTLIRSLQSQLQNKESEVLEGAERVRHISSKVEELSQALSQKELEITKMDQLLLEKKRDVETLQQTIEEKDQQVTEISFSMTEKMVQLNEEKFSLGVEIKTLKEQLNLLSRAEEAKKEQVEEDNEVSSGLKQNYDEMSPAGQISKEELQHEFDLLKKENEQRKRKLQAALINRKELLQRVSRLEEELANLKDESKKEIPLSETERGEVEEDKENKEYSEKCVTSKCQEIEIYLKQTISEKEVELQHIRKDLEEKLAAEEQFQALVKQMNQTLQDKTNQIDLLQAEISENQAIIQKLITSNTDASDGDSVALVKETVVISPPCTGSSEHWKPELEEKILALEKEKEQLQKKLQEALTSRKAILKKAQEKERHLREELKQQKDDYNRLQEQFDEQSKENENIGDQLRQLQIQVRESIDGKLPSTDQQESCSSTPGLEEPLFKATEQHHTQPVLESNLCPDWPSHSEDASALQGGTSVAQIKAQLKEIEAEKVELELKVSSTTSELTKKSEEVFQLQEQINKQGLEIESLKTVSHEAEVHAESLQQKLESSQLQIAGLEHLRELQPKLDELQKLISKKEEDVSYLSGQLSEKEAALTKIQTEIIEQEDLIKALHTQLEMQAKEHDERIKQLQVELCEMKQKPEEIGEESRAKQQIQRKLQAALISRKEALKENKSLQEELSLARGTIERLTKSLADVESQVSAQNKEKDTVLGRLALLQEERDKLITEMDRSLLENQSLSSSCESLKLALEGLTEDKEKLVKEIESLKSSKIAESTEWQEKHKELQKEYEILLQSYENVSNEAERIQHVVEAVRQEKQELYGKLRSTEANKKETEKQLQEAEQEMEEMKEKMRKFAKSKQQKILELEEENDRLRAEVHPAGDTAKECMETLLSSNASMKEELERVKMEYETLSKKFQSLMSEKDSLSEEVQDLKHQIEGNVSKQANLEATEKHDNQTNVTEEGTQSIPGETEEQDSLSMSTRPTCSESVPSAKSANPAVSKDFSSHDEINNYLQQIDQLKERIAGLEEEKQKNKEFSQTLENEKNTLLSQISTKDGELKMLQEEVTKMNLLNQQIQEELSRVTKLKETAEEEKDDLEERLMNQLAELNGSIGNYCQDVTDAQIKNELLESEMKNLKKCVSELEEEKQQLVKEKTKVESEIRKEYLEKIQGAQKEPGNKSHAKELQELLKEKQQEVKQLQKDCIRYQEKISALERTVKALEFVQTESQKDLEITKENLAQAVEHRKKAQAELASFKVLLDDTQSEAARVLADNLKLKKELQSNKESVKSQMKQKDEDLERRLEQAEEKHLKEKKNMQEKLDALRREKVHLEETIGEIQVTLNKKDKEVQQLQENLDSTVTQLAAFTKSMSSLQDDRDRVIDEAKKWERKFSDAIQSKEEEIRLKEDNCSVLKDQLRQMSIHMEELKINISRLEHDKQIWESKAQTEVQLQQKVCDTLQGENKELLSQLEETRHLYHSSQNELAKLESELKSLKDQLTDLSNSLEKCKEQKGNLEGIIRQQEADIQNSKFSYEQLETDLQASRELTSRLHEEINMKEQKIISLLSGKEEAIQVAIAELRQQHDKEIKELENLLSQEEEENIVLEEENKKAVDKTNQLMETLKTIKKENIQQKAQLDSFVKSMSSLQNDRDRIVGDYQQLEERHLSIILEKDQLIQEAAAENNKLKEEIRGLRSHMDDLNSENAKLDAELIQYREDLNQVITIKDSQQKQLLEVQLQQNKELENKYAKLEEKLKESEEANEDLRRSFNALQEEKQDLSKEIESLKVSISQLTRQVTALQEEGTLGLYHAQLKVKEEEVHRLSALFSSSQKRIAELEEELVCVQKEAAKKVGEIEDKLKKELKHLHHDAGIMRNETETAEERVAELARDLVEMEQKLLMVTKENKGLTAQIQSFGRSMSSLQNSRDHANEELDELKRKYDASLKELAQLKEQGLLNRERDALLSETAFSMNSTEENSLSHLEKLNQQLLSKDEQLLHLSSQLEDSYNQVQSFSKAMASLQNERDHLWNELEKFRKSEEGKQRSAAQPSTSPAEVQSLKKAMSSLQNDRDRLLKELKNLQQQYLQINQEITELHPLKAQLQEYQDKTKAFQIMQEELRQENLSWQHELHQLRMEKSSWEIHERRMKEQYLMAISDKDQQLSHLQNLIRELRSSSSQTQPLKVQYQRQASPETSASPDGSQNLVYETELLRTQLNDSLKEIHQKELRIQQLNSNFSQLLEEKNTLSIQLCDTSQSLRENQQHYGDLLNHCAVLEKQVQELQAGPLNIDVAPGAPQEKNGVHRKSDPEELREPQQSFSEAQQQLCNTRQEVNELRKLLEEERDQRVAAENALSVAEEQIRRLEHSEWDSSRTPIIGSCGTQEQALLIDLTSNSCRRTRSGVGWKRVLRSLCHSRTRVPLLAAIYFLMIHVLLILCFTGHL

SEQ ID NO: 18833 - protein, 136 aa, Homo sapiens; identical to SEQ ID NO: 7651

SEQ ID NO: 18834 - protein, 509 aa, Homo sapiens
MEFSGRKWRKLRLAGDQRNASYPHCLQFYLQPPSENISLIEFENLAIDRVKLLKSVENLGVSYVKGTEQYQSKLESELRKLKFSYRENLEDEYEPRRRDHISHFILRLAYCQSEELRRWFIQQEMDLLRFRFSILPKDKIQDFLKDSQLQFEAISDEEKTLREQEIVASSPSLSGLKLGFESIYKIPFADALDLFRGRKVYLEDGFAYVPLKDIVAIILNEFRAKLSKALALTARSLPAVQSDERLQPLLNHLSHSYTGQDYSTQGNVGKISLDQIDLLSTKSFPPCMRQLHKALRENHHLRHGGRMQYGLFLKGIGLTLEQALQFWKQEFIKGKMDPDKFDKGYSYNIRHSFGKEGKRTDYTPFSCLKIILSNPPSQGDYHGCPFRHSDPELLKQKLQSYKISPGGISQILDLVKGTHYQVACQKYFEMIHNVDDCGFSLNHPNQFFCESQRILNGGKDIKKEPIQPETPQPKPSVQKTKDASSALASLNSSLEMDMEGLEDYFSEDS

SEQ ID NO: 18835 - protein, 817 aa, Homo sapiens
MSDTRRRVKVYTLNEDRQWDDRGTGHVSSTYVEELKGMSLLVRAESDGSLLLESKINPNTAYQKQQDTLIVWSEAENYDLALSFQEKAGCDEIWEKICQVQGKDPSVEVTQDLIDESEEERFEEMPETSHLIDLPTCELNKLEEIADLVTSVLSSPIRREKLALALENEGYIKKLLQLFQACENLENTEGLHHLYEIIRGILFLNKATLFEVMFSDECIMDVVGCLEYDPALAQPKRHREFLTKTAKFKEVIPITDSELRQKIHQTYRVQYIQDIILPTPSVFEENFLSTLTSFIFFNKVEIVSMLQEDEKFLSEVFAQLTDEATDDDKRRELVNFFKEFCAFSQTLQPQNRDAFFKTLAKLGILPALEIVMGMDDLQVRSAATDIFSYLVEFSPSMVREFVMQEAQQSDDDILLINVVIEQMICDTDPELGGAVQLMGLLRTLIDPENMLATTNKTEKSEFLNFFYNHCMHVLTAPLLTNTSEDKCEKDNIVGSNKNNTICPDNYQTAQLLALILELLTFCVEHHTYHIKNYIMNKDLLRRVLVLMNSKHTFLALCALRFMRRIIGLKDEFYNRYITKGNLFEPVINALLDNGTRYNLLNSAVIELFEFIRVEDIKSLTAHIVENFYKALESIEYVQTFKGLKTKYEQEKDRQNQKLNSVPSILRSNRFRRDAKALEEDEEMWFNEDEEEEGKAVVAPVEKPKPEDDFPDNYEKFMETKKAKESEDKENLPKRTSPGGFKFTFSHSASAANGTNSKSVVAQIPPATSNGSSSKTTNLPTSVTATKGSLVGLVDYPDDEEEDEEEESSPRKRPRLGS

SEQ ID NO: 18836 - protein, 451 aa, Homo sapiens
MGSGDSSRSCETSSQDLGFSYYPAENLIEYKWPPDETGEYYMLQEQVSEYLGVTSFKRKYPDLERRDLSHKEKLYLRELNVITETQCTLGLTALRSDEVIDLMIKEYPAKHAEYSVILQEKERQRITDHYKEYSQMQQQNTQKVEASKVPEYIKKAAKKAAEFNSNLNRERMEERRAYFDLQTHVIQVPQGKYKVLPTERTKVSSYPVALIPGQFQEYYKRYSPDELRYLPLNTALYEPPLDPELPALDSDGDSDDGEDGRGDEKRKNKGTSDSSSGNVSEGESPPDSQEDSFQGRQKSKDKAATPRKDGPKRSVLSKSVPGYKPKVIPNAICGICLKGKESNKKGKAESLIHCSQCENSGHPSCLDMTMELVSMIKTYPWQCMECKTCIICGQPHHEEEMMFCDMCDRGYHTFCVGLGAIPSGRWICDCCQRAPPTPRKVGRRGKNSKEG

SEQ ID NO: 18837 - protein, 816 aa, Homo sapiens
MVYSRRGSLGSRLLLLWLLLAYWKAGSGQLHYSIPEEAKHGTFVGRIAQDLGLELAELVPRLFRVASKGRGDLLEVNLQNGILFVNSRIDREELCRRRAECSIHLEVIVDRPLQVFHVEVAVKDINDNPPRFSRQEQRLFILESRMPDSRFPLEGASDLDIGANAQLRYRLNPNEYFDLDVKTNEEETNFLELVLRKSLDREETQEHRLLVIATDGGKPELTGTVQLLINVLDANDNAPEFDKSIYNVRLLENAPSGTLVIKLNASDADEGINKEIVYFFSNLVLDDVKSKFIINSNTGEIKVNGELDYEDYNSYEINIDAMDKSTFPLSGHCKVVVKLLDVNDNTPEMAITTLFLPVKEDAPLSTVIALISVSDRDSGANGQVTCSLMPHVPFKLVSTFKNYYSLVLDSALDRESVSVYELVVTARDGGSPSLWATASVSVEVADVNDNAPAFAQPQYTVFVKENNPPGCHIFTVSARDADAQENALVSYSLVERRVGERPLSSYVSVHAESGKVYALQPLDHEEVELLQFQVSARDAGVPPLGSNVTLQVFVLDENDNAPALLVPRVGGTGGAVSELVPRSVGAGHVVAKVRAVDPDSGYNAWLSYELQPAPGSARIPFRVGLYTGEISTTRSLDETEAPRHRLLVLVKDHGEPPLTATATVLVSLVESGQAPKASSRASAGAVGPEAALVDVNVYLIIAICAVSSLLVLTLLLYTALRCSAQPTEAVCTRGKPTLLCSSAVGSWSYSQQRRQRVCSGEAPPKTDLMAFSPSLPQGPTSTDNVSFLILTSIFPSQFSNIKCHIHPLFLYLKIMS

SEQ ID NO: 18838 - protein, 398 aa, Homo sapiens
MDFGLALLLAGLLGLLLGQSLQVKPLQVEPPEPVVAVALGASRQLTCRLACADRGASVQWRGLDTSLGAVQSDTGRSVLTVRNASLSAAGTRVCVGSCGGRTFQHTVQLLVYAFPDQLTVSPAALVPGDPEVACTAHKVTPVDPNALSFSLLVGGQELEGAQALGPEVQEEEEEPQGDEDVLFRVTERWRLPPLGTPVPPALYCQATMRLPGLELSHRQAIPALHGWLSPPPPQNTGPHGPHPTSPEPPDTTSPESPDTTSPESPDTTSQEPPDTTSPEPPDKTSPEPAPQQGSTHTPRSPGSTRTRRPEISQAGPTQGEVIPTGSSKPAGDQLPAALWTSSAVLGLLLLALPTYHLWKRCRHLAEDDTHPPASLRLLPQVSAWAGLRGTGQVGISPS

SEQ ID NO: 18839 - protein, 732 aa, Homo sapiens
MVSWGRFICLVVVTMATLSLARPSFSLVEDTTLEPEDAISSGDDEDDTDGAEDFVSENSNNKRAPYWTNTEKMEKRLHAVPAANTVKFRCPAGGNPMPTMRWLKNGKEFKQEHRIGGYKVRNQHWSLIMESVVPSDKGNYTCVVENEYGSINHTYHLDVVERSPHRPILQAGLPANASTVVGGDVEFVCKVYSDAQPHIQWIKHVEKNGSKYGPDGLPYLKVLKAAGVNTTDKEIEVLYIRNVTFEDAGEYTCLAGNSIGISFHSAWLTVLPAPGREKEITASPDYLEIAIYCIGVFLIACMVVTVILCRMKNTTKKPDFSSQPAVHKLTKRIPLRRQVTVSAESSSSMNSNTPLVRITTRLSSTADTPMLAGVSEYELPEDPKWEFPRDKLTLGKPLGEGCFGQVVMAEAVGIDKDKPKEAVTVAVKMLKDDATEKDLSDLVSEMEMMKMIGKHKNIINLLGACTQDGPLYVIVEYASKGNLREYLRARRPPGMEYSYDINRVPEEQMTFKDLVSCTYQLARGMEYLASQKCIHRDLAARNVLVTENNVMKIADFGLARDINNIDYYKKTTNGRLPVKWMAPEALFDRVYTHQSDVWSFGVLMWEIFTLGGSPYPGIPVEELFKLLKEGHRMDKPANCTNELYMMMRDCWHAVPSQRPTFKQLVEDLDRILTLTTNEEYLDLSQPLEQYSPSYPDTRSSCSSGDDSVFSPDPMPYEPCLPQYPHINGSVKT

SEQ ID NO: 18840 - protein, 164 aa, Homo sapiens
MVAMAAGPSGCLVPAFGLRLLLATVLQAVSAFGAEFSSEACRELGFSSNLLCSSCDLLGQFNLLQLDPDCRGCCQEEAQFETKKLYAGAILEVCGKLGRFPQVQAFVRSDKPKLFRGLQIKYVRGSDPVLKLLDDNGNIAEELSILKWNTDSVEEFLSEKLERI

SEQ ID NO: 18841 - protein, 284 aa, Homo sapiens
MKTSAELHEQEKPPSSPRATGPGRLGHARGRGPDALRGGAAGPGRASSGAPRERKMAPHDPGSLTTLVPWAAALLLALGVERALALPEICTQCPGSVQNLSKVAFYCKTTRELMLHARCCLNQKGTILGLDLQNCSLEDPGPNFHQAHTTVIIDLQANPLKGDLANTFRGFTQLQTLILPQHVNCPGGINAWNTITSYIDNQICQGQKNLCNNTGDPEMCPENGSCVPDGPGLLQCVCADGFHGYKCMRQGSFSLLMFFGILGATTLSVSILLWATQRRKAKTS

SEQ ID NO: 18842 - protein, 818 aa, Homo sapiens
MGDILAHESELLGLVKEYLDFAEFEDTLKTFSKECKIKGKPLCKTVGGSFRDSKSLTIQKDLVAAFDNGDQKVFFDLWEEHISSSIRDGDSFAQKLEFYLHIHFAIYLLKYSVGRPDKEELDEKISYFKTYLETKGAALSQTTEFLPFYALPFVPNPMVHPSFKELFQDSWTPELKLKLIKFLALISKASNTPKLLTIYKENGQSNKEILQQLHQQLVEAERRSVTYLKRYNKIQADYHNLIGVTAELVDSLEATVSGKMITPEYLQSVCVRLFSNQMRQSLAHSVDFTRPGTASTMLRASLAPVKLKDVPLLPSLDYEKLKKDLILGSDRLKAFLLQALRWRLTTSHPGEQRETVLQAYISNDLLDCYSHNQRSVLQLLHSTSDVVRQYMARLINAFASLAEGRLYLAQNTKVLQMLEGRLKEEDKDIITRENVLGALQKFSLRRPLQTAMIQDGLIFWLVDVLKDPDCLSDYTLEYSVALLMNLCLRSTGKNMCAKVAGLVLKVLSDLLGHENHEIQPYVNGALYSILSVPSIREEARAMGMEDILRCFIKEGNAEMIRQIEFIIKQLNSEELPDGVLESDDDEDEDDEEDHDIMEADLDKDELIQPQLGELSGEKLLTTEYLGIMTNTGKTRRKGLANVQWSGDEPLQRPVTPGGHRNGYPVVEDQHTPPQTAQHARNGHPQALPAAHEAVYREGKPSTPESCVSSSSAIIAKPGEWLPRGRQEEPRPAPTGTPRQPREAPQDPGNGVTTRECASAFTCKPRAPCTPEMLDWNPPKAKASVLAPLFSSCGPQQASRPGSTASSTRGLPSSQSHRK

SEQ ID NO: 18843 - protein, 573 aa, Homo sapiens [sequence omitted]

SEQ ID NO: 18844 - protein, 225 aa, Homo sapiens
MARLLQASCLLSLLLAGFVSQSRGQEKSKMDCHGGISGTIYEYGALTIDGEEYIPFKQYAGKYVLFVNVASYGLTGQYIELNALQEELAPFGLVILGFPCNQFGKQEPGENSEILPTLKYVRPGGGFVPNFQLFEKGDVNGEKEQKFYTFLKNSCPPTSELLGTSDRLFWEPMKVHDIRWNFEKFLVGPDGIPIMRWHHRTTVSNVKMDILSYMRRQAALGVKRK

SEQ ID NO: 18845 - protein, 673 aa, Homo sapiens
MKPGGFWLHLTLLGASLPAALGWMDPGTSRGPDVGVGESQAEEPRSFEVTRREGLSSHNELLASCGKKFCSRGSRCVLSLAPEDRVSVTTVTVGLSTVLTCAVHGDLRPPIIWKRNGLTLNFLDLEDINDFGEDDSLYITKVTTIHMGNYTCHASGHEQLFQTHVLQVNVPPVIRVYPESQAQEPGVAASLRCHAEGIPMPRITWLKNGVDVSTQMSKQLSLLANGSELHISSVRYEDTGAYTCIAKNEVGVDEDISSLFIEDSARKTLANILWREEGLSVGNMFYVFSDDGIIVIHPVDCEIQRHLKPTEKIFMSYEEICPQREKNATQPCQWVSAVNVRNRYIYVAQPALSRVLVVDIQAQKVLQSIGVDPLPAKLSYDKSHDQVWVLSWGDVHKSRPSLQVITEASTGQSQHLIRTPFAGVDDFFIPPTNLIINHIRFGFIFNKSDPAVHKVDLETMMPLKTIGLHHHGCVPQAMAHTHLGGYFFIQCRQDSPASAARQLLVDSVTDSVLGPNGDVTGTPHTSPDGRFIVSAAADSPWLHVQEITVRGEIQTLYDLQINSGISDLAFQRSFTESNQYNIYAALHTEPDLLFLELSTGKVGMLKNLKEPPAGPAQPWGGTHRIMRDSGLFGQYLLTPARESLFLINGRQNTLRCEVSGIKGGTTVVWVGEV

SEQ ID NO: 18846 - protein, 166 aa, Homo sapiens
MNVAMPSWFDIIGLSPDSQEDESGIKQAAENIKALIDQEVKNGIPSNRIILGGFSQGGALSLYTALTTQQKLAGVTALSCWLPLRASFPQGPIGGANRDISILQCHGDCDPLVPLMFGSLTVEKLKTLVNPANVTFKTYEGMMHSSCQQEMMDVKQFIDKLLPPID

SEQ ID NO: 18847 - protein, 1504 aa, Homo sapiens
MAGVGAAALSLLLHLGALALAAGAEGGAVPREPPGQQTTAHSSVLAGNSQEQWHPLREWLGRLEAAVMELREQNKDLQTRVRQLESCECHPASPQCWGLGRAWPEGARWEPDACTACVCQDGAAHCGPQAHLPHCRGCSQNGQTYGNGETFSPDACTTCRCLTGAVQCQGPSCSELNCLESCTPPGECCPICRCTEGGSHWEHGQEWTTPGDPCRICRCLEGHIQCRQRECASLCPYPARPLPGTCCPVCDGCFLNGREHRSGEPVGSGDPCSHCRCANGSVQCEPLPCPPVPCRHPGKIPGQCCPVCDGCEYQGHQYQSQETFRLQERGLCVRCSCQAGEVSCEEQECPVTPCALPASGRQLCPACELDGEEFAEGVQWEPDGRPCTACVCQDGVPKCGAVLCPPAPCQHPTQPPGACCPSCDSCTYHSQVYANGQNFTDADSPCHACHCQDGTVTCSLVDCPPTTCARPQSGPGQCCPRCPDCILEEEVFVDGESFSHPRDPCQECRCQEGHAHCQPRPCPRAPCAHPLPGTCCPNDCSGCAFGGKEYPSGADFPHPSDPCRLCRCLSGNVQCLARRCVPLPCPEPVLLPGECCPQCPAPAGCPRPGAAHARHQEYFSPPGDPCRRCLCLDGSVSCQRLPCPPAPCAHPRQGPCCPSCDGCLYQGKEFASGERFPSPTAACHLCLCWEGSVSCEPKACAPALCPFPARGDCCPDCDGCEYLGESYLSNQEFPDPREPCNLCTCLGGFVTCGRRPCEPPGCSHPLIPSGHCCPTCQGCRYHGVTTASGETLPDPLDPTCSLCTCQEGSMRCQKKPCPPALCPHPSPGPCFCPVCHSCLSQGREHQDGEEFEGPAGSCEWCRCQAGQVSCVRLQCPPLPCKLQVTERGSCCPRCRGCLAHGEEHPEGSRWVPPDSACSSCVCHEGVVTCARIQCISSCAQPRQGPHDCCPQCSDCEHEGRKYEPGESFQPGADPCEVCICEPQPEGPPSLRCHRRQCPSLVGCPPSQLLPPGPQHCCPTCAEALSNCSEGLLGSELAPPDPCYTCQCQDLTWLCIHQACPELSCPLSERHTPPGSCCPVCRAPTQSCVHQGREVASGERWTVDTCTSCSCMAGTVRCQSQRCSPLSCGPDKAPALSPGSCCPRCLPRPASCMAFGDPHYRTFDGRLLHFQGSCSYVLAKDCHSGDFSVHVTNDDRGRSGVAWTQEVAVLLGDMAVRLLQDGAVTVDGHPVALPFLQEPLLYVELRGHTVILHAQPGLQVLWDGQSQVEVSVPGSYQGRTCGLCGNFNGFAQDDLQGPEGLLLPSEAAFGNSWQVSEGLWPGRPCSAGREVDPCRAAGYRARREANARCGVLKSSPFSRCHAVVPPEPFFAACVYDLCACGPGSSADACLCDALEAYASHCRQAGVTPTWRGPTLCVVGCPLERGFVFDECGPPCPRTCFNQHIPLGELAAHCVRPCVPGCQCPAGLVEHEAHCIPPEACPQVLLTGDQPLGARPSPSREPQETP

SEQ ID NO: 18848 - protein, 192 aa, Homo sapiens
MRLGSPGLLFLLFSSLRAANFSVPVVSAPHSPSQDELTFTCTSINGYPRPNVYWINKTDNSLLDQALQNDTVFLNMRGLYDVVSVLRIARTPSVNIGCCIENVLLQQNLTVGSQTGNDIGERDKITENPVSTGEKNAATWSILAVLCLLVVVAVAIGWVCRDRCLQHSYAGAWAVSPETELTESWNLLLLLS

SEQ ID NO: 18849 - protein, 543 aa, Homo sapiens
MQSPWKILTVAPLFLLLSLQSSASPANDDQSRPSLSNGHTCVEKLFLKTTCYLVIDKFGSDIIKLLSADMNADVVCHTLEFCKQNTGQPLCHLYPLPKETWKFTLQKARQIVKKSPILKYSRSGSDICSLPVLAKICQKIKLAMEQSVPFKDVDSDKYSVFPTLRGYHWRGRDCNDSDESVYPGRRPNNWDVHQDSNCNGIWGVDPKDGVPYEKKFCEGSQPRGIILLGDSAGAHFHISPEWITASQMSLNSFINLPTALTNELDWPQLSGATGFLDSTVGIKEKSIYLRLWKRNHCNHRDYQNISRNGASSRNLKKFIESLSRNKVLDYPAIVIYAMIGNDVCSGKSDPVPAMTTPEKLYSNVMQTLKHLNSHLPNGSHVILYGLPDGTFLWDNLHNRYHPLGQLNKDMTYAQLYSFLNCLQVSPCHGWMSSNKTLRTLTSERAEQLSNTLKKIAASEKFTNFNLFYMDFAFHEIIQEWQKRGGQPWQLIEPVDGFHPNEVALLLLADHFWKKVQLQWPQILGKENPFNPQIKQVFGDQGGH

SEQ ID NO: 18850 - protein, 184 aa, Homo sapiens
MALLLCLVCLTAALAHGCLHCHSNFSKKFSFYRHHVNFKSWWVGDIPVSGALLTDWSDDTMKELHLAIPAKITREKLDQVATAVYQMMDQLYQGKMYFPGKGRETEAGPPHPGTPRPPPEPDLLLPRRLRVFPQRAAKHLPGAGAPHPERHHRKPHRLSAPLWSSAQWKSAVQGLLNYINNWHK

SEQ ID NO: 18851 - protein, 400 aa, Homo sapiens
MDFGLALLLAGLLGLLLGQSLQVKPLQVEPPEPVVAVALGASRQLTCRLACADRGASVQWRGLDTSLGAVQSDTGRSVLTVRNASLSAAGTRVCVGSCGGRTFQHTVQLLVYAFPDQLTVSPAALVPGDPEVACTAHKVTPVDPNALSFSLLVGGQELEGAQALGPEVQEEEEEPQGDEDVLFRVTERWRLPPLGTPVPPALYCQATMRLPGLELSHRQAIPVRWVPWRPTRSPADSTSPVLHSPTSPEPPDTTSPESPDTTSPESPDTTSQEPPDTTSPEPPDKTSPEPAPQQGSTHTPRSPGSTRTRRPEISQAGPTQGEVIPTGSSKPAGDQLPAALWTSSAVLGLLLLALPTYHLWKRCRHLAEDDTHPPASLRLLPQVSAWAGLRGTGQVGISPS

SEQ ID NO: 18852 - protein, 297 aa, Homo sapiens
MYKQAQASFWTAEEVDLSKDLPHWNKLKADEKYFISHILAFFAASDGIVNENLVERFSQEVQVPEARCFYGFQILIENVHSEMYSLLIDTYIRDPKKREFLFNAIETMPYVKKKADWALRWIADRKSTFGERVVAFAAVEGVFFSGSFAAIFWLKKRGLMPGLTFSNELISRDEGLHCDFACLMFQYLVNKPSEERVREIIVDAVKIEQEFLTEALPVGLIGMNCILMKQYIEFVADRLLVELGFSKVFQAENPFDFMENISLEGKTNFFEKRVSEYQRFAVMAETTDNVFTLDADF

SEQ ID NO: 18853 - protein, 395 aa, Homo sapiens
MSSRQRGNFNYKLAFKSAIMDVLAEANGTFALNLLKTLGKDNSKNVFFSPMSMSCALAMVYMGAKGNTAAQMAQILSFNKSGGGGDIHQGFQSLLTEVNKTGTQYLLRMANRLFGEKSCDFLSSFRDSCQKFYQAEMEELDFISAVEKSRKHINTWVAEKTEGKIAELLSPGSVDPLTRLVLVNAVYFRGNWDEQFDKENTEERLFKVSKNEEKPVQMMFKQSTFKKTYIGEIFTQILVLPYVGKELNMIIMLPDETTDLRTVEKELTYEKFVEWTRLDMMDEEEVEVSLPRFKLEESYDMESVLRNLGMTDAFELGKADFSGMSQTDLSLSKVVHKSFVEVNEEGTEAAAATAAIMMMRCARFVPRFCADHPFLFFIQHSKTNGILFCGRFSSP

SEQ ID NO: 18854 - protein, 1344 aa, Homo sapiens
MLDPSSSEEESDEIVEEESGKEVLGSAPSGARLSPSRTSEGSAGSAGLGGGGAGAGAGVGAGGGGGSGASSGGGAGGLQPSSRAGGGRPSSPSPSVVSEKEKEELERLQKEEEERKKRLQLYVFVMRCIAYPFNAKQPTDMARRQQKISKQQLQTVKDRFQAFLNGETQIMADEAFMNAVQSYYEVFLKSDRVARMVQSGGCSANDSREVFKKHIEKRVRSLPEIDGLSKETVLSSWMAKFDAIYRGEEDPRKQQARMTASAASELILSKEQLYEMFQNILGIKKFEHQLLYNACQLDNPDEQAAQIRRELDGRLQMADQIARERKFPKFVSKEMENMYIEELKSSVNLLMANLESMPVSKGGEFKLQKLKRSHNASIIDMGEESENQLSKSDVVLSFSLEVVIMEVQGLKSLAPNRIVYCTMEVEGGEKLQTDQAEASKPTWGTQGDFSTTHALPAVKVKLFTESTGVLALEDKELGRVILHPTPNSPKQSEWHKMTVSKNCPDQDLKIKLAVRMDKPQNMKHSGYLWAIGKNVWKRWKKRFFVLVQVSQYTFAMCSYREKKAEPQELLQLDGYTVDYTDPQPGLEGGRAFFNAVKEGDTVIFASDDEQDRILWVQAMYRATGQSHKPVPPTQVQKLNAKGGNVPQLDAPISQFYADRAQKHGMDEFISSNPCNFDHASLFEMVQRLTLDHRLNDSYSCLGWFSPGQVFVLDEYCARNGVRGCHRHLCYLRDLLERAENGAMIDPTLLHYSFAFCASHVHGNSQQMHVYLSGLPPNTDPEGSKTPSPPEPEAKKDTKKESKKRKDSKTQANQELKRPDGIGTVTVEEKERFEEIKERLRVLLENQITHFRYCFPFGRPEGALKATLSLLERVLMKDIVTPVPQEEVKTVIRKCLEQAALVNYSRLSEYAKIEENVGRLITPAKKLEDTIRLAELVIEVLQQNEEHHAEAFAWWSDLMVEHAETFLSLFAVDMDAALEVQPPDTWDSFPLFQLLNDFLRTDYNLCNGKFHKHLQDLFAPLVVRYVDLMESSIAQSIHRGFERESWEPVNNGSGTSEDLFWKLDALQTFIRDLHWPEEEFGKHLEQRLKLMASDMIESCVKRTRIAFEVKLQKTSRSTDFRVPQSICTMFNVMVDAKAQSTKLCSMEMGQEHQYHSKIDELIEETVKEMITLLVAKFVTILEGVLAKLSRYDEGTLFSSFLSFTVKAASKYVDVPKPGMDVADAYVTFVRHSQDVLRDKVNEEMYIERLFDQWYNSSMNVICTWLTDRMDLQLHIYQLKTLIRMVKKTYRDFRLQGVLDSTLNSKTYETIRNRLTVEEATASVSEGGGLQGISMKDSDEEDEEDD

SEQ ID NO: 18855 - protein, 1002 aa, Homo sapiens
MRVHPRPHSRLAAKLAGLEPETPYPGFEFSELVTGATGTGDLTRKEPTELGASEMADEALAGLDEGALRKLLEVTADLAERRRIRSAIRELQRQELEREEEALASKRFRAERQDNKENWLHSQQREAEQRAALARLAGQLESMNDVEELTALLRSAGEYEERKLIRAAIRRVRAQEIEAATLAGRLYSGRPNSGSREDSKGLAAHRLEQCEVPEREEQEQQAEVSKPTPTPEGTSQDVTTVTLLLRAPPGSTSSSPASPSSSPTPASPEPPLEPAEAQCLTAEVPGSPEPPPSPPKTTSPEPQESPTLPSTEGQVVNKLLSGPKETPAAQSPTRGPSDTKRADVAGPRPCQRSLSVLSPRQPAQNRESTPLASGPSSFQRAGSVRDRVHKFTSDSPMAARLQDGTPQAALSPLTPARLLGPSLTSTTPASSSSGSSSRGPSDTSSRFSKEQRGVAQPLAQLRSCPQEEGPRGRGLAARPLENRAGGPVARSEEPGAPLPVAVGTAEPGGSMKTTFTIEIKDGRGQASTGRVLLPTGNQRAELTLGLRAPPTLLSTSSGGKSTITRVNSPGTLARLGSVTHVTSFSHAPPSSRGGCSIKAAEDAGTPVAHPPAFSTRRRSSTGTTRSTSLMEAEPAEPLAAAVEAANGAEQTRVNKAPEGRSPLSAEELMTIEDEGVLDKMLDQSTDFEERKLIRAALRELRQRKRDQRDKERERRLQEARGRPGEGRGNTATETTTRHSQRAADGSAVSTVTKTERLVHSNDGTRTARTTTVESSFVRRSENGSGSTMMQTKTFSSSSSSKKMGSIFDREDQASPRAGSLAALEKRQAEKKKELMKAQSLPKTSASQARKAMIEKLEKEGAAGSPGGPRAAVQRSTSFGVPNANSIKQMLLDWCRAKTRGYEHVDIQNFSSSWSDGMAFCALVHNFFPEAFDYGQLSPQNRRQNFEVAFSSAEMLVDCVPLVEVDDMMIMGKKPDPKCVFTYVQSLYNHLRRHELRLRGKNV

SEQ ID NO: 18856 - protein, 170 aa, Homo sapiens
MTNEEPLPKKVRLSETDFKVMARDELILRWKQYEAYVQALEGKYTDLNSNDVTGLRESEEKLKQQQQESARRENILVMRLATKEQEMQECTTQIQYLKQVQQPSVAQLRSTMVDPAINLFFLKMKGELEQTKDKLEQAQNELSAWKFTPDRGLMASDYSEEVATSEKFPF

SEQ ID NO: 18857 - protein, 252 aa, Homo sapiens
MCSRGWDSCLALELLLLPLSLLVTSIQGHLVHMTVVSGSNVTLNISESLPENYKQLTWFYTFDQKIVEWDSRKSKYFESKFKGRVRLDPQSGALYISKVQKEDNSTYIMRVLKKTGNEQEWKIKLQVLDPVPKPVIKIEKIEDMDDNCYLKLSCVIPGESVNYTWYGDKRPFPKELQNSVLETTLMPHNYSRCYTCQVSNSVSSKNGTVCLSPPCTLGKKDPWELRGAQGNWSCFEQRKAGGPIQPPCTVWW

SEQ ID NO: 18858 - protein, 101 aa, Homo sapiens
MVSHFMGSLSVLCFLLLLGFQFVCPQPSTQHRKVPQRMAAEGAPEDDGGGGAPGVWGAWGPWSACSRSCSGGVMEQTRPCLPRSYRLRGGQRPGAPARAFA

SEQ ID NO: 18859 - protein, 626 aa, Homo sapiens
MPLLLLLLLLPSPLHPHPICEVSKVASHLEVNCDKRNLTALPPDLPKDTTILHLSENLLYTFSLATLMPYTRLTQLNLDRCELTKLQVDGTLPVLGTLDLSHNQLQSLPLLGQTLPALTVLDVSFNRLTSLPLGALRGLGELQELYLKGNELKTLPPGLLTPTPKLEKLSLANNNLTELPAGLLNGLENLDTLLLQENSLYTIPKGFFGSHLLPFAFLHGNPWLCNCEILYFRRWLQDNAENVYVWKQGVDVKAMTSNVASVQCDNSDKFPVYKYPGKGCPTLGDEGDTDLYDYYPEEDTEGDKVRATRTVVKFPTKAHTTPWGLFYSWSTASLDSQMPSSLHPTQESTKEQTTFPPRWTPNFTLHMESITFSKTPKSTTEPTPSPTTSEPVPEPAPNMTTLEPTPSPTTPEPTSEPAPSPTTPEPTPIPTIATSPTILVSATSLITPKSTFLTTTKPVSLLESTKKTIPELDQPPKLRGVLQGHLESSRNDPFLHPDFCCLLPLGFYVLGLFWLLFASVVLILLLSWVGHVKPQALDSGQGAALTTATQTTHLELQRGRQVTVPRAWLLFLRGSLPTFRSSLFLWVRPNGRVGPLVAGRRPSALSQGRGQDLLSTVSIRYSGHSL

SEQ ID NO: 18860 - protein, 422 aa, Homo sapiens
MLELIEVNGTPGSQLSTPRSGKSPSPSPTSPGSLRKQRSSQHGGSSTSLASTKVCSSMDENDGPGEEVSEEGFQIPATITERYKVGRTIGDGNFAVVKECVERSTAREYALKIIKKSKCRGKEHMIQNEVSILRRVKHPNIVLLIEEMDVPTELYLVMELVKGGDLFDAITSTNKYTERDASGMLYNLASAIKYLHSLNIVHRDIKPENLLVYEHQDGSKSLKLGDFGLATIVDGPLYTVCGTPTYVAPEIIAETGYGLKVDIWAAGVITYILLCGFPPFRGSGDDQEVLFDQILMGQVDFPSPYWDNVSDSAKELITMMLLVDVDQRFSAVQVLEHPWVNDDGLPENEHQLSVAGKIKKHFNTGPKPNSTAAGVSVIALDHGFTIKRSGSLDYYQQPGMYWIRPPLLIRRGRFSDEDATRM

SEQ ID NO: 18861 - protein, 1682 aa, Homo sapiens
MFRQFYLWTCLASGIILGSLFEICLGQYDDDWQYEDCKLARGGPPATIVAIDEESRNGTILVDNMLIKGTAGGPDPTIELSLKDNVDYWVLMDPVKQMLFLNSTGRVLDRDPPMNIHSIVVQVQCINKKVGTIIYHEVRIVVRDRNDNSPTFKHESYYATVNELTPVGTTIFTGFSGDNGATDIDDGPNGQIEYVIQYNPDDPTSNDTFEIPLMLTGNIVLRKRLNYEDKTRYFVIIQANDRAQNLNERRTTTTTLTVDVLDGDDLGPMFLPCVLVPNTRDCRPLTYQAAIPELRTPEELNPIIVTPPIQAIDQDRNIQPPSDRPGILYSILVGTPEDYPRFFHMHPRTAELSLLEPVNRDFHQKFDLVIKAEQDNGHPLPAFAGLHIEILDENNQSPYFTMPSYQGYILESAPVGATISDSLNLTSPLRIVALDKDIEDTKDPELHLFLNDYTSVFTVTQTGITRYLTLLQPVDREEQQTYTFSITAFDGVQESEPVIVNIQVMDANDNTPTFPEISYDVYVYTDMRPGDSVIQLTAVDADEGSNGEITYEILVGAQGDFIINKTTGLITIAPGVEMIVGRTYALTVQAADNAPPAERRNSICTVYIEVLPPNNQSPPRFPQLMYSLEISEAMRVGAVLLNLQATDREGDSITYAIENGDPQRVFNLSETTGILTLGKALDRESTDRYILIITASDGRPDGTSTATVNIVVTDVNDNAPVFDPYLPRNLSVVEEEANAFVGQVKATDPDAGINGQVHYSLGNFNNLFRITSNGSIYTAVKLNREVRDYYELVVVATDGAVHPRHSTLTLAIKVLDIDDNSPVFTNSTYTVLVEENLPAGTTILQIEAKDVDLGANVSYRIRSPEVKHFFALHPFTGELSLLRSLDYEAFPDQEASITFLVEAFDIYGTMPPGIATVTVIVKDMNDYPPVFSKRIYKGMVAPDAVKGTPITTVYAEDADPPGLPASRVRYRVDDVQFPYPASIFEVEEDSGRVITRVNLNEEPTTIFKLVVVAFDDGEPVMSSSATVKILVLHPGEIPRFTQEEYRPPPVSELATKGTMVGVISAAAINQSIVYSIVSGNEEDTFGINNITGVIYVNGPLDYETRTSYVLRVQADSLEVVLANLRVPSKSNTAKVYIEIQDENNHPPVFQKKFYIGGVSEDARMFTSVLRVKATDKDTGNYSVMAYRLIIPPIKEGKEGFVVETYTGLIKTAMLFHNMRRSYFKFQVIATDDYGKGLSGKADVLVSVVNQLDMQVIVSNVPPTLVEKKIEDLTEILDRYVQEQIPGAKVVVESIGARRHGDAFSLEDYTKCDLTVYAIDPQTNRAIDRNELFKFLDGKLLDINKDFQPYYGEGGRILEIRTPEAVTSIKKRGESLGYTEGALLALAFIIILCCIPAILVVLVSYRQFKVRQAECTKTARIQAALPAAKPAVPAPAPVAAPPPPPPPPPGAHLYEELGDSSMHKYEMPQYGSRRRLLPPAGQEEYGEVVGEAEEEYEEEEWARKRMIKLVVDREYETSSTGEDSAPECQRNRLHHPSIHSNINGNIYIAQNGSVVRTRRACLTDNLKVASPVRLGGPFKKLDKLAVTHEENVPLNTLSKGPFSTEKMNARPTLVTFAPCPVGTDNTAVKPLRNRLKSTVEQESMIDSKNIKEALEFHSDHTQSDDEELWMGPWNNLHIPMTKL

SEQ ID NO: 18862 - protein, 68 aa, Homo sapiens
MKLCVTVLSLLVLVAAFCSLALSAPTKSSEWKLQGVCFQCCSGKDPIHQSCPTWTMVRQRKMPTTGKG

SEQ ID NO: 18863 - protein, 2473 aa, Homo sapiens
MTTLLWVFVTLRVITAAVTVETSDHDNSLSVSIPQPSPLRVLLGTSLTIPCYFIDPMHPVTTAPSTAPLAPRIKWSRVSKEKEVVLLVATEGRVRVNSAYQDKVSLPNYPAIPSDATLEVQSLRSNDSGVYRCEVMHGIEDSEATLEVVVKGIVFHYRAISTRYTLDFDRAQRACLQNSAIIATPEQLQAAYEDGFHQCDAGWLADQTVRYPIHTPREGCYGDKDEFPGVRTYGIRDTNETYDVYCFAEEMEGEVFYATSPEKFTFQEAANECRRLGARLATTGQLYLAWQAGMDMCSAGWLADRSVRYPISKARPNCGGNLLGVRTVYVHANQTGYPDPSSRYDAICYTGEDFVDIPENFFGVGGEEDITVQTVTWPDMELPLPRNITEGEARGSVILTVKPIFEVSPSPLEPEEPFTFAPEIGATAFAEVENETGEATRPWGFPTPGLGPATAFTSEDLVVQVTAVPGQPHLPGGVVFHYRPGPTRYSLTFEEAQQACLRTGAVIASPEQLQAAYEAGYEQCDAGWLRDQTVRYPIVSPRTPCVGDKDSSPGVRTYGVRPSTETYDVYCFVDRLEGEVFFATRLEQFTFQEALEFCESHNATLATTGQLYAAWSRGLDKCYAGWLADGSLRYPIVTPRPACGGDKPGVRTVYLYPNQTGLPDPLSRHHAFCFRGISAVPSPGEEEGGTPTSPSGVEEWIVTQVVPGVAAVPVEEETTAVPSGETTAILEFTTEPENQTEWEPAYTPVGTSPLPGILPTWPPTGAATEESTEGPSATEVPSASEEPSPSEVPFPSEEPSPSEEPFPSVRPFPSVELFPSEEPFPSKEPSPSEEPSASEEPYTPSPPVPSWTELPSSGEESGAPDVSGDFTGSGDVSGHLDFSGQLSGDRASGLPSGDLDSSGLTSTVGSGLPVESGLPSGDEERIEWPSTPTVGELPSGAEILEGSASGVGDLSGLPSGEVLETSASGVGDLSGLPSGEVLETTAPGVEDISGLPSGEVLETTAPGVEDISGLPSGEVLETTAPGVEDISGLPSGEVLETTAPGVEDISGLPSGEVLETTAPGVEDISGLPSGEVLETAAPGVEDISGLPSGEVLETAAPGVEDISGLPSGEVLETAAPGVEDISGLPSGEVLETAAPGVEDISGLPSGEVLETAAPGVEDISGLPSGEVLETAAPGVEDISGLPSGEVLETAAPGVEDISGLPSGEVLETAAPGVEDISGLPSGEVLETAAPGVEDISGLPSGEVLETAAPGVEDISGLPSGEVLETAAPGVEDISGLPSGEVLETAAPGVEDISGLPSGEVLETAAPGVEDISGLPSGEVLETAAPGVEDISGLPSGEVLETAAPGVEDISGLPSGEVLETAAPGVEDISGLPSGEVLETTAPGVEEISGLPSGEVLETTAPGVDEISGLPSGEVLETTAPGVEEISGLPSGEVLETSTSAVGDLSGLPSGGEVLEISVSGVEDISGLPSGEVVETSASGIEDVSELPSGEGLETSASGVEDLSRLPSGEEVLEISASGFGDLSGLPSGGEGLETSASEVGTDLSGLPSGREGLETSASGAEDLSGLPSGKEDLVGSASGDLDLGKLPSGTLGSGQAPETSGLPSGFSGEYSGVDLGSGPPSGLPDFSGLPSGFPTVSLVDSTLVEVVTASTASELEGRGTIGISGAGEISGLPSSELDISGRASGLPSGTELSGQASGSPDVSGEIPGLFGVSGQPSGFPDTSGETSGVTELSGLSSGQPGISGEASGVLYGTSQPFGITDLSGETSGVPDLSGQPSGLPGFSGATSGVPDLVSGTTSGSGESSGITFVDTSLVEVAPTTFKEEEGLGSVELSGLPSGEADLSGKSGMVDVSGQFSGTVDSSGFTSQTPEFSGLPSGIAEVSGESSRAEIGSSLPSGAYYGSGTPSSFPTVSLVDRTLVESVTQAPTAQEAGEGPSGILELSGAHSGAPDMSGEHSGFLDLSGLQSGLIEPSGEPPGTPYFSGDFASTTNVSGESSVAMGTSGEASGLPEVTLITSEFVEGVTEPTISQELGQRPPVTHTPQLFESSGKVSTAGDISGATPVLPGSGVEVSSVPESSSETSAYPEAGFGASAAPEASREDSGSPDLSETTSAFHEANLERSSGLGVSGSTLTFQEGEASAAPEVSGESTTTSDVGTEAPGLPSATPTASGDRTEISGDLSGHTSQLGVVISTSIPESEWTQQTQRPAETHLEIESSSLLYSGEETHTVETATSPTDASIPASPEWKRESESTAADQEVCEEGWNKYQGHCYRHFPDRETWVDAERRCREQQSHLSSIVTPEEQEFVNNNAQDYQWIGLNDRTIEGDFRWSDGHPMQFENWRPNQPDNFFAAGEDCVVMIWHEKGEWNDVPCNYHLPFTCKKGTVACGEPPVVEHARTFGQKKDRYEINSLVRYQCTEGFVQRHMPTIRCQPSGHWEEPQITCTDPTTYKRRLQKRSSRHPRRSRPSTAH

SEQ ID NO: 18864 - protein, 292 aa, Homo sapiens
MLNLLLLALPVLASRAYAAPAPGQALQRVGIVGGQEAPRSKWPWQVSLRVRDRYWMHFCGGSLIHPQWVLTAAHCVGPDVKDLAALRVQLREQHLYYQDQLLPVSRIIVHPQFYTAQIGADIALLELEEPVNVSSHVHTVTLPPASETFPPGMPCWVTGWGDVDNDERLPPPFPLKQVKVPIMENHICDAKYHLGAYTGDDVRIVRDDMLCAGNTRRDSCQGDSGGPLVCKVNGTWLQAGVVSWGEGCAQPNRPGIYTRVTYYLDWIHHYVPKKPDGVSPCWPVWSRTPDLK

SEQ ID NO: 18865 - protein, 189 aa, Homo sapiens
MALPFVLLMALVVLNCKSICSLGCDLPQTHSLSNRRTLMIMAQMGRISPFSCLKDRHDFGFPQEEFDGNQFQKAQAISVLHEMIQQTFNLFSTKDSSATWDETLLDKFYTELYQQLNDLEACMMQEVGVEDTPLMNVDSILTVRKYFQRITLYLTEKKYSPCAWEVVRAEIMRSFSLSANLQERLRRKE

SEQ ID NO: 18866 - protein, 565 aa, Homo sapiens
MLISRNKLILLLGIVFFERGKSATLSLPKAPSCGQSLVKVQPWNYFNIFSRILGGSQVEKGSYPWQVSLKQRQKHICGGSIVSPQWVITAAHCIANRNIVSTLNVTAGEYDLSQTDPGEQTLTIETVIIHPHFSTKKPMDYDIALLKMAGAFQFGHFVGPICLPELREQFEAGFICTTAGWGRLTEGGVLSQVLQEVNLPILTWEECVAALLTLKRPISGKTFLCTGFPDGGRDACQGDSGGSLMCRNKKGAWTLAGVTSWGLGCGRGWRNNVRKSDQGSPGIFTDISKVLPWIHEHIQTGNRRKSSRAWCSEQDVIVSGAEGKLHFPESLHLYYESKQRCVWTLLVPEEMHVLLSFSHLDVESCHHSYLSMYSLEDRPIGKFCGESLPSSILIGSNSLRLKFVSDATDNAAGFNLTYKALKPNYIPDSGCSYLTVLFEEGLIQSLNYPENYSDKANCDWIFQASKHHLIKLSFQSLEIEESGDCTSDYVTVHSDVERKKEIARLCGYDVPTPVLSPSSIMLISFQSDENGTCRGFQATVSFIPKAVYPDLNISISEDESMFLET

SEQ ID NO: 18867 - protein, 86 aa, Homo sapiens
MKLCVTVLSLLVLVAAFCSLALSAPMGSDPPTACCFSYTARKLPRNFVVDYYETSSLCSQPAVVAAPHGPWSGRGRCLPQARDKAR

SEQ ID NO: 18868 - protein, 252 aa, Homo sapiens
MGTDSRAAKALLARARTLHLQTGNLLNWGRLRKKCPSTHSEEEFPDVLECTVSHAVEKINPDEREEMKVSAKLFIVESNSSSSTRSAVDMACSVLGVAQLDSVIIASPPIEDGVNLSLEHLQPYWEELENLVQSKKIVAIGTSDLDKTQLEQLYQWAQVKPNSNQVNLASCCVMPPDLTAFAKQFDIQLLTHNDPKELLSEASFQEALQESIPDIQAHEWVPLWLLRYSVIVKSRGIIKSKGYILQAKRRGS

SEQ ID NO: 18869 - protein, 961 aa, Homo sapiens
MEVPAAGRVPAEGAPTAAVAEVRCPGPAPLRLLEWRVAAGAAVRIGSVLAVFEAAASAQSSGASQSRVASGGCVRPARPERRLRSERAGVVRELCAQPGQVVAPGAVLVRLEGCSHPVVMKGLCAECGQDLTQLQSKNGKQQVPLSTATVSMVHSVPELMVSSEQAEQLGREDQQRLHRNRKLVLMVDLDQTLIHTTEQHCQQMSNKGIFHFQLGRGEPMLHTRLRPHCKDFLEKIAKLYELHVFTFGSRLYAHTIAGFLDPEKKLFSHRILSRDECIDPFSKTGNLRNLFPCGDSMVCIIDDREDVWKFAPNLITVKKYVYFQGTGDMNAPPGSRESQTRKKVNHSRGTEVSEPSPPVRDPEGVTQAPGVEPSNGLEKPARELNGSEAATPRDSPRPGKPDERDIWPPAQAPTSSQELAGAPEPQGSCAQGGRVAPGQRPAQGATGTDLDFDLSSDSESSSESEGTKSSSSASDGESEGKRGRQKPKAAPEGAGALAQGSSLEPGRPAAPSLPGEAEPGAHAPDKEPELGGQEEGERDGLCGLGNGCADRKEAETESQNSELSGVTAGESLDQSMEEEEEEDTDEDDHLIYLEEILVRVHTDYYAKYDRYLNKEIEEAPDIRKIVPELKSKVLADVAIIFSGLHPTNFPIEKTREHYHATALGAKILTRLVLSPDAPDRATHLIAARAGTEKVLQAQECGHLHVVNPDWLWSCLERWDKVEEQLFPLRDDHTKAQRENSPAAFPDREGVPPTALFHPMPVLPKAQPGPEVRIYDSNTGKLIRTGARGPPAPSSSLPIRQEPSSFRAVPPPQPQMFGEELPDAQDGEQPGPSRRKRQPSMSETMPLYTLCKEDLESMDKEVDDILGEGSDDSDSEKRRPEEQEEEPQPRKPGTRRERTLGAPASSERSAAGGRGPRGHKRKLNEEDAASESSRESSNEDEGSSSEADEMAKALEAELNDLM

SEQ ID NO: 18870 - protein, 978 aa, Homo sapiens
MAQVAMSTLPVEDEESSESRMVVTFLMSALESMCKELAKSKAEVACIAVYETDVFVVGTERGRAFVNTRKDFQKDFVKYCVEEEEKAAEMHKMKSTTQANRMSVDAVEIETLRKTVEDYFCFCYGKALGKSTVVPVPYEKMLRDQSAVVVQGLPEGVAFKHPENYDLATLKWILENKAGISFIIKRPFLEPKKHVGGRVMVTDADRSILSPGGSCGPIKVKTEPTEDSGISLEMAAVTVKEESEDPDYYQYNIQGSHHSSEGNEGTEMEVPAEDSTQHVPSETSEDPEVEVTIEDDDYSPPSKRPKANELPQPPVPEPANAGKRKVREFNFEKWNARITDLRKQVEELFERKYAQAIKAKGPVTIPYPLFQSHVEDLYVEGLPEGIPFRRPSTYGIPRLERILLAKERIRFVIKKHELLNSTREDLQLDKPASGVKEEWYARITKLRKMVDQLFCKKFAEALGSTEAKAVPYQKFEAHPNDLYVEGLPENIPFRSPSWYGIPRLEKIIQVGNRIKFVIKRPELLTHSTTEVTQPRTNTPVKEDWNVRITKLRKQVEEIFNLKFAQALGLTEAVKVPYPVFESNPEFLYVEGLPEGIPFRSPTWFGIPRLERIVRGSNKIKFVVKKPELVISYLPPGMASKINTKALQSPKRPRSPGSNSKVPEIEVTVEGPNNNNPQTSAVRTPTQTNGSNVPFKPRGREFSFEAWNAKITDLKQKVENLFNEKCGEALGLKQAVKVPFALFESFPEDFYVEGLPEGVPFRRPSTFGIPRLEKILRNKAKIKFIIKKPEMFETAIKESTSSKSPPRKINSSPNVNTTASGVEDLNIIQVTIPDDDNERLSKVEKARQLREQVNDLFSRKFGEAIGMGFPVKVPYRKITINPGCVVVDGMPPGVSFKAPSYLEISSMRRILDSAEFIKFTVIRPFPGLVINNQLVDQSESEGPVIQESAEPSQLEVPATEEIKETDGSSQIKQEPDPTW

SEQ ID NO: 18871 - protein, 1224 aa, Homo sapiens
MALRPGAGSGGGGAAGAGAGSAGGGGFMFPVAGGIRPPQAGLMPMQQQGFPMVSVMQPNMQGIMGMNYSSQMSQGPIAMQAGIPMGPMPAAGMPYLGQAPFLGMRPPGPQYTPDMQKQFAEEQQKRFEQQQKLLEEERKRRQFEEQKQKLRLLSSVKPKTGEKSRDDALEAIKGNLDGFSRDAKMHPTPASHPKKPGVGVFPSQDPAQPRMPPWIYNESLVPDAYKKILETTMTPTGIDTAKLYPILMSSGLPRETLGQIWALANRTTPGKLTKEELYTVLAMIAVTQRGVPAMSPDALNQFPAAPIPTLSGFSMTLPTPVSQPTVIPSGPAGSMPLSLGQPVMGINLVGPVGGAAAQASSGFIPTYPANQVVKPEEDDFQDFQDASKSGSLDDSFSDFQELPASSKTSNSQHGNSAPSLLMPLPGTKALPSMDKYAVFKGIAADKSSENTVPPGDPGDKYSAFRELEQTAENKPLGESFAEFRSAGTDDGFTDFKTADSVSPLEPPTKDKTFPPSFPSGTIQQKQQTQVKNPLNLADLDMFSSVNCSSEKPLSFSAVFSTSKSVSTPQSTGSAATMTALAATKTSSLADDFGEFSLFGEYSGLAPVGEQDDFADFMAFSNSSISSEQKPDDKYDALKEEASPVPLTSNVGSTVKGGQNSTAASTKYDVFRQLSLEGSGLGVEDLKDNTPSGKSDDDFADFHSSKFSSINSDKSLGEKAVAFRHTKEDSASVKSLDLPSIGGSSVGKEDSEDALSVQFDMKLADVGGDLKHVMSDSSLDLPTVSGQHPPAADIEDLKYAAFGSYSSNFAVSTLTSYDWSDRDDATQGRKLSPFVLSAGSGSPSATSILQKKETSFGSSENITMTSLSKVTTFVSEDALPETTFPALASFKDTIPQTSEQKEYENRDYKDFTKQDLPTAERSQEATCPSPASSGASQETPNECSDDFGEFQSEKPKISKFDFLVATSQSKMKSSEEMIKSELATFDLSVQGSHKRSLSLGDKEISRSSPSPALEQPFRDRSNTLNEKPALPVIRDKYKDLTGEVEENERYAYEWQRCLGSALNVIKKANDTLNGISSSSVCTEVIQSAQGMEYLLGVVEVYRVTKRVELGIKATAVCSEKLQQLLKDIDKVWNNLIGFMSLATLTPDENSLDFSSCMLRPGIKNAQELACGVCLLNVDSRSRAFNSETDSFKLAYGGHQYHASCANFWINCVEPKPPGLVLPDLL

SEQ ID NO: 18872 - protein, 154 aa, Homo sapiens
MGGHPQLRLVKALLLLGLNPVSASLQDQHCESLSLASNISEKKQGALPCRSHHQLPGPLYLPGGPPGGLCPLSAAQEHPVPAKHHPLEPHLRLHPAQRHLVRGPANHEPRGPPEQRGLVQVGDSRLQLLPCDQLLLDVRRGLLPAHSHRAHLLH

SEQ ID NO: 18873 - protein, 228 aa, Homo sapiens
MWSWKCLLFWAVLVTATLCTARPSPTLPEQDALPSSEDDDDDDDSSSEEKETDNTKPNPVAPYWTSPEKMEKKLHAVPAAKTVKFKCPSSGTPNPTLRWLKNGKEFKPDHRIGGYKVRYATWSIIMDSVVPSDKGNYTCIVENEYGSINHTYQLDVVERSPHRPILQAGLPANKTVALGSNVEFMCKVYSDPQPHIQWLKHIEVNGSKIGPDNLPYVQILKPWKRGRQ

SEQ ID NO: 18874 - protein, 803 aa, Homo sapiens
MGSGAGELGRAERLPVLFLFLLSLFCPALCEQIRYRIPEEMPKGSVVGNLATDLGFSVQELPTRKLRVSSEKPYFTVSAESGELLVSSRLDREEICGKKPACALEFEAVAENPLNFYHVNVEIEDINDHTPKFTQNSFELQISESAQPGTRFILGSAHDADIGSNTLQNYQLSPSDHFSLINKEKSDGSKYPEMVLKTPLDREKQKSYHLTLTALDFGAPPLSSTAQIHVLVTDANDNAPVFSQDVYRVSLSENVYPGTTVLQVTATDQDEGVNAEITFSFSEASQITQFDLNSNTGEITVLNTLDFEEVKEYSIVLEARDGGGMIAQCTVEVEVIDENDNAPEVIFQSLPNLIMEDAELGTHIALLKVRDKDSRHNGEVTCKLEGDVPFKILTSSRNTYKLVTDAVLDREQNPEYNITVTATDRGKPPLSSSSSITLHIGDVNDNAPVFSQSSYIVHVAENNPPGASISQVRASDPDLGPNGQVSYCIMASDLEQRELSSYVSISAESGVVFAQRAFDHEQLRAFELTLQARDQGSPALSANVSLRVLVDDRNDNAPRVLYPALGPDGSALFDMVPHAAEPGYLVTKVVAVDADSGHNAWLSYHVLQASEPGLFSLGLRTGEVRTARALGDRDAVRQRLLVAVRDGGQPPLSATATLHLVFADSLQEVLPDITDRPDPSDLQAELQFYLVVALALISVLFLVAMILAIALRLRRSSSPASWSCFQPGLCVKSESVVPPNYSEGTLPYSYNLCVAHTGKTEFNFLKCSEQLSSGQDILCGDSSGALFPLCNSSELTSHQVSFL

SEQ ID NO: 18875 - protein, 254 aa, Homo sapiens
MAKPCGVRLSGEARKQVEVFRQNLFQEAEEFLYRFLPQKIIYLNQLLQEDSLNVADLTSLRAPLDIPIPDPPPKDDEMETDKQEKKEGKRDKRKGLNPLFLTVHKCGFLPGNEKVLSLLALVKPEVWTLKEKCILVITWIQHLIPKIEDGNDFGVAIQEKVLERVNAVKTKVEAFQTTISKYFSERGDAVAKASKETHVMDYRALVHERDEAAYGELRAMVLDLRAFYAELYHIISSNLEKIVNPKGEEKPSMY

SEQ ID NO: 18876 - protein, 464 aa, Homo sapiens
MKTYRQREKQGTKVADSSKGPDEAKIKALLERTGYTLDVTTGQRKYGGPPPDSVYSGQQPSVGTEIFVGKIPRDLFEDELVPLFEKAGPIWDLRLMMDPLTGLNRGYAFVTFCTKEAAQEAVKLYNNHEIRSGKHIGVCISVANNRLFVGSIPKSKTKEQILEEFSKVTEGLTDVILYHQPDDKKKNRGFCFLEYEDHKTAAQARRRLMSGKVKVWGNVGTVEWADPIEDPDPEVMAKVKVLFVRNLANTVTEEILEKAFSQFGKLERVKKLKDYAFIHFDERDGAVKAMEEMNGKDLEGENIEIVFAKPPDQKRKERKAQRQAAKNQMYDDYYYYGPPHMPPPTRGRGRGGRGGYGYPPDYYGYEDYYDYYGYDYHNYRGGYEDPYYGYEDFQVGARGRGGRGARGAAPSRGRGAAPPRGRAGYSQRGGPGSARGVRGARGGAQQQRGRGQGKGVEAGPDLLQ

SEQ ID NO: 18877 - protein, 205 aa, Homo sapiens
MAASTASHRPIKGILKNKTSTTSSMVASAEQPRGNVDEELSKKSQKWDEMNILATYHPADKDYGLMKIDEPSTPYHSMMGDDEDACSDTEATEAMAPDILARKLAAAEGLEPKYRIQEQESSGEEDSDLSPEEREKKRQFEMKRKLHYNEGLNIKLARQLISKDLHDDDEDEEMLETADGESMNTEESNQGSTPSDQQQNKLRSS

SEQ ID NO: 18878 - protein, 692 aa, Homo sapiens
MGWRPRRARGTPLLLLLLLLLLWPVPGAGVLQGHIPGQPVTPHWVLDGQPWRTVSLEEPVSKPDMGLVALEAEGQELLLELEKNHRLLAPGYIETHYGPDGQPVVLAPNHTDHCHYQGRVRGFPDSWVVLCTCSGMSGLITLSRNASYYLRPWPPRGSKDFSTHEIFRMEQLLTWKGTCGHRDPGNKAGMTSLPGGPQSRGRREARRTRKYLELYIVADHTLFLTRHRNLNHTKQRLLEVANYVDQLLRTLDIQVALTGLEVWTERDRSRRQLRAFFRKGGGACLSNAPDPGLPVPPALCGNGFVEAGEECDCGPGQECRDLCCFAHNCSLRPGAQCAHGDCCVRCLLKPAGALCRQAMGDCDLPEFCTGTSSHCPPDVYLLDGSPCARGSGYCWDGACPTLEQQCQQLWGPGSHPAPEACFQVVNSAGDAHGNCGQDSEGHFLPCAGRDALCGKLQCQGGKPSLLAPHMVPVDSTVHLDGQEVTCRGALALPSAQLDLLGLGLVEPGTQCGPRMVCQSRRCRKNAFQELQRCLTACHSHGVCNSNHNCHCAPGWAPPFCDKPGFGGSMDSGPVQAENHDTFLLAMLLSVLLPLLPGAGLAWCCYRLPGAHLQRCSWGCRRDPACSGPKDGPHRDHPLGGVHPMELGPTATGQPWPLDPENSHEPSSHPEKPLPAVSPDPQDQVQMPRSCLW

SEQ ID NO: 18879 - protein, 2413 aa, Homo sapiens; identical to SEQ ID NO: 8532

SEQ ID NO: 18880 - protein, 89 aa, Homo sapiens
MEVGLPAITLFLTSASSPVVATTMDQEPVGGVERGEAVAASGAAAAAAFGESAGQNLTLLPRLKFMARSRLAATSTSRVQAILLPQPPV

SEQ ID NO: 18881 - protein, 92 aa, Homo sapiens
MADKVRRQRPRRRVCWALVAVLLADLLALSDTLAVMSVDLGSESMKVAIVKPGVPMEIVLNKESRRKTPVIVTLKENERFFGDSAASMAIKN

SEQ ID NO: 18882 - protein, 55 aa, Homo sapiens
MAAALFVLLGFALLGTHGASGAAGTVFTTVEDLGSKILLTCSLNDSATEQRAAPE

SEQ ID NO: 18883 - protein, 136 aa, Homo sapiens; identical to SEQ ID NO: 7651

SEQ ID NO: 18884 - protein, 222 aa, Homo sapiens
MKQESAAPNTPPTSQSPTPSAQFPRNDGDPQALWIFGYGSLVWRPDFAYSDSRVGFVRGYSRRFWQGDTFHRGSDKMPGRVVTLLEDHEGCTWGVAYQVQGEQVSKALKYLNVREAVLGGYDTKEVTFYPQDAPDQPLKALAYVATPQNPGYLGPAPEEAIATQILACRGFSGHNLEYLLRLADFMQLCGPQAQDEHLAAIVDAVGTMLPCFCPTEQALALV

SEQ ID NO: 18885 - protein, 136 aa, Homo sapiens; identical to SEQ ID NO: 7651

SEQ ID NO: 18886 - protein, 143 aa, Homo sapiens
MLCLLLTLGVALVCGVPAMDIPQTKQDLELPKLAGTWHSMAMATNNISLMATLKAPLRVHITSLLPTPEDNLEIVLHRWENNSCVEKKVLGEKTENPKKFKINSRVLVEDDEIMQGFIRAFRPLPRHLWYLLDLKQMEEPCRF

SEQ ID NO: 18887 - protein, 355 aa, Homo sapiens
MEEGERSPLLSQETAGQKPLSVHRPPTSGCLGPVPREDQAEAWGCSCCPPETKHQALSGTPKKGPAPSLSPGSSCVKYLIFLSNFPFSLLGLLALAIGLWGLAVKGSLGSDLGGPLPADPMLGLALGGLVVSAVSLAGYLGALCENTCLLRGFSGGILAFLVLEAVAGALVVALWGPLQDSLEHTLRVAIAHYQDDPDLRFLLDQVQLGLRCCGAASYQDWQQNLYFNCSSPGVQACSLPASCCIDPREDGASVNDQCGFGVLRLDADAAQRVVYLEGCGPPLRRWLRANLAASGGYAIAVVLLQGAELLLAARLLGALAARRGAAYGPGARGEDRAGPQSPSPGAPPAAKPARG

SEQ ID NO: 18888 - protein, 593 aa, Homo sapiens
MAATVATAAAVAPAPAPGTDSASSVHWFRKGLRLHDNPALLAAVRGARCVRCVYILDPWFAASSSVGINRWRFLLQSLEDLDTSLRKLNSRLFVVRGQPADVFPRLFKEWGVTRLTFEYDSEPFGKERDAAIMKMAKEAGVEVVTENSHTLYDLDRIIELNGQKPPLTYKRFQAIISRMELPKKPVGLVTSQQMESCRAEIQENHDETYGVPSLEELGFPTEGLGPAVWQGGETEALARLDKHLERKAWVANYERPRMNANSLLASPTGLSPYLRFGCLSCRLFYYRLWDLYKKVKRNSTPPLSLFGQLLWREFFYTAATNNPRFDRMEGNPICIQIPWDRNPEALAKWAEGKTGFPWIDAIMTQLRQEGWIHHLARHAVACFLTRGDLWVSWESGVRVFDELLLDADFSVNAGSWMWLSCSAFFQQFFHCYCPVGFGRRTDPSGDYIRRYLPKLKAFPSRYIYEPWNAPESIQKAAKCIIGVDYPRPIVNHAETSRLNIERMKQIYQQLSRYRGLCLLASVPSCVEDLSHPVAEPSSSQAGSMSSAGPRPLPSGPASPKRKLEAAEEPPGEELSKRARVAELPTPELPSKDA

SEQ ID NO: 18889 - protein, 155 aa, Homo sapiens
MASLKCSTVVCVICLEKPKYRCPACRVPYCSVVCFRKHKEQCNPETRPVEKKIRSALPTKTVKPVENKDDDDSIADFLNSDEEEDRVSLQNLKNLGESATLRSLLLNPHLRQLMVNLDQGEDKAKLMRAYMQEPLFVEFADCCLGIVEPSQNEES

SEQ ID NO: 18890 - protein, 1964 aa, Homo sapiens
MFRQFYLWTCLASGIILGSLFEICLGQYDDDWQYEDCKLARGGPPATIVAIDEESRNGTILVDNMLIKGTAGGPDPTIELSLKDNVDYWVLMDPVKQMLFLNSTGRVLDRDPPMNIHSIVVQVQCINKKVGTIIYHEVRIVVRDRNDNSPTFKHESYYATVNELTPVGTTIFTGFSGDNGATDIDDGPNGQIEYVIQYNPDDPTSNDTFEIPLMLTGNIVLRKRLNYEDKTRYFVIIQANDRAQNLNERRTTTTTLTVDVLDGDDLGPMFLPCVLVPNTRDCRPLTYQAAIPELRTPEELNPIIVTPPIQAIDQDRNIQPPSDRPGILYSILVGTPEDYPRFFHMHPRTAELSLLEPVNRDFHQKFDLVIKAEQDNGHPLPAFAGLHIEILDENNQSPYFTMPSYQGYILESAPVGATISDSLNLTSPLRIVALDKDIEDTKDPELHLFLNDYTSVFTVTQTGITRYLTLLQPVDREEQQTYTFSITAFDGVQESEPVIVNIQVMDANDNTPTFPEISYDVYVYTDMRPGDSVIQLTAVDADEGSNGEITYEILVGAQGDFIINKTTGLITIAPGVEMIVGRTYALTVQAADNAPPAERRNSICTVYIEVLPPNNQSPPRFPQLMYSLEISEAMRVGAVLLNLQATDREGDSITYAIENGDPQRVFNLSETTGILTLGKALDRESTDRYILIITASDGRPDGTSTATVNIVVTDVNDNAPVFDPYLPRNLSVVEEEANAFVGQVKATDPDAGINGQVHYSLGNFNNLFRITSNGSIYTAVKLNREVRDYYELVVVATDGAVHPRHSTLTLAIKVLDIDDNSPVFTNSTYTVLVEENLPAGTTILQIEAKDVDLGANVSYRIRSPEVKHFFALHPFTGELSLLRSLDYEAFPDQEASITFLVEAFDIYGTMPPGIATVTVIVKDMNDYPPVFSKRIYKGMVAPDAVKGTPITTVYAEDADPPGLPASRVRYRVDDVQFPYPASIFEVEEDSGRVITRVNLNEEPTTIFKLVVVAFDDGEPVMSSSATVKILVLHPGEIPRFTQEEYRPPPVSELATKGTMVGVISAAAINQSIVYSIVSGNEEDTFGINNITGVIYVNGPLDYETRTSYVLRVQADSLEVVLANLRVPSKSNTAKVYIEIQDENNHPPVFQKKFYIGGVSEDARMFTSVLRVKATDKDTGNYSVMAYRLIIPPIKEGKEGFVVETYTGLIKTAMLFHNMRRSYFKFQVIATDDYGKGLSGKADVLVSVVNQLDMQVIVSNVPPTLVEKKIEDLTEILDRYVQEQIPGAKVVVESIGARRHGDAFSLEDYTKCDLTVYAIDPQTNRAIDRNELFKFLDGKLLDINKDFQPYYGEGGRILEIRTPEAVTSIKKRGESLGYTEGALLALAFIIILCCIPAILVVLVSYRQVFKGRQAECTKTARIQAALPAAKPAVPAPAPVAAPPPPPPPPPGAHLYEELGDSSILSSLFLLYHFQQSRGNNSVSEDRKHQQVVMPFSSNTIEAHKSAHVDGSLKSNKLKSARKFTFLSDEDDLSAHNPLYKENISQVSTNSDISQRTDFVDPFSPKIQAKSKSLRGPREKIQRLWSQSVSLPRRLMRKVPNRPEIIDLQQWQGTRQKAENENTGICTNKRGSSNPLLTTEEANLTEKEEIRQGETLMIEGTEQLKSLSSDSSFCFPRPHFSFSTLPTVSRTVELKSEPNVISSPAECSLELSPSRPCVLHSSLSRRETPICMLPIETERNIFENFAHPPNISPSACPLPPPPPISPPSPPPAPAPLAPPPDISPFSLFCPPPSPPSIPLPLPPPTFFPLSVSTSGPPTPPLLPPFPTPLPPPPPSIPCPPPPSASFLSTECVCITGVKCTTNLMPAEKIKSSMTQLSTTTVCKTDPQREPKGILRHVKNLAELEKSVANMYSQIEKNYLRTNVSELQTMCPSEVTNMEITSEQNKGSLNNIVEGTEKQSHSQSTSL

SEQ ID NO: 18891 - protein, 494 aa, Homo sapiens
MAVFPSSGLPRCLLTLILLQLPKLDSAPFDVIGPPEPILAVVGEDAELPCRLSPNASAEHLELRWFRKKVSPAVLVHRDGREQEAEQMPEYRGRATLVQDGIAKGRVALRIRGVRVSDDGEYTCFFREDGSYEEALVHLKVAALGSDPHISMQVQENGEICLECTSVGWYPEPQVQWRTSKGEKFPSTSESRNPDEEGLFTVAASVIIRDTSAKNVSCYIQNLLLGQEKKVEISIPASSLPRLTPWIVAVAVILMVLGLLTIGSIFFTWRLYNERPRERRNEFSSKERLLEELKWKKATLHAVDVTLDPDTAHPHLFLYEDSKSVRLEDSRQKLPEKTERFDSWPCVLGRETFTSGRHYWEVEVGDRTDWAIGVCRENVMKKGFDPMTPENGFWAVELYGNGYWALTPLRTPLPLAGPPRRVGIFLDYESGDISFYNMNDGSDIYTFSNVTVIANAQDLSKEIPLSPMGEDSAPRDADTLHSKLIPTQPSQGAP

SEQ ID NO: 18892 - protein, 913 aa, Homo sapiens
MTDSKYFTTNKKGEIFELKAELNNEKKEKRKEAVKKVIAAMTVGKDVSSLFPDVVNCMQTDNLELKKLVYLYLMNYAKSQPDMAIMAVNSFVKDEDPYVRKTAAVCVAKLHDINAQMVEDQGFLDSLRDLIADSNPMVVANAVAALSEISESHPNSNLLDLNPQNINKLLTALNECTEWGQIFILDCLSNYNPKDDREAQSICERVTPRLSHANSAVVLSAVKVLMKFLELLPKDSDYYNMLLKKLAPPLVTLLSGEPEVQYVALRNINLIVQKRPEILKQEIKVFFVKYNDPIYVKLEKLDIMIRLASQANIAQVLAELKEYATEVDVDFVRKAVRAIGRCAIKVEQSAERCVSTLLDLIQTKVNYVVQEAIVVIRDIFRKYPNKYESIIATLCENLDSLDEPDARAAMIWIVGEYAERIDNADELLESFLEGFHDESTQVQLTLLTAIVKLFLKKPSETQELVQQVLSLATQDSDNPDLRDRGYIYWRLLSTDPVTAKEVVLSEKPLISEETDLIEPTLLDELICHIGSLASVYHKPPNAFVEGSHGIHRKHLPIHHGSTDAGDSPVGTTTATNLEQPQVIPSQGDLLGDLLNLDLGPPVNVPQVSSMQMGAVDLLGGGLDSLLGSDLGGGIGGSPAVGQSFIPSSVPATFAPSPTPAVVSSGLNDLFELSTGIGMAPGGYVAPKAVWLPAVKAKGLEISGTFTHRQGHIYMEMNFTNKALQHMTDFAIQFNKNSFGVIPSTPLAIHTPLMPNQSIDVSLPLNTLGPVMKMEPLNNLQVAVKNNIDVFYFSCLIPLNVLFVEDGKMERQVFLATWKDIPNENELQFQIKECHLNADTVSSKLQNNNVYTIAKRNVEGQDMLYQSLKLTNGIWILAELRIQPGNPNYTLSLKCRAPEVSQYIYQVYDSILKN

SEQ ID NO: 18893 - protein, 379 aa, Homo sapiens
METLCPAPRLAVPASPRGSPCSPTPRKPCRGTQEFSPLCLRALAFCALAKPRASSLGPGPGELAARSPVLRGPQAPLRPGGWAPDGLKHLWAPTGRPGVPNTAAGEDADVAACPRRGEEEEGGGGFPHFGVRSCAPPGRCPAPPHPRESTTSFASAPPRPAPGLEPQRGPAASPPQEPSSRPPSPPAGLSTEPAGPGTAPRPFLPGQPAEVDGNPPPAAPEAPAASPSTASPAPAAPGDLRQEHFDRLIRRSKLWCYAKGFALDTPSLRRGPERPPAKGPARGAAKKRRLPAPPPRTAQPRRPAPTLPTTSTFSLLNCFPCPPALVVGEDGDLKPASSLRLQGDSKPPPAHPLWRWQMGGPAVPEPPGLKFWGINMDES

SEQ ID NO: 18894 - protein, 540 aa, Homo sapiens
METLESELTCPICLELFEDPLLLPCAHSLCFNCAHRILVSHCATNESVESITAFQCPTCRHVITLSQRGLDGLKRNVTLQNIIDRFQKASVSGPNSPSETRRERAFDANTMTSAEKVLCQFCDQDPAQDAVKTCVTCEVSYCDECLKATHPNKKPFTGHRLIEPIPDSHIRGLMCLEHEDEKVNMYCVTDDQLICALCKLVGRHRDHQVAALSERYDKLKQNLESNLTNLIKRNTELETLLAKLIQTCQHVETVKDQKVIGREKQQYYPRNRRKWVSNSLQARLMGRRCISRRERKLTLDVEKVNASRQEAKLTEECDLLIEIIQQRRQIIGTKIKEGKVMRLRKLAQQIANCKQCIERSASLISQAEHSLKENDHARFLQTAKNITERVSMATASSQVLIPEINLNDTFDTFALDFSREKKLLECLDYLTAPNPPTIREELCTASYDTITVHWTSDDEFSVVSYELQYTIFTGQANVVSEYLMAYLFLSLVAFFRLIAFLNLNFKGRQGRKEHTIFIDLSFLNKKVIALTCTTLVKTAG

SEQ ID NO: 18895 - protein, 58 aa, Homo sapiens
MSEKKQPVDLGLLEEDDEFEEFPAEDWAGLDEDEDAHVWEDNWDDDNVEDDFSNQLRS

SEQ ID NO: 18896 - protein, 149 aa, Homo sapiens
MTPGTQSPFFLLLLLTVLTVVTGSGHASSTPGGEKETSATQRSSVPSSTEKNAFNSSLEDPSTDYYQELQRDISEMFLQIYKQGGFLGLSNIKFSLGLGCQAGASRCWCWSVFWLRWPLSISLPWLSVSAAERTTGSWTSFQPGIPTIL

SEQ ID NO: 18897 - protein, 329 aa, Homo sapiens
MELHILEHRLQVASVAKESIPLFTYGLIKLAFLSSKTRCKFFSLTETPEDYTIIVDEEGFLELPSSEHLSVADATWLALNVVSGGGSFSSSQPIGVTKIAKSVIAPLADQNISVFMLSTYQTDFILVRERDLPFVTHTLSSEFTILRVVNGETVAAENLGITNGFVKPKLVQRPVIHPLSSPSNRFCVTSLDPDTLPAVATLLMDVMFYSNGVKDPMATGDDCGHIRFFSFSLIEGYISLVMDVQTQQRFPSNLLFTSASGELWKMVRIGGQPLGFDECGIVAQISEPLAAADIPAYYISTFKFDHALVPEENINGVISALKVSQAEKH

SEQ ID NO: 18898 - protein, 120 aa, Homo sapiens
MKVSVAALSCLMLVTALGSQARVTKDAETEFMMSKLPLENPVLLDRFHATSADCCISYTPRSIPCSLLESYFETNSECSKPGVIFLTKKGRRFCANPSDKQVQVCMRMLKLDTRIKTRKN

SEQ ID NO: 18899 - protein, 790 aa, Homo sapiens
MEATSREAAPAKSSASGPNAPPALFELCGRAVSAHMGVLESGVWALPGPILQSILPLLNIYYLERIEETALKKGLSTQAIWRRLWDELMKTRPSSLESVTCWRAKFMEAFFSHVLRGTIDVSSDRRLCDQRFSPLLHSSRHVRQLTICNMLQGATELVAEPNRRVLETLASSLHTLKFRHLLFSDVAAQQSLRQLLHQLIHHGAVSQVSLYSWPVPESALFILILTMSAGFWQPGPGGPPCRLCGEASRGRAPSRDEGSLLLGSRRPRRDAAERCAAALMASRRKSEAKQMPRAAPATRVTRRSTQESLTAGGTDLKRELHPPATSHEAPGTKRSPSAPAATSSASSSTSSYKRAPASSAPQPKPLKRFKRAAGKKGARTRQGPGAESEDLYDFVFIVAGEKEDGEEMEIGEVACGALDGSDPSCLGLPALEASQRFRSISTLELFTVPLSTEAALTLCHLLSSWVSLESLTLSYNGLGSNIFRLLDSLRALSGQAGCRLRALHLSDLFSPLPILELTRAIVRALPLLRVLSIRVDHPSQRDNPGVPGNAGPPSHIIGDEEIPENCLEQLEMGFPRGAQPAPLLCSVLKASGSLQQLSLDSATFASPQDFGLVLQTLKEYNLALKRLSFHDMNLADCQSEVLFLLQNLTLQEITFSFCRLFEKRPAQFLPEMVAAMKGNSTLKGLRLPGNRLGNAGLLALADVFSEDSSSSLCQLDISSNCIKPDGLLEFAKRLERWGRGAFGHLRLFQNWLDQDAVTAREAIRRLRATCHVVSDSWDSSQAFADYVSTM

SEQ ID NO: 18900 - protein, 483 aa, Homo sapiens
MSENNKNSLESSLRQLKCHFTWNLMEGENSLDDFEDKVFYRTEFQNREFKATMCNLLAYLKHLKGQNEAALECLRKAEELIQQEHADQAEIRSLVTWGNYAWVYYHMGRLSDVQIYVDKVKHVCEKFSSPYRIESPELDCEEGWTRLKCGGNQNERAKVCFEKALEKKPKNPEFTSGLAIASYRLDNWPPSQNAIDPLRQAIRLNPDNQYLKVLLALKLHKMREEGEEEGEGEKLVEEALEKAPGVTDVLRSAAKFYRRKDEPDKAIELLKKALEYIPNNAYLHCQIGCCYRAKVFQVMNLRENGMYGKRKLLELIGHAVAHLKKADEANDNLFRVCSILASLHALADQYEDAEYYFQKEFSKELTPVAKQLLHLRYGNFQLYQMKCEDKAIHHFIEGVKINQKSREKEKMKDKLQKIAKMRLSKNGADSEALHVLAFLQELNEKMQQADEDSERGLESGSLIPSASSWNGERIEMWCPLGYC

SEQ ID NO: 18901 - protein, 363 aa, Homo sapiens [sequence omitted]

SEQ ID NO: 18902 - protein, 103 aa, Homo sapiens [sequence omitted]

SEQ ID NO: 18903 - protein, 65 aa, Homo sapiens
MKISVAAIPFFLLITIALGTKTESSSRGPYHPSECCFTYTTYKIPRQRIMDYYETNSQCSKPGIV

SEQ ID NO: 18904 - protein, 484 aa, Homo sapiens
MTPGTQSPFFLLLLLTVLTATTAPKPATVVTGSGHASSTPGGEKETSATQRSSVPSSTEKNAVSMTSSVLSSHSPGSGSSTTQGQDVTLAPATEPASGSAATWGQDVTSVPVTRPALGSTTPPAHDVTSAPDNKPAPGSTAPPAHGVTSAPDTRPAPGSTAPPAHGVTSAPDNRPALGSTAPPVHNVTSASGSASGSASTLVHNGTSARATTTPASKSTPFSIPSHHSDTPTTLASHSTKTDASSTHHSTVPPLTSSNHSTSPQLSTGVSFFFLSFHISNLQFNSSLEDPSTDYYQELQRDISEMFLQIYKQGGFLGLSNIKFRPGSVVVQLTLAFREGTINVHDVETQFNQYKTEAASRYNLTISDVSVSDVPFPFSAQSGAGVPGWGIALLVLVCVLVALAIVYLIALAVCQCRRKNYGQLDIFPARDTYHPMSEYPTYHTHGRYVPPSSTDRSPYEKVSAGNGGSSLSYTNPAVAATSANL

SEQ ID NO: 18905 - protein, 771 aa, Homo sapiens [sequence omitted]

SEQ ID NO: 18906 - protein, 136 aa, Homo sapiens; identical to SEQ ID NO: 7651

SEQ ID NO: 18907 - protein, 221 aa, Homo sapiens
MAAALFVLLGFALLGTHGASGAVFTTVEDLGSKILLTCSLNDSATEVTGHRWLKGGVVLKEDALPGQKTEFKVDSDDQWGEYSCVFLPEPMGTANIQLHGPPRVKAVKSSEHINEGETAMLVCKSESVPPVTDWAWYKITDSEDKALMNGSESRFFVSSSQGRSELHIENLNMEADPGQYRCNGTSSKGSDQAIITLRVRSHLAALWPFLGIVAEVLVLVT

SEQ ID NO: 18908 - protein, 708 aa, Homo sapiens
MATTAELFEEPFVADEYIERLVWRTPGGGSRGGPEAFDPKRLLEEFVNHIQELQIMDERIQRKVEKLEQQCQKEAKEFAKKVQELQKSNQVAFQHFQELDEHISYVATKVCHLGDQLEGVNTPRQRAVEAQKLMKYFNEFLDGELKSDVFTNSEKIKEAADIIQKLHLIAQELPFDRFSEVKSKIASKYHDLECQLIQEFTSAQRRGEISRMREVAAVLLHFKGYSHCVDVYIKQCQEGAYLRNDIFEDAGILCQRVNKQVGDIFSNPETVLAKLIQNVFEIKLQSFVKEQLEECRKSDAEQYLKNLYDLYTRTTNLSSKLMEFNLGTDKQTFLSKLIKSIFISYLENYIEVETGYLKSRSAMILQRYYDSKNHQKRSIGTGGIQDLKERIRQRTNLPLGPSIDTHGETFLSQEVVVNLLQETKQAFERCHRLSDPSDLPRNAFRIFTILVEFLCIEHIDYALETGLAGIPSSDSRNANLYFLDVVQQANTIFHLFDKQFNDHLMPLISSSPKLSECLQKKKEIIEQMEMKLDTGIDRTLNCMIGQMKHILAAEQKKTDFKPEDENNVLIQYTNACVKVCAYVRKQVEKIKNSMDGKNVDTVLMELGVRFHRLIYEHLQQYSYSCMGGMLAICDVAEYRKCAKDFKIPMVLHLFDTLHALCNLLVVAPDNLKQVCSGEQLANLDKNILHSFVQLRADYRSARLARHFS

SEQ ID NO: 18909 - protein, 383 aa, Homo sapiens
MARSLCPGAWLRKPYYLQCDKYKTGVIDGPACNSLCVTETLYFGKCLSTKPNNQMYLGIWDNLPGVVKCQMEQALHLDFGTELEPRKEIVLFDKPTRGTTVQKFKEMVYSLFKAKLGDQGNLSELVNLILTVADGDKDGQVSLGEAKSAWALLQLNEFLLMVILQDKEHTPKLMGFCGDLYVMESVEYTSLYGISLPWVIELFIPSGFRRSMDQLFTPSWPRKAKIAIGLLEFVEDVFHGPYGNFLMCDTSAKNLGYNDKYDLKMVDMRKIVPETNLKELIKDRHCESDLDCVYGTDCRTSCDQSTMKCTSEVIQPNLAKACQLLKDYLLRGAPSEIREELEKQLYSCIALKVTANQMEMEHSLILNNLKTLLWKKISYTNDS

SEQ ID NO: 18910 - protein, 117 aa, Homo sapiens
MRDLYIKNGQGFILVYSLVNQQSFQDIKPMRDQIVRVKRYEKVPLILVGNKVDLEPEREVMSSEGRALAQEWGCPFMETSAKSKSMVDELFAEIVRQMNYSSLPEKQDQCCTTCVVQ

SEQ ID NO: 18911 - protein, 1230 aa, Homo sapiens
MVTQIRNQSKASGSGLCEGDEVVSINGNPCADLTYPEVIKLMESITDSLQMLIKRPSSGISEALISENENKNLEHLTHGGYVESTTLQIRPATKTQCTEFFLAPVKTEVPLAENQRSGPDCAGSLKEETGPSYQRAPQMPDSQRGRVAEELILREKVEAVQPGPVVELQLSLSQERHKGASGPLVALPGAEKSKSPDPDPNLSHDRIVHINSIPTNEKADPFLRSSKIIQISSGRELRVIQESEAGDAGLPRVEVILDCSDRQKTEGCRLQAGKECVDSPVEGGQSEAPPSLVSFAVSSEGTEQGEDPRSEKDHSRPHKHRARHARLRRSESLSEKQVKEAKSKCKSIALLLTDAPNPNSKGVLMFKKRRRRARKYTLVSYGTGELEREADEEEEGDKEDTCEVAFLGASESEVDEELLSDVDDNTQVVNFDWDSGLVDIEKKLNRGDKMEMLPDTTGKGALMFAKRRERMDQITAQKEEDKVGGTPSREQDAAQTDGLRTTTSYQRKEEESVRTQSSVSKSYIEVSHGLGHVPQQNGFSGTSETANIQRMVPMNRTAKPFPGSVNQPATPFSPTRNMTSPIADFPAPPPYSAVTPPPDAFSRGVSSPIAGPAQPPPWPQPAPWSQPAFYDSSERIASRDERISVPAKRTGILQEAKRRSTTKPMFTFKEPKVSPNPELLSLLQNSEGKRGTGAGGDSGPEEDYLSLGAEACNFMQSSSAKQKTPPPVAPKPAVKSSSSQPVTPVSPVWSPGVAPTQPPAFPTSNPSKGTVVSSIKIAQPSYPPARPASTLNVAGPFKGPQAAVASQNYTPKPTVSTPTVNAVQPGAVGPSNELPGMSGRGAQLFAKRQSRMEKYVVDSDTVQAHAARAQSPTPSLPASWKYSSNVRAPPPVAYNPIHSPSYPLAALKSQPSAAQPSKMGKKKGKKPLNALDVMKHQPYQLNASLFTFQPPDAKDGLPQKSSVKVNSALAMKQALPPRPVNAASPTNVQASSVYSVPAYTSPPSFFAEASSPVSASPVPVGIPTSPKQESASSSYFVAPRPKFSAKKSGVTIQESGRSLSLPGRSVPPPISTSPWVYQPTYSYSSKPTDGLEKANKRPTPWEAAAKSPLGLVDDAFQPRNIQESIVANVVSAARRKVLPGPPEDWNERLSYIPQTQKAYMGSCGRQEYNVTANNNMSTTSQYGSQLPYAYYRQASRNDSAIMSMETRSDYCLPVADYNYNPHPRGWRRQT

SEQ ID NO: 18912 - protein, 818 aa, Homo sapiens
MGSGAGELGRAERLPVLFLFLLSLFCPALCEQIRYRIPEEMPKGSVVGNLATDLGFSVQELPTRKLRVSSEKPYFTVSAESGELLVSSRLDREEICGKKPACALEFEAVAENPLNFYHVNVEIEDINDHTPKFTQNSFELQISESAQPGTRFILEVAEDADIGLNSLQKYKLSLNPSFSLIIKEKQDGSKYPELALEKTLDREQQSYHRLVLTALDGGHPPLSGTTELRIQVTDANDNPPVFNRDVYRVSLRENVPPGTTVLQVSATDQDEGINSEITYSFYRTGQIFSLNSKSGEITTQKKLDFEETKEYSMVVEGRDGGGLVAQCTVEINIQDENDNSPEVTFHSLLEMILENAVPGTLIALIKIHDQDSGENGEVNCQLQGEVPFKIISSSKNSYKLVTDGTLDREQTPEYNVTITATDRGKPPLSSSISVILHIRDVNDNAPVFHQASYLVSVPENNPPGASIAQVCASDLDLGLNGQVSYSIMASDLEPLALASYVSMSAQSGVVFAQRAFDYEQLRTFELTLQARDQGSPALSANVSLRVLVGDRNDNAPRVLYPALGPDGSALFDMVPRAAEPGYLVTKVVAVDADSGHNAWLSYHVLQASEPGLFSLGLRTGEVRTARALGDRDAARQRLLVAVRDGGQPPLSATATLHLVFADSLQEVLPDITDRPVPSDPQAELQFYLVVALALISVLFLLAVILAVALRLRRSSSPAAWSCFQPGLCVKSGPVVPPNYSQGTLPYSYNLCVAHTGKTEFNFLKCSEQLSSGQDILCGDSSGALFPLCNSSESTSHPELVSFIYVYSFSLPTQFSVFT

SEQ ID NO: 18913 - protein, 64 aa, Homo sapiens
MVSWGRFICLVVVTMATLSLARPSFSLVEDTTLEPEDAISSGDDEDDTDGAEDFVSENSNNKSK

SEQ ID NO: 18914 - protein, 306 aa, Homo sapiens
MAAPIPQGFSCLSRFLGWWSRQPVLVTQSAAIVPVRTKKRFTPPIYQPKFKTEKEFMQHARKAGLVIPPEKSDRSIHLACTAGIFDAYVPPEGDARISSLSKEGLIERTERMKKTMASQVSIRRIKDYDANFKIKDFPEKAKDIFIEAHLCLNNSDHDRLHTLVTEHCFPDMTWDIKYKTVRWSFVESLEPSHVVQVRCSSMMNQGNVYGQITVRMHTRQTLAIYDRFGRLMYGQEDVPKDVLEYVVFEKQLTNPYGSWRMHTKIVPPWAPPKQPILKTVMIPGPQLKPEEEYEEAQGEAQKPQLA

SEQ ID NO: 18915 - protein, 916 aa, Homo sapiens
MTAGAGVLLLLLSLSGALRAHNEDLTTRETCKAGFSEDDYTALISQNILEGEKLLQVKFSSCVGTKGTQYETNSMDFKVGADGTVFATRELQVPSEQVAFTVTAWDSQTAEKWDAVVRLLVAQTSSPHSGHKPQKGKKVVALDPSPPPKDTLLPWPQHQNANGLRRRKRDWVIPPINVPENSRGPFPQQLVRIRSDKDNDIPIRYSITGVGADQPPMEVFSIDSMSGRMYVTRPMDREEHASYHLRAHAVDMNGNKVENPIDLYIYVIDMNDNRPEFINQVYNGSVDEGSKPGTYVMTVTANDADDSTTANGMVRYRIVTQTPQSPSQNMFTINSETGDIVTVAAGLDREKVQQYTVIVQATDMEGNLNYGLSNTATAIITVTDVNDNPPEFTASTFAGEVPENRVETVVANLTVMDRDQPHSPNWNAVYRIISGDPSGHFSVRTDPVTNEGMVTVVKAVDYELNRAFMLTVMVSNQAPLASGIQMSFQSTAGVTISIMDINEAPYFPSNHKLIRLEEGVPPGTVLTTFSAVDPDRFMQQAVRYSKLSDPASWLHINATNGQITTAAVLDRESLYTKNNVYEATFLAADNGIPPASGTGTLQIYLIDINDNAPELLPKEAQICEKPNLNAINITAADADVDPNIGPYVFELPFVPAAVRKNWTITRLNGDYAQLSLRILYLEAGMYDVPIIVTDSGNPPLSNTSIIKVKVCPCDDNGDCTTIGAVAAAGLGTGAIVAILICILILLTMVLLFVMWMKRREKERHTKQLLIDPEDDVRDNILKYDEEGGGEEDQDYDLSQLQQPEAMGHVPSKAPGVRRVDERPVGAEPQYPIRPMVPHPGDIGDFINEGLRAADNDPTAPPYDSLLVFDYEGSGSTAGSVSSLNSSSSGDQDYDYLNDWGPRFKKLADMYGGGEED

SEQ ID NO: 18916 - protein, 848 aa, Homo sapiens
MLQTKDLIWTLFFLGTAVSLQVDIVPSQGEISVGESKFFLCQVAGDAKDKDISWFSPNGEKLTPNQQRISVVWNDDSSSTLTIYNANIDDAGIYKCVVTGEDGSESEATVNVKIFQKLMFKNAPTPQEFREGEDAVIVCDVVSSLPPTIIWKHKGRDVILKKDVRFIVLSNNYLQIRGIKKTDEGTYRCEGRILARGEINFKDIQVIVNVPPTIQARQNIVNATANLGQSVTLVCDAEGFPEPTMSWTKDGEQIEQEEDDEKYIFSDDSSQLTIKKVDKNDEAEYICIAENKAGEQDATIHLKVFAKPKITYVENQTAMELEEQVTLTCEASGDPIPSITWRTSTRNISSEEKTLDGHMVVRSHARVSSLTLKSIQYTDAGEYICTASNTIGQDSQSMYLEVQYAPKLQGPVAVYTWEGNQVNITCEVFAYPSATISWFRDGQLLPSSNYSNIKIYNTPSASYLEVTPDSENDFGNYNCTAVNRIGQESLEFILVQADTPSSPSIDQVEPYSSTAQVQFDEPEATGGVPILKYKAEWRAVGEEVWHSKWYDAKEASMEGIVTIVGLKPETTYAVRLAALNGKGLGEISAASEFKTQPVQGEPSAPKLEGQMGEDGNSIKVNLIKQDDGGSPIRHYLVRYRALSSEWKPEIRLPSGSDHVMLKSLDWNAEYEVYVVAENQQGKSKAAHFVFRTSAQPTAIPANGSPTSGLSTGAIVGILIVIFVLLLVVVDITCYFLNKCGLFMCIAVNLCGKAGPGAKGKDMEEGKAAFSKDESKEPIVEVRTEEERTPNHDGGKHTEPNETTPLTEPEKGPVEAKPECQETETKPAPAEVKTVPNDATQTKENESKA

SEQ ID NO: 18917 - protein, 445 aa, Homo sapiens
MKVKMLSRNPDNYVRETKLDLQRVPRNYDPALHPFEVPREYIRALNATKLERVFAKPFLASLDGHRDGVNCLAKHPEKLATVLSGACDGEVRIWNLTQRNCIRTIQAHEGFVRGICTRFCGTSFFTVGDDKTVKQWKMDGPGYGDEEEPLHTILGKTVYTGIDHHWKEAVFATCGQQVDIWDEQRTNPICSMTWGFDSISSVKFNPIETFLLGSCASDRNIVLYDMRQATPLKKVILDMRTNTICWNPMEAFIFTAANEDYNLYTFDMRALDTPVMVHMDHVSAVLDVDYSPTGKEFVSASFDKSIRIFPVDKSRSREVYHTKRMQHVICVKWTSDSKYIMCGSDEMNIRLWKANASEKLGVLTSREKAAKDYNQKLKEKFQHYPHIKRIARHRHLPKSIYSQIQEQRIMKEARRRKEVNRIKHSKPGSVPLVSEKKKHVVAVVK

SEQ ID NO: 18918 - protein, 328 aa, Homo sapiens
MAILLSQIVFIEEQAAGIGKSAKIVVHLHPAPPNKEPGPFQSSKNSYIKLSFKEHGQIEFYRRLSEEMTQRRWENMPVSQSLQTNRGPQPGRIRAVGIVGIERKLEEKRKETDKNISEAFEDLSKLMIKAKEMVELSKSIANKIKDKQGDITEDETIRFKSYLLSMGIANPVTRETYGSGTQYHMQLAKQLAGILQVPLEERGGIMSLTEVYCLVNRARGMELLSPEDLVNACKMLEALKLPLRLRVFDSGVMVIELQSHKEEEMVASALETVSEKGSLTSEEFAKLVGMSVLLAKERLLLAEKMGHLCRDDSVEGLRFYPNLFMTQS

SEQ ID NO: 18919 - protein, 403 aa, Homo sapiens
MAIPGIPYERRLLIMADPRDKALQDYRKKLLEHKEIDGRLKELREQLKELTKQYEKSENDLKALQSVGQIVGEVLKQLTEEKFIVKATNGPRYVVGCRRQLDKSKLKPGTRVALDMTTLTIMRYLPREVDPLVYNMSHEDPGNVSYSEIGGLSEQIRELREVIELPLTNPELFQRVGIIPPKGCLLYGPPGTGKTLLARAVASQLDCNFLKVVSSSIVDKYIGESARLIREMFNYARDHQPCIIFMDEIDAIGGRRFSEGTSADREIQRTLMELLNQMDGFDTLHRVKMIMATNRPDTLDPALLRPGRLDRKIHIDLPNEQARLDILKIHAGPITKHGEIDYEAIVKLSDGFNGADLRNVCTEAGMFAIRADHDFVVQEDFMKAVRKVADSKKLESKLDYKPV

SEQ ID NO: 18920 - protein, 196 aa, Homo sapiens
MSLGRLCRLLKPALLCGALAAPGLAGTMCASRDDWRCARSMHEFSAKDIDGHMVNLDKYRGFVCIVTNVASQGKTEVNYTQLVDLHARYAECGLRILAFPCNQFGKQEPGSNEEIKEFAAGYNVKFDMFSKICVNGDDAHPLWKWMKIQPKGKGILGNAIKWNFTKFLIDKNGCVVKRYGPMEEPLVIEKDLPHYF

SEQ ID NO: 18921 - protein, 49 aa, Homo sapiens
MRDPDDQYKLTEDTRQLGLVVCRGTSVVLICPQDGMEAIPNPFIQQQDA

SEQ ID NO: 18922 - protein, 1583 aa, Homo sapiens
MAQILPVRFQEHFQLQNLGINPANIGFSTLTMESDKFICIREKVGEQAQVTIIDMSDPMAPIRRPISAESAIMNPASKVIALKAGKTLQIFNIEMKSKMKAHTMAEEVIFWKWVSVNTVALVTETAVYHWSMEGDSQPMKMFDRHTSLVGCQVIHYRTDEYQKWLLLVGISAQQNRVVGAMQLYSVDRKVSQPIEGHAAAFAEFKMEGNAKPATLFCFAVRNPTGGKLHIIEVGQPAAGNQPFVKKAVDVFFPPEAQNDFPVAMQIGAKHGVIYLITKYGYLHLYDLESGVCICMNRISADTIFVTAPHKPTSGIIGVNKKGQVLSVCVEEDNIVNYATNVLQNPDLGLRLAVRSNLAGAEKLFVRKFNTLFAQGSYAEAAKVAASAPKGILRTRETVQKFQSIPAQSGQASPLLQYFGILLDQGQLNKLESLELCHLVLQQGRKQLLEKWLKEDKLECSEELGDLVKTTDPMLALSVYLRANVPSKVIQCFAETGQFQKIVLYAKKVGYTPDWIFLLRGVMKISPEQGLQFSRMLVQDEEPLANISQIVDIFMENSLIQQCTSFLLDALKNNRPAEGLLQTWLLEMNLVHAPQVADAILGNKMFTHYDRAHIAQLCEKAGLLQQALEHYTDLYDIKRAVVHTHLLNPEWLVNFFGSLSVEDSVECLHAMLSANIRQNLQLCVQVASKYHEQLGTQALVELFESFKSYKGLFYFLGSIVNFSQDPDVHLKYIQAACKTGQIKEVERICRESSCYNPERVKNFLKEAKLTDQLPLIIVCDRFGFVHDLVLYLYRNNLQRYIEIYVQKVNPSRTPAVIGGLLDVDCSEEVIKHLIMAVRGQFSTDELVAEVEKRNRLKLLLPWLESQIQEGCEEPATHNALAKIYIDSNNSPECFLRENAYYDSSVVGRYCEKRDPHLACVAYERGQCDLELIKVCNENSLFKSEARYLVCRKDPELWAHVLEETNPSRRQLIDQVVQTALSETRDPEEISVTVKAFMTADLPNELIELLEKIVLDNSVFSEHRNLQNLLILTAIKADRTRVMEYISRLDNYDALDIASIAVSSALYEEAFTVFHKFDMNASAIQVLIEHIGNLDRAYEFAERCNEPAVWSQLAQAQLQKDLVKEAINSYIRGDDPSSYLEVVQSASRSNNWEDLVKFLQMARKKGRESYIETELIFALAKTSRVSELEDFINGPNNAHIQQVGDRCYEEGMYEAAKLLYSNVSNFARLASTLVHLGEYQAAVDNSRKASSTRTWKEVCFACMDGQEFRFAQLCGLHIVIHADELEELMCYYQDRGYFEELILLLEAALGLERAHMGMFTELAILYSKFKPQKMLEHLELFWSRVNIPKVLRAAEQAHLWAELVFLYDKYEEYDNAVLTMMSHPTEAWKEGQFKDIITKVANVELCYRALQFYLDYKPLLINDLLLVLSPRLDHTWTVSFFSKAGQLPLVKPYLRSVQSHNNKSVNEALNHLLTEEEDYQDAMQHAAESRDAELAQKLLQWFLEEGKRECFAACLFTCYDLLRPDMVLELAWRHNLVDLAMPYFIQVMREYLSKVDKLDALESLRKQEEHVTEPAPLVFDFDGHE

SEQ ID NO: 18923 - protein, 240 aa, Homo sapiens; identical to SEQ ID NO: 3466

SEQ ID NO: 18924 - protein, 512 aa, Homo sapiens
MKAIIHLTLLALLSVNTATNQGNSADAVTTTETATSGPTVAAADTTETNFPETASTTANTPSFPTATSPAPPIISTHSSSTIPTPAPPIISTHSSSTIPIPTAADSESTTNVNSLATSDIITASSPNDGLITMVPSETQSNNEMSPTTEDNQSSGPPTGTALLETSTLNSTGPSNPCQDDPCADNSLCVKLHNTSFCLCLEGYYYNSSTCKKGKVFPGKISVTVSETFDPEEKHSMAYQDLHSEITSLFKDVFGTSVYGQTVILTVSTSLSPRSEMRADDKFVNVTIVTILAETTSDNEKTVTEKINKAIRSSSSNFLNYDLTLRCDYYGCNQTADDCLNGLACDCKSDLQRPNPQSPFCVASSLKCPDACNAQHKQCLIKKSGGAPECACVPGYQEDANGNCQKCAFGYSGLDCKDKFQLILTIVGTIAGIVILSMIIALIVTARSNNKTKHIEEENLIDEDFQNLKLRSTGFTNLGAEGSVFPKVRITASRDSQMQNPYSRHSSMPRPDY

SEQ ID NO: 18925 - protein, 61 aa, Homo sapiens
MKIHVFLFVLFFFLVPIATRVKCAVKDTYSCFIMRGKCRHECHDFEKPIGFCTKLNANCYM

SEQ ID NO: 18926 - protein, 1886 aa, Homo sapiens
MTRWVPTKREEKYGVAFYNYDARGADELSLQIGDTVHILETYEGWYRGYTLRKKSKKGIFPASYIHLKEAIVEGKGQHETVIPGDLPLIQEVTTTLREWSTIWRQLYVQDNREMFRSVRHMIYDLIEWRSQILSGTLPQDELKELKKKVTAKIDYGNRILDLDLVVRDEDGNILDPELTSTISLFRAHEIASKQVEERLQEEKSQKQNIDINRQAKFAATPSLALFVNLKNVVCKIGEDAEVLMSLYDPVESKFISENYLVRWSSSGLPKDIDRLHNLRAVFTDLGSKDLKREKISFVCQIVRVGRMELRDNNTRKLTSGLRRPFGVAVMDVTDIINGKVDDEDKQHFIPFQPLALDDAIRHKPLNMSSRFSPRVAGENDFLQTVINKVIAAKEVNHKGQGLWVTLKLLPGDIHQIRKEFPHLVDRTTAVARKTGFPEIIMPGDVRNDIYVTLVQGDFDKGSKTTAKNVEVTVSVYDEDGKRLEHVIFPGAGDEAISEYKSVIYYQVKQPRWFETVKVAIPIEDVNRSHLRFTFRHRSSQDSKDKSEKIFALAFVKLMRYDGTTLRDGEHDLIVYKAEAKKLEDAATYLSLPSTKAELEEKGHSATGKSMQSLGSCTISKDSFQISTLVCSTKLTQNVDLLGLLKWRSNTSLLQQNLRQLMKVDGGEVVKFLQDTLDALFNIMMENSESETFDTLVFDALVFIIGLIADRKFQHFNPVLETYIKKHFSATLAYTKLTKVLKNYVDGAEKPGVNEQLYKAMKALESIFKFIVRSRILFNQLYENKGEADFVESLLQLFRSINDMMSSMSDQTVRVKGAALKYLPTIVNDVKLVFDPKELSKMFTEFILNVPMGLLTIQKLYCLIEIVHSDLFTQHDCREILLPMMTDQLKYHLERQEDLEACCQLLSHILEVLYRKDVGPTQRHVQIIMEKLLRTVNRTVISMGRDSELIGNFVACMTAILRQMEDYHYAHLIKTFGKMRTDVVDFLMETFIMFKNLIGKNVYPFDWVIMNMVQNKVFLRAINQYADMLNKKFLDQANFELQLWNNYFHLAVAFLTQESLQLENFSSAKRAKILNKYGDMRRQIGFEIRDMWYNLGQHKIKFIPEMVGPILEMTLIPETELRKATIPIFFDMMQCEFHSTRSFQMFENEIITKLDHEVEGGRGDEQYKVLFDKILLEHCRKHKYLAKTGETFVKLVVRLMERLLDYRTIMHDENKENRMSCTVNVLNFYKEIEREEMYIRYLYKLCDLHKECDNYTEAAYTLLLHAKLLKWSEDVCVAHLTQRDGYQATTQGQLKEQLYQEIIHYFDKGKMWEEAIALGKELAEQYENEMFDYEQLSELLKKQAQFYENIVKVIRPKPDYFAVGYYGQGFPTFLRGKVFIYRGKEYERREDFEARLLTQFPNAEKMKTTSPPGDDIKNSPGQYIQCFTVKPKLDLPPKFHRPVSEQIVSFYRVNEVQRFEYSRPIRKGEKNPDNEFANMWIERTIYTTAYKLPGILRWFEVKSVFMVEISPLENAIETMQLTNDKINSMVQQHLDDPSLPINPLSMLLNGIVDPAVMGGFANYEKAFFTDRYLQEHPEAHEKIEKLKDLIAWQIPFLAEGIRIHGDKVTEALRPFHERMEACFKQLKEKVEKEYGVRIMPSSLDDRRGSRPRSMVRSFTMPSSSRPLSVASVSSLSSDSTPSRPGSDGFALEPLLPKKMHSRSQDKLDKDDLEKEKKDKKKEKRNSKHQEIFEKEFKPTDISLQQSEAVILSETISPLRPQRPKSQVMNVIGSERRFSVSPSSPSSQQTPPPVTPRAKLSFSMQSSLELNGMTGADVADVPPPLPLKGSVADYGNLMENQDLLGSPTPPPPPPHQRHLPPPLPSKTPPPPPPKTTRKQASVDSGIVQ

SEQ ID NO: 18927 - protein, 683 aa, Homo sapiens
MAALLLLPLLLLLPLLLLKLHLWPQLRWLPADLAFAVRALCCKRALRARALAAAAADPEGPEGGCSLAWRLAELAQQRAAHTFLIHGSRRFSYSEAERESNRAARAFLRALGWDWGPDGGDSGEGSAGEGERAAPGAGDAAAGSGAEFAGGDGAARGGGAAAPLSPGATVALLLPAGPEFLWLWFGLAKAGLRTAFVPTALRRGPLLHCLRSCGARALVLAPEFLESLEPDLPALRAMGLHLWAAGPGTHPAGISDLLAEVSAEVDGPVPGYLSSPQSITDTCLYIFTSGTTGLPKAARISHLKILQCQGFYQLCGVHQEDVIYLALPLYHMSGSLLGIVGCMGIGATVVLKSKFSAGQFWEDCQQHRVTVFQYIGELCRYLVNQPPSKAERGHKVRLAVGSGLRPDTWERFVRRFGPLQVLETYGLTEGNVATINYTGQRGAVGRASWLYKHIFPFSLIRYDVTTGEPIRDPQGHCMATSPGEPGLLVAPVSQQSPFLGYAGGPELAQGKLLKDVFRPGDVFFNTGDLLVCDDQGFLRFHDRTGDTFRWKGENVATTEVAEVFEALDFLQEVNVYGVTVPGHEGRAGMAALVLRPPHALDLMQLYTHVSENLPPYARPRFLRLQESLATTETFKQQKVRMANEGFDPSTLSDPLYVLDQAVGAYLPLTTARYSALLAGNLRI

SEQ ID NO: 18928 - protein, 56 aa, Homo sapiens
MADVSERTLQLSVLVAFASGVLLGWQANRLRRRYLDWRKRRLQDKLAATQKKLDLA

SEQ ID NO: 18929 - protein, 132 aa, Homo sapiens
MKCVFVTVGTTSFDDLIACVSAPDSLQKIESLGYNRLILQIGRGTVVPEPFSTESFTLDVYRYKDSLKEDIQKADLVISHAGAGSCLETLEKGKPLVVVINEKLMNNHQLELAKQLHKEGHLFYCTCRYARD

SEQ ID NO: 18930 - protein, 607 aa, Homo sapiens
MRGAARLGRPGRSCLPGARGLRAPPPPPLLLLLALLPLLPAPGAAAAPAPRPPELQSASAGPSVSLYLSEDEVRRLIGLDAELYYVRNDLISHYALSFSLLVPSETNFLHFTWHAKSKVEYKLGFQVDNVLAMDMPQVNISVQGEVPRTLSVFRVELSCTGKVDSEVMILMQLNLTVNSSKNFTVLNFKRRKMCYKKLEEVKTSALDKNTSRTIYDPVHAAPTTSTRVFYISVGVCCAVIFLVAIILAVLHLHSMKRIELDDSISASSSSQGLSQPSTQTTQYLRADTPNNATPITSYPTLRIEKNDLRSVTLLEAKGKVKDIAISRERITLKDVLQEGTFGRIFHGILIDEKDPNKEKQAFVKTVKDQASEIQVTMMLTESCKLRGLHHRNLLPITHVCIEEGEKPMVILPYMNWGNLKLFLRQCKLVEANNPQAISQQDLVHMAIQIACGMSYLARREVIHKDLAARNCVIDDTLQVKITDNALSRDLFPMDYHCLGDNENRPVRWMALESLVNNEFSSASDVWAFGVTLWELMTLGQTPYVDIDPFEMAAYLKDGYRIAQPINCPDELFAVMACCWALDPEERPKFQQLVQCLTEFHAALGAYV

SEQ ID NO: 18931 - protein, 302 aa, Homo sapiens; identical to SEQ ID NO: 11814

SEQ ID NO: 18932 - protein, 70 aa, Homo sapiens
MRVLFFVFGVLSLMSTVPPTRSFTSNDECPSEYYHCRLKCNADEHAIRYCADFSICCKLKIIQIDGQKKW

SEQ ID NO: 18933 - protein, 117 aa, Homo sapiens
MDWTWRFLFVVAAATGVQSQVQLVQSGAEVKKPGSSVKVSCKASGGTFSSYAISWVRQAPGQGLEWMGGIIPIFGTANYAQKFQGRVTITADESTSTAYMELSSLRSEDTAVYYCAR

SEQ ID NO: 18934 - protein, 119 aa, Homo sapiens
MDILCSTLLLLTVPSWVLSQVTLRESGPALVKPTQTLTLTCTFSGFSLSTSGMCVSWIRQPPGKALEWLALIDWDDDKYYSTSLKTRLTISKDTSKNQVVLTMTNMDPVDTATYYCARI

SEQ ID NO: 18935 - protein, 103 aa, Homo sapiens
MADDKDSLPKLKDLAFLKNQLESLQRRVEDEVNSGVGQDGSLLSSPFLKGFLAGYVVAKLRASAVLGFAVGTCTGIYAAQAYAVPNVEKTLRDYLQLLRKGPD

SEQ ID NO: 18936 - protein, 274 aa, Homo sapiens
MPALRPALLWALLALWLCWAAPAHALQCRDGYEPCVNKGMCVTYHSGTGYCKCPEGFLGEYCQHRDPCEKNRCQNGGTCVAQAMLGKATCRCASGFTGEDCQYSTPHPCFVSRPCLNGGTCHMLSRDTYECTCQVGFTGKECQWTDACLSHLCANGSTCTTVANQFSCKCLTGFTGQKCETDVNECDIPGHCQHGGTCLNLPGSYQCQCLQGFTGQYCDRLYVPCAHSPCVNGGTCRQTGDFTFECNCLPETVRNKRNRALGKRQASLEWKRTR

SEQ ID NO: 18937 - protein, 72 aa, Homo sapiens
MAAATRGCRPWGSLLGLLGLVSAAAAAWDLASLRCTLGAFCECDFRPDLPEGSEELGPREPHCLWPLPLPLR

SEQ ID NO: 18938 - protein, 232 aa, Homo sapiens
MGRLVLLWGAAVFLLGGWMALGQGGAEGVQIQIIYFNLETVQVTWNASKYSRTNLTFHYRFNGDEAYDQCTNYLLQEGHTSGCLLDAEQRDDILYFSIRNGTHPVFTASRWMVYYLKPSSPKHVRFSWHQDAVTVTCSDLSYGDLLYEVQYRSPFDTEWQTQSRSVTQAGVQWCDLCLLQPSPPRFKRFSCLSLPSSWDYRHPPPRLANFCIISRDGVSPCWPGWSRTCDLR

SEQ ID NO: 18939 - protein, 748 aa, Homo sapiens
MGRAGAAAVIPGLALLWAVGLGSAAPSPPRLRLSFQELQAWHGLQTFSLERTCCYQALLVDEERGRLFVGAENHVASLNLDNISKRAKKLAWPAPVEWREECNWAGKDIGTECMNFVKLLHAYNRTHLLACGTGAFHPTCAFVEVGHRAEEPVLRLDPGRIEDGKGKSPYDPRHRAASVLVGEELYSGVAADLMGRDFTIFRSLGQRPSLRTEPHDSRWLNEPKFVKVFWIPESENPDDDKIYFFFRETAVEAAPALGRLSVSRVGQICRNDVGGQRSLVNKWTTFLKARLVCSVPGVEGDTHFDQLQDVFLLSSRDHRTPLLYAVFSTSSIFQGSAVCVYSMNDVRRAFLGPFAHKEGPMHQWVSYQGRVPYPRPGMCPSKTFGTFSSTKDFPDDVIQFARNHPLMYNSVLPTGGRPLFLQVGANYTFTQIAADRVAAADGHYDVLFIGTDVGTVLKVISVPKGSRPSAEGLLLEELHVFEDSAAVTSMQISSKRHQLYVASRSAVAQIALHRCAAHGRVCTECCLARDPYCAWDGVACTRFQPSAKRRFRRQDVRNGDPSTLCSGDSSRPALLEHKVFGVEGSSAFLECEPRSLQARVEWTFQRAGVTAHTQVLAEERTERTARGLLLRRLRRRDSGVYLCAAVEQGFTQPLRRLSLHVLSATQAERLARAEEAAPAAPPGPKLWYRDFLQLVEPGGGGSANSLRMCRPQPALQSLPLESRRKGRNRRTHAPEPRAERGPRSATHW

SEQ ID NO: 18940 - protein, 95 aa, Homo sapiens
MYRNEFTAWYRRMSVVYGIGTWSVLGSLLYYSRTMAKSSVDQKDGSASEVPSELSERPKGFYVETVVTYKEDFVPNTEKILNYWKSWTGGPGTEP

SEQ ID NO: 18941 - protein, 486 aa, Homo sapiens
MPLPVQVFNLQGAVEPMQIDVDPQEDPQNAPDVNYVVENPSLDLEQYAASYSGLMRIERLQFIADHCPTLRVEALKMALSFVQRTFNVDMYEEIHRKLSEATRELQNAPDAIPESGVEPPALDTAWVEATRKKALLKLEKLDTDLKNYKGNSIKESIRRGHDDLGDHYLDCGDLSNALKCYSRARDYCTSAKHVINMCLNVIKVSVYLQNWSHVLSYVSKAESTPEIAERGERDSQTQAILTKLKCAAGLAELAARKYKQAAKCLLLASFDHCDFPELLSPSNVAIYGGLCALATFDRQELQRNVISSSSFKLFLELEPQVRDIIFKFYESKYASCLKMLDEMKDNLLLDMYLAPHVRTLYTQIRNRALIQYFSPYVSADMHRMAAAFNTTVAALEDELTQLILEGLISARVDSHSKILYARDVDQRSTTFEKSLLMGKEFQRRAKAMMLRAAVLRNQIHVKSPPREGSQGELTPANSQSRMSTNM

SEQ ID NO: 18942 - protein, 57 aa, Homo sapiens
MSEKKQPVDLGLLEEDDEFEEFPAEDWAGLDEDEDAHVWEDNWDDDNVEDDFSNQLR

SEQ ID NO: 18943 - protein, 67 aa, Homo sapiens
MENGGAGTLQIRQVLLFFVLLGMSQAGSETGNFLVMEELQSGSFVGNLAKTLGLEHLWILKQLSHTQ

SEQ ID NO: 18944 - protein, 131 aa, Homo sapiens
MFSDNSHCPDCGQQWFPSLELGHWLYQTELVENECYQVFLDRINRADYCPECYPDNPANRSLVLPWSFPLEWAPQNLTRWTFEKACHPFLLGPPLVRKRIHDSRVAGFNPALQLILTRTDKTLNKKLGQNK

SEQ ID NO: 18945 - protein, 5059 aa, Homo sapiens
MPGAPLLRLLTAVSAAVAVAVAGAPGTVMPPTTGDATLAFVFDVTGSMWDELMQVIDGASRILERSLSRRSQAIANYALVPFHDPDIGPVTLTADPTVFQRELRELYVQGGGDCPEMSVGAIKAAVEVANPGSFIYVFSDARAKDYHKKEELLRLLQLKQSQVVFVLTGDCGDRTHPGYLAYEEIAATSSGQVFHLDKQQVTEVLKWVESAIQASKVHLLSTDHEEEGEHTWRLPFDPSLKEVTISLSGPGPEIEVQDPLGRILQEDEGLNVLLNIPDSAKVVAFKPEHPGLWSIKVYSSGRHSVRITGVSNIDFRAGFSTQPLLDLNHTLEWPLQGVPISLVINSTGLKAPGRLDSVELAQSSGKPLLTLPTKPLSNGSTHQLWGGPPFHTPKERFYLKVKGKDHEGNPLLRVSGVSYSGVAPGAPLVSMAPRIHGYLHQPLLVSCSVHSALPFRLQLRRGEARLGEERHFQESGNSSWEILRASKAEEGTYECTAVSRAGTGRAKAQIVVTDPPPQLVPAPNVTVSPGETAVLSCRVLGEAPYNLTWVRDWRVLPASTGRVAQLADLSLEISGIIPTDGGRYQCVASNANGVTRASVWLLVREAPQVSIHTSSQHFSQGVEVKVSCSASGYPTPHISWSRESQALQEDSRIHVDAQGTLIIQGVAPEDAGNYSCQATNEVGTDQETVTLYYTDPPSVSAVNAVVLVAVGEEAVLVCEASGVPPPRVIWYRGGLEMILAPEGSSSGKLRIPAAQERDAGTYTCRAVNELGDASAEIQLAVGHAPQLTELPRDVTVELGRSALLACRATGRPPPTVTWRRGDGQPLGLRLGAGRGSRSRQPDSGVLFFESVAPEDQAPYVCEARNVFGKVQAEARLIVTGHAPPQIASSAPTVRVLEGQPVSLPCIVLAGRPLPERHWLKDGRPLPPGSRHSIRADGSLHLDRALQEHAGRYSCVATNTAGSQHRDVELVVQVPPRIHPTATHHITNEGVAASLPCVASGVPAPTITWTKETNALTSRGPHYNVSKEGTLLIAQPSAQDAGAYVCTATNTVGFSSQEMRLSVNTKPRIHMNGSRNADVPLQVTAKAGEEVTLDCEAKGSPPPLVTWTKDSRPVPPITNRYGLLPSGSLRLAQVQVGDSGHYECTASNPAGSASHRYVLGVQVPPQVQPGPRVLKVLVGEALDLNCVAEGNPEPQLSWSKDGVVLQGRGPQGSVHFAAIRTSDAGRYRCEASNSAGVDAWEVELRVLEPPHWGADETSGLLERVAGENASLPCPARGTPKPQVTWRKGPSSEPLHGQPGVAVLEEGSLFLASVSPADSGDYECQATNEVGSTSRRAKLVVYVPPSIREDGRKANVSGMAGQSLTLECDANGFPVPEIVWLKDAQLIPKVGGHRLLDEGQSLHFPRIQEGDSGLYSCRAENQAGTAQRDFHLLVLTPPSVLGAGAAQEVLGLAGADVELQCWTSGVPTPQVEWTKDRQPVLPGGPHLQVQEDGQVLRITGSHVGDEGRYQCVAFSPAGQQARDFQLRVHAPPTIWGSNETGEVAVMEDHLVQLLCEARGVPTPNITWFKDGALLPTSTKVVYTRGGRQLQLGRAQSSDAGVYTCKASNAVGAAEKATRLDVYVPPTIEGAGGRPYVVKAVAGRPVALECVARGHPSPTLSWHHEGLPVAESNESRLETDGSVLRLESPGEASSGLYSCVASSPAGEAVLQYSVEVQVPPQLLVAEGLGQVTTIVGQPLELPCQASGSPVPTIQWLQNGRPAEELAGVQVASQGTTLHIDHVELDHSGLFACQATNEAGTAGAEVEVSVHEFPSVSIIGGENITAPFLQPVTLQCIGDGVPTPSLRWWKDGVALAAFGGNLQIEKVDLRDEGIYTCAATNLAGESKREVALKVLVPPNIEPGPVNKAVLENASVTLECLASGVPPPDVSWFKGHQPVSSWMGVTVSVDGRVLRIEQAQLSDAGSYRCVASNVAGSTELRYGLRVNVPPRITLPPSLPGPVLVNTPVRLTCNATGAPSPTLMWLKDGNPVSPAGTPGLQVFPGGRVLTLASARASDSGRYSCVAVSAVGEDRQDVVLQVHMPPSILGEELNVSVVANESVALECQSHAMPPPVLSWWKDGRPLEPRPGVHLSADKALLQVDRADVWDAGHYTCEALNQAGHSEKHYNLNVWVAPVFPLRESHTLTVREGHPTRLSCECRGVPFPKISWRKDGQPLPGEGAGLQHVSAVGRLLYLGQAQLAQEGTYTCECSNVVGNSSQDLQLEVHVPPQIAGPREPPTQVSVVQDGVATLECNATGKPPPTVTWERDGQPVGAELGLQLQNQGQSLHVERAQAAHTGRYSCVAENLAGRAERKFELSVLVPPELIGDLDPLTNITAALHSPLTLLCEAMGIPPPAIRWFRGEEPVSPGEDTYLLAGGWMLKMTQTQEQDSGLYSCLASNEAGEARRNFSVEVLVPPSIENEDLEEVIKVLDGQTAHLMCNVTGHPQPKLTWFKDGRPLARGDAHHISPDGVLLQVLQANLSSAGHYSCIAANAVGEKTKHFQLSVLLAPTILGGAEDSADEEVTVTVNNPISLICEALAFPSPNITWMKDGAPFEASRNIQLLPGTHGLQILNAQKEDAGQYTCVVTNELGEAVKNYHVEVLIPPSISKDDPLAEVGVKEVKTKVNSTLTLECESWAVPPPTIRWYKDGQPVTPSSRLQVLGEGRLLQIQPTQVSDSGRYLCVATNVAGEDDQDFNVLIQVPPMFQKVGDFSAAFEILSREEEARGGVTEYREIVENNPAYLYCDTNAIPPPDLTWYREDQPLSAGDEVSVLQGGRVLQIPLVRAENAGRYSCKASNEVGEDWLHYELLVLTPPVILGDTEELVEEVTVNASSTVSLQCPALGNPVPTISWLQNGLPFSPSPRLQVLEDGQVLQVSTAEVADAASYMCVAENQAGSAEKLFTLRVQVPPRIAGLDLEQVTAILNSSVSLPCDVHAHPNPEVTWYKDSQALSLGEEVFLLPGTHTLQLGRARLSDSGMYTCEALNAAGRDQKLVQLSVLVPPAFRQAPRGPQDAVLVRVGDKAVLSCETDALPEPTVTWYKDGQPLVLAQRTQALRGGQRLEIQEAQVSDKGLYSCKVSNVAGEAVRTFTLTVQVPPTFENPKTETVSQVAGSPLVLTCDVSGVPAPTVTWLKDRMPVESSAVHGVVSRGGRLQLSRLQPAQAGTYTCVAENTQAEARKDFVVAVLVAPRIRSSGVAREHHVLEGQEVRLDCEADGQPPPDVAWLKDGSPLGQDMGPHLRFYLDGGSLVLKGLRASDAGAYTCVAHNPAGEDARLHTVNVLVPPTIKQGADGSGTLVSRPGELVTMVCPVRGSPPIHVSWLKDGLPLPLSQRTLLHGSGHTLRISKVQLADAGIFTCVAASPAGVADRNFTLQVQVPPVLEPVEFQNDVVVVRGSLVELPCEARGVPLPLVSWMKDGEPLLSQSLEQGPSLQLEAVGAGDSGTYSCVAVSEAGEARRHFQLTVMEPPHIEDSGQPTELSLTPGAPMELLCDAQGTPQPNITWHKDGQALTRLENNSRATRVLRVENVQVRDAGLYTCLAESPAGAIEKSFRVRVQAPPNIVGPRGPRFVVGLAPGQLVLECSVEAEPAPKITWHRDGIVLQEDAHTQFPERGRFLQLQALSTADSGDYSCTARNAAGSTSVAFRVEIHTVPTIRSGPPAVNVSVNQTALLPCQADGVPAPLVSWRKDRVPLDPRSPRFEILPEGSLRIQPVLAQDAGHYLCLASNSAGSDRQGRDLRVLALLPCEASGSPKPLVVWWKDGQKLDFRLQQGAYRLLPSNALLLTAPGPQDSAQFECVVSNEVGEAHRLYQVTVHVPPTIADDQTDFTVTMMAPVVLTCHSTGIPAPTVSWSKAGAQLGARGSGYRVSPSGALEIGQALPIHAGRYTCSARNSAGVAHKHVFLTVQASPVVKPLPSVVRAVAEEEVLLPCEASGIPRPTITWQKEGLNVATGVSTQVLPGGQLRIAHASPEDAGNYLCIAKNSAGSAMGKTRLVVQVPPVIENGLPDLSTTEGSHAFLPCKARGSPEPNITWDKDGQPVSGAEGKFTIQPSGELLVKNLEGQDAGTYTCTAENAVGRARRRVHLTILVLPVFTTLPGDRSLRLGDRLWLRCAARGSPTPRIGWTVNDRPVTEGVSEQDGGSTLQRAAVSREDSGTYVCWAENRVGRTQAVSFVHVKEAPVLQGEAFSYLVEPVGGSIQLDCVVRGDPVPDIHWIKDGLPLRGSHLRHQLQNGSLTIRRTERDDAGRYQCLAENEMGVAKKVVILVLQSAPVFQVEPQDMTVRSGDDVALRCQATGEPTPTIEWLQAGQPLRASRRLRTLPDGSLWLENVETGDAGTYDCVAHNLLGSATARAFLVVRGEPQGSWGSMTGVINGRKFGVATLNTSVMQEAHSGVSSIHSSIRHVPANVGPLMRVLVVTIAPIYWALARESGEALNGHSLTGGRFRQESHVEFATGELLTMTQVARGLDPDGLLLLDVVVNGVVPESLADADLQVQDFEEHYVQTGPGQLFVGSTQRFFQGGLPSFLRCNHSIQYNAARGPQPQLVQHLRASAISSAFDPEAEALRFQLATALQAEENEVGCPEGFELDSQGAFCVDRDECSGGPSPCSHACLNAPGRFSCTCPTGFALAWDDRNCRDVDECAWDAHLCREGQRCVNLLGSYRCLPDCGPGFRVADGAGCEDVDECLEGLDDCHYNQLCENTPGGHRCSCPRGYRMQGPSLPCLDVNECLQLPKACAYQCHNLQGSYRCLCPPGQTLLRDGKACTSLERNGQNVTTVSHRGPLLPWLRPWASIPGTSYHAWVSLRPGPMALSSVGRAWCPPGFIRQNGVCTDLDECRVRNLCQHACRNTEGSYQCLCPAGYRLLPSGKNCQDINECEEESIECGPGQMCFNTRGSYQCVDTPCPATYRQGPSPGTCFRRCSQDCGTGGPSTLQYRLLPLPLGVRAHHDVARLTAFSEVGVPANRTELSMLEPDPRSPFALRPLRAGLGAVYTRRALTRAGLYRLTVRAAAPRHQSVFVLLIAVSPYPY

SEQ ID NO: 18946 - protein, 503 aa, Homo sapiens
MAETSLLEAGASAASTAAALENLQVEASCSVCLEYLKEPVIIECGHNFCKACITRWWEDLERDFPCPVCRKTSRYRSLRPNRQLGSMVEIAKQLQAVKRKIRDESLCPQHHEALSLFCYEDQEAVCLICAISHTHRAHTVVPLDDATQEYKEKLQKCLEPLEQKLQEITRCKSSEEKKPGELKRLVESRRQQILREFEELHRRLDEEQQVLLSRLEEEEQDILQRLRENAAHLGDKRRDLAHLAAEVEGKCLQSGFEMLKDVKSTLEKCEKVKTMEVTSVSIELEKNFSNFPRQYFALRKILKQLIADVTLDPETAHPNLVLSEDRKSVKFVETRLRDLPDTPRRFTFYPCVLATEGFTSGRHYWEVEAAHCVLAQDPENQALARFYCYTERTIAKRLVLRRDPSVKRTLCRGCSSLLVPGLTCTQRQRRCRGQRWTVQTCLTCQRSQRFLNDPGHLLWGDRPEAQLGSQADSKPLQPLPNTAHSISDRLPEEKMQTQGSSNQ

SEQ ID NO: 18947 - protein, 157 aa, Homo sapiens
MNPRKKVDLKLIIVGAIGVGKTSLLHQYVHKTFYEEYQTTLGASILSKIIILGDTTLKLQIWDTGGQERFRSMVSTFYKGSDGCILAFDVTDLESFEALDIWRGDVLAKIVPMEQSYPMVLLGNKIDLADRKYQSILENHLTESIKLSPDQSRSRCC

SEQ ID NO: 18948 - protein, 91 aa, Homo sapiens
MGLEDEQKMLTESGDPEEEEEEEEELVDPLTTVREQCEQLEKCVKARERLELYDEHVSSRSHTEEDCTEELFDFLHAKDHCVAHKLFNNLK

SEQ ID NO: 18949 - protein, 899 aa, Homo sapiens
MVKLLLSRGANINAFDKKDRRAIHWAAYMGHIEVVKLLVSHGAEVTCKDKKSYTPLHAAASSGMISVVKYLLDLGVDMNEPNAYGNTPLHVACYNGQDVVVNELIDCGAIVNQKNEKGFTPLHFAAASTHGALCLELLVGNGADVNMKSKDGKTPLHMTALHGRFSRSQTIIQSGAVIDCEDKNGNTPLHIAARYGHELLINTLITSGADTAKRGIHGMFPLHLAALSGFSDCCRKLLSSGFDIDTPDDFGRTCLHAAAAGGNLECLNLLLNTGADFNKKDKFGRSPLHYAAANCNYQCLFALVGSGASVNDLDERGCTPLHYAATSDTDGKCLEYLLRNDANPGIRDKQGYNAVHYSAAYGHRLCLQLIASETPLDVLMETSGTDMLSDSDNRATISPLHLAAYHGHHQALEVLVQSLLDLDVRNSSGRTPLDLAAFKGHVECVDVLINQGASILVKDYILKRTPIHAAATNGHSECLRLLIGNAEPQNAVDIQDGNGQTPLMLSVLNGHTDCVYSLLNKGANVDAKDKWGRTALHRGAVTGHEECVDALLQHGAKCLLRDSRGRTPIHLSAACGHIGVLGALLQSAASMDANPATADNHGYTALHWACYNGHETCVELLLEQEVFQKTEGNAFSPLHCAVINDNEGAAEMLIDTLGASIVNATDSKGRTPLHAAAFTDHVECLQLLLSHNAQVNSVDSTGKTPLMMAAENGQTNTVEMLVSSASAELTLQDNSKNTALHLACSKGHETSALLILEKITDRNLINATNAALQTPLHVAARNGLTMVVQELLGKGASVLAVDENGYTPALACAPNKDVADCLALILATMMPVSSSSPLSSLTFNAINRYTNTSKTVSFEALPIMRNEPSSYCSFNNIGGEQEYLYTDVDELNDSDSETY

SEQ ID NO: 18950 - protein, 184 aa, Homo sapiens
MARGAALALLLFGLLGVLVAAPDGGFDLSDALPDNENKKPTAIPKKPSAGDDFDLGDAVVDGENDDPRPPNPPKPMPNPNPNHPSSSGSFSDADLADGVSGGEGKGGSDGGGSHRKEGEEADAPGVIPGIVGAVVVAVAGAISSFIAYQKKKLCFKENEQGEVDMESHRNANAEPAVQRTLLEK

SEQ ID NO: 18951 - protein, 45 aa, Homo sapiens
MLQFLLGFTLGNVVGMYLAQNYDGIGSPSVSQAGVQWWDLGSLQL

SEQ ID NO: 18952 - protein, 859 aa, Homo sapiens
MRRCRWAALALGLLRLCLAQANFAPHFFDNGVGSTNGNMALFSLPEDTPVGSHVYTLNGTDPEGDPISYHISFDPSTRSVFSVDPTFGNITLVEELDREREDEIEAIISISDGLNLVAEKVVILVTDANDEAPRFIQEPYVALVPEDIPAGSIIFKVHAVDRDTGSGGSVTYFLQNLHSPFAVDRHSGVLRLQAGATLDYERSRTHYITVVAKDGGGRLHGADVVFSATTTVTVNVEDVQDMAPVFVGTPYYGYVYEDTLPGSEVLKVVAMDGDRGKPNRILYSLVNGNDGAFEINETSGAISITQSPAQLQREVYELHVQVTEMSPAGSPAAQATVPVTIRIVDLNNHPPTFYGESGPQNRFELSMNEHPPQGEILRGLKITVNDSDQGANAKFNLQLVGPRGIFRVVPQTVLNEAQVTIIVENSAAIDFEKSKVLTFKLLAVEVNTPEKFSSTADVVIQLLDTNDNVPKFDSLYYVARIPENAPGGSSVVAVTAVDPDTGPWGEVKYSTYGTGADLFLIHPSTGLIYTQPWASLDAEATARYNFYVKAEDMEGKYSVAEVFITLLDVNDHPPQFGKSVQKKTMVLGTPVKIEAIDEDAEEPNNLVDYSITHAEPANVFDINSHTGEIWLKNSIRSLDALHNITPGRDCLWSLEVQAKDRGSPSFSTTALLKIDITDAETLSRSPMAAFLIQTKDNPMKAVGVLAGTMATVVAITVLISTATFWRNKKSNKVLPMRRVLRKRPSPAPRTIRIEWLKSKSTKAATKFMLKEKPPNENCNNNSPESSLLPRAPALPPPPSVAPSTGAAQWTVPTVSGSLTPQPTQPPPKPKTMGSPVQSTLISELKQKFEKKSVHNKAYF

SEQ ID NO: 18953 - protein, 180 aa, Homo sapiens
MKTVAGALLSLVMGQPSEGRPELTPIAIMAGRLLVQRLFGGSSDLMDYDNVPTTVFTPLEYGCVGLSEEEAVARHGQEHVEVYHAHYKPLEFTVAGRDASQCYVKMVCLREPPQLVLGLHFLGPNAGEVTQGFALGIKCGASYAQVMRTVGIHPTCSEEVVKLRISKRSGLDPTVTGCUG

SEQ ID NO: 18954 - protein, 1070 aa, Homo sapiens
MTSPAKFKKDKEIIAEYDTQVKEIRAQLTEQMKCLDQQCELRVQLLQDLQDFFRKKAEIEMDYSRNLEKLAERFLAKTRSTKDQQFKKDQNVLSPVNCWNLLLNQVKRESRDHTTLSDIYLNNIIPRFVQVSEDSGRLFKKSKEVGQQLQDDLMKVLNELYSVMKTYHMYNADSISAQSKLKEAEKQEEKQIGKSVKQEDRQTPRSPDSTANVRIEEKHVRRSSVKKIEKMKEKRQAKYTENKLKAIKARNEYLLALEATNASVFKYYIHDLSDLIDCCDLGYHASLNRALRTFLSAELNLEQSKHEGLDAIENAVENLDATSDKQRLMEMYNNVFCPPMKFEFQPHMGDMASQLCAQQPVQSELVQRCQQLQSRLSTLKIENEEVKKTMEATLQTIQDIVTVEDFDVSDCFQYSNSMESVKSTVSETFMSKPSIAKRRANQQETEQFYFTKMKEYLEGRNLITKLQAKHDLLQKTLGESQRTDCSLARRSSTVRKQDSSQAIPLVVESCIRFISRHGLQHEGIFRVSGSQVEVNDIKNAFERGEDPLAGDQNDHDMDSIAGVLKLYFRGLEHPLFPKDIFHDLMACVTMDNLQERALHIRKVLLVLPKTTLIIMRYLFAFLNHLSQFSEENMMDPYNLAICFGPSLMSVPEGHDQVSCQAHVNELIKTIIIQHENIFPSPRELEGPVYSRGGSMEDYCDSPHGETTSVEDSTQDVTAEHHTSDDECEPIEAIAKFDYVGRTARELSFKKGASLLLYQRASDDWWEGRHNGIDGLIPHQYIVVQDTEDGVVERSSPKSEIEVISEPPEEKVTARAGASCPSGGHVADIYLANINKQRKRPESGSIRKTFRSDSHGLSSSLTDSSSPGVGASCRPSSQPIMSQSLPKEGPDKCSISGHGSLNSISRHSSLKNRLDSPQIRKTATAGRSKSFNNHRPMDPEVIAQDIEATMNSALNELRELERQSSVKHTPDVVLDTLEPLKTSPVVAPTSEPSSPLHTQLLKDPEPAFQRSASTAGDIACAFRPVKSVKMAAPVKPPATRPKPTVFPKTNATSPGVNSSTSPQSTDKSCTV

SEQ ID NO: 18955 - protein, 208 aa, Homo sapiens
MKLLTGLVFCSLVLSVSSRSFFSFLGEAFDGARDMWRAYSDMREANYIGSDKYFHARGNYDAAKRGPGGAWAAEVISTMRLFTGIVFCSLVMGVTSESWRSFFKEALQGVGDMGRAYWDIMISNHQNSNRYLYARGNYDAAQRGPGGVWAAKLISRSRVYLQGLIDCYLFGNSSTVLEDSKSNEKAEEWGRSGKDPDRFRPDGLPKKY

SEQ ID NO: 18956 - protein, 77 aa, Homo sapiens
MRLGSPGLLFLLFSSLRAEQLLGKRGQPLPEPSPDVTGRHAAGRLLPALVQRHPPGRAEVSLPGVEPIPGIPGGFER

SEQ ID NO: 18957 - protein, 918 aa, Homo sapiens
MSRPRFNPRGDFPLQRPRAPNPSGMRPPGPFMRPGSMGLPRFYPAGRARGIPHRFAGHESYQNMGPQRMNVQVTQHRTDPRLTKEKLDFHEAQQKKGKPHGSRWDDEPHISASVAVKQSSVTQVTEQSPKVQSRYTKESASSILASFGLSNEDLEELSRYPDEQLTPENMPLILRDIRMRKMGRRLPNLPSQSRNKETLGSEAVSSNVIDYGHASKYGYTEDPLEVRIYDPEIPTDEVENEFQSQQNISASVPNPNVICNSMFPVEDVFRQMDFPGESSNNRSFFSVESGTKMSGLHISGGQSVLEPIKSVNQSINQTVSQTMSQSLIPPSMNQQPFSSELISSVSQQERIPHEPVINSSNVHVGSRGSKKNYQSQADIPIRSPFGIVKASWLPKFSHADAQKMKRLPTPSMMNDYYAASPRIFPHLCSLCNVECSHLKDWIQHQNTSTHIESCRQLRQQYPDWNPEILPSRRNEGNRKENETPRRRSHSPSPRRSRRSSSSHRFRRSRSPMHYMYRPRSRSPRICHRFISRYRSRSRSRSPYRIRNPFRGSPKCFRSVSPERMSRRSVRSSDRKKALEDVVQRSGHGTEFNKQKHLEAADKGHSPAQKPKTSSGTKPSVKPTSATKSDSNLGGHSIRCKSKNLEDDTLSECKQVSDKAVSLQRKLRKEQSLHYGSVLLITELPEDGCTEEDVRKLFQPFGKVNDVLIVPYRKEAYLEMEFKEAITAIMKYIETTPLTIKGKSVKICVPGKKKAQNKEVKKKTLESKKVSASTLKRDADASKAVEIVTSTSAESVDQTQQLVPLVRNTARDHDGTPENEGEETVQSALFGFQYDASDHTMAWLGPNTVPEVKEMILQDPQLQTTQLPQTTQAPDITWGMLKKTTYKAEQILLQTQKPFTPDNLFLALLSGDAKPEYEQ

SEQ ID NO: 18958 - protein, 185 aa, Homo sapiens; identical to SEQ ID NO: 11713

SEQ ID NO: 18959 - protein, 5654 aa, Homo sapiens
MSVGRRKLALLWALALALACTRHTGHAQDGSSESSYKHHPALSPIARGPSGVPLRGATVFPSLRTIPVVRASNPAHNGRVCSTWGSFHYKTFDGDVFRFPGLCNYVFSEHCGAAYEDFNIQLRRSQESAAPTLSRVLMKVDGVVIQLTKGSVLVNGHPVLLPFSQSGVLIQQSSSYTKVEARLGLVLMWNHDDSLLLELDTKYANKTCGLCGDFNGMPVVSELLSHNTKLTPMEFGNLQKMDDPTDQCQDPVPEPPRNCSTGFGICEELLHGQLFSGCVALVDVGSYLEACRQDLCFCEDTDLLSCVCHTLAEYSRQCTHAGGLPQDWRGPDFCPQKCPNNMQYHECRSPCADTCSNQEHSRACEDHCVAGCFCPEGTVLDDIGQTGCVPVSKCACVYNGAAYAPGATYSTDCTNCTCSGGRWSCQEVPCPGTCSVLGGAHFSTFDGKQYTVHGDCSYVLTKPCDSSAFTVLAELRRCGLTDSETCLKSVTLSLDGAQTVVVIKASGEVFLNQIYTQLPISAANVTIFRPSTFFIIAQTSLGLQLNLQLVPTMQLFMQLAPKLRGQTCGLCGNFNSIQADDFRTLSGVVEATAAAFFNTFKTQAACPNIRNSFEDPCSLSVENEKYAQHWCSQLTDADGPFGRCHAAVKPGTYYSNCMFDTCNCERSEDCLCAALSSYVHACAAKGVQLGGWRDGVCTKPMTTCPKSMTYHYHVSTCQPTCRSLSEGDITCSVGFIPVDGCICPKGTFLDDTGKCVQASNCPCYHRGSMIPNGESVHDSGAICTCTHGKLSCIGGQAPAPVCAAPMVFFDCRNATPGDTGAGCQKSCHTLDMTCYSPQCVPGCVCPDGLVADGEGGCITAEDCPCVHNEASYRAGQTIRVGCNTCTCDSRMWRCTDDPCLATCAVYGDGHYLTFDGQSYSFNGDCEYTLVQNHCGGKDSTQDSFRVVTENVPCGTTGTTCSKAIKIFLGGFELKLSHGKVEVIGTDESQEVPYTIRQMGIYLVVDTDIGLVLLWDKKTSIFINLSPEFKGRVCGLCGNFDDIAVNDFATRSRSVVGDVLEFGNSWKLSPSCPDALAPKDPCTANPFRKSWAQKQCSILHGPTFAACHAHVEPARYYEACVNDACACDSGGDCECFCTAVAAYAQACHEVGLCVSWRTPSICPLFCDYYNPEGQCEWHYQPCGVPCLRTCRNPRGDCLRDVRGLEGCYPKCPPEAPIFDEDKMQCVATCPTPPLPPRCHVHGKSYRPGAVVPSDKNCQSCLCTERGVECTYKAEACVCTYNGQRFHPGDVIYHTTDGTGGCISARCGANGTIERRVYPCSPTTPVPPTTFSFSTPPLVVSSTHTPSNGPSSAHTGPPSSAWPTTAGTSPRTRLPTASASLPPVCGEKCLWSPWMDVSRPGRGTDSGDFDTLENLRAHGYRVCESPRSVECRAEDAPGVPLRALGQRVQCSPDVGLTCRNREQASGLCYNYQIRVQCCTPLPCSTSSSPAQTTPPTTSKTTETRASGSSAPSSTPGTVSLSTARTTPAPGTATSVKKTFSTPSPPPVPATSTSSMSTTAPGTSVVSSKPTPTEPSTSSCLQELCTWTEWIDGSYPAPGINGGDFDTFQNLRDEGYTFCESPRSVQCRAESFPNTPLADLGQDVICSHTEGLICLNKNQLPPICYNYEIRIQCCETVNVCRDITRLPKTVATTRPTPHPTGAQTQTTFTTHMPSASTEQPTATSRGGPTATSVTQGTHTTLVTRNCHPRCTWTKWFDVDFPSPGPHGGDKETYNNIIRSGEKICRRPEEITRLQCRAKSHPEVSIEHLGQVVQCSREEGLVCRNQDQQGPFKMCLNYEVRVLCCETPRGCHMTSTPGSTSSSPAQTTPSTTSKTTETQASGSSAPSSTPGTVSLSTARTTPAPGTATSVKKTFSTPSPPPVPATSTSSMSTTAPGTSVVSSKPTPTEPSTSSCLQELCTWTEWIDGSYPAPGINGGDFDTFQNLRDEGYTFCESPRSVQCRAESFPNTPLADLGQDVICSHTEGLICLNKNQLPPICYNYEIRIQCCETVNVCRDITRPPKTVATTRPTPHPTGAQTQTTFTTHMPSASTEQPTATSRGGPTATSVTQGTHTTPVTRNCHPRCTWTTWFDVDFPSPGPHGGDKETYNNIIRSGEKICRRPEEITRLQCRAKSHPEVSIEHLGQVVQCSREEGLVCRNQDQQGPFKMCLNYEVRVLCCETPKGCPVTSTPVTAPSTPSGRATSPTQSTSSWQKSRTTTLVTTSTTSTPQTSTTYAHTTSTTSAPTARTTSAPTTRTTSASPASTTSGPGNTPSPVPTTSTISAPTTSITSAPTTSTTSAPTSSTTSGPGTTPSPVPTTSITSAPTTSTTSAPTTSTTSARTSSTTSATTTSRISGPETTPSPVPTTSTTSATTTSTTSAPTTSTTSAPTSSTTSSPQTSTTSAPTTSTTSGPGTTPSPVPTTSTTSAPTTRTTSAPKSSTTSAATTSTTSGPETTPRPVPTTSTTSSPTTSTTSAPTTSTTSASTTSTTSGAGTTPSPVPTTSTTSAPTTSTTSAPISSTTSATTTSTTSGPGTTPSPVPTTSTTSAPTTSTTSGPGTTPSAVPTTSITSAPTTSTNSAPISSTTSATTTSRISGPETTPSPVPTASTTSASTTSTTSGPGTTPSPVPTTSTISVPTTSTTSASTTSTTSASTTSTTSGPGTTPSPVPTTSTTSAPTTSTTSAPTTSTISAPTTSTTSATTTSTTSAPTPRRTSAPTTSTISASTTSTTSATTTSTTSATTTSTISAPTTSTTLSPTTSTTSTTITSTTSAPISSTTSTPQTSTTSAPTTSTTSGPGTTSSPVPTTSTTSAPTTSTTSAPTTRTTSVPTSSTTSTATTSTTSGPGTTPSPVPTTSTTSAPTTRTTSAPTTSTTSAPTTSTTSAPTSSTTSATTTSTISVPTTSTTSVPGTTPSPVPTTSTISVPTTSTTSASTTSTTSGPGTTPSPVPTTSTTSAPTTSTTSAPTTSTISAPTTSTPSAPTTSTTLAPTTSTTSAPTTSTTSTPTSSTTSSPQTSTTSASTTSITSGPGTTPSPVPTTSTTSAPTTSTTSAATTSTISAPTTSTTSAPTTSTTSASTASKTSGLGTTPSPIPTTSTTSPPTTSTTSASTASKTSGPGTTPSPVPTTSTIFAPRTSTTSASTTSTTPGPGTTPSPVPTTSTASVSKTSTSHVSISKTTHSQPVTRDCHLRCTWTKWFDIDFPSPGPHGGDKETYNNIIRSGEKICRRPEEITRLQCRAESHPEVSIEHLGQVVQCSREEGLVCRNQDQQGPFKMCLNYEVRVLCCETPKGCPVTSTPVTAPSTPSGRATSPTQSTSSWQKSRTTTLVTTSTTSTPQTSTTSAPTTSTTSAPTTSTTSAPTTSTTSTPQTSISSAPTSSTTSAPTSSTISARTTSIISAPTTSTTSSPTTSTTSATTTSTTSAPTSSTTSTPQTSKTSAATSSTTSGSGTTPSPVTTTSTASVSKTSTSHVSVSKTTHSQPVTRDCHPRCTWTKWFDVDFPSPGPHGGDKETYNNIIRSGEKICRRPEEITRLQCRAKSHPEVSIEHLGQVVQCSREEGLVCRNQDQQGPFKMCLNYEVRVLCCETPKGCPVTSTSVTAPSTPSGRATSPTQSTSSWQKSRTTTLVTSSITSTTQTSTTSAPTTSTTPASIPSTTSAPTTSTTSAPTTSTTSAPTTSTTSTPQTTTSSAPTSSTTSAPTTSTISAPTTSTISAPTTSTTSAPTASTTSAPTSTSSAPTTNTTSAPTTSTTSAPITSTISAPTTSTTSTPQTSTISSPTTSTTSTPQTSTTSSPTTSTTSAPTTSTTSAPTTSTTSTPQTSISSAPTSSTTSAPTASTISAPTTSTTSFHTTSTTSPPTSSTSSTPQTSKTSAATSSTTSGSGTTPSPVPTTSTASVSKTSTSHVSVSKTTHSQPVTRDCHPRCTWTKWFDVDFPSPGPHGGDKETYNNIIRSGEKICRRPEEITRLQCRAESHPEVSIEHLGQVVQCSREEGLVCRNQDQQGPFKMCLNYEVRVLCCETPKGCPVTSTPVTAPSTPSGRATSPTQSTSSWQKSRTTTLVTTSTTSTPQTSTTSAPTTSTIPASTPSTTSAPTTSTTSAPTTSTTSAPTHRTTSGPTTSTTLAPTTSTTSAPTTSTNSAPTTSTISASTTSTISAPTTSTISSPTSSTTSTPQTSKTSAATSSTTSGSGTTPSPVPTTSTTSASTTSTTSAPTTSTTSGPGTTPSPVPSTSTTSAATTSTTSAPTTRTTSAPTSSMTSGPGTTPSPVPTTSTTSAPTTSTTSGPGTTPSPVPTTSTTSAPITSTTSGPGSTPSPVPTTSTTSAPTTSTTSASTASTTSGPGTTPSPVPTTSTTSAPTTRTTSASTASTTSGPGSTPSPVPTTSTTSAPTTRTTPASTASTTSGPGTTPSPVPTTSTTSASTTSTISLPTTSTTSAPITSMTSGPGTTPSPVPTTSTTSAPTTSTTSASTASTTSGPGTTPSPVPTTSTTSAPTTSTTSASTASTTSGPGTSLSPVPTTSTTSAPTTSTTSGPGTTPSPVPTTSTTSAPTTSTTSGPGTTPSPVPTTSTTPVSKTSTSHLSVSKTTHSQPVTSDCHPLCAWTKWFDVDFPSPGPHGGDKETYNNIIRSGEKICRRPEEITRLQCRAESHPEVNIEHLGQVVQCSREEGLVCRNQDQQGPFKMCLNYEVRVLCCETPRGCPVTSVTPYGTSPTNALYPSLSTSMVSASVASTSVASSSVASSSVAYSTQTCFCNVADRLYPAGSTIYRHRDLAGHCYYALCSQDCQVVRGVDSDCPSTTLPPAPATSPSISTSEPVTELGCPNAVPPRKKGETWATPNCSEATCEGNNVISLRPRTCPRVEKPTCANGYPAVKVADQDGCCHHYQCQCVCSGWGDPHYITFDGTYYTFLDNCTYVLVQQIVPVYGHFRVLVDNYFCGAEDGLSCPRSIILEYHQDRVVLTRKPVHGVMTNEIIFNNKVVSPGFRKNGIVVSRIGVKMYATIPELGVQVMFSGLIFSVEVPFSKFANNTEGQCGTCTNDRKDECRTPRGTVVASCSEMSGLWNVSIPDQPACHRPHPTPTTVGPTTVGSTTVGPTTVGSTTVGPTTPPAPCLPSPICQLILSKVFEPCHTVIPPLLFYEGCVFDRCHMTDLDVVCSSLELYAALCASHDICIDWRGRTGHMCPFTCPADKVYQPCGPSNPSYCYGNDSASLGALPEAGPITEGCFCPEGMTLFSTSAQVCVPTGCPRCLGPHGEPVKVGHTVGMDCQECTCEAATWTLTCRPKLCPLPPACPLPGFVPVPAAPQAGQCCPQYSCACNTSRCPAPVGCPEGARAIPTYQEGACCPVQNCSWTVCSINGTLYQPGAVVSSSLCETCRCELPGGPPSDAFVVSCETQICNTHCPVGFEYQEQSGQCCGTCVQVACVTNTSKSPAHLFYPGETWSDAGNHCVTHQCEKHQDGLVVVTTKKACPPLSCSLDEARMSKDGCCRFCPPPPPPYQNQSTCAVYHRSLIIQQQGCSSSEPVRLAYCRGNCGDSSSMYSLEGNTVEHRCQCCQELRTSLRNVTLHCTDGSSRAFSYTEVEECGCMGRRCPAPGDTQHSEEAEPEPSQEAESGSWERGVPVSPMH

SEQ ID NO: 18960 - protein, 564 aa, Homo sapiens
MSYPADDYESEAAYDPYAYPSDYDMHTGDPKQDLAYERQYEQQTYQVIPEVIKNFIQYFHKTVSDLIDQKVYELQASRVSSDVIDQKVYEIQDIYENSWTKLTERFFKNTPWPEAEAIAPQVGNDAVFLILYKELYYRHIYAKVSGGPSLEQRFESYYNYCNLFNYILNADGPAPLELPNQWLWDIIDEFIYQFQSFSQYRCKTAKKSEEEIDFLRSNPKIWNVHSVLNVLHSLVDKSNINRQLEVYTSGGDPESVAGEYGRHSLYKMLGYFSLVGLLRLHSLLGDYYQAIKVLENIELNKKSMYSRVPECQVTTYYYVGFAYLMMRRYQDAIRVFANILLYIQRTKSMFQRTTYKYEMINKQNEQMHALLAIALTMYPMRIDESIHLQLREKYGDKMLRMQKGDPQVYEELFSYSCPKFLSPVVPNYDNVHPNYHKEPFLQQLKVFSDEVQQQAQLSTIRSFLKLYTTMPVAKLAGFLDLTEQEFRIQLLVFKHKMKNLVWTSGISALDGEFQSASEVDFYIDKDMIHIADTKVARRYGDFFIRQIHKFEELNRTLKKMGQRP

SEQ ID NO: 18961 - protein, 173 aa, Homo sapiens
MARMNRPAPVEVTYKNMRFLITHNPTNATLNKFIEELKKYGVTTIVRVCEATYDTTLVEKEGIHVLDWPFDDGAPPSNQIVDDWLSLVKIKFREEPGCCIAVHCVAGLGRAPVLVALALIEGGMKYEDAVQFIRQKRRGAFNSKQLLYLEKYRPKMRLRFKDSNGHRNNCCIQ

SEQ ID NO: 18962 - protein, 66 aa, Homo sapiens
MEVDAPGVDGRDGLRERRGFSEGGRQNFDVRPQSGANGLPKHSYWLDLWLFILFDVVVFLFVYFLP

SEQ ID NO: 18963 - protein, 245 aa, Homo sapiens
MIISAMAMASVKLLAGVLRKPDAWIGLWGVLRGTPSSYKLCTSWNRYLYFSSTKLRAPNYKTLFYNIFSLRLPGLLLSPECIFPFSVRLKSNIRSTKSTKKSLQKVDEEDSDEESHHDEMSEQEEELEDDPTVVKNYKDLEKAVQSFRYDVVLKTGLDIGRNKVEDAFYKGELRLNEEKLWKKSRTVKVGDTLDLLIGEDKEAGTETVMRILLKKVFEEKTESEKYRVVLRRWKSLKLPKKRMSK

SEQ ID NO: 18964 - protein, 1013 aa, Homo sapiens
MPAARPPAAGLRGISLFLALLLGSPAAALERDALPEGDASPLGPYLLPSGAPERGSPGKEHPEERVVTAPPSSSQSAEVLGELVLDGTAPSAHHDIPALSPLLPEEARPKHALPPKKKLPSLKQVNSARKQLRPKATSAATVQRAGSQPASQGLDLLSSSTEKPGPPGDPDPIVASEEASEVPLWLDRKESAVPTTPAPLQISPFTSQPYVAHTLPQRPEPGEPGPDMAQEAPQEDTSPMALMDKGENELTGSASEESQETTTSTIITTTVITTEQAPALCSVSFSNPEGYIDSSDYPLLPLNNFLECTYNVTVYTGYGVELQVKSVNLSDGELLSIRGVDGPTLTVLANQTLLVEGQVIRSPTNTISVYFRTFQDDGLGTFQLHYQAFMLSCNFPRRPDSGDVTVMDLHSGGVAHFHCHLGYELQGAKMLTCINASKPHWSSQEPICSAPCGGAVHNATIGRVLSPSYPENTNGSQFCIWTIEAPEGQKLHLHFERLLLHDKDRMTVHSGQTNKSALLYDSLQTESVPFEGLLSEGNTIRIEFTSDQARAASTFNIRFEAFEKGHCYEPYIQNGNFTTSDPTYNIGTIVEFTCDPGHSLEQGPAIIECINVRDPYWNDTEPLCRAMCGGELSAVAGVVLSPNWPEPYVEGEDCIWKIHVGEEKRIFLDIQFLNLSNSDILTIYDGDEVMPHILGQYLGNSGPQKLYSSTPDLTIQFHSDPAGLIFGKGQGFIMNYIEVSRNDSCSDLPEIQNGWKTTSHTELVRGARITYQCDPGYDIVGSDTLTCQWDLSWSSDPPFCEKIMYCTDPGEVDHSTRLISDPVLLVGTTIQYTCNPGFVLEGSSLLTCYSRETGTPIWTSRLPHCVSEESLACDNPGLPENGYQILYKRLYLPGESLTFMCYEGFELMGEVTIRCILGQPSHWNGPLPVCKVAEAAAETSLEGGNMALAIFIPVLIISLLLGGAYIYITRCRYYSNLRLPLMYSHPYSQITVETEFDNPIYETGETREYEVSI

SEQ ID NO: 18965 - protein, 306 aa, Homo sapiens
MDFWLWPLYFLPVSGALRILPEVKVEGELGGSVTIKCPLPEMHVRIYLCREMAGSGTCGTVVSTTNFIKAEYKGRVTLKQYPRKNLFLVEVTQLTESDSGVYACGAGMNTDRGKTQKVTLNVHSEYEPSWEEQPMPETPKWFHLPYLFQMPAYASSSKFVTRVTTPAQRGKVPPVHHSSPTTQITHRPRVSRASSVAGDKPRTFLPSTTASKISALEGLLKPQTPSYNHHTRLHRQSPLQAGPPTGREDARPGELPEAPRVAATALPKQHLQRLPAARSWSGRCRHRGGPRSRPRSAVAPRPAAGV

SEQ ID NO: 18966 - protein, 559 aa, Homo sapiens
MQHVLCNHPPWIFTCLCAEGNIQPGDPGPGDQEKQQQASEGRPWSDQAEGPEGEGAMPLFGRTKKRTLGAFSRPPQRQPVSSRNGLRGVELEASPAQSGNPEETDKLLKRIEVLGFGTVNCGECGLSFSKMTNLLSHQRIHSGEKPYVCGVCEKGFSLKKSLARHQKAHSGEKPIVCRECGRGFNRKSTLIIHERTHSGEKPYMCSECGRGFSQKSNLIIHQRTHSGEKPYVCRECGKGFSQKSAVVRHQRTHLEEKTIVCSDCGLGFSDRSNLISHQRTHSGEKPYACKECGRCFRQRTTLVNHQRTHSKEKPYVCGVCGHSFSQNSTLISHRRTHTGEKPYVCGVCGRGFSLKSHLNRHQNIHSGEKPIVCKDCGRGFSQQSNLIRHQRTHSGEKPMVCGECGRGFSQKSNLVAHQRTHSGERPYVCRECGRGFSHQAGLIRHKRKHSREKPYMCRQCGLGFGNKSALITHKRAHSEEKPCVCRECGQGFLQKSHLTLHQMTHTGEKPYVCKTCGRGFSLKSHLSRHRKTTSVHHRLPVQPDPEPCAGQPSDSLYSL

SEQ ID NO: 18967 - protein, 923 aa, Homo sapiens
MCIPPPNVTGSLHIGHALTVAIQDALVRWHRMRGDQVLWVPGSDHAGIATQAVVEKQLWKERGVRRHELSREAFLREVWQWKEAKGGEICEQLRALGASLDWDRECFTMDVGSSVAVTEAFVRLYKAGLLYRNHQLVNWSCALRSAISDIEVENRPLPGHTQLRLPGCPTPVSFGLLFSVAFPVDGEPDAEVVVGTTRPETLPGDVAVAVHPDDSRYTHLHGRQLRHPLMGQPLPLITDYAVQPHVGTGAVKVTPAHSPADAEMGARHGLSPLNVIAEDGTMTSLCGDWLQGLHRFVAREKIMSVLSEWGLFRGLQNHPMVLPICSRSGDVIEYLLKNQWFVRCQEMGARAAKAVESGALELSPSFHQKNWQHWFSHIGDWCVSRQLWWGHQIPAYLVVEDHAQGEEDCWVVGRSEAEAREVAAELTGRPGAELTLERDPDVLDTWFSSALFPFSALGWPQETPDLARFYPLSLLETGSDLLLFWVGRMVMLGTQLTGQLPFSKVLLHPMVRDRQGRKMSKSLGNVLDPRDIISGVEMQVLQEKLRSGNLDPAELAIVAAAQKKDFPHGIPECGTDALRFTLCSHGVQAGDLHLSVSEVQSCRHFCNKIWNALRFILNALGEKFVPQPAEELSPSSPMDAWILSRLALAAQECERGFLTRELSLVTHALHHFWLHNLCDVYLEAVKPVLWHSPRPLGPPQVLFSCADLGLRLLAPLMPFLAEELWQRLPPRPGCPPAPSISVAPYPSACSLEHWRQPELERRFSRVQEVVQVLRALRATYQLTKARPRVLLQSSEPGDQGLFEAFLEPLGTLGYCGAVGLLPPGAAAPSGWAQAPLSDTAQVYMELQGLVDPQIQLPLLAARRYKLQKQLDSLTARTPSEGEAGTQRQQKLSSLQLELSKLDKAASHLRQLMDEPPAPGSPEL

SEQ ID NO: 18968 - protein, 72 aa, Homo sapiens
MESERSKRMGNACIPLKRIAYFLCLLSALLLTEGKKPAKPKCPAVCTCTKDNALCENARSIPRTVPPDVISL

SEQ ID NO: 18969 - protein, 1496 aa, Homo sapiens
MGTALLQRGGCFLLCLSLLLLGCWAELGSGLEFPGAEGQWTRFPKWNACCESEMSFQLKTRSARGLVLYFDDEGFCDFLELILTRGGRLQLSFSIFCAEPATLLADTPVNDGAWHSVRIRRQFRNTTLFIDQVEAKWVEVKSKRRDMTVFSGLFVGGLPPELRAAALKLTLASVREREPFKGWIRDVRVNSSQVLPVDSGEVKLDDEPPNSGGGSPCEAGEEGEGGVCLNGGVCSVVDDQAVCDCSRTGFRGKDCSQEDNNVEGLAHLMMGDQGKSKGKEEYIATFKGSEYFCYDLSQNPIQSSSDEITLSFKTLQRNGLMLHTGKSADYVNLALKNGAVSLVINLGSGAFEALVEPVNGKFNDNAWHDVKVTRNLRQVTISVDGILTTTGYTQEDYTMLGSDDFFYVGGSPSTADLPGSPVSNNFMGCLKEVVYKNNDVRLELSRLAKQGDPKMKIHGVVAFKCENVATLDPITFETPESFISLPKWNAKKTGSISFDFRTTEPNGLILFSHGKPRHQKDAKHPQMIKVDFFAIEMLDGHLYLLLDMGSGTIKIKALLKKVNDGEWYHVDFQRDGRSGTISVNTLRTPYTAPGESEILDLDDELYLGGLPENKAGLVFPTEVWTALLNYGYVGCIRDLFIDGQSKDIRQMAEVQSTAGVKPSCSKETAKPCLSNPCKNNGMCRDGWNRYVCDCSGTGYLGRSCEREATVLSYDGSMFMKIQLPVVMHTEAEDVSLRFRSQRAYGILMATTSRDSADTLRLELDAGRVKLTVNLDCIRINCNSSKGPETLFAGYNLNDNEWHTVRVVRRGKSLKLTVDDQQAMTGQMAGDHTRLEFHNIETGIITERRYLSSVPSNFIGHLQSLTFNGMAYIDLCKNGDIDYCELNARFGFRNIIADPVTFKTKSSYVALATLQAYTSMHLFFQFKTTSLDGLILYNSGDGNDFIVVELVKGYLHYVFDLGNGANLIKGSSNKPLNDNQWHNVMISRDTSNLHTVKIDTKITTQITAGARNLDLKSDLYIGGVAKETYKSLPKLVHAKEGFQGCLASVDLNGRLPDLISDALFCNGQIERGCEGPSTTCQEDSCSNQGVCLQQWDGFSCDCSMTSFSGPLCNDPGTTYIFSKGGGQITYKWPPNDRPSTRADRLAIGFSTVQKEAVLVRVDSSSGLGDYLELHIHQGKIGVKFNVGTDDIAIEESNAIINDGKYHVVRFTRSGGNATLQVDSWPVIERYPAGNNDNERLAIARQRIPYRLGRVVDEWLLDKGRQLTIFNSQATIIIGGKEQGQPFQGQLSGLYYNGLKVLNMAAENDANIAIVGNVRLVGEVPSSMTTESTATAMQSEMSTSIMETTTTLATSTARRGKPPTKEPISQTTDDILVASAECPSDDEDIDPCEPSSANPTRAGGREPYPGSAEVIRESSSTTGMVVGIVAAAALCILILLYAMYKYRNRDEGSYHVDESRNYISNSAQSNGAVVKEKQPSSAKSSNKNKKNKDKEYYV

SEQ ID NO: 18970 - protein, 506 aa, Homo sapiens
MRHCINCCIQLLPDGAHKQQVNCQGGPHHGHQACPTCKGENKILFRVDSKQMNLLAVLEVRTEGNENWGGFLRFKKGKRCSLVFGLIIMTLVMASYILSGAHQELLISSPFHYGGFPSNPSLMDSENPSDTKEHHHQSSVNNISYMKDYPSIKLIINSITTRIEFTTRQLPDLEDLKKQELHMFSVIPNKFLPNSKSPCWYEEFSGQNTTDPYLTNSYVLYSKRFRSTFDALRKAFWGHLAHAHGKHFRLRCLPHFYIIGQPKCGTTDLYDRLRLHPEVKFSAIKEPHWWTRKRFGIVRLRDGLRDRYPVEDYLDLFDLAAHQIHQGLQASSAKEQSKMNTIIIGEASASTMWDNNAWTFFYDNSTDGEPPFLTQDFIHAFQPNARLIVMLRDPVERLYSDYLYFASSNKSADDFHEKVTEALQLFENCMLDYSLRACVYNNTLNNAMPVCTPPPRTPRAGPWQKELVCCYYASGIVGLRFSIGTERSVLMCKCCSPLFMDVKAEN

SEQ ID NO: 18971 - protein, 277 aa, Homo sapiens
MGTALLQRGGCFLLCLSLLLLGCWAELGSGLEFPGAEGQWTRFPKWNACCESEMSFQLKTRSARGLVLYFDDEGFCDFLELILTRGGRLQLSFSIFCAEPATLLADTPVNDGAWHSVRIRRQFRNTTLFIDQVEAKWVEVKSKRRDMTVFSGLFVGGLPPELRAAALKLTLASVREREPFKGWIRDVRVNSSQVLPVDSGEVKLDDEPPNSGGGSPCEAGEEGEGGVCLNGGVCSVVDDQAVCDCSRTGFRGKDCSQDNNVEGLAHLMMGDQGKSKD

SEQ ID NO: 18972 - protein, 509 aa, Homo sapiens
MESERSKRMGNACIPLKRIAYFLCLLSALLLTEGKKPAKPKCPAVCTCTKDNALCENARSIPRTVPPDVISLSFVRSGFTEISEGSFLFTPSLQLLSLANNNLQTLPKDIFKGLDSLTNVDLRGNSFNCDCKLKWLVEWLGHTNATVEDIYCEGPPEYKKRKINSLSSKDFDCIITEFAKSQDLPYQSLSIDTFSYLNDEYVVIAQPFTGKCIFLEWDHVEKTFRNYDNITGTSTVVCKPIVIETQLYVIVAQLFGGSHIYKRDSFANKFIKIQDIEILKIRKPNDIETFKIENNWYFVVADSSKAGFTTIYKWNGNGFYSHQSLHAWYRDTDVEYLEIVRTPQTLRTPHLILSSSSQRPVIYQWNKATQLFTNQTDIPNMEDVYAVKHFSVKGDVYICLTRFIGDSKVMKWGGSSFQDIQRMPSRGSMVFQPLQINNYQYAILGSDYSFTQVYNWDAEKAKFVKFQELNVQAPRSFTHVSINKRNFLFASSFKGNTQIYKHVIVDLSA

SEQ ID NO: 18973 - protein, 119 aa, Homo sapiens
MQAAPRAGCGAALLLWIVSSCLCRAWTAPSTSQKCDEPLVSGLPHVAFSSSSSISGSYSPGYAKINKRGGAGGWSPSDSDHYQWLQVDFGNRKQISAIATQGRYSSSDWVTQYRMLYSD

SEQ ID NO: 18974 - protein, 144 aa, Homo sapiens [sequence omitted]

SEQ ID NO: 18975 - protein, 555 aa, Homo sapiens
MELEKSGALLESGTYEDNYYGTPKPPAEPAPLLLNVTDQILPGATPSAEGKRKRNKSVSNMEKASIEPPEEEEEERPVVNGNGVVVTPESSEHEDKSAGASGEMPSQPYPAPVYSQPEELKEQMDDTKPTKPEDNEEPDPLPDNWEMAYTEKGEVYFIDHNTKTTSWLDPRLAKKAKPPEECKENELPYGWEKIDDPIYGTYYVDHINRRTQFENPVLEAKRKLQQHNMPHTELGTKPLQAPGFREKPLFTRDASQLKGTFLSTTLKKSNMGFGFTIIGGDEPDEFLQVKSVIPDGPAAQDGKMETGDVIVYINEVCVLGHTHADVVKLFQSVPIGQSVNLVLCRGYPLPFDPEDPANSMVPPLAIMERPPPVMVNGRHNYETYLEYISRTSQSVPDITDRPPHSLHSMPTDGQLDGTYPPPVHDDNVSMASSGATQAELMTLTIVKGAQGFGFTIADSPTGQRVKQILDIQGCPGLCEGDLIVEINQQNVQNLSHTEVVDILKDCPIGSETSLIIHRGGKTNTGSAIKYVGKIVGSFNNIVKMQISLELNEIIL

SEQ ID NO: 18976 - protein, 151 aa, Homo sapiens
MLLILLSVALLALSSAQNLNEDVSQEESPSLIAGNPQGPSPQGGNKPQGPPPPPGKPQGPPPQGGNKPQGPPPPGKPQGPPPQGDKSRSPRSPPGKPQGPPPQGGNQPQGPPPPPGKPQGPPPQGGNRPQGPPPPGKPQGPPPQGDKSRSP

SEQ ID NO: 18977 - protein, 565 aa, Homo sapiens
MCAVQVKLELGHRAQVRKKPTVEGFTHDWMVFVRGPEHSNIQHFVEKVVFHLHESFPRPKRVCKDPPYKVEESGYAGFILPIEVYFKNKEEPRKVRFDYDLFLHLEGHPPVNHLRCEKLTFNNPTEDFRRKLLKAGGDPNRSIHTSSSSSSSSSSSSSSSSSSSSSSSSSSSSSSSSSSSSSSSSSSTSFSKPHKLMKEHKEKPSKDSREHKSAFKEPSRDHNKSSKESSKKPKENKPLKEEKIVPKMAFKEPKPMSKEPKPDSNLLTITSGQDKKAPSKRPPISDSEELSAKKRKKSSSEALFKSFSSAPPLILTCSADKKQIKDKSHVKMGKVKIESETSEKKKSTLPPFDDIVDPNDSDVEENISSKSDSEQPSPASSSSSSSSSFTPSQTRQQGPLRSIMKDLHSDDNEEESDEVEDNDNDSEMERPVNRGGSRSRRVSLSDGSDSESSSASSPLHHEPPPPLLKTNNNQILEVKSPIKQSKSDKQIKNGECDKAYLDELVELHRRLMTLRERHILQQIVNLIEETGHFHITNTTFDFDLCSLDKTTVRKLQSYLETSGTS

SEQ ID NO: 18978 - protein, 116 aa, Homo sapiens
MDYYRKYAAIFLVTLSVFLHVLHSAPDVQDCPECTLQENPFFSQPGAPILQCMGCCFSRAYPTPLRSKKTMLVQKNVTSESTCCVAKSYNRVTVMGGFKVENHTACHCSTCYYHKS

SEQ ID NO: 18979 - protein, 383 aa, Homo sapiens
MGTFCSVIKFENLQELKRLCHWGPIIALGVIAICSTMAMIDSVLWYWPLHTTGGSVNFIMLINWTVMILYNYFNAMFVGPGFVPLGWKPEISQDTMYLQYCKVCQAYKAPRSHHCRKCNRCVMKMDHHCPWINNCCGYQNHASFTLFLLLAPLGCIHAAFIFVMTMYTQLYHRLSFGWNTVKIDMSAARRDPLPIVPFGLAAFATTLFALGLALGTTIAVGMLFFIQMKIILRNKTSIESWIEEKAKDRIQYYQLDEVFVFPYDMGSRWRNFKQVFTWSGVPEGDGLEWPVREGCHQYSLTIEQLKQKADKRVRSVRYKVIEDYSGACCPLNKGIKTFFTSPCTEEPRIQLQKGEFILATRGLRYWLYGDKILDDSFIEGVLV

SEQ ID NO: 18980 - protein, 852 aa, Homo sapiens
MEYERRGGRGDRTGRYGATDRSQDDGGENRSRDHDYRDMDYRSYPREYGSQEGKHDYDDSSEEQSAEIRGQLQSHGVQAREVRLMRNKSSGQSRGFAFVEFSHLQDATRWMEANQHSLNILGQKVSMHYSDPKPKINEDWLCNKCGVQNFKRREKCFKCGVPKSEAEQKLPLGTRLDQQTLPLGGRELSQGLLPLPQPYQAQGVLASQALSQGSEPSSENANDTIILRNLNPHSTMDSILGALAPYAVLSSSNVRVIKDKQTQLNRGFAFIQLSTIEAAQLLQILQALHPPLTIDGKTINVEFAKGSKRDMASNEGSRISAASVASTAIAAAQWAISQASQGGEGTWATSEEPPVDYSYYQQDEGYGNSQGTESSLYAHGYLKGTKGPGITGTKGDPTGAGPEASLEPGADSVSMQAFSRAQPGAAPGIYQQSAEASSSQGTAANSQSYTIMSPAVLKSELQSPTHPSSALPPATSPTAQESYSQYPVPDVSTYQYDETSGYYYDPQTGLYYDPNSQYYYNAQSQQYLYWDGERRTYVPALEQSADGHKETGAPSKEGKEKKEKHKTKTAQQIAKDMERWARSLNKQKENFKNSFQPISSLRDDERRESATADAGYAILEKKGALAERQHTSMDLPKLASDDRPSPPRGLVAAYSGESDSEEEQERGGPEREEKLTDWQKLACLLCRRQFPSKEALIRHQQLSGLHKQNLEIHRRAHLSENELEALEKNDMEQMKYRDRAAERREKYGIPEPPEPKRRKYGGISTASVDFEQPTRDGLGSDNIGSRMLQAMGWKEGSGLGRKKQGIVTPIEAQTRVRGSGLGARGSSYGVTSTESYKETLHKTMVTRFNEAQ

SEQ ID NO: 18981 - protein, 436 aa, Homo sapiens
MQPPPSLCGRALVALVLACGLSRIWGEERGFPPDRATPLLQTAEIMTPPTKTLWPKGSNASLARSLAPAEVPKGDRTAGSPPRTISPPPCQGPIEIKETFKYINTVVSCLVFVLGIIGNSTLLRIIYKNKCMRNGPNILIASLALGDLLHIVIDIPINVYKLLAEDWPFGAEMCKLVPFIQKASVGITVLSLCALSIDRYRAVASWSRIKGIGVPKWTAVEIVLIWVVSVVLAVPEAIGFDIITMDYKGSYLRICLLHPVQKTAFMQFYKTAKDWWLFSFYFCLPLAITAFFYTLMTCEMLRKKSGMQIALNDHLKQRREVAKTVFCLVLVFALCWLPLHLSRILKLTLYNQNDPNRCELLSFLLVLDYIGINMASLNSCINPIALYLVSKRFKNCFKAGPHVGNKLVMLFSVNIECDGTVNQNPTMWPERKSNNN

SEQ ID NO: 18982 - protein, 142 aa, Homo sapiens
MRRLLLVTSLVVVLLWEAGAVPAPKVPIKMQVKHWPSEQDPEKAWGARVVEPPEKDDQLVVLFPVQKPKLLTTEEKPRGTKAWMETEDTLGHVLSPEPDHDSLYHPPPEEDQGEERPRLWVMPNHQVLLGPEEDQDHIYHPQ

SEQ ID NO: 18983 - protein, 279 aa, Homo sapiens
MERPSLRALLLGAAGLLLLLLPLSSSSSSDTCGPCEPASCPPLPPLGCLLGETRDACGCCPMCARGEGEPCGGGGAGRGYCAPGMECVKSRKRRKGKAGAAAGGPGVSGVCVCKSRYPVCGSDGTTYPSGCQLRAASQRAESRGEKAITQVSKGTCEQGPSIVTPPKDIWNVTGAQVYLSCEVIGIPTPVLIWNKVKRGHYGVQRTELLPGDRDNLAIQTRGGPEKHEVTGWVLVSPLSKEDAGEYECHASNSQGQASASAKITVVDALHEIPVKKGTQ

SEQ ID NO: 18984 - protein, 2457 aa, Homo sapiens
MDPSGVKVLETAEDIQERRQQVLDRYHRFKELSTLRRQKLEDSYRFQFFQRDAEELEKWIQEKLQIASDENYKDPTNLQGKLQKHQAFEAEVQANSGAIVKLDETGNLMISEGHFASETIRTRLMELHRQWELLLEKMREKGIKLLQAQKLVQYLRECEDVMDWINDKEAIVTSEELGQDLEHVEVLQKKFEEFQTDMAAHEERVNEVNQFAAKLIQEQHPEEELIKTKQDEVNAAWQRLKGLALQRQGKLFGAAEVQRFNRDVDETISWIKEKEQLMASDDFGRDLASVQALLRKHEGLERDLAALEDKVKALCAEADRLQQSHPLSATQIQVKREELITNWEQIRTLAAERHARLNDSYRLQRFLADFRDLTSWVTEMKALINADELASDVAGAEALLDRHQEHKGEIDAHEDSFKSADESGQALLAAGHYASDEVREKLTVLSEERAALLELWELRRQQYEQCMDLQLFYRDTEQVDNWMSKQEAFLLNEDLGDSLDSVEALLKKHEDFEKSLSAQEEKITALDEFATKLIQNNHYAMEDVATRRDALLSRRNALHERAMRRRAQLADSFHLQQFFRDSDELKSWVNEKMKTATDEAYKDPSNLQGKVQKHQAFEAELSANQSRIDALEKAGQKLIDVNHYAKDEVAARMNEVISLWKKLLEATELKGIKLREANQQQQFNRNVEDIELWLYEVEGHLASDDYGKDLTNVQNLQKKHALLEADVAAHQDRIDGITIQARQFQDAGHFDAENIKKKQEALVARYEALKEPMVARKQKLADSLRLQQLFRDVEDEETWIREKEPIAASTNRGKDLIGVQNLLKKHQALQAEIAGHEPRIKAVTQKGNAMVEEGHFAAEDVKAKLHELNQKWEALKAKASQRRQDLEDSLQAQQYFADANEAESWMREKEPIVGSTDYGKDEDSAEALLKKHEALMSDLSAYGSSIQALREQAQSCRQQVAPTDDETGKELVLALYDYQEKSPREVTMKKGDILTLLNSTNKDWWKVEVNDRQGFVPAAYVKKLDPAQSASRENLLEEQGSIALRQEQIDNQYHSLLELGEKRKGMLEKSCKKFMLFREANELQQWINEKEAALTSEEVGADLEQVEVLQKKFDDFQKDLKANESRLKDINKVAEDLESEGLMAEEVQAVQQQEVYGMMPRDETDSKTASPWKSARLMVHTVATFNSIKELNERWRSLQQLAEERSQLLGSAHEVQRFHRDADETKEWIEEKNQALNTDNYGHDLASVQALQRKHEGFERDLAALGDKVNSLGETAERLIQSHPESAEDLQEKCTELNQAWSSLGKRADQRKAKLGDSHDLQRFLSDFRDLMSWINGIRGLVSSDELAKDVTGAEALLERHQEHRTEIDARAGTFQAFEQFGQQLLAHGHYASPEIKQKLDILDQERADLEKAWVQRRMMLDQCLELQLFHRDCEQAENWMAAREAFLNTEDKGDSLDSVEALIKKHEDFDKAINVQEEKIAALQAFADQLIAAGHYAKGDISSRRNEVLDRWRRLKAQMIEKRSKLGESQTLQQFSRDVDEIEAWISEKLQTASDESYKDPTNIQLSKLLSKHQKHQAFEAELHANADRIRGVIDMGNSLIERGACAGSEDAVKARLAALADQWQFLVQKSAEKSQKLKEANKQQNFNTGIKDFDFWLSEVEALLASEDYGKDLASVNNLLKKHQLLEADISAHEDRLKDLNSQADSLMTSSAFDTSQVKDKRDTINGRFQKIKSMAASRRAKLNESHRLHQFFRDMDDEESWIKEKKLLVGSEDYGRDLTGVQNLRKKHKRLEAELAAHEPAIQGVLDTGKKLSDDNTIGKEEIQQRLAQFVEHWKELKQLAAARGQRLEESLEYQQFVANVEEEEAWINEKMTLVASEDYGDTLAAIQGLLKKHEAFETDFTVHKDRVNDVCTNGQDLIKKNNHHEENISSKMKGLNGKVSDLEKAAAQRKAKLDENSAFLQFNWKADVVESWIGEKENSLKTDDYGRDLSSVQTLLTKQETFDAGLQAFQQEGIANITALKDQLLAAKHVQSKAIEARHASLMKRWSQLLANSAARKKKLLEAQSHFRKVEDLFLTFAKKASAFNSWFENAEEDLTDPVRCNSLEEIKALREAHDAFRSSLSSAQADFNQLAELDRQIKSFRVASNPYTWFTMEALEETWRNLQKIIKERELELQKEQRRQEENDKLRQEFAQHANAFHQWIQETRTYLLDGSCMVEESGTLESQLEATKRKHQEIRAMRSQLKKIEDLGAAMEEALILDNKYTEHSTVGLAQQWDQLDQLGMRMQHNLEQQIQARNTTGVTEEALKEFSMMFKHFDKDKSGRLNHQEFKSCLRSLGYDLPMVEEGEPDPEFEAILDTVDPNRDGHVSLQEYMAFMISRETENVKSSEEIESAFRALSSEGKPYVTKEELYQNLTREQADYCVSHMKPYVDGKGRELPTAFDYVEFTRSLFVN

SEQ ID NO: 18985 - protein, 474 aa, Homo sapiens
MSISSDEVNFLVYRYLQESGFSHSAFTFGIESHISQSNINGALVPPAALISIIQKGLQYVEAEVSINEDGTLFDGRPIESLSLIDAVMPDVVQTRQQAYRDKLAQQQAAAAAAAAAAASQQGSAKNGENTANGEENGAHTIANNHTDMMEVDGDVEIPPNKAVVLRGHESEVFICAWNPVSDLLASGSGDSTARIWNLSENSTSGSTQLVLRHCIREGGQDVPSNKDVTSLDWNSEGTLLATGSYDGFARIWTKDGNLASTLGQHKGPIFALKWNKKGNFILSAGVDKTTIIWDAHTGEAKQQFPFHSAPALDVDWQSNNTFASCSTDMCIHVCKLGQDRPIKTFQGHTNEVNAIKWDPTGNLLASCSDDMTLKIWSMKQDNCVHDLQAHNKEIYTIKWSPTGPGTNNPNANLMLASASFDSTVRLWDVDRGICIHTLTKHQEPVYSVAFSPDGRYLASGSFDKCVHIWNTQVL

SEQ ID NO: 18986 - protein, 526 aa, Homo sapiens
MAGTVRTACLVVAMLLSLDFPGQAQPPPPPPDATCHQVRSFFQRLQPGLKWVPETPVPEAFEIVVRHAKNYTNAMFKNNYPSLTPQAFEFVGEFFTDVSLYILGSDINVDDMVNELFDSLFPVIYTQLMNPGLPDSALDINECLRGARRDLKVFGNFPKLIMTQVSKSLQVTRIFLQALNLGIEVINTTDHLKFSKDCGRMLTRMWYCSYCQGLMMVKPCGGYCNVVMQGCMAGVVEIDKYWREYILSLEELVNGMYRIYDMENVLLGLFSTIHDSIQYVQKNAGKLTTTIGKLCAHSQQRQYRSAYYPEDLFIDKKVLKVAHVEHEETLSSRRRELIQKLKSFISFYSALPGYICSHSPVAENDTLCWNGQELVERYSQKAARNGMKNQFNLHELKMKGPEPVVSQIIDKLKHINQLLRTMSMPKGRVLDKNLDEEGFESGDCGDDEDECIGGSGDGMIKVKNQLRFLAELAYDLDVDDAPGNSQQATPKDNEISTFHNLGNVHSPLKLLTSMAISVVCFFFLVH

SEQ ID NO: 18987 - protein, 54 aa, Homo sapiens
MGSRCALALAVLSALLCQVWSSGVFELKLQEFVNKKGLLGNRNCCRGGAGPPPC

SEQ ID NO: 18988 - protein, 35 aa, Homo sapiens
MKPRAECCSPKFWLVLAVLAVSGSRARSQKSPPSI

SEQ ID NO: 18989 - protein, 391 aa, Homo sapiens
MGTKGKVIKCKAAIAWEAGKPLCIEEVEVAPPKAHEVRIQIIATSLCHTDATVIDSKFEGLAFPVIVGHEAAGIVESIGPGVTNVKPGDKVIPLYAPLCRKCKFCLSPLTNLCGKISNLKSPASDQQLMEDKTSRFTCKGKPVYHFFGTSTFSQYTVVSDINLAKIDDDANLERVCLLGCGFSTGYGAAINNAKVTPGSTCAVFGLGGVGLSAVMGCKAAGASRIIGIDINSEKFVKAKALGATDCLNPRDLHKPIQEVIIELTKGGVDFALDCAGGSETMKAALDCTTAGWGSCTFIGVAAGSKGLTIFPEELIIGRTINGTFFGGWKSVDSIPKLVTDYKNKKFNLDALVTHTLPFDKISEAFDLMNQGKSVRTILIFRCQEQFRILSD

SEQ ID NO: 18990 - protein, 203 aa, Homo sapiens
MTPILTVLICLGLSLGPRTHVQAGHLPKPTLWAEPGSVIIQGSPVTLRCQGSLQAEEYHLYRENKSASWVRRIQEPGKNGQFPIPSITWEHAGRYHCQYYSHNHSSEHQAQQNQAEFRMGPVTSAHVGTYRCYSSLSSNPYLLSLPSDPLELVVSASLGQHPQDYTVENLIRMGVAGLVLVVLGILLFEAQHSQRSLQDAAGR

SEQ ID NO: 18991 - protein, 96 aa, Homo sapiens
MESERSKRMGNACIPLKRIAYFLCLLSALLLTEGKKPAKPKCPAVCTCTKDNALCENARSIPRTVPPDVISLSFVRSGFTEISEGSFLFTPSLQLL

SEQ ID NO: 18992 - protein, 459 aa, Homo sapiens
MGTALLQRGGCFLLCLSLLLLGCWAELGSGLEFPGAEGQWTRFPKWNACCESEMSFQLKTRSARGLVLYFDDEGFCDFLELILTRGGRLQLSFSIFCAEPATLLADTPVNDGAWHSVRIRRQFRNTTLFIDQVEAKWVEVKSKRRDMTVFSGLFVGGLPPELRAAALKLTLASVREREPFKGWIRDVRVNSSQVLPVDSGEVKLDDEPPNSGGGSPCEAGEEGEGGVCLNGGVCSVVDDQAVCDCSRTGFRGKDCSQGKEEYIATFKGSEYFCYDLSQNPIQSSSDEITLSFKTLQRNGLMLHTGKSADYVNLALKNGAVSLVINLGSGAFEALVEPVNGKFNDNAWHDVKVTRNLRQVTISVDGILTTTGYTQEDYTMLGSDDFFYVGGSPSTADLPGSPVSNNFMGCLKEVNIVAIRIIPNSWSHHFRSSMKAPLLKTRCSRVKRHNFKFNILLLFM

SEQ ID NO: 18993 - protein, 122 aa, Homo sapiens
MSTPARRRLMRDFKRLQEDPPAGVSGAPSENNIMVWNAVIFGPEGTPFEDVYADGSICLDILQNRWSPTYDVSSILTSIQSLLDEPNPNSPANSQAAQLYQENKREYEKRVSAIVEQSWRDC

SEQ ID NO: 18994 - protein, 168 aa, Homo sapiens
MESERSKRMGNACIPLKRIAYFLCLLSALLLTEGKKPAKPKCPAVCTCTKDNALCENARSIPRTVPPDVISLSFVRSGFTEISEGSFLFTPSLQLLLFTSNSFDVISDDAFIGLPHLEYLFIENNNIKSISRHTFRGLKSLIHLSLANNNLQTLPKDIFKGLDSLTNV

SEQ ID NO: 18995 - protein, 135 aa, Homo sapiens
MPSDFISLLSADLDLESPKSLYSRESVYDLLPKELQLPPSRETSVASMSQTSGGEAGSPPPAVVAADASSAPSSSSMGGACSSFTTSSSPTIYSTSVTDSKAMQVESCSSAVGNIGKPKRNWSKEEPYVVWTISC

SEQ ID NO: 18996 - protein, 62 aa, Homo sapiens
MDYYRKYAAIFLVTLSVFLHVLHSAPDVQDCPECTLQENPFFSQPGAPILQCMGCCFSRAYP

SEQ ID NO: 18997 - protein, 314 aa, Homo sapiens
MGSQALPPGPMQTLIFFDMEATGLPFSQPKVTELCLLAVHRCALESPPTSQGPPPTVPPPPRVVDKLSLCVAPGKACSPAASEITGLSTAVLAAHGRQCFDDNLANLLLAFLRRQPQPWCLVAHNGDRYDFPLLQAELAMLGLTSALDGAFCVDSITALKALERASSPSEHGPRKSYSLGSIYTRLYGQSPPDSHTAEGDVLALLSICQWRPQALLRWVDAHARPFGTIRPMYGVTASARTKPRPSAVTTTAHLATTRNTSPSLGESRGTKDLPPVKDPGALSREGLLAPLGLLAILTLAVATLYGLSLATPGE

SEQ ID NO: 18998 - protein, 213 aa, Homo sapiens
MAGSPELVVLDPPWDKELAAGTESQALVSATPREDFRVRCTSKRAVTEMLQLCGRFVQKLGDALPEEIREPALRDAQWTFESAVQENISINGQAWQEASDNCFMDSDIKVLEDQFDEIIVDIATKRKQYPRKILECVIKTIKAKQEILKQYHPVVHPLDLKYDPDPVLNGNAFNFSPFNMMLAVDLSYMVFITSSPSYGKFEMQRGNSSKGDQ

SEQ ID NO: 18999 - protein, 864 aa, Homo sapiens
MDVSLCPAKCSFWRIFLLGSVWLDYVGSVLACPANCVCSKTEINCRRPDDGNLFPLLEGQDSGNSNGNASINITDISRNITSIHIENWRSLHTLNAVDMELYTGLQKLTIKNSGLRSIQPRAFAKNPHLRYINLSSNRLTTLSWQLFQTLSLRELQLEQNFFNCSCDIRWMQLWQEQGEAKLNSQNLYCINADGSQLPLFRMNISQCDLPEISVSHVNLTVREGDNAVITCNGSGSPLPDVDWIVTGLQSINTHQTNLNWTNVHAINLTLVNVTSEDNGFTLTCIAENVVGMSNASVALTVYYPPRVVSLEEPELRLEHCIEFVVRGNPPPTLHWLHNGQPLRESKIIHVEYYQEGEISEGCLLFNKPTHYNNGNYTLIAKNPLGTANQTINGHFLKEPFPESTDNFILFDEVSPTPPITVTHKPEEDTFGVSIAVGLAAFACVLLVVLFVMINKYGRRSKFGMKGPVAVISGEEDSASPLHHINHGITTPSSLDAGPDTVVIGMTRIPVIENPQYFRQGHNCHKPDTYVQHIKRRDIVLKRELGEGAFGKVFLAECYNLSPTKDKMLVAVKALKDPTLAARKDFQREAELLTNLQHEHIVKFYGVCGDGDPLIMVFEYMKHGDLNKFLRAHGPDAMILVDGQPRQAKGELGLSQMLHIASQIASGMVYLASQHFVHRDLATRNCLVGANLLVKIGDFGMSRDVYSTDYYREGPCQKGPFSVVWQRQRLAATAASTLFNPSGNDFCIWCEVGGHTMLPIRWMPPESIMYRKFTTESDVWSFGVILWEIFTYGKQPWFQLSNTEVIECITQGRVLERPRVCPKEVYDVMLGCWQREPQQRLNIKEIYKILHALGKATPIYLDILG

SEQ ID NO: 19000 - protein, 495 aa, Homo sapiens
MWQIVFFTLSCDLVLAAAYNNFRKSMDSIGKKQYQVQHGSCSYTFLLPEMDNCRSSSSPYVSNAVQRDAPLEYDDSVQRLQVLENIMENNTQWLMKLENYIQDNMKKEMVEIQQNAVQNQTAVMIEIGTNLLNQTAEQTRKLTDVEAQVLNQTTRLELQLLEHSLSTNKLEKQILDQTSEINKLQDKNSFLEKKVLAMEDKHIIQLQSIKEEKDQLQVLVSKQNSIIEELEKKIVTATVNNSVLQKQQHDLMETVNNLLTMMSTSNSKDPTVAKEEQISFRDCAEVFKSGHTTNGIYTLTFPNSTEEIKAYCDMEAGGGGWTIIQRREDGSVDFQRTWKEYKVGFGNPSGEYWLGNEFVSQLTNQQRYVLKIHLKDWEGNEAYSLYEHFYLSSEELNYRIHLKGLTGTAGKISSISQPGNDFSTKDGDNDKCICKCSQMLTGGWWFDACGPSNLNGMYYPQRQNTNKFNGIKWYYWKGSGYSLKATTMMIRPADF

SEQ ID NO: 19001 - protein, 1499 aa, Homo sapiens
MGTALLQRGGCFLLCLSLLLLGCWAELGSGLEFPGAEGQWTRFPKWNACCESEMSFQLKTRSARGLVLYFDDEGFCDFLELILTRGGRLQLSFSIFCAEPATLLADTPVNDGAWHSVRIRRQFRNTTLFIDQVEAKWVEVKSKRRDMTVFSGLFVGGLPPELRAAALKLTLASVREREPFKGWIRDVRVNSSQVLPVDSGEVKLDDEPPNSGGGSPCEAGEEGEGGVCLNGGVCSVVDDQAVCDCSRTGFRGKDCSQEDNNVEGLAHLMMGDQGKSKGKEEYIATFKGSEYFCYDLSQNPIQSSSDEITLSFKTLQRNGLMLHTGKSADYVNLALKNGAVSLVINLGSGAFEALVEPVNGKFNDNAWHDVKVTRNLRQVTISVDGILTTTGYTQEDYTMLGSDDFFYVGGSPSTADLPGSPVSNNFMGCLKEVVYKNNDVRLELSRLAKQGDPKMKIHGVVAFKCENVATLDPITFETPESFISLPKWNAKKTGSISFDFRTTEPNGLILFSHGKPRHQKDAKHPQMIKVDFFAIEMLDGHLYLLLDMGSGTIKIKALLKKVNDGEWYHVDFQRDGRSGTISVNTLRTPYTAPGESEILDLDDELYLGGLPENKAGLVFPTEVWTALLNYGYVGCIRDLFIDGQSKDIRQMAEVQSTAGVKPSCSKETAKPCLSNPCKNNGMCRDGWNRYVCDCSGTGYLGRSCEREATVLSYDGSMFMKIQLPVVMHTEAEDVSLRFRSQRAYGILMATTSRDSADTLRLELDAGRVKLTVNLDCIRINCNSSKGPETLFAGYNLNDNEWHTVRVVRRGKSLKLTVDDQQAMTGQMAGDHTRLEFHNIETGIITERRYLSSVPSNFIGHLQSLTFNGMAYIDLCKNGDIDYCELNARFGFRNIIADPVTFKTKSSYVALATLQAYTSMHLFFQFKTTSLDGLILYNSGDGNDFIVVELVKGYLHYVFDLGNGANLIKGSSNKPLNDNQWHNVMISRDTSNLHTVKIDTKITTQITAGARNLDLKSDLYIGGVAKETYKSLPKLVHAKEGFQGCLASVDLNGRLPDLISDALFCNGQIERGCEGPSTTCQEDSCSNQGVCLQQWDGFSCDCSMTSFSGPLCNDPGTTYIFSKGGGQITYKWPPNDRPSTRADRLAIGFSTVQKEAVLVRVDSSSGLGDYLELHIHQGKIGVKFNVGTDDIAIEESNAIINDGKYHVVRFTRSGGNATLQVDSWPVIERYPAGNNDNERLAIARQRIPYRLGRVVDEWLLDKGRQLTIFNSQATIIIGGKEQGQPFQGQLSGLYYNGLKVLNMAAENDANIAIVGNVRLVGEVPSSMTTESTATAMQSEMSTSIMETTTTLATSTARRGKPPTKEPISQTTDDILVASAECPSDDEDIDPCEPSSGGLANPTRAGGREPYPGSAEVIRESSSTTGMVVGIVAAAALCILILLYAMYKYRNRDEGSYHVDESRNYISNSAQSNGAVVKEKQPSSAKSSNKNKKNKDKEYYV

SEQ ID NO: 19002 - protein, 309 aa, Homo sapiens
IPFSVSWGVLLLAGLCCLVPSSLVEDPQEDAAQKTDTSHHDQGDWEDLACQKISYNVTDLAFDLYKELADLSQTSNVLVTPTSVAMAFAMLSLGTKADTRTEILEGLNVNLTETPEAKIHECFQQVLQALSRPDTRLQLTTGSSLFVNKSMKLVDTFLEDTKKLYHSEASSINFRDTEEAKEQINNYVEKRTGRKVVDLVKHLKKDTSLALVDYISFHGKWKDKFKAERIMVEGFHVDDKTIIRVPMINHLGRFDIHRDRELSSWVLAQHYVGNATAFFILPDPKKMWQLEEKLTYSHLENIQRAFDIR

SEQ ID NO: 19003 - protein, 602 aa, Homo sapiens
MPQLNGGGGDDLGANDELISFKDEGEQEEKSSENSSAERDLADVKSSLVNESETNQNSSSDSEAERRPPPRSESFRDKSRESLEEAAKRQDGGLFKGPPYPGYPFIMIPDLTSPYLPNGSLSPTARTLHFQSGSTHYSAYKTIEHQIAVQYLQMKWPLLDVQAGSLQSRQALKDARSPSPAHIVSNKVPVVQHPHHVHPLTPLITYSNEHFTPGNPPPHLPADVDPKTGIPRPPHPPDISPYYPLSPGTVGQIPHPLGWLVPQQGQPVYPITTGGFRHPYPTALTVNASMSRFPPHMVPPHHTLHTTGIPHPAIVTPTVKQESSQSDVGSLHSSKHQDSKKEEEKKKPHIKKPLNAFMLYMKEMRAKVVAECTLKESAAINQILGRRWHALSREEQAKYYELARKERQLHMQLYPGWSARDNYGKKKKRKRDKQPGETNDANTPKKCRALFGLDRQTLWCKPCRRKKKCVRYIQGEGSCLSPPSSDGSLLDSPPPSPNLLGSPPRDAKSQTEQTQPLSLSLKPDPLAHLSMMPPPPALLLAEATHKASALCPNGALDLPPAALQPAAPSSSIAQPSTSSLHSHSSLAGTQPQPLSLVTKSLE

SEQ ID NO: 19004 - protein, 533 aa, Homo sapiens
MESERSKRMGNACIPLKRIAYFLCLLSALLLTEGKKPAKPKCPAVCTCTKDNALCENARSIPRTVPPDVISLLFTSNSFDVISDDAFIGLPHLEYLFIENNNIKSISRHTFRGLKSLIHLSLANNNLQTLPKDIFKGLDSLTNVDLRGNSFNCDCKLKWLVEWLGHTNATVEDIYCEGPPEYKKRKINSLSSKDFDCIITEFAKSQDLPYQSLSIDTFSYLNDEYVVIAQPFTGKCIFLEWDHVEKTFRNYDNITGTSTVVCKPIVIETQLYVIVAQLFGGSHIYKRDSFANKFIKIQDIEILKIRKPNDIETFKIENNWYFVVADSSKAGFTTIYKWNGNGFYSHQSLHAWYRDTDVEYLEIVRTPQTLRTPHLILSSSSQRPVIYQWNKATQLFTNQTDIPNMEDVYAVKHFSVKGDVYICLTRFIGDSKVMKWGGSSFQDIQRMPSRGSMVFQPLQINNYQYAILGSDYSFTQVYNWDAEKAKFVKFQELNVQAPRSFTHVSINKRNFLFASSFKGNTQIYKHVIVDLSA

SEQ ID NO: 19005 - protein, 111 aa, Homo sapiens
MELGGPGAPRLLPPLLLLLGTGLLRASSHVETRAHAEERLLKKLFSGYNKWSRPVANISDVVLVRFGLSIAQLIDVDEKNQMMTTNVWVKQPPPAPPHPGVARLQAALGPS

SEQ ID NO: 19006 - protein, 117 aa, Homo sapiens; identical to SEQ ID NO: 18105

SEQ ID NO: 19007 - protein, 103 aa, Homo sapiens [sequence omitted]

SEQ ID NO: 19008 - protein, 859 aa, Homo sapiens
MLPVYQEVKPNPLQDANLCSRVFFWWLNPLFKIGHKRRLEEDDMYSVLPEDRSQHLGEELQGFWDKEVLRAENDAQKPSLTRAIIKCYWKSYLVLGIFTLIEESAKVIQPIFLGKIINYFENYDPMDSVALNTAYAYATVLTFCTLILAILHHLYFYHVQCAGMRLRVAMCHMIYRKALRLSNMAMGKTTTGQIVNLLSNDVNKFDQVTVFLHFLWAGPLQAIAVTALLWMEIGISCLAGMAVLIILLPLQSCFGKLFSSLRSKTATFTDARIRTMNEVITGIRIIKMYAWEKSFSNLITNLRKKEISKILRSSCLRGMNLASFFSASKIIVFVTFTTYVLLGSVITASRVFVAVTLYGAVRLTVTLFFPSAIERVSEAIVSIRRIQTFLLLDEISQRNRQLPSDGKKMVHVQDFTAFWDKASETPTLQGLSFTVRPGELLAVVGPVGAGKSSLLSAVLGELAPSHGLVSVHGRIAYVSQQPWVFSGTLRSNILFGKKYEKERYEKVIKACALKKDLQLLEDGDLTVIGDRGTTLSGGQKARVNLARAVYQDADIYLLDDPLSAVDAEVSRHLFELCICQILHEKITILVTHQLQYLKAASQILILKDGKMVQKGTYTEFLKSGIDFGSLLKKDNEESEQPPVPGTPTLRNRTFSESSVWSQQSSRPSLKDGALESQDTENVPVTLSEENRSEGKVGFQAYKNYFRAGAHWIVFIFLILLNTAAQVAYVLQDWWLSYWANKQSMLNVTVNGGGNVTEKLDLNWYLGIYSGLTVATVLFGIARSLLVFYVLVNSSQTLHNKMFESILKAPVLFFDRNPIGRILNRFSKDIGHLDDLLPLTFLDFIQRWDLAVLSWLVSNS

SEQ ID NO: 19009 - protein, 442 aa, Homo sapiens
MQPPPSLCGRALVALVLACGLSRIWGEERGFPPDRATPLLQTAEIMTPPTKTLWPKGSNASLARSLAPAEVPKGDRTAGSPPRTISPPPCQGPIEIKETFKYINTVVSCLVFVLGIIGNSTLLRIIYKNKCMRNGPNILIASLALGDLLHIVIDIPINVYKLLAEDWPFGAEMCKLVPFIQKASVGITVLSLCALSIDRYRAVASWSRIKGIGVPKWTAVEIVLIWVVSVVLAVPEAIGFDIITMDYKGSYLRICLLHPVQKTAFMQFYKTAKDWWLFSFYFCLPLAITAFFYTLMTCEMLRKKSGMQIALNDHLKQRREVAKTVFCLVLVFALCWLPLHLSRILKLTLYNQNDPNRCELLSFLLVLDYIGINMASLNSCINPIALYLVSKRFKNCFKSCLCCWCQSFEEKQSLEEKQSCLKFKANDHGYDNFRSSNKYSSS

SEQ ID NO: 19010 - protein, 81 aa, Homo sapiens
MFSKRLEKIPQVPLLFPFIFIILTNYSKMEGAVESQPSFFKTSQDIVTCTWVENCYSSFSRRPLEVCVILLKCITNSEWLP

SEQ ID NO: 19011 - protein, 449 aa, Homo sapiens
MRLLAKIICLMLWAICVAEDCNELPPRRNTEILTGSWSDQTYPEGTQAIYKCRPGYRSLGNVIMVCRKGEWVALNPLRKCQKRPCGHPGDTPFGTFTLTGGNVFEYGVKAVYTCNEGYQLLGEINYRECDTDGWTNDIPICEVVKCLPVTAPENGKIVSSAMEPDREYHFGQAVRFVCNSGYKIEGDEEMHCSDDGFWSKEKPKCVEISCKSPDVINGSPISQKIIYKENERFQYKCNMGYEYSERGDAVCTESGWRPLPSCEEKSCDNPYIPNGDYSPLRIKHRTGDEITYQCRNGFYPATRGNTAKCTSTGWIPAPRCTLKPCDYPDIKHGGLYHENMRRPYFPVAVGKYYSYYCDEHFETPSGSYWDHIHCTQDGWSPAVPCLRKCYFPYLENGYNQNHGRKFVQGKSIDVACHPGYALPKAQTTVTCMENGWSPTPRCIRVSFTL

SEQ ID NO: 19012 - protein, 101 aa, Homo sapiens
MDYYRKYAAIFLVTLSVFLHVLHSAPDVQDCPECTLQENPFFSQPGAPILQCMGCCFSRAYPTPLRSKKTMLVQKNVTSESTCCVAKSYNRVRTSRSPEAF

SEQ ID NO: 19013 - protein, 298 aa, Homo sapiens; identical to SEQ ID NO: 14024

SEQ ID NO: 19014 - protein, 366 aa, Homo sapiens
MSSSVEQKKGPTRQRKCGFCKSNRDKECGQLLISENQKVAAHHKCMLFSSALVSSHSDNESLGGFSIEDVQKEIKRGTKLMCSLCHCPGATIGCDVKTCHRTYHYHCALHDKAQIREKPSQGIYMVYCRKHKKTAHNSEAADLEESFNEHELEPSSPKSKKKSRKGRPRKTNFKGLSEDTRSTSSHGTDEMESSSYRDRSPHRSSPSDTRPKCGFCHVGEEENEARGKLHIFNAKKAAAHYKCMLFSSGTVQLTTTSRAEFGDFDIKTVLQEIKRGKRMKCTLCSQPGATIGCEIKACVKTYHYHCGVQDKAKYIENMSRGIYKLYCKNHSGNDERDEEDEERESKSRGKVEIDQQQLTQQQLNGN

SEQ ID NO: 19015 - protein, 584 aa, Homo sapiens
MPQLNGGGGDDLGANDELISFKDEGEQEEKSSENSSAERDLADVKSSLVNESETNQNSSSDSEAERRPPPRSESFRDKSRESLEEAAKRQDGGLFKGPPYPGYPFIMIPDLTSPYLPNGSLSPTARTYLQMKWPLLDVQAGSLQSRQALKDARSPSPAHIVSNKVPVVQHPHHVHPLTPLITYSNEHFTPGNPPPHLPADVDPKTGIPRPPHPPDISPYYPLSPGTVGQIPHPLGWLVPQQGQPVYPITTGGFRHPYPTALTVNASMSSFLSSRFPPHMVPPHHTLHTTGIPHPAIVTPTVKQESSQSDVGSLHSSKHQDSKKEEEKKKPHIKKPLNAFMLYMKEMRAKVVAECTLKESAAINQILGRRWHALSREEQAKYYELARKERQLHMQLYPGWSARDNYGKKKKRKRDKQPGETNDANTPKKCRALFGLDRQTLWCKPCRRKKKCVRYIQGEGSCLSPPSSDGSLLDSPPPSPNLLGSPPRDAKSQTEQTQPLSLSLKPDPLAHLSMMPPPPALLLAEATHKASALCPNGALDLPPAALQPAAPSSSIAQPSTSSLHSHSSLAGTQPQPLSLVTKSLE

SEQ ID NO: 19016 - protein, 134 aa, Homo sapiens
MFSKRLEKIPQVPLLFPFIFIILTNYSKMEGAVESQPSFFKTSQDIVTCTWVENCYSSFSRRPLEQMFCKHQSKNIISWTGMVAHTCNPSTLGGQDGVSFCHPDRSAVAPSQLTATSTSQVQAILLPQPPEYPG

SEQ ID NO: 19017 - protein, 1526 aa, Homo sapiens
MAFSKGFRIYHKLDPPPFSLIVETRHKEECLMFESGAVAVLSSAEKEAIKGTYSKVLDAYGLLGVLRLNLGDTMLHYLVLVTGCMSVGKIQESEVFRVTSTEFISLRIDSSDEDRISEVRKVLNSGNFYFAWSASGISLDLSLNAHRSMQEQTTDNRFFWNQSLHLHLKHYGVNCDDWLLRLMCGGVEIRTIYAAHKQAKACLISRLSCERAGTRFNVRGTNDDGHVANFVETEQVVYLDDSVSSFIQIRGSVPLFWEQPGLQVGSHRVRMSRGFEANAPAFDRHFRTLKNLYGKQIIVNLLGSKEGEHMLSKAFQSHLKASEHAADIQMVNFDYHQMVKGGKAEKLHSVLKPQVQKFLDYGFFYFNGSEVQRCQSGTVRTNCLDCLDRTNSVQAFLGLEMLAKQLEALGLAEKPQLVTRFQEVFRSMWSVNGDSISKIYAGTGALEGKAKAGKLKDGARSVTRTIQNNFFDSSKQEAIDVLLLGNTLNSDLADKARALLTTGSLRASSKVLKSMCENFYKYSKPKKIRVCVGTWNVNGGKQFRSIAFKNQTLTDWLLDAPKLAGIQEFQDKRSKPTDIFAIGFEEMVELNAGNIVSASTTNQKLWAVELQKTISRDNKYVLLASEQLVGVCLFVFIRPQHAPFIRDVAVDTVKTGMGGATGNKGAVAIRMLFHTTSLCFVCSHFAAGQSQVKERNEDFIEIARKLSFPMGRMLFSHDYVFWCGDFNYRIDLPNEEVKELIRQQNWDSLIAGDQLINQKNAGQVFRGFLEGKVTFAPTYKYDLFSDDYDTSEKCRTPAWTDRVLWRRRKWPFDRSAEDLDLLNASFQDESKILYTWTPGTLLHYGRAELKTSDHRPVVALIDIDIFEVEAEERQNIYKEVIAVQGPPDGTVLVSIKSSLPENNFFDDALIDELLQQFASFGEVILIRFVEDKMWVTFLEGSSALNVLSLNGKELLNRTITIALKSPDWIKNLEEEMSLEKISIALPSSTSSTLLGEDAEVAADFDMEGDVDDYSAEVEELLPQHLQPSSSSGLGTSPSSSPRTSPCQSPTISEGPVPSLPIRPSRAPSRTPGPPSAQSSPIDAQPATPLPQKDPAQPLEPKRPPPPRPVAPPTRPAPPQRPPPPSGRSQPSPQAGLAGPGPAGYSTARPTIPPRAGVISAPQSHARASAGRLTPESQSKTSETSKGSTFLPEPLKPQAAFPPQSSLPPPAQRLQEPLVPVAAPMPQSGPQPNLETPPQPPPRSRSSHSLPSEASSQPQVKTNGISDGKRESPLKIDPFEDLSFNLLAVSKAQLSVQTSPVPTPDPKRLIQLPSATQSNVLSSVSCMPTMPPIPARSQSQENMRSSPNPFITGLTRTNPFSDRTAAPGNPFRAKSEESEATSWFSKEEPVTISPFPSLQPLGHNKSRASSSLDGFKDSFDLQGQSTLKISNPKGWVTFEEEEDFGVKGKSKSACSDLLGNQPSSFSGSNLTLNDDWNKGTNVSFCVLPSRRPPPPPVPLLPPGTSPPVDPFTTLASKASPTLDFTER

SEQ ID NO: 19018 - protein, 277 aa, Homo sapiens
MDSELKEEIPVHEEFILCGGAETQVLKCGPWTDLFHDQSVKRPKLLIFIIPDSNAQEIKDIYGLNGQIEHKLAFLRTHVPKDMKLVLIGHSIGSYFTLQMLKRVPELPVIRAFLLFPTIERMSESPNGRIATPLLCWFRYVLYVTGYLLLKPCPETIKSLLIRRGLQVMNLENEFSPLNILEPFCLANAAYLGGQEMMEVVKRDDETIKEHLCKLTFYYGTIDPWCPKEYYEDIKKDFPEGDIRLCEKNIPHAFITHFNQEMADMIADSLKDDLSKM

SEQ ID NO: 19019 - protein, 103 aa, Homo sapiens
SRWPHGLGLLLLLQLLPPSTLSQDRLDAPPPPAAPLPRWSGPIGVSWGLRAAAAGGAFPRGGRWRRSAPGEDEECGRVRDFVAKLANNTHQLSKSLEHRFSSV

SEQ ID NO: 19020 - protein, 117 aa, Homo sapiens
MDCTWRILLLVAAATGTHAEVQLVQSGAEVKKPGATVKISCKVSGYTFTDYYMHWVQQAPGKGLEWMGLVDPEDGETIYAEKFQGRVTITADTSTDTAYMELSSLRSEDTAVYYCAT

SEQ ID NO: 19021 - protein, 117 aa, Homo sapiens
MDWTWRILFLVAAATGAHSQVQLVQSGSELKKPGASVKVSCKASGYTFTSYAMNWVRQAPGQGLEWMGWINTNTGNPTYAQGFTGRFVFSLDTSVSTAYLQICSLKAEDTAVYYCAR

SEQ ID NO: 19022 - protein, 100 aa, Homo sapiens
MALPALGLDPWSLLGLFLFQLLQLLLPTTTAGGGGQGPMPRVRYYAGDERRALSFFHQKGLQDFDTLLLSGDGNTLYVGAREAILALDIQDPGVPRLKNM

SEQ ID NO: 19023 - protein, 1074 aa, Homo sapiens
MAPGMSGRGGAALLCLSALLAHASGRSHPASPSPPGPQASPVLPVSYRLSHTRLAFFLREARPPSPAVANSSLQRSEPFVVFQTKELPVLNVSLGPFSTSQVVARELLQPSSTLDIPERLTVNWKVRAFIVRSHVPASQPVVQVLFYVAGRDWDDFGVTERLPCVRLHAFRDAREVKSSCRLSGGLATCLVRAELPLAWFGPPAPAAPPTARRKSPDGLEPEATGESQQAELYYTLHAPDASGGCGGSRRGAGPGVGARAESPTQHPLLRIGSISLFRPPPRRTLQEHRLDSNLMIRLPDRPLKPGEVLSILLYLAPNSSSPSSPSVEHFTLRVKAKKGVTLLGTKSRSGQWHVTSELLTGAKHSTATVDVAWAQSTPLPPREGQGPLEILQLDFEMENFTSQSVKRRIMWHIDYRGHGALPDLERAVTELTVIQRDVQAILPLAMDTEIINTAILTGRTVAIPVKVIAIEVNGLVLDISALVECESDNEDIIKVSSSCDYVFVSGKESRGSMNARVTFRYDVLNAPLEMTVWVPKLPLHIELSDARLSQVKGWRVPILPDRRSVRESEDEDEEEEERRQSASRGCTLQYQHATLQVFTQFHTTSSEGTDQVVTMLGPDWLVEVTDLVSDFMRVGDPRVAHMVDSSTLAGLEPGTTPFKVVSPLTEAVLGETLLTVTEEKVSITQLQAQVVASLALSLRPSPGSSHTILATTAAQQTLSFLKQEALLSLWLSYSDGTTAPLSLYSPRDYGLLVSSLDEHVATVTQDRAFPLVVAEAEGSGELLRAELTIAESCQKTKRKSVLATTPVGLRVHFGRDEEDPTYDYPGPSQPGPGGGEDEARGAGPPGSALPAPEAPGPGTASPVVPPTEDFLPLPTGFLQVPRGLTDLEIGMYALLGVFCLAILVFLINCIVFVLRYRHKRIPPEGQTSMDHSHHWVFLGNGQPLRVQGELSPPAGNPLETVPAFCHGDHHSSGSSQTSVQSQVHGRGDGSSGGSARDQAEDPASSPTSKRKRVKFTTFTTLPSEELAYDSVPAGEEDEEEEEDLGWGCPDVAGPTRPTAPPDLHNYMRRIKEIA

SEQ ID NO: 19024 - protein, 1902 aa, Homo sapiens
MKVFKRRYFYLTQLPDGSYILNSYKDEKNSKESKGCIYLDACIDVVQCPKMRRHAFELKMLDKYSHYLAAETEQEMEEWLITLKKIIQINTDSLVQEKKETVETAQDDETSSQGKAENIMASLERSMHPELMKYGRETEQLNKLSRGDGRQNLFSFDSEVQRLDFSGIEPDIKPFEEKCNKRFLVNCHDLTFNILGQIGDNAKGPPTNVEPFFINLALFDVKNNCKISADFHVDLNPPSVREMLWGSSTQLASDGSPKGSSPESYIHGIAESQLRYIQQGIFSVTNPHPEIFLVARIEKVLQGNITHCAEPYIKNSDPVKTAQKVHRTAKQVCSRLGQYRMPFAWAARPIFKDTQGSLDLDGRFSPLYKQDSSKLSSEDILKLLSEYKKPEKTKLQIIPGQLNITVECVPVDLSNCITSSYVPLKPFEKNCQNITVEVEEFVPEMTKYCYPFTIYKNHLYVYPLQLKYDSQKTFAKARNIAVCVEFRDSDESDASALKCIYGKPAGSVFTTNAYAVVSHHNQNPEFYDEIKIELPIHLHQKHHLLFTFYHVSCEINTKGTTKKQDTVETPVGFAWVPLLKDGRIITFEQQLPVSANLPPGYLNLNDAESRRQCNVDIKWVDGAKPLLKIKSHLESTIYTQDLHVHKFFHHCQLIQSGSKEVPGELIKYLKCLHAMEIQVMIQFLPVILMQLFRVLTNMTHEDDVPINCTMVLLHIVSKCHEEGLDSYLRSFIKYSFRPEKPSAPQAQLIHETLATTMIAILKQSADFLSINKLLKYSWFFFEIIAKSMATYLLEENKIKLPRGQRFPETYHHVLHSLLLAIIPHVTIRYAEIPDESRNVNYSLASFLKRCLTLMDRGFIFNLINDYISGFSPKDPKVLAEYKFEFLQTICNHEHYIPLNLPMAFAKPKLQRVQDFFSFAVDRLTSVDSNLEYSLSDEYCKHHFLVGLLLRETSIALQDNYEIRYTAISVIKNLLIKHAFDTRYQHKNQQAKIAQLYLPFVGLLLENIQRLAGRDTLYSCAAMPNSASRDEFPCGFTSPANRGSLSTDKDTAYGSFQNGHGIKREDSRGSLIPEGATGFPDQGNTGENTRQSSTRSSVSQYNRLDQYEIRSLLMCYLYIVKMISEDTLLTYWNKVSPQELINILILLEVCLFHFRYMGKRNIARVHDAWLSKHFGIDRKSQTMPALRNRSGVMQARLQHLSSLESSFTLNHSSTTTEADIFHQALLEGNTATEVSLTVLDTISFFTQCFKTQLLNNDGHNPLMKKVFDIHLAFLKNGQSEVSLKHVFASLRAFISKFPSAFFKGRVNMCAAFCYEVLKCCTSKISSTRNEASALLYLLMRNNFEYTKRKTFLRTHLQIIIAVSQLIADVALSGGSRFQESLFIINNFANSDRPMKATAFPAEVKDLTKRIRTVLMATAQMKEHEKDPEMLIDLQYSLAKSYASTPELRKTWLDSMAKIHVKNGDFSEAAMCYVHVAALVAEFLHRKKLFPNGCSAFKKITPNIDEEGAMKEDAGMMDVHYSEEVLLELLEQCVDGLWKAERYEIISEISKLIVPIYEKRREFEKLTQVYRTLHGAYTKILEVMHTKKRLLGTFFRVAFYGQSFFEEEDGKEYIYKEPKLTGLSEISLRLVKLYGEKFGTENVKIIQDSDKVNAKELDPKYAHIQVTYVKPYFDDKELTERKTEFERNHNISRFVFEAPYTLSGKKQGCIEEQCKRRTILTTSNSFPYVKKRIPINCEQQINLKPIDVATDEIKDKTAELQKLCSSTDVDMIQLQLKLQGCVSVQVNAGPLAYARAFLNDSQASKYPPKKVSELKDMFRKFIQACSIALELNERLIKEDQVEYHEGLKSNFRDMVKELSDIIHEQILQEDTMHSPWMSNTLHVFCAISGTSSDRGYGSPRYAEV

SEQ ID NO: 19025 - protein, 2131 aa, Homo sapiens
MPLSPPAQGDPGEPSPCRPPKKHTTFHLWRSKKKQQPAPPDCGVFVPHPLPAPAGEARALDVVDGKYVVRDSQEFPLHCGESQFFHTTSEALGSLLLESGIFKKSRAQPPEDNRRKPVLGKLGTLFTAGRRRNSRNGLESPTRSNAKPLSPKDVVASPKLPERESERSRSQSSQLKQTDTSEEGSPRENPREAEGELPESGGPAAPPDAELSPRWSSSAAAVAVQQCHENDSPQLEPLEAEGEPFPDATTTAKQLHSSPGNSSRQENAETPARSPGEDASPGAGHEQEAFLGVRGAPGSPTQERPAGGLGEAPNGAPSVCAEEGSLGPRNARSQPPKGASDLPGEPPAEGAAHTASSAQADCTARPKGHAHPAKVLTLDIYLSKTEGAQVDEPVVITPRAEDCGDWDDMEKRSSGRRSGRRRGSQKSTDSPGADAELPESAARDDAVFDDEVAPNAASDNASAEKKVKSPRAALDGGVASAASPESKPSPGTKGQLRGESDRSKQPPPASSPTKRKGRSRALEAVPAPPASGPRAPAKESPPKRVPDPSPVTKGTAAESGEEAARAIPRELPVKSSSLLPEIKPEHKRGPLPNHFNGRAEGGRSRELGRAAGAPGASDADGLKPRNHFGVGRSTVTTKVTLPAKPKHVELNLKTPKNLDSLGNEHNPFSQPVHKGNTATKISLFENKRTNSSPRHTDIRGQRNTPASSKTFVGRAKLNLAKKAKEMEQPEKKVMPNSPQNGVLVKETAIETKVTVSEEEILPATRGMNGDSSENQALGPQPNQDDKADVQTDAGCLSEPVASALIPVKDHKLLEKEDSEAADSKSLVLENVTDTAQDIPTTVDTKDLPPTAMPKPQHTFSDSQSPAESSPGPSLSLSAPAPGDVPKDTCVQSPISSFPCTDLKVSENHKGCVLPVSRQNNEKMPLLELGGETTPPLSTERSPEAVGSECPSRVLVQVRSFVLPVESTQDVSSQVIPESSEVREVQLPTCHSNEPEVVSVASCAPPQEEVLGNEHSHCTAELAAKSGPQVIPPASEKTLPIQAQSQGSRTPLMAESSPTNSPSSGNHLATPQRPDQTVTNGQDSPASLLNISAGSDDSVFDSSSDMEKFTEIIKQMDSAVCMPMKRKKARMPNSPAPHFAMPPIHEDHLEKVFDPKVFTFGLGKKKESQPEMSPALHLMQNLDTKSKLRPKRASAEQSVLFKSLHTNTNGNSEPLVMPEINDKENRDVTNGGIKRSRLEKSALFSSLLSSLPQDKIFSPSVTSVNTMTTAFSTSQNGSLSQSSVSQPTTEGAPPCGLNKEQSNLLPDNSLKVFNFNSSSTSHSSLKSPSHMEKYPQKEKTKEDLDSRSNLHLPETKFSELSKLKNDDMEKANHIESVIKSNLPNCANSDTDFMGLFKSSRYDPSISFSGMSLSDTMTLRGSVQNKLNPRPGKVVIYSEPDVSEKCIEVFSDIQDCSSWSLSPVILIKVVRGCWILYEQPNFEGHSIPLEEGELELSGLWGIEDILERHEEAESDKPVVIGSIRHVVQDYRVSHIDLFTEPEGLGILSSYFDDTEEMQGFGVMQKTCSMKVHWGTWLIYEEPGFQGVPFILEPGEYPDLSFWDTEEAYIGSMRPLKMGGRKVEFPTDPKVVVYEKPFFEGKCVELETGMCSFVMEGGETEEATGDDHLPFTSVGSMKVLRGIWVAYEKPGFTGHQYLLEEGEYRDWKAWGGYNGELQSLRPILGDFSNAHMIMYSEKNFGSKGSSIDVLGIVANLKETGYGVKTQSINVLSGVWVAYENPDFTGEQYILDKGFYTSFEDWGGKNCKISSVQPICLDSFTGPRRRNQIHLFSEPQFQGHSQSFEETTSQIDDSFSTKSCRVSGGSWVVYDGENFTGNQYVLEEGHYPCLSAMGCPPGATFKSLRFIDVEFSEPTIILFEREDFKGKKIELNAETVNLRSLGFNTQIRSVQVIGGIWVTYEYGSYRGRQFLLSPAEVPNWYEFSGCRQIGSLRPFVQKRIYFRLRNKATGLFMSTNGNLEDLKLLRIQVMEDVGADDQIWIYQEGCIKCRIAEDCCLTIVGSLVTSGSKLGLALDQNADSQFWSLKSDGRIYSKLKPNLVLDIKGGTQYDQNHIILNTVSKEKFTQVWEAMVLYT

SEQ ID NO: 19026 - protein, 707 aa, Homo sapiens
MAAEVYFGDLELFEPFDHPEESIPKPVHTRFKDDDGDEEDENGVGDAELRERLRQCEETIEQLRAENQELKRKLNILTRPSGILVNDTKLDGPILQILFMNNAISKQYHQEIEEFVSNLVKRFEEQQKNDVEKTSFNLLPQPSSIVLEEDHKVEESCAIKNNKEAFSVVGSVLYFTNFCLDKLGQPLLNENPQLSEGWEIPKYHQVFSHIVSLEGQEIQVKAKRPKPHCFNCGSEEHQMKDCPMPRNAARISEKRKEYMDACGEANNQNFQQRYHAEEVEERFGRFKPGVISEELQDALGVTDKSLPPFIYRMRQLGYPPGWLKEAELENSGLALYDGKDGTDGETEVGEIQQNKSVTYDLSKLVNYPGFNISTPRGIPDEWRIFGSIPMQACQQKDVFANYLTSNFQAPGVKSGNKRSSSHSSPGSPKKQKNESNSAGSPADMELDSDMEVPHGSQSSESFQFQPPLPPDTPPLPRGTPPPVFTPPLPKGTPPLTPSDSPQTRTASGAVDEDALTLEELEEQQRRIWAALEQAESVNSDSDVPVDTPLTGNSVASSPCPNELDLPVPEGKTSEKQTLDEPEVPEIFTKKSEAGHASSPDSEVTSLCQKEKAELAPVNTEGALLDNGSVVPNCDISNGGSQKLFPADTSPSTATKIHSPIPDMSKFATGITPFEFENMAESTGMYLRIRSLLKNSPRNQQKNKKASE

SEQ ID NO: 19027 - protein, 246 aa, Homo sapiens
MNLLLILTFVAAAVAAPFDDDDKIVGGYICEENSVPYQVSLNSGYHFCGGSLISEQWVVSAGHCYKSAINSKLSGRGCEYHRIQVRLGEHNIEVLEGNEQFINAAKIIRHPKYNSRTLDNDILLIKLSSPAVINSRESLISGWGNTLSSGADYPDELQCLDAPVLSQAECEASYPGKITNNMFCVGFLEGGKDSCQGDSGGPVVSNGELQGIVSWGYGCAQKNRPGVYTKVYNYVDWIKDTIAANS

SEQ ID NO: 19028 - protein, 117 aa, Homo sapiens
MGSTAILALLLAVLQGVCAEVQLVQSGAEVKKPGESLRISCKGSGYSFTSYWISWVRQMPGKGLEWMGRIDPSDSYTNYSPSFQGHVTISADKSISTAYLQWSSLKASDTAMYYCAR

SEQ ID NO: 19029 - protein, 117 aa, Homo sapiens
MEFWLSWVLLVAILKDVQCEVQLVESGGGLVQPGGSLRLSCSASGFTFSSYAMHWVRQAPGKGLEYVSAISSNGGSTYYADSVKGRFTISRDNSKNTLYLQMSSLRAEDTAVYYCVK

SEQ ID NO: 19030 - protein, 334 aa, Homo sapiens
MVDYYEVLGVQRHASPEDIKKAYRKLALKWHPDKNPENKEEAERKFKQVAEAYEVLSDAKKRDIYDKYGKEGLNGGGGGGSHFDSPFEFGFTFRNPDDVFREFFGGRDPFSFDFFEDPFEDFFGNRRGPRGSRSRGTGSFFSAFSGFPSFGSGFSSFDTGFTSFGSLGHGGLTSFSSTSFGGSGMGNFKSISTSTKMVNGRKITTKRIVENGQERVEVEEDGQLKSLTINGVADDDALAEERMRRGQNALPAQPAGLRPPKPPRPASLLRHAPHCLSEEEGEQDRPRAPGPWDPLASAAGVQREAAVEQAQSETSLGARGQRGHKPRLGCCVLT

SEQ ID NO: 19031 - protein, 99 aa, Homo sapiens
MVLRRLLAALLHSPQLVERLSESRPIRRAAQLTAFALLQAQLRGQDAARRLQDLAAGPVGSLCRRAERFRDAFTQELRRGLRGRSGPPPGSQRGPGANI

SEQ ID NO: 19032 - protein, 247 aa, Homo sapiens
MNLLLILTFVAAAVAAPFDDDDKIVGGYICEENSVPYQVSLNSGYHFCGGSLISEQWVVSAGHCYKSRIQVRLGEHNIEVLEGNEQFINAAKIIRHPKYNSRTLDNDILLIKLSSPAVINSRVSAISLPTAPPAAGTESLISGWGNTLSSGADYPDELQCLDAPVLSQAECEASYPGKITNNMFCVGFLEGGKDSCQGDSGGPVVSNGELQGIVSWGYGCAQKNRPGVYTKVYNYVDWIKDTIAANS

SEQ ID NO: 19033 - protein, 375 aa, Homo sapiens
MAPPTELLARPERGSAPGSRAMGRLVAVGLLGIALALLGERLLALRNRLKASREVESVDLPHCHLIKGIEAGSEDIDILPNGLAFFSVGLKFPGLHSFAPDKPGGILMMDLKEEKPRARELRISRGFDLASFNPHGISTFIDNDDTVYLFVVNHPEFKNTVEIFKFEEAENSLLHLKTVKHELLPSVNDITAVGPAHFYATNDHYFSDPFLKYLETYLNLHWANVVYYSPNEVKVVAEGFDSANGINISPDDKYIYVADILAHEIHVLEKHTNMNLTQLKVLELDTLVDNLSIDPSSGDIWVGCHPNGQKLFVYDPNNPPSSEVLRIQNILSEKPTVTTVYANNGSVLQGSSVASVYDGKLLIGTLYHRALYCEL

SEQ ID NO: 19034 - protein, 134 aa, Homo sapiens
MSALRPLLLLLLPLCPGPGPGPGSEAKVTRSCAETRQVLGARGYSLNLIPPALISGEHLRVCPQEYTCCSSETEQRLIRETEATFRGLVEDSGSFLVHTLAARHRKFDDNPDPGGCPSLCAGPGDWKKCGQRSA

SEQ ID NO: 19035 - protein, 533 aa, Homo sapiens
MTSAFKLDFLPDMMVEGRLLVPDRINGTANKMNGALDHSDQPDPDAIKMFVGQIPRSWSEKELKELFEPYGAVYQINVLRDRSQNPPQSKGCCFVTFYTRKAALEAQNALHNIKTLPGMHHPIQMKPADSEKSNAVEDRKLFIGMVSKKCNENDIRVMFSPFGQIEECRILRGPDGLSRGCAFVTFSTRAMAQNAIKAMHQSQTMEGCSSPIVVKFADTQKDKEQRRLQQQLAQQMQQLNTATWGNLTGLGGLTPQYLALLQQATSSSNLGAFSGIQQMAGMNALQLQNLATLAAAAAAAQTSATSTNANPLSTTSSALGALTSPVAASTPNSTAGAAMNSLTSLGTLQGLAGATVGLNNINALAGTINTPRSKRLLLPKDNNGMAALNGGLGATGLTNGTAGTMDALTQAYSGIQQYAAAALPTLYSQSLLQQQSAAGSQKEGPEGANLFIYHLPQEFGDQDILQMFMPFGNVISAKVFIDKQTNLSKCFGFVSYDNPVSAQAAIQAMNGFQIGMKRLKVQLKRSKNDSKPY

SEQ ID NO: 19036 - protein, 261 aa, Homo sapiens
MNLLLILTFVAAAVAAPFDDDDKIVGGYICEENSVPYQVSLNSGYHFCGGSLISEQWVVSAGHCYKSAINSKLSGRGCEYHRIQVRLGEHNIEVLEGNEQFINAAKIIRHPKYNSRTLDNDILLIKLSSPAVINSRVSAISLPTAPPAAGTESLISGWGNTLSSGADYPDELQCLDAPVLSQAECEASYPGKITNNMFCVGFLEGGKDSCQGDSGGPVVSNGELQGIVSWGYGCAQKNRPGVYTKVYNYVDWIKDTIAANS

SEQ ID NO: 19037 - protein, 30 aa, Homo sapiens
GLRLLLATVLQAVSVDHLRSCHRESRSDCS

SEQ ID NO: 19038 - protein, 1372 aa, Homo sapiens
MSAPDEGRRDPPKPKGKTLGSFFGSLPGFSSARNLVANAHSSARARPAADPTGAPAAEAAQPQAQVAAHPEQTAPWTEKELQPSEKQMVSGAKDLVCSKMSRAKDAVSSGVASVVDVAKGVVQGGLDTTRSALTGTKEVVSSGVTGAMDMAKGAVQGGLDTSKAVLTGTKDTVSTGLTGAVNVAKGTVQAGVDTTKTVLTGTKDTVTTGVMGAVNLAKGTVQTGVETSKAVLTGTKDAVSTGLTGAVNVARGSIQTGVDTSKTVLTGTKDTVCSGVTGAMNVAKGTIQTGVDTSKTVLTGTKDTVCSGVTGAMNVAKGTIQTGVDTSKTVLTGTKDTVCSGVTGAMNVAKGTIQTGVDTTKTVLTGTKNTVCSGVTGAVNLAKEAIQGGLDTTKSMVMGTKDTMSTGLTGAANVAKGAMQTGLNTTQNIATGTKDTVCSGVTGAMNLARGTIQTGVDTTKIVLTGTKDTVCSGVTGAANVAKGAVQGGLDTTKSVLTGTKDAVSTGLTGAVNVAKGTVQTGVDTTKTVLTGTKDTVCSGVTSAVNVAKGAVQGGLDTTKSVVIGTKDTMSTGLTGAANVAKGAVQTGVDTAKTVLTGTKDTVTTGLVGAVNVAKGTVQTGMDTTKTVLTGTKDTIYSGVTSAVNVAKGAVQTGLKTTQNIATGTKNTFGSGVTSAVNVAKGAAQTGVDTAKTVLTGTKDTVTTGLMGAVNVAKGTVQTSVDTTKTVLTGTKDTVCSGVTGAANVAKGAIQGGLDTTKSVLTGTKDAVSTGLTGAVKLAKGTVQTGMDTTKTVLTGTKDAVCSGVTGAANVAKGAVQMGVDTAKTVLTGTKDTVCSGVTGAANVAKGAVQTGLKTTQNIATGTKNTLGSGVTGAAKVAKGAVQGGLDTTKSVLTGTKDAVSTGLTGAVNLAKGTVQTGVDTSKTVLTGTKDTVCSGVTGAVNVAKGTVQTGVDTAKTVLSGAKDAVTTGVTGAVNVAKGTVQTGVDASKAVLMGTKDTVFSGVTGAMSMAKGAVQGGLDTTKTVLTGTKDAVSAGLMGSGNVATGATHTGLSTFQNWLPSTPATSWGGLTSSRTTDNGGEQTALSPQEAPFSGISTPPDVLSVGPEPAWEAAATTKGLATDVATFTQGAAPGREDTGLLATTHGPEEAPRLAMLQNELEGLGDIFHPMNAEEQAQLAASQPGPKVLSAEQGSYFVRLGDLGPSFRQRAFEHAVSHLQHGQFQARDTLAQLQDCFRLIEKAQQAPEGQPRLDQGSGASAEDAAVQEERDAGVLSRVCGLLRQLHTAYSGLVSSLQGLPAELQQPVGRARHSLCELYGIVASAGSVEELPAERLVQSREGVHQAWQGLEQLLEGLQHNPPLSWLVGPFALPAGGQ

SEQ ID NO: 19039 - protein, 536 aa, Homo sapiens
MGAWAFPAALFLLCLTSESLQGGLPLLPPGLGKVYGPHSGLGAGYDGGVKPQKPGFVVRHGLGTQPDTEGGMKPQNLGFRTFAGAAAQPGYGNGLGAAAFPVAGAQSGPAAQNGFGPGFGGGGKPQKPGPTTQNGYRPGYVGAVKPQKPGFQYRIGLGAQPGFRGDMKAQEPGLGNGNGLSAQPVLTAQNRFGFGAGLGGNVKPLKPGYGKRLRAGAFPGAGTQPEYGHGNGPGVQPGLGAGMKPQMPGLGAPNGYGPGRGRAGVPGGPERRPWVPHLLPFSSPGYLGVMKAQKPGPLAQNGYRAGAGEGMKPQKPGLRGTLKPQKSGHGHENGPWPGPCNARVAPMLLPRLPTPGVPSDKEGGWGLKSQPPSAVQNGKLPAPMPAIQWGLKPQKAGHQPPNGYGPGAEPGFNGGLEPQKIGLGYGNGVLGARVFPEAHPQPGFHGANGFRNRDGVEALVYPKAAALAPEGNGQAGVLWNSRWPTLQAWGAGLKPGYQAGDEYAEARSQPGGPDVKRGSNGQLGNGYGGRCPLGKC

SEQ ID NO: 19040 - protein, 1225 aa, Homo sapiens
MPFYRRTVVPQRLCPRNPPQQLAELRDVSHLAALSLLRQLADLCGHSLALLEDLEGHLLALGRRTDSLYRRTVRLRRRLPCRLLGPEEDEEELAAANSGRENATATAHSRSSWRQPVNVFLSSGRPPSVEELLREAQLNLQSLLQEEYEEQYSEARLVGQTFRSSDEATKPTPNPRPQSARRLEFILMPTKRQLSEDETTTQGVRAPEASLSLSTTADKQTAWNSLFPLPILEEKRWPQLCSTQSDIVPINISGQQFDKHASLRHSLFNTETAVNPKSTLRRRRTIIGFSNFSQRDQGHSNSPAGSVAHSTTSDIRPSHSVPEGVHGRVAVGQDARFPSLTSPVLRTPSSEPDEPHQARSGPNPPGMESMGMVYSVPSSCNGPTESTFSTSWKGDAFTYMTPSATSQSNQVNENGKNPSCGNSWVSLNKVPPLVPKEAATLLVARDNPAGCSGSAGYPERLIQQRHMPERPSKIGLLTSGTSRLETGPGGASRFRERSLSVPTDSGTTDVDYDEEQKANEACALPFASTSSEGSNSADNIASLSAQQEAQHRRQRSKSISLRKAKKKPSPPTRSVSLVKDEPGLLPEGGSALPKDQRPKSLCLSLEHQGHHSSHPDAQGHPAIPNHKDPESTQFSHHWYLTDWKSGDTYQSLSSSSTATGTTVIECTQVQGSSESLASPSTSRATTPSQLSIEVEAREISSPGRPPGLMSPSSGYSSQSETPTPTVSMSLTLGHLPPPSSSVRVRPVVPERKSSLPPTSPMEKFPKSRLSFDLPLTSSPNLDLSGMSISIRSKTKVSRHHSETNFGVKLAQKTNPNQPIMPMVTQSDLRSVRLRSVSKSEPEDDIESPEYAEEPRAEEVFTLPERKTKPPVAEKPPVARRPPSLVHKPPSVPEEYALTSPTLAMPPRSSIQHARPLPQDSYTVVRKPKPSSFPDGRSPGESTAPSSLVFTPFASSSDAFFSGTQQPPQGSVEDEGPKVRVLPERISLQSQEEAEKKKGKIPPPVPKKPSVLYLPLTSPTAQMEAYVAEPRLPLSPIITLEEDTKCPATGDDLQSLGQRVTSTPQADSEREASPLGSSVEPGTEEKSLISDKTAEWIAEDDDDVFVASRTTEDLFTVIHRSKRKLLGWKEPGEAFVGGRTSSHSPIKNTAESPISESTATAGSGSSANLDAGRNDDFKALLQKKGSKATPRSRPSAAELLKTTNPLARRIIAQFSKDYETTDNPST

SEQ ID NO: 19041 - protein, 185 aa, Homo sapiens
MVDMMKEALEKLQLNIVEMKDENATLDGGDVLFTGREFFVGLSKRTNQRGAEILADTFKDYAVSTVPVADGLHLKSFCSMAGPNLIAIGSSESAQKALKIMQQMSDHRYDKLTVPDDIAANCIYLNIPNKGHVLLHRTPEEYPESAKVYEKLKDHMLIPVSMSELEKVDGLLTCCSVLINKKVDS

SEQ ID NO: 19042 - protein, 247 aa, Homo sapiens
MNPLLILAFVGAAVAAPFDDDDKIVGGYICEENSVPYQVSLNSGYHFCGGSLISEQWVVSAGHCYKSRIQVRLGEHNIEVLEGNEQFINAAKIIRHPKYNSRTLDNDILLIKLSSPAVINSRVSAISLPTAPPAAGTESLISGWGNTLSSGADYPDELQCLDAPVLSQAECEASYPGKITNNMFCVGFLEGGKDSCQGDSGGPVVSNGELQGIVSWGYGCAQKNRPGVYTKVYNYVDWIKDTIAANS

SEQ ID NO: 19043 - protein, 68 aa, Homo sapiens
MAPAAAPSSLAVRASSPAATPTSYGVFCKGLSRTLLAFFELAWQLRMNFPYFYVAGSVILNIRLQVHI

SEQ ID NO: 19044 - protein, 211 aa, Homo sapiens
MRTKQTMHGILERSKFCKDMTVKYDSRLRERKYGVVEGKALSELRAMAKAAREECPVFTPPGGETLDQVKMRGIDFFEFLCQLILKEADQKEQFSQGSPSNCLETSLAEIFPLGKNHSSKVNSDSGIPGLAASVLVVSHGAYMRSLFDYFLTDLKCSLPATLSRSELMSVTPNTGMSLFIINFEEGREVKPTVQCICMNLQDHLNGLTETR

SEQ ID NO: 19045 - protein, 71 aa, Homo sapiens
MGAQLSGGRGAPEPAQTQPQPQPQPAAPEGPEQPRHPPQPQPQPQPQPQPEPSPWGPLDDVRFLIACTSWY

SEQ ID NO: 19046 - protein, 2509 aa, Homo sapiens
MEEVVIAGMSGKLPESENLQEFWDNLIGGVDMVTDDDRRWKAGLYGLPRRSGKLKDLSRFDASFFGVHPKQAHTMDPQLRLLLEVTYEAIVDGGINPDSLRGTHTGVWVGVSGSETSEALSRDPETLVGYSMVGCQRAMMANRLSFFFDFRGPSIALDTACSSSLMALQNAYQAIHSGQCPAAIVGGINVLLKPNTSVQFLRLGMLSPEGTCKAFDTAGNGYCRSEGVVAVLLTKKSLARRVYATILNAGTNTDGFKEQGVTFPSGDIQEQLIRSLYQSAGVAPESFEYIEAHGTGTKVGDPQELNGITRALCATRQEPLLIGSTKSNMGHPEPASGLAALAKVLLSLEHGLWAPNLHFHSPNPEIPALLDGRLQVVDQPLPVRGGNVGINSFGFGGSNVHIILRPNTQPPPAPAPHATLPRLLRASGRTPEAVQKLLEQGLRHSQDLAFLSMLNDIAAVPATAMPFRGYAVLGGERGGPEVQQVPAGERPLWFICSGMGTQWRGMGLSLMRLDRFRDSILRSDEAVKPFGLKVSQLLLSTDESTFDDIVHSFVSLTAIQIGLIDLLSCMGLRPDGIVGHSLGEVACGYADGCLSQEEAVLAAYWRGQCIKEAHLPPGAMAAVGLSWEECKQRCPPGVVPACHNSKDTVTISGPQAPVFEFVEQLRKEGVFAKEVRTGGMAFHSYFMEAIAPPLLQELKKVIREPKPRSARWLSTSIPEAQWHSSLARTSSAEYNVNNLVSPVLFQEALWHVPEHAVVLEIAPHALLQAVLKRGLKPSCTIIPLMKKDHRDNLEFFLAGIGRLHLSGIDANPNALFPPVEFPAPRGTPLISPLIKWDHSLAWDVPAAEDFPNGSGSPSAAIYNIDTSSESPDHYLVDHTLDGRVLFPATGYLSIVWKTLARALGLGVEQLPVVFEDVVLHQATILPKTGTVSLEVRLLEASRAFEVSENGNLVVSGKVYQWDDPDPRLFDHPESPTPNPTEPLFLAQAEVYKELRLRGYDYGPHFQGILEASLEGDSGRLLWKDNWVSFMDTMLQMSILGSAKHGLYLPTRVTAIHIDPATHRQKLYTLQDKAQVADVVVSRWLRVTVAGGVHISGLHTESAPRRQQEQQVPILEKFCFTPHTEEGCLSERAALQEELQLCKGLVQALQTKVTQQGLKMVVPGLDGAQIPRDPSQQELPRLLSAACRLQLNGNLQLELAQVLAQERPKLPEDPLLSGLLDSPALKACLDTAVENMPSLKMKVVLAGHGHLYSRIPGLLSPHPLLQLSYTATDRHPQALEAAQAELQQHDVAQGQWDPADPAPSALGSADLLVCNCAVAALGDPASALSNMVAALREGGFLLLHTLLRGHPLGDIVAFLTSTEPQYGQGILSQDAWESLFSRVSLRLVGLKKSFYGSTLFLCRRPTPQDSPIFLPVDDTSFRWVESLKGILADEDSSRPVWLKAINCATSGVVGLVNCLRREPGGNRLRCVLLSNLSSTSHVPEVDPGSAELQKVLQGDLVMNVYRDGAWGAFRHFLLEEDKPEEPTAHAFVSTLTRGDLSSIRWVCSSLRHAQPTCPGAQLCTVYYASLNFRDIMLATGKLSPDAIPGKWTSQDSLLGMEFSGRDASGKRVMGLVPAKGLATSVLLSPDFLWDVPSNWTLEEAASVPVVYSTAYYALVVRGRVRPGETLLIHSGSGGVGQAAIAIALSLGCRVFTTVGSAEKRAYLQARFPQLDSTSFANSRDTSFEQHVLWHTGGKGVDLVLNSLAEEKLQASVRCLATHGRFLEIGKFDLSQNHPLGMAIFLKNVTFHGVLLDAFFNESSADWREVWALVQAGIRDGVVRPLKCTVFHGAQVEDAFRYMAQGKHIGKVVVQVLAEEPEAVLKGAKPKLMSAISKTFCPAHKSYIIAGGLGGFGLELAQWLIQRGVQKLVLTSRSGIRTGYQAKQVRRWRRQGVQVQVSTSNISSLEGARGLIAEAAQLGPVGGVFNLAVVLRDGLLENQTPEFFQDVCKPKYSGTLNLDRVTREACPELDYFVVFSSVSCGRGNAGQSNYGFANSAMERICEKRRHEGLPGLAVQWGAIGDVGILVETMSTNDTIVSGTLPQRMASCLEVLDLFLNQPHMVLSSFVLAEKAAAYRDRDSQRDLVEAVAHILGIRDLAAVNLDSSLADLGLDSLMSVEVRQTLERELNLVLSVREVRQLTLRKLQELSSKADEASELACPTPKEDGLAQQQTQLNLRSLLVNPEGPTLMRLNSVQSSERPLFLVHPIEGSTTVFHSLASRLSIPTYGLQCTRAAPLDSIHSLAAYYIDCIRQVQPEGPYRVAGYSYGACVAFEMCSQLQAQQSPAPTHNSLFLFDGSPTYVLAYTQSYRAKLTPGCEAEAETEAICFFVQQFTDMEHNRVLEALLPLKGLEERVAAAVDLIIKSHQGLDRQELSFAARSFYYKLRAAEQYTPKAKYHGNVMLLRAKTGGAYGEDLGADYNLSQVCDGKVSVHVIEGDHRTLLEGSGLESIISIIHSSLAEPRVSVREG

SEQ ID NO: 19047 - protein, 114 aa, Homo sapiens
MSLGLLCCGAFSLLWAGPVNAGVTQTPKFRVLKTGQSMTLLCAQDMNHEYMYWYRQDPGMGLRLIHYSVGEGTTAKGEVPDGYNVSRLKKQNFLLGLESAAPSQTSVYFCASSY

SEQ ID NO: 19048 - protein, 191 aa, Homo sapiens
MAASMFYGRLVAVATLRNHRPRTAQRAAAQVLGSSGLFNNHGLQVQQQQQRNLSLHEYMSMELLQEAGVSVPKGYVAKSPDEAYAIAKKLGSKDVVIKAQVLAGGRGKGTFESGLKGGVKIVFSPEEAKAVSSQMIGKKLFTKQTGEKGRICNQVLVCERKYPRREYYFAITMERSFQVSNCRHDTYGINL

SEQ ID NO: 19049 - protein, 109 aa, Homo sapiens
MDKPCGCPPGVCDHGTGDRRDPWYSTVGLLPPVRAMSQRNLNAKTEQGPTGVTMTSNPITWGQIKKTTQEAEKLLERQGQAKTPDSMFLAMLAVVSCASIGSGEPPTGN

SEQ ID NO: 19050 - protein, 35 aa, Homo sapiens
MRKSPGLSDCLWAWILLLSTLTGRSYGQPSLQDEL

SEQ ID NO: 19051 - protein, 115 aa, Homo sapiens
MGTRLLFWVAFCLLGADHTGAGVSQSPSNKVTEKGKDVELRCDPISGHTALYWYRQSLGQGLEFLIYFQGNSAPDKSGLPSDRFSAERTGGSVSTLTIQRTQQEDSAVYLCASSL

SEQ ID NO: 19052 - protein, 232 aa, Homo sapiens
MPGTVGTAGHLYHPRQWRCRLRGPGEGPGSGRSGGRAATAPRHRSPNRGGRAGPRGPHEGWVPRARGEVIAHSEYQKSKRISIFLSMQDEIETEEIIKDIFQRGKICFIPRYRFQSNHMDMVRIESPEEISLLPKTSWNIPQPGEGDVREEALSTGGLDLIFMPGLGFDKHGNRLGRGKGYYDAYLKRCLQHQEVKPYTLALAFKEQICLQVPVNENDMKVDEVLYEDSSTA

SEQ ID NO: 19053 - protein, 59 aa, Homo sapiens
MIVLGWMFFVGLVCYMGTFPELMPPTLKWQERWPVQESKTQLRRRALGEDLLQNHVEGI

SEQ ID NO: 19054 - protein, 85 aa, Homo sapiens
MLPLFIFLISDLTHNFLGPLSLDPSRTTLATARGKEEMDKPCGCPPGVCDHGTGDRRDPWYSTVGLLPPVRAMSQRNLNAKTEQG

SEQ ID NO: 19055 - protein, 98 aa, Homo sapiens
MKRLAARCFAGLLILSPLTVISDSRPADSGKCCWLWFKASVCRPSKTAIWRKWKRKYGLRSEKDEEMWIKILQKKMWKKLRREEAALPLRNCHQIPPN

SEQ ID NO: 19056 - protein, 42 aa, Homo sapiens
MRAPGRPALRPLPLPPLLLLLLAAPWGRAGYSRPLLGLWAKV

SEQ ID NO: 19057 - protein, 55 aa, Homo sapiens
MADFYKEFLSKNFQKHMYYNRDWYKRNFAITFFMGKVALERIWNKLKQKQKKRSN

SEQ ID NO: 19058 - protein, 200 aa, Homo sapiens
MKRLAARCFAGLLILSPLTVISDSRPADSGKAIEDGNLEEMEEEVRLKKRKRRRNVDKDPAKEDVEKAKKRRGRPPAEKLSPNPPKLTKQMNAIIDTVINYKDSSGRQLSEVFIQLPSRKELPEYYELIRKPVDFKKIKERIRNHKYRSLGDLEKDVMLLCHNAQTFNLEGSQIYEDSIVLQSVFKSARQKIAKEEESED

SEQ ID NO: 19059 - protein, 60 aa, Homo sapiens
MRPLLVLLLLGLAAGSPPLDDNKIPSLCPGHPGLPGLPGPRGDPGPRGEAGPAGPTGPAG

SEQ ID NO: 19060 - protein, 229 aa, Homo sapiens
MKRLAARCFAGLLILSPLTVISDSRPADSGKAIEDGNLEEMEEEVRLKKRKRRRNVDKDPAKEDVEKAKKRRGRPPAEKLSPNPPKLTKQMNAIIDTVINYKDSSGRQLSEVFIQLPSRKELPEYYELIRKPVDFKKIKERIRNHKYRSLGDLEKDVMLLCHNAQTFNLEGSQIYEDSIVLQSVFKSARQKIAKEEESEDESNEEEEEEDEEESESEAKSVKVKIKLNK

SEQ ID NO: 19061 - protein, 245 aa, Homo sapiens
MKRLAARCFAGLLILSPLTVISDSRPADSGKAIEDGNLEEMEEEVRLKKRKRRRNVDKDPAKEDVEKAKKRRGRPPAEKLSPNPPKLTKQMNAIIDTVINYKDRCNVEKVPSNSQLEIEGNSSGRQLSEVFIQLPSRKELPEYYELIRKPVDFKKIKERIRNHKYRSLGDLEKDVMLLCHNAQTFNLEGSQIYEDSIVLQSVFKSARQKIAKEEESEDESNEEEEEEDEEESESEAKSVKVKIKL

SEQ ID NO: 19062 - protein, 145 aa, Homo sapiens
MVAWRSAFLVCLAFSLATLVQRGSGDFDDFNLEDAVKETSSVKPALGMYHKLDGLKQQNFILSLFWMLEVLYQGVGWATFSLKALGKNLSLTFPTSGGSRCSLVCGCITPISASVVTWCSPFCVSLLSLTKMLVSGFKAHLDNPG

SEQ ID NO: 19063 - protein, 3564 aa, Homo sapiens
MTAWRRFQSLLLLLGLLVLCARLLTAAKGQNCGGLVQGPNGTIESPGFPHGYPNYANCTWIIITGERNRIQLSFHTFALEEDFDILSVYDGQPQQGNLKVRLSGFQLPSSIVSTGSILTLWFTTDFAVSAQGFKALYEVLPSHTCGNPGEILKGVLHGTRFNIGDKIRYSCLPGYILEGHAILTCIVSPGNGASWDFPAPFCRAEGACGGTLRGTSSSISSPHFPSEYENNADCTWTILAEPGDTIALVFTDFQLEEGYDFLEISGTEAPSIWLTGMNLPSPVISSKNWLRLHFTSDSNHRRKGFNAQFQVKKAIELKSRGVKMLPSKDGSHKNSVLSQGGVALVSDMCPDPGIPENGRRAGSDFRVGANVQFSCEDNYVLQGSKSITCQRVTETLAAWSDHRPICRARTCGSNLRGPSGVITSPNYPVQYEDNAHCVWVITTTDPDKVIKLAFEEFELERGYDTLTVGDAGKVGDTRSVLYVLTGSSVPDLIVSMSNQMWLHLQSDDSIGSPGFKAVYQEIEKGGCGDPGIPAYGKRTGSSFLHGDTLTFECPAAFELVGERVITCQQNNQWSGNKPSCVFSCFFNFTASSGIILSPNYPEEYGNNMNCVWLIISEPGSRIHLIFNDFDVEPQFDFLAVKDDGISDITVLGTFSGNEVPSQLASSGHIVRLEFQSDHSTTGRGFNITYTTFGQNECHDPGIPINGRRFGDRFLLGSSVSFHCDDGFVKTQGSESITCILQDGNVVWSSTVPRCEAPCGGHLTASSGVILPPGWPGYYKDSLHCEWIIEAKPGHSIKITFDRFQTEVNYDTLEVRDGPASSSPLIGEYHGTQAPQFLISTGNFMYLLFTTDNSRSSIGFLIHYESVTLESDSCLDPGIPVNGHRHGGDFGIRSTVTFSCDPGYTLSDDEPLVCERNHQWNHALPSCDALCGGYIQGKSGTVLSPGFPDFYPNSLNCTWTIEVSHGKGVQMIFHTFHLESSHDYLLITEDGSFSEPVARLTGSVLPHTIKAGLFGNFTAQLRFISDFSISYEGFNITFSEYDLEPCDDPGVPAFSRRIGFHFGVGDSLTFSCFLGYRLEGATKLTCLGGGRRVWSAPLPRCVAECGASVKGNEGTLLSPNFPSNYDNNHECIYKIETEAGKGIHLRTRSFQLFEGDTLKVYDGKDSSSRPLGTFTKNELLGLILNSTSNHLWLEFNTNGSDTDQGFQLTYTSFDLVKCEDPGIPNYGYRIRDEGHFTDTVVLYSCNPGYAMHGSNTLTCLSGDRRVWDKPLPSCIAECGGQIHAATSGRILSPGYPAPYDNNLHCTWIIEADPGKTISLHFIVFDTEMAHDILKVWDGPVDSDILLKEWSGSALPEDIHSTFNSLTLQFDSDFFISKSGFSIQFSTSIAATCNDPGMPQNGTRYGDSREAGDTVTFQCDPGYQLQGQAKITCVQLNNRFFWQPDPPTCIAACGGNLTGPAGVILSPNYPQPYPPGKECDWRVKVNPDFVIALIFKSFNMEPSYDFLHIYEGEDSNSPLIGSYQGSQAPERIESSGNSLFLAFRSDASVGLSGFAIEFKEKPREACFDPGNIMNGTRVGTDFKLGSTITYQCDSGYKILDPSSITCVIGADGKPSWDQVLPSCNAPCGGQYTGSEGVVLSPNYPHNYTAGQICLYSITVPKEFVVFGQFAYFQTALNDLAELFDGTHAQARLLSSLSGSHSGETLPLATSNQILLRFSAKSGASARGFHFVYQAVPRTSDTQCSSVPEPRYGRRIGSEFSAGSIVRFECNPGYLLQGSTALHCQSVPNALAQWNDTIPSCVVPCSGNFTQRRGTILSPGYPEPYGNNLNCIWKIIVTEGSGIQIQVISFATEQNWDSLEIHDGGDVTAPRLGSFSGTTVPALLNSTSNQLYLHFQSDISVAAAGFHLEYKTVGLAACQEPALPSNSIKIGDRYMVNDVLSFQCEPGYTLQGRSHISCMPGTVRRWNYPSPLCIATCGGTLSTLGGVILSPGFPGSYPNNLDCTWRISLPIGYGAHIQFLNFSTEANHDFLEIQNGPYHTSPMIGQFSGTDLPAALLSTTHETLIHFYSDHSQNRQGFKLAYQAYELQNCPDPPPFQNGYMINSDYSVGQSVSFECYPGYILIGHPVLTCQHGINRNWNYPFPRCDAPCGYNVTSQNGTIYSPGFPDEYPILKDCIWLITVPPGHGVYINFTLLQTEAVNDYIAVWDGPDQNSPQLGVFSGNTALETAYSSTNQVLLKFHSDFSNGGFFVLNFHAFQLKKCQPPPAVPQAEMLTEDDDFEIGDFVKYQCHPGYTLVGTDILTCKLSSQLQFEGSLPTCEAQCPANEVRTGSSGVILSPGYPGNYFNSQTCSWSIKVEPNYNITIFVDTFQSEKQFDALEVFDGSSGQSPLLVVLSGNHTEQSNFTSRSNQLYLRWSTDHATSKKGFKIRYAAPYCSLTHPLKNGGILNRTAGAVGSKVHYFCKPGYRMVGHSNATCRRNPLGMYQWDSLTPLCQAVSCGIPESPGNGSFTGNEFTLDSKVVYECHEGFKLESSQQATAVCQEDGLWSNKGKPPTCKPVACPSIEAQLSEHVIWRLVSGSLNEYGAQVLLSCSPGYYLEGWRLLRCQANGTWNIGDERPSCRVISCGSLSFPPNGNKIGTLTVYGATAIFTCNTGYTLVGSHVRECLANGLWSGSETRCLAGHCGSPDPIVNGHISGDGFSYRDTVVYQCNPGFRLVGTSVRICLQDHKWSGQTPVCVPITCGHPGNPAHGFTNGSEFNLNDVVNFTCNTGYLLQGVSRAQCRSNGQWSSPLPTCRVVNCSDPGFVENAIRHGQQNFPESFEYGMSILYHCKKGFYLLGSSALTCMANGLWDRSLPKCLAISCGHPGVPANAVLTGELFTYGAVVHYSCRGSESLIGNDTRVCQEDSHWSGALPHCTGNNPGFCGDPGTPAHGSRLGDDFKTKSLLRFSCEMGHQLRGSPERTCLLNGSWSGLQPVCEAVSCGNPGTPTNGMIVSSDGILFSSSVIYACWEGYKTSGLMTRHCTANGTWTGTAPDCTIISCGDPGTLANGIQFGTDFTFNKTVSYQCNPGYVMEAVTSATIRCTKDGRWNPSKPVCKAVLCPQPPPVQNGTVEGSDFRWGSSISYSCMDGYQLSHSAILSCEGRGVWKGEIPQCLPVFCGDPGIPAEGRLSGKSFTYKSEVFFQCKSPFILVGSSRRVCQADGTWSGIQPTCIDPAHNTCPDPGTPHFGIQNSSRGYEVGSTVFFRCRKGYHIQGSTTRTCLANLTWSGIQTECIPHACRQPETPAHADVRAIDLPTFGYTLVYTCHPGFFLAGGSEHRTCKADMKWTGKSPVCKSKGVREVNETVTKTPVPSDVFFVNSLWKGYYEYLGKRQPATLTVDWFNATSSKVNATFSEASPVELKLTGIYKKEEAHLLLKAFQIKGQADIFVSKFENDNWGLDGYVSSGLERGGFTFQGDIHGKDFGKFKLERQDPLNPDQDSSSHYHGTSSGSVAAAILVPFFALILSGFAFYLYKHRTRPKVQYNGYAGHENSNGQASFENPMYDTNLKPTEAKAVRFDTTLNTVCTVV

SEQ ID NO: 19064 - protein, 108 aa, Homo sapiens
MRPSVWAAVAAGLWVLCTVIAEGPPALPALALPLAGAPDAGGCQGAEGPLPUAGTARLLQEGPRGPEEASQTPESGLASVPQSQRGLQPPAPAHVGAPAGCTLWALPL

SEQ ID NO: 19065 - protein, 40 aa, Homo sapiens
MIVVLWMLLIAGTMWKGYKYPPGGTPVEVSKDDPGEVMQL

SEQ ID NO: 19066 - protein, 3432 aa, Homo sapiens
MASERPEPEVEEAGQVFLLMKKDYRISRNVRLAWFLSHLHQTVQATPQEMLLQSEQELEVLSVLPPGWQPDEPVVPRPFLLVPSTRVTFLAWQYRFVIELDLSPSTGIVDDSTGEILFDEVFHALSRCLGGLLRPFRVPGSCIDFQPEIYVTIQAYSSIIGLQSHQVLVQGCLLDPSQREVFLQQIYEQLCLFEDKVATMLQQQYDPQSQAEDQSPDSGDLLGRKVGVSMVTADLGLVSMIRQGILALQLLPSNSSAGIIVITDGVTSVPDVAVCETLLNQLRSGTVACSFVQVGGVYSYDCSFGHVPNVELMKFIAMATFGSYLSTCPEPEPGNLGLTVYHRAFLLYSFLRSGEALNPEYYCGSQHRLFNEHLVSASSNPALALRRKKHTEKEVPADLVSTVSVRLREGYSVREVTLAKGGSQLEVKLVLLWKHNMRIEYVAMAPWPLEPEGPRVTRVEVTMEGGYDILHDVSCALRQPIRSLYRTHVIRRFWNTLQSINQTDQMLAHLQSFSSVPEHFTLPDSTKSGVPLFYIPPGSTTPVLSLQPSGSDSSHAQFAAYWKPVLSMDANSWQRWLHMHRLVLILEHDTPIPKHLHTPGSNGRYSTIQCRISHSSLTSLLRDWSSFVLVEGYSYVKLLSSAPDQPPNSFYMVRIISKAPCMVLRLGFPIGTPAPARHKIVSGLREEILRLRFPHRVQSKEPTPKVKRKGLGGAGGGSSPSKSPPVLGPQQALSDRPCLVVLHKPLDKLLIRYEKLPLDYRAPFLLTLEPPGPLPLVSGRSASSSLASLSRYLYHQRWLWSVPSGLAPALPLSAIAQLLSILTEVRLSEGFHFACSGEGIINMVLELPIQNEPPGQAAAEEKHTCVVQYILFPPHSTSTKDSFSTDDDNDVEVEALEGDSELNLVTEVWVEPQYGRVGPGPGIWKHLQDLTYSEIPQALHPRDAACIGSMLSFEYLIQLCQSKEWGPLPPEPRVSDGLDQGGDTCVHEIPFHFDLMGLLPQCQQLQMFFLLLAREPEGVPFAEGSCPANDMVLCLLHSCLGQELSDREIPLTPVDQAAFLSEVLRRTCHVPGAEGPLLGVHGIPKEQAVGSTQATGDSAFTSLSVGLPETLKPLISAQPPQWRCYARLVNPQHVFLTFLPATFSDVQRLAACGLEGPPQEETKPKFGDWSGAPSLKDLGGTGIKATKSHVPVLSVTLASDNAQNQGELSPPFRRDLQAYAGRQASQTESADGPRTRCPVYIYSCSLEALREQMVGMQPPQAPRDLIFRTQFLDHPSPSSAWMEPRYKEAANHCALLQEHAQRCYVRGLFRSLQQAQSVTSQDLLTAVDACEELLQEIDITPFLLALCGHTWGLPHAPPSPGPLSPGPFSSSMEEGAEPRERAILASESSIETEDLSEPEFQSTRVPGIPDPGPEISLTDVCQLRGEAHGALHSVIQEKFLEISRLHFRTVPSNPHYFFYCPPSSRREDEGPRDTVDRKISDLEFSEAELMGEEGDTSACCVVTESDPELEVEYRESRESDLGPAGLDSASLSDVDTVNPDEDSFSILGGDSPTGPESFLHDLPPLFLHLTCSVRLRGQHSSVPVCSLPTCLGQVLSSLEGPPVGGRVPLRDLSVTLDVFMLTLPLEVELPTASDPQHHRSTSESSASFPRSPGQPSSLRSDDGLGPPLPPPEEERHPGLSNLATPHRLAIETTMNEIRWLLEDEMVGALRRGGIPQSPALHRAAAHIHSSPGRSTCLRQTLPLSFVFGPERSLTQFKEEFRRLHLPGHVLLEDPDSGFFFVAAGQQPGGSHGEPSSAAWAWHSHEDRAEGIEGETLTASPQAPGSPEDSEGVPLISLPRVPQGGSQPGPSRGLSLMSSQGSVDSDHLGYDGGSSGSDSEGPNDTLGEKAPFTLRTPPGPAPPQPSLSGLPGPCLPDFWLIVRVLQDRVEVYAHARSLIREDGGPGTECRHLQQLLVRRVGEICREVNQRLLLQDLHDSHVCNSLLVAESEEDLWRSETPFHSRQRAPLPSDDYAADESCAPRGYLAATMQFVPGHFSCDVVWGTVIRVHSRLKMGPSMGVSRAIQALRSVLNAFSVVNRKNMFVYQERATKAVYYLRLLETSCSDRPWKGDALPPSLALSRSQEPIYSEEASGPRSPLDMVSSRSSDAARPVGQVDRHIQLLVHGVGQAGPEITDELVRVLCRRLDEATLDVITVMLVRNCKLTPADVEFIQPPGSLPSEVLHLALPTSCRPWLPALAWYLRQNLLIFLHSPKYTDSNSRNHFQHPLPPQGGLPDLDIYLYNKPGGQGTGGKGVACITLAFVDEGGAPLSLALWPPSSPGPPDPLREEEFEQLTQVIRCPVVVDSSSAQNGAPRLRLDVWEKGNISIVQLEEKLRGAARQALADAIIELQLLPASLCTEDTPTGSLRNGSLETKSSAGRASTFPPAPVPGEPVTPPSKAGRRSFWDMLSKTECGDLGSPKTTDDIVLDRPEDTRGRRRHKTESVRTPGGAERAPGSDSGAQRQKRRTTQLEEGEVGTLHPVFARVAQRWMEFMVQIGCASVSRSSAHMVSRFLLPSILSEFTALVTSMAGDTSVRIFEQHLGSEPEIFGPCSPGQLGPSPRPAAERHLLLLGRNFLQWRRPTQQAAKAMQRFEPGGDGSSGRNAPRQRLLLLEVVDKKLQLLTYNWAPDLGAALGRALVRLVQWQNARAHLIFCLLSQKLGLFHHYGQLDFPVRDEKEPNPFLLPTMEVETLIRSASPPLSREQGRLSGSSRGGGPLPLDTFPFDEALRDITAARPSSVLGPVPRPPDPVTYHGQQFLEIKMAERRELERQMKMENLFVTWQQRSTPATMPISAGELETLKQSSRLVHYCATAMLFDPAAWLHGPPETSGPPDGQRRHRPESGSGSREAPTSCESLDVSPPGAREEPWLKELSLAFLQQYVQYLQSIGFVLVPLRPPSPARSTSRPRAMAILGTEGRGSFSCPKTKTDGSPKSTSSPVTTYHLQRALPGGIILMELAFQGCYFCVKQFALECSRIPMGQAVNSQLSMLFTEECDKVRDLMHVHSFSYDFHLRLVHQHVLGAHLVLRHGYHLTTFLRHFLAHHPDGPHFGRNHIYQGTLELPTPLIAAHQLYNYVADHASSYHMKPLRMARPGGPEHNEYALVSAWHSSGSYLDSEGLRHQDDFDVSLLVCHCAAPFEEQGEAERHVLRLQFFVVLTSQRELFPRLTADMRRFRKPPRLPPEPEAPGSSAGSPGEASGLILAPGPAPLFPPLAAEVGMARARLAQLVRLAGGHCRRDTLWKRLFLLEPPGPDRLRLGGRLALAELEELLEAVHAKSIGDIDPQLDCFLSMTVSWYQSLIKVLLSRFPQSCRHFQSPDLGTQYLVVLNQKFTDCFVLVFLDSHLGKTSLTVVFREPFPVQPQDSESPPAQLVSTYHHLESVINTACFTLWTRLL

SEQ ID NO: 19067 - protein, 1361 aa, Homo sapiens
MAWKTLPIYLLLLLSVFVIQQVSSQDLSSCAGRCGEGYSRDATCNCDYNCQHYMECCPDFKRVCTAELSCKGRCFESFERGRECDCDAQCKKYDKCCPDYESFCAEVHNPTSPPSSKKAPPPSGASQTIKSTTKRSPKPPNKKKTKKVIESEEITEVKDNKKNRTKKKPTPKPPVVDEAGSGLDNGDFKVTTPDTSTTQHNKVSTSPKITTAKPINPRPSLPPNSDTSKETSLTVNKETTVETKETTTTNKQTSTDGKEKTTSAKETQSIEKTSAKDLAPTSKVLAKPTPKAETTTKGPALTTPKEPTPTTPKEPASTTPKEPTPTTIKSAPTTPKEPAPTTTKSAPTTPKEPAPTTTKEPAPTTPKEPAPTTTKEPAPTTTKSAPTTPKEPAPTTPKKPAPTTPKEPAPTTPKEPTPTTPKEPAPTTKEPAPTTPKEPAPTAPKKPAPTTPKEPAPTTPKEPAPTTTKEPSPTTPKEPAPTTTKSAPTTTKEPAPTTTKSAPTTPKEPSPTTTKEPAPTTPKEPAPTTPKKPAPTTPKEPAPTTPKEPAPTTTKKPAPTTPKEPAPTTPKETAPTTPKKLTPTTPEKLAPTTPEKPAPTTPEELAPTTPEEPTPTTPEEPAPTTPKAAAPNTPKEPAPTTPKEPAPTTPKEPAPTTPKETAPTTPKGTAPTTLKEPAPTTPKKPAPKELAPTTTKEPTSTTSDKPAPTTPKGTAPTTPKEPAPTTPKEPAPTTPKGTAPTTLKEPAPTTPKKPAPKELAPTTTKGPTSTTSDKPAPTTPKETAPTTPKEPAPTTPKKPAPTTPETPPPTTSEVSTPTTTKEPTTIHKSPDESTPELSAEPTPKALENSPKEPGVPTTKTPAATKPEMTTTAKDKTTERDLRTTPETTTAAPKMTKETATTTEKTTESKITATTTQVTSTTTQDTTPFKITTLKTTTLAPKVTTTKKTITTTEIMNKPEETAKPKDRATNSKATTPKPQKPTKAPKKPTSTKKPKTMPRVRKPKTTPTPRKMTSTMPELNPTSRIAEAMLQTTTRPNQTPNSKLVEVNPKSEDAGGAEGETPHMLLRPHVFMPEVTPDMDYLPRVPNQGIIINPMLSDETNICNGKPVDGLTTLRNGTLVAFRGHYFWMLSPFSPPSPARRITEVWGIPSPIDTVFTRCNCEGKTFFFKDSQYWRFTNDIKDAGYPKPIFKGFGGLTGQIVAALSTAKYKNWPESVYFFKRGGSIQQYIYKQEPVQKCPGRRPALNYPVYGETTQVRRRRFERAIGPSQTHTIRIQYSPARLAYQDKGVLHNEVKVSILWRGLPNVVTSAISLPNIRKPDGYDYYAFSKDQYYNIDVPSRTARAITTRSGQTLSKVWYNCP

SEQ ID NO: 19068 - protein, 1916 aa, Homo sapiens
MIEDKGPRVADYFVVAGLTDVSKPLEEEIHFNDACHKVAKPKEPITDVSVIIKSLGEEVPQDYICIDVTPTGLSADLNNGSLVGPQIYLCYRRGRDKPPLTDLGVLYDWKERLKQGCEIIQSTPYGRPANISGSTSSQRIYITYRRASENMTQNTLAVTDICIIIPSKGESPPHTFCKVDKNLNNSMWGSAVYLCYKKSVAKTNTVSYKAGLICRYPQEDYESFSLPESVPLFCLPMGATIECWPSNSKYPLPVFSTFVLTGASAEKVYGAAIQFYEPYSEENLTEKQRLLLGLTSADGKSDSSKTIHTNKCICLLSHWPFFDAFRKFLTFLYRYSISGPHVLPIEKHISHFMHKVPFPSPQRPRILVQLSPHDNLILSQPVSSPLPLSGGKFSTLLQNLGPENAVTLLVFAVTEHKILIHSLRPSVLTSVTEALVSMIFPFHWPCPYVPLCPLALADVLSAPCPFIVGIDSRYFDLYDPPPDVSCVDVDTNTISQIGDKKNVAWKILPKKPCKNLMNTLNNLHQQLAKLQQRPRDDGLMDLAINDYDFNSGKRLHMIDLEIQEAFLFFMASILKGYRSYLRPITQAPSETATDAASLFALQAFLRSRDRSHQKFYNMMTKTQMFIRFIEECSFVSDKDASLAFFDDCVDKVDMDKSGEVRLIELDESFKSEHTVFVTPPEIPHLPNGEEPPLQYSYNGFPVLRNNLFERPEGFLQAKKNKLPSKSSSPNSPLPMFRRTKQEIKSAHKIAKRYSSIPQMWSRCLLRHCYGLWFICLPAYVKVCHSKVRALKTAYDVLKKMQSKKMDPPDEVCYRILMQLCGQYDQPVLAVRVLFEMQKAGIDPNAITYGYYNKAVLESTWPSRSRSGYFLWTKVRNVVLGVTQFKRALKKHAHLSQTTLSADGSDLDAVSHGSMDSGHGTHTVEQAPFNTGLIKVYATDDRSSTGGQSDLGYNSLSKDEVRRGDTSTEDIQEEKDKKGSDCSSLSESESTKGSADCLPKLSYQNSSSIVRLTGTSNNSAGKISGESMESTPELLLISSLEDTNETRNIQSRCFRKRHKSDNETNLQQQVVWGNRNRNLSGGVLMGFMLNRINQEATPGDIVEKLGADAKILSNVISKSTRPNTLDIGKPPLRSKRDSLEKESSDDDTPFDGSNYLADKVDSPVIFDLEDLDSETDVSKAGCVATQNPKRIQRMNSSFSVKPFEKTDVATGFDPLSLLVAETEQQQKEEEEEDEDDSKSISTPSARRDLAEEIVMYMNNMSSPLTSRTPSIDLQRACDDKLNKKSPPLVKACRRSSLPPNSPKPVRLTKSKSYTKSEEKPRDRLWSSPAFSPTCPFREESQDTLTHSSPSFNLDTLLVPKLDVLRNSMFTAGKGVAEKASKWYSRFTMYTTSSKDQSSDRTSLSSVGAQDSESTSLTDEDVCHELEGPISSQETSATSGTKRIDLSRISLESSASLEGSLSKFALPGKSEVTSSFNASNTNIFQNYAMEVLISSCSRCRTCDCLVHDEEIMAGWTADDSNLNTTCPFCGNIFLPFLNIEIRDLRRPGRYFLKSSPSTENMHFPSSISSQTRQSCISTSASGLDTSALSVQGNFDLNSKSKLQENFCTRSIQIPANRSKTAMSKCPIFPMARSISTSGPLDKEDTGRQKLISTGSLPATLQGATDSLGLEWHLPSPDPVTVPYLSPLVVWKELESLLENEGDHAITVADFVDHHPIVFWNLVWYFRRLDLPSNLPGLILSSEHCNKYSKIPRHCMSEDSKYVLIQMLWDNMKLHQDPGQPLYILWNAHSQSRTLLFETQKYPMVHLLQKSDNSFNQELLKSMVKSIKMNDVYGPMSQILETLNKCPHFKRQRSLYREILFLSLVALGRENIDIDAFDKEYKMAYDRLTPSQVKSTHNCDRPPSTGVMECRKTFGEPYL

SEQ ID NO: 19069 - protein, 169 aa, Homo sapiens
MSGRGKQGGKARAKAKTRSSRAGLQFPVGRVHRLLRKGNYSERVGAGAPVYLAAVLEYLTAEILELAGNAARDNKKTRIIPRHLQLAIRNDEELNKLLGKVTIAQGGVLPNIQAVLLPKKTESHHKAKGFRSSQWLVPSRLLASPRVGKRHASSWPPRLLERALQPPAA

SEQ ID NO: 19070 - protein, 76 aa, Homo sapiens
MIVLGWMFFVGLVCYMGTFPELMPPTLKWQERWPVQESKTQLRRRALGTMWKGYKYPPGGTPVEVSKDDPGEVMQL

SEQ ID NO: 19071 - protein, 244 aa, Homo sapiens
MKRLAARCFAGLLILSPLTVISDSRPADSGKAIEDGNLEEMEEEVRLKKRKRRRNVDKDPAKEDVEKAKKRRGRPPAEKLSPNPPKLTKQMNAIIDTVINYKDRCNVEKVPSNSQLEIEGNSSGRQLSEVFIQLPSRKELPEYYELIRKPVDFKKIKERIRNHKYRSLGDLEKDVMLLCHNAQTFNLEGSQIYEDSIVLQSVFKSARQKIAKEEESEDESNEEEEEEDEEESESEAKSVKVKIK

SEQ ID NO: 19072 - protein, 285 aa, Homo sapiens
MRKSPGLSDCLWAWILLLSTLTGRSYGQPSLQDELKDNTTVFTRILDRLLDGYDNRLRPGLGERVTEVKTDIFVTSFGPVSDHDMEYTIDVFFRQSWKDERLKFKGPMTVLRLNNLMASKIWTPDTFFHNGKKSVAHNMTMPNKLLRITEDGTLLYTMRLTVRAECPMHLEDFPMDAHACPLKFGSYAYTRAEVVYEWTREPARSVVVAEDGSRLNQYDLLGQTVDSGIVQSSTGEYVVMTTHFHLKRKIGYFVIQTYLPCIMTVILSQVSFWLNRESVPARTVF

SEQ ID NO: 19073 - protein, 815 aa, Homo sapiens
MERGKMAEAESLETAAEHERILREIESTDTACIGPTLRSVYDGEEHGRFMEKLETRIRNHDREIEKMCNFHYQGFVDSITELLKVRGEAQKLKNQVTDTNRKLQHEGKELVIAMEELKQCRLQQRNISATVDKLMLCLPVLEMYSKLRDQMKTKRHYPALKTLEHLEHTYLPQVSHYRFCKVMVDNIPKLREEIKDVSMSDLKDFLESIRKHSDKIGETAMKQAQQQRNLDNIVLQQPRIGSKRKSKKDAYIIFDTEIESTSPKSEQDSGILDVEDEEDDEEVPGAQDLVDFSPVYRCLHIYSVLGARETFENYYRKQRRKQARLVLQPPSNMHETLDGYRKYFNQIVGFFVVEDHILHTTQGLVNRAYIDELWEMALSKTIAALRTHSSYCSDPNLVLDLKNLIVLFADTLQVYGFPVNQLFDMLLEIRDQYSETLLKKWAGIFRNILDSDNYSPIPVTSEEMYKKVVGQFPFQDIELEKQPFPKKFPFSEFVPKVYNQIKEFIYACLKFSEDLHLSSTEVDDMIRKSTNLLLTRTLSNSLQNVIKRKNIGLTELVQIIINTTHLEKSCKYLEEFITNITNVLPETVHTTKLYGTTTFKDARHAAEEEIYTNLNQKIDQFLQLADYDWMTGDLGNKASDYLVDLIAFLRSTFAVFTHLPGKVAQTACMSACKHLATSLMQLLLEAEVRQLTLGALQQFNLDVRECEQFARSGPVPGFQEDTLQLAFIDLRQLLDLFIQWDWSTYLADYGQPNCKYLRVNPVTALTLLEKISREMKDTSRKNNMFAQFRKNERDKQKLIDTVAKQLRGLISSHHS

SEQ ID NO: 19074 - protein, 68 aa, Homo sapiens
MGDQPCASGRSTLPPGNAREAKPPKKRCLLAPRWDYPEGTPNGGSTTLPSAPPPASAGLKSHPPPPEK

SEQ ID NO: 19075 - protein, 2098 aa, Homo sapiens
MAERRAFAQKISRTVAAEVRKQISGQYSGSPQLLKNLNIVGNISHHTTVPLTEAVDPVDLEDYLITHPLAVDSGPLRDLIEFPPDDIEVVYSPRDCRTLVSAVPEESEMDPHVRDCIRSYTEDWAIVIRKYHKLGTGFNPNTLDKQKERQKGLPKQVFESDEAPDGNSYQDDQDDLKRRSMSIDDTPRGSWACSIFDLKNSLPDALLPNLLDRTPNEEIDRQNDDQRKSNRHKELFALHPSPDEEEPIERLSVPDIPKEHFGQRLLVKCLSLKFEIEIEPIFASLALYDVKEKKKISENFYFDLNSEQMKGLLRPHVPPAAITTLARSAIFSITYPSQDVFLVIKLEKVLQQGDIGECAEPYMIFKEADATKNKEKLEKLKSQADQFCQRLGKYRMPFAWTAIHLMNIVSSAGSLERDSTEVEISTGERKGSWSERRNSSIVGRRSLERTTSGDDACNLTSFRPATLTVTNFFKQEGDRLSDEDLYKFLADMRRPSSVLRRLRPITAQLKIDISPAPENPHYCLTPELLQVKLYPDSRVRPTREILEFPARDVYVPNTTYRNLLYIYPQSLNFANRQGSARNITVKVQFMYGEDPSNAMPVIFGKSSCSEFSKEAYTAVVYHNRSPDFHEEIKVKLPATLTDHHHLLFTFYHVSCQQKQNTPLETPVGYTWIPMLQNGRLKTGQFCLPVSLEKPPQAYSVLSPEVPLPGMKWVDNHKGVFNVEVVAVSSIHTQDPYLDKFFALVNALDEHLFPVRIGDMRIMENNLENELKSSISALNSSQLEPVVRFLHLLLDKLILLVIRPPVIAGQIVNLGQASFEAMASIINRLHKNLEGNHDQHGRNSLLASYIHYVFRLPNTYPNSSSPGPGGLGGSVHYATMARSAVRPASLNLNRSRSLSNSNPDISGTPTSPDDEVRSIIGSKAMDRSCNRMSSHTETSSFLQTLTGRLPTKKLFHEELALQWVVCSGSVRESALQQAWFFFELMVKSMVHHLYFNDKLEAPRKSRFPERFMDDIAALVSTIASDIVSRFQKDTEMVERLNTSLAFFLNDLLSVMDRGFVFSLIKSCYKQVSSKLYSLPNPSVLVSLRLDFLRIICSHEHYVTLNLPCSLLTPPASPSPSVSSATSQSSGFSTNVQDQKIANMFELSVPFRQQHYLAGLVLTELAVILDPDAEGLFGLHKKVINMVHNLLSSHDSDPRYSDPQIKARVAMLYLPLIGIIMETVPQLYDFTETHNQRGRPICIATDDYESESGSMISQTVAMAIAGTSVPQLTRPGSFLLTSTSGRQHTTFSAESSRSLLICLLWVLKNADETVLQKWFTDLSVLQLNRLLDLLYLCVSCFEYKGKKVFERMNSLTFKKSKDMRAKLEEAILGSIGARQEMVRRSRGQLERSPSGSAFGSQENLRWRKDMTHWRQNTEKLDKSRAEIEHEALIDGNLATEANLIILDTLEIVVQTVSVTESKESILGGVLKVLLHSMACNQSAVYLQHCFATQRALVSKFPELLFEEETEQCADLCLRLLRHCSSSIGTIRSHASASLYLLMRQNFEIGNNFARVKMQVTMSLSSLVGTSQNFNEEFLRRSLKTILTYAEEDLELRETTFPDQVQDLVFNLHMILSDTVKMKEHQEDPEMLIDLMYRIAKGYQTSPDLRLTWLQNMAGKHSERSNHAEAAQCLVHSAALVAEYLSMLEDRKYLPVGCVTFQNISSNVLEESAVSDDVVSPDEEGICSGKYFTESGLVGLLEQAAASFSMAGMYEAVNEVYKVLIPIHEANRDAKKLSTIHGKLQEAFSKIVHQDGKRMFGTYFRVGFYGTKFGDLDEQEFVYKEPAITKLAEISHRLEGFYGERFGEDVVEVIKDSNPVDKCKLDPNKAYIQITYVEPYFDTYEMKDRITYFDKNYNLRRFMYCTPFTLDGRAHGELHEQFKRKTILTTSHAFPYIKTRVNVTHKEEIILTPIEVAIEDMQKKTQELAFATHQDPADPKMLQMVLQGSVGTTVNQGPLEVAQVFLSEIPSDPKLFRHHNKLRLCFKDFTKRCEDALRKNKSLIGPDQKEYQRELERNYHRLKEALQPLINRKIPQLYKAVLPVTCHRDSFSRMSLRKMDL

SEQ ID NO: 19076 - protein, 132 aa, Homo sapiens
MRPSVWAAVAAGLWVLCTVIAEGPPALPALALPLAGAPDAGGCQGAEGPLRGRGAELGAAQLLLPPQEGSSAAIAUAGTARLLQEGPRGPEEASQTPESGLASVPQSQRGLQPPAPAHVGAPAGCTLWALPL

SEQ ID NO: 19077 - protein, 46 aa, Homo sapiens
MLKALFLTMLTLALVKSQDTEETITYTQCTDGYEWDPVRQQCKEDS

SEQ ID NO: 19078 - protein, 1165 aa, Homo sapiens
MANDSPAKSLVDIDLSSLRDPAGIFELVEVVGNGTYGQVYKGRHVKTGQLAAIKVMDVTEDEEEEIKLEINMLKKYSHHRNIATYYGAFIKKSPPGHDDQLWLVMEFCGAGSITDLVKNTKGNTLKEDWIAYISREILRGLAHLHIHHVIHRDIKGQNVLLTENAEVKLVDFGVSAQLDRTVGRRNTFIGTPYWMAPEVIACDENPDATYDYRSDLWSCGITAIEMAEGAPPLCDMHPMRALFLIPRNPPPRLKSKKWSKKFFSFIEGCLVKNYMQRPSTEQLLKHPFIRDQPNERQVRIQLKDHIDRTRKKRGEKDETEYEYSGSEEEEEEVPEQEGEPSSIVNVPGESTLRRDFLRLQQENKERSEALRRQQLLQEQQLREQEEYKRQLLAERQKRIEQQKEQRRRLEEQQRREREARRQQEREQRRREQEEKRRLEELERRRKEEEERRRAEEEKRRVEREQEYIRRQLEEEQRHLEVLQQQLLQEQAMLLHDHRRPHPQHSQQPPPPQQERSKPSFHAPEPKAHYEPADRAREVPVRTTSRSPVLSRRDSPLQGSGQQNSQAGQRNSTSIEPRLLWERVEKLVPRPGSGSSSGSSNSGSQPGSHPGSQSGSGERFRVRSSSKSEGSPSQRLENAVKKPEDKKEVFRPLKPAGEVDLTALAKELRAVEDVRPPHKVTDYSSSSEESGTTDEEDDDVEQEGADESTSGPEDTRAASSLNLSNGETESVKTMIVHDDVESEPAMTPSKEGTLIVRQTQSASSTLQKHKSSSSFTPFIDPRLLQISPSSGTTVTSVVGFSCDGMRPEAIRQDPTRKGSVVNVNPTNTRPQSDTPEIRKYKKRFNSEILCAALWGVNLLVGTESGLMLLDRSGQGKVYPLINRRRFQQMDVLEGLNVLVTISGKKDKLRVYYLSWLRNKILHNDPEVEKKQGWTTVGDLEGCVHYKVVKYERIKFLVIALKSSVEVYAWAPKPYHKFMAFKSFGELVHKPLLVDLTVEEGQRLKVIYGSCAGFHAVDVDSGSVYDIYLPTHVRKNPHSMIQCSIKPHAIIILPNTDGMELLVCYEDEGVYVNTYGRITKDVVLQWGEMPTSVAYIRSNQTMGWGEKAIEIRSVETGHLDGVFMHKRAQRLKFLCERNDKVFFASVRSGGSSQVYFMTLGRTSLLSW

SEQ ID NO: 19079 - protein, 597 aa, Homo sapiens
MTSRRWFHPNITGVEAENLLLTRGVDGSFLARPSKSNPGDFTLSVRRNGAVTHIKIQNTGDYYDLYGGEKFATLAELVQYYMEHHGQLKEKNGDVIELKYPLNCADPTSERWFHGHLSGKEAEKLLTEKGKHGSFLVRESQSHPGDFVLSVRTGDDKGESNDGKSKVTHVMIRCQELKYDVGGGERFDSLTDLVEHYKKNPMVETLGTVLQLKQPLNTTRINAAEIESRVRELSKLAETTDKVKQGFWEEFETLQQQECKLLYSRKEGQRQENKNKNRYKNILPFDHTRVVLHDGDPNEPVSDYINANIIMPEFETKCNNSKPKKSYIATQGCLQNTVNDFWRMVFQENSRVIVMTTKEVERGKSKCVKYWPDEYALKEYGVMRVRNVKESAAHDYTLRELKLSKVGQALLQGNTERTVWQYHFRTWPDHGVPSDPGGVLDFLEEVHHKQESIMDAGPVVVHCSAGIGRTGTFIVIDILIDIIREKGVDCDIDVPKTIQMVRSQRSGMVQTEAQYRFIYMAVQHYIETLQRRIEEEQKSKRKGHEYTNIKYSLADQTSGDQSPLPPCTPTPPCAEMREDSARVYENVGLMQQQKSFR

SEQ ID NO: 19080 - protein, 802 aa, Homo sapiens
MSEQSICQARAAVMVYDDANKKWVPAGGSTGFSRVHIYHHTGNNTFRVVGRKIQDHQVVINCAIPKGLKYNQATQTFHQWRDARQVYGLNFGSKEDANVFASAMMHALEVLNSQETVFYLGPTLPRQNSQLPAQVQNGPSQEELEIQRRQLQEQQRQKELERERLERERMERERLERERLERERLERERLEQEQLERERQERERQERLERQERLERQERLERQERLDRERQERQERERLERLERERQERERQEQLEREQLEWERERRISSAAPSSDSSLYNAPLPEYSSCQPPSAPPPSYAKVISAPVSDATPDYAVVTALPPTSTPPTPPLRHSATRFATSLGSAFHPVLPHYATVPRPLNKNSRPSSPVNTPSSQPPATKPCAWSTSNFSPLPPSPPIMISSPPGKATGPRPVLPVCVSSPVPQMPPSPTAPNGLVDSVTYPVSPPPTSGPAAPPPPPPLPSLASLSHCGSQASPPPSTPIASTPSSKPSVLPSPSAAAPASVETPLNSVLGDSSASEPGLQAASQPAETPSQQGIVLGPLAPPPPPPLPPGPAQASVALPPPPGPPPPPPLPSTGPPPPPPPPPLPNQVPPPPPPPPAPPLPASGFFLASMSEDNRPLTGLAAAIAGAKLRKVSRMEDTSFPSGGNAIGVNSASSKTDTGRGNGPLPLGGSGLMEEMSALLARRRRIAEKGSTIETEQKEDKGEDSEPVTSKASSTSTPEPTRKPWERTNTMNGSKSPVISRPKSTPLSQPSANGVQTEGLDYDRLKQDILDEMRKELTKLKEELIDAIRQELSKSNTA

SEQ ID NO: 19081 - protein, 81 aa, Homo sapiens
MPGRSCVALVLLAAAVSCAVAQHAPPVSELEPRRREGRAGAGADGGAGVAARAVDRGLQKINLSSFRTNVQRCSSMVHHKS

SEQ ID NO: 19082 - protein, 457 aa, Homo sapiens
MKRTPTAEEREREAKKLRLLEELEDTWLPYLTPKDDEFYQQWQLKYPKLILREASSVSEELHKEVQEAFLTLHKHGCLFRDLVRIQGKDLLTPVSRILIGNPGCTYKYLNTRLFTVPWPVKGSNIKHTEAEIAAACETFLKLNDYLQIETIQALEELAAKEKANEDAVPLCMSADFPRVGMGSSYNGQDEVDIKSRAAYNVTLLNFMDPQKMPYLKEEPYFGMGKMAVSWHHDENLVDRSAVAVYSYSCEGPEEESEDDSHLEGRDPDIWHVGFKISWDIETPGLAIPLHQGDCYFMLDDLNATHQHCVLAGSQPRFSSTHRVAECSTGTLDYILQRCQLALQNVCDDVDNDDVSLKSFEPAVLKQGEEIHNEVEFEWLRQFWFQGNRYRKCTDWWCQPMAQLEALWKKMEGVTNAVLHEVKREGLPVEQRNEILTAILASLTARQNLRREWHARVE

SEQ ID NO: 19083 - protein, 90 aa, Homo sapiens
MAYKMLQVVLCSTLLIGALGAPFLLEDPANQFLRLKRHVNLQDYWDPDHSSDVWVNTLAKQARETWIALKTTAQYYLDMNTFTFDMSTAQ

SEQ ID NO: 19084 - protein, 42 aa, Homo sapiens
MPGRSCVALVLLAAAVSCAVAQHAPPWTEDCRKSTYPPSGPT

SEQ ID NO: 19085 - protein, 492 aa, Homo sapiens
MASVAWAVLKVLLLLPTQTWSPVGAGNPPDCDAPLASALPRSSFSSSSELSSSHGPGFSRLNRRDGAGGWTPLVSNKYQWLQIDLGERMEVTAVATQGGYGSSDWVTSYLLMFSDGGRNWKQYRREESIWGFPGNTNADSVVHYRLQPPFEARFLRFLPLAWNPRGRIGMRIEVYGCAYKSEVVYFDGQSALLYRLDKKPLKPIRDVISLKFKAMQSNGILLHREGQHGNHITLELIKGKLVFFLNSGNAKLPSTIAPVTLTLGSLLDDQHWHSVLIELLDTQVNFTVDKHTHHFQAKGDSSYLDLNFEISFGGIPTPGRSRAFRRKSFHGCLENLYYNGVDVTELAKKHKPQILMMGNVSFSCPQPQTVPVTFLSSRSYLALPGNSGEDKVSVTFQFRTWNRAGHLLFGELRRGSGSFVLFLKDGKLKLSLFQPGQSPRNVTAGAGLNDGQWHSVSFSAKWSHMNVVVDDDTAVQPLVAVLIDSGDTYYFG

SEQ ID NO: 19086 - protein, 518 aa, Homo sapiens
MARRCGPVALLLGFGLLRLCSGVWGTDTEERLVEHLLDPSRYNKLIRPATNGSELVTVQLMVSLAQLISVHEREQIMTTNVWLTQEWEDYRLTWKPEEFDNMKKVRLPSKHIWLPDVVLYNNADGMYEVSFYSNAVVSYDGSIFWLPPAIYKSACKIEVKHFPFDQQNCTMKFRSWTYDRTEIDLVLKSEVASLDDFTPSGEWDIVALPGRRNENPDDSTYVDITYDFIIRRKPLFYTINLIIPCVLITSLAILVFYLPSDCGEKMTLCISVLLALTVFLLLISKIVPPTSLDVPLVGKYLMFTMVLVTFSIVTSVCVLNVHHRSPTTHTMAPWVKVVFLEKLPALLFMQQPRHHCARQRLRLRRRQREREGAGALFFREAPGADSCTCFVNRASVQGLAGAFGAEPAPVAGPGRSGEPCGCGLREAVDGVRFIADHMRSEDDDQSVSEDWKYVAMVIDRLFLWIFVFVCVFGTIGMFLQPLFQNYTTTTFLHSDHSAPSSKLKVWGARLSIRGASEF

SEQ ID NO: 19087 - protein, 197 aa, Homo sapiens
MAQEVDTAQGAEMRRGAGAARGRASWCWALALLWLAVVPGWSRVSGIPSRRHWPVPYKRFDFRPKPDPYCQAKYTFCPTGSPIPVMEGDDDIEVFRLQAPVWEFKYGDLLGHLKIMHDAIGFRSTLTGKNYTMEWYELFQLGNCTFPHLRPEMDAPFWCNQGAACFFEGIDDVHWKENGTLVQVATISDGETEAQRG

SEQ ID NO: 19088 - protein, 339 aa, Homo sapiens
MTARAFWLLCLIVGSSPEAPVAERKTSPPHSRKPDSRGCPSAEETPGPRAQPLLEAPQRPRAAEVAPAARAWPDPRRRKPPPPADNQASFREAARAPAGPPGPRLAQAENRASPRREPASEDAPRRARSRALRFPAARPPALATEGSAGHAHPNRPRAAALAPGPAPAPPPRFSLSFGLSPPQRDAEPGAEPCARACRSDLDEREAFCESEFAVNGIVHDVDVLGAGIRLVTLLVDRDGLYKMNRLYLTPDGFFFRVHMLALDSSSCNKPCPEFKPGSRYIVMGHIYHKRRQLPTALLQVLRGRLRPGDGLLRSSSSYVKRFNRKREGQIQGAIHTQCI

SEQ ID NO: 19089 - protein, 204 aa, Homo sapiens
MDSDSGEQSEGEPVTAAGPDVFSSKSLALQAQKKILSKIASKTVANMLIDDTSSEIFDELYKVTKEHTHNKKEAHKIMKDLIKVAIKIGILYRNNQFSQEELVIVEKFRKKLNQTAMTIVSFYEVEYTFDRNVLSNLLHECKDLVHELVQRHLTPRTHGRINHVFNHFADVEFLSTLYSLDGDCRPNLKRICEGINKLLDEKVL

SEQ ID NO: 19090 - protein, 189 aa, Homo sapiens
MVPPKPALWALLLALLGTAPSRAYSPACSVPDVLRHYRAIIFEDLQAAVKWGGAGAEKTRPGSRHFHFIQKNLTRPGSSGRRGRPRASCGAQKEHSILLSISSLGRTLRGAVAGGRRGALERAAWTVAVRTEAVMRRHCRTLRQRSRRPKMRPARRRGGRRQLLLRALDAVATCWEKLFALRAPASRDS

SEQ ID NO: 19091 - protein, 1324 aa, Homo sapiens
MALVRGAEPAAGPSRWLPTHVQVTVLRARGLRGKSSGAGSTSDAYTVIQVGREKYSTSVVEKTHGCPEWREECSFELPPGALDGLLRAQEADAGPAPWAASSAAACELVLTTMHRSLIGVDKFLGQATVALDEVFGAGRAQHTQWYKLHSKPGKKEKERGEIEVTIQFTRNNLSASMFDLSMKDKPRSPFSKIRDKMKGKKKYDLESASAILPSSAIEDPDLGSLGKMGKAKGFFLRNKLRKSSLTQSNTSLGSDSTLSSASGSLAYQGPGAELLTRSPSRSSWLSTEGGRDSAQSPKLFTHKRTYSDEANQMRVAPPRALLDLQGHLDAASRSSLCVNGSHIYNEEPQGPVRHRSSISGSLPSSGSLQAVSSRFSEEGPRSTDDTWPRGSRSNSSSEAVLGQEELSAQAKVLAPGASHPGEEEGARLPEGKPVQVATPIVASSEAVAEKEGARKEERKPRMGLFHHHHQGLSRSELGRRSSLGEKGGPILGASPHHSSSGEEKAKSSWFGLREAKDPTQKPSLDVSPQVESDPAALPHHLPCSPWAPAPPTPAPTAAPMLSTNLFAAASPAAATAAAAATTAAPEATPPGLLGLTNPFLTSLQSNPFFEELIADIALNSPSPAPSLPSASRASPTPLASPGKALPEWDNTFNVFAASRLRPEARSEILAPAGVGLEAAGLQDPGPGAMTAKAAEPQGEPGGGGGGGGGGGGRGGSSVWLEPRVPLDLGPNHQSASAADPGLLGSVGAGLPSSSAQLQLRASGSEPDRELPAPEVEAGQSPADSGTSLFSSPEVISVWERLPGPESAAEGQDDESSRGENQLCPDVETADDAWPWDVVTISPAAETASLVFRGESDEPAPQVQPESPETVSPKGSEGLPPPEPEPKPEWVSDKGLQPSTPPPKPPRLFTPSRSQEEEEEKAAVGLSNRGPETEGEDASPSALVVGPPETKEEGEKRESEESDSCSSATLLGQPGLEELVEDASPPVSGPCLSAPASCPEGPAPIPCHSKSLALQSQHIWGTPEVGEGPEAPEAQGQDPVGEGLGSLSATSQQADVWVSKEDALNPFLFQGSRDPPSLSSASPPGSRESSIHSGPEELPTPPEPDFPPPPLPPWASHHRGGPSPPCSPLSEAWPLTTSSAPPGEPALLPGPHEPSPPGGSPALLREDLAAATPASPLVLLPLETRPAEEPQPSASPHPVKPLSAAPVEGSPDRKQSRSSLSIALSSGLEKLKTVTSGSIQPVTQAPQAGQMVDTKRLKDSAVLDQSAKYYHLTHDELISLLLQRERELSQRDEHVQELESYIDRLLVRIMETSPTLLQIPPGPPK

SEQ ID NO: 19092 - protein, 376 aa, Homo sapiens
MPGRSCVALVLLAAAVSCAVAQHAPPWTEDCRKSTYPPSGPTYRGAVPWYTINLDLPPYKRWHELMLDKAPVLKVIVNSLKNMINTFVPSGKIMQVVDEKLPGLLGNFPGPFEEEMKGIAAVTDIPLVAEDKKGHLIHGRNMDFGVFLGWNINNDTWVITEQLKPLTVNLDFQRNNKTVFKASSFAGYVGMLTGFKPGLFSLTLNERFSINGGYLGILEWILGKKDVMWIGFLTRTVLENSTSYEEAKNLLTKTKILAPAYFILGGNQSGEGCVITRDRKESLDVYELDAKQGRWYVVQTNYDRWKHPFFLDDRRTPAKMCLNRTSQENISFETMYDVLSTKPVLNKLTVYTTLIDVTKGQFETYLRDCPDPCIGW

SEQ ID NO: 19093 - protein, 151 aa, Homo sapiens
MESERSKRMGNACIPLKRIAYFLCLLSALLLTEGKKPAKPKCPAVCTCTKDNALCENARSIPRTVPPDVISLSFVRSGFTEISEGSFLFTPSLQLLLFTSNSFDVISDDAFIGLPHLEYLFIENNNIKSISRHTFRGLKSLIHLRDGVGRI

SEQ ID NO: 19094 - protein, 288 aa, Homo sapiens
MPGRSCVALVLLAAAVSCAVAQHAPPWTEDCRKSTYPPSGPTYRGAVPWYTINLDLPPYKRWHELMLDKAPVLKVIVNSLKNMINTFVPSGKIMQVVDEKLPGLLGNFPGPFEEEMKGIAAVTDIPLGILEWILGKKDVMWIGFLTRTVLENSTSYEEAKNLLTKTKILAPAYFILGGNQSGEGCVITRDRKESLDVYELDAKQGRWYVVQTNYDRWKHPFFLDDRRTPAKMCLNRTSQENISFETMYDVLSTKPVLNKLTVYTTLIDVTKGQFETYLRDCPDPCIGW

SEQ ID NO: 19095 - protein, 56 aa, Homo sapiens
MPGRSCVALVLLAAAVSCAVAQHAPPWTEDCRKSTYPPSGPTLAYLATFLALLKRK

SEQ ID NO: 19096 - protein, 318 aa, Homo sapiens
MAVFVVLLALVAGVLGNEFSILKSPGSVVFRNGNWPIPGERIPDVAALSMGFSVKEDLSWPGLAVGNLFHRPRATVMVMVKGVNKLALPPGSVISYPLENRVYMVGKANSVFEDLSVTLRQLRNRLFQENSVLSSLPLNSLSRNNEVDLLFLSELQVLHDISSLLSRHKHLAKDHSPDLYSLELAGLDEIGKRYGEDSEQFRDASKILVDALQKFADDMYSLYGGNAVVELVTVKSFDTSLIRKTRTILEAKQAKNPASPYNLAYKYNFEYSVVFNMVLWIMIALALAVIITSYNIWNMDPGYDSIIYRMTNQKIRMD

SEQ ID NO: 19097 - protein, 301 aa, Homo sapiens
MGFSVKEDLSWPGLAVGNLFHRPRATVMVMVKGVNKLALPPGSVISYPLENAVPFSLDSVANSIHSLFSEETPVVLQLAPSEERVYMVGKANSVFEDLSVTLRQLRNRLFQENSVLSSLPLNSLSRNNEVDLLFLSELQVLHDISSLLSRHKHLAKDHSPDLYSLELAGLDEIGKRYGEDSEQFRDASKILVDALQKFADDMYSLYGGNAVVELVTVKSFDTSLIRKTRTILEAKQAKNPASPYNLAYKYNFEYSVVFNMVLWIMIALALAVIITSYNIWNMDPGYDSIIYRMTNQKIRMD

SEQ ID NO: 19098 - protein, 1595 aa, Homo sapiens
MTTETGPDSEVKKAQEEAPQQPEAAAAVTTPVTPAGHGHPEANSNEKHPSQQDTRPAEQSLDMEEKDYSEADGLSERTTPSKAQKSPQKIAKKYKSAICRVTLLDASEYECEVEKHGRGQVLFDLVCEHLNLLEKDYFGLTFCDADSQKNWLDPSKEIKKQIRSSPWNFAFTVKFYPPDPAQLTEDITRYYLCLQLRADIITGRLPCSFVTHALLGSYAVQAELGDYDAEEHVGNYVSELRFAPNQTRELEERIMELHKTYRGMTPGEAEIHFLENAKKLSMYGVDLHHAKDSEGIDIMLGVCANGLLIYRDRLRINRFAWPKILKISYKRSNFYIKIRPGEYEQFESTIGFKLPNHRSAKRLWKVCIEHHTFFRLVSPEPPPKGFLVMGSKFRYSGRTQAQTRQASALIDRPAPFFERSSSKRYTMSRSLDGAEFSRPASVSENHDAGPDGDKRDEDGESGGQRSEAEEGEVRTPTKIKELKPEQETTPRHKQEFLDKPEDVLLKHQASINELKRTLKEPNSKLIHRDRDWERERRLPSSPASPSPKGTPEKANESQRTQDISQRDLVPEPGAAAGLEVFTQKSLAASPEGSEHWVFIEREYTRPEELGLLKVTTMQQEERQAGLAGILANGRLSKVDVLVDKFKVEVATEEMVGNRRANTQQQGKMIASPEDFESVGEEGPWIRESPGGAALASGRTLAEKLLEGSELRADTREATIRNRCMSDGQPEGQTELRKGLEEPHTCGRPTAPGTRPAEVDVLSPASDKGGLQSFLLDPAHAEARAELSNETDTSFAERSFYLNYEEKDSEDQVLPPPLEERKGRLDAPPGGEPRPTLNSLDLRVSAAASSRSKDEAHMTSPKEGAGTPKNHGGPGDLKGSPAGQTFAEGWEDAQWGVEGEFPHLTASAAREEGTPVSGDLLGKAEESPTEELKKHPPHRGQGVHPDPQACALPRAIPLNVRKPVKPDRGNFPPKERGVVPTQKGGAELKDREASAFLHMEVIIPLPASPGHSEDLAALEEASPSPTSHGSGEPSELREPFLRHVHLSKASPEPKDQVGFVVSPATGGERRPPPITSRKPRVVPEEAEGRIPLGFGFPSGKRREMTSFQAGDQEGSLEDISKTSVANKIRIFETHGAETRRMSEGEARSLPNDVSSEAPVGQAEQQRSTLSDLGFAQLQPPGDFASPKATHSTVIPLATRHFREDTSASYQEAHTELEPVSPNSGCETTLAEATGTGNKSGDAVREEKRSTNLAANTPGKGGRLRFASPSGPQRAGLREGSEEKVKPPRPRAPESDTGDEDQDQERDTVFLKDNHLAIERKCSSITVSSTSSLEAEVDFTVIGDYHGSAFEDFSRSLPELDRDKSDSDTEGLLFSRDLNKGAPSQDDESGGIEDSPDRGACSTPDMPQFEPVKTETMTVSSLAIRKKIEPEAVLQTRVSAMDNTQVDGSASVGREFIATTPSITTETISTTMENSLKSGKGAAAMIPGPQTVATEIRSLSPIIGKDVLTSTYGATAETLSTSTTTHVTKTVKGGFSETRIEKRIIITGDEDVDQDQALALAIKEAKLQHPDMLVTKAVVYRETDPSPEERDKKPQES

SEQ ID NO: 19099 - protein, 788 aa, Homo sapiens
MLLLLLLLLLLPPLVLRVAASRCLHDETQKSVSLLRPPFSQLPSKSRSSSLTLPSSRDPQPLRIQSCYLGDHISDGAWDPEGEGMRGGSRALAAVREATQRIQAVLAVQGPLLLSRDPAQYCHAVWGDPDSPNYHRCSLLNPGYKGESCLGAKIPDTHLRGYALWPEQGPPQLVQPDGPGVQNTDFLLYVRVAHTSKCHQETVSLCCPGWSTAAQSQLTAALTSWAQRRGFVMLPRLCLKLLGSSNLPTLASQSIRITGPSVIAYAACCQLDSEDRPLAGTIVYCAQHLTSPSLSHSDIVMATLHELLHALGFSGQLFKKWRDCPSGFSVRENCSTRQLVTRQDEWGQLLLTTPAVSLSLAKHLGVSGASLGVPLEEEEGLLSSHWEARLLQGSLMTATFDGAQRTRLDPITLAAFKDSGWYQVNHSAAEELLWGQGSGPEFGLVTTCGTGSSDFFCTGSGLGCHYLHLDKGSCSSDPMLEGCRMYKPLANGSECWKKENGFPAGVDNPHGEIYHPQSRCFFANLTSQLLPGDKPRHPSLTPHLKEAELMGRCYLHQCTGRGAYKVQVEGSPWVPCLPGKVIQIPGYYGLLFCPRGRLCQTNEDINAVTSPPVSLSTPDPLFQLSLELAGPPGHSLGKEQQEGLAEAVLEALASKGGTGRCYFHGPSITTSLVFTVHMWKSPGCQGPSVATLHKALTLTLQKKPLEVYHGGANFTTQPSKLLVTSDHNPSMTHLRLSMGLCLMLLILVGVMGTTAYQKRATLPVRPSASYHSPELHSTRVPVRGIREV

SEQ ID NO: 19100 - protein, 90 aa, Homo sapiens
RAMALFFVLCWIQGYSQQKSLNNAAFASGSNEREEHLAKIFDHLSEEKNFKESCLFDRDLREQLTTIDKETLQGAAKPDLLWQTRHIIFL

SEQ ID NO: 19101 - protein, 112 aa, Homo sapiens
KEYLTLKTFIAKVIGLTCALGSGMPLGKEASSSASRSPPPSLQCGTTGGASSLPPSVPSSSGSWQSGTGMKRLLQPSSKPDSGSTSPLTCRSCQPLLSLVLLVASVEPSLST

SEQ ID NO: 19102 - protein, 1094 aa, Homo sapiens
MDPPAGAARRLLCPALLLLLLLLPPPLLPPPPPPANARLAAAADPPGGPLGHGAERILAVPVRTDAQGRLVSHVVSAATSRAGVRARRAAPVRTPSFPGGNEEEPGSHLFYNVTVFGRDLHLRLRPNARLVAPGATMEWQGEKGTTRVEPLLGSCLYVGDVAGLAEASSVALSNCDGLAGLIRMEEEEFFIEPLEKGLAAQEAEQGRVHVVYRRPPTSPPLGGPQALDTGASLDSLDSLSRALGVLEEHANSSRRRARRHAADDDYNIEVLLGVDDSVVQFHGKEHVQKYLLTLMNIVNEIYHDESLGAHINVVLVRIILLSYGKSMSLIEIGNPSQSLENVCRWAYLQQKPDTGHDEYHDHAIFLTRQDFGPSGMQGYAPVTGMCHPVRSCTLNHEDGFSSAFVVAHETGHVLGMEHDGQGNRCGDEVRLGSIMAPLVQAAFHRFHWSRCSQQELSRYLHSYDCLLDDPFAHDWPALPQLPGLHYSMNEQCRFDFGLGYMMCTAFRTFDPCKQLWCSHPDNPYFCKTKKGPPLDGTMCAPGKHCFKGHCIWLTPDILKRDGSWGAWSPFGSCSRTCGTGVKFRTRQCDNPHPANGGRTCSGLAYDFQLCSRQDCPDSLADFREEQCRQWDLYFEHGDAQHHWLPHEHRDAKERCHLYCESRETGEVVSMKRMVHDGTRCSYKDAFSLCVRGDCRKVGCDGVIGSSKQEDKCGVCGGDNSHCKVVKGTFTRSPKKHGYIKMFEIPAGARHLLIQEVDATSHHLAVKNLETGKFILNEENDVDASSKTFIAMGVEWEYRDEDGRETLQTMGPLHGTITVLVIPVGDTRVSLTYKYMIHEDSLNVDDNNVLEEDSVVYEWALKKWSPCSKPCGGGSQFTKYGCRRRLDHKMVHRGFCAALSKPKAIRRACNPQECSQPVWVTGEWEPCSQTCGRTGMQVRSVRCIQPLHDNTTRSVHAKHCNDARPESRRACSRELCPGRWRAGPWSQCSVTCGNGTQERPVLCRTADDSFGICQEERPETARTCRLGPCPRNISDPSKKSYVVQWLSRPDPDSPIRKISSSNRPVYNSASALQCMPCALWSLPWAPLLSVYGKLP

SEQ ID NO: 19103 - protein, 582 aa, Homo sapiens
MQPSSLLPLALCLLAAPASALVRIPLHKFTSIRRTMSEVGGSVEDLIAKGPVSKYSQAVPAVTEGPIPEVLKNYMDAQYYGEIGIGTPPQCFTVVFDTGSSNLWVPSIHCKLLDIACWIHHKYNSDKSSTYVKNGTSFDIHYGSGSLSGYLSQDTVSVPCQSASSASALGGVKVERQVFGEATKQPGITFIAAKFDGILGMAYPRISVNNVLPVFDNLMQQKLVDQNIFSFYLSRDPDAQPGGELMLGGTDSKYYKGSLSYLNVTRKAYWQVHLDQVEVASGLTLCKEGCEAIVDTGTSLMVGPVDEVRELQKAIGAVPLIQGEYMIPCEKVSTLPAITLKLGGKGYKLSPEDYTLKAQGPGQCPAPLGDPASTTDGAQEARVPLDGAFWIPRPPAGSPKGCFACVSKPPALQAPAAPAPEPSASPPMAPTLFPMESKSSKTDSVRAAGAPPACKHLAEKKTMTNPTTVIEVYPDTTEVNDYYLWSIFNFVYLNFCCLGFIALAYSLKPRLEWPRPDVLHQCSCPAGWGRRQGMQGEKRLGRGWLGGRTPGQLRLCSILELEPHPARHRNCGRRSPPAPDSS

SEQ ID NO: 19104 - protein, 180 aa, Homo sapiens
MRCSPGGVWLALAASLLHVSLQGEFQRKLYKELVKNYNPLERPVANDSQPLTVYFSLSLLQIMDVDEKNQVLTTNIWLQMSWTDHYLQWNVSEYPGVKTVRFPDGQIWKPDILLYNSYDQQQEVLAYGMHCWSPQFGPTSSSMFPVVHWRVLWQRWLQAYSRVPATSMYAGFPLMCSTAN

SEQ ID NO: 19105 - protein, 191 aa, Homo sapiens
MNCCIGLGEKARGSHRASYPSLSALFTEASILGFGSFAVKAQWTEDCRKSTYPPSGPTYRGAVPWYTINLDLPPYKRWHELMLDKAPVLKVIVNSLKNMINTFVPSGKIMQVVDEKLPGLLGNFPGPFEEEMKGIAAVTDIPLGKVHLEALKKKVIKFFYKFPLRCDIHTAQVLYVLDIQHRCTGLRYTAQ

SEQ ID NO: 19106 - protein, 160 aa, Homo sapiens
MRCSPGGVWLALAASLLHVSLQGEFQRKLYKELVKNYNPLERPVANDSQPLTVYFSLSLLQIMDVDEKNQVLTTNIWLQMSWTDHYLQWNVSEYPGVKTVRFPDGQIWKPDILLYNSSYDQQQEVLAYGMHCWSPQFGPTSSSMFPVVHWRVLWQRWLQC

SEQ ID NO: 19107 - protein, 273 aa, Homo sapiens
MVMVKGVNKLALPPGSVISYPLENAVPFSLDSVANSIHSLFSEETPVVLQLAPSEERVYMVGKANSVFEDLSVTLRQLRNRLFQENSVLSSLPLNSLSRNNEVDLLFLSELQVLHDISSLLSRHKHLAKDHSPDLYSLELAGLDEIGKRYGEDSEQFRDASKILVDALQKFADDMYSLYGGNAVVELVTVKSFDTSLIRKTRTILEAKQANPASPYNLAYKYNFEYSVVFNMVLWIMIALALAVIITSYNIWNMDPGYDSIIYRMTNQKIRMD

SEQ ID NO: 19108 - protein, 44 aa, Homo sapiens
YGLASRLRDTRRLSFLLPLSMCGVTPWTPSTLWTSSGNVAWVSL

SEQ ID NO: 19109 - protein, 74 aa, Homo sapiens
MTSKGPEEEHPSVTLFRQYLRIRTVQPKPDYGGTWLCGDRVDLARHQPYTLLHLAQLPHGCGACLQGTLESRPL

SEQ ID NO: 19110 - protein, 259 aa, Homo sapiens
MDDLCEANGTFAISLFKILGEEDNSRNVFFSPMSISSALAMVFMGAKGSTAAQMSQALCLYKDGDIHRGFQSLLSEVNRTGTQYLLRTANRLFGEKTCDFLPDFKEYCQKFYQAELEELSFAEDTEECRKHINDWVAEKTEGKISEVLDAGTVDPLTKLVLVNAIYFKGKWNEQFDRKYTRGMLFKTNEEKKTVQMMFKEAKFKMGYADEVHTQVLELPYVEEELSMVILLPDDNTDLAVDTLRSTSFFCDILANIIST

SEQ ID NO: 19111 - protein, 520 aa, Homo sapiens
MVSLVSDLDPLKNWKVLRETATELAGSLPSNGTANKMNGALDHSDQPDPDAIKMFVGQIPRSWSEKELKELFEPYGAVYQINVLRDRSQNPPQSKGCCFVTFYTRKAALEAQNALHNIKTLPGMHHPIQMKPADSEKSNAVEDRKLFIGMVSKKCNENDIRVMFSPFGQIEECRILRGPDGLSRGCAFVTFSTRAMAQNAIKAMHQSQTMEGCSSPIVVKFADTQKDKEQRRLQQQLAQQMQQLNTATWGNLTGLGGLTPQYLALLQQATSSSNLGAFSGIQQMAGMNALQLQNLATLAAAAAAAQTSATSTNANPLSTTSSALGALTSPVAASTPNSTAGAAMNSLTSLGTLQGLAGATVGLNNINALAGMAALNGGLGATGLTNGTAGTMDALTQAYSGIQQYAAAALPTLYSQSLLQQQSAAGSQKEGPEGANLFIYHLPQEFGDQDILQMFMPFGNVISAKVFIDKQTNLSKCFGFVSYDNPVSAQAAIQAMNGFQIGMKRLKVQLKRSKNDSKPY

SEQ ID NO: 19112 - protein, 540 aa, Homo sapiens
MLAEWGACLLLAVALLGPGLQAQAMEGVKCGGVLSAPSGNFSSPNFPRLYPYNTECSWLIVVAEGSSVLLTFHAFDLEYHDTCSFDFLEIYNGASPDKGNLLGRFCGKVPPPPFTSSWHVMSVIFHSDKHVASHGFSAGYQKDVCGGVLTGLSGVLTSPEYPNNYPNSMECHWVIRAAGPAHVKLVFVDFQVEGNEECTYDYVAVLGGPGPTRGHHYCGSTRPPTLVSLGHELQVVFKSDFNIGGRGFKAYYFSGECQEVYMAMRGNFSSPQYPSSYPNNIRCHWTIRLPPGYQVKVFFLDLDLEEPNSLTKTCDFDHLAAFDGASEEAPLLGNWCGHHLPPPVTSSHNQLLLLLHTDRSTTRRGFSVAYIGVVPMNVSCSRTDFQILISTQALAPLERTKVYLGSRSCAAQEVGGNLRIQARFDTCGTESQRRNNTSVIVSVLYIDFSAAGREDIHEYEVRCEPRRKEASVHLLSGSHWLGPYAATAEHLQEAPPMDEAEALEGPVSMVAQDTSDIVFLGLCILAGILMVIAIVVLMLL

SEQ ID NO: 19113 - protein, 132 aa, Homo sapiens
MRCSPGGVWLALAASLLHVSLQGEFQRKLYKELVKNYNPLERPVANDSQPLTVYFSLSLLQIMDVDEKNQVLTTNIWLQMSWTDHYLQWNVSEYPGVKTVRFPDGQIWKPDILLYNRHIQEFLLHRCTLVSL

SEQ ID NO: 19114 - protein, 181 aa, Homo sapiens
MKHLVASSILGVFVLTPSLAMMNIRFNHPLYGSFGTQIIHIGAFQGMVSIRDNNIFSEUDGILDYKNALLVAKVFNKMACVLARMDKAVFPSLDDISKALDKQAFKYYPSTRGLTYTVLPSWVKNLAQYGKPIKNMCRDDPTYFAQQQKEGTALAIDSNSCFEIQLLSFMGLFICGETPGL

SEQ ID NO: 19115 - protein, 185 aa, Homo sapiens
MPGRSCVALVLLAAAVSCAVAQHAPPWTEDCRKSTYPPSGPTYRGAVPWYTINLDLPPYKRWHELMLDKAPVLKVIVNSLKNMINTFVPSGKIMQVVDEKLPGLLGNFPGPFEEEMKGEIISFNIFYELFTICTSIVAEDKKGHLIHGRNMDFGVFLGWNINNDTWVITEQLKPLTVNLDFQRNN

SEQ ID NO: 19116 - protein, 138 aa, Homo sapiens
MSRSQVALLGLSLLLMLLLYVGLPGPPEQTSCLWGDPNVTVLAGLTPGNSPIFYREVLPLNQAHRVEVVLLHGKAFNSHTWEQLGTLQLLSQRGYRAVALDLPAHHAQRHDQQGSRGGAPIGDALPPVPAYPHCPAQA

SEQ ID NO: 19117 - protein, 70 aa, Homo sapiens
MRKSPGLSDCLWAWILLLSTLTGRRTSRKSHQNTDLYEVNEGKDVAMDSRHYKMNLKTIPLSSPGFWTDS

SEQ ID NO: 19118 - protein, 557 aa, Homo sapiens
MQPSSLLPLALCLLAAPASALVRIPLHKFTSIRRTMSEVGGSVEDLIAKGPVSKYSQAVPAVTEGPIPEVLKNYMDAQYYGEIGIGTPPQCFTVVFDTGSSNLWVPSIHCKLLDIACWIHHKYNSDKSSTYVKNGTSFDIHYGSGSLSGYLSQDTVSVPCQSASSASALGGVKVERQVFGEATKQPGITFIAAKFDGILGMAYPRISVNNVLPVFDNLMQQKLVDQNIFSFYLSRDPDAQPGGELMLGGTDSKYYKGSLSYLNVTRKAYWQVHLDQVEVASGLTLCKEGCEAIVDTGTSLMVGPVDEVRELQKAIGAVPLIQGEYMIPCEKVSTLPAITLKLGGKGYKLSPEDYTLKAQGPGQCPAPLGDPASTTDGAQEARVPLDGAFWIPRPPAGSPKGCFACVSKPPALQAPAAPAPEPSASPPMAPTLFPMESKSSKTDSVRAAGAPPACKHLAEKKTMTNPTTVIEVYPDTTEVNDYYLWSIFNFVYLNFCCLGFIALAYSLKVRDKKLLNDLNGAVEDAKTARLFNITSSALAASCIILVFIFLRYPLTDY

SEQ ID NO: 19119 - protein, 375 aa, Homo sapiens
MPGRSCVALVLLAAAVSCAVAQHAPPWTEDCRKSTYPPSGPTYRGAVPWYTINLDLPPYKRWHELMLDKAPVLKVIVNSLKNMINTFVPSGKIMQVVDEKLPGLLGNFPGPFEEEMKGIAAVTDIPLAEDKKGHLIHGRNMDFGVFLGWNINNDTWVITEQLKPLTVNLDFQRNNKTVFKASSFAGYVGMLTGFKPGLFSLTLNERFSINGGYLGILEWILGKKDVMWIGFLTRTVLENSTSYEEAKNLLTKTKILAPAYFILGGNQSGEGCVITRDRKESLDVYELDAKQGRWYVVQTNYDRWKHPFFLDDRRTPAKMCLNRTSQENISFETMYDVLSTKPVLNKLTVYTTLIDVTKGQFETYLRDCPDPCIGW

SEQ ID NO: 19120 - protein, 246 aa, Homo sapiens
MPGRSCVALVLLAAAVSCAVAQHAPPWTEDCRKSTYPPSGPTYRGAVPWYTINLDLPPYKRWHELMLDKAPVLKVIVNSLKNMINTFVPSGKIMQVVDEKLPGLLGNFPGPFEEEMKGIAAVTDIPLVNLDFQRNNKTVFKASSFAGYVGMLTGFKPGLFSLTLNERFSINGGYLGILEWILGKKDVMWIGFLTRTVLENSTSYEEAKNLLTKTKILAPAYFILGGNQSGEGCVITRDRKESLDVY

SEQ ID NO: 19121 - protein, 281 aa, Homo sapiens
MESERSKRMGNACIPLKRIAYFLCLLSALLLTEGKKPAKPKCPAVCTCTKDNALCENARSIPRTVPPDVISLSFVRSGFTEISEGSFLFTPSLQLLLFTSNSFDVISDDAFIGLPHLEYLFIENNNIKSISRHTFRGLKSLIHLSLANNNLQTLPKDIFKGLDSLTNVDLRGNSFNCDCKLKWLVEWLGHTNATVEDIYCEGPPEYKKRKINSLSSKDFDCIITEFAKSQDLPYQSLSIDTFSYLNDEYVVIAQPFTGKCIFLEWDHVEKTFRNYDNITGS

SEQ ID NO: 19122 - protein, 59 aa, Homo sapiens
MTSVSTQLSLVLMSLLLVLPVVEAVEAGDAIALLLGVVLSITGICACLGVYARKRNGQM

SEQ ID NO: 19123 - protein, 81 aa, Homo sapiens
MVPRLLLRAWPRGPAVGPGAPSRPLSAGSGPGQYLQRSIVPTMHYQDSLPRLPIPKLEDTIRRYLSAQKPLLNDGQFRTLV

SEQ ID NO: 19124 - protein, 39 aa, Homo sapiens
MHRSEPFLKMSLLILLFLGLAEACTPREDDDLQKGDKVS

SEQ ID NO: 19125 - protein, 350 aa, Homo sapiens
MAVFVVLLALVAGVLGNEFSILKSPGSVVFRNGNWPIPGERIPDVAALSMGFSVKEDLSWPGLAVGNLFHRPRATVMVMVKGVNKLALPPGSVISYPLENAVPFSLDSVANSIHSLFSEETPVVLQLAPSEERVYMVGKANSVFEDLSVTLRQLRNRLFQENSVLSSLPLNSLSRNNEVDLLFLSELQVLHDISSLLSRHKHLAKDHSPDLYSLELAGLDEIGKRYGEDSEQFRDASKILVDALQKFADDMYSLYGGNAVVELVTVKSFDTSLIRKTRTILEAKQAKNPASPYNLAYKYNFEYSVVFNMVLWIMIALALAVIITSYNIWNMDPGYDSIIYRMTNQKIRMD

SEQ ID NO: 19126 - protein, 366 aa, Homo sapiens
MPGRSCVALVLLAAAVSCAVAQHAPPWTEDCRKSTYPPSGPTYRGAVPWYTINLDLPPYKRWHELMLDKAPVPGLLGNFPGPFEEEMKGIAAVTDIPLGEIISFNIFYELFTICTSIVAEDKKGHLIHGRNMDFGVFLGWNINNDTWVITEQLKPLTVNLDFQRNNKTVFKASSFAGYVGMLTGFKPGLFSLTLNERFSINGGYLGILEWILGKKDVMWIGFLTRTVLENSTSYEEAKNLLTKTKILAPAYFILGGNQSGEGCVITRDRKESLDVYELDAKQGRWYVVQTNYDRWKHPFFLDDRRTPAKMCLNRTSQENISFETMYDVLSTKPVLNKLTVYTTLIDVTKGQFETYLRDCPDPCIGW

SEQ ID NO: 19127 - protein, 393 aa, Homo sapiens
MPGRSCVALVLLAAAVSCAVAQHAPPWTEDCRKSTYPPSGPTYRGAVPWYTINLDLPPYKRWHELMLDKAPVVIVNSLKNMINTFVPSGKIMQVVDEKLPGLLGNFPGPFEEEMKGIAAVTDIPLGEIISFNIFYELFTICTSIVAEDKKGHLIHGRNMDFGVFLGWNINNDTWVITEQLKPLTVNLDFQRNNKTVFKASSFAGYVGMLTGFKPGLFSLTLNERFSINGGYLGILEWILGKKDVMWIGFLTRTVLENSTSYEEAKNLLTKTKILAPAYFILGGNQSGEGCVITRDRKESLDVYELDAKQGRWYVVQTNYDRWKHPFFLDDRRTPAKMCLNRTSQENISFETMYDVLSTKPVLNKLTVYTTLIDVTKGQFETYLRDCPDPCIGW

SEQ ID NO: 19128 - protein, 2495 aa, Homo sapiens
MFSKKPHGDVKKSTQKVLDTKKDALTRLKHLRIVIENAESIDLKQFFDQHFSHIYYVFFENFVTIEASLKQKGHKSQREELDAILFIFEKILQLLPERIHQRWQFHSIGLILKKLLHTGNSLKIRREGVRLFLLWLQALQNNCSKEQLWMFSCLIPGFSAPQSEHGPRTLDNLINPPLNLQETQVTIEEITPLVPPQSGDKGQEDLTSYFLEALLKYIVIQVKSLEWKNKENQERGFSFLFSHFKKYYLPYIFPNICKENSLYHPILDIPQMRPKPHYVVIKKDAETNEAIYCTKEPFIKARVIVIRWLVSFWLEPKPHTGPHIPGMEGEVLPKNIQRAAASLVSREESKNDNADKTDRTTEPEQSHSNTSTLTEREPSSSSLCSIDEEHLTDIEIVRRVFSSKRSNVNFVTEIFRQAFLLPICEAAAMRKVVKVYQEWIQQEEKPLFMQEPEEIVITSSDLPCIENVTDHDISMEEGEKREEENGTNTADHVRNSSWAKNGSYQGALHNASEEATEQNIRAGTQAVLQVFIINSSNIFLLEPANEIKNLLDEHTDMCKRILNIYRYMVVQVSMDKKTWEQMLLVLLRVTESVLKMPSQAFLQFQGKKNMTLAGRLAGPLFQTLIVAWIKANLNVYISRELWDDLLSVLSSLTYWEELATEWSLTMETLTKVLARNLYSLDLSDLPLDKLSEQKQKKHKGKGVGHEFQKVSVDKSFSRGWSRDQPGQAPMRQRSATTTGSPGTEKARSIVRQKTVDIDDAQILPRSTRVRHFSQSEETGNEVFGALNEEQPLPRSSSTSDILEPFTVERAKGAVPVIDSSSRHAPSLQSSTEASSITRSTESHITDTHSRESSLEVGDSIYDHLCHLIGPVELADSAFEQIQYIDLEGDDDLLSTLKEYFKENQENHSKNETGKDPASQEVTIAVNRGERLSLDKLECTDQETESENITSFVGTPENLQFQKEPNSAVFMSNIAPNQSDSFFRTQTSEKSKQLNTDKQPSEPSLDSPCDKEKRKHLYRQAATELDACVDVTLVEKLKSVQINEKITVPHVMRAKKATLKAPVNRRMPHVTSTSKLSPTKRSLSETVTHRAKIMKIATKKRNSVHVTFRPSTESVQFYNPLENKEAPWKMRLRKLGGFSSGSSNSSTSNTHTSTNSATELVKPGVYRPLDTLGTASVSSKTVKESTEIPTTILQKEGIASSQLGSRSTLRSSSHEAGLQQGSLGGVYKTVVHALSKPKANVSPQRQNRMPPEAPLRDLYSHVMGYFGRKAAVNKEDMSQKLPPLNSDIGGSSANVPDLMDEFIAERLRSGNASTMTRRGSSPGSLEIPKDLPDILNKQNQMRPIDDPGVPSEWTSPASAGSSDLISSDSHSDSFSAFQYDGRKFDNFGFGTDTGVTSSADVDSGSGHHQSAEEQEVASLTTLHIDSETSSLNQQAFSAEVATITGSESASPVHSPLGSRSQTPSPSTLNIDHMEQKDLQLDEKLHHSVLQTPDDLEISEFPSECCSVMAGGTLTGWHADVATVMWRRMLGILGDVNSIMDPEIHAQVFDYLCELWQNLAKIRDNLGISTDNLTSPSPPVLIPPLRILTPWLFKATMLTDKYKQGKLHAYKLICNTMKRRQDVSPNRDFLTHFYNIMHCGLLHIDQDIVNTIIKHCSPQFFSLGLPGATMLIMDFIVAAGRVASSAFLNAPRVEAQVLLGSLVCFPNLYCELPSLHPNIPDVAVSQFTDVKELIIKTVLSSARDEPSGPARCVALCSLGIWICEELVHESHHPQIKEALNVICVSLKFTNKTVAHVACNMLHMLVHYVPRLQIYQPDSPLKIIQILIATITHLLPSTEASSYEMDKRLVVSLLLCLLDWIMALPLKTLLQPFHATGAESDKTEKSVLNCIYKVLHGCVYGAQCFSNPRYFPMSLSDLASVDYDPFMHLESLKEPEPLHSPDSERSSKLQPVTEVKTQMQHGLISIAARTVITHLVNHLGHYPMSGGPAMLTSQVCENHDNHYSESTELSPELFESPNIQFFVLNNTTLVSCIQIRSEENMPGGGLSAGLASANSNVRIIVRDLSGKYSWDSAILYGPPPVSGLSEPTSFMLSLSHQEKPEEPPTSNECLEDITVKDGLSLQFKRFRETVPTWDTIRDEEDVLDELLQYLGVTSPECLQRTGISLNIPAPQPVCISEKQENDVINAILKQHTEEKEFVEKHFNDLNMKAVEQDEPIPQKPQSAFYYCRLLLSILGMNSWDKRRSFHLLKKNEKLLRELRNLDSRQCRETHKIAVFYVAEGQEDKHSILTNTGGSQAYEDFVAGLGWEVNLTNHCGFMGGLQKNKSTGLTTPYFATSTVEVIFHVSTRMPSDSDDSLTKKLRHLGNDEVHIVWSEHTRDYRRGIIPTEFGDVLIVIYPMKNHMFSIQIMKKPEVPFFGPLFDGAIVNGKVLPIMVRATAINASRALKSLIPLYQNFYEERARYLQTIVQHHLEPTTFEDFAAQVFSPAPYHHLPSDADH

SEQ ID NO: 19129 - protein, 42 aa, Homo sapiens; identical to SEQ ID NO: 19084

SEQ ID NO: 19130 - protein, 41 aa, Homo sapiens
MSRAMALFFVLCWIQVEMGFHHVGQAGHELLTSMDPPASAS

SEQ ID NO: 19131 - protein, 1792 aa, Homo sapiens
MARCGEGSAAPMVLLGSAGVCSKGLQRKGPCERRRLKATVSEQLSQDLLRLLREEFHTDVTFSVGCTLFKAHKAVLLARVPDFYFHTIGQTSNSLTNQEPIAVENVEALEFRTFLQIIYSSNRNIKNYEEEILRKKIMEIGISQKQLDISFPKCENSSDCSLQKHEIPEDISDRDDDFISNDNYDLEPASELGEDLLKLYVKPCCPDIDIFVDGKRFKAHRAILSARSSYFAAMLSGCWAESSQEYVTLQGISHVELNVMMHFIYGGTLDIPDKTNVGQILNMADMYGLEGLKEVAIYILRRDYCNFFQKPVPRTLTSILECLIIAHSVGVESLFADCMKWIVKHFARFWSERSFANIPPEIQKSCLNMLIQSLNDKNAAFLLMESDRLIISLPRVKWTEAALTMASQLQEKCIAFIVDNFSKIIQSENFALLLQSQAMSSTADLLDTILKAIEENITTENSCSLLMALDTLLNSDSTKEMGFTCKIQALRDKLWIFLVQSFYAVRHTESWKLMSTDDQQKIQAAAFDKGDDRRLGKKPIFSSSQQRKQVSDSGDIKIKSWRGNNKKECWSYLSTNKKMKSDGLGASGHSSSTNRNSINKTLKQDDVKEKDGTKIASKITKELKTGGKNVSGKPKTVTKSKTENGDKARLENMSPRQVVERSATAAAAATGQKNLLNGKGVRNQEGQISGARPKVLTGNLNVQAKAKPLKKATGKDSPCLSIAGPSSRSTDSSMEFSISTECLDEPKENGSTEEEKPSGHKLSFCDSPGQMMKNSVDSVKNSTVAIKSRPVSRVTNGTSNKKSIHEQDTNVNNSVLKKVSGKGCSEPVPQAILKKRGTSNGCTAAQQRTKSTPSNLTKTQGSQGESPNSVKSSVSSRQSDENVAKLDHNTTTEKQAPKRKMVKQVHTALPKVNAKIVAMPKNLNQSKKGETLNNKDSKQKMPPGQVISKTQPSSQRPLKHETSTVQKSMFHDVRDNNNKDSVSEQKPHKPLINLASEISDAEALQSSCRPDPQKPLNDQEKEKLALECQNISKLDKSLKHELESKQICLDKSETKFPNHKETDDCDAANICCHSVGSDNVNSKFYSTTALKYMVSNPNENSLNSNPVCDLDSTSAGQIHLISDRENQVGRKDTNKQSSIKCVEDVSLCNPERTNGTLNSAQEDKKSKVPVEGLTIPSKLSDESAMDEDKHATADSDVSSKCFSGQLSEKNSPKNMETSESPESHETPETPFVGHWNLSTGVLHQRESPESDTGSATTSSDDIKPRSEDYDAGGSQDDDGSNDRGISKCGTMLCHDFLGRSSSDTSTPEELKIYDSNLRIEVKMKKQSNNDLFQVNSTSDDEIPRKRPEIWSRSAIVHSRERENIPRGSVQFAQEIDQVSSSADETEDERSEAENVAENFSISNPAPQQFQGIINLAFEDATENECREFSATKKFKRSVLLSVDECEELGSDEGEVHTPFQASVDSFSPSDVFDGISHEHHGRTCYSRFSRESEDNILECKQNKGNSVCKNESTVLDLSSIDSSRKNKQSVSATEKKNTIDVLSSRSRQLLREDKKVNNGSNVENDIQQRSKFLDSDVKSQERPCHLDLHQREPNSDIPKNSSTKSLDSFRSQVLPQEGPVKESHSTTTEKANIALSAGDIDDCDTLAQTRMYDHRPSKTLSPIYEMDVIEAFEQKVESETHVTDMDFEDDQHFAKQDWTLLKQLLSEQDSNLDVTNSVPEDLSLAQYLINQTLLLARDSSKPQGITHIDTLNRWSELTSPLDSSASITMASFSSEDCSPQGEWTILELETQH

SEQ ID NO: 19132 - protein, 127 aa, Homo sapiens
MARLEAPQCPGFLARLLGGTWCLLCIAGQVCGDQSQGAVFLREFTLIRRESLHEDFLSDLLNSHKTEDSSSRTARSEEDRDGLWDAWGPWSECSRTCGGGASYSLRRCLSSKSCEGRNIRYRTCSNV

SEQ ID NO: 19133 - protein, 698 aa, Homo sapiens
MAEPQAESEPLLGGARGGGGDWPAGLTTYRSIQVGPGAAARWDLCIDQAVVFIEDAIQYRSINHRVDASSMWLYRRYYSNVCQRTLSFTIFLILFLAFIETPSSLTSTADVRYRAAPWEPPCGLTESVEVLCLLVFAADLSVKGYLFGWAHFQKNLWLLGYLVVLVVSLVDWTVSLSLVCHEPLRIRRLLRPFFLLQNSSMMKKTLKCIRWSLPEMASVGLLLAIHLCLFTMFGMLLFAGGKQDDGQDRERLTYFQNLPESLTSLLVLLTTANNPDVMIPAYSKNRAYAIFFIVFTVIGSLFLMNLLTAIIYSQFRGYLMKSLQTSLFRRRLGTRAAFEVLSSMVGEGGAFPQAVGVKPQNLLQVLQKVQLDSSHKQAMMEKVRSYGSVLLSAEEFQKLFNELDRSVVKEHPPRPEYQSPFLQSAQFLFGHYYFDYLGNLIALANLVSICVFLVLDADVLPAERDDFILGILNCVFIVYYLLEMLLKVFALGLRGYLSYPSNVFDGLLTVVLLVLEISTLAVYRLPHPGWRPEMVGLLSLWDMTRMLNMLIVFRFLRIIPSMKLMAVVASTVLGLVQNMRAFGGILVVVYYVFAIIGINLFRGVIVALPGNSSLAPANGSAPCGSFEQLEYWANNFDDFAAALVTLWNLMVVNNWQVFLDAYRRYSGPDPGGSHVESPEQHQLLTMLLTVVDRLSMPR

SEQ ID NO: 19134 - protein, 142 aa, Homo sapiens
MYSGNRSGGHGYWDGGGAAGAEGPAPAGTLSPAPLFSPGTYERLALLLGSIGLLGVGNNLLVLVLYYKFQRLRTPTHLLLVNISLSDLLVSLFGVTFTFVSCLRNGWVWDTVGCVWDGFSGSLFASLCGRSSDNSSDQDFKI

SEQ ID NO: 19135 - protein, 526 aa, Homo sapiens
MVSLVSDLDPLKNWKVLRETATELAGSLPSNGTANKMNGALDHSDQPDPDAIKMFVGQIPRSWSEKELKELFEPYGAVYQINVLRDRSQNPPQSKGCCFVTFYTRKAALEAQNALHNIKTLPGMHHPIQMKPADSEKSNAVEDRKLFIGMVSKKCNENDIRVMFSPFGQIEECRILRGPDGLSRGCAFVTFSTRAMAQNAIKAMHQSQTMEGCSSPIVVKFADTQKDKEQRRLQQQLAQQMQQLNTATWGNLTGLGGLTPQYLALLQQATSSSNLGAFSGIQQMAGMNALQLQNLATLAAAAAAAQTSATSTNANPLSTTSSALGALTSPVAASTPNSTAGAAMNSLTSLGTLQGLAGATVGLNNINALAVAQMLSGMAALNGGLGATGLTNGTAGTMDALTQAYSGIQQYAAAALPTLYSQSLLQQQSAAGSQKEGPEGANLFIYHLPQEFGDQDILQMFMPFGNVISAKVFIDKQTNLSKCFGFVSYDNPVSAQAAIQAMNGFQIGMKRLKVQLKRSKNDSKPY

SEQ ID NO: 19136 - protein, 75 aa, Homo sapiens
SFIFLCSFLMLNLFVAVIMDNFEYLTRDSSILGPHHLDEYVRVWAEYDPAACGFCGWTCPSQMTTPSTSIPPSWL

SEQ ID NO: 19137 - protein, 75 aa, Homo sapiens
MPGRSCVALVLLAAAVSCAVAQHAPPVSELEPRRREGRAGAGADGGAVDRGLQKINLSSFRTNVQRCSSMVHHKS

SEQ ID NO: 19138 - protein, 154 aa, Homo sapiens
MAASRRLMKELEEIRKCGMENFRNIQVDEANLLTWQGLIVPDNPPYNKGAFRIEINFPAEYPFKPPRITFKTKIYHPNIDEKGQVCLPVISAENWKPATKTDQVIQSLIALVNDPQPEHPLRADLAEEYSNDRKKFCKNAEEFTKKYGEKRPVD

SEQ ID NO: 19139 - protein, 331 aa, Homo sapiens
MAVFVVLLALVAGVLGNEFSILKSPGSVVFRNGNWPIPGERIPDVAALSMGFSVKEDLSWPGLAVGNLFHRPRATVMVMVKGVNKLALPPGSVISYPLENAVPFSLDSVANSIHSLFSEETPVVLQLAPSEERVYMVGKANSVFEDLSVTLRQLRNRLFQENSVLSSLPLNSLSRNNEVDLLFLSELQVLHDISSLLAGLDEIGKRYGEDSEQFRDASKILVDALQKFADDMYSLYGGNAVVELVTVKSFDTSLIRKTRTILEAKQAKNPASPYNLAYKYNFEYSVVFNMVLWIMIALALAVIITSYNIWNMDPGYDSIIYRMTNQKIRMD

SEQ ID NO: 19140 - protein, 872 aa, Homo sapiens
MATACKRSGEPQSDDIEASRMKRAAAKHLIERYYHQLTEGCGNEACTNEFCASCPTFLRMDNNAAAIKALELYKINAKLCDPHPSKKGASSAYLENSKGAPNNSCSEIKMNKKGARIDFKDVTYLTEEKVYEILELCREREDYSPLIRVIGRVFSSAEALVQSFRKVKQHTKEELKSLQAKDEDKDEDEKEKAACSAAAMEEDSEASSSRIGDSSQGDNNLQKLGPDDVSVDIDAIRRVYTRLLSNEKIETAFLNALVYLSPNVECDLTYHNVYSRDPNYLNLFIIVMENRNLHSPEYLEMALPLFCKAMSKLPLAAQGKLIRLWSKYNADQIRRMMETFQQLITYKVISNEFNSRNLVNDDDAIVAASKCLKMVYYANVVGGEVDTNHNEEDDEEPIPESSELTLQELLGEERRNKKGPRVDPLETELGVKTLDCRKPLIPFEEFINEPLNEVLEMDKDYTFFKVETENKFSFMTCPFILNAVTKNLGLYYDNRIRMYSERRITVLYSLVQGQQLNPYLRLKVRRDHIIDDALVRLEMIAMENPADLKKQLYVEFEGEQGVDEGGVSKEFFQLVVEEIFNPDIGMFTYDESTKLFWFNPSSFETEGQFTLIGIVLGLAIYNNCILDVHFPMVVYRKLMGKKGTFRDLGDSHPVLYQSLKDLLEYEGNVEDDMMITFQISQTDLFGNPMMYDLKENGDKIPITNENRKEFVNLYSDYILNKSVEKQFKAFRRGFHMVTNESPLKYLFRPEEIELLICGSRNLDFQALEETTEYDGGYTRDSVLIREFWEIVHSFTDEQKRLFLQFTTGTDRAPVGGLGKLKMIIAKNGPDTERLPTSHTCFNVLLLPEYSSKEKLKERLLKAITYAKGFGML

SEQ ID NO: 19141 - protein, 181 aa, Homo sapiens
MALEKGPLLLLALGLGLAGAQKALEEVPVQPGFNAQKVEGRWLTLQLAANHADLVSPADPLRLALHSIRTRDGGDVDFVLFWKGEGVCKETNITVHPTQLQGQYQGSFEGGSMHVCFVSTDYSNLILYVRFEDDEITNLWVLLARRMLEDPKWLGRYLEYVEKFHLQKAPVFNIDGPCPPP

SEQ ID NO: 19142 - protein, 55 aa, Homo sapiens
MKPVSRRTLDWIYSVLLLAIVLISWGCIIYASMVSARRQLRKKYPDKIFGTNENL

SEQ ID NO: 19143 - protein, 285 aa, Homo sapiens
MRAFIFFLFMLLAMFSASSTQISNTSVFKLEENPKPALILEEKNEANHLGGQRDSNKQGGSYTQGNPGTFRLQGQPGYFNKLEKPRHFKQGRAGVLNQPGILKNSGKSNQKGNPESSNKQENSGSSSQLGRPGISTQQGNPGSSDQQEKPGSFSQKVMVGSSSQQGKPGSSSQHGNLGSSTQKGNLGSSSLQGHLGLSSHQGKPESSGQQGKPGSSSQQGNLGTSGQQEKPGSSSQQGKPGLSSHQGKPGSSSQQGNLHLSSQQGNQGPSSKQRKPGSSSRQGNL

SEQ ID NO: 19144 - protein, 45 aa, Homo sapiens
MEYVLFVLYFSFFLCLCALVCLYFSGCQEMTYKHEEACCGDIFWI

SEQ ID NO: 19145 - protein, 1267 aa, Homo sapiens
MAADEGSAEKQAGEAHMAADGETNGSCENSDASSHANAAKHTQDSARVNPQDGTNTLTRIAENGVSERDSEAAKQNHVTADDFVQTSVIGSNGYILNKPALQAQPLRTTSTLASSLPGHAAKTLPGGAGKGRTPSAFPQTPAAPPATLGEGSADTEDRKLPAPGADVKVHRARKTMPKSVVGLHAASKDPREVREARDHKEPKEEINKNISDFGRQQLLPPFPSLHQSLPQNQCYMATTKSQTACLPFVLAAAVSRKKKRRMGTYSLVPKKKTKVLKQRTVIEMFKSITHSTVGSKGEKDLGASSLHVNGESLEMDSDEDDSEELEEDDGHGAEQAAAFPTEDSRTSKESMSEADRAQKMDGESEEEQESVDTGEEEEGGDESDLSSESSIKKKFLKRKGKTDSPWIKPARKRRRRSRKKPSGALGSESYKSSAGSAEQTAPGDSTGYMEVSLDSLDLRVKGILSSQAEGLANGPDVLETDGLQEVPLCSCRMETPKSREITTLANNQCMATESVDHELGRCTNSVVKYELMRPSNKAPLLVLCEDHRGRMVKHQCCPGCGYFCTAGNFMECQPESSISHRFHKDCASRVNNASYCPHCGEESSKAKEVTIAKADTTSTVTPVPGQEKGSALEGRADTTTGSAAGPPLSEDDKLQGAASHVPEGFDPTGPAGLGRPTPGLSQGPGKETLESALIALDSEKPKKLRFHPKQLYFSARQGELQKVLLMLVDGIDPNFKMEHQNKRSPLHAAAEAGHVDICHMLVQAGANIDTCSEDQRTPLMEAAENNHLEAVKYLIKAGALVDPKDAEGSTCLHLAAKKGHYEVVQYLLSNGQMDVNCQDDGGWTPMIWATEYKHVDLVKLLLSKGSDINIRDNEENICLHWAAFSGCVDIAEILLAAKCDLHAVNIHGDSPLHIAARENRYDCVVLFLSRDSDVTLKNKEGETPLQCASLNSQVWSALQMSKALQDSAPDRPSPVERIVSRDIARGYERIPIPCVNAVDSEPCPSNYKYVSQNCVTSPMNIDRNITHLQYCVCIDDCSSSNCMCGQLSMRCWYDKDGRLLPEFNMAEPPLIFECNHACSCWRNCRNRVVQNGLRARLQLYRTRDMGWGVRSLQDIPPGTFVCEYVGELISDSEADVREEDSYLFDLDNKDGEVYCIDARFYGNVSRFINHHCEPNLVPVRVFMAHQDLRFPRIAFFSTRLIEAGEQLGFDYGERFWDIKGKLFSCRCGSPKCRHSSAALAQRQASAAQEAQEDGLPDTSSAAAADPL

SEQ ID NO: 19146 - protein, 406 aa, Homo sapiens
MQPSSLLPLALCLLAAPASALVRIPLHKFTSIRRTMSEVGGSVEDLIAKGPVSKYSQAVPAVTEGPIPEVLKNYMDAQYYGEIGIGTPPQCFTVVFDTGSSNLWVPSIHCKLLDIACWIHHKYNSDKSSTYVKNGTSFDIHYGSGSLSGYLSQDTVSVPCQSASSASALGGVKVERQVFGEATKQPGITFIAAKFDGILGMAYPRISVNNVLPVFDNLMQQKLVDQNIFSFYLSRDPDAQPGGELMLGGTDSKYYKGSLSYLNVTRKAYWVEVASGLTLCKEGCEAIVDTGTSLMVGPVDEVRELQKAIGAVPLIQGEYMIPCEKVSTLPAITLKLGGKGYKLSPEDYTLKVSQAGKTLCLSGFMGMDIPPPSGPLWILGDVFIGRYYTVFDRDNNRVGFAEAARL

SEQ ID NO: 19147 - protein, 143 aa, Homo sapiens
MAVFVVLLALVAGVLGNEFSILKSPGSVVFRNGNWPIPGERIPDVAALSMGFSVKEDLSWPGLAVGNLFHRPRATVMVMVKGVNKLALPPGSVISYPLENAVPFSLDSVANSIHSLFSEETPVVLQLAPSEESVYGREGKLSV

SEQ ID NO: 19148 - protein, 287 aa, Homo sapiens
MESERSKRMGNACIPLKRIAYFLCLLSALLLTEGKKPAKPKCPAVCTCTKDNALCENARSIPRTVPPDVISLSFVRSGFTEISEGSFLFTPSLQLLLFTSNSFDVISDDAFIGLPHLEYLFIENNNIKSISRHTFRGLKSLIHLSLANNNLQTLPKDIFKGLDSLTNVDLRGNSFNCDCKLKWLVEWLGHTNATVEDIYCEGPPEYKKRKINSLSSKDFDCIITEFAKSQDLPYQSLSIDTFSYLNDEYVVIAQPFTGKCIFLEWDHVEKTFRNYDNITGQSCWCPQ

SEQ ID NO: 19149 - protein, 186 aa, Homo sapiens
MQRWTLWAAAFLTLHSAQAFPQTDISISPALPELPLPSLCPLFWMEFKGHCYRFFPLNKTWAEADLYCSEFSVGRKSAKLASIHSWEENVFVYDLVNSCVPGIPADVWTGLHDHRQEGQFEWTDGSSYDYSYWDGSQPDDGVHADPEEEDCVQIWYRPTSALRSWNDNTCSRKFPFVCKIPSLTIH

SEQ ID NO: 19150 - protein, 209 aa, Homo sapiens
MAVFVVLLALVAGVLGNEFSILKSPGSVVFRNGNWPIPGERIPDVAALSMGFSVKEDLSWPGLAVGNLFHRPRATVMVMVKGVNKLALPPGSVISYPLENAVPFSLDSVANSIHSLFSEETPVVLQLAPSEERVYMVGKANSVFEDLSVTLRQLRNRLFQENSVLSSLPLNSLSRNNEVDLLFLSELQVLHDISSLGETTYLPRTQAWA

SEQ ID NO: 19151 - protein, 38 aa, Homo sapiens
RAMALFFVLCWIQEMGFHHVGQAGHELLTSMDPPASAS

SEQ ID NO: 19152 - protein, 801 aa, Homo sapiens
MGEIEQRPTPGSRLGAPENSGISTLERGQKPPPTPSGKLVSIKIQMLDDTQEAFEVPQRAPGKVLLDAVCNHLNLVEGDYFGLEFPDHKKITVWLDLLKPIVKQIRRPKHVVVKFVVKFFPPDHTQLQEELTRYLFALQVKQDLAQGRLTCNDTSAALLISHIVQSEIGDFDEALDREHLAKNKYIPQQDALEDKIVEFHHNHIGQTPAESDFQLLEIARRLEMYGIRLHPAKDREGTKINLAVANTGILVFQGFTKINAFNWAKVRKLSFKRKRFLIKLRPDANSAYQDTLEFLMASRDFCKSFWKICVEHHAFFRLFEEPKPKPKPVLFSRGSSFRFSGRTQKQVLDYVKEGGHKKVQFERKHSKIHSIRSLASQPTELNSEVLEQSQQSTSLTFGEGAESPGGQSCRRGKEPKVSAGEPGSHPSPAPRRSPAGNKQADGAASAPTEEEEEVVKDRTQQSKPQPPQPSTGPASRAARGSSTSIPFIDCSDVDSEYDLLREQASRSRSRSRSRSQTNDNYEGDLTSGVYLLSREEGRREAGRRASPHSAKSSRPPSGEFLDDDSADITFDMSGSPRLPRHSSLIDEMFKGSAGHSPLATPLSPSSSSSSPNMSWDRTGSQGYVSENGHDHREGSMGEDTLPDQGPPYERWSPTSPRPYMRNLPGRCNKSETDPLILSQVAFTPEAMDGLGGRGKWGQASAAAPEGRSLANGTPPMGAASKVPAVQSVCARGMAGQLAPLQVTEGSTSSGTESSESDSEMLIPGSQPLIFGNPAVLRSPSLLRSRGSLGGLRLSEEQEEDE

SEQ ID NO: 19153 - protein, 526 aa, Homo sapiens
MRMQAALVGWACTTLCLASCSSAFSHGASTVACDDMQPKHIQAQPQHQDSHHITIHTHRTSYAPGDKIPVTVRSSRDFMGFLLQARRVSDHQIAGTFVLIPPHSKLMTCFQEADAVTHSDKSLKRNLSFVWKAPAQPVGDIKFLLSVVQSYFVYWARIESSVVSQQTHSSAHSDDRMEPRLLMPNLHQRLGDVEGAAPAPRTPITLPQQHTHVFAVALPGAAEEDNLDPVPASIWVTKFPGDAETLSQPSSHTATEGSINQQPSGDSNPTLEPSLEVHRLERLVALKRVSSESFASSLSTHHRTQDDPSFDSLETCLSSDGGEQDKTKASNRTVTQPPLSTVQLTYPQCLWSSETFTGNGVRASNPIPVLQTSGTSGLPAAGDQSEASRASASFLPQSKHKELRAGKGNGEGGVGYPRQTNPRPDIGLEGAQAPLGIQLRTPQLGILLCLSATLGMALAAGLRYLHTQYCHQQTEVSFSEPASDAVARSNSGETVHVRKIGENSFVLVQAEYNWITPSVGSKKTVL

SEQ ID NO: 19154 - protein, 62 aa, Homo sapiens
MPGRSCVALVLLAAAVSCAVAQHAPPWTEDCRKSTYPPSGPTYRGAVPWYTINLDLPPYKRC

SEQ ID NO: 19155 - protein, 52 aa, Homo sapiens
MGCHSSKSTTVAAESQKLEEEREGREPGLETGTQAADCKDAPLKDGTPEPKS

SEQ ID NO: 19156 - protein, 67 aa, Homo sapiens
MPGRSCVALVLLAAAVSCAVAQHAPPVSELEPRRREGRAVDRGLQKINLSSFRTNVQRCSSMVHHKS

SEQ ID NO: 19157 - protein, 317 aa, Homo sapiens
MAVFVVLLALVAGVLGNEFSILKSPGSVVFRNGNWPIPGERIPDVAALSMGFSVKEDLSWPGLAVGNLFHRPRATVMVMVKGVNKLALPPGSVISYPLENRVYMVGKANSVFEDLSVTLRQLRNRLFQENSVLSSLPLNSLSRNNEVDLLFLSELQVLHDISSLLSRHKHLAKDHSPDLYSLELAGLDEIGKRYGEDSEQFRDASKILVDALQKFADDMYSLYGGNAVVELVTVKSFDTSLIRKTRTILEAKQANPASPYNLAYKYNFEYSVVFNMVLWIMIALALAVIITSYNIWNMDPGYDSIIYRMTNQKIRMD

SEQ ID NO: 19158 - protein, 190 aa, Homo sapiens
MQLLVRVPSLPERGELDCNICYRPFNLGCRAPRRLPGTARARCGHTICTACLRELAARGDGGGAAARVVRLRRVVTCPFCRAPSQLPRGGLTEMALDSDLWSRLEEKARAKCERDEAGNPAKESSDADGEAEEEGESEKGAGPRSAGWRALRRLWDRVLGPARRWRRPLPSNVLYCAEIKDIGHLTRCTL

SEQ ID NO: 19159 - protein, 242 aa, Homo sapiens
MVMVKGVNKLALPPGSVISYPLENRVYMVGKANSVFEDLSVTLRQLRNRLFQENSVLSSLPLNSLSRNNEVDLLFLSELQVLHDISSLLSRHKHLAKDHSPDLYSLELAGLDEIGKRYGEDSEQFRDASKILVDALQKFADDMYSLYGGNAVVELVTVKSFDTSLIRKTRTILEAKQAKNPASPYNLAYKYNFEYSVVFNMVLWIMIALALAVIITSYNIWNMDPGYDSIIYRMTNQKIRMD

SEQ ID NO: 19160 - protein, 139 aa, Homo sapiens
MCFATRRWFYLHLGCMMLINLVNADFEFQKGVLASISPGITKDIDLQCWKACSLTLIDLKELKIEHNVDAFWNFMLFLQKSQRPGHYNVFLNIAQDFWDMYVDCLLSRSHGMGRRQVMPPKYNFPQKITGGNLNVYLRE

SEQ ID NO: 19161 - protein, 409 aa, Homo sapiens
MQPSSLLPLALCLLAAPASALVRIPLHKFTSIRRTMSEVGGSVEDLIAKGPVSKYSQAVPAVTEGPIPEVLKNYMDAQYYGEIGIGTPPQCFTVVFDTGSSNLWVPSIHCKLLDIACWIHHKYNSDKSSTYVKNGTSFDIHYGSGSLSGYLSQDTVSVPCQSASSASALGGVKVERQVFGEATKQPGITFIAAKFDGILGMAYPRISVNNVLPVFDNLMQQKLVDQNIFSFYLSRDPDAQPGGELMLGGTDSKYYKGSLSYLNVTRKAYWQVHLDQVEVASGLTLCKEGCEAIVDTGTSLMVGPVDEVRELQKAIGAVPLIQGEYMIPCEKVSTLPAITLKLGGKGYKLSPEDYTLKAGKTLCLSGFMGMDIPPPSGPLWILGDVFIGRYYTVFDRDNNRVGFAEAARL

SEQ ID NO: 19162 - protein, 504 aa, Homo sapiens
MARRCGPVALLLGFGLLRLCSGVWGTDTEERLVEHLLDPSRYNKLIRPATNGSELVTVQLMVSLAQLISVHEREQIMTTNVWLTQVSEWEDYRLTWKPEEFDNMKKVRLPSKHIWLPDVVLYNNADGMYEVSFYSNAVVSYDGSIFWLPPAIYKSACKIEVKHFPFDQQNCTMKFRSWTYDRTEIDLVLKSEVASLDDFTPSGEWDIVALPGRRNENPDDSTYVDITYDFIIRRKPLFYTINLIIPCVLITSLAILVFYLPSDCGEKMTLCISVLLALTVFLLLISKIVPPTSLDVPLVGKYLMFTMVLVTFSIVTSVCVLNVHHRSPTTHTMAPWVKVVFLEKLPALLFMQQPRHHCARQRLRLRRRQREREGAGALFFREAPGADSCTCFVNRASVQGLAGAFGAEPAPVAGPGRSGEPCGCGLREAVDGVRFIADHMRSEDDDQSVSEDWKYVAMVIDRLFLWIFVFVCVFGTIGMFLQPLFQNYTTTTFLHSDHSAPSSK

SEQ ID NO: 19163 - protein, 184 aa, Homo sapiens
MPGRSCVALVLLAAAVSCAVAQHAPPWTEDCRKSTYPPSGPTVFPAVIRYRGAVPWYTINLDLPPYKRWHELMLDKAPVLKVIVNSLKNMINTFVPSGKIMQVVDEKLPGLLGNFPGPFEEEMKGIAAVTDIPLGEIISFNIFYELFTICTSIVAEDKKGHLIHGRNMDFGVFLGWNINNDTWV

SEQ ID NO: 19164 - protein, 2372 aa, Homo sapiens
MAARAAAAAAAAAARARARAGSGERRAPPGPRPAPGARDLEAGARGAAAAAAAPGPMLGGGGDGGGGLNSVHHHPLLPRHELNMAHNAGAAAAAGTHSAKSGGSEAALKEGGSAAALSSSSSSSAAAAAASSSSSSGPGSAMETGLLPNHKLKTVGEAPAAPPHQQHHHHHHAHHHHHHAHHLHHHHALQQQLNQFQQQQQQQQQQQQQQQQQQHPISNNNSLGGAGGGAPQPGPDMEQPQHGGAKDSAAGGQADPPGPPLLSKPGDEDDAPPKMGEPAGGRYEHPGLGALGTQQPPVAVPGGGGGPAAVPEFNNYYGSAAPASGGPGGRAGPCFDQHGGQQSPGMGMMHSASAAAAGAPGSMDPLQNSHEGYPNSQCNHYPGYSRPGAGGGGGGGGGGGGGSGGGGGGGGAGAGGAGAGAVAAAAAAAAAAAGGGGGGGYGGSSAGYGVLSSPRQQGGGMMMGPGGGGAASLSKAAAGSAAGGFQRFAGQNQHPSGATPTLNQLLTSPSPMMRSYGGSYPEYSSPSAPPPPPSQPQSQAAAAGAAAGGQQAAAGMGLGKDMGAQYAAASPAWAAAQQRSHPAMSPGTPGPTMGRSQGSPMDPMVMKRPQLYGMGSNPHSQPQQSSPYPGGSYGPPGPQRYPIGIQGRTPGAMAGMQYPQQQMPPQYGQQGVSGYCQQGQQPYYSQQPQPPHLPPQAQYLPSQSQQRYQPQQDMSQEGYGTRSQPPLAPGKPNHEDLNLIQQERPSSLPDLSGSIDDLPTGTEATLSSAVSASGSTSSQGDQSNPAQSPFSPHASPHLSSIPGGPSPSPVGSPVGSNQSRSGPISPASIPGSQMPPQPPGSQSESSSHPALSQSPMPQERGFMAGTQRNPQMAQYGPQQTGPSMSPHPSPGGQMHAGISSFQQSNSSGTYGPQMSQYGPQGNYSRPPAYSGVPSASYSGPGPGMGISANNQMHGQGPSQPCGAVPLGRMPSAGMQNRPFPGNMSSMTPSSPGMSQQGGPGMGPPMPTVNRKAQEAAAAVMQAAANSAQSRQGSFPGMNQSGLMASSSPYSQPMNNSSSLMNTQAPPYSMAPAMVNSSAASVGLADMMSPGESKLPLPLKADGKEEGTPQPESKSKDSYSSQGISQPPTPGNLPVPSPMSPSSASISSFHGDESDSISSPGWPKTPSSPKSSSSTTTGEKITKVYELGNEPERKLWVDRYLTFMEERGSPVSSLPAVGKKPLDLFRLYVCVKEIGGLAQVNKNKKWRELATNLNVGTSSSAASSLKKQYIQYLFAFECKIERGEEPPPEVFSTGDTKKQPKLQPPSPANSGSLQGPQTPQSTGSNSMAEVPGDLKPPTPASTPHGQMTPMQGGRSSTISVHDPFSDVSDSSFPKRNSMTPNAPYQQGMSMPDVMGRMPYEPNKDPFGGMRKVPGSSEPFMTQGQMPNSSMQDMYNQSPSGAMSNLGMGQRQQFPYGASYDRRHEPYGQQYPGQGPPSGQPPYGGHQPGLYPQQPNYKRHMDGMYGPPAKRHEGDMYNMQYSSQQQEMYNQYGGSYSGPDRRPIQGQYPYPYSRERMQGPGQIQTHGIPPQMMGGPLQSSSSEGPQQNMWAARNDMPYPYQNRQGPGGPTQAPPYPGMNRTDDMMVPDQRINHESQWPSHVSQRQPYMSSSASMQPITRPPQPSYQTPPSLPNHISRAPSPASFQRSLENRMSPSKSPFLPSMKMQKVMPTVPTSQVTGPPPQPPPIRREITFPPGSVEASQPVLKQRRKITSKDIVTPEAWRVMMSLKSGLLAESTWALDTINILLYDDSTVATFNLSQLSGFLELLVEYFRKCLIDIFGILMEYEVGDPSQKALDHNAARKDDSQSLADDSGKEEEDAECIDDDEEDEEDEEEDSEKTESDEKSSIALTAPDAAADPKEKPKQASKFDKLPIKIVKKNNLFVVDRSDKLGRVQEFNSGLLHWQLGGGDTTEHIQTHFESKMEIPPRRRPPPPLSSAGRKKEQEGKGDSEEQQEKSIIATIDDVLSARPGALPEDANPGPQTESSKFPFGIQQAKSHRNIKLLEDEPRSRDETPLCTIAHWQDSLAKRCICVSNIVRSLSFVPGNDAEMSKHPGLVLILGKLILLHHEHPERKRAPQTYEKEEDEDKGVACSKDEWWWDCLEVLRDNTLVTLANISGQLDLSAYTESICLPILDGLLHWMVCPSAEAQDPFPTVGPNSVLSPQRLVLETLCKLSIQDNNVDLILATPPFSRQEKFYATLVRYVGDRKNPVCREMSMALLSNLAQGDALAARAIAVQKGSIGNLISFLEDGVTMAQYQQSQHNLMHMQPPPLEPPSVDMMCRAAKALLAMARVDENRSEFLLHEGRLLDISISAVLNSLVASVICDVLFQIGQL

SEQ ID NO: 19165 - protein, 197 aa, Homo sapiens
MHYPIGLLFDLLASSSALPWNITVHFKSFPEKDLLHCPSKDAIEAHFMSCMKEADALKHKSQVINEMQKKDHKQLWMGLQNDRFDQFWAINRKLMEYPAEENGFRYIPFRIYQTTTERPFIQKLFRPVAADGQLHTLGDLLKEVCPSAIDPEDGEKKNQVMIHGIEPMLETPLQWLSEHLSYPDNFLHISIIPQPTD

SEQ ID NO: 19166 - protein, 293 aa, Homo sapiens
MGTALLQRGGCFLLCLSLLLLGCWAELGSGLEFPGAEGQWTRFPKWNACCESEMSFQLKTRSARGLVLYFDDEGFCDFLELILTRGGRLQLSFSIFCAEPATLLADTPVNDGAWHSVRIRRQFRNTTLFIDQVEAKWVEVKSKRRDMTVFSGLFVGGLPPELRAAALKLTLASVREREPFKGWIRDVRVNSSQVLPVDSGEVKLDDEPPNSGGGSPCEAGEEGEGGVCLNGGVCSVVDDQAVCDCSRTGFRGKDCSQEDNNVEGLAHLMMGDQGKSKEMNDYLNYKKVKICYT

SEQ ID NO: 19167 - protein, 159 aa, Homo sapiens
MRCSPGGVWLALAASLLHVSLQGEFQRKLYKELVKNYNPLERPVANDSQPLTVYFSLSLLQIMDVDEKNQVLTTNIWLQMSWTDHYLQWNVSEYPGVKTVRFPDGQIWKPDILLYNSYDQQQEVLAYGMHCWSPQFGPTSSSMFPVVHWRVLWQRWLQC

SEQ ID NO: 19168 - protein, 175 aa, Homo sapiens
MPGRSCVALVLLAAAVSCAVAQHAPPWTEDCRKSTYPPSGPTYRGAVPWYTINLDLPPYKRWHELMLDKAPVLKVIVNSLKNMINTFVPSGKIMQVVDEKLPGLLGNFPGPFEEEMKGIAAVTDIPLGKVHLEALKKKVIKFFYKFPLRCDIHTAQVLYVLDIQHRCTGLRYTAQ

SEQ ID NO: 19169 - protein, 225 aa, Homo sapiens
MKLANWYWLSSAVLATYGFLVVANNETEEIKDERAKDVCPVRLESRGKCEEAGECPYQVSLPPLTIQLPKQFSRIEEVFKEVQNLKEIVNSLKKSCQDCKLQADDNGDPGRNGLLLPSTGAPGEVGDNRVRELESEVNKLSSELKNAKEEINVLHGRLEKLNLVNMNNIENYVDSKVANLTFVVNSLDGKCSKCPSQEQIQSRPGMYNNVFLSYVHKCYTAREYL

SEQ ID NO: 19170 - protein, 279 aa, Homo sapiens
MSTPTDPGAMPHPGPSPGPGPSPGPILGPSPGPGPSPGSVHSMMGPSPGPPSVSHPMPTMGSTDFPQEGMHQMHKPIDGIHDKGIVEDIHCGSMKGTGMRPPHPGMGPPQSPMDQHSQGYMSPHPSPLGAPEHVSSPMSGGGPTPPQMPPSQPGALIPGDPQAMSQPNRGPSPFSPVQLHQLRAQILAYKMLARGQPLPETLQLAVQGKRTLPGLQQQQQQQQQQQQQQQQQQQQQQQPQQQPPQPQTQQQQQPALVNYNRPSGRLIRNQMNNAMVQLG

SEQ ID NO: 19171 - protein, 274 aa, Homo sapiens
MVMVKGVNKLALPPGSVISYPLENAVPFSLDSVANSIHSLFSEETPVVLQLAPSEERVYMVGKANSVFEDLSVTLRQLRNRLFQENSVLSSLPLNSLSRNNEVDLLFLSELQVLHDISSLLSRHKHLAKDHSPDLYSLELAGLDEIGKRYGEDSEQFRDASKILVDALQKFADDMYSLYGGNAVVELVTVKSFDTSLIRKTRTILEAKQAKNPASPYNLAYKYNFEYSVVFNMVLWIMIALALAVIITSYNIWNMDPGYDSIIYRMTNQKIRMD

SEQ ID NO: 19172 - protein, 124 aa, Homo sapiens
GRASWCWALALLWLAVVPGWSRVSGIPSRRHWPVPYKRFDFRPKPDPYCQAKYTFCPTGSPIPVMEGDDDIEVFRLQAPVWEFKYGDLLGHLVTWTHGCVTVAFIHVLSLHRKLCMMPLDSEVH

SEQ ID NO: 19173 - protein, 1515 aa, Homo sapiens
MSPADAKRGAKRRKNKRGGGGGSGGGNGGASSGKAGPAAALRGSQAAGLAAPGSAAGLVGGAAAANGPLGAGASAGGAAPGGYFETPFSFGMNHRTPPYPAGDYCLLCRSERKDSSFLESGIKTASKLALSMAPKGNSVLHLPLWVCPDCRRTVEKEERHGGLDQPVSQDFLLHSSLGGSQPEAGSGGRLALGAQTLPSDTACSCEACSERREISAEADREPQQLQNYWSEVRYTVRCIYRQAGTPLADDQDQSLVPDKEGVKELVDRLCERDPYQLYQRLEQQAREYVLEMKVRLLRQLSAAAKVKAPSGLQGPPQAHQFISLLLEEYGALCQAARSISTFLGTLENEHLKKFQVTWELHNKHLFENLVFSEPLLQSNLPALVSQIRLGTTTHDTCSEDTYSTLLQRYQRSEEELRRVAEEWLECQKRIDAYVDEQMTMKTKQRMLTEDWELFKQRRFIEEQLTNKKAVTGENNFTDTMRHMLSSRLSMPDCPNCNYRRRCACDDCSLSHILTCGIMDPPVTDDIHIHQLPLQVDPAPDYLAERSPPSVSSASSGSGSSSPITIQQHPRLILTDSGSAPTFCSDDEDVAPLSAKFADIYPLSNYDDTEVVANMNGIHSELNGGGENMALKDESPQISSTSSSSSEADDEEADGESSGEPPGAPKEDGVLGSRSPRTEESKADSPPPSYPTQQAEQAPNTCECHVCKQEASGLTPSAMTAGALPPGHQFLSPEKPTHPALHLYPHIHGHVPLHTVPHLPRPLIHPTLYATPPFTHSKALPPAPVQNHTNKHQVFNASLQDHIYPSCFGNTPEWNSSKFISLWGSEVMNDKNWNPGTFLPDTISGSEILGPTLSETRPEALPPPSSNETPAVSDSKEKKNAAKKKCLYNFQDAFMEANKVVMATSSATSSVSCTATTVQSSNSQFRVSSKRPPSVGDVFHGISKEDHRHSAPAAPRNSPTGLAPLPALSPAALSPAALSPASTPHLANLAAPSFPKTATTTPGFVDTRKSFCPAPLPPATDGSISAPPSVCSDPDCEGHRCENGVYDPQQDDGDESADEDSCSEHSSSTSTSTNQKEGKYCDCCYCEFFGHGGPPAAPTSRNYAEMREKLRLRLTKRKEEQPKKMDQISERESVVDHRRVEDLLQFINSSETKPVSSTRAAKRARHKQRKLEEKARLEAEARAREHLHLQEEQRRREEEEDEEEEEDRFKEEFQRLQELQKLRAVKKKKKERPSKDCPKLDMLTRNFQAATESVPNSGNIHNGSLEQTEEPETSSHSPSRHMNHSEPRPGLGADGDAADPVDTRDSKFLLPKEVNGKQHEPLSFFFDIMQHHKEGNGKQKLRQTSKASSEPARRPTEPPKATEGQSKPRAQTESKAKVVDLMSITEQKREERKVNSNNNNKKQLNHIKDEKSNPTPMEPTSPGEHQQNSKLVLAESPQPKGKNKKNKKKKGDRVNNSIDDVFLPKDIDLDSVDMDETEREVEYFKRFCLDSARQTRQRLSINWSNFSLKKATFAAH

SEQ ID NO: 19174 - protein, 265 aa, Homo sapiens
MSRAMALFFVLCWIQDEIVLQVFSKVPYDPSFDETRTAVRSITKRDTQKSYSQQKSLNNAAFASGSNEREEHLAKIFDEILLQVFPKFPYDPSFNEATAVRSITKTDMRKGTSIAWNSPKPEYFLGSVDKIPDKDHLSEEKNFKESCLFDRDLREQLTTIDKETLQGAAKPDAHFRTMPCGQLLHFLQRNTIIAAVSGVAILMAIVLLLLGLASYIRKKQPSSPLANTTYNIFIMDGKTWWHNSEEKNFTKLAKKQKQLKSSSCV

SEQ ID NO: 19175 - protein, 298 aa, Homo sapiens
MEANGLGPQGFPELKNDTFLRAAWGEETDYTPVWCMRQAGRYLPEFRETRAAQDFFSTCRSPEACCELTLQPLRRFPLDAAIIFSDILVVPQALGMEVTMVPGKGPSFPEPLREEQDLERLRDPEVVASELGYVFQAITLTRQRLAGRVPLIGFAGAPWTLMTYMVEGGGSSTMAQAKRWLYQRPQASHQLLRILTDALVPYLVGQVVAGAQALQLFESHAGHLGPQLFNKFALPYIRDVAKQVKARLREAGLAPVPMIIFAKDGHFALEELAQAGYEVVGLDWTVAPKKARRRSGSW

SEQ ID NO: 19176 - protein, 67 aa, Homo sapiens
MALFFVLCWIQDEIVLQVFSKVPYDPSFDETRTAVRSITKRDTQKNYVKMSLAPGVVLELQMLADTS

SEQ ID NO: 19177 - protein, 405 aa, Homo sapiens
MQPSSLLPLALCLLAAPASALVRIPLHKFTSIRRTMSEVGGSVEDLIAKGPVSKYSQAVPAVTEGPIPEVLKNYMDAQYYGEIGIGTPPQCFTVVFDTGSSNLWVPSIHCKLLDIACWIHHKYNSDKSSTYVKNGTSFDIHYGSGSLSGYLSQDTVSVPCQSASSASALGGVKVERQVFGEATKQPGITFIAAKFDGILGMAYPRISVNNVLPVFDNLMQQKLVDQNIFSFYLSRDPDAQPGGELMLGGTDSKYYKGSLSYLNVTRKAYWQVHLDQVEVASGLTLCKEGCEAIVDTGTSLMVGPVDEVRELQKAIGAVPLIQGEVSTLPAITLKLGGKGYKLSPEDYTLKVSQAGKTLCLSGFMGMDIPPPSGPLWILGDVFIGRYYTVFDRDNNRVGFAEAARL

SEQ ID NO: 19178 - protein, 81 aa, Homo sapiens
MRCSPGGVWLALAASLLHVSLQGEFQRKLYKELVKNYNPLERPVANDSQPLTVYFSLSLLQIMDVILRINKKTDSICSGLC

SEQ ID NO: 19179 - protein, 36 aa, Homo sapiens
MALFFVLCWIQEMGFHHVGQAGHELLTSMDPPASAS

SEQ ID NO: 19180 - protein, 345 aa, Homo sapiens
MAVFVVLLALVAGVLGNEFSILKSPGSVVFRNGNWPIPGERIPDVAALSMGFSVKEDLSWPGLAVGNLFHRPRATVMVMVKGVNKLALPPGSVISYPLENAVPFSLDSVANSIHSLFSEETPVVLQLAPSEERVYMVGKANSVFEDLSVTLRQLRNRLFQENSVLSSLPLNSLSRNNEVDLLFLSELQVLHDISSLHLAKDHSPDLYSLELAGLDEIGKRYGEDSEQFRDASKILVDALQKFADDMYSLYGGNAVVELVTVKSFDTSLIRKTRTILEAKQAKNPASPYNLAYKYNFEYSVVFNMVLWIMIALALAVIITSYNIWNMDPGYDSIIYRMTNQKIRMD

SEQ ID NO: 19181 - protein, 19 aa, Homo sapiens
MGRVGYWTLLVLPALLVWR

SEQ ID NO: 19182 - protein, 296 aa, Homo sapiens
MKCVFVTVGTTSFDDLIACVSAPDSLQKIESLGYNRLILQIGRGTVVPEPFSTESFTLDVYRYKDSLKEDIQKADLVISHAGAGSCLETLEKGKPLVVVINEKLMNNHQLELAKQLHKEGHLFYCTCRVLTCPGQAKSIASAPGKCQDSAALTSTAFSGLDFGLLSGYLHKQALVTATHPTCTLLFPSCHAFFPLPLTPTLYKMHKGWKNYCSQKSLNEASMDEYLGSLGLFRKLTAKDASCLFRAISEQLFCSQVHHLEIRKACVSYMRENQQTFESSGFHSLSLSWKTSNLCHR

SEQ ID NO: 19183 - protein, 94 aa, Homo sapiens
MRKSPGLSDCLWAWILLLSTLTGRSYGQPSLQDELKDNTTVFTRILDRLLDGYDNRLRPGLGERVTEVKTDIFVTSFGPVSDHDMIFALQNTAQ

SEQ ID NO: 19184 - protein, 133 aa, Homo sapiens
MGPSCPVFLSFTKLSLWWLLLTPAGGEEAKRPPPRAPGDPLSSPSPTALPQGGSHTETEDRLFKHLFRGYNRWARPVPNTSDVVIVRFGLSIAQLIDVVRLSSHRWPEEGDPRPPTAFPLLLPLPQPCPHAQQ

SEQ ID NO: 19185 - protein, 137 aa, Homo sapiens
MYSGNRSGGHGYWDGGGAAGAEGPAPAGTLSPAPLFSPGTYERLALLLGSIGLLGVGNNLLVLVLYYKFQRLRTPTHLLLVNISLSDLLVSLFGVTFTFVSCLRNGWVWDTVGCVWDGFSGSLFEKSSSHKCIYDAF

SEQ ID NO: 19186 - protein, 49 aa, Homo sapiens
MPGRSCVALVLLAAAVSCAVAQHAPPRTAENQPILLQDQRTEVQFHGTP

SEQ ID NO: 19187 - protein, 748 aa, Homo sapiens
MVLQARNKHREAAPKPPQPPRASQSPLRGASDVGAGEPGPERAPLSPGRKGAAGRKGPRAEPGAPPAGGGLGGRLAARLRWALGLRRAGRGRTWTTLLLAVFAAVLHWSHITHLFENDRHFSHLSTLEREMAFRTEMGLYYSYFKTIVEAPSFLNGVWMIMNDKLTEYPLVINTLKRFNLYPEVILASWYRIYTKIMDLIGIQTKICWTVTRGEGLSPIESCEGLGDPACFYVAVIFILNGLMMALFFIYGTYLSGSRLGGLVTVLCFFFNHGECTRVMWTPPLRESFSYPFLVLQMLLVTHILRATKLYRGSLIALCISNVFFMLPWQFAQFVLLTQIASLFAVYVVGYIDICKLRKIIYIHMISLALCFVLMFGNSMLLTSYYASSLVIIWGILAMKPHFLKINVSELSLWVIQGCFWLFGTVILKYLTSKIFGIADDAHIGNLLTSKFFSYKDFDTLLYTCAAEFDFMEKETPLRYTKTLLLPVVLVVFVAIVRKIISDMWGVLAKQQTHVRKHQFDHGELVYHALQLLAYTALGILIMRLKLFLTPHMCVMASLICSRQLFGWLFCKVHPGAIVFAILAAMSIQGSANLQTQWNIVGEFSNLPQEELIEWIKYSTKPDAVFAGAMPTMASVKLSALRPIVNHPHYEDAGLRARTKIVYSMYSRKAAEEVKRELIKLKVNYYILEESWCVRRSKPGCSMPEIWDVEDPANAGKTPLCNLLVKDSKPHFTTVFQNSVYKVLEVVKE

SEQ ID NO: 19188 - protein, 1507 aa, Homo sapiens
MNGGKECDGGDKEGGLPAIQVPVGWQRRVDQNGVLYVSPSGSLLSCLEQVKTYLLTDGTCKCGLECPLILPKVFNFDPGAAVKQRTAEDVKADEDVTKLCIHKRKIIAVATLHKSMEAPHPSLVLTSPGGGTNATPVVPSRAATPRSVRNKSHEGITNSVMPECKNPFKLMIGSSNAMGRLYVQELPGSQQQELHPVYPRQRLGSSEHGQKSPFRGSHGGLPSPASSGSQIYGDGSISPRTDPLGSPDVFTRSNPGFHGAPNSSPIHLNRTPLSPPSVMLHGSPVQSSCAMAGRTNIPLSPTLTTKSPVMKKPMCNFSTNMEIPRAMFHHKPPQGPPPPPPPSCALQKKPLTSEKDPLGILDPIPSKPVNQNPVIINPTSFHSNVHSQVPMMNVSMPPAVVPLPSNLPLPTVKPGHMNHGSHVQRVQHSASTSLSPSPVTSPVHMMGTGIGRIEASPQRSRSSSTSSDHGNFMMPPVGPQATSSGIKVPPRSPRSTIGSPRPSMPSSPSTKSDGHHQYKDIPNPLIAGISNVLNTPSSAAFPTASAGSSSVKSQPGLLGMPLNQILNQHNAASFPASSLLSAAAKAQLANQNKLAGNNSSSSSNSGAVAGSGNTEGHSTLNTMFPPTANMLLPTGEGQSGRAALRDKLMSQQKDALRKRKQPPTTVLSLLRQSQMDSSAVPKPGPDLLRKQGQGSFPISSMSQLLQSMSCQSSHLSSNSTPGCGASNTALPCSANQLHFTDPSMNSSVLQNIPLRGEAVHCHNANTNFVHSNSPVPNHHLAGLINQIQASGNCGMLSQSGMALGNSLHPNPPQSRISTSSTPVIPNSIVSSYNQTSSEAGGSGPSSSIAIAGTNHPAITKTTSVLQDGVIVTTAAGNPLQSQLPIGSDFPFVGQEHALHFPSNSTSNNHLPHPLNPSLLSSLPISLPVNQQHLLNQNLLNILQPSAGEGDMSSINNTLSNHQLTHLQSLLNNNQMFPPNQQQQQLLQGYQNLQAFQGQSTIPCPANNNPMACLFQNFQVRMQEDAALLNKRISTQPGLTALPENPNTTLPPFQDTPCELQPRIDPSLGQQVKDGLVVGGPGDASVDAIYKAVVDAASKGMQVVITTAVNSTTQISPIPALSAMSAFTASIGDPLNLSSAVSAVIHGRNMGGVDHDGRLRNSRGARLPKNLDHGKNVNEGDGFEYFKSASCHTSKKQWDGEQSPRGERNRWKYEEFLDHPGHIHSSPCHERPNNVSTLPFLPGEQHPILLPPRNCPGDKILEENFRYNNYKRTMMSFKERLENTVERCAHINGNRPRQSRGFGELLSTAKQDLVLEEQSPSSSNSLENSLVKDYIHYNGDFNAKSVNGCVPSPSDAKSISSEDDLRNPDSPSSNELIHYRPRTFNVGDLVWGQIKGLTSWPGKLVREDDVHNSCQQSPEEGKVWVMWFGLHTFTQVEPEKLKTLTEGLEAYSRVRKRNRKSGKLNNHLEAAIHEAMSELDKMSGTVHQIPQGDRQMRPPKPKRRKISR

SEQ ID NO: 19189 - protein, 83 aa, Homo sapiens
MDLSFMAAQLPMMGGAFMDSPNEDFSTEYSLFNSSANVHAAANGQGQPEDPPRSSNDAVLLWIAIIATLGNIVVVGVVYAFTF

SEQ ID NO: 19190 - protein, 186 aa, Homo sapiens
MAVFVVLLALVAGVLGNEFSILKSPGSVVFRNGNWPIPGERIPDVAALSMGFSVKEDLSWPGLAVGNLFHRPRATVMVMVKGVNKLALPPGSVISYPLENAVPFSLDSVANSIHSLFSEETPVVLQLAPSEERVYMVGKANSVFEDLSVTLRQLRNRLFQENSVLSSLPLNSLSRNNENALFFWAL

SEQ ID NO: 19191 - protein, 585 aa, Homo sapiens
SMSRSQVALLGLSLLLMLLLYVGLPGPPEQTSCLWGDPNVTVLAGLTPGNSPIFYREVLPLNQAHRVEVVLLHGKAFNSHTWEQLGTLQLLSQRGYRAVALDLPGFGNSAPSKEASTEAGRAALLERALRDLEVQNAVLVSPSLSGHYALPFLMRGHHQLHGFVPIAPTSTQNYTQEQFWAVKLTTRSAMTSKGPEEEHPSVTLFRQYLRIRTVQPKPDYGAAVAFFEETARQLGLGCQKVEVAPGYVVTVLTWPGTNPTLSSILLNSHTDVVPVFKEHWSHDPFEAFKDSEGYIYARGAQDMKCVSIQYLEAVRRLKVEGHRFPRTIHMTFVPDEEVGGHQGMELFVQRPEFHALRAGFALDEGIANPTDAFTVFYSERSPWWVRVTSTGRPGHASRFMEDTAAEKLHKVVNSILAFREKEWQRLQSNPHLKEGSVTSVNLTKLEGGVAYNVIPATMSASFDFRVAPDVDFKAFEEQLQSWCQAAGEGVTLEFAQKWMHPQVTPTDDSNPWWAAFSRVCKDMNLTLEPEIMPAATDNRYIRAVGVPALGFSPMNRTPVLLHDHDERLHEAVFLRGVDIYTRLLP

SEQ ID NO: 19192 - protein, 70 aa, Homo sapiens
MAPWSREAVLSLYRALLRQGRQLRYTDRDFYFASIRREFRKNQKLEDAEARERQLEKGLVFLNGKLGRII

SEQ ID NO: 19193 - protein, 405 aa, Homo sapiens
MQPSSLLPLALCLLAAPASALVRIPLHKFTSIRRTMSEVGGSVEDLIAKGPVSKYSQAVPAVTEGPIPEAQYYGEIGIGTPPQCFTVVFDTGSSNLWVPSIHCKLLDIACWIHHKYNSDKSSTYVKNGTSFDIHYGSGSLSGYLSQDTVSVPCQSASSASALGGVKVERQVFGEATKQPGITFIAAKFDGILGMAYPRISVNNVLPVFDNLMQQKLVDQNIFSFYLSRDPDAQPGGELMLGGTDSKYYKGSLSYLNVTRKAYWQVHLDQVEVASGLTLCKEGCEAIVDTGTSLMVGPVDEVRELQKAIGAVPLIQGEYMIPCEKVSTLPAITLKLGGKGYKLSPEDYTLKVSQAGKTLCLSGFMGMDIPPPSGPLWILGDVFIGRYYTVFDRDNNRVGFAEAARL

SEQ ID NO: 19194 - protein, 284 aa, Homo sapiens
MRCSPGGVWLALAASLLHVSLQGEFQRKLYKELVKNYNPLERPVANDSQPLTVYFSLSLLQIMDVDEKNQVLTTNIWLQMSWTDHYLQWNVSEYPGVKTVRFPDGQIWKPDILLYNSADERFDATFHTNVLVNSSGHCQYLPPGIFKSSCYIDVRWFPFDVQHCKLKFGSWSYGGWSLDLQMQEADISGYIPNGEWDLVVTMRRRTLYYGLNLLIPCVLISALALLVFLLPADSGEKISLGITVLLSLTVFMLLVAEIMPATSDSVPLIAQYFASTMIIVGLSV

SEQ ID NO: 19195 - protein, 173 aa, Homo sapiens
MPGRSCVALVLLAAAVSCAVAQHAPPWTEDCRKSTYPPSGPTYRGAVPWYTINLDLPPYKRWHELMLDKAPVLKVIVNSLKNMINTFVPSGKIMQVVDEKLPGLLGNFPGPFEEEMKGIAAVTDIPLGEIISFNIFYELFTICTSIVAEDKKGNCALREGGQHEALHKEKSSK

SEQ ID NO: 19196 - protein, 374 aa, Homo sapiens
MPGRSCVALVLLAAAVSCAVAQHAPPWTEDCRKSTYPPSGPTYRGAVPWYTINLDLPPYKRWHELMLDKAPVLKVIVNSLKNMINTFVPSGKIMQVVDEKLPGLLGNFPGPFEEEMKGIAAVTDIPLEDKKGHLIHGRNMDFGVFLGWNINNDTWVITEQLKPLTVNLDFQRNNKTVFKASSFAGYVGMLTGFKPGLFSLTLNERFSINGGYLGILEWILGKKDVMWIGFLTRTVLENSTSYEEAKNLLTKTKILAPAYFILGGNQSGEGCVITRDRKESLDVYELDAKQGRWYVVQTNYDRWKHPFFLDDRRTPAKMCLNRTSQENISFETMYDVLSTKPVLNKLTVYTTLIDVTKGQFETYLRDCPDPCIGW

SEQ ID NO: 19197 - protein, 147 aa, Homo sapiens
RAMALFFVLCWIQGYSQQKSLNNAAFASGSNEREEHLAKIFDEILLQVFPKFPYDPSFNEATAVRSITKTDMRKGTSIAWNSPKPEYFLGSVDKIPDKDHLSEEKNFKESCLFDRDLREQLTTIDKETLQGAAKPDLLWQTRHIIFL

SEQ ID NO: 19198 - protein, 231 aa, Homo sapiens
MSRAMALFFVLCWIQGYSQQKSLNNAAFASGSNEREEHLAKIFDEILLQVFPKFPYDPSFNEATAVRSITKTDMRKGTSIAWNSPKPEYFLGSVDKIPDKDHLSEEKNFKESCLFDRDLREQLTTIDKETLQGAAKPDAHFRTMPCGQLLHFLQRNTIIAAVSGVAILMAIVLLLLGLASYIRKKQPSSPLANTTYNIFIMDGKTWWHNSEEKNFTKLAKKQKQLKSSSCV

SEQ ID NO: 19199 - protein, 1128 aa, Homo sapiens
MAEEESDQEAERLGEELVAIVESPLGPVGLRAAGDGRGGAGSGNCGGGVGISSRDYCRRFCQVVEDYAGRWQVPLPQLQVLQTALCCFTTASASFPDECEHVQYVLSSLAVSFFELLLFFGRDEFYEEPLKDILGSFQECQNHLRRYGNVNLELVTRIIRDGGPWEDPVLQAVLKAQPASQEIVNKYLSSENPLFFELRARYLIACERIPEAMALIKSCINHPEISKDLYFHQALFTCLFMSPVEDQLFREHLLKTDCKSGIDIICNAEKEGKTMLALQLCESFLIPQLQNGDMYCIWELIFIWSKLQLKSNPSKQVFVDQCYQLLRTATNVRVIFPFMKIIKDEVEEEGLQICVEICGCALQLDLHDDPKTKCLIYKTIAHFLPNDLEILRICALSIFFLERSLEAYRTVEELYKRPDEEYNEGTSSVQNRVRFELLPILKKGLFFDPEFWNFVMIKKNCVALLSDKSAVRFLNESTLENNAGNLKRTEEQQGLDEGFDSLTDQSTGETDPDDVSGVQPKGHINTKKNLTALSTSKVDHNVPRHRCMLCNKEFLGGHIVRHAQAHQKKGSFACVICGRKFRNRGLMQKHLKNHVKKIQRQQIAAAQQDDQEVTALEEINCSSSSISFENGNSDSKDLEVETLTASSEGNKEVIPEHVAEFIEIPISVPEDVIENVIENGSPNNSLNNVFKPLTECGDDYEEEEDEEGDYEEDDYDLNQETSVIHKINGTVCHPKDIYATDQEGNFKCPALGCVRIFKRIGFLNKHAMTVHPTDLNVRQTVMKWSKGKCKFCQRQFEDSQHFIDHLNRHSYPNVYFCLHFNCNESFKLPFQLAQHTKSHRIFQAQCSFPECHELFEDLPLLYEHEAQHYLSKTPESSAQPSETILWDVQTDSNPNQEKDSSSNEKQTISLPVSTSKSRKESTEPKTCIESMEKKTDSLVQNGNERSDDTVSNISLIDQKMPDIEPNSENNCSSSDIVNGHSEIEQTPLVSSDPALKIDTNRIRTENGSILPSVVPQEHNTLPVSQAPSKPNLTSEHTSYGLILTKPYVRPLPPSYLDERYLSMPKRRKFLTDRVDACSDQDNVYKKSVKRLRCGKCLTTYCNAEALEAHLAQKKCQTLFGFDSDDESA

SEQ ID NO: 19200 - protein, 236 aa, Homo sapiens
MESERSKRMGNACIPLKRIAYFLCLLSALLLTEGKKPAKPKCPAVCTCTKDNALCENARSIPRTVPPDVISLSFVRSGFTEISEGSFLFTPSLQLLLFTSNSFDVISDDAFIGLPHLEYLFIENNNIKSISRHTFRGLKSLIHLFRETQTQAENLHCRGAGAPQMAVGDAFLAAEPGGTETNAVFEPVWSALERRLSSGFHSHNRRFSWVNDENTKGQEMVIISVKKEWPSAFENT

SEQ ID NO: 19201 - protein, 1072 aa, Homo sapiens
MITVVYGPDLVNISHLNLVAFQEEVAKEWTNEVFSLATNLLAQNMSRDAFLEKAYTKLKLQVTPEGRIPLKNIYRLFSADRKRVETALEACSLPSSRNDSIPQEDFTPEVYRVFLNNLCPRPEIDNIFSEFGAKSKPYLTVDQMMDFINLKQRDPRLNEILYPPLKQEQVQVLIEKYEPNNSLARKGQISVDGFMRYLSGEENGVVSPEKLDLNEDMSQPLSHYFINSSHNTYLTAGQLAGNSSVEMYRQVLLSGCRCVELDCWKGRTAEEEPVITHGFTMTTEISFKEVIEAIAECAFKTSPFPILLSFENHVDSPKQQAKMAEYCRLIFGDALLMEPLEKYPLESGVPLPSPMDLMYKILVKNKKKSHKSSEGSGKKKLSEQASNTYSDSSSMFEPSSPGAGEADTESDDDDDDDDCKKSSMDEGTAGSEAMATEEMSNLVNYIQPVKFESFEISKKRNKSFEMSSFVETKGLEQLTKSPVEFVEYNKMQLSRIYPKGTRVDSSNYMPQLFWNAGCQMVALNFQTMDLAMQINMGMYEYNGKSGYRLKPEFMRRPDKHFDPFTEGIVDGIVANTLSVKIISGQFLSDKKVGTYVEVDMFGLPVDTRRKAFKTKTSQGNAVNPVWEEEPIVFKKVVLPTLACLRIAVYEEGGKFIGHRILPVQAIRPGYHYICLRNERNQPLTLPAVFVYIEVKDYVPDTYADVIEALSNPIRYVNLMEQRAKQLAALTLEDEEEVKKEADPGETPSEAPSEARTTPAENGVNHTTTLTPKPPSQALHSQPAPGSVKAPAKTEDLIQSVLTEVEAQTIEELKQQKSFVKLQKKHYKEMKDLVKRHHKKTTDLIKEHTTKYNEIQNDYLRRRAALEKSAKKDSKKKSEPSSPDHGSSTIEQDLAALDAEMTQKLIDLKDKQQQQLLNLRQEQYYSEKYQKREHIKLLIQKLTDVAEECQNNQLKKLKEICEKEKKELKKKMDKKRQEKITEAKSKDKSQMEEEKTEMIRSYIQEVVQYIKRLEEAQSKRQEKLVEKHKEIRQQILDEKPKGEGSSSFLSETCHEDPSVSPNFTPPNPQALKW

SEQ ID NO: 19202 - protein, 541 aa, Homo sapiens
MDMGNPGTLSPTKPGSQYYQYSSNNPRRRPLHSSAMEVQTKKVRKVPPGLPSSVYAPSASTADYNRDSPGYPSSKPATSTFPSSFFMQDGHHSSDPWSSSSGMNQPGYAGMLGNSSHIPQSSSYCSLHPHERLSYPSHSSADINSSLPPMSTFHRSGTNHYSTSSCTPPANGTDSIMANRGSGAAGSSQTGDALGKALASIYSPDHTNNSFSSNPSTPVGSPPSLSAGTAVWSRNGGQASSSPNYEGPLHSLQSRIEDRLERLDDAIHVLRNHAVGPSTAMPGGHGDMHGIIGPSHNGAMGGLGSGYGTGLLSANRHSLMVGTHREDGVALRGSHSLLPNQVPVPQLPVQSATSPDLNPPQDPYRGMPPGLQGQSVSSGSSEIKSDDEGDENLQDTKSSEDKKLDDDKKDIKSITRSRSSNNDDEDLTPEQKAEREKERRMANNARERLRVRDINEAFKELGRMVQLHLKSDKPQTKLLILHQAVAVILSLEQQVRERNLNPKAACLKRREEEKVSSEPPPLSLAGPHPGMGDASNHMGQM

SEQ ID NO: 19203 - protein, 410 aa, Homo sapiens
MQPSSLLPLALCLLAAPASALVRIPLHKFTSIRRTMSEVGGSVEDLIAKGPVSKYSQAVPAVTEGPIPEVLKNYMDYYGEIGIGTPPQCFTVVFDTGSSNLWVPSIHCKLLDIACWIHHKYNSDKSSTYVKNGTSFDIHYGSGSLSGYLSQDTVSVPCQSASSASALGGVKVERQVFGEATKQPGITFIAAKFDGILGMAYPRISVNNVLPVFDNLMQQKLVDQNIFSFYLSRDPDAQPGGELMLGGTDSKYYKGSLSYLNVTRKAYWQVHLDQVEVASGLTLCKEGCEAIVDTGTSLMVGPVDEVRELQKAIGAVPLIQGEYMIPCEKVSTLPAITLKLGGKGYKLSPEDYTLKVSQAGKTLCLSGFMGMDIPPPSGPLWILGDVFIGRYYTVFDRDNNRVGFAEAARL

SEQ ID NO: 19204 - protein, 400 aa, Homo sapiens
MLPRALLLSFCAAALQLVSSKRDLVLVKEALSWYDAQQHCRLHYTDLADLQPSGLWKLYSLMTSTPAWIGLFFDASTSGLRWSSGSTFTALEWGQKLPEFGVGFCATLYTWLKLPSIGAASCTAQKPFLCYCDPDVGHLISTKPSLSLTTSPKPAVVQISGQTFMRFDQVMTWSSALLYCRSHHTDLADLQMVTDETGKEALRSIMSETEAWIGLYLNANSGSLSWSSDLGASIPSWLQVPMMVRGLCTALGIYMTYSPKVYSVNCSSLLPFFCFYDSSTGHRASAELPPLFHTSPTEMTEETTPRPGRAVASVGSGTDRRDTAAATEAQHLSSESKEKTSAQKSGHPFGILKADFTISTLMDPEEMKDQFLRQIQEVLKLTLGHEQFRLKWVSFEVNKK

SEQ ID NO: 19205 - protein, 144 aa, Homo sapiens
MVSWGRFICLVVVTMATLSLARPSFSLVEDTTLEPEEPPTKYQISQPEVYVAAPGESLEMPSHPEMMRMTPMVRKILSVRTVTTRVSNCPAPMVPERGAWREVLPVTCLLVDSSAPCCVPRPLPFPAVSTFLTFKPENKPVLLH

SEQ ID NO: 19206 - protein, 81 aa, Homo sapiens
MRCSPGGVWLALAASLLHVSLQGEFQRKLYKELVKNYNPLERPVANDSQPLTVYFSLSLLQIMDVDEKNQVLTTNIWLQMC

SEQ ID NO: 19207 - protein, 114 aa, Homo sapiens
MDLSFMAAQNKDKSRISPSVCDPREDPELAPGKGCVWPGRLPMMGGAFMDSPNEDFSTEYSLFNSSANVHAAANGQGQPEDPPRSSNDAVLLWIAIIATLGNIVVVGVVYAFTF

SEQ ID NO: 19208 - protein, 1479 aa, Homo sapiens
MPPQPPGSQSESSSHPALSQSPMPQERGNYSRPPAYSGVPSASYSGPGPGMGISANNQMHGQGPSQPCGAVPLGRMPSAGMQNRPFPGNMSSMTPSSPGMSQQGGPGMGPPMPTVNRKAQEAAAAVMQAAANSAQSRQGSFPGMNQSGLMASSSPYSQPMNNSSSLMNTQAPPYSMAPAMVNSSAASVGLADMMSPGESKLPLPLKADGKEEGTPQPESKSKDSYSSQGISQPPTPGNLPVPSPMSPSSASISSFHGDESDSISSPGWPKTPSSPKSSSSTTTGEKITKVYELGNEPERKLWVDRYLTFMEERGSPVSSLPAVGKKPLDLFRLYVCVKEIGGLAQVNKNKKWRELATNLNVGTSSSAASSLKKQYIQYLFAFECKIERGEEPPPEVFSTGDTKKQPKLQPPSPANSGSLQGPQTPQSTGSNSMAEVPGDLKPPTPASTPHGQMTPMQGGRSSTISVHDPFSDVSDSSFPKRNSMTPNAPYQQGMSMPDVMGRMPYEPNKDPFGGMRKVPGSSEPFMTQGQMPNSSMQDMYNQSPSGAMSNLGMGQRQQFPYGASYDRRHEPYGQQYPGQGPPSGQPPYGGHQPGLYPQQPNYKRHMDGMYGPPAKRHEGDMYNMQYSSQQQEMYNQYGGSYSGPDRRPIQGQYPYPYSRERMQGPGQIQTHGIPPQMMGGPLQSSSSEGPQQNMWAARNDMPYPYQNRQGPGGPTQAPPYPGMNRTDDMMVPDQRINHESQWPSHVSQRQPYMSSSASMQPITRPPQPSYQTPPSLPNHISRAPSPASFQRSLENRMSPSKSPFLPSMKMQKVMPTVPTSQVTGPPPQPPPIRREITFPPGSVEASQPVLKQRRKITSKDIVTPEAWRVMMSLKSGLLAESTWALDTINILLYDDSTVATFNLSQLSGFLELLVEYFRKCLIDIFGILMEYEVGDPSQKALDHNAARKDDSQSLADDSGKEEEDAECIDDDEEDEEDEEEDSEKTESDEKSSIALTAPDAAADPKEKPKQASKFDKLPIKIVKKNNLFVVDRSDKLGRVQEFNSGLLHWQLGGGDTTEHIQTHFESKMEIPPRRRPPPPLSSAGRKKEQEGKGDSEEQQEKSIIATIDDVLSARPGALPEDANPGPQTESSKFPFGIQQAKSHRNIKLLEDEPRSRDETPLCTIAHWQDSLAKRCICVSNIVRSLSFVPGNDAEMSKHPGLVLILGKLILLHHEHPERKRAPQTYEKEEDEDKGVACSKDEWWWDCLEVLRDNTLVTLANISGQLDLSAYTESICLPILDGLLHWMVCPSAEAQDPFPTVGPNSVLSPQRLVLETLCKLSIQDNNVDLILATPPFSRQEKFYATLVRYVGDRKNPVCREMSMALLSNLAQGDALAARAIAVQKGSIGNLISFLEDGVTMAQYQQSQHNLMHMQPPPLEPPSVDMMCRAAKALLAMARVDENRSEFLLHEGRLLDISISAVLNSLVASVICDVLFQIGQL

SEQ ID NO: 19209 - protein, 258 aa, Homo sapiens
MAVFVVLLALVAGVLGNEFSILKSPGSVVFRNGNWPIPGERIPDVAALSMGFSVKEDLSWPGLAVGNLFHRPRATVMVMVKGVNKLALPPGSVISYPLENAVPFSLDSVANSIHSLFSEETPVVLQLAPSEERVYMVGKANSVFEDLSVTLRQLRNRLFQENSVLSSLPLNSLSRNNEVDLLFLSELQVLHDISSLLSRHKHLAKDHSPDLYSLELAGLDEIGKRYGEDSEQFRDASKILVDALQKMTCTVFMVGMQW

SEQ ID NO: 19210 - protein, 287 aa, Homo sapiens
MFANLKYVSLGILVFQTTSLVLTMRYSRTLKEEGPRYLSSTAVVVAELLKIMACILLVYKDSKCSLRALNRVLHDEILNKPMETLKLAIPSGIYTLQNNLLYVALSNLDAATYQWPSDSQLDSKELSAGSQFVGLMAVLTACFSSGFAGVYFEKILKETKQSVWIRNIQLGFFGSIFGLMGVYIYDGELVSKNGFFQGYNRLTWIVVVLQALGGLVIAAVIKYADNILKGFATSLSIILSTLISYFWLQDFVPTRVSLCRQAGVLWRDLGLLQPPTPWFKGFSCLSL

SEQ ID NO: 19211 - protein, 970 aa, Homo sapiens
MLLFFTLGLLIHFVFFASIFDIYFTSPLVHGMTPQFTPLPPPARRLVLFVADGLRADALYELDENGNSRAPFIRNIIMHEGSWGISHTRVPTESRPGHVALIAGFYEDVSAVAKGWKENPVEFDSLFNESKYTWSWGSPDILPMFAKGASGDHVYTYSYDAKREDFGAQDATKLDTWVFDNVKDFFHHARNNQSLFSKINEEKIVFFLHLLGIDTNGHAHRPSSRDYKHNIKKVDDGVKEIVSMFNHFYGNDGKTTFIFTSDHGMTDWGSHGAGHPSETLTPLVTWGAGIKYPQRVSAQQFDDAFLKEWRLENWKRLDVNQADIAPLMTSLIGVPFPLNSVGILPVDYLNNTDLFKAESMFTNAVQILEQFKVKMTQKKEVTLPFLFTPFKLLSDSKQFNILRKARSYIKHRKFDEVVSLCKELIHLALKGLSYYHTYDRFFLGVNVVIGFVGWISYASLLIIKSHSNLIKGVSKEVKKPSHLLPCSFVAIGILVAFFLLIQACPWTYYVYGLLPLPIWYAVLREFQVIQDLVVSVLTYPLSHFVGYLLAFTLGIEVLVLSFFYRYMLTAGLTAFAAWPFLTRLWTRAKMTSLSWTFFSLLLAVFPLMPVVGRKPDISLVMGAGLLVLLLSLCVVTSLMKRKDSFIKEELLVHLLQVLSTVLSMYVVYSTQSSLLRKQGLPLMNQIISWATLASSLVVPLLSSPVLFQRLFSILLSLMSTYLLLSTGYEALFPLVLSCLMFVWINIEQETLQQSGVCCKQKLTSIQFSYNTDITQFRQLYLDDIRRAFFLVFFLVTAFFGTGNIASINSFDLASVYCFLTVFSPFMMGALMMWKILIPFVLVMCAFEAVQLTTQLSSKSLFLIVLVISDIMALHFFFLVKDYGSWLDIGTRQLLACTAWLFMYISASPNRLWMLSDPGLDLNLLHAIRACISHYVIVMSMTIFLVFLNGLAQLLTTKKLRLCGKPKSHFM

SEQ ID NO: 19212 - protein, 1412 aa, Homo sapiens
MAKFGVHRILLLAISLTKCLESTKLLADLKKCGDLECEALINRVSAMRDYRGPDCRYLNFTKGEEISVYVKLAGEREDLWAGSKGKEFGYFPRDAVQIEEVFISEEIQMSTKESDFLCLLGVSYTFDNEDSELNGDYGENIYPYEEDKDEKSSIYESDFQIEPGFYATYESTLFEDQVPALEAPEDIGSTSESKDWEEVVVESMEQDRIPEVHVPPSSAVSGVKEWFGLGGEQAEEKAFESVIEPVQESSFRSRKIAVEDENDLEELNNGEPQTEHQQESESEIDSVPKTQSELASESEHIPKPQSTGWFGGGFTSYLGFGDEDTGLELIAEESNPPLQDFPNSISSDKEATVPCTEILTEKKDTITNDSLSLKPSWFDFGFAILGFAYAKEDKIMLDDRKNEEDGGADEHEHPLTSELDPEKEQEIETIKIIETEDQIDKKPVSEKTDESDTIPYLKKFLYNFDNPWNFQNIPKETELPFPKQILDQNNVIENEETGEFSIDNYPTDNTKVMIFKSSYSLSDMVSNIELPTRIHEEVYFEPSSSKDSDENSKPSVDTEGPALVEIDRSVENTLLNSQMVSTDNSLSSQNYISQKEDASEFQILKYLFQIDVYDFMNSAFSPIVILTERVVAALPEGMRPDSNLYGFPWELVICAAVVGFFAVLFFLWRSFRSVRSRLYVGREKKLALMLSGLIEEKSKLLEKFSLVQKEYEGYEVESSLKDASFEKEATEAQSLEATCEKLNRSNSELEDEILCLEKELKEEKSKHSEQDELMADISKRIQSLEDESKSLKSQVAEAKMTFKIFQMNEERLKIAIKDALNENSQLQESQKQLLQEAEVWKEQVSELNKQKVTFEDSKVHAEQVLNDKESHIKTLTERLLKMKDWAAMLGEDITDDDNLELEMNSESENGAYLDNPPKGALKKLIHAAKLNASLKTLEGERNQIYIQLSEVDKTKEELTEHIKNLQTEQASLQSENTHFENENQKLQQKLKVMTELYQENEMKLHRKLTVEENYRLEKEEKLSKVDEKISHATEELETYRKRAKDLEEELERTIHSYQGQIISHEKKAHDNWLAARNAERNLNDLRKENAHNRQKLTETELKFELLEKDPYALDVPNTAFGREHSPYGPSPLGWPSSETRAFLSPPTLLEGPLRLSPLLPGGGGRGSRGPGNPLDHQITNERGESSCDRLTDPHRAPSDTGSLSPPWDQDRRMMFPPPGQSYPDSALPPQRQDRFCSNSGRLSGPAELRSFNMPSLDKMDGSMPSEMESSRNDTKDDLGNLNVPDSSLPAENEATGPGFVPPPLAPIRGPLFPVDARGPFLRRGPPFPPPPPGAMFGASRDYFPPGDFPGPPPAPFAMRNVYPPRGFPPYLPPRPGFFPPPPHSEGRSEFPSGLIPPSNEPATEHPEPQQET

SEQ ID NO: 19213 - protein, 69 aa, Homo sapiens
MAFTLYSLLQAALLCVNAIAVLHEERFLKNIGWGTDQGIGGFGEEPGIKSQLMNLIRSVRTVMRGKKKS

SEQ ID NO: 19214 - protein, 183 aa, Homo sapiens
MAAAMPLALLVLLLLGPGGWCLAEPPRDSLREELVITPLPSGDVAATFQFRTRWDSELQREGVSHYRLFPKALGQLISKYSLRELHLSFTQGFWRTRYWGPPFLQAPSGAELWVWFQDTVTELVPLPDVLPNPHGALPPGFREPSLCGHHHLQPGQRDIRGAPTPDHYISGRHPRHSEDLCHL

SEQ ID NO: 19215 - protein, 499 aa, Homo sapiens
MAAAMPLALLVLLLLGPGGWCLAEPPRDSLREELVITPLPSGDVAATFQFRTRWDSELQREGVSHYRLFPKALGQLISKYSLRELHLSFTQGFWRTRYWGPPFLQAPSGAELWVWFQDTVTDVDKSWKELSNVLSGIFCASLNFIDSTNTVTPTASFKPLGLANDTDHYFLRYAVLPREVVCTENLTPWKKLLPCSSKAGLSVLLKADRLFHTSYHSQAVHIRPVCRNARCTSISWELRQTLSVVFDAFITGQGKKDWSLFRMFSRTLTEPCPLASESRVYVDITTYNQDNETLEVHPPPTTTYQDVILGTRKTYAIYDLLDTAMINNSRNLNIQLKWKRPPENEAPPVPFLHAQRYVSGYGLQKGELSTLLYNTHPYRAFPVLLLDTVPWYLRLYVHTLTITSKGKENKPSYIHYQPAQDRLQPHLLEMLIQLPANSVTKVSIQFERALLKWTEYTPDPNHGFYVSPSVLSALVPSMVAAKPVDWEESPLFNSLLPWT

SEQ ID NO: 19216 - protein, 684 aa, Homo sapiens
MSLHQFLLEPITCHAWNRDRTQIALSPNNHEVHIYKKNGSQWVKAHELKEHNGHITGIDWAPKSDRIVTCGADRNAYVWSQKDGVWKPTLVILRINRAATFVKWSPLENKFAVGSGARLISVCYFESENDWWVSKHIKKPIRSTVLSLDWHPNNVLLAAGSCDFKCRVFSAYIKEVDEKPASTPWGSKMPFGQLMSEFGGSGTGGWVHGVSFSASGSRLAWVSHDSTVSVADASKSVQVSTLKTEFLPLLSVSFVSENSVVAAGHDCCPMLFNYDDRGCLTFVSKLDIPKQSIQRNMSAMERFRNMDKRATTEDRNTALETLHQNSITSQAAMAYHSFLVEPISCHAWNKDRTQIAICPNNHEVHIYEKSGAKWTKVHELKEHNGQVTGIDWAPESNRIVTCGTDRNAYVWTLKGRTWKPTLVILRINRAARCVRWAPNENKFAVGSGSRVISICYFEQENDWWVCKHIKKPIRSTVLSLDWHPNNVLLAAGSCDFKCRIFSAYIKEVEERPAPTPWGSKMPFGELMFESSSSCGWVHGVCFSASGSRVAWVSHDSTVCLADADKKMAVATLASETLPLLALTFITDNSLVAAGHDCFPVLFTYDAAAGMLSFGGRLDVPKQSSQRGLTARERFQNLDKKASSEGGTAAGAGLDSLHKNSVRSRCSAAARPSARSSAPLAWMAA

SEQ ID NO: 19217 - protein, 580 aa, Homo sapiens
LALLVLLLLGPGGWCLAEPPRDSLREELVITPLPSGDVAATFQFRTRWDSELQREGVSHYRLFPKALGQLISKYSLRELHLSFTQGFWRTRYWGPPFLQAPSGAELWVWFQDTVTEREGSPTPSWDCPDCGARGGVGSRRVIPISGMWIPRGQSPRPTPDRPLSPSDTDHYFLRYAVLPREVVCTENLTPWKKLLPCSSKAGLSVLLKADRLFHTSYHSQAVHIRPVCRNARCTSISWELRQTLSVVFDAFITGQGKKDWSLFRMFSRTLTEPCPLASESRVYVDITTYNQDNETLEVHPPPTTTYQDVILGTRKTYAIYDLLDTAMINNSRNLNIQLKWKRPPENEAPPVPFLHAQRYVSGYGLQKGELSTLLYNTHPYRAFPVLLLDTVPWYLRLYVHTLTITSKGKENKPSYIHYQPAQDRLQPHLLEMLIQLPANSVTKVSIQFERALLKWTEYTPDPNHGFYVSPSVLSALVPSMVAAKPVDWEESPLFNSLFPVSDGSNYFVRLYTEPLLVNLPTPDFSMPYNVICLTCTVVAVCYGSFYNLLTRTFHIEEPRTGGLAKRLANLIRRARGVPPL

SEQ ID NO: 19218 - protein, 41 aa, Homo sapiens
MGTATRRKPHLLLVAAVALVSSSGEDTEAQKSSITFPRSHS

SEQ ID NO: 19219 - protein, 665 aa, Homo sapiens
MVSYWDTGVLLCALLSCLLLTGSSSGSKLKDPELSLKGTQHIMQAGQTLHLQCRGEAAHKWSLPEMVSKESERLSITKSACGRNGKQFCSTLTLNTAQANHTGFYSCKYLAVPTSKKKETESAIYIFISDTGRPFVEMYSEIPEIIHMTEGRELVIPCRVTSPNITVTLKKFPLDTLIPDGKRIIWDSRKGFIISNATYKEIGLLTCEATVNGHLYKTNYLTHRQTNTIIDVQISTPRPVKLLRGHTLVLNCTATTPLNTRVQMTWSYPDEKNKRASVRRRIDQSNSHANIFYSVLTIDKMQNKDKGLYTCRVRSGPSFKSVNTSVHIYDKAFITVKHRKQQVLETVAGKRSYRLSMKVKAFPSPEVVWLKDGLPATEKSARYLTRGYSLIIKDVTEEDAGNYTILLSIKQSNVFKNLTATLIVNVKPQIYEKAVSSFPDPALYPLGSRQILTCTAYGIPQPTIKWFWHPCNHNHSEARCDFCSNNEESFILDADSNMGNRIESITQRMAIIEGKNKMASTLVVADSRISGIYICIASNKVGTVGRNISFYITDVPNGFHVNLEKMPTEGEDLKLSCTVNKFLYRDVTWILLRTVNNRTMHYSISKQKMAITKEHSITLNLTIMNVSLQDSGTYACRARNVYTGEEILQKKEITIRGSEEMLLPK

SEQ ID NO: 19220 - protein, 240 aa, Homo sapiens
MAAAMPLALLVLLLLGPGGWCLAEPPRDSLREELVITPLPSGDVAATFQFRTRWDSELQREGVSHYRLFPKALGQLISKYSLRELHLSFTQGFWRTRYWGPPFLQAPSGAELWVWFQDTVTDVDKSWKELSNVLSGIFCASLNFIDSTNTVTPTASFKPLGLANDTDHYFLRYAVLPREVVCTENLTPWKKLLPCSSKAGLSVLLKADRLFHTSYHSQAVHIRPVCRHLLGAEADPVSCI

SEQ ID NO: 19221 - protein, 144 aa, Homo sapiens
SLLLLVTSVTLLVARVFQKAVDQSIEKKIVLRNGTEAFDSWEKPPLPVYTQFYFFNVTNPEEILRGETPRVEEVGPYTYRELRNKANIQFGDNGTTISAVSNKAYVFERDQSVGDPKIDLIRTLNIPVLSGPRCTSSGRSSRPC

SEQ ID NO: 19222 - protein, 72 aa, Homo sapiens
MAVLWRLSAVCGALGGRALLLRTPVVRPAHISAFLQDRPIPEWCGVQHIHLSPSHHCWSAVVRSRLTATSTF

SEQ ID NO: 19223 - protein, 441 aa, Homo sapiens
MAAAMPLALLVLLLLGPGGWCLAEPPRDSLREELVITPLPSGDVAATFQFRTRWDSELQREGGLSVLLKADRLFHTSYHSQAVHIRPVCRNARCTSISWELRQTLSVVFDAFITGQGKKDWSLFRMFSRTLTEPCPLASESRVYVDITTYNQDNETLEVHPPPTTTYQDVILGTRKTYAIYDLLDTAMINNSRNLNIQLKWKRPPENEAPPVPFLHAQRYVSGYGLQKGELSTLLYNTHPYRAFPVLLLDTVPWYLRLYVHTLTITSKGKENKPSYIHYQPAQDRLQPHLLEMLIQLPANSVTKVSIQFERALLKWTEYTPDPNHGFYVSPSVLSALVPSMVAAKPVDWEESPLFNSLFPVSDGSNYFVRLYTEPLLVNLPTPDFSMPYNVICLTCTVVAVCYGSFYNLLTRTFHIEEPRTGGLAKRLANLIRRARGVPPL

SEQ ID NO: 19224 - protein, 495 aa, Homo sapiens
MAAAMPLALLVLLLLGPGGWCLAEPPRDSLREELVITPLPSGDVAATFQFRTRWDSELQREGVSHYRLFPKALGQLISKYSLRELHLSFTQGFWRTRYWGPPFLQAPSGAELWVWFQDTVTDVDKSWKELSNVLSGIFCASLNFIDSTNTVTPTASFKPLGLANDTDHYFLRYAVLPREVVCTENLTPWKKLLPCSSKAGLSVLLKADRLFHTSYHSQAVHIRPVCRNARCTSISWELRQTLSVVFDAFITGQGKKDWSLFRMFSRTLTEPCPLASESRVYVDITTYNQDNETLEVHPPPTTTYQDVILGTRKTYAIYDLLDTAMINNSRNLNIQLKWKRPPENEAPPVPFLHAQRYVSGYGLQKGELSTLLYNTHPYRAFPVLLLDTVPWYLRLYVHTLTITSKGKENKPSYIHYQPAQDRLQPHLLEMLIQLPANSVTKVSIQFERALLKWTEYTPDPNHGFYVSPSVLSALVPSMVAAKPVDWEESPLFNSL

SEQ ID NO: 19225 - protein, 140 aa, Homo sapiens
MAAAMPLALLVLLLLGPGGWCLAEPPRDSLREELVITPLPSGDVAATFQFRTRWDSELQREGVSHYRLFPKALGQLISKYSLRELHLSFTQGFWRTRYWGPPFLQAPSGAELWVWFQDTVTEFSSQLWTLKEGAEVAPGQ

SEQ ID NO: 19226 - protein, 188 aa, Homo sapiens
MIRYFTSNPASKVLCSPMLLSTFSHFSLFHMAANMYVLWSFSSSIVNILGQEQFMAVYLSAGVISNFVSYVGKVATGRYGPSLGASGAIMTVLAAVCTKIPEGRLAIIFLPMFTFTAGNALKAIIAMDTAGMILGWKFFDHAAHLGGALFGIWYVTYGHELIWKNREPLVKIWHEIRTNGPKKGGGSK

SEQ ID NO: 19227 - protein, 128 aa, Homo sapiens
MAAAMPLALLVLLLLGPGGWCLAEPPRDSLREELVITPLPSGDVAATFQFRTRWDSELQREGVSHYRLFPKALGQLISKYSLRELHLSFTQGFWRTRYWGPPFLQAPSGAELWVWFQDTVTEQASLCC

SEQ ID NO: 19228 - protein, 361 aa, Homo sapiens
MKRLPLLVVFSTLLNCSYTQNCTKTPCLPNAKCEIRNGIEACYCNMGFSGNGVTICEDDNECGNLTQSCGENANCTNTEGSYYCMCVPGFRSSSNQDRFITNDGTVCIENVNANCHLDNVCIAANINKTLTKIRSIKEPVALLQEVYRNSVTDLSPTDIITYIEILAESSSLLGYKNNTISAKDTLSNSTLTEFVKTVNNFVQRDTFVVWDKLSVNHRRTHLTKLMHTVEQATLRISQSFQKTTEFDTNSTDIALKVFFFDSYNMKHIHPHMNMDGDYINIFPKRKAAYDSNGNVAVAFVYYKSIGPLLSSSDNFLLKPQNYDNSEEEERVISSVISVSMSSNPPTLYELEKITFTLSHRK

SEQ ID NO: 19229 - protein, 63 aa, Homo sapiens
MRFFCARCCSFGPEMPAVQLLLLACLVWDVGARTAQLRKANDQRSFYVEFGHFGLPGTEVRAN

SEQ ID NO: 19230 - protein, 825 aa, Homo sapiens
MSSSPVNVKKLKVSELKEELKKRRLSDKGLKAELMERLQAALDDEEAGGRPAMEPGNGSLDLGGDSAGRSGAGLEQEAAAGGDEEEEEEEEEEEGISALDGDQMELGEENGAAGAADSGPMEEEEAASEDENGDDQGFQEGEDELGDEEEGAGDENGHGEQQPQPPATQQQQPQQQRGAAKEAAGKSSGPTSLFAVTVAPPGARQGQQQAGGKKKAEGGGGGGRPGAPAAGDGKTEQKGGDKKRGVKRPREDHGRGYFEYIEENKYSRAKSPQPPVEEEDEHFDDTVVCLDTYNCDLHFKISRDRLSASSLTMESFAFLWAGGRASYGVSKGKVCFEMKVTEKIPVRHLYTKDIDIHEVRIGWSLTTSGMLLGEEEFSYGYSLKGIKTCNCETEDYGEKFDENDVITCFANFESDEVELSYAKNGQDLGVAFKISKEVLAGRPLFPHVLCHNCAVEFNFGQKEKPYFPIPEEYTFIQNVPLEDRVRGPKGPEEKKDCEVVMMIGLPGAGKTTWVTKHAAENPGKYNILGTNTIMDKMMVAGFKKQMADTGKLNTLLQRAPQCLGKFIEIAARKKRNFILDQTNVSAAAQRRKMCLFAGFQRKAVVVCPKDEDYKQRTQKKAEVEGKDLPEHAVLKMKGNFTLPEVAECFDEITYVELQKEEAQKLLEQYKEESKKALPPEKKQNTGSKKSNKNKSGKNQFNRGGGHRGRGGFNMRGGNFRGGAPGNRGGYNRRGNMPQRGGGGGGSGGIGYPYPRAPVFPGRGSYSNRGNYNRGGMPNRGNYNQNFRGRGNNRGYKNQSQGYNQWQQGQFWGQKPWSQHYHQGYY

SEQ ID NO: 19231 - protein, 105 aa, Homo sapiens
MAKSGLRQDPQSTAAATVLKRAVELDSESRYPQALVCYQEGIDLLLQVLKGTKDNTKRCNLREKISKYMDRAENIKKYLDQEKEEAKETPGISLRFCCESKHLRS

SEQ ID NO: 19232 - protein, 408 aa, Homo sapiens
MAWRGWAQRGWGCGQAWGASVGGRSCEELTAVLTPPQLLGRRFNFFIQQKCGFRKAPRKVEPRRSDPGTSGEAYKRSALIPPVEETVFYPSPYPIRSLIKPLFFTVGFTGCAFGSAAIWQYESLKSRVQSYFDGIKADWLDSIRPQKEGDFRKEINKWWNNLSDGQRTVTGIIAANVLVFCLWRVPSLQRTMIRYFTSNPASKVLCSPMLLSTFSHFSLFHMAANMYVLWSFSSSIVNILGQEQFMAVYLSAGVISNFVSYVGKVATGRYGPSLGASGAIMTVLAAVCTKIPEGRLAIIFLPMFTFTAGNALKAIIAMDTAGMILGWKFFDHAAHLGGALFGIQEFQAWTGVKPSRSTKTKPARVITTHTSGWDSSPGAGFQVPEVRKKFTPNPSAIFQASAPRILNV

SEQ ID NO: 19233 - protein, 115 aa, Homo sapiens
MARTPGALLLAPLLLLQLATPALVYQDYQYLGQQGEGDSWEQLRLQHLKEVEDSILGPWGKWRCLCDLGKQERSREVVGTAPGPVFMDPEKLIQLRPCRQRDCPSCKPFDCDWRL

SEQ ID NO: 19234 - protein, 354 aa, Homo sapiens
MAAAMPLALLVLLLLGPGGWCLAEPPRDSLREELVITPLPSGDVAATFQFRTRWDSELQREGVSHYRLFPKALGQLISKYSLRELHLSFTQGFWRTRYWGPPFLQAPSGAELWVWFQDTVTDVDKSWKELSNVLSGIFCASLNFIDSTNTVTPTASFKPLGLANGLSVLLKADRLFHTSYHSQAVHIRPVCRNARCTSISWELRQTLSVVFDAFITGQGKKDWSLFRMFSRTLTEPCPLASESRVYVDITTYNQDNETLEVHPPPTTTYQDVILGTRKTYAIYDLLDTAMINNSRNLNIQLKWKRPPENEAPPVPFLHAQRYVSGYGLQKGELSTLLYNTHPYRAFPVLLLDTV

SEQ ID NO: 19235 - protein, 363 aa, Homo sapiens
MLVMAPRTVLLLLSAALALTETWAGSHSMRYFYTSVSRPGRGEPRFISVGYVDDTQFVRFDSDAASPREEPRAPWIEQEGPEYWDRNTQIYKAQAQTDRESLRNLRGYYNQSEAGSHTLQSMYGCDVGPDGRLLRGHDQYAYDGKDYIALNEDLRSWTAADTAAQITQRKWEAAREAEQRRAYLEGECVEWLRRYLENGKDKLERADPPKTHVTHHPISDHEATLRCWALGFYPAEITLTWQRDGEDQTQDTELVETRPAGDRTFQKWAAVVVPSGEEQRYTCHVQHEGLPKPLTLRWEPSSQSTVPIVGIVAGLAVLAVVVIGAVVAAVMCRRKSSGRKGGSYSQAACSDSAQGSDVSLTAK

SEQ ID NO: 19236 - protein, 191 aa, Homo sapiens
MAAAMPLALLVLLLLGPGGWCLAEPPRDSLREELVITPLPSGDVAATFQFRTRWDSELQREGVSHYRLFPKALGQLISKYSLRELHLSFTQGFWRTRYWGPPFLQAPSVWINLGRSSVMSSQGSSAPLSTSSTPPTQSLPLPPSNPWVWPMTLTTTFCAMLCCRGRWSAPKTSPPGRSSCPVVPRQASLCC

SEQ ID NO: 19237 - protein, 126 aa, Homo sapiens; identical to SEQ ID NO: 18618

SEQ ID NO: 19238 - protein, 59 aa, Homo sapiens
MNIIDIVAIIPYFITLGTELAEKPEDAQQGQQAMSLAILRVIRNADLCKARRVSGEGSI

SEQ ID NO: 19239 - protein, 307 aa, Homo sapiens
MFANLKYVSLGILVFQTTSLVLTMRYSRTLKEEGPRYLSSTAVVVAELLKIMACILLVYKDSKCSLRALNRVLHDEILNKPMETLKLAIPSGIYTLQNNLLYVALSNLDAATYQVTYQLKILTTALFSVSMLSKKLGVYQWLSLVILMTGVAFVQWPSDSQLDSKELSAGSQFVGLMAVLTACFSSGFAGVYFEKILKETKQSVWIRNIQLGFFGSIFGLMGVYIYDGELVSKNGFFQGYNRLTWIVVVLQALGGLVIAAVIKYADNILKGFATSLSIILSTLISYFWLQDFVPTRWLYASSSSSCS

SEQ ID NO: 19240 - protein, 767 aa, Homo sapiens
MVGQRAQHSPVSLLLLIHLCLLHLRASGQPHPTPEAPVEEVVSVQGVRGGSVELACGSGPAPLLVLWSFTPLGSLVPRPVAVTDGAMSKVEAIASALGVVSLRNSSLVLGELHEGARGHFLCQVLHVAGGQLHAAYSHLTLAVLVPVSKPQVRLSNPSPVEGASVVATCAVREGTEPVTFAWQHRAPRGLGEALVGVTEPLFQLDPVNRTHLGWYMCSASNSVNRLSSDGAFLDVIYGPDKPVITMEPLGLTEEGFWASEREEVTLSCLAASNPPSHYVWLRDHTQVHTGPTYVIARAGRVHTGLYTCLARNSYLDTRTQTTVQLTIYYPPEGQPSCAVHPSPEAVTLLCAWPGGLPPAQLQWEGPQGPGPTAPSNVTWSHAAAQLPSGSVFTCTGQHPALAPPALCTVMLWEPLGRPTCWSTATMGDQFIMLSCEWPGGEPPATLGWLDEQQQPLGGSSSSMAVHLLQAQEDLAGREFTCRGTHLLRTPDPHCHLQLEAPQLDVAEPRVSVLEGGEAWLECSLRGGTPPAQLLWLGPQQQKVDPGTSGFMLHPEGAQLRLGIYDADPAHHRGTYQCVARNAVGNSSQSVLLEVLRYPAPPNVTISRLTYGRHRREVQLQWAILGPGNLTGFLVQRKASALGPGAGAWETAASDIEPESRGRRLGGLDPGVLYAFRILALNHHTAGHPSEVKIPADPPFSAYPAVLGAAGTGMVVATVASLLVFQYAARHPETFPRLETPTTTPGLDPAQETTDSPVNVTITVTATP

SEQ ID NO: 19241 - protein, 1085 aa, Homo sapiens
MGTATRRKPHLLLVAAVALVSSSAWSSALGSQTTFGPVFEDQPLSVLFPEESTEEQVLLACRARASPPATYRWKMNGTEMKLEPGSRHQLVGGNLVIMNPTKAQDAGVYQCLASNPVGTVVSREAILRFGFLQEFSKEERDPVKAHEGWGVMLPCNPPAHYPGLSYRWLLNEFPNFIPTDGRHFVSQTTGNLYIARTNASDLGNYSCLATSHMDFSTKSVFSKFAQLNLAAEDTRLFAPSIKARFPAETYALVGQQVTLECFAFGNPVPRIKWRKVDGSLSPQWTTAEPTLQIPSVSFEDEGTYECEAENSKGRDTVQGRIIVQAQPEWLKVISDTEADIGSNLRWGCAAAGKPRPTVRWLRNGEPLASQNRVEVLAGDLRFSKLSLEDSGMYQCVAENKHGTIYASAELAVQALAPDFRLNPVRRLIPAARGGEILIPCQPRAAPKAVVLWSKGTEILVNSSRVTVTPDGTLIIRNISRSDEGKYTCFAENFMGKANSTGILSVRDATKITLAPSSADINLGDNLTLQCHASHDPTMDLTFTWTLDDFPIDFDKPGGHYRRTNVKETIGDLTILNAQLRHGGKYTCMAQTVVDSASKEATVLVRGPPGPPGGVVVRDIGDTTIQLSWSRGFDNHSPIAKYTLQARTPPAGKWKQVRTNPANIEGNAETAQVLGLTPWMDYEFRVIASNILGTGEPSGPSSKIRTREAAPSVAPSGLSGGGGAPGELIVNWTPMSREYQNGDGFGYLLSFRRQGSTHWQTARVPGADAQYFVYSNESVRPYTPFEVKIRSYNRRGDGPESLTALVYSAEEEPRVAPTKVWAKGVSSSEMNVTWEPVQQDMNGILLGYEIRYWKAGDKEAAADRVRTAGLDTSARVSGLHPNTKYHVTVRAYNRAGTGPASPSANATTMKPPPRRPPGNISWTFSSSSLSIKWDPVVPFRNESAVTGYKMLYQNDLHLTPTLHLTGKNWIEIPVPEDIGHALVQIRTTGPGGDGIPAEVHIVRNGEMALWDPIRTPPLESSPRPGRNTRHEQVEELERSAHLTILQSKEEGQALGPRALPPSPSSSSKDPDAVPDNSLGAPACPSG

SEQ ID NO: 19242 - protein, 2226 aa, Homo sapiens
MVLAGLIRKLGHQLAEIRERALKSILCKIEHNLICYADLIQERQLFLHLLEWFNFPSVPMKEEVLNLLSRLVKYPPAVQHLVDVGAVEFLSKLRSNVEPNLQAEIDGILDGLFLLPSEVPALSSASYQTNQTELSKNPEILTGYFPQDKSNFQQMEVPPRPVVNQTVKCLKFSTFPWLPLTTTDRHVLSSNESSLRSSNHTLIWNTCELLKDVIMQDFPAEIFLQRPKIVQSLLSLLKLAFGDGKHRLALQSVSCLQQLCMYLRNRLNFHRDPGFFSNKHDTVSQNSSLSYCHEARGTHHSQNPSPGSSSPRPSVVGRTGQRPRGDGQDWDAASSSGSSSHAHVNSRISVHSPLDMGHIDLPELETEDTLELQFQQLSLPQFCVSILESAVPLLRTGSRQVIIRVLELLTEDMTLIGEAISTDIWDDSSLFGIDMKEKLLLVLGALGETMCYHKSSISLEQPEVMLVHHRMAFISISLFAVRLLQTLLPVEKASEFLSEPMSTALFLLSLDMPISLEYPNIHEAVVAYLEQLNSENYSIYKRTAEAVYSIECTCNFLSDIGKEGEKNLLELVELADQALRSFSYHQHFPLIKEIISICSKIWKSAQASPLLQGESQKVLLHMLSHPLPRVKAETYHCCLEITKECLGVHNVTKPVSSLCNGIHFLLHPKVLYEISVFGIQEPESEVNTAAKAILLYLLQGRLMMTALTWNKFIESLCPVIPILQGYADTEDPLGNCILLLSKASSDTEEMLPCTTRLKSMLRLLLVKKPSVRSLALKLLAFHLTSEEGADTKRPLIDARVLSRVTDLFIGKKPIELRLDDRRELVIKLETVEKVYEIFTSDDVDLVLRKSAAEQLAVIMQDIKMHAVVKKLCLIDKIIEYLNECVSQDGKVVECLVQPCLTLLRKVLCGDPVMRVSLSQQSSLLTVLFRVSLIFHEDCSVVTEVGALFCLLLFDEVSRMDMWSVNPSNKPSLPSVFSLPVSVFRRYHLPVHVIGHHAVSPYSIVLPLSADCLALKPVSDMLRIAWNLSWYHGSDNLLKQMNSETKTQEILDALKLSTEDILTLKITHMASGLQDCLHSIVQAATHREVRAAVTRMSFYLLNDRLSLKGCPGPCGVTLKSLAWHTALNRFLQVLPACTEDEKLLIDIIHFLNKLIKEQRKNSSLELLNWILELLLRHSANPLLDLLVLTESQAREETDDIRTAVRQQLQKELIALFDTLLLNFMEVTDRKCSELLYVFQTQLALKLLQCLKVTDAPHFYGLPSLERTLRGMANLTAFPGWSSHSPLTKPLDICVKYLSGLLEVITSFYVERGGNAMSFMGKGVTKSTILCLLHLSHEMMAQAGSLEWMSLWFLPLGSHSEEHIPTQQGLAWLIPLWVDRDPEVRFTSLGLGSALTTLETGCVALANSCQNISGGLWGTVVNILLDQSECSMVRREAAFILQNLLVIPMPTEIIKDYTWQGPCVHDEDSGLSLIGKPALQALLYHCHFYEHLNQMVKHCYLGRCMFDLNFSAFDRNSESNDLNGLDDSFKFWRAPSRTSQDRDPSSLSTSETTVAPSLGSTEFQPLVQSTTLLPEASHDQFVAQGHQESTSPRPPHDSSLSAPLPKLCVFVTPSLLSAMCSLLDNLLTIAPRDTAKAFRQAHLIELLCSIADATLIQTCVQELRALLPSSPPAEHTQAQVSFLLEYLSSLSRLLQSCLLVEPDLVIQDELVKPLITNIIGILTICTKDVLDKELISAFYHTWTHLFNLLAMLLRKAGAITLPFVTVALAKHWTAAIDMFCTCAGLSATCPALYTASLQFLSVLLTEEAKGHLQAKSKTHLCCSPTVASLLDDSQENQKSLEQLSDVILQCYEGKSSKDILKRVAANALMSLLAVSRRAQKHALKANLIDNCMEQMKHINAQLNLDSLRPGKAALKKKEDGVIKELSIAMQLLRNCLYQNEECKEAALEAHLVPVLHSLWPWILMDDSLMQISLQLLCVYTANFPNGCSSLCWSSCGQHPVQATHRGAVSNSLMLCILKLASQMPLENTTVQQMVFMLLSNLALSHDCKGVIQKSNFLQNFLSLALPKGGNKHLSNLTILWLKLLLNISSGEDGQQMILRLDGCLDLLTEMSKYKHKSSPLLPLLIFHNVCFSPANKPKILANEKVITVLAACLESENQNAQRIGAAALWALIYNYQKAKTALKSPSVKRRVDEAYSLAKKTFPNSEANPLNAYYLKCLENLVQLLNSS

SEQ ID NO: 19243 - protein, 356 aa, Homo sapiens
MWELVALLLLTLAYLFWPKRRCPGAKYPKSLLSLPLVGSLPFLPRHGHMHNNFFKLQKKYGPIYSVRMGTKTTVIVGHHQLAKEVLIKKGKDFSGRPQMEKFRSDSITNMLDTLMQAKMNSDNGNAGPDQDSELLSDNHILTTIGDIFGAGVETTTSVVKWTLAFLLHNPQVKKKLYEEIDQNVGFSRTPTISDRNRLLLLEATIREVLRLRPVAPMLIPHKANVDSSIGEFAVDKGTEVIINLWALHHNEKEWHQPDQFMPERFLNPAGTQLISPSVSYLPFGAGPRSCIGEILARQELFLIMAWLLQRFDLEVPDDGQLPSLEGIPKVVFLIDSFKVKIKVRQAWREAQAEGST

SEQ ID NO: 19244 - protein, 1027 aa, Homo sapiens
MRAALWTLGLGPLLLNLWAVPIGGPGALRLAYRHSTCDGVVLVRHHGAWGYVCNQEWTLAEASVVCRQLGCGPAVGAPKYVPLPGEMAQPWLHNVSCRGNESSLWECSLGSWCQSPCPHAWVVVALCSNGTFRELRLVKGRSPCAGLPEIRNVNGVDRLCVLHVEEAMVFCRELGCGPVLQAPRRDVGVVRKYLACRGTEPTIRSCRLDNNFRSGCDLRLDAEVVCSGHTEARLVGGEHPCAGRLEVTWGTVCDAALDLATAHVVCRELQCGAVVSTPEGARFGRGSGPVWTEAFRCAGNESLLFHCPRGRGSQCGHGHDAGLRCSEFRMVNGSSSCEGRVEFQVQGSWAPLCATHWDIADATVLCHQLNCGNAVAAPGGGHFGDGDAAIWPDAFHCEGTESYLWNCPVSTLGAPACAPGNTASAVCSGLAHALRLREGQSRCDGRVEVSLDGVWGRVLDDAWDLRGAGVVCRQLGCRGAQQAYDAPAPSRGSVQVALSRVRCLGTETRLTQCNVSATLQEPAGTSRDAGVVCSGEVGTASPMARRHGIPGALTLSLHREPQGAAGRGAGALHGGAWGTVCDDAWDLRDAHVVCRQLGCGRALSALGAAHFGAGAGRIWLDELGCQGHESALWQCPSAGWGRHDWRHKEDAGVFCSESVALRLRGGTCCCAGWLDVFYNGTWGAMCSNALKDLSLSIICKQLGCGVWGVGLAGEQALPLCGHRDRLGGQHRVPQAAQLHSVAMPFPPMAPALLRPSRAGLSEDRPQAAGEPLNCSSWLGCPEEGALRVRGGEDRCSGRVELWHAGSWGTVCDDGWDLADAEVVCRQLGCGRAVAALGAAAFGPGSGPVWLDEVGCRGSEASLWGCPAERWGRGDRAHEEDAGVRCWEPGPGPPLPAAPFRTFWVVSVVLGSLLGLLLLGLMAFLILPRVTQAMQRGLGRSEVSPGEAIYDVIGEMPPAGLYEEIMEAEAVLQDEEDGSVVKVDTEAAVSGEVSNLLEGQSIRAEGGHSRPVSQGYDEAAFPLEEMTL

SEQ ID NO: 19245 - protein, 393 aa, Homo sapiens
MAAAMPLALLVLLLLGPGGWCLAEPPRDSLREELVITPLPSGDVAATFQFRTRWDSELQREGVSHYRLFPKALGQLISKYSLRELHLSFTQGFWRTRYWGPPFLQAPSVWINLGRSSVMSSQGSSAPLSTSSTPPTQSLPLPPSNPWVWPMAGLSVLLKADRLFHTSYHSQAVHIRPVCRNARCTSISWELRQTLSVVFDAFITGQGKKDWSLFRMFSRTLTEPCPLASESRVYVDITTYNQDNETLEVHPPPTTTYQDVILGTRKTYAIYDLLDTAMINNSRNLNIQLKWKRPPENEAPPVPFLHAQRYVSGYGLQKGELSTLLYNTHPYRAFPVLLLDTVPWYLRLYVHTLTITSKGKENKPSYIHYQPAQDRLQPHLLEMLIQLPANSVT

SEQ ID NO: 19246 - protein, 318 aa, Homo sapiens
MAAAMPLALLVLLLLGPGGWCLAEPPRDSLREELVITPLPSGDVAATFQFRTRWDSELQREGVWINLGRSSVMSSQGSSAPLSTSSTPPTQSLPLPPSNPWVWPMAGLSVLLKADRLFHTSYHSQAVHIRPVCRNARCTSISWELRQTLSVVFDAFITGQGKKDWSLFRMFSRTLTEPCPLASESRVYVDITTYNQDNETLEVHPPPTTTYQDVILGTRKTYAIYDLLDTAMINNSRNLNIQLKWKRPPENEAPPVPFLHAQRYVSGYGLQKGELSTLLYNTHPYRAFPVLLLDTVPWYLRLYVHTLTITSKGKENKP

SEQ ID NO: 19247 - protein, 314 aa, Homo sapiens
MAAAMPLALLVLLLLGPGGWCLAEPPRDSLREELVITPLPSGDVAATFQFRTRWDSELQREGVSHYRLFPKALGQLISKYSLRELHLSFTQGFWRTRYWGPPFLQAPSGAELVDKSWKELSNVLSGIFCASLNFIDSTNTVTPTASFKPLGLANDTDHYFLRYAVLPREVVCTENLTPWKKLLPCSSKAGLSVLLKADRLFHTSYHSQAVHIRPVCRNARCTSISWELRQTLSVVFDAFITGQGKKDWSLFRMFSRTLTEPCPLASESRVYVDITTYNQDNETLEVHPPPTTTYQDVILGTRKTYAIYDLLDTA

SEQ ID NO: 19248 - protein, 361 aa, Homo sapiens
MASANSSAGIRWSRQETRTLLSILGEAEYIQRLQTVHHNADVYQAVSKRMQQEGFRRTERQCRSKFKVLKALYLKAYVAHATSMGEPPHCPFYDTLDQLLRNQIVTDPDNLMEDAAWAKHCDQNLVASDAPGEEGTGILKSKRTQAADHQPILKTVKASDEDCQLRISDRIRETSDLEDSWDESSGAGCSQGTPSYSSSHSLFRGAVAPCQSSPMARLGVSGEPSPCTSTNRSTPGVASTPQTPVSSSRAGFVSGGDRPLTSEPPPRWARRRRRSVARTIAAELAENRRLARELSKREEEKLDRLIAIGEEASAQQDTANELRRDAVIAVRRLATAVEEATGAFQLGLEKLLQRLISNTKS

SEQ ID NO: 19249 - protein, 402 aa, Homo sapiens
MSFLVSKPERIRTNDASSESIASFSKQEVMSSFLPEGGCYELLTVIGKGFEDLMTVNLARYKPTGEYVTVRRINLEACSNEMVTFLQGELHVSKLFNHPNIVPYRATFIADNELWVVTSFMAYGSAKDLICTHFMDGMNELAIAYILQGVLKALDYIHHMGYVHRSVKASHILISVDGKVYLSGLRSNLSMISHGQRQRVVHDFPKYSVKVLPWLSPEVLQQNLQGYDAKSDIYSVGITACELANGHVPFKDMPATQMLLEKLNGTVPCLLDTSTIPAEELTMSPSRSVANSGLSDSLTTSTPRPSNGDSPSHPYHRTFSPHFHHFVEQCLQRNPDARPSASTLLNHSFFKQIKRRASEALPELLRPVTPITNFEGSQSQDHSGIFGLVTNLEELEVDDWEF

SEQ ID NO: 19250 - protein, 1078 aa, Homo sapiens
MAFYSCCWVLLALTWHTSAYGPDQRAQKKGDIILGGLFPIHFGVAAKDQDLKSRPESVECIRYNFRGFRWLQAMIFAIEEINSSPALLPNLTLGYRIFDTCNTVSKALEATLSFVAQNKIDSLNLDEFCNCSEHIPSTIAVVGATGSGVSTAVANLLGLFYIPQVSYASSSRLLSNKNQFKSFLRTIPNDEHQATAMADIIEYFRWNWVGTIAADDDYGRPGIEKFREEAEERDICIDFSELISQYSDEEEIQHVVEVIQNSTAKVIVVFSSGPDLEPLIKEIVRRNITGKIWLASEAWASSSLIAMPQYFHVVGGTIGFALKAGQIPGFREFLKKVHPRKSVHNGFAKEFWEETFNCHLQEGAKGPLPVDTFLRGHEESGDRFSNSSTAFRPLCTGDENISSVETPYIDYTHLRISYNVYLAVYSIAHALQDIYTCLPGRGLFTNGSCADIKKVEAWQVLKHLRHLNFTNNMGEQVTFDECGDLVGNYSIINWHLSPEDGSIVFKEVGYYNVYAKKGERLFINEEKILWSGFSREVPFSNCSRDCLAGTRKGIIEGEPTCCFECVECPDGEYSDETDASACNKCPDDFWSNENHTSCIAKEIEFLSWTEPFGIALTLFAVLGIFLTAFVLGVFIKFRNTPIVKATNRELSYLLLFSLLCCFSSSLFFIGEPQDWTCRLRQPAFGISFVLCISCILVKTNRVLLVFEAKIPTSFHRKWWGLNLQFLLVFLCTFMQIVICVIWLYTAPPSSYRNQELEDEIIFITCHEGSLMALGFLIGYTCLLAAICFFFAFKSRKLPENFNEAKFITFSMLIFFIVWISFIPAYASTYGKFVSAVEVIAILAASFGLLACIFFNKIYIILFKPSRNTIEEVRCSTAAHAFKVAARATLRRSNVSRKRSSSLGGSTGSTPSSSISSKSNSEDPFPQPERQKQQQPLALTQQEQQQQPLTLPQQQRSQQQPRCKQKVIFGSGTVTFSLSFDEPQKNAMAHRNSTHQNSLEAQKSSDTLTRHEPLLPLQCGETDLDLTVQETGLQGPVGGDQRPEVEDPEELSPALVVSSSQSFVISGGGSTVTENVVNS

SEQ ID NO: 19251 - protein, 242 aa, Homo sapiens
MAAAMPLALLVLLLLGPGGWCLAEPPRDSLREELVITPLPSGDVAATFQFRTRWDSELQREGVSHYRLFPKALGQLISKYSLRELHLSFTQGFWRTRYWGPPFLQAPSGAELWVWFQDTVTDVDKSWKELSNVLSGIFCASLNFIDSTNTVTPTASFKPLGLANDTDHYFLRYAVLPREVVCTENLTPWKKLLPCSSKGFSYLFPSPPGRPLCAAEGRSLVPHQLPLPGSAYPPCLQKCTLY

SEQ ID NO: 19252 - protein, 90 aa, Homo sapiens
KMTVWILLLLSLYPGFTSQKSDDDYEDYASNKTWVLTPKVPEGDVTVILNNLLEGYDNKLRPDIGVKPTLIHTDMYVNSIGPVNAINMHH

SEQ ID NO: 19253 - protein, 395 aa, Homo sapiens
MDAPARLLAPLLLLCAQQLRGTRAMNDIGDYVGSNLEISWLPNLDGLIAGYARNFRPGIGGPPVNVALALEVASIDHISEANMVGATSLCLRHGVHHDGVPAPELAGQQALLQPHQRDPGSGQPLRGQAVAARHLHRERQVGLVPRRDGGEQAHPAAARRRDPVQHPNHLHCGLRHGPGQIPHGRAGVHAGPGELRLLIGGHRLLLVGEPGAHPRAGQAAAGAVHHHQLPLHHGADELQVRWPVPTAQPALPPAEEPRRVHHPILHALRPAGRHVLGLLLDQPGGGARQGVSRHHHGADDDHAHGQCPLLPATGISHQGTGRLLLDLLCLRVCRPGGVRLCSFQRRLQEEAEGQGQGLQAEGRDGREERHCPLLPLCCRRHAGAGHLPPAAPRPG

SEQ ID NO: 19254 - protein, 394 aa, Homo sapiens
MSFLTNDASSESIASFSKQEVMSSFLPEGGCYELLTVIGKGFEDLMTVNLARYKPTGEYVTVRRINLEACSNEMVTFLQGELHVSKLFNHPNIVPYRATFIADNELWVVTSFMAYGSAKDLICTHFMDGMNELAIAYILQGVLKALDYIHHMGYVHRSVKASHILISVDGKVYLSGLRSNLSMISHGQRQRVVHDFPKYSVKVLPWLSPEVLQQNLQGYDAKSDIYSVGITACELANGHVPFKDMPATQMLLEKLNGTVPCLLDTSTIPAEELTMSPSRSVANSGLSDSLTTSTPRPSNGDSPSHPYHRTFSPHFHHFVEQCLQRNPDARPSASTLLNHSFFKQIKRRASEALPELLRPVTPITNFEGSQSQDHSGIFGLVTNLEELEVDDWEF

SEQ ID NO: 19255 - protein, 505 aa, Homo sapiens
MAAAMPLALLVLLLLGPGGWCLAEPPRDSLREELVITPLPSGDVAATFQFRTRWDSELQREGVSHYRLFPKALGQLISKYSLRELHLSFTQGFWRTRYWGPPFLQAPSGAELWVWFQDTVTDVDKSWKELSNVLSGIFCASLNFIDSTNTVTPTASFKPLGLANDTDHYFLRYAVLPREVVCTENLTPWKKLLPCSSKAGLSVLLKADRLFHTSYHSQAVHIRPVCRNARCTSISWELRQTLSVVFDAFITGQGKKDWSLFRMFSRTLTEPCPLASESRVYVDITTYNQDNETLEVHPPPTTTYQDVILGTRKTYAIYDLLDTAMINNSRNLNIQLKWKRPPENEAPPVPFLHAQRYVSGYGLQKGELSTLLYNTHPYRAFPVLLLDTVPWYLRLYVHTLTITSKGKENKPSYIHYQPAQDRLQPHLLEMLIQLPANSVTKVSIQFERALLKWTEYTPDPNHGFYVSPSVLSALVPSMVAAKPVDWEESPLFNSLEPVTCAALRC

SEQ ID NO: 19256 - protein, 277 aa, Homo sapiens
MLFLFAVIVLQYVCPGTECQLLRLQAFSSPVPDPYRSEDESSARFVPRYNFTRGDLLRKVDFDIKGDDLIVFLHIQKTGGTTFGRHLVRNIQLEQPCECRVGQKKCTCHRPGKRETWLFSRFSTGWSCGLHADWTELTRCVPHIWNWEQSFSISYNRWRIFQILDAASKDKRGSPNTNAGANSPSSTKTRNTSKSGKNFHYITILRDPVSRYLSEWRHVQRGATWKASLHVCDGRPPTSEELPSCYTGDDWSGCPLKEFMDCPYNLANNRQCACSPT

SEQ ID NO: 19257 - protein, 422 aa, Homo sapiens
MANGGGGGGGSSGGGGGGGGSSLRMSSNIHANHLSLDASSSSSSSSSSSSSSSSSSSSSSVHEPKMDALIIPVTMEVPCDSRGQRMWWAFLASSMVTFFGGLFIILLWRTLKYLWTVCCHCGGKTKEAQKINNGSSQADGTLKPVDEKEEAVAAEVGWMTSVKDWAGVMISAQTLTGRVLVVLVFALSIGALVIYFIDSSNPIESCQNFYKDFTLQIDMAFNVFFLLYFGLRFIAANDKLWFWLEVNSVVDFFTVPPVFVSVYLNRSWLGLRFLRALRLIQFSEILQFLNILKTSNSIKLVNLLSIFISTWLTAAGFIHLVENSGDPWENFQNNQALTYWECVYLLMVTMSTVGYGDVYAKTTLGRLFMVFFILGGLAMFASYVPEIIELIGNRKKYGGSYSAVSGRKQCLPATCPKLLLSS

SEQ ID NO: 19258 - protein, 962 aa, Homo sapiens
MTMAGGRRGLVAPQNTFLENIVRRSNDTNFVLGNAQIVDWPIVYSNDGFCKLSGYHRAEVMQKSSTCSFMYGELTDKDTIEKVRQTFENYEMNSFEILMYKKNRTPVWFFVKIAPIRNEQDKVVLFLCTFSDITAFKQPIEDDSCKGWGKFARLTRALTSSRGVLQQLAPSVQKGENVHKHSRLAEVLQLGSDILPQYKQEAPKTPPHIILHYCVFKTTWDWIILILTFYTAILVPYNVSFKTRQNNVAWLVVDSIVDVIFLVDIVLNFHTTFVGPAGEVISDPKLIRMNYLKTWFVIDLLSCLPYDVINAFENVDEGISSLFSSLKVVRLLRLGRVARKLDHYIEYGAAVLVLLVCVFGLAAHWMACIWYSIGDYEIFDEDTKTIRNNSWLYQLAMDIGTPYQFNGSGSGKWEGGPSKNSVYISSLYFTMTSLTSVGFGNIAPSTDIEKIFAVAIMMIGSLLYATIFGNVTTIFQQMYANTNRYHEMLNSVRDFLKLYQVPKGLSERVMDYIVSTWSMSRGIDTEKVLQICPKDMRADICVHLNRKVFKEHPAFRLASDGCLRALAMEFQTVHCAPGDLIYHAGESVDSLCFVVSGSLEVIQDDEVVAILGKGDVFGDVFWKEATLAQSCANVRALTYCDLHVIKRDALQKVLEFYTAFSHSFSRNLILTYNLRKRIVFRKISDVKREEEERMKRKNEAPLILPPDHPVRRLFQRFRQQKEARLAAERGGRDLDDLDVEKGNVLTEHASANHSLVKASVVTVRESPATPVSFQAASTSGVPDHAKLQAPGSECLGPKGGGGDCAKRKSWARFKDACGKSEDWNKVSKAESMETLPERTKASGEATLKKTDSCDSGITKSDLRLDNVGEARSPQDRSPILAEVKHSFYPIPEQTLQATVLEVRHELKEDIKALNAKMTNIEKQLSEILRILTSRRSSQSPQELFEISRPQSPESERDIFGAS

SEQ ID NO: 19259 - protein, 280 aa, Homo sapiens [sequence omitted]

SEQ ID NO: 19260 - protein, 47 aa, Homo sapiens
MATHHTLWMGLALLGVLGDLQAAPEAQVSVQPNFQQDKFLGRWFSAG

SEQ ID NO: 19261 - protein, 369 aa, Homo sapiens [sequence omitted]

SEQ ID NO: 19262 - protein, 145 aa, Homo sapiens
MAAAMPLALLVLLLLGPGGWCLAEPPRDSLREELVITPLPSGDVAATFQFRTRWDSELQREGVWINLGRSSVMSSQGSSAPLSTSSTPPTQSLPLPPSNPWVWPMTLTTTFCAMLCCRGRWSAPKTSPPGRSSCPVVPRQASLCC

SEQ ID NO: 19263 - protein, 198 aa, Homo sapiens
MAAAMPLALLVLLLLGPGGWCLAEPPRDSLREELVITPLPSGDVAATFQFRTRWDSELQREGVSHYRLFPKALGQLISKYSLRELHLSFTQGFWRTRYWGPPFLQAPSGAELWVWFQDTVTDVDKSWKELSNVLSGIFCASLNFIDSTNTVTPTASFKPLGLANGRPLCAAEGRSLVPHQLPLPGSAYPPCLQKCTLY

SEQ ID NO: 19264 - protein, 328 aa, Homo sapiens
MFANLKYVSLGILVFQTTSLVLTMRYSRTLKEEGPRYLSSTAVVVAELLKIMACILLVYKDSKCSLRALNRVLHDEILNKPMETLKLAIPSGIYTLQNNLLYVALSNLDAATYQVTYQLKILTTALFSVSMLSKKLGVYQWLSLVILMTGVAFVQWPSDSQLDSKELSAGSQFVGLMAVLTACFSSGFAGVYFEKILKETKQSVWIRNIQLGFFGSIFGLMGVYIYDGELVSKNGFFQGYNRLTWIVVVLQALGGLVIAAVIKYADNILKGFATSLSIILSTLISYFWLQDFVPTRVSLCRQAGVLWRDLGLLQPPTPWFKGFSCLSL

SEQ ID NO: 19265 - protein, 480 aa, Homo sapiens
MDAPARLLAPLLLLCAQQLRGTRAMNDIGDYVGSNLEISWLPNLDGLIAGYARNFRPGIGGPPVNVALALEVASIDHISEANMEYTMTVFLHQSWRDSRLSYNHTNETLGLDSRFVDKLWLPDTFIVNAKSAWFHDVTVENKLIRLQPDGVILYSIRITSTVACDMDLAKYPMDEQECMLDLESCFLCGRSAPARAPGAGPGSAAHLCAFPPDGYSSEDIVYYWSESQEHIHGLDKLQLAQFTITSYRFTTELMNFKSAGQFPRLSLHFHLRRNRGVYIIQSYMPSVLLVAMSWVSFWISQAAVPARVSLGITTVLTMTTLMVSARSSLPRASAIKALDVYFWICYVFVFAALVEYAFAHFNADYRKKQKAKVKVSRPRAEMDVRNAIVLFSLSAAGVTQELAISRRQRRVPGNLMGSYRSVGVETGETKKEGAARSGGQGGIRARLRPIDADTIDIYARAVFPAAFAAVNVIYWAAYAM

SEQ ID NO: 19266 - protein, 359 aa, Homo sapiens
MPMISVLGKMFLWQREGPGGRWTCQTSRRVSSDPAWAVEWIELPRGLSLSSLGSARTLRGWSRSSRPSSVDSQDLPEVNVGDTVAMLPKSRRALTIQEIAALARSSLHGISQVVKDHVTKPTAMAQGRVAHLIEWKGWSKPSDSPAALESAFSSYSDLSEGEQEARFAAGVAEQFAIAEAKLRAWSSVDGEDSTDDSYDEDFAGGMDTDMAGQLPLGPHLQDLFTGHRFSRPVRQGSVEPESDCSQTVSPDTLCSSLCSLEDGLLGSPARLASQLLGDELLLAKLPPSRESAFRSLGPLEAQDSLYNSPLTESCLSPAEEEPAPCKDCQPLCPPLTGSWERQRQASDLGLAPALPEPMG

SEQ ID NO: 19267 - protein, 854 aa, Homo sapiens
MHEGSWGISHTRVPTESRPGHVALIAGFYEDVSAVAKGWKENPVEFDSLFNESKYTWSWGSPDILPMFAKGASGDHVYTYSYDAKREDFGAQDATKLDTWVFDNVKDFFHHARNNQSLFSKINEEKIVFFLHLLGIDTNGHAHRPSSRDYKHNIKKVDDGVKEIVSMFNHFYGNDGKTTFIFTSDHGMTDWGSHGAGHPSETLTPLVTWGAGIKYPQRVSAQQFDDAFLKEWRLENWKRLDVNQADIAPLMTSLIGVPFPLNSVGILPVDYLNNTDLFKAESMFTNAVQILEQFKVKMTQKKEVTLPFLFTPFKLLSDSKQFNILRKARSYIKHRKFDEVVSLCKELIHLALKGLSYYHTYDRFFLGVNVVIGFVGWISYASLLIIKSHSNLIKGVSKEVKKPSHLLPCSFVAIGILVAFFLLIQACPWTYYVYGLLPLPIWYAVLREFQVIQDLVVSVLTYPLSHFVGYLLAFTLGIEVLVLSFFYRYMLTAGLTAFAAWPFLTRLWTRAKMTSLSWTFFSLLLAVFPLMPVVGRKPDISLVMGAGLLVLLLSLCVVTSLMKRKDSFIKEELLVHLLQVLSTVLSMYVVYSTQSSLLRKQGLPLMNQIISWATLASSLVVPLLSSPVLFQRLFSILLSLMSTYLLLSTGYEALFPLVLSCLMFVWINIEQETLQQSGVCCKQKLTSIQFSYNTDITQFRQLYLDDIRRAFFLVFFLVTAFFGTGNIASINSFDLASVYCFLTVFSPFMMGALMMWKILIPFVLVMCAFEAVQLTTQLSSKSLFLIVLVISDIMALHFFFLVKDYGSWLDIGTSISHYVIVMSMTIFLVFLNGLAQLLTTKKLRLCGKPKSHFM

SEQ ID NO: 19268 - protein, 41 aa, Homo sapiens
ILKCTLLVFGVWILYILKLNYTTEECDMKKMHYVDPDHVKS

SEQ ID NO: 19269 - protein, 300 aa, Homo sapiens
MAAAMPLALLVLLLLGPGGWCLAEPPRDSLREELVITPLPSGDVAATFQFRTRWDSELQREGVSHYRLFPKALGQLISKYSLRELHLSFTQGFWRTRYWGPPFLQAPSGAELWVWFQDTVTDVDKSWKELSNVLSGIFCASLNFIDSTNTVTPTASFKPLGLANDTDHYFLRYAVLPREVVCTENLTPWKKLLPCSSKAGLSVLLKADRLFHTSYHSQAVHIRPVCRNARCTSISWELRQTLSVVFDAFITGQGKKDWSLFRMFSRTLTEPCPLASESRVYVDITTYNQPCLCVPRTTRH

SEQ ID NO: 19270 - protein, 291 aa, Homo sapiens
MLMPKKNRIAIYELLFKEGVMVAKKDVHMPKHPELADKNVPNLHVMKAMQSLKSRGYVKEQFAWRHFYWYLTNEGIQYLRDYLHLPPEIVPATLRRSRPETGRPRPKGLEGERPARLTRGEADRDTYRRSAVPPGADKKAEAGAGSATEFQFVLLVSSSRHPDRWIVPGGGMEPEEEPSVAAVREVCEEAGVKGTLGRLVGIFENQERKHRTYVYVLIVTEVLEDWEDSVNIGRKREWFKIEDAIKVLQYHKPVQASYFETLRQGYSANNGTPVVATTYSVSAQSSMSGIR

SEQ ID NO: 19271 - protein, 547 aa, Homo sapiens
MAFTLQERQMLGLQGLLPPKIETQDIQALRFHRNLKKMTSPLEKYIYIMGIQERNEKLFYRILQDDIESLMPIVYTPTVGLACSQYGHIFRRPKGLFISISDRGHVRSIVDNWPENHVKAVVVTDGERILGLGDLGVYGMGIPVGKLCLYTACAGIRPDRCLPVCIDVGTDNIALLKDPFYMGLYQKRDRTQQYDDLIDEFMKAITDRYGRNTLIQFEDFGNHNAFRFLRKYREKYCTFNDDIQGTAAVALAGLLAAQKVISKPISEHKILFLGAGEAALGIANLIVMSMVENGLSEQEAQKKIWMFDKYGLLVKGRKAKIDSYQEPFTHSAPESIPDTFEDAVNILKPSTIIGVAGAGRLFTPDVIRAMASINERPVIFALSNPTAQAECTAEEAYTLTEGRCLFASGSPFGPVKLTDGRVFTPGQGNNVYIFPGVALAVILCNTRHISDSVFLEAAKALTSQLTDEELAQGRLYPPLANIQEVSINIAIKVTEYLYANKMAFRYPEPEDKAKYVKERTWRSEYDSLLPDVYEWPESASSPPVITE

SEQ ID NO: 19272 - protein, 397 aa, Homo sapiens
VWILLLLSLYPGFTSQKSDDDYEDYASNKTWVLTPKVPEGDVTVILNNLLEGYDNKLRPDIGVKPTLIHTDMYVNSIGPVNAINMEYTIDIFFAQTWYDRRLKFNSTIKVLRLNSNMVGKIWIPDTFFRNSKKADAHWITTPNRMLRIWNDGRVLYTLRLTIDAECQLQLHNFPMDEHSCPLEFSSYGYPREEIVYQWKRSSVEVGDTRSWRLYQFSFVGLRNTTEVVKTTSGDYVVMSVYFDLSRRMGYFTIQTYIPCTLIVVLSWVSFWINKDAVPARTSLGITTVLTMTTLSTIARKSLPKVSYVTAMDLFVSVCFIFVFSALVEYGTLHYFVSNRKPSKDKDKKKKNPKVVLLRVGILPASYNKDMRTGFQTSSDESFGKSPLALSVSYAIAE

SEQ ID NO: 19273 - protein, 764 aa, Homo sapiens
MGTATRRKPHLLLVAAVALVSSSAWSSALGSQTTFGPVFEDQPLSVLFPEESTEEQVLLACRARASPPATYRWKMNGTEMKLEPGSRHQLVGGNLVIMNPTKAQDAGVYQCLASNPVGTVVSREAILRFGFLQEFSKEERDPVKAHEGWGVMLPCNPPAHYPGLSYRWLLNEFPNFIPTDGRHFVSQTTGNLYIARTNASDLGNYSCLATSHMDFSTKSVFSKFAQLNLAAEDTRLFAPSIKARFPAETYALVGQQVTLECFAFGNPVPRIKWRKVDGSLSPQWTTAEPTLQIPSVSFEDEGTYECEAENSKGRDTVQGRIIVQAQPEWLKVISDTEADIGSNLRWGCAAAGKPRPTVRWLRNGEPLASQNRVEVLAGDLRFSKLSLEDSGMYQCVAENKHGTIYASAELAVQALAPDFRLNPVRRLIPAARGGEILIPCQPRAAPKAVVLWSKGTEILVNSSRVTVTPDGTLIIRNISRSDEGKYTCFAENFMGKANSTGILSVRDATKITLAPSSADINLGDNLTLQCHASHDPTMDLTFTWTLDDFPIDFDKPGGHYRRTNVKETIGDLTILNAQLRHGGKYTCMAQTVVDSASKEATVLVRGPPGPPGGVVVRDIGDTTIQLSWSRGFDNHSPIAKYTLQARTPPAGKWKQVRTNPANIEGNAETAQVLGLTPWMDYEFRVIASNILGTGEPSGPSSKIRTREAAPSVAPSGLSGGGGAPGELIVNWTAGQHSLADRPGAWRRCPVLCLQQRERPALHAL

SEQ ID NO: 19274 - protein, 798 aa, Homo sapiens
MLLFFTLGLLIHFVFFASIFDIYFTSPLVHGMTPQFTPLPPPARRLVLFVADGLRADALYELDENGNSRAPFIRNIIMHEGSWGISHTRVPTESRPGHVALIAGFYEDVSAVAKGWKENPVEFDSLFNESKYTWSWGSPDILPMFAKGASGDHVYTYSYDAKREDFGAQDATKLDTWVFDNVKDFFHHARNNQSLFSKINEEKIVFFLHLLGIDTNGHAHRPSSRDYKHNIKKVDDGVKEIVSMFNHFYGNDGKTTFIFTSDHGMTDWGSHGAGHPSETLTPLVTWGAGIKYPQRVSAQQFDDAFLKEWRLENWKRLDVNQADIAPLMTSLIGVPFPLNSVGILPVDYLNNTDLFKAESMFTNAVQILEQFKVKMTQKKEVTLPFLFTPFKLLSDSKQFNILRKARSYIKHRKFDEVVSLCKELIHLALKGLSYYHTYDRFFLGVNVVIGFVGWISYASLLIIKSHSNLIKGVSKEVKKPSHLLPCSFVAIGILVAFFLLIQACPWTYYVYGLLPLPIWYAVLREFQVIQDLVVSVLTYPLSHFVGYLLAFTLGIEVLVLSFFYRYMLTAGLTAFAAWPFLTRLWTRAKMTSLSWTFFSLLLAVFPLMPVVGRKPDISLVMGAGLLVLLLSLCVVTSLMKRKDSFIKEELLVHLLQVLSTVLSMYVVYSTQSSLLRKQGLPLMNQIISWATLASSLVVPLLSSPVLFQRLFSILLSLMSTYLLLSTGYEALFPLVLSCLMFVWINIEQETLQQSGVCCKQKLTSIQFSYNTDITQFRQLYLDDIRRAFFLVSFVETLV

SEQ ID NO: 19275 - protein, 117 aa, Homo sapiens
MDWSPLLLILLTHCTGSWAQSVLTQPPSVSWATRQRLTVSCTGSSSNTGTGYNVNCWQLPRTDPKLLTYRNNNRPSGISERFSASRSGNTASLTITGLQPEDEADYYCSALDSSLSA

SEQ ID NO: 19276 - protein, 165 aa, Homo sapiens
MDPLFQQTHKQVHEIQSCMGRLETADKQSVHIVENEIQASIDQIFSRLERLEILSSKEPPNKRQNARLRVDQLKYDVQHLQTALRNFQHRRHAREQQERQREELLSRTFTTNGTQKKILDIANMLGLSNTVMRLIEKRAFQDKYFMIGGMLLTCVVMFLVVQYLT

SEQ ID NO: 19277 - protein, 230 aa, Homo sapiens
MRRVLRLLLGCFLTELCARVCRAQERAGHGQLAQLGGVLLLAGGNRSGAASGEASEGAEASDAPPTRAPTPDFCRGYFDVMGQWDPPFNCSSGDFIFCCGTCGFRFCCTFKKRRLNQSTCTNYDTPLWLNTGKPPARKDDPLHDPTKDKTNLIVYIICGVVAVMVLVGIFTKLGLEKAHRPQREHMSRALADVMRPQGHCNTDHMERDLNIVVHVQHYENMDTRTPINNL

SEQ ID NO: 19278 - protein, 35 aa, Homo sapiens
MDAPARLLAPLLLLCAQQLRGTRRTGMTITTNWTA

SEQ ID NO: 19279 - protein, 116 aa, Homo sapiens
MAAAMPLALLVLLLLGPGGWCLAEPPRDSLREELVITPLPSGDVAATFQFRTRWDSELQREGVSHYRLFPKALGQLISKYSLRELHLSFTQGFWRTRYWGPPFLQAPSGLAASCGL

SEQ ID NO: 19280 - protein, 438 aa, Homo sapiens
MWTLVSWVALTAGLVAGTRCPDGQFCPVACCLDPGGASYSCCRPLLDKWPTTLSRHLGGPCQVDAHCSAGHSCIFTVSGTSSCCPFPEAVACGDGHHCCPRGFHCSADGRSCFQRSGNNSVGAIQCPDSQFECPDFSTCCVMVDGSWGCCPMPQASCCEDRVHCCPHGAFCDLVHTRCITPTGTHPLAKKLPAQRTNRAVALSSSVMCPDARSRCPDGSTCCELPSGKYGCCPMPNATCCSDHLHCCPQDTVCDLIQSKCLSKENATTDLLTKLPAHTVGDVKCDMEVSCPDGYTCCRLQSGAWGCCPFTQAVCCEDHIHCCPAGFTCDTQKGTCEQGPHQVPWMEKAPAHLSLPDPQALKRDVPCDNVSSCPSSDTCCRDNRQGWACCPYRQGVCCADRRHCCPAGFRCAARGTKCLRREAPRWDAPLRDPALRQLL

SEQ ID NO: 19281 - protein, 213 aa, Homo sapiens
MSAPSATPIFAPGENCSPAWGAAPAAYDAADTHLRILGGRVLEVGFGMAIAASKVQEAPIDEHWIIECNDGVFQRLRDWAPRQTHKVIPLKGLWEDVAPTLPDGHFDGILYDTYPLSEETWHTHQFNFIKNHAFRLLKPGGVLTYCNLTSWGELMKSKYSDITIMFEETQVPALLEAGFRRENIRTEVMALVPPADCRYYAFPQMITPLVTKG

SEQ ID NO: 19282 - protein, 232 aa, Homo sapiens
MAARLLLLGILLLLLPLPVPAPCHTAARSECKRSHKFVPGAWLAGEGVDVTSLRRSGSFPVDTQRFLRPDGTCTLCENALQEGTLQRLPLALTNWRAQGSGCQRHVTRAKVSSTEAVARDAARSIRNDWKVGLDVTPKPTSNVHVSVAGSHSQAANFAAQKTHQDQYSFSTDTVECRFYSSSAIVSASGFYMWPNTILLPTWPREAKRLDTHQTDGKGRFRLFFREVAGFTR

SEQ ID NO: 19283 - protein, 305 aa, Homo sapiens
MGARGALLLALLLARAGLGKPESQEEELLSEACGHREIHALVAGGVESARGRWPWQASLRLRRRHRCGGSLLSRRWVLSAAHCFQKHYYPSEWTVQLGELTSRPTPWNLRAYSSRYKVQDIIVNPDALGVLRNDIALLRLASSVTYNAYIQPICIESSTFNFVHRPDCWVTGWGLISPSGTPLPPPYNLREAQVTILNNTRCNYLFEQPSSRSMIWDSMFCAGAEDGSVDTCKGDSGGPLVCDKDGLWYQVGIVSWGMDCGQPNRPGVYTNISVYFHWIRRVMSHSTPRPNPSQLLLLLALLWAP

SEQ ID NO: 19284 - protein, 445 aa, Homo sapiens
MTVWILLLLSLYPGFTSQKSDDDYEDYASNKTWVLTPKVPEGDVTVILNNLLEGYDNKLRPDIGVKPTLIHTDMYVNSIGPVNAINMEYTIDIFFAQTWYDRRLKFNSTIKVLRLNSNMVGKIWIPDTFFRNSKKADAHWITTPNRMLRIWNDGRVLYTLRLTIDAECQLQLHNFPMDEHSCPLEFSSYGYPREEIVYQWKRSSVEVGDTRSWRLYQFSFVGLRNTTEVVKTTSGDYVVMSVYFDLSRRMGYFTIQTYIPCTLIVVLSWVSFWINKDAVPARTSLGITTVLTMTTLSTIARKSLPKVSYVTAMDLFVSVCFIFVFSALVEYGTLHYFVSNRKPSKDKDKKKKNPAPTIDIRPRSATIQMNNATHLQERDEEYGYECLDGKDCASFFCCFEDCRTGAWRHGRIHIRIAKMDSYARIFFPTAFCLFNLVYWVSYLYL

SEQ ID NO: 19285 - protein, 424 aa, Homo sapiens
MAAVATCGSVAASTGSAVATASKSNVTSFQRRGPRASVTNDSGPRLVSIAGTRPSVRNGQLLVSTGLPALDQLLGGGLAVGTVLLIEEDKYNIYSPLLFKYFLAEGIVNGHTLLVASAKEDPANILQELPAPLLDDKCKKEFDEDVYNHKTPESNIKMKIAWRYQLLPKMEIGPVSSSRFGHYYDASKRMPQELIEASNWHGFFLPEKISSTLKVEPCSLTPGYTKLLQFIQNIIYEEGFDGSNPQKKQRNILRIGIQNLGSPLWGDDICCAENGGNSHSLTKFLYVLRGLLRTSLSACIITMPTHLIQNKAIIARVTTLSDVVVGLESFIGSERETNPLYKDYHGLIHIRQIPRLNNLICDESDVKDLAFKLKRKLFTIERLHLPPDLSDTVSRSSKMDLAESAKRLGPGCGMMAGGKKHLDF

SEQ ID NO: 19286 - protein, 312 aa, Homo sapiens
MASQLTQRGALFLLFFLTPAVTPTWYAGSGYYPDESYNEVYAEEVPQAPALDYRACLSSIATVPRWCYTLNIQDGEATCYSPKGGNYHSSLGTRCELSCDRGFRLIGRRSVQCLPSRRWSGTAYCRQMRCHALPFITSGTYTCTNGVLLDSRCDYSCSSGYHLEGDRSRICMEDGRWSGGEPVCVDIDPPKIRCPHSREKMAEPEKLTARVYWDPPLVKDSADGTITRVTLRGPEPGSHFPEGEHVIRYTAYDRAYNRASCKFIVKVQVRRCPTLKPPQHGYLTCTSAGDNYGATCEYHCDGGYDRQGTPSR

SEQ ID NO: 19287 - protein, 432 aa, Homo sapiens
MAAAMPLALLVLLLLGPGGWCLAEPPRDSLREELVITPLPSGDVAATFQFRTRWDSELQREGVSHYRLFPKALGQLISKYSLRELHLSFTQGFWRTRYWGPPFLQAPSGAELWVWFQDTVTDVDKSWKELSNVLSGIFCASLNFIDSTNTVTPTASFKPLGLANDTDHYFLRYAVLPREVVCTENLTPWKKLLPCSSKAGLSVLLKADRLFHTSYHSQAVHIRPVCRNARCTSISWELRQTLSVVFDAFITGQGKKDWSLFRMFSRTLTEPCPLASESRVYVDITTYNQDNETLEVHPPPTTTYQDVILGTRKTYAIYDLLDTAMINNSRNLNIQLKWKRPPENGYIHYQPAQDRLQPHLLEMLIQLPANSVTKVSIQFERALLKWTEYTPDPNHGFYVSPSVLSALVPSMVAAKPVDWEESPLFNSLLPWT

SEQ ID NO: 19288 - protein, 58 aa, Homo sapiens
MALRVVRSVRALLCTLRAVPSPAAPCPPRPWQLGVGAVRTLRTGPALLSGSVGRCCLL

SEQ ID NO: 19289 - protein, 838 aa, Homo sapiens
MACAEFSFHVPSLEELAGGICGKTRIAEVGGVPYLLPLVNQKKVYDLNKIAKEIKLPGAFILGAGAGPFQTLGFNSEFMPVIQTESEHKPPVNGSYFAHVNPADGGCLLEKYSEKCHDFQCALLANLFASEGQPGKVIEVKAKRRTGPLNFVTCMRETLEKHYGNKPIGMGGTFIIQKGKVKSHIMPAEFSSCPLNSDEEVNKWLHFYEMKAPLVCLPVFVSRDPNLARLAQRIDFSQGSGSEEEEAAGTEGDAQEWPGAGSSADQDDEEGVVKFQPSLWPWDSVRNNLRSALTEMCVLYDVLSIVRDKKFMTLDPVSQDALPPKQNPQTLQLISKKKSLAGAAQILLKGAERLTKSVTENQENKLQRDFNSELLRLRQHWKLRKVGDKILGDLSYRSAGSLFPHHGTFEVIKNTDLDLDKKIPEDYCPLDVQIPSDLEGSAYIKVSIQKQAPDIGDLGTVNLFKRPLPKSKPGSPHWQTKLEAAQNVLLCKEIFAQLSREAVQIKSQVPHIVVKNQIISQPFPSLQLSISLCHSSNDKKSQKFATEKQCPEDHLYVLEHNLHLLIREFHKQTLSSIMMPHPASAPFGHKRMRLSGPQAFDKNEINSLQSSEGLLEKIIKQAKHIFLRSRAAATIDSLASRIEDPQIQAHWSNINDVYESSVKVLITSQGYEQICKSIQLQLNIGVEQIRVVHRDGRVITLSYQEQELQDFLLSQMSQHQVHAVQQLAKVMGWQVLSFSNHVGLGPIESIGNASAITVASPSGDYAISVRNGPESGSKIMVQFPRNQCKDLPKSDVLQDNKWSHLRGPFKEVQWNKMEGRNFVYKMELLMSALSPCLL

SEQ ID NO: 19290 - protein, 449 aa, Homo sapiens
MGRCCFYTAGTLSLLLLVTSVTLLVARVFQKAVDQSIEKKIVLRNGTEAFDSWEKPPLPVYTQFYFFNVTNPEEILRGETPRVEEVGPYTYRELRNKANIQFGDNGTTISAVSNKAYVFERDQSVGDPKIDLIRTLNIPVLTVIEWSQVHFLREIIEAMLKAYQQKLFVTHTVDELLWGYKDEILSLIHVFRPDISPYFGLFYEKNGTNDGDYVFLTGEDSYLNFTKIVEWNGKTSLDWWITDKCNMINGTDGDSFHPLITKDEVLYVFPSDFCRSVYITFSDYESVQGLPAFRYKVPAEILANTSDNAGFCIPEGNCLGSGVLNVSICKNGAPIIMSFPHFYQADERFVSAIEGMHPNQEDHETFVDINPLTGIILKAAKRFQINIYVKKLDDFVETGDIRTMVFPVMYLNESVHIDKETASRLKSMINTTLIITNIPYIIMALGNSG

SEQ ID NO: 19291 - protein, 271 aa, Homo sapiens
MATELEYESVLCVKPDVSVYRIPPRASNRGYRASDWKLDQPDWTGRLRITSKGKTAYIKLEDKVSGELFAQAPVEQYPGIAVETVTDSSRYFVIRIQDGTGRSAFIGIGFTDRGDAFDFNVSLQDHFKWVKQESEISKESQEMDARPKLDLGFKEGQTIKLCIGNITNKKGGASKPRTARGGGLSLLPPPPGGKVTIPPPSSSVAISNHVTPPPIPKSNHGDILLDLDSPAPVTTPAPTPVSVSNDLWGDFSTASSSVPNQAPQPSNWVQF

SEQ ID NO: 19292 - protein, 203 aa, Homo sapiens
MAAAMPLALLVLLLLGPGGWCLAEPPRDSLREELVITPLPSGDVAATFQFRTRWDSELQREGVSHYRLFPKALGQLISKYSLRELHLSFTQGFWRTRYWGPPFLQAPSGAELWVWFQDTVTDVDKSWKELSNVLSGIFCASLNFIDSTNTVTPTASFKPLGLANDTDHYFLRYAVLPREVVCTENLTPWKKLLPCSSKASLCC

SEQ ID NO: 19293 - protein, 232 aa, Homo sapiens
MAAAMPLALLVLLLLGPGGWCLAEPPRDSLREELVITPLPSGDVAATFQFRTRWDSELQREGVSHYRLFPKALGQLISKYSLRELHLSFTQGFWRTRYWGPPFLQAPSGAELWVWFQDTVTDVDKSWKELSNVLSGIFCASLNFIDSTNTVTPTASFKPLGLANDTDHYFLRYAVLPREVVCTENLTPWKKLLPCSSKAGLSVLLKADRLFHTSYHSQAVHIRPVCRVSHGE

SEQ ID NO: 19294 - protein, 479 aa, Homo sapiens
MWELVALLLLTLAYLFWPKRRCPGAKYPKSLLSLPLVGSLPFLPRHGHMHNNFFKLQKKYGPIYSVRMGTKTTVIVGHHQLAKEVLIKKGKDFSGRPQMATLDIASNNRKGIAFADSGAHWQLHRRLAMATFALFKDGDQKLEKIICQEISTLCDMLATHNGQSIDISFPVFVAVTNVISLICFNTSYKNGDPELNVIQNYNEGIIDNLSKDSLVDLVPWLKEKFRSDSITNMLDTLMQAKMNSDNGNAGPDQDSELLSDNHILTTIGDIFGAGVETTTSVVKWTLAFLLHNPQVKKKLYEEIDQNVGFSRTPTISDRNRLLLLEATIREVLRLRPVAPMLIPHKANVDSSIGEFAVDKGTEVIINLWALHHNEKEWHQPDQFMPERFLNPAGTQLISPSVSYLPFGAGPRSCIGEILARQELFLIMAWLLQRFDLEVPDDGQLPSLEGIPKVVFLIDSFKVKIKVRQAWREAQAEGST

SEQ ID NO: 19295 - protein, 417 aa, Homo sapiens; identical to SEQ ID NO: 786

SEQ ID NO: 19296 - protein, 121 aa, Homo sapiens
MYGKIIFVLLLSEIVSISALSTTEVAMHTSTSSSVTKSYISSQTNDKHKRDTCPAHTANEVSEISVTTVSPPEKKNGETGQLVHRFTVPAPVVIILIILCVMAGIIGTILLISYSIRRLIK

SEQ ID NO: 19297 - protein, 315 aa, Homo sapiens [sequence omitted]

SEQ ID NO: 19298 - protein, 1154 aa, Homo sapiens
MEAGSGPPGGPGSESPNRAVEYLLELNNIIESQQQLLETQRRRIEELEGQLDQLTQENRDLREESQLHRGELHRDPHGARDSPGRESQYQNLRETQFHHRELRESQFHQAARDVGYPNREGAYQNREAVYRDKERDASYPLQDTTGYTARERDVAQCHLHHENPALGRERGGREAGPAHPGREKEAGYSAAVGVGPRPPRERGQLSRGASRSSSPGAGGGHSTSTSTSPATTLQRKSDGENSRTVSVEGDAPGSDLSTAVDSPGSQPPYRLSQLPPSSSHMGGPPAGVGLPWAQRARLQPASVALRKQEEEEIKRSKALSDSYELSTDLQDKKVEMLERKYGGSFLSRRAARTIQTAFRQYRMNKNFERLRSSASESRMSRRIILSNMRMQFSFEEYEKAQNPAYFEGKPASLDEGAMAGARSHRLERGLPYGGSCGGGIDGGGSSVTTSGEFSNDITELEDSFSKQVKSLAESIDEALNCHPSGPMSEEPGSAQLEKRESKEQQEDSSATSFSDLPLYLDDTVPQQSPERLPSTEPPPQGRPEFWAPAPLPPVPPPVPSGTREDGSREEGTRRGPGCLECRDFRLRAAHLPLLTIEPPSDSSVDLSDRSDRGSVHRQLVYEADGCSPHGTLKHKGPPGRAPIPHRHYPAPEGPAPAPPGPLPPAPNSGTGPSGVAGGRRLGKCEAAGENSDGGDNESLESSSNSNETINCSSGSSSRDSLREPPATGLCKQTYQRETRHSWDSPAFNNDVVQRRHYRIGLNLFNKKPEKGIQYLIERGFLSDTPVGVAHFILERKGLSRQMIGEFLGNRQKQFNRDVLDCVVDEMDFSSMDLDDALRKFQSHIRVQGEAQKVERLIEAFSQRYCVCNPALVRQFRNPDTIFILAFAIILLNTDMYSPSVKAERKMKLDDFIKNLRGVDNGEDIPRDLLVGIYQRIQGRELRTNDDHVSQVQAVERMIVGKKPVLSLPHRRLVCCCQLYEVPDPNRPQRLGLHQREVFLFNDLLVVTKIFQKKKILVTYSFRQSFPLVEMHMQLFQNSYYQFGIKLLSAVPGGERKVLIIFNAPSLQDRLRFTSDLRESIAEVQEMEKYRVESELEKQKGMMRPNASQPGGAKDSVNGTMARSSLEDTYGAGDGLKRGALSSSLRDLSDAGVCY

SEQ ID NO: 19299 - protein, 96 aa, Homo sapiens
MAAAMPLALLVLLLLGPGGWCLAEPPRDSLREELVITPLPSGDVAATFQFRTRWDSELQREGGRPLCAAEGRSLVPHQLPLPGSAYPPCLQKCTLY

SEQ ID NO: 19300 - protein, 263 aa, Homo sapiens
MAPRARRRRPLFALLLLCALLARLQVALQIAPPCTSEKHYEHLGRCCNKCEPGKYMSSKCTTTSDSVCLPCGPDEYLDSWNEEDKCLLHKVCDTGKALVAVVAGNSTTPRRCACTAGYHWSQDCECCRRNTECAPGLGAQHPLQLNKDTVCKPCLAGYFSDAFSSTDKCRPWTNCTFLGKRVEHHGTEKSDAVCSSSLPARKPPNEPHVYLPGLIILLLFASVALVAAIIFGVCYRKKGKALTANLWHWINEACGRLSGDKES

SEQ ID NO: 19301 - protein, 181 aa, Homo sapiens
MMKFKPNQTRTYDREGFKKRAACLCFRSEQEDEVLLVSSSRYPDQWIVPGGGMEPEEEPGGAAVREVYEEAGVKGKLGRLLGIFEQNQDRKHRTYVYVLTVTEILEDWEDSVNIGRKREWFKVEDAIKVLQCHKPVHAEYLEKLKLGCSPANGNSTVPSLPDNNALFVTAAQTSGLPSSVR

SEQ ID NO: 19302 - protein, 500 aa, Homo sapiens
MDAPARLLAPLLLLCAQQLRGTRAMNDIGDYVGSNLEISWLPNLDGLIAGYARNFRPGIGGPPVNVALALEVASIDHISEANMEYTMTVFLHQSWRDSRLSYNHTNETLGLDSRFVDKLWLPDTFIVNAKSAWFHDVTVENKLIRLQPDGVILYSIRITSTVACDMDLAKYPMDEQECMLDLESYGYSSEDIVYYWSESQEHIHGLDKLQLAQFTITSYRFTTELMNFKSAGQFPRLSLHFHLRRNRGVYIIQSYMPSVLLVAMSWVSFWISQAAVPARVSLGITTVLTMTTLMVSARSSLPRASAIKALDVYFWICYVFVFAALVEYAFAHFNADYRKKQKAKVKVSRPRAEVRAWGRARDSTAGGPNQDPSAAPAHCGSQLCSLSVGGWSCWSRRGPRMGTPVVQGPGSCTPVLSPVSPTGLRADGREERHCPLLPLCCRRHAGAGHLPPAAPRPGEPDGLLQVGGGGDRGDEEGGGSPLRRPGGHPCPAQAHRRRHH

SEQ ID NO: 19303 - protein, 475 aa, Homo sapiens
MAAVATCGSVAASTGSAVATASKSNVTSFQRRGPRASVTNDSGPRLVSIAGTRPSVRNGQLLVSTGLPALDQLLGGGLAVGTVLLIEEDKYNIYSPLLFKYFLAEGIVNGHTLLVASAKEDPANILQELPAPLLDDKCKKEFDEDVYNHKTPESNIKMKIAWRYQLLPKMEIGPVSSSRFGHYYDASKRMPQELIEASNWHGFFLPEKISSTLKVEPCSLTPGYTKLLQFIQNIIYEEGFDGSNPQKKQRNILRIGIQNLGSPLWGDDICCAENGGNSHSLTKFLYVLRGLLRTSLSACIITMPTHLIQNKAIIARVTTLSDVVVGLESFIGSERETNPLYKDYHGLIHIRQIPRLNNLICDESDVKDLAFKLKRKLFTIEWVQDNYLRQERNIYPPGFSYLLKQKDSAWGEGSLQHSTFLMSFLAKATAFASRLVRHSEPLKQNGSGRIRQAAGPRLWHDGRRQEAPGLLGIPP

SEQ ID NO: 19304 - protein, 316 aa, Homo sapiens
MAAAMPLALLVLLLLGPGGWCLAEPPRDSLREELVITPLPSGDVAATFQFRTRWDSELQREGVSHYRLFPKALGQLISKYSLRELHLSFTQGFWRTRYWGPPFLQAPSGAELWVWFQDTVTEPLSPSDTDHYFLRYAVLPREVVCTENLTPWKKLLPCSSKAGLSVLLKADRLFHTSYHSQAVHIRPVCRNARCTSISWELRQTLSVVFDAFITGQGKKDWSLFRMFSRTLTEPCPLASESRVYVDITTYNQDNETLEVHPPPTTTYQDVILGTRKTYAIYDLLDTAMINNSRNLNIQLKWKRPPENEAPPVPFLH

SEQ ID NO: 19305 - protein, 429 aa, Homo sapiens
MDAPARLLAPLLLLCAQQLRGTRAMNDIGDYVGSNLEISWLPNLDGLIAGYARNFRPGIGGPPVNVALALEVASIDHISEANMEYTMTVFLHQSWRDSRLSYNHTNETLGLDSRFVDKLWLPDTFIVNAKSAWFHDVTVENKLIRLQPDGVILYSIRITSTVACDMDLAKYPMDEQECMLDLESYGYSSEDIVYYWSESQEHIHGLDKLQLAQFTITSYRFTTELMNFKSAGQFPRLSLHFHLRRNRGVYIIQSYMPSVLLVAMSWVSFWISQAAVPARVSLAIKALDVYFWICYVFVFAALVEYAFAHFNADYRKKQKAKVKVSRPRAEMDVRNAIVLFSLSAAGVTQELAISRRQRRVPGNLMGSYRSVGVETGETKKEGAARSGGQGGIRARLRPIDADTIDIYARAVFPAAFAAVNVIYWAAYAM

SEQ ID NO: 19306 - protein, 101 aa, Homo sapiens
MAAAMPLALLVLLLLGPGGWCLAEPPRDSLREELVITPLPSGDVAATFQFRTRWDSELQREGDTDHYFLRYAVLPREVVCTENLTPWKKLLPCSSKASLCC

SEQ ID NO: 19307 - protein, 123 aa, Homo sapiens
MALNNVSLSSGDQRSRVAYRSSHGDLRPRASALAMVSGDGFLVSRPEAIHLGPRQAVRPSVRAESRRVDGGGRSPREPDGRGRSRQARFSPYPIPAVEPDLLRSVLQQRLIALGGVIAARISV

SEQ ID NO: 19308 - protein, 407 aa, Homo sapiens
MWELVALLLLTLAYLFWPKRRCPGAKYPKSLLSLPLVGSLPFLPRHGHMHNNFFKLQKKYGPIYSVRMGTKTTVIVGHHQLAKEVLIKKGKDFSGRPQMATLDIASNNRKGIAFADSGAHWQLHRRLAMATFALFKDGDQKLEKIICQEISTLCDMLATHNGQSIDISFPVFVAVTNVISLICFNTSYKNGDPELNVIQNYNEGIIDNLSKDSLVDLVPWLKVKKKLYEEIDQNVGFSRTPTISDRNRLLLLEATIREVLRLRPVAPMLIPHKANVDSSIGEFAVDKGTEVIINLWALHHNEKEWHQPDQFMPERFLNPAGTQLISPSVSYLPFGAGPRSCIGEILARQELFLIMAWLLQRFDLEVPDDGQLPSLEGIPKVVFLIDSFKVKIKVRQAWREAQAEGST

SEQ ID NO: 19309 - protein, 223 aa, Homo sapiens
MASQLTQRGALFLLFFLTPAVTPTWYAGSGYYPDESYNEVYAEEVPQAPALDYRVPRWCYTLNIQDGEATCYSPKGGNYHSSLGTRCELSCDRGFRLIGRRSVQCLPSRRWSGTAYCRQMRCHALPFITSGTYTCTNGVLLDSRCDYSCSSGYHLEGDRSRICMEDGRWSGGEPVCVDIDPPKIRCPHSREKMAEPEKLTARVYWDPPLVKDSADGTITRVTL

SEQ ID NO: 19310 - protein, 80 aa, Homo sapiens
MNFSTLRNIQGLFAPLKLQMEFKAVQQVQRLPFLSSSNLSLDVLRGNDETIGFEDILNDPSQSEVMGEPHLMVEYKLGLL

SEQ ID NO: 19311 - protein, 453 aa, Homo sapiens
MTVWILLLLSLYPGFTSQKSDDDYEDYASNKTWVLTPKVPEGDVTVILNNLLEGYDNKLRPDIGVKPTLIHTDMYVNSIGPVNAINMEYTIDIFFAQTWYDRRLKFNSTIKVLRLNSNMVGKIWIPDTFFRNSKKADAHWITTPNRMLRIWNDGRVLYTLRLTIDAECQLQLHNFPMDEHSCPLEFSSYGYPREEIVYQWKRSSVEVGDTRSWRLYQFSFVGLRNTTEVVKTTSGDYVVMSVYFDLSRRMGYFTIQTYIPCTLIVVLSWVSFWINKDAVPARTSLGITTVLTMTTLSTIARKSLPKVSYVTAMDLFVSVCFIFVFSALVEYGTLHYFVSNRKPSKDKDKKKKNPLLRMFSFKAPTIDIRPRSATIQMNNATHLQERDEEYGYECLDGKDCASFFCCFEDCRTGAWRHGRIHIRIAKMDSYARIFFPTAFCLFNLVYWVSYLYL

SEQ ID NO: 19312 - protein, 42 aa, Homo sapiens
MLGLSNTVMRLIEKRAFQDKYFMIGGMLLTCVVMFLVVQYLT

SEQ ID NO: 19313 - protein, 509 aa, Homo sapiens
MWELVALLLLTLAYLFWPKRRCPGAKYPKSLLSLPLVGSLPFLPRHGHMHNNFFKLQKKYGPIYSVRMGTKTTVIVGHHQLAKEVLIKKGKDFSGRPQMATLDIASNNRKGIAFADSGAHWQLHRRLAMATFALFKDGDQKLEKIICQEISTLCDMLATHNGQSIDISFPVFVAVTNVISLICFNTSYKNGDPELNVIQNYNEGIIDNLSKDSLVDLVPWLKIFPNKTLEKLKSHVKIRNDLLNKILENYKEKFRSDSITNMLDTLMQAKMNSDNGNAGPDQDSELLSDNHILTTIGDIFGAGVETTTSVVKWTLAFLLHNPQVKKKLYEEIDQNVGFSRTPTISDRNRLLLLEATIREVLRLRPVAPMLIPHKANVDSSSIGEFAVDKGTEVIINLWALHHNEKEWHQPDQFMPERFLNPAGTQLISPSVSYLPFGAGPRSCIGEILARQELFLIMAWLLQRFDLEVPDDGQLPSLEGIPKVVFLIDSFKVKIKVRQAWREAQAEGST

SEQ ID NO: 19314 - protein, 257 aa, Homo sapiens
MFANLKYVSLGILVFQTTSLVLTMRYSRTLKEEGPRYLSSTAVVVAELLKIMACILLVYKDSKCSLRALNRVLHDEILNKPMETLKLAIPSGIYTLQNNLLYVALSNLDAATYQVTYQLKILTTALFSVSMLSKKLGVYQWLSLVILMTGVAFVQWPSDSQLDSKELSAGSQFVGLMAVLTACFSSGFAGVYFEKILKETKQSVWIRNIQLGFFGSIFGLMGVYIYDGELVSKNGFFQGYNRLTWIVVVLQVKHLKS

SEQ ID NO: 19315 - protein, 171 aa, Homo sapiens
MAAAMPLALLVLLLLGPGGWCLAEPPRDSLREELVITPLPSGDVAATFQFRTRWDSELQREGVWINLGRSSVMSSQGSSAPLSTSSTPPTQSLPLPPSNPWVWPMTLTTTFCAMLCCRGRWSAPKTSPPGRSSCPVVPRPLCAAEGRSLVPHQLPLPGSAYPPCLQKCTLY

SEQ ID NO: 19316 - protein, 243 aa, Homo sapiens
MFANLKYVSLGILVFQTTSLVLTMRYSRTLKEEGPRYLSSTAVVVAELLKIMACILLVYKDSKCSLRALNRVLHDEILNKPMETLKLAIPSGIYTLQNNLLYVALSNLDAATYQVTYQLKILTTALFSVSMLSKKLGVYQWLSLVILMTGVAFVQWPSDSQLDSKELSAGSQFVGLMAVLTACFSSGFAGVYFEKILKETKQSVWIRNIQLDGYMHPVHPHVVRRLAYQHNQTVCRNSPTVEM

SEQ ID NO: 19317 - protein, 518 aa, Homo sapiens
AGTLSLLLLVTSVTLLVARVFQKAVDQSIEKKIVLRNGTEAFDSWEKPPLPVYTQFYFFNVTNPEEILRGETPRVEEVGPYTYRELRNKANIQFGDNGTTISAVSNKAYVFERDQSVGDPKIDLIRTLNIPVLTGSCSVAQAGVQSVAPSQLTEASTSWAPGILLCRPGTPGVNHCSWAGPTVIEWSQVHFLREIIEAMLKAYQQKLFVTHTVDELLWGYKDEILSLIHVFRPDISPYFGLFYEKNGTNDGDYVFLTGEDSYLNFTKIVEWNGKTSLDWWITDKCNMINGTDGDSFHPLITKDEVLYVFPSDFCRSVYITFSDYESVQGLPAFRYKVPAEILANTSDNAGFCIPEGNCLGSGVLNVSICKNGAPIIMSFPHFYQADERFVSAIEGMHPNQEDHETFVDINPLTGIILKAAKRFQINIYVKKLDDFVETGDIRTMVFPVMYLNESVHIDKETASRLKSMINTTLIITNIPYIIMALGVFFGLVFTWLACKGQGSMDEGTADERAPLIRT

SEQ ID NO: 19318 - protein, 429 aa, Homo sapiens
MAAAMPLALLVLLLLGPGGWCLAEPPRDSLREELVITPLPSGDVAATFQFRTRWDSELQREGVSHYRLFPKALGQLISKYSLRELHLSFTQGFWRTRYWGPPFLQAPSGAELWVWFQDTVTDVDKSWKELSNVLSGIFCASLNFIDSTNTVTPTASFKPLGLANDTDHYFLRYAVLPREVVCTENLTPWKKLLPCSSKAGLSVLLKADRLFHTSYHSQAVHIRPVCRNARCTSISWELRQTLSVVFDAFITGQGKKDWSLFRMFSRTLTEPCPLASESRVYVDITTYNQDNETLEVHPPPTTTYQDVILGTRKTYAIYDLLDTAMINNSRNLNIQLKWKRPPENEAPPVPFLHAQRYVSGYGLQKGELSTLLYNTHPYRAFPVLLLDTVPWYLRLLHPLPACPGPAATPPPGDADSAAGQLSHQGFHPV

SEQ ID NO: 19319 - protein, 212 aa, Homo sapiens
MDPLFQQTHKQVHEIQSCMGRLETADKQSVHIVENEIQASIDQIFSRLERLEILSSKEPPNKRQNARLRVDQLKYDVQHLQTALRNFQHRRHAREQQERQREELLSRTFTTNDSDTTIPMDESLQFNSSLQKVHNGMDDLILDGHNILDGLRTQRLTLKGTQKKILDIANMLGLSNTVMRLIEKRAFQDKYFMIGGMLLTCVVMFLVVQYLT

SEQ ID NO: 19320 - protein, 284 aa, Homo sapiens
MFANLKYVSLGILVFQTTSLVLTMRYSRTLKEEGPRYLSSTAVVVAELLKIMACILLVYKDSKCSLRALNRVLHDEILNKPMETLKLAIPSGIYTLQNNLLYVALSNLDAATYQWPSDSQLDSKELSAGSQFVGLMAVLTACFSSGFAGVYFEKILKETKQSVWIRNIQLGFFGSIFGLMGVYIYDGELVSKNGFFQGYNRLTWIVVVLQALGGLVIAAVIKYADNILKGFATSLSIILSTLISYFWLQDFVPTSVFFLGAILVITATFLYGYDPKPAGNPTKA

SEQ ID NO: 19321 - protein, 325 aa, Homo sapiens
MAVMAPRTLLLLLSGALALTQTWAGSHSMRYFFTSVSRPGRGEPRFIAVGYVDDTQFVRFDSDAASQRMEPRAPWIEQEGPEYWDQETRNVKAQSQTDRVDLGTLRGYYNQSEAGSHTIQIMYGCDVGSDGRFLRGYRQDAYDGKDYIALNEDLRSWTAADMAAQITKRKWEAAHEAEQLRAYLDGTCVEWLRRYLENGKETLQRTDPPKTHMTHHPISDHEATLRCWALGFYPAEITLTWQRDGEDQTQDTELVETRPAGDGTFQKWAAVVVPSGEEQRYTCHVQHEGLPKPLTLRWDRKGGSYTQAASSDSAQGSDVSLTACK

SEQ ID NO: 19322 - protein, 195 aa, Homo sapiens
MDPLFQQTHKQVHEIQSCMGRLETADKQSVHIVENEIQASIDQIFSRLERLEILSSKEPPNKRQNARLRVDQLKYDVQHLQTALRNFQHRRHAREQQERQREELLSRTFTTNDSDTTIPMDESLQFNSSLQKVHNGMDDLILDGHNILDGLRTQRLTLKVGSLLGDREKASCFSLIQQFSNCVYILITCPQIVIF

SEQ ID NO: 19323 - protein, 475 aa, Homo sapiens
MGRCCFYTAGTLSLLLLVTSVTLLVARVFQKAVDQSIEKKIVLRNGTEAFDSWEKPPLPVYTQFYFFNVTNPEEILRGETPRVEEVGPYTYRNKANIQFGDNGTTISAVSNKAYVFERDQSVGDPKIDLIRTLNIPVLTVIEWSQVHFLREIIEAMLKAYQQKLFVTHTVDELLWGYKDEILSLIHVFRPDISPYFGLFYEKNGTNDGDYVFLTGEDSYLNFTKIVEWNGKTSLDWWITDKCNMINGTDGDSFHPLITKDEVLYVFPSDFCRSVYITFSDYESVQGLPAFRYKVPAEILANTSDNAGFCIPEGNCLGSGVLNVSICKNGAPIIMSFPHFYQADERFVSAIEGMHPNQEDHETFVDINPLTGIILKAAKRFQINIYVKKLDDFVETGDIRTMVFPVMYLNESVHIDKETASRLKSMINTTLIITNIPYIIMALGVFFGLVFTWLACKGQGSMDEGTADERAPLIRT

SEQ ID NO: 19324 - protein, 331 aa, Homo sapiens
MAAAMPLALLVLLLLGPGGWCLAEPPRDSLREELVITPLPSGDVAATFQFRTRWDSELQREGVSHYRLFPKALGQLISKYSLRELHLSFTQGFWRTRYWGPPFLQAPSGAELWVWFQDTVTDVDKSWKELSNVLSGIFCASLNFIDSTNTVTPTASFKPLGLANDTDHYFLRYAVLPREVVCTENLTPWKKLLPCSSKAGLSVLLKADRLFHTSYHSQAVHIRPVCRNARCTSISWELRQTLSVVFDAFITGQGKKALRSVSQTGPSSGCSPEPSRSPAPWLQRAESMWTSPPTTSPAFVSPGQRDIRGAPTPDHYISGRHPRHSEDLCHL

SEQ ID NO: 19325 - protein, 46 aa, Homo sapiens
MASPGCLWLLAVALLPWTCASRALQHLDPPAPLPLVIWHGMAVAIP

SEQ ID NO: 19326 - protein, 283 aa, Homo sapiens
MALPHDSNETSYLLPPNNEDWGRQTIPDFVYGQKDLMAEGIQWPRNAPGIPDALPQSPFDAALCSAWKQRVELGLFRYRLRELQTQILPGAVGFVAQLNVERGVQRRPPQTIKSVRQAFDPVQFNFNKIRPGEVLFRLHREPDLPGTLLQEDILVVINVSPLEWGHVLLVPEPARQLPQRLLPGALRAGIEAVLLSLHPGFRVGFNSLGGLASVNHLHLHGYYLAHRLPVEQAPSEPLDPGGHLHLLQDLPAPGFLFYTRGPGPDLESLISRITGHQPDQLQV

SEQ ID NO: 19327 - protein, 201 aa, Homo sapiens
MTQRAGAAMLPSALLLLCVPGCLTVSGPSTVMGAVGESLSVQCRYEEKYKTFNKYWCRQPCLPIWHEMVETGGSEGVVRSDQVIITDHPGDLTFTVTLENLTADDAGKYRCGIATILQEDGLSGFLPDPFFQVQVLVSSASSTENSVKTPASPTRPSQCQGSLPSSTCFLLLPLLKVPLLLSILGAILWVNRPWRTPWTES

SEQ ID NO: 19328 - protein, 526 aa, Homo sapiens
MAFANLRKVLISDSLDPCCRKILQDGGLQVVEKQNLSKEELIAELQDCEGLIVRSATKVTADVINAAEKLQVVGRAGTGVDNVDLEAATRKGILVMNTPNGNSLSAAELTCGMIMCLARQIPQATASMKDGKWERKKFMGTELNGKTLGILGLGRIGREVATRMQSFGMKTIGYDPIISPEVSASFGVQQLPLEEIWPLCDFITVHTPLLPSTTGLLNDNTFAQCKKGVRVVNCARGGIVDEGALLRALQSGQCAGAALDVFTEEPPRDRALVDHENVISCPHLGASTKEAQSRCGEEIAVQFVDMVKGKSLTGVVNAQALTSAFSPHTKPWIGLAEALGTLMRAWAGSPKGTIQVITQGTSLKNAGNCLSPAVIVGLLKEASKQADVNLVNAKLLVTTSHSPAAPGEQGFGECLLAVALAGAPYQAVGLVQGTTPVLQGLNGAVFRPEVPLRRDLPLLLFRTQTSDPAMLPTMIGLLAEAGVRLLSYQTSLVSDGETWHVMGISSLLPSLEAWKQHVTEAFQFHF

SEQ ID NO: 19329 - protein, 153 aa, Homo sapiens
MTQRAGAAMLPSALLLLCVPGCLTVSGPSTVMGAVGESLSVQCRYEEKYKTFNKYWCRQPCLPIWHEMVETGGSEGVVRSDQVIITDHPGDLTFTVTLENLTADDAGKYRCGIATILQEDGLSGFLPDPFFQVQVLVSSGPCPAAPASCFSHS

SEQ ID NO: 19330 - protein, 258 aa, Homo sapiens
MDEFFSEIEETRLNIDKISEHVEEAKKLYSIILSAPIPEPKTKDDLEQLTTEIKKRANNVRNKLKSMEKHIEEDEVRSSADLRIRKSQHSVLSRKFVEVMTKYNEAQVDFRERSKGRIQRQLEITGKKTTDEELEEMLESGNPAIFTSGIIDSQISKQALSEIEGRHKDIVRLESSIKELHDMFMDIAMLVENQGEMLDNIELNVMHTVDHVEKARDETKKAVKYQSQARKKLIIIIVLVVVLLGILALIIGLSVGLN

SEQ ID NO: 19331 - protein, 52 aa, Homo sapiens
MASPGCLWLLAVALLPWTCASRALQHLDPPAPLPLVIWHGMASCKPNTGMTP

SEQ ID NO: 19332 - protein, 301 aa, Homo sapiens
MASPGCLWLLAVALLPWTCASRALQHLDPPAPLPLVIWHGMGDSCCNPLSMGAIKKMVEKKIPGIYVLSLEIGKTLMEDVENSFFLNVNSQVTTVCQALAKDPKLQQGYNAMGFSQGGQFLRAVAQRCPSPPMINLISVGGQHQGVFGLPRCPGESSHICDFIRKTLNAGAYSKVVQERLVQAEYWHDPIKEDVYRNHSIFLADINQERGINESYKKNLMALKKFVMVKFLNDSIVDPVDSEWFGFYRSGQAKETIPLQETSLYTQFCSLPRLECNGMISAHCNLRLPGSSEFSCLSLPSS

SEQ ID NO: 19333 - protein, 335 aa, Homo sapiens
MASPGCLWLLAVALLPWTCASRALQHLDPPAPLPLVIWHGMGSRYVAQTGLELLASSNPPASSYQSAGMIGDSCCNPLSMGAIKKMVEKKIPGIYVLSLEIGKTLMEDVENSFFLNVNSQVTTVCQALAKDPKLQQGYNAMGFSQGGQFLRAVAQRCPSPPMINLISVGGQHQGVFGLPRCPGESSHICDFIRKTLNAGAYSKVVQERLVQAEYWHDPIKEDVYRNHSIFLADINQERGINESYKKNLMALKKFVMVKFLNDSIVDPVDSEWFGFYRSGQAKETIPLQETSLYTQDRLGLKEMDNAGQLVFLATEGDHLQLSEEWFYAHIIPFLG

SEQ ID NO: 19334 - protein, 317 aa, Homo sapiens
MAARTLASALVLTLWVWALAPAGAVDAMGPHAAVRLAELLTPEECGHFRSLLEAPEPDVEAELSRLSEDRLARPEPLNTTSGSPSRRRRREAAEDPAGRVAGPGEVSDGCREALAAWLAPQAASLSWDRLARALRRSGRPDVARELGKNLHQQATLQLRKFGQRFLPRPGAAARVPFAPAPRPRRAAVPAPDWDALQLIVERLPQPLYERSPMGWAGPLALGLLTGFVGALGTGALVVLLTLWITGGDGDRASPGSPGPLATVQGWWETKLLLPKERRAPPGAWAADGPDSPSPHSALALSCKMGAQSWGSGALDGL

SEQ ID NO: 19335 - protein, 533 aa, Homo sapiens
MAFANLRKVLISDSLDPCCRKILQDGGLQVVEKQNLSKEELIAELQDCEGLIVRSATKVTADVINAAEKLQVVGRAGTGVDNVDLEAATRKGILVMNTPNGNSLSAAELTCGMIMCLARQIPQATASMKDGKWERKKFMGTELNGKTLGILGLGRIGREVATRMQSFGMKTIGYDPIISPEVSASFGVQQLPLEEIWPLCDFITVHTPLLPSTTGLLNDNTFAQCKKGVRVVNCARGGIVDEGALLRALQSGQCAGAALDVFTEEPPRDRALVDHENVISCPHLGASTKEAQSRCGEEIAVQFVDMVKGKSLTGVVNAQALTSAFSPHTKPWIGLAEALGTLMRAWAGSPKGTIQVITQGTSLKNAGNCLSPAVIVGLLKEASKQADVNLVNAKLLVKEAGLNVTTSHSPAAPGEQGFGECLLAVALAGAPYQAVGLVQGTTPVLQGLNGAVFRPEVPLRRDLPLLLFRTQTSDPAMLPTMIGLLAEAGVRLLSYQTSLVSDGETWHVMGISSLLPSLEAWKQHVTEAFQFHF

SEQ ID NO: 19336 - protein, 445 aa, Homo sapiens
MAFANLRKVLISDSLDPCCRKILQDGGLQVVEKQNLSKEELIAELQDCEGLIVRSATKVTADVINAAEKLQVVGRAGTGVDNVDLEAATRKGILVMNTPNGNSLSAAELTCGMIMCLARQIPQATASMKDGKWERKKFMGTELNGKTLGILGLGRIGREVATRMQSFGMKTIGYDPIISPEVSASFGVQQLPLEEIWPLCDFITVHTPLLPSTTGLLNDNTFAQCKKGVRVVNCARGGIVDEGALLRALQSGQCAGAALDVFTEEPPRDRALVDHENVISCPHLGASTKEAQSRCGEEIAVQFVDMVKGKSLTGVVTTSHSPAAPGEQGFGECLLAVALAGAPYQAVGLVQGTTPVLQGLNGAVFRPEVPLRRDLPLLLFRTQTSDPAMLPTMIGLLAEAGVRLLSYQTSLVSDGETWHVMGISSLLPSLEAWKQHVTEAFQFHF

SEQ ID NO: 19337 - protein, 261 aa, Homo sapiens
MTCWLRGVTATFGRPAEWPGYLSHLCGRSAAMDLGPMRKSYRGDREAFEETHLTSLDPVKQFAAWFEEAVQCPDIGEANAMCLATCTRDGKPSARMLLLKGFGKDGFRFFTNFESRKGKELDSNPFASLVFYWEPLNRQVRVEGPVKKLPEEEAECYFHSRPKSSQIGAVVSHQSSVIPDREYLRKKNEELEQLYQDQEVPKPKSWGGYVLYPQVMEFWQGQTNRLHDRIVFRRGLPTGDSPLGPMTHRGEEDWLYERLAP

SEQ ID NO: 19338 - protein, 44 aa, Homo sapiens
CAFQLLLMTSFSAGEIFILTAMSYDRYVAICCPLNYEVLELVHV

SEQ ID NO: 19339 - protein, 400 aa, Homo sapiens
MEDGVYEPPDLTPEERMELENIRRRKQELLVEIQRLREELSEAMSEVEGLEANEGSKTLQRNRKMAMGRKKFNMDPKKGIQFLVENELLQNTPEEIARFLYKGEGLNKTAIGDYLGEREELNLAVLHAFVDLHEFTDLNLVQALRQFLWSFRLPGEAQKIDRMMEAFAQRYCLCNPGVFQSTDTCYVLSFAVIMLNTSLHNPNVRDKPGLERFVAMNRGINEGGDLPEELLRNLYDSIRNEPFKIPEDDGNDLTHTFFNPDREGWLLKLGGGRVKTWKRRWFILTDNCLYYFEYTTDKEPRGIIPLENLSIREVDDPRKPNCFELYIPNNKGQLIKACKTEADGRVVEGNHMVYRISAPTQEEKDEWIKSIQAAVSVDPFYEMLAARKKRISVKKKQEQP

SEQ ID NO: 19340 - protein, 322 aa, Homo sapiens
LLAVALLPWTCASRALQHLDPPAPLPLVIWHGMGDSCCNPLSMGAIKKMVEKKIPGIYVLSLEIGKTLMEDVENSFFLNVNSQVTTVCQALAKDPKLQQGYNAMGFSQGGQFLRAVAQRCPSPPMINLISVGGQHQGVFGLPRCPGESSHICDFIRKTLNAGAYSKVVQERLVQAEYWHDPIKEDVYRNHSIFLADINQERGINESYKKNLMALKKFVMVKFLNDSIVDPVDSEWFGFYRSGQAKETIPLQETSLYTQVTGRESILGGWCFFSSQFLKLLCSLVLEPFPLHLRALGPPGAKGNGQCRTASVSGYRRGPSSVV

SEQ ID NO: 19341 - protein, 190 aa, Homo sapiens
MELQALIDSHFEARKKEEEELVALKERIEKRRAERAEQQRIRAEKERERQNRLAEEKARREEEDAKRRAEDDLKKKKALSSMGANYSSYLAKADQKRGKKQTAREMKKKILAERRKPLNIDHLGEDKLRDKAKELWETLHQLEIDKFEFGEKLKRQKYDITTLRSRIDQAQKHSKKAGTPAKGKVGGRWK

SEQ ID NO: 19342 - protein, 46 aa, Homo sapiens
GCAFQLLLMTSFSAGEIFILTAMSYDRYVAICCPLNYEVIHVPIRA

SEQ ID NO: 19343 - protein, 365 aa, Homo sapiens
MRLHLLLLLALCGAGTTAAELSYSLRGNWSICNGNGSLELPGAVPGCVHSALFQQGLIQDSYYRFNDLNYRWVSLDNWTYSKEFKIPFEISKWQKVNLILEGVDTVSKILFNEVTIGETDNMFNRYSFDITNVVRDVNSIELRFQSAVLYAAQQSKAHTRYQVPPDCPPLVQKGECHVNFVRKEQCSFSWDWGPSFPTQGIWKDVRIEAYNICHLNYFTFSPIYDKSAQEWNLEIESTFDVVSSKPVGGQVIVAIPKLQTQQTYSIELQPGKRIVELFVNISKNITVETWWPHGHGNQTGYNMTVLFELDGGLNIEKSAKSWRLESKIKVSAELCSFRRLWERILPCPFQFLIIAGNPWLVDASL

SEQ ID NO: 19344 - protein, 198 aa, Homo sapiens
MEPGLWLLFGLTVTSAAGFVPCSQSGDAGRRGVSQAPTAARSEGDCEETVAGPGEETVAGPGEGTVAPTALQGPSPGSPGQEQAAEGAPEHHRSRRCTCFTYKDKECVYYCHLDIIWINTPEQTVPYGLSNYRGSFRGKRSAGPLPGNLQLSHRPHLRCACVGRYDKACLHFCTQTLDVSSNSRTAEKTDKEEEGKVT

SEQ ID NO: 19345 - protein, 924 aa, Homo sapiens
MAQPLSRPLVLSQSPPWPPAPPSPRFPHRPQPLPGSPSRTPFQSLPLAWPPSRPRPSFHPLSQIPAQALSQPHSQCLLKALAQPRPLLQSPSQPFLPSHSLPLFKPQCPAQPNPLSQPLPSSLCLPKSLPLVPPISHTLPLSQPRLKSGFQLPPALLLLLLFSVLGPGAGGLFLTDYSTCSPRKLSPFRSFASTELFHFHVPEDTFLAVWNLIIFKEQGGTFGDHCPDQSVTVYFRSGAPPVINPLHTHFPGDTAVPGVFSLTLSWTLPNRTSGIFNVSSPLPGDWFLAAHLPQAHGHISVKGLQDECQYLLQPQLIVRRLLDVAVLVPGRPSEQTLSPHNRSALYKVFVPSFTYRVSAQLVCVGGRGVSACPLSLRLRPKAPPLHNSSSVACGGASGCQLELALPPWGHWVYVRVETSSRGPGRTIRFQLCVRLQECPQPGLLRALVPGAAMNMPQSLGNQPLPPEPPSLGTPAEGPGTTSPPEHCWPVRPTLRNELDTFSVHFYIFFGPSVALPPERPAVFAMRLLPVLDSGGVLSLELQLNASSVRQENVTVFGCLTHEVPLSLGDAAVTCSKESLAGFLLSVSATTRVARLRIPFPQTGTWFLALRSLCGVGPRFVRCRNATAEVRMRTFLSPCVDDCGPYGQCKLLRTHNYLYAACECKAGWRGWGCTDSADALTYGFQLLSTLLLCLSNLMFLPPVVLAIRSRYVLEAAVYTFTMFFSTFYHACDQPGIVVFCIMDYDVLQFCDFLGSLMSVWVTVIAMARLQPVVKQVLYLLGAMLLSMALQLDRHGLWNLLGPSLFALGILATAWTVRSVRRRHCYPPTWRRWLFYLCPGSLIAGSAVLLYAFVETRDNYFYIHSIWHMLIAGSVGFLLPPRAKTDHGVPSGARARGCGYQLCINEQEELGLVGPGGATVSSICAS

SEQ ID NO: 19346 - protein, 1000 aa, Homo sapiens
MPPRPSSGELWGIHLMPPRILVECLLPNGMIVTLECLREATLITIKHELFKEARKYPLHQLLQDESSYIFVSVTQEAEREEFFDETRRLCDLRLFQPFLKVIEPVGNREEKILNREIGFAIGMPVCEFDMVKDPEVQDFRRNILNVCKEAVDLRDLNSPHSRAMYVYPPNVESSPELPKHIYNKLDKGQIIVVIWVIVSPNNDKQKYTLKINHDCVPEQVIAEAIRKKTRSMLLSSEQLKLCVLEYQGKYILKVCGCDEYFLEKYPLSQYKYIRSCIMLGRMPNLMLMAKESLYSQLPMDCFTMPSYSRRISTATPYMNGETSTKSLWVINSALRIKILCATYVNVNIRDIDKIYVRTGIYHGGEPLCDNVNTQRVPCSNPRWNEWLNYDIYIPDLPRAARLCLSICSVKGRKGAKEEHCPLAWGNINLFDYTDTLVSGKMALNLWPVPHGLEDLLNPIGVTGSNPNKETPCLELEFDWFSSVVKFPDMSVIEEHANWSVSREAGFSYSHAGLSNRLARDNELRENDKEQLKAISTRDPLSEITEQEKDFLWSHRHYCVTIPEILPKLLLSVKWNSRDEVAQMYCLVKDWPPIKPEQAMELLDCNYPDPMVRGFAVRCLEKYLTDDKLSQYLIQLVQVLKYEQYLDNLLVRFLLKKALTNQRIGHFFFWHLKSEMHNKTVSQRFGLLLESYCRACGMYLKHLNRQVEAMEKLINLTDILKQEKKDETQKVQMKFLVEQMRRPDFMDALQGFLSPLNPAHQLGNLRLEECRIMSSAKRPLWLNWENPDIMSELLFQNNEIIFKNGDDLRQDMLTLQIIRIMENIWQNQGLDLRMLPYGCLSIGDCVGLIEVVRNSHTIMQIQCKGGLKGALQFNSHTLHQWLKDKNKGEIYDAAIDLFTRSCAGYCVATFILGIGDRHNSNIMVKDDGQLFHIDFGHFLDHKKKKFGYKRERVPFVLTQDFLIVISKGAQECTKTREFESSQGECFQLFPIQYDIGRGFVT

SEQ ID NO: 19347 - protein, 413 aa, Homo sapiens
MRLHLLLLLALCGAGTTAAELSYSLRGNWSICNGNGSLELPGAVPGCVHSALFQQGLIQDSYYRFNDLNYRWVSLDNWTYSKEFKIPFEISKWQKVNLILEGVDTVSKILFNEVTIGETDNMFNRYSFDITNVVRDVNSIELRFQSAVLYAAQQSKAHTRYQVPPDCPPLVQKGECHVNFVRKEQCSFSWDWGPSFPTQGIWKDVRIEAYNICHLNYFTFSPIYDKSAQEWNLEIESTFDVVSSKPVGGQVIVAIPKLQTQQTYSIELQPGKRIVELFVNISKNITVETWWPHGHGNQTGYNMTVLFELDGGLNIEKSAKVYFRTVELIEEPIKGSPGLSFYFKINGFPIFLKGSNWIPADSFQDRVTSELLRLLLQSVVDANMNTLRVWGGGIYEQDEFYELCDELGIMVCI

SEQ ID NO: 19348 - protein, 626 aa, Homo sapiens
MQRADSEQPSKRPRCDDSPRTPSNTPSAEADWSPGLELHPDYKTWGPEQVCSFLRRGGFEEPVLLKNIRENEITGALLPCLDESRFENLGVSSLGERKKLLSYIQRLVQIHVDTMKVINDPIHGHIELHPLLVRIIDTPQFQRLRYIKQLGGGYYVFPGASHNRFEHSLGVGYLAGCLVHALGEKQPELQISERDVLCVQIAGLCHDLGHGPFSHMFDGRFIPLARPEVKWTHEQGSVMMFEHLINSNGIKPVMEQYGLIPEEDICFIKEQIVGPLESPVEDSLWPYKGRPENKSFLYEIVSNKRNGIDVDKWDYFARDCHHLGIQNNFDYKRFIKFARVCEVDNELRICARDKEVGNLYDMFHTRNSLHRRAYQHKVGNIIDTMITDAFLKADDYIEITGAGGKKYRISTAIDDMEAYTKLTDNIFLEILYSTDPKLKDAREILKQIEYRNLFKYVGETQPTGQIKIKREDYESLPKEVASAKPKVLLDVKLKAEDFIVDVINMDYGMQEKNPIDHVSFYCKTAPNRAIRITKNQVSQLLPEKFAEQLIRVYCKKVDRKSLYAARQYFVQWCADRNFTKPQDGDVIAPLITPQKKEWNDSTSVQNPTRLREASKSRVQLFKDDPM

SEQ ID NO: 19349 - protein, 513 aa, Homo sapiens
MSAAWIPALGLGVCLLLLPGPAGSEGAAPIAITCFTRGLDIRKEKADVLCPGGCPLEEFSVYGNIVYASVSSICGAAVHRGVISNSGGPVRVYSLPGRENYSSVDANGIQSQMLSRWSASFTVTKGKSSTQEATGQAVSTAHPPTGKRLKKTPEKKTGNKDCKADIAFLIDGSFNIGQRRFNLQKNFVGKVALMLGIGTEGPHVGLVQASEHPKIEFYLKNFTSAKDVLFAIKEVGFRGGNSNTDVAERMSSTTVDSEERLLRGKALKHTAQKFFTVDAGVRKGIPKVVVVFIDGWPSDDIEEAGIVAREFGVNVFIVSVAKPIPEELGMVQDVTFVDKAVCRNNGFFSYHMPNWFGTTKYVKPLVQKLCTHEQMMCSKTCYNSVNIAFLIDGSSSVGDSNFRLMLEFVSNIAKTFEISDIGAKIAAVQFTYDQRTEFSFTDYSTKENVLAVIRNIRYMSGGTATGDAISFTVRNVFGPIRESPNKNFLVIVTDGQSYDDVQGPAAAAHDAAK

SEQ ID NO: 19350 - protein, 500 aa, Homo sapiens
MGLQACLLGLFALILSGKCSYSPEPDQRRTLPPGWVSLGRADPEEELSLTFALRQQNVERLSELVQAVSDPSSPQYGKYLTLENVADLVRPSPLTLHTVQKWLLAAGAQKCHSVITQDFLTCWLSIRQAELLLPGAEFHHYVGGPTETHVVRSPHPYQLPQALAPHVDFVGGLHRFPPTSSLRQRPEPQVTGTVGLHLGVTPSVIRKRYNLTSQDVGSGTSNNSQACAQFLEQYFHDSDLAQFMRLFGGNFAHQASVARVVGQQGRGRAGIEASLDVQYLMSAGANISTWVYSSPGDSGAGCWSVSGRHQFRPTFPASSPYVTTVGGTSFQEPFLITNEIVDYISGGGFSNVFPRPSYQEEAVTKFLSSSPHLPPSSYFNASGRAYPDVAALSDGYWVVSNRVPIPWVSGTSASTPVFGGILSLINEHRILSGRPPLGFLNPRLYQQHGAGLFDVTRGCHESCLDEEVEGQGFCSGPGWDPVTGWGTPNFPALLKTLLNP

SEQ ID NO: 19351 - protein, 184 aa, Homo sapiens
MKTILGFKGLFYLHSLIWTCAGDWSAIQVHCTQFWFFARIKPTIFYNLYVNPDEVFLGDGCHVTHVLPNVYYEFFYHPHDCGIVTQPLQEVLLLKTKIRYISRDSTVRSEMPLSCVVHNQHHLLNAVEMRDGETDNVNEWEIEVRIHIANEDMGSNFCNTILVLKVKVIFRYLLIFISRTLPRR

SEQ ID NO: 19352 - protein, 730 aa, Homo sapiens
MLLLLLLLLLLPPLVLRVAASRCLHDETQKSVSLLRPPFSQLPSKSRSSSLTLPSSRDPQPLRIQSCYLGDHISDGAWDPEGEGMRGGSRALAAVREATQRIQAVLAVQGPLLLSRDPAQYCHAVWGDPDSPNYHRCSLLNPGYKGESCLGAKIPDTHLRGYALWPEQGPPQLVQPDGPGVQNTDFLLYVRVAHTSKCHQEPSVIAYAACCQLDSEDRPLAGTIVYCAQHLTSPSLSHSDIVMATLHELLHALGFSGQLFKKWRDCPSGFSVRENCSTRQLVTRQDEWGQLLLTTPAVSLSLAKHLGVSGASLGVPLEEEEGLLSSHWEARLLQGSLMTATFDGAQRTRLDPITLAAFKDSGWYQVNHSAAEELLWGQGSGPEFGLVTTCGTGSSDFFCTGSGLGCHYLHLDKGSCSSDPMLEGCRMYKPLANGSECWKKENGFPAGVDNPHGEIYHPQSRCFFANLTSQLLPGDKPRHPSLTPHLKEAELMGRCYLHQCTGRGAYKVQVEGSPWVPCLPGKVIQIPGYYGLLFCPRGRLCQTNEDINAVTSPPVSLSTPDPLFQLSLELAGPPGHSLGKEQQEGLAEAVLEALASKGGTGRCYFHGPSITTSLVFTVHMWKSPGCQGPSVATLHKALTLTLQKKPLEVYHGGANFTTQPSKLLVTSDHNPSMTHLRLSMGLCLMLLILVGVMGTTAYQKRATLPVRPSASYHSPELHSTRVPVRGIREV

SEQ ID NO: 19353 - protein, 809 aa, Homo sapiens
MAVLLLLLRALRRGPGPGPRPLWGPGPAWSPGFPARPGRGRPYMASRPPGDLAEAGGRALQSLQLRLLTPTFEGINGLLLKQHLVQNPVRLWQLLGGTFYFNTSRLKQKNKEKDKSKGKAPEEDEEERRRRERDDQMYRERLRTLLVIAVVMSLLNALSTSGGSISWNDFVHEMLAKGEVQRVQVVPESDVVEVYLHPGAVVFGRPRLALMYRMQVANIDKFEEKLRAAEDELNIEAKDRIPVSYKRTGFFGNALYSVGMTAVGLAILWYVFRLAGMTGREGGFSAFNQLKMARFTIVDGKMGKGVSFKDVAGMHEAKLEVREFVDYLKSPERFLQLGAKVPKGALLLGPPGCGKTLLAKAVATEAQVPFLAMAGPEFVEVIGGLGAARVRSLFKEARARAPCIVYIDEIDAVGKKRSTTMSGFSNTEEEQTLNQLLVEMDGMGTTDHVIVLASTNRADILDGALMRPGRLDRHVFIDLPTLQERREIFEQHLKSLKLTQSSTFYSQRLAELTPGFSGADIANICNEAALHAAREGHTSVHTLNFEYAVERVLAGTAKKSKILSKEEQKVVAFHESGHALVGWMLEHTEAVMKVSITPRTNAALGFAQMLPRDQHLFTKEQLFERMCMALGGRASEALSFNEVTSGAQDDLRKVTRIAYSMVKQFGMAPGIGPISFPEAQEGLMGIGRRPFSQGLQQMMDHEARLLVAKAYRHTEKVLQDNLDKLQARALCVTWGSCLGPLDCRPQPAAAASGQVWAVPSPAEAGLPVDPCSSRLTKQLCRARAHHSGSHNGSKAAAGKRPSGKGSDKL

SEQ ID NO: 19354 - protein, 3095 aa, Homo sapiens
MVFESVVVDVLNRFLGDYVVDLDTSQLSLGIWKGAVALKNLQIKENALSQLDVPFKVKVGHIGNLKLIIPWKNLYTQPVEAVLEEIYLLIVPSSRIKYDPLKEEKQLMEAKQQELKRIEEAKQKVVDQEQHLPEKQDTFAEKLVTQIIKNLQVKISSIHIRYEDDITNRDKPLSFGISLQNLSMQTTDQYWVPCLHDETEKLVRKLIRLDNLFAYWNVKSQMFYLSDYDNSLDDLKNGIVNENIVPEGYDFVFRPISANAKLVMNRRSDFDFSAPKINLEIELHNIAIEFNKPQYFSIMELLESVDMMAQNLPYRKFKPDVPLHHHAREWWAYAIHGVLEVNVCPRLWMWSWKHIRKHRQKVKQYKELYKKKLTSKKPPGELLVSLEELEKTLDVFNITIARQTAEVEVKKAGYKIYKEGVKDPEDNKGWFSWLWSWSEQNTNEQQPDVQPETLEEMLTPEEKALLYEAIGYSETAVDPTLLKTFEALKFFVHLKSMSIVLRENHQKPELVDIVIEEFSTLIVQRPGAQAIKFETKIDSFHITGLPDNSEKPRLLSSLDDAMSLFQITFEINPLDETVSQRCIIEAEPLEIIYDARTVNSIVEFFRPPKEVHLAQLTAATLTKLEEFRSKTATGLLYIIETQKVLDLKINLKASYIIVPQDGIFSPTSNLLLLDLGHLKVTSKSRSELPDVKQGEANLKEIMDRAYDSFDIQLTSVQLLYSRVGDNWREARKLSVSTQHILVPMHFNLELSKAMVFMDVRMPKFKIYGKLPLISLRISDKKLQGIMELIESIPKPEPVTEVSAPVKSFQIQTSTSLGTSQISQKIIPLLELPSVSEDDSEEEFFDAPCSPLEEPLQFPTGVKSIRTRKLQKQDCSVNMTTFKIRFEVPKVLIEFYHLVGDCELSVVEILVLGLGAEIEIRTYDLKANAFLKEFCLKCPEYLDENKKPVYLVTTLDNTMEDLLTLEYVKAEKNVPDLKSTYNNVLQLIKVNFSSLDIHLHTEALLNTINYLHNILPQSEEKSAPVSTTETEDKGDVIKKLALKLSTNEDIITLQILAELSCLQIFIQDQKCNISEIKIEGLDSEMIMRPSETEINAKLRNIIVLDSDITAIYKKAVYITGKEVFSFKMVSYMDATAGSAYTDMNVVDIQVNLIVGCIEVVFVTKFLYSILAFIDNFQAAKQALAEATVQAAGMAATGVKELAQRSSRMALDINIKAPVVVIPQSPVSENVFVADFGLITMTNTFHMITESQSSPPPVIDLITIKLSEMRLYRSRFINDAYQEVLDLLLPLNLEVVVERNLCWEWYQEVPCFNVNAQLKPMEFILSQEDITTIFKTLHGNIWYEKDGSASPAVTKDQYSATSGVTTNASHHSGGATVVTAAVVEVHSRALLVKTTLNISFKTDDLTMVLYSPGPKQASFTDVRDPSLKLAEFKLENIISTLKMYTDGSTFSSFSLKNCILDDKRPHVKKATPRMIGLTVGFDKKDMMDIKYRKVRDGCVTDAVFQEMYICASVEFLQTVANVFLEAYTTGTAVETSVQTWTAKEEVPTQESVKWEINVIIKNPEIVFVADMTKNDAPALVITTQCEICYKGNLENSTMTAAIKDLQVRACPFLPVKRKGKITTVLQPCDLFYQTTQKGTDPQVIDMSVKSLTLKVSPVIINTMITITSALYTTKETIPEETASSTAHLWEKKDTKTLKMWFLEESNETEKIAPTTELVPKGEMIKMNIDSIFIVLEAGIGHRTVPMLLAKSRFSGEGKNWSSLINLHCQLELEVHYYNEMFGVWEPLLEPLEIDQTEDFRPWNLGIKMKKKAKMAIVESDPEEENYKVPEYKTVISFHSKDQLNITLSKCGLVMLNNLVKAFTEAATGSSADFVKDLAPFMILNSLGLTISVSPSDSFSVLNIPMAKSYVLKNGESLSMDYIRTKDNDHFNAMTSLSSKLFFILLTPVNHSTADKIPLTKVGRRLYTVRHRESGVERSIVCQIDTVEGSKKVTIRSPVQIRNHFSVPLSVYEGDTLLGTASPENEFNIPLGSYRSFIFLKPEDENYQMCEGIDFEEIIKNDGALLKKKCRSKNPSKESFLINIVPEKDNLTSLSVYSEDGWDLPYIMHLWPPILLRNLLPYKIAYYIEGIENSVFTLSEGHSAQICTAQLGKARLHLKLLDYLNHDWKSEYHIKPNQQDISFVSFTCVTEMEKTDLDIAVHMTYNTGQTVVAFHSPYWMVNKTGRMLQYKADGIHRKHPPNYKKPVLFSFQPNHFFNNNKVQLMVTDSELSNQFSIDTVGSHGAVKCKGLKMDYQVGVTIDLSSFNITRIVTFTPFYMIKNKSKYHISVAEEGNDKWLSLDLEQCIPFWPEYASSKLLIQVERSEDPPKRIYFNKQENCILLRLDNELGGIIAEVNLAEHSTVITFLDYHDGAATFLLINHTKNELVQYNQSSLSEIEDSLPPGKAVFYTWADPVGSRRLKWRCRKSHGEVTQKDDMMMPIDLGEKTIYLVSFFEGLQRIILFTEDPRVFKVTYESEKAELAEQEIAVALQDVGISLVNNYTKQEVAYIGITSSDVVWETKPKKKARWKPMSVKHTEKLEREFKEYTESSPSEDKVIQLDTNVPVRLTPTGHNMKILQPHVIALRRNYLPALKVEYNTSAHQSSFRIQIYRIQIQNQIHGAVFPFVFYPVKPPKSVTMDSAPKPFTDVSIVMRSAGHSQISRIKYFKVLIQEMDLRLDLGFIYALTDLMTEAEVTENTEVELFHKDIEAFKEEYKTASLVDQSQVSLYEYFHISPIKLHLSVSLSSGREEAKDSKQNGGLIPVHSLNLLLKSIGATLTDVQDVVFKLAFFELNYQFHTTSDLQSEVIRHYSKQAIKQMYVLILGLDVLGNPFGLIREFSEGVEAFFYEPYQGAIQGPEEFVEGMALGLKALVGGAVGGLAGAASKITGAMAKGVAAMTMDEDYQQKRREAMNKQPAGFREGITRGGKGLVSGFVSGITGIVTKPIKGAQKGGAAGFFKGVGKGLVGAVARPTGGIIDMASSTFQGIKRATETSEVESLRPPRFFNEDGVIRPYRLRDGTGNQMLQKIQFYREWIMTHSSSSDDDDDDDDDDESDLNH

SEQ ID NO: 19355 - protein, 631 aa, Homo sapiens
MKLLHVFLLFLCFHLRFCKVTYTSQEDLVEKKCLAKKYTHLSCDKVFCQPWQRCIEGTCVCKLPYQCPKNGTAVCATNRRSFPTYCQQKSLECLHPGTKFLNNGTCTAEGKFSVSLKHGNTDSEGIVEVKLVDQDKTMFICKSSWSMREANVACLDLGFQQGADTQRRFKLSDLSINSTECLHVHCRGLETSLAECTFTKRRTMGYQDFADVVCYTQKADSPMDDFFQCVNGKYISQMKACDGINDCGDQSDELCCKACQGKGFHCKSGVCIPSQYQCNGEVDCITGEDEVGCAGFASVTQEETEILTADMDAERRRIKSLLPKLSCGVKNRMHIRRKRIVGGKRAQLGDLPWQVAIKDASGITCGGIYIGGCWILTAAHCLRASKTHRYQIWTTVVDWIHPDLKRIVIEYVDRIIFHENYNAGTYQNDIALIEMKKDGNKKDCELPRSIPACVPWSPYLFQPNDTCIVSGWGREKDNERVFSLQWGEVKLISNCSKFYGNRFYEKEMECAGSKPFPRYGYKPSPPNGCGSPLFGVHLNIGIPSLTKCCNQHDRCYETCGKSKNDCDEEFQYCLSKICRDVQKTLGLTQHVQACETTVELLFDSVIHLGCKPYLDSQRAACRCHYEEKTDL

SEQ ID NO: 19356 - protein, 172 aa, Homo sapiens
MATVVLGGDTMGPERIFPNQTEELGHQGPSEGTGDWSSEEPEEEQEETGSGPAGYSYQPLNQDPEQEEVELAPVGDGDVVADIQDRIQALGLHLPDPPLESEDEDEEGATALNNHSSIPMDPEHVELVKRTMAGVSLPAPGVPAWAREISDAQWEDVVQKALQARQASPAWK

SEQ ID NO: 19357 - protein, 854 aa, Homo sapiens
MIPDLSEYKWIVPDIVWEIDEYIDFEKIRKALPSSEDLVKLAPDFDKIVESLSLLKDFFTSGHKLVSEVIGASDLLLLLGSPEETAFRATDRGSESDKHFRKVSDKEKIDQLQEELLHTQLKYQRILERLEKENKELRKLVLQKDDKGIHHRKLKKSLIDMYSEVLDVLSDYDASYNTQDHLPRVVVVGDQSAGKTSVLEMIAQARIFPRGSGEMMTRSPVKVTLSEGPHHVALFKDSSREFDLTKEEDLAALRHEIELRMRKNVKEGCTVSPETISLNVKGPGLQRMVLVDLPGVINTVTSGMAPDTKETIFSISKAYMQNPNAIILCIQDGSVDAERSIVTDLVSQMDPHGRRTIFVLTKVDLAEKNVASPSRIQQIIEGKLFPMKALGYFAVVTGKGNSSESIEAIREYEEEFFQNSKLLKTSMLKAHQVTTRNLSLAVSDCFWKMVRESVEQQADSFKATRFNLETEWKNNYPRLRELDRNELFEKAKNEILDEVISLSQVTPKHWEEILQQSLWERVSTHVIENIYLPAAQTMNSGTFNTTVDIKLKQWTDKQLPNKAVEVAWETLQEEFSRFMTEPKGKEHDDIFDKLKEAVKEESIKRHKWNDFAEDSLRVIQHNALEDRSISDKQQWDAAIYFMEEALQARLKDTENAIENMVGPDWKKRWLYWKNRTQEQCVHNETKNELEKMLKCNEEHPAYLASDEITTVRKNLESRGVEVDPSLIKDTWHQVYRRHFLKTALNHCNLCRRGFYYYQRHFVDSELECNDVVLFWRIQRMLAITANTLRQQLTNTEVRRLEKNVKEVLEDFAEDGEKKIKLLTGKRVQLAEDLKKVREIQEKLDAFIEALHQEK

SEQ ID NO: 19358 - protein, 101 aa, Homo sapiens
MMSASRLAGTLIPAMAFLSCVRPESWEPCVEVVPNITYQCMELNFYKIPDNLPFSTKNLDLSFNPLRHLGSYSFFSFPELQVLDLSRCHCYSFTCSFCKSL

SEQ ID NO: 19359 - protein, 985 aa, Homo sapiens
MHRRRLALGLGFCLLAGTSLSVLWVYLENWLPVSYVPYYLPCPEILPMMMALSCLCHQQHEAALQEGEATPARGMVTVPSAQAAGAQAHTAADTHTLVGAHRLRGNLQPRASAAHLPATEPDHWGHGVCRGESSTQEIGEELINGVIYSISLRKVQLHHGGNKGQRWLGYENESALNLYETCKVRTVKAGTLEKLVEHLVPAFQGSDLSYVTIFLCTYRAFTTTQQVLDLLFKRYGRCDALTASSRYGCILPYSDEDGGPQDQLKNAISSILGTWLDQYSEDFCQPPDFPCLKQLVAYVQLNMPGSDLERRAHLLLAQLEHSEPIEAEPEALSPVPALKPTPELELALTPARAPSPVPAPAPEPEPAPTPAPGSELEVAPAPAPELQQAPEPAVGLESAPAPALELEPAPEQDPAPSQTLELEPAPAPVPSLQPSWPSPVVAENGLSEEKPHLLVFPPDLVAEQFTLMDAELFKKVVPYHCLGSIWSQRDKKGKEHLAPTIRATVTQFNSVANCVITTCLGNRSTKAPDRARVVEHWIEVARECRILKNFSSLYAILSALQSNSIHRLKKTWEDVSRDSFRIFQKLSEIFSDENNYSLSRELLIKEGTSKFATLEMNPKRAQKRPKETGIIQGTVPYLGTFLTDLVMLDTAMKDYLYGRLINFEKRRKEFEVIAQIKLLQSACNNYSIAPDEQFGAWFRAVERLSETESYNLSCELEPPSESASNTLRTKKNTAIVKRWSDRQAPSTELSTSGSSHSKSCDQLRCGPYLSSGDIADALSVHSAGSSSSDVEEINISFVPESPDGQEKKFWESASQSSPETSGISSASSSTSSSSASTTPVAATRTHKRSVSGLCNSSSALPLYNQQVGDCCIIRVSLDVDNGNMYKSILVTSQDKAPAVIRKAMDKHNLEEEEPEDYELLQILSDDRKLKIPENANVFYAMNSTANYDFVLKKRTFTKGVKVKHGASSTLPRMKQKGLKIAKGIF

SEQ ID NO: 19360 - protein, 81 aa, Homo sapiens
MGLQACLLGLFALILSGKCSYSPEPDQRRTLPPGWVSLGRADPEEELSLTFALRQQNVERLSELVQAVSDPSSPQYGAFWD

SEQ ID NO: 19361 - protein, 333 aa, Homo sapiens
MAVRRDSVWKYCWGVLMVLCRTAISKSIVLEPIYWNSSNSKFLPGQGLVLYPQIGDKLDIICPKVDSKTVGQYEYYKVYMVDKDQADRCTIKKENTPLLNCAKPDQDIKFTIKFQEFSPNLWGLEFQKNKDYYIISTSNGSLEGLDNQEGGVCQTRAMKILMKVGQDASSAGSTRNKDPTRRPELEAGTNGRSSTTSPFVKPNPGSSTDGNSAGHSGNNILGSEVALFAGIASGCIIFIVIIITLVVLLLKYRRRHRKHSPQHTTTLSLSTLATPKRSGNNNGSEPSDIIIPLRTADSVFCPHYEKVSGDYGHPVYIVQEMPPQSPANIYYKV

SEQ ID NO: 19362 - protein, 311 aa, Homo sapiens
MLKPSLPFTSLLFLQLPLLGVGLNTTILTPNGNEDTTADFFLTTMPTDSLSVSTLPLPEVQCFVFNVEYMNCTWNSSSEPQPTNLTLHYWYKNSDNDKVQKCSHYLFSEEITSGCQLQKKEIHLYQTFVVQLQDPREPRRQATQMLKLQNLVIPWAPENLTLHKLSESQLELNWNNRFLNHCLEHLVQYRTDWDHSWTEQSVDYRHKFSLPSVDGQKRYTFRVRSRFNPLCGSAQHWSEWSHPIHWGSNTSKENPFLFALEAVVISVGSMGLIISLLCVYFWLERTMPRIPTLKNLEDLVTEYHGNFSGTL

SEQ ID NO: 19363 - protein, 1319 aa, Homo sapiens
MWTLGRRAVAGLLASPSPAQAQTLTRVPRPAELAPLCGRRGLRTDIDATCTPRRAVNVAPVAVPSLRKSEDHALQTGHVLDYLCFCLLGFQSASEQRSNPDSVVHRMAGVRSTTLLSSPCEWDWHPGCSSRSKYSRKHRAVPVHGPRCQAPGMEELIWEQYTVTLQKDSKRGFGIAVSGGRDNPHFENGETSIVISDVLPGGPADGLLQENDRVVMVNGTPMEDVLHSFAVQQLRKSGKVAAIVVKRPRKVQVAALQASPPLDQDDRAFEVMDEFDGRSFRSGYSERSRLNSHGGRSRSWEDSPERGRPHERARSRERDLSRDRSRGRSLERGLDQDHARTRDRSRGRSLERGLDHDFGPSRDRDRDRSRGRSIDQDYERAYHRAYDPDYERAYSPEYRRGARHDARSRGPRSRSREHPHSRSPSPEPRGRPGPIGVLLMKSRANEEYGLRLGSQIFVKEMTRTGLATKDGNLHEGDIILKINGTVTENMSLTDARKLIEKSRGKLQLVVLRDSQQTLINIPSLNDSDSEIEDISEIESNRSFSPEERRHQYSDYDYHSSSEKLKERPSSREDTPSRLSRMGATPTPFKSTGDIAGTVVPETNKEPRYQEDPPAPQPKAAPRTFLRPSPEDEAIYGPNTKMVRFKKGDSVGLRLAGGNDVGIFVAGIQEGTSAEQEGLQEGDQILKVNTQDFRGLVREDAVLYLLEIPKGEMVTILAQSRADVYRDILACGRGDSFFIRSHFECEKETPQSLAFTRGEVFRVVDTLYDGKLGNWLAVRIGNELEKGLIPNKSRAEQMASVQNAQRDNAGDRADFWRMRGQRSGVKKNLRKSREDLTAVVSVSTKFPAYERVLLREAGFKRPVVLFGPIADIAMEKLANELPDWFQTAKTEPKDAGSEKSTGVVRLNTVRQIIEQDKHALLDVTPKAVDLLNYTQWFPIVIFFNPDSRQGVKTMRQRLNPTSNKSSRKLFDQANKLKKTCAHLFTATINLNSANDSWFGSLKDTIQHQQGEAVWVSEGKMEGMDDDPEDRMSYLTAMGADYLSCDSRLISDFEDTDGEGGAYTDNELDEPAEEPLVSSITRSSEPVQHEESIRKPSPEPRAQMRRAASSDQLRDNSPPPAFKPEPPKAKTQNKEESYDFSKSYEYKSNPSAVAGNETPGASTKGYPPPVAAKPTFGRSILKPSTPIPPQEGEEVGESSEEQDNAPKSVLGKVKIFEKMDHKARLQRMQELQEAQNARIEIAQKHPDIYAVPIKTHKPDPGTPQHTSSRPPEPQKAPSRPYQDTRGSYGSDAEEEEYRQQLSEHSKRGYYGQSARYRDTEL

SEQ ID NO: 19364 - protein, 278 aa, Homo sapiens
MAVLLLLLRALRRGPGPGPRPLWGPGPAWSPGFPARPGRGRPYMASRPPGDLAEAGGRALQSLQLRLLTPTFEGINGLLLKQHLVQNPVRLWQLLGGTFYFNTSRLKQKNKEKDKSKGKAPEEDEEERRRRERDDQMYRERLRTLLVIAVVMSLLNALSTSGGSISWNDFVHEMLAKGEVQRVQVVPESDVVEVYLHPGAVVFGRPRLALMYRMQVANIDKFEEKLRAAEDELNIEAKDRIPVSYKRTGFFGKVSLCRPGWSAVVQSQLTAASTSQDQ

SEQ ID NO: 19365 - protein, 727 aa, Homo sapiens
MFDHNGKIIQKTPYPRPRGTTVSVQQLFSTLPVRHKEFQRNIKKEYAKMVQVLHAYCIISAGIRVSCTNQLGQGKRQPVVCTGGSPSIKENIGSVFGQKQLQSLIPFVQLPPSDSVCEEYGLSCSDALHNLFYISGFISQCTHGVGRSSTDRQFFFINRRPCDPAKVCRLVNEVYHMYNRHQYPFVVLNISVDSECVDINVTPDKRQILLQEEKLLLAVLKTSLIGMFDSDVNKLNVSQQPLLDVEGNLIKMHAADLEKPMVEKQDQSPSLRTGEEKKDVSISRLREAFSLRHTTENKPHSPKTPEPRRSPLGQKRGMLSSSTSGAISDKGVLRPQKEAVSSSHGPSDPTDRAEVEKDSGHGSTSVDSEGFSIPDTGSHCSSEYAASSPGDRGSQEHVDSQEKAPKTDDSFSDVDCHSNQEDTGCKFRVLPQPTNLATPNTKRFKKEEILSSSDICQKLVNTQDMSASQVDVAVKINKKVVPLDFSMSSLAKRIKQLHHEAQQSEGEQNYRKFRAKICPGENQAAEDELRKEISKTMFAEMEIIGQFNLGFIITKLNEDIFIVDQHATDEKYNFEMLQQHTVLQGQRLIAPQTLNLTAVNEAVLIENLEIFRKNGFDFVIDENAPVTERAKLISLPTSKNWTFGPQDVDELIFMLSDSPGVMCRPSRVKQMFASRACRKSVMIGTALNTSEMKKLITHMGEMDHPWNCPHGRPTMRHIANLGVISQN

SEQ ID NO: 19366 - protein, 1489 aa, Homo sapiens
MAEARKRRELLPLIYHHLLRAGYVRAAREVKEQSGQKCFLAQPVTLLDIYTHWQQTSELGRKRKAEEDAALQAKKTRVSDPISTSESSEEEEEAEAETAKATPRLASTNSSVLGADLPSSMKEKAKAETEKAGKTGNSMPHPATGKTVANLLSGKSPRKSAEPSANTTLVSETEEEGSVPAFGAAAKPGMVSAGQADSSSEDTSSSSDETDVEGKPSVKPAQVKASSVSTKESPARKAAPAPGKVGDVTPQVKGGALPPAKRAKKPEEESESSEEGSESEEEAPAGTRSQVKASEKILQVRAASAPAKGTPGKGATPAPPGKAGAVASQTKAGKPEEDSESSSEESSDSEEETPAAKALLQAKASGKTSQVGAASAPAKESPRKGAAPAPPGKTGPAVAKAQAGKREEDSQSSSEESDSEEEAPAQAKPSGKAPQVRAASAPAKESPRKGAAPAPPRKTGPAAAQVQVGKQEEDSRSSSEESDSDREALAAMNAAQVKPLGKSPQVKPASTMGMGPLGKGAGPVPPGKVGPATPSAQVGKWEEDSESSSEESSDSSDGEVPTAVAPAQEKSLGNILQAKPTSSPAKGPPQKAGPVAVQVKAEKPMDNSESSEESSDSADSEEAPAAMTAAQAKPALKIPQTKACPKKTNTTASAKVAPVRVGTQAPRKAGTATSPAGSSPAVAGGTQRPAEDSSSSEESDSEEEKTGLAVTVGQAKSVGKGLQVKAASVPVKGSLGQGTAPVLPGKTGPTVTQVKAEKQEDSESSEEESDSEEAAASPAQVKTSVKKTQAKANPAAARAPSAKGTISAPGKVVTAAAQAKQRSPSKVKPPVRNPQNSTVLARGPASVPSVGKAVATAAQAQTGPEEDSGSSEEESDSEEEAETLAQVKPSGKTHQIRAALAPAKESPRKGAAPTPPGKTGPSAAQAGKQDDSGSSSEESDSDGEAPAAVTSAQVIKPPLIFVDPNRSPAGPAATPAQAQAASTPRKARASESTARSSSSESEDEDVIPATQCLTPGIRTNVVTMPTAHPRIAPKASMAGASSSKESSRISDGKKQEGPATQVSKKNPASLPLTQAALKVLAQKASEAQPPVARTQPSSGVDSAVGTLPATSPQSTSVQAKGTNKLRKPKLPEVQQATKAPESSDDSEDSSDSSSGSEEDGEGPQGAKSAHTLVGPTPSRTETLVEETAAESSEDDVVAPSQSLLSGYMTPGLTPANSQASKATPKLDSSPSVSSTLAAKDDPDGKQEAKPQQAAGMLSPKTGGKEAASGTTPQKSRKPKKGAGNPQASTLALQSNITQCLLGQPWPLNEAQVQASVVKVLTELLEQERKKVVDTTKESSRKGWESRKRKLSGDQPAARTPRSKKKKKLGAGEGGEASVSPEKTSTTSKGKAKRDKASGDVKEKKGKGSLGSQGAKDEPEEELQKGMGTVEGGDQSNPKSKKEKKKSDKRKKDKEKKEKKKKAKKASTKDSESPSQKKKKKKKKTAEQTV

SEQ ID NO: 19367 - protein, 1741 aa, Homo sapiens
MAKPTSKDSGLKEKFKILLGLGTPRPNPRSAEGKQTEFIITAEILRELSMECGLNNRIRMIGQICEVAKTKKFEEHAVEALWKAVADLLQPERPLEARHAVLALLKAIVQGQGERLGVLRALFFKVIKDYPSNEDLHERLEVFKALTDNGRHITYLEEELADFVLQWMDVGLSSEFLLVLVNLVKFNSCYLDEYIARMVQMICLLCVRTASSVDIEVSLQVLDAVVCYNCLPAESLPLFIVTLCRTINVKELCEPCWKLMRNLLGTHLGHSAIYNMCHLMEDRAYMEDAPLLRGAVFFVGMALWGAHRLYSLRNSPTSVLPSFYQAMACPNEVVSYEIVLSITRLIKKYRKELQVVAWDILLNIIERLLQQLQTLDSPELRTIVHDLLTTVEELCDQNEFHGSQERYFELVERCADQRPESSLLNLISYRAQSIHPAKDGWIQNLQALMERFFRSESRGAVRIKVLDVLSFVLLINRQFYEEELINSVVISQLSHIPEDKDHQVRKLATQLLVDLAEGCHTHHFNSLLDIIEKVMARSLSPPPELEERDVAAYSASLEDVKTAVLGLLVILQTKLYTLPASHATRVYEMLVSHIQLHYKHSYTLPIASSIRLQAFDFLLLLRADSLHRLGLPNKDGVVRFSPYCVCDYMEPERGSEKKTSGPLSPPTGPPGPAPAGPAVRLGSVPYSLLFRVLLQCLKQESDWKVLKLVLGRLPESLRYKVLIFTSPCSVDQLCSALCSMLSGPKTLERLRGAPEGFSRTDLHLAVVPVLTALISYHNYLDKTKQREMVYCLEQGLIHRCASQCVVALSICSVEMPDIIIKALPVLVVKLTHISATASMAVPLLEFLSTLARLPHLYRNFAAEQYASVFAISLPYTNPSKFNQYIVCLAHHVIAMWFIRCRLPFRKDFVPFITKGLRSNVLLSFDDTPEKDSFRARSTSLNERPKSRIQTSLTSASLGSADENSVAQADDSLKNLHLELTETCLDMMARYVFSNFTAVPKRSPVGEFLLAGGRTKTWLVGNKLVTVTTSVGTGTRSLLGLDSGELQSGPESSSSPGVHVRQTKEAPAKLESQAGQQVSRGARDRVRSMSGGHGLRVGALDVPASQFLGSATSPGPRTAPAAKPEKASAGTRVPVQEKTNLAAYVPLLTQGWAEILVRRPTGNTSWLMSLENPLSPFSSDINNMPLQELSNALMAAERFKEHRDTALYKSLSVPAASTAKPPPLPRSNTDSAVVMEEGSPGEVPVLVEPPGLEDVEAALGMDRRTDAYSRSSSVSSQEEKSLHAEELVGRGIPIERVVSSEGGRPSVDLSFQPSQPLSKSSSSPELQTLQDILGDPGDKADVGRLSPEVKARSQSGTLDGESAAWSASGEDSRGQPEGPLPSSSPRSPSGLRPRGYTISDSAPSRRGKRVERDALKSRATASNAEKVPGINPSFVFLQLYHSPFFGDESNKPILLPNESQSFERSVQLLDQIPSYDTHKIAVLYVGEGQSNSELAILSNEHGSYRYTEFLTGLGRLIELKDCQPDKVYLGGLDVCGEDGQFTYCWHDDIMQAVFHIATLMPTKDVDKHRCDKKRHLGNDFVSIVYNDSGEDFKLGTIKGQFNFVHVIVTPLDYECNLVSLQCRKDMEGLVDTSVAKIVSDRNLPFVARQMALHANMASQVHHSRSNPTDIYPSKWIARLRHIKRLRQRICEEAAYSNPSLPLVHPPSHSKAPAQTPAEPTPGYEVGQRKRLISSVEDFTEFV

SEQ ID NO: 19368 - protein, 473 aa, Homo sapiens
MIAKEELESVLEEEVDDFPTFGDSQSDYDTVVHPFYAYWQSFCTQKNFAWKEEYDTRQASNRWEKRAMEKENKKIRDKARKEKNELVRQLVAFIRKRDKRVQAHRKLVEEQNAEKARKAEEMRRQQKLKQAKLVEQYREQSWMTMANLEKELQEMEARYEKEFGDGSDENEMEEHELKDEEDGKDSDEAEDAELYDDLYCPACDKSFKTEKAMKNHEKSKKHREMVALLKQQLEEEEENFSRPQIDENPLDDNSEEEMEDAPKQKVKYLTFRFIFALRLSKKQKKKKQKPAQDVPGKDSYLPAAHFQMAWGKKCVLGERRDGESEHKCAKMLLENRQNYDDNFNVNGPGEGVKVDPEDTNLNQDSAKELEDSPQENVSVTEIIKPCDDPKSEAKSVPKPKGKKTKDMKKPVRVPAEPQTMSVLISCTTCHSEFPSRNKLFDHLKATGHARAPSSSSLNSATSSQSKKEKRKNR

SEQ ID NO: 19369 - protein, 775 aa, Homo sapiens
MGDHLDLLLGVVLMAGPVFGIPSCSFDGRIAFYRFCNLTQVPQVLNTTERLLLSFNYIRTVTASSFPFLEQLQLLELGSQYTPLTIDKEAFRNLPNLRILDLGSSKIYFLHPDAFQGLFHLFELRLYFCGLSDAVLKDGYFRNLKALTRLDLSKNQIRSLYLHPSFGKLNSLKSIDFSSNQIFLVCEHELEPLQGKTLSFFSLAANSLYSRVSVDWGKCMNPFRNMVLEILDVSGNGWTVDITGNFSNAISKSQAFSLILAHHIMGAGFGFHNIKDPDQNTFAGLARSSVRHLDLSHGFVFSLNSRVFETLKDLKVLNLAYNKINKIADEAFYGLDNLQVLNLSYNLLGELYSSNFYGLPKVAYIDLQKNHIAIIQDQTFKFLEKLQTLDLRDNALTTIHFIPSIPDIFLSGNKLVTLPKINLTANLIHLSENRLENLDILYFLLRVPHLQILILNQNRFSSCSGDQTPSENPSLEQLFLGENMLQLAWETELCWDVFEGLSHLQVLYLNHNYLNSLPPGVFSHLTALRGLSLNSNRLTVLSHNDLPANLEILDISRNQLLAPNPDVFVSLSVLDITHNKFICECELSTFINWLNHTNVTIAGPPADIYCVYPDSFSGVSLFSLSTEGCDEEEVLKSLKFSLFIVCTVTLTLFLMTILTVTKFRGFCFICYKTAQRLVFKDHPQGTEPDMYKYDAYLCFSSKDFTWVQNALLKHLDTQYSDQNRFNLCFEERDFVPGENRIANIQDAIWNSRKIVCLVSRHFLRDGWCLEAFSYA

SEQ ID NO: 19370 - protein, 968 aa, Homo sapiens
MSLKPQQQQQQQQQQQQQQQQQQQQQQQPPPAAANVRKPGGSGLLASPAAAPSPSSSSVSSSSATAPSSVVAATSGGGRPGLGRGRNSNKGLPQSTISFDGIYANMRMVHILTSVVGSKCEVQVKNGGIYEGVFKTYSPKCDLVLDAAHEKSTESSSGPKREEIMESILFKCSDFVVVQFKDMDSSYAKRDAFTDSAISAKVNGEHKEKDLEPWDAGELTANEELEALENDVSNGWDPNDMFRYNEENYGVVSTYDSSLSSYTVPLERDNSEEFLKREARANQLAEEIESSAQYKARVALENDDRSEEEKYTAVQRNSSEREGHSINTRENKYIPPGQRNREVISWGSGRQNSPRMGQPGSGSMPSRSTSHTSDFNPNSGSDQRVVNGGVPWPSPCPSPSSRPPSRYQSGPNSLPPRAATPTRPPSRPPSRPSRPPSHPSAHGSPAPVSTMPKRMSSEGPPRMSPKAQRHPRNHRVSAGRGSISSGLEFVSHNPPSEAATPPVARTSPSGGTWSSVVSGVPRLSPKTHRPRSPRQNSIGNTPSGPVLASPQAGIIPTEAVAMPIPAASPTPASPASNRAVTPSSEAKDSRLQDQRQNSPAGNKENIKPNETSPSFSKAENKGISPVVSEHRKQIDDLKKFKNDFRLQPSSTSESMDQLLNKNREGEKSRDLIKDKIEPSAKDSFIENSSSNCTSGSSKPNSPSISPSILSNTEHKRGPEVTSQGVQTSSPACKQEKDDKEEKKDAAEQVRKSTLNPNAKEFNPRSFSQPKPSTTPTSPRPQAQPSPSMVGHQQPTPVYTQPVCFAPNMMYPVPVSPGVQPLYPIPMTPMPVNQAKTYRAVKYLELELLRYVPNMPQQRQDQHHQSAMMHPASAAGPPIAATPPAYSTQYVAYSPQQFPNQPLVQHVPHYQSQHPHVYSPVIQGNARMMAPPTHAQPGLVSSSATQYGAHEQTHAMYGRKHFVCLFQCV

SEQ ID NO: 19371 - protein, 171 aa, Homo sapiens
MEERGDSEPTPGCSGLGPGGVRGFGDGGGAPSWAPEDAWMGTHPKYLEMMELDIGDATQVYVAFLVYLDLMESKSWHEVNCVGLPELQLICLVGTEIEGEGLQTVVPTPITASLSHNRIREILKASRKLQGDPDLPMSFTLAIVESDSTIVYYKLTDGFMLPDPQNISLRR

SEQ ID NO: 19372 - protein, 474 aa, Homo sapiens
MATNWGSLLQDKQQLEELARQAVDRALAEGVLLRTSQEPTSSEVVSYAPFTLFPSLVPSALLEQAYAVQMDFNLLVDAVSQNAAFLEQTLSSTIKQDDFTARLFDIHKQVLKEGIAQTVFLGLNRSDYMFQRSADGSPALKQIEINTISASFGGLASRTPAVHRHVLSVLSKTKEAGKILSNNPSKGLALGIAKAWELYGSPNALVLLIAQEKERNIFDQRAIENELLARNIHVIRRTFEDISEKGSLDQDRRLFVDGQEIAVVYFRDGYMPRQYSLQNWEARLLLERSHAAKCPDIATQLAGTKKVQQELSRPGMLEMLLPGQPEAVARLRATFAGLYSLDVGEEGDQAIAEALAAPSRFVLKPQREGGGNNLYGEEMVQALKQLKDSEERASYILMEKIEPEPFENCLLRPGSPARVVQCISELGIFGVYVRQEKTLVMNKHVGHLLRTKAIEHADGGVAAGVAVLDNPYPV

SEQ ID NO: 19373 - protein, 553 aa, Homo sapiens
MQARYSVSSPNSLGVVPYLGGEQSYYRAAAAAAGGGYTAMPAPMSVYSHPAHAEQYPGGMARAYGPYTPQPQPKDMVKPPYSYIALITMAIQNAPDKKITLNGIYQFIMDRFPFYRDNKQGWQNSIRHNLSLNECFVKVPRDDKKPGKGSYWTLDPDSYNMFENGSFLRRRRRFKKKDAVKDKEEKDRLHLKEPPPPGRQPPPAPPEQADGNAPGPQPPPVRIQDIKTENGTCPSPPQPLSPAAALGSGSAAAVPKIESPDSSSSSLSSGSSPPGSLPSARPLSLDGADSAPPPPAPSAPPPHHSQGFSVDNIMTSLRGSPQSAAAELSSGLLASAAASSRAGIAPPLALGAYSPGQSSLYSSPCSQTSSAGSSGGGGGGAGAAGGAGGAGTYHCNLQAMSLYAAGERGGHLQGAPGGAGGSAVDDPLPDYSLPPVTSSSSSSLSHGGGGGGGGGGQEAGHHPAAHQGRLTSWYLNQAGGDLGHLASAAAAAAAAGYPGQQQNFHSVREMFESQRIGLNNSPVNGNSSCQMAFPSSQSLYRTSGAFVYDCSKF

SEQ ID NO: 19374 - protein, 511 aa, Homo sapiens
MAVLLLLLRALRRGPGPGPRPLWGPGPAWSPGFPARPGRGRPYMASRPPGDLAEAGGRALQSLQLRLLTPTFEGINGLLLKQHLVQNPVRLWQLLGGTFYFNTSRLKQKNKEKDKSKGKAPEEDEEERRRRERDDQMYRERLRTLLVIAVVMSLLNALSTSGGSISWNDFVHEMLAKGEVQRVQVVPESDVVEVYLHPGAVVFGRPRLALMYRMQVANIDKFEEKLRAAEDELNIEAKDRIPVSYKRTGFFGNALYSVGMTAVGLAILWYVFRLAGMTGREGGFSAFNQLKMARFTIVDGKMGKGVSFKDVAGMHEAKLEVREFVDYLKSPERFLQLGAKVPKGALLLGPPGCGKTLLAKAVATEAQVPFLAMAGPEFVEVIGGLGAARVRSLFKEARARAPCIVYIDEIDAVGKKRSTTMSGFSNTEEEQTLNQLLVEMDGMGTTDHVIVLASTNRADILDGALMRPGRLDRHVFIDLPTLQRKGVALSPRLECSAAITTHCGLNLQGSS

SEQ ID NO: 19375 - protein, 454 aa, Homo sapiens
MAQQANVGELLAMLDSPMLGVRDDVTAVFKENLNSDRGPMLVNTLVDYYLETSSQPALHILTTLQEPHDKHLLDRINEYVGKAATRLSILSLLGHVIRLQPSWKHKLSQAPLLPSLLKCLKMDTDVVVLTTGVLVLITMLPMIPQSGKQHLLDFFDIFGRLSSWCLKKPGHVAEVYLVHLHASVYALFHRLYGMYPCNFVSFLRSHYSMKENLETFEEVVKPMMEHVRIHPELVTGSKDHELDPRRWKRLETHDVVIECAKISLDPTEASYEDGYSVSHQISARFPHRSADVTTSPYADTQNSYGCATSTPYSTSRLMLLNMPGQLPQTLSSPSTRLITEPPQATLWSPSMVCGMTTPPTSPGNVPPDLSHPYSKVFGTTAGGKGTPLGTPATSPPPAPLCHSDDYVHISLPQATVTPPRKVRSSSSAIPLPRHSDSLASLTLRSLIMPDRILT

SEQ ID NO: 19376 - protein, 1860 aa, Homo sapiens
MTRLSWCFSCVIRWGKYLFSCLLPLRFCLRSQPEDLEAPKTHRFKVKTFKKVKPCGICRQVITQEGCTCKVCSFSCHRKCQAKVAAPCVPPSNHELVPITTENAPKNVVDKGEGASRGGNTRKSLEDNGSTRVTPSVQPHLQPIRNMSVSRTMEDSCELDLVYVTERIIAVSFPSTANEENFRSNLREVAQMLKSKHGGNYLLFNLSERRPDITKLHAKVLEFGWPDLHTPALEKICSICKAMDTWLNADPHNVVVLHNKGNRGRIGVVIAAYMHYSNISASADQALDRFAMKRFYEDKIVPIGQPSQRRYVHYFSGLLSGSIKMNNKPLFLHHVIMHGIPNFESKGGCRPFLRIYQAMQPVYTSGIYNIPGDSQTSVCITIEPGLLLKGDILLKCYHKKFRSPARDVIFRVQFHTCAIHDLGVVFGKEDLDDAFKDDRFPEYGKVEFVFSYGPEKIQGMEHLENGPSVSVDYNTSDPLIRWDSYDNFSGHRDDGMEEVVGHTQGPLDGSLYAKVKKKDSLHGSTGAVNATRPTLSATPNHVEHTLSVSSDSGNSTASTKTDKTDEPVPGASSATAALSPQEKRELDRLLSGFGLEREKQGAMYHTQHLRSRPAGGSAVPSSGRHVVPAQVHVNGGALASERETDILDDELPNQDGHSAGSMGTLSSLDGVTNTSEGGYPEALSPLTNGLDKSYPMEPMVNGGGYPYESASRAGPAHAGHTAPMRPSYSAQEGLAGYQREGPHPAWPQPVTTSHYAHDPSGMFRSQSFSEAEPQLPPAPVRGGSSREAVQRGLNSWQQQQQQQQQPRPPPRQQERAHLESLVASRPSPQPLAETPIPSLPEFPRAASQQEIEQSIETLNMLMLDLEPASAAAPLHKSQSVPGAWPGASPLSSQPLSGSSRQSHPLTQSRSGYIPSGHSLGTPEPAPRASLESVPPGRSYSPYDYQPCLAGPNQDFHSKSPASSSLPAFLPTTHSPPGPQQPPASLPGLTAQPLLSPKEATSDPSRTPEEEPLNLEGLVAHRVAGVQAREKQPAEPPAPLRRRAASDGQYENQSPEATSPRSPGVRSPVQCVSPELALTIALNPGGRPKEPHLHSYKEAFEEMEGTSPSSPPPSGVRSPPGLAKTPLSALGLKPHNPADILLHPTGEPRSYVESVARTAVAGPRAQDSEPKSFSAPATQAYGHEIPLRNGTLGGSFVSPSPLSTSSPILSADSTSVGSFPSGESSDQGPRTPTQPLLESGFRSGSLGQPSPSAQRNYQSSSPLPTVGSSYSSPDYSLQHFSSSPESQARAQFSVAGVHTVPGSPQARHRTVGTNTPPSPGFGWRAINPSMAAPSSPSLSHHQMMGPPGTGFHGSTVSSPQSSAATTPGSPSLCRHPAGVYQVSGLHNKVATTPGSPSLGRHPGAHQGNLASGLHSNAIASPGSPSLGRHLGGSGSVVPGSPCLDRHVAYGGYSTPEDRRPTLSRQSSASGYQAPSTPSFPVSPAYYPGLSSPATSPSPDSAAFRQGSPTPALPEKRRMSVGDRAGSLPNYATINGKVSSPVASGMSSPSGGSTVSFSHTLPDFSKYSMPDNSPETRAKVKFVQDTSKYWYKPEISREQAIALLKDQEPGAFIIRDSHSFRGAYGLAMKVSSPPPTIMQQNKKGDMTHELVRHFLIETGPRGVKLKGCPNEPNFGSLSALVYQHSIIPLALPCKLVIPNRDPTDESKDSSGPANSTADLLKQGAACNVLFVNSVDMESLTGPQAISKATSETLAADPTPAATIVHFKVSAQGITLTDNQRKLFFRRHYPLNTVTFCDLDPQERKWMKTEGGAPAKLFGFVARKQGSTTDNACHLFAELDPNQPASAIVNFVSKVMLNAGQKR

SEQ ID NO: 19377 - protein, 246 aa, Homo sapiens
MPHTLWMVWVLGVIISLSKEESSNQASLSCDRNGICKGSSGSLNSIPSGLTEAVKSLDLSNNRITYISNSDLQRCVNLQALVLTSNGINTIEEDSFSSLGSLEHLDLSYNYLSNLSSSWFKPLSSLTFLNLLGNPYKTLGETSLFSHLTKLQILRVGNMDTFTKIQRKDFAGLTFLEELEIDASDLQSYEPKSLKSIQNVSHLILHMKQHILLLEIFVDVTSSVECLELRDTDLDTFHFSELSTGE

SEQ ID NO: 19378 - protein, 659 aa, Homo sapiens
MAEAVAAPISPWTMAATIQAMERKIESQAARLLSLEGRTGMAEKKLADCEKTAVEFGNQLEGKWAVLGTLLQEYGLLQRRLENVENLLRNRNFWILRLPPGSKGESPKVPVTFDDVAVYFSEQEWGKLEDWQKELYKHVMRGNYETLVSLDYAISKPEVLSQIEQGKEPCNWRRPGPKIPDVPVDPSPGSGPPVPAPDLLMQIKQEGELQLQEQQALGVEAWAAGQPDIGEEPWGLSQLDSGAGDISTDATSGVHSNFSTTIPPTSWQTDLPPHHPSSACSDGTLKLNTAASTEDVKIVIKTEVQEEEVVATPVHPTDLEAHGTLFGPGQATRFFPSPAQEGAWESQGSSFPSQDPVLGLREPARPERDMGELSPAVAQEETPPGDWLFGGVRWGWNFRCKPPVGLNPRTGPEGLPYSSPDNGEAILDPSQAPRPFNEPCKYPGRTKGFGHKPGLKKHPAAPPGGRPFTCATCGKSFQLQVSLSAHQRSCGAPDGSGPGTGGGGSGSGGGGGGSGGGSARDGSALRCGECGRCFTRPAHLIRHRMLHTGERPFPCTECEKRFTERSKLIDHYRTHTGVRPFTCTVCGKSFIRKDHLRKHQRNHAAGAKTPARGQPLPTPPAPPDPFKSPASKGPLASTDLVTDWTCGLSVLGPTDGGDM

SEQ ID NO: 19379 - protein, 126 aa, Homo sapiens
MAVLLLLLRALRRGPGPGPRPLWGPGPAWSPGFPARPGRGRPYMASRPPGDLAEAGGRALQSLQLRLLTPTFEGINGLLLKQHLVQNPVRLWQLLGGTFYFNTSRLKQKNKEKDKSKGKAPEEDEG

SEQ ID NO: 19380 - protein, 644 aa, Homo sapiens
MKLITILFLCSRLLLSLTQESQSEEIDCNDKDLFKAVDAALKKYNSQNQSNNQFVLYRITEATKTVGSDTFYSFKYEIKEGDCPVQSGKTWQDCEYKDAAKAATGECTATVGKRSSTKFSVATQTCQITPAEGPVVTAQYDCLGCVHPISTQSPDLEPILRHGIQYFNNNTQHSSLFMLNEVKRAQRQVVAGLNFRITYSIVQTNCSKENFLFLTPDCKSLWNGDTGECTDNAYIDIQLRIASFSQNCDIYPGKDFVQPPTKICVGCPRDIPTNSPELEETLTHTITKLNAENNATFYFKIDNVKKARVQVVAGKKYFIDFVARETTCSKESNEELTESCETKKLGQSLDCNAEVYVVPWEKKIYPTVNCQPLGMISLMKRPPGFSPFRSSRIGEIKEETTVSPPHTSMAPAQDEERDSGKEQGHTRRHDWGHEKQRKHNLGHGHKHERDQGHGHQRGHGLGHGHEQQHGLGHGHKFKLDDDLEHQGGHVLDHGHKHKHGHGHGKHKNKGKKNGKHNGWKTEHLASSSEDSTTPSAQTQEKTEGPTPIPSLAKPGVTVTFSDFQDSDLIATMMPPISPAPIQSDDDWIPDIQIDPNGLSFNPISDFPDTTSPKCPGRPWKSVSEINPTTQMKESYYFDLTDGLS

SEQ ID NO: 19381 - protein, 335 aa, Homo sapiens
MLKPSLPFTSLLFLQLPLLGVGLNTTILTPNGNEDTTADFFLTTMPTDSLSVSTLPLPEVQCFVFNVEYMNCTWNSSSEPQPTNLTLHYWYKNSDNDKVQKCSHYLFSEEITSGCQLQKKEIHLYQTFVVQLQDPREPRRQATQMLKLQNLVIPWAPENLTLHKLSESQLELNWNNRFLNHCLEHLVQYRTDWDHSWTEQSVDYRHKFSLPSVDGQKRYTFRVRSRFNPLCGSAQHWSEWSHPIHWGSNTSKENPFLFALEAVVISVGSMGLIISLLCVYFWLERTMPRIPTLKNLEDLVTEYHGNFSSTNPIGLFAPHKASRTPSFCMTHQGTL

SEQ ID NO: 19382 - protein, 509 aa, Homo sapiens
MRLHLLLLLALCGAGTTAAELSYSLRGNWSICNGNGSLELPGAVPGCVHSALFQQGLIQDSYYRFNDLNYRWVSLDNWTYSKEFKIPFEISKWQKVNLILEGVDTVSKILFNEVTIGETDNMFNRYSFDITNVVRDVNSIELRFQSAVLYAAQQSKAHTRYQVPPDCPPLVQKGECHVNFVRKEQCSFSWDWGPSFPTQGIWKDVRIEAYNICHLNYFTFSPIYDKSAQEWNLEIESTFDVVSSKPVGGQVIVAIPKLQTQQTYSIELQPGKRIVELFVNISKNITVETWWPHGHGNQTGYNMTVLFELDGGLNIEKSAKVYFRTVELIEEPIKGSPGLSFYFKINGFPIFLKGSNWIPADSFQDRVTSELLRLLLQSVVDANMNTLRVWGGGIYEQDEFYELCDELGIMVWQDFMFACALYPTDQGFLDSVTAEVAYQIKRLKSHPSIIIWSGNNENEEALMMNWYHISFTDRPIYIKDYVTLYVKNIRELVLACGKMPDTIDLTNTC

SEQ ID NO: 19383 - protein, 55 aa, Homo sapiens
MALLLSVLRVLLGGFFALVGLAKLSEEISAPVSERMVRDEQQCWGPGCWRLQPLG

SEQ ID NO: 19384 - protein, 385 aa, Homo sapiens
MMMMALSKTFGQKPVKFQLEDDGEFYMIGSEVGNYLRMFRGSLYKRYPSLWRRLATVEERKKIVASSHGKKTKPNTKDHGYTTLATSVTLLKASEVEEILDGNDEKYKAVSISTEPPTYLREQKAKRNSQWVPTLPNSSHHLDAVPCSTTINRNRMGRDKKRTFPLCFDDHDPAVIHENASQPEVLVPIRLDMEIDGQKLRDAFTWNMNEKLMTPEMFSEILCDDLDLNPLTFVPAIASAIRQQIESYPTDSILEDQSDQRVIIKLNIHVGNISLVDQFEWDMSEKENSPEKFALKLCSELGLGGEFVTTIAYSIRGQLSWHQKTYAFSENPLPTVEIAIRNTGDADQWCPLLETLTDAEMEKKIRDQDRNTRRMRRLANTAPAW

SEQ ID NO: 19385 - protein, 630 aa, Homo sapiens
MASAGHIITLLLWGYLLELWTGGHTADTTHPRLRLSHKELLNLNRTSIFHSPFGFLDLHTMLLDEYQERLFVGGRDLVYSLSLERISDGYKEIHWPSTALKMEECIMKGKDAGECANYVRVLHHYNRTHLLTCGTGAFDPVCAFIRVGYHLEDPLFHLESPRSERGRGRCPFDPSSSFISTLIGSELFAGLYSDYWSRDAAIFRSMGRLAHIRTEHDDERLLKEPKFVGSYMIPDNEDRDDNKVYFFFTEKALEAENNAHAIYTRVGRLCVNDVGGQRILVNKWSTFLKARLVCSVPGMNGIDTYFDELEDVFLLPTRDHKNPVIFGLFNTTSNIFRGHAICVYHMSSIRAAFNGPYAHKEGPEYHWSVYEGKVPYPRPGSCASKVNGGRYGTTKDYPDDAIRFARSHPLMYQAIKPAHKKPILVKTDGKYNLKQIAVDRVEAEDGQYDVLFIGTDNGIVLKVITIYNQEMESMEEVILEELQIFKDPVPIISMEISSKRQQLYIGSASAVAQVRFHHCDMYGSACADCCLARDPYCAWDGISCSRYYPTGTHAKRRFRRQDVRHGNAAQQCFGQQFVGDALDKTEEHLAYGIENNSTLLECTPRSLQAKVIWFVQKGRETRKEEVKAMS

SEQ ID NO: 19386 - protein, 2963 aa, Homo sapiens
MLPINVDPDSKPGEYVLKSLFVNFTTQAERKIRIIMAEPLEKPLTKSLQRGEDPQFDQVISSMSSLSEYCLPSILRTLFDWYKRQNGIEDESHEYRPRTSNKSKSDEQQRDYLMERRDLAIDFIFSLVLIEVLKQIPLHPVIDSLIHDVINLAFKHFKYKEGYLGPNTGNMHIVADLYAEVIGVLAQAKFPAVKKKFMAELKELRHKEQNPYVVQSIISLIMGMKFFRIKMYPVEDFEASLQFMQECAHYFLEVKDKDIKHALAGLFVEILVPVAAAVKNEVNVPCLRNFVESLYDTTLELSSRKKHSLALYPLVTCLLCVSQKQLFLNRWHIFLNNCLSNLKNKDPKMARVALESLYRLLWVYMIRIKCESNTATQSRLITIITTLFPKGSRGVVPRDMPLNIFVKIIQFIAQERLDFAMKEIIFDFLCVGKPAKAFSLNPERMNIGLRAFLVIADSLQQKDGEPPMPVTGAVLPSGNTLRVKKTYLSKTLTEEEAKMIGMSLYYSQVRKAVDNILRHLDKEVGRCMMLTNVQMLNKEPEDMITGERKPKIDLFRTCVAAIPRLLPDGMSKLELIDLLARLSIHMDDELRHIAQNSLQGLLVDFSDWREDVLFGFTNFLLREVNDMHHTLLDSSLKLLLQLLTQWKLVIQTQGKVYEQANKIRNSELIANGSSHRIQSERGPHCSVLHAVEGFALVLLCSFQVATRKLSVLILKEIRALFIALGQPEDDDRPMIDVMDQLSSSILESFIHVAVSDSATLPLTHNVDLQWLVEWNAVLVNSHYDVKSPSHVWIFAQSVKDPWVLCLFSFLRQENLPKHCPTALSYAWPYAFTRLQSVMPLVDPNSPINAKKTSTAGSGDNYVTLWRNYLILCFGVAKPSIMSPGHLRASTPEIMATTPDGTVSYDNKAIGTPSVGVLLKQLVPLMRLESIEITESLVLGFGRTNSLVFRELVEELHPLMKEALERRPENKKRRERRDLLRLQLLRIFELLADAGVISDSTNGALERDTLALGALFLEYVDLTRMLLEAENDKEVEILKDIRAHFSAMVANLIQCVPVHHRRFLFPQQSLRHHLFILFSQWAGPFSIMFTPLDRYSDRNHQITRYQYCALKAMSAVLCCGPVFDNVGLSPDGYLYKWLDNILACQDLRVHQLGCEVVVLLLELNPDQINLFNWAIDRCYTGSYQLASGCFKAIATVCGSRNYPFDIVTLLNLVLFKASDTNREIYEISMQLMQILEAKLFVYSKKVAEQRPGSILYGTHGPLPPLYSVSLALLSCELARMYPELTLPLFSEVSQRFPTTHPNGRQIMLTYLLPWLHNIELVDSRLLLPGSSPSSPEDEVKDREGDVTASHGLRGNGWGSPEATSLVLNNLMYMTAKYGDEVPGPEMENAWNALANNEKWSNNLRITLQFLISLCGVSSDTVLLPYIKKVAIYLCRNNTIQTMEELLFELQQTEPVNPIVQHCDNPPFYRFTASSKASAAASGTTSSSNTVVAGQENFPDAEENKILKESDERFSNVIRAHTRLESRYSNSSGGSYDEDKNDPISPYTGWLLTITETKQPQPLPMPCTGGCWAPLVDYLPETITPRGPLHRCNIAVIFMTEMVVDHSVREDWALHLPLLLHAVFLGLDHYRPEVFEHSKKLLLHLLIALSCNSNFHSIASVLLQTREMGEAKTLTVQPAYQPEYLYTGGFDFLREDQSSPVPDSGLSSSSTSSSISLGGSSGNLPQMTQEVEDVDTAAETDEKANKLIEFLTTRAFGPLWCHEDITPKNQNSKSAEQLTNFLRHVVSVFKDSKSGFHLEHQLSEVALQTALASSSRHYAGRSFQIFRALKQPLSAHALSDLLSRLVEVIGEHGDEIQGYVMEALLTLEAAVDNLSDCLKNSDLLTVLSRSSSPDLSSSSKLTASRKSTGQLNMNPGTTSGNTATAERSRHQRSFSVPKKFGVIDRSSDPPRSATLDRIQACTQQGLSSKTRSSSSLKDSLTDPSHINHPTNLLATIFWVTVALMESDFEFEYLMALRLLSRLLAHMPLDKAENREKLEKLQAQLKWADFSGLQQLLLKGFTSLTTTDLTLQLFSLLTPVSKISMVDASHAIGFPLNVLCLLPQLIQHFENPNQFCKDIAERIAQVCLEEKNPKLSNLAHVMTLYKTHSYTRDCATWVNVVCRYLHEAYADITLNMVTYLAELLEKGLPSVQQPLLQVIYSLLSYMDLSVVPVKQFNVEVLKTIEKYVQSVHWREALNILKLVVSRSASLVLPSYQHSDLSKIEIHRVWTSASKELPGKTLDFHFDISETPIIGRRYDELQNSSGRDGKPRAMAVTRSTSSTSSGSNSNVLVPVSWKRPQYSQKRTKEKLVHVLSLCGQEVGLSKNPSVIFSSCGDLDLLEHQTSLVSSEDGAREQENMDDTNSEQQFRVFRDFDFLDVELEDGEGESMDNFNWGVRRRSLDSLDKCDMQILEERQLSGSTPSLNKMHHEDSDESSEEEDLTASQILEHSDLIMTLSPSEETNPMELLTTACDSTPAEPHSFNTRMSSFDASLPDMNNLQISEGSKAEAVREEEDTTVHEDDLSSSINELPAAFECSDSFSLDMTEGEEKGNRALDQFTLASFGEGDRGVSPPPSPFFSAILAAFQPAACDDAEEAWRSHINQLMCDSDGSCAVYTFHVFSSLFKNIQKRFCFLTCDAASYLGDNLRGIGSKFVSSSQMLTSCSECPTLFVDAETLLSCGLLDKLKFSVLELQEYLDTYNNRKEATLSWLANCKATFAGGSRDGVITCQPGDSEEKQLELCQRLYKLHFQLLLLFQSYCKLIGQVHEVSSMPELLNMSRELSDLKKHLKEASAVIAADPLYSDGAWSEPTFTSTEAAIQSMLECLKNNELGKALRQIRECRSLWPNDIFGSSSDDEVQTLLNIYFRHQTLGQTGTYALVGSNQSLTEICTKLMELNMEIRDMIRRAQSYRVLTTFLPDSSVSGTSL

SEQ ID NO: 19387 - protein, 162 aa, Homo sapiens
MGLQACLLGLFALILSGKCSYSPEPDQRRTLPPGWVSLGRADPEEELSLTFALRQQNVERLSELVQAVSDPSSPQYGKYLTLENVADLVRPSPLTLHTVQKWLLAAGAQKCHSVITQDFLTCWLSIRQAELLLPGAEFHHYVGGPTETHVWGDCTVFPQHHP

SEQ ID NO: 19388 - protein, 195 aa, Homo sapiens
MESWWGLPCLAFLCFLMHARGQRDFDLADALDDPEPTKKPNSDIYPKPKPPYYPQPENPDSGGNIYPRPKPRPQPQPGNSGNSGGYFNDVDRDDGRYPPRPRPRPPAGGGGGGYSSYGNSDNTHGRGGYRLNSRYGNTYGGDHHSTYGNPEGNMVAKIVSPIVSVVVVTLLGAAASYFKLNNRRNCFRTHEPENV

SEQ ID NO: 19389 - protein, 205 aa, Homo sapiens
GMTAVGLAILWYVFRLAGMTGREGGFSAFNQLKMARFTIVDGKMGKGVSFKDVAGMHEAKLEVREFVDYLKSPERFLQLGAKVPKGALLLGPPGCGKTLLAKAVATEAQVPFLAMAGPEFVEVIGGLGAARVRSLFKEARARAPCIVYIDEIDAVGKKRSTTMSGFSNTEEEQTLNQLLVEMDVFYAEIEELKLVYPYHGVLHSD

SEQ ID NO: 19390 - protein, 284 aa, Homo sapiens
MEAIKKKMQMLKLDKENAIDRAEQAEADKKAAEDKCKQVEEELTHLQKKLKGTEDELDKYSEDLKDAQEKLELTEKKASDAEGDVAALNRRIQLVEEELDRAQERLATALQKLEEAEKAADESERGMKVIENRAMKDEEKMEIQEMQLKEAKHIAEEADRKYEEVARKLVILEGELERAEERAEVSELKCGDLEEELKNVTNNLKSLEAASEKYSEKEDKYEEEIKLLSDKLKEAETRAEFAERTVAKLEKTIDDLEEKLAQAKEENVGLHQTLDQTLNELNCI

SEQ ID NO: 19391 - protein, 161 aa, Homo sapiens
MTMYLWLKLLAFGFAFLDTEVFVTGQSPTPSPTGVSSVQTPHLPTHADSQTPSAGTDTQTFSGSAANAKLNPTPGSNAISDAYLNASETTTLSPSGSAVISTTTIATTPSKPTCDEKYANITVDYLYNKETKLFTAKLNVNENVECGNNTCTNNEVHNLTE

SEQ ID NO: 19392 - protein, 415 aa, Homo sapiens
MIAKEELESVLEEEVDDFPTFGDSQSDYDTVVHPFYAYWQSFCTQKNFAWKEEYDTRQASNRWEKRAMEKENKKIRDKARKEKNELVRQLVAFIRKRDKRVQAHRKLVEEQNAEKARKAEEMRRQQKLKQAKLVEQYREQSWMTMANLEKELQEMEARYEKEFGDGSDENEMEEHELKDEEDGKDSDEAEDAELYDDLYCPACDKSFKTEKAMKNHEKSKKHREMVALLKQQLEEEEENFSRPQIDENPLDDNSEEEMEDAPKQKLSKKQKKKKQKPAQNYDDNFNVNGPGEGVKVDPEDTNLNQDSAKELEDSPQENVSVTEIIKPCDDPKSEAKSVPKPKGKKTKDMKKPVRVPAEPQTMSVLISCTTCHSEFPSRNKLFDHLKATGHARAPSSSSLNSATSSQSKKEKRKNR

SEQ ID NO: 19393 - protein, 136 aa, Homo sapiens
MRTHTRGAPSVFFIYLLCFVSAYITDENPEVMIPFTNANYDSHPMLYFSRAEVAELQLRAASSHEHIAARLTEAVHTMLSSPLEYLPPWDPKDYSARWNEIFGNNLGALAMFCVLYPENIEARDMAKDYMERMAAQ

SEQ ID NO: 19394 - protein, 335 aa, Homo sapiens
MDNARMNSFLEYPILSSGDSGTCSARAYPSDHRITTFQSCAVSANSCGGDDRFLVGRGVQIGSPHHHHHHHHRHPQPATYQTSGNLGVSYSHSSCGPSYGSQNFSAPYSPYALNQEADVSGGYPQCAPAVYSGNLSSPMVQHHHHHQGYAGGAVGSPQYIHHSYGQEHQSLALATYNNSLSPLHASHQEACRSPASETSSPAQTFDWMKVKRNPPKTGKVGEYGYLGQPNAVRTNFTTKQLTELEKEFHFNKYLTRARRVEIAASLQLNETQVKIWFQNRRMKQKKREKEGLLPISPATPPGNDEKAEESSEKSSSSPCVPSPGSSTSDTLTTSH

SEQ ID NO: 19395 - protein, 448 aa, Homo sapiens
MIDLDTSKNNRIGKTGERPSQENGIQKHRTSLPAPMFSRSDFSVWTILKKCVGLELSKITMPIAFNEPLSFLQRITEYMEHVYLIHRASCQPQPLERMQSVAAFAVSAVASQWERTGKPFNPLLGETYELIREDLGFRFISEQVSHHPPISAFHSEGLNHDFLFHGSIYPKLKFWGKSVEAEPRGTITLELLKHNEAYTWTNPTCCVHNVIIGKLWIEQYGTVEILNHRTGHKCVLHFKPCGLFGKELHKVEGHIQDKNKKKLFMIYGKWTECLWGIDPVSYESFKKQERRGDHLRKAKLDEDSGKADSDVADDVPVAQETVQVIPGSKLLWRINTRPPNSAQMYNFTSFTVSLNELETGMEKTLPPTDCRLRPDIRGMENGNMDLASQEKERLEEKQREARRERAKEEAEWQTRWFYPGNNPYTGTPDWLYAGDYFERNFSDCPDIY

SEQ ID NO: 19396 - protein, 375 aa, Homo sapiens
MDDDIAALVVDNGSGMCKAGFAGDDAPRAVFPSIVGRPRHQGVMVGMGQKDSYVGDEAQSKRGILTLKYPIEHGIVTNWDDMEKIWHHTFYNELRVAPEEHPVLLTEAPLNPKANREKMTQIMFETFNTPAMYVAIQAVLSLYASGRTTGIVMDSGDGVTHTVPIYEGYALPHAILRLDLAGRDLTDYLMKILTERGYSFTTTAEREIVRDIKEKLCYVALDFEQEMATAASSSSLEKSYELPDGQVITIGNERFRCPEALFQPSFLGMESCGIHETTFNSIMKCDVDIRKDLYANTVLSGGTTMYPGIADRMQKEITALAPSTMKIKIIAPPERKYSVWIGGSILASLSTFQQMWISKQEYDESGPSIVHRKCF

SEQ ID NO: 19397 - protein, 569 aa, Homo sapiens
MWRLRRAAVACEVCQSLVKHSSGIKGSLPLQKLHLVSRSIYHSHHPTLKLQRPQLRTSFQQFSSLTNLPLRKLKFSPIKYGYQPRRNFWPARLATRLLKLRYLILGSAVGGGYTAKKTFDQWKDMIPDLSEYKWIVPDIVWEIDEYIDFEKIRKALPSSEDLVKLAPDFDKIVESLSLLKDFFTSGSPEETAFRATDRGSESDKHFRKVSDKEKIDQLQEELLHTQLKYQRILERLEKENKELRKLVLQKDDKGIHHRKLKKSLIDMYSEVLDVLSDYDASYNTQDHLPRVVVVGDQSAGKTSVLEMIAQARIFPRGSGEMMTRSPVKVTLSEGPHHVALFKDSSREFDLTKEEDLAALRHEIELRMRKNVKEGCTVSPETISLNVKGPGLQRMVLVDLPGVINTVTSGMAPDTKETIFSISKAYMQNPNAIILCIQDGSVDAERSIVTDLVSQMDPHGRRTIFVLTKVDLAEKNVASPSRIQQIIEGKLFPMKALGYFAVVTGKGNSSESIEAIREYEEEFFQNSKLLKTSMLKAHQVTTRNLSLAVSDCFWKMVRESVEQQADSFKE

SEQ ID NO: 19398 - protein, 1882 aa, Homo sapiens
MPENPATDKLQVLQVLDRLKMKLQEKGDTSQNEKLSMFYETLKSPLFNQILTLQQSIKQLKGQLNHIPSDCSANFDFSRKGLLVFTDGSITNGNVHRPSNNSTVSGLFPWTPKLGNEDFNSVIQQMAQGRQIEYIDIERPSTGGLGFSVVALRSQNLGKVDIFVKDVQPGSVADRDQRLKENDQILAINHTPLDQNISHQQAIALLQQTTGSLRLIVAREPVHTKSSTSSSLNDTTLPETVCWGHVEEVELINDGSGLGFGIVGGKTSGVVVRTIVPGGLADRDGRLQTGDHILKIGGTNVQGMTSEQVAQVLRNCGNSVRMLVARDPAGDISVTPPAPAALPVALPTVASKGPGSDSSLFETYNVELVRKDGQSLGIRIVGYVGTSHTGEASGIYVKSIIPGSAAYHNGHIQVNDKIVAVDGVNIQGFANHDVVEVLRNAGQVVHLTLVRRKTSSSTSPLEPPSDRGTVVEPLKPPALFLTGAVETETNVDGEDEEIKERIDTLKNDNIQALEKLEKVPDSPENELKSRWENLLGPDYEVMVATLDTQIADDAELQKYSKLLPIHTLRLGVEVDSFDGHHYISSIVSGGPVDTLGLLQPEDELLEVNGMQLYGKSRREAVSFLKEVPPPFTLVCCRRLFDDEASVDEPRRTETSLPETEVDHNMDVNTEEDDDGELALWSPEVKIVELVKDCKGLGFSILDYQDPLDPTRSVIVIRSLVADGVAERSGGLLPGDRLVSVNEYCLDNTSLAEAVEILKAVPPGLVHLGICKPLVEDNEEESCYILHSSSNEDKTEFSGTIHDINSSLILEAPKGFRDEPYFKEELVDEPFLDLGKSFHSQQKEIEQSKEAWEMHEFLTPRLQEMDEEREILVDEEYELYQDPSPSMELYPLSHIQEATPVPSVNELHFGTQWLHDNEPSESQEARTGRTVYSQEAQPYGYCPENVMKENFVMESLPSVPSTEGNSQQGRFDDLENLNSLAKTSLDLGMIPNDVQGPSLLIDLPVVAQRREQEDLPLYQHQATRVISKASAYTGMLSSRYATDTCELPEREEGEGEETPNFSHWGPPRIVEIFREPNVSLGISIVGGQTVIKRLKNGEELKGIFIKQVLEDSPAGKTNALKTGDKILEVSGVDLQNASHSEAVEAIKNAGNPVVFIVQSLSSTPRVIPNVHNKANKITGNQNQDTQEKKEKRQGTAPPPMKLPPPYKALTDDSDENEEEDAFTDQKIRQRYADLPGELHIIELEKDKNGLGLSLAGNKDRSRMSIFVVGINPEGPAAADGRMRIGDELLEINNQILYGRSHQNASAIIKTAPSKVKLVFIRNEDAVNQMAVTPFPVPSSSPSSIEDQSGTEPISSEEDGSVEVGIKQLPESESFKLAVSQMKQQKYPTKVSFSSQEIPLAPASSYHSTDADFTGYGGFQAPLSVDPATCPIVPGQEMIIEISKGRSGLGLSIVGGKDTPLNAIVIHEVYEEGAAARDGRLWAGDQILEVNGVDLRNSSHEEAITALRQTPQKVRLVVYRDEAHYRDEENLEIFPVDLQKKAGRGLGLSIVGKRNGSGVFISDIVKGGAADLDGRLIQGDQILSVNGEDMRNASQETVATILKCAQGLVQLEIGRLRAGSWTSARTTSQNSQGSQQSAHSSCHPSFAPVITGLQNLVGTKRVSDPSQKNSGTDMEPRTVEINRELSDALGISIAGGRGSPLGDIPVFIAMIQASGVAARTQKLKVGDRIVSINGQPLDGLSHADVVNLLKNAYGRIILQVVADTNISAIAAQLENMSTGYHLGSPTAEHHPEDTETPPPKIITLEKGSEGLGFSIVGGYGSPHGDLPIYVKTVFAKGAAADDGRLKRGDQILAVNGETLEGVTHEQAVAILKHQRGTVTLTVLS

SEQ ID NO: 19399 - protein, 151 aa, Homo sapiens
MTMYLWLKLLAFGFAFLDTEVFVTGQSPTPSPTGHLQAEEQGSQSKSPNLKSREADSSAFSWWPKAREPLTNHWSVSSVQTPHLPTHADSQTPSAGTDTQTFSGSAANAKLNPTPGSNAISDAYLNASETTTLSPSGSAVISTTTIATTPS

SEQ ID NO: 19400 - protein, 332 aa, Homo sapiens
MLLLAAAFLVAFVLLLYMVSPLISPKPLALPGAHVVVTGGSSGIGKCIAIECYKQGAFITLVARNEDKLLQAKKEIEMHSINDKQVVLCISVDVSQDYNQVENVIKQAQEKLGPVDMLVNCAGMAVSGKFEDLEVSTFERLMSINYLGSVYPSRAVITTMKERRVGRIVFVSSQAGQLGLFGFTAYSASKFAIRGLAEALQMEVKPYNVYITVAYPPDTDTPGFAEENRTKPLETRLISETTSVCKPEQVAKQIVKDAIQGNFNSSLGSDGYMLSALTCGMAPVTSITEGLQQVVTMGLFRTIALFYLGSFDSIVRRCMMQREKSENADKTA

SEQ ID NO: 19401 - protein, 1646 aa, Homo sapiens
MSTPDPPLGGTPRPGPSPGPGPSPGAMLGPSPGPSPGSAHSMMGPSPGPPSAGHPIPTQGPGGYPQDNMHQMHKPMESMHEKGMSDDPRYNQMKGMGMRSGGHAGMGPPPSPMDQHSQGYPSPLGGSEHASSPVPASGPSSGPQMSSGPGGAPLDGADPQALGQQNRGPTPFNQNQLHQLRAQIMAYKMLARGQPLPDHLQMAVQGKRPMPGMQQQMPTLPPPSVSATGPGPGPGPGPGPGPGPAPPNYSRPHGMGGPNMPPPGPSGVPPGMPGQPPGGPPKPWPEGPMANAAAPTSTPQKLIPPQPTGRPSPAPPAVPPAASPVMPPQTQSPGQPAQPAPMVPLHQKQSRITPIQKPRGLDPVEILQEREYRLQARIAHRIQELENLPGSLAGDLRTKATIELKALRLLNFQRQLRQEVVVCMRRDTALETALNAKAYKRSKRQSLREARITEKLEKQQKIEQERKRRQKHQEYLNSILQHAKDFKEYHRSVTGKIQKLTKAVATYHANTEREQKKENERIEKERMRRLMAEDEEGYRKLIDQKKDKRLAYLLQQTDEYVANLTELVRQHKAAQVAKEKKKKKKKKKAENAEGQTPAIGPDGEPLDETSQMSDLPVKVIHVESGKILTGTDAPKAGQLEAWLEMNPGYEVAPRSDSEESGSEEEEEEEEEEQPQAAQPPTLPVEEKKKIPDPDSDDVSEVDARHIIENAKQDVDDEYGVSQALARGLQSYYAVAHAVTERVDKQSALMVNGVLKQYQIKGLEWLVSLYNNNLNGILADEMGLGKTIQTIALITYLMEHKRINGPFLIIVPLSTLSNWAYEFDKWAPSVVKVSYKGSPAARRAFVPQLRSGKFNVLLTTYEYIIKDKHILAKIRWKYMIVDEGHRMKNHHCKLTQVLNTHYVAPRRLLLTGTPLQNKLPELWALLNFLLPTIFKSCSTFEQWFNAPFAMTGEKVDLNEEETILIIRRLHKVLRPFLLRRLKKEVEAQLPEKVEYVIKCDMSALQRVLYRHMQAKGVLLTDGSEKDKKGKGGTKTLMNTIMQLRKICNHPYMFQHIEESFSEHLGFTGGIVQGLDLYRASGKFELLDRILPKLRATNHKVLLFCQMTSLMTIMEDYFAYRGFKYLRLDGTTKAEDRGMLLKTFNEPGSEYFIFLLSTRAGGLGLNLQSADTVIIFDSDWNPHQDLQAQDRAHRIGQQNEVRVLRLCTVNSVEEKILAAAKYKLNVDQKVIQAGMFDQKSSSHERRAFLQAILEHEEQDEEEDEVPDDETVNQMIARHEEEFDLFMRMDLDRRREEARNPKRKPRLMEEDELPSWIIKDDAEVERLTCEEEEEKMFGRGSRHRKEVDYSDSLTEKQWLKKITGKDIHDTASSVARGLQFQRGLQFCTRASKAIEEGTLEEIEEEVRQKKSSRKRKRDSDAGSSTPTTSTRSRDKDDESKKQKKRGRPPAEKLSPNPPNLTKKMKKIVDAVIKYKDSSSGRQLSEVFIQLPSRKELPEYYELIRKPVDFKKIKERIRNHKYRSLNDLEKDVMLLCQNAQTFNLEGSLIYEDSIVLQSVFTSVRQKIEKEDDSEGEESEEEEEGEEEGSESESRSVKVKIKLGRKEKAQDRLKGGRRRPSRGSRAKPVVSDDDSEEEQEEDRSGSGSEED

SEQ ID NO: 19402 - protein, 205 aa, Homo sapiens
MWVTKLLPALLLQHVLLHLLLLPIAIPYAEGQRKRRNTIHEFKKSAKTTLIKIDPALKIKTKKVNTADQCANRCTRNKGLPFTCKAFVFDKARKQCLWFPFNSMSSGVKKEFGHEFDLYENKDYIRNCIIGKGRSYKGTVSITKSGIKCQPWSSMIPHEHSYRGKDLQENYCRNPRGEEGGPWCFTSNPEVRYEVCDIPQCSEGK

SEQ ID NO: 19403 - protein, 263 aa, Homo sapiens; identical to SEQ ID NO: 6772

SEQ ID NO: 19404 - protein, 463 aa, Homo sapiens
MAASMFYGRLVAVATLRNHRPRTAQRAAAQVLGSSGLFNNHGLQVQQQQQRNLSLHEYMSMELLQEAGVSVPKGYVAKSPDEAYAIAKKLGSKDVVIKAQVLAGGRGKGTFESGLKGGVKIVFSPEEAKAVSSQMIGKKLFTKQTGEKGRICNQVLVCERKYPRREYYFAITMERSFQGPVLIGSSHGGVNIEDVAAESPEAIIKEPIDIEEGIKKEQALQLAQKMGFPPNIVESAAENMVKLYSLFLKYDATMIEINPMVEDSDGAVLCMDAKINFDSNSAYRQKKIFDLQDWTQEDERDKDAAKANLNYIGLDGNIGCLVNGAGLAMATMDIIKLHGGTPANFLDVGGGATVHQVTEAFKLITSDKKVLAILVNIFGGIMRCDVIAQGIVMAVKDLEIKIPVVVRLQGTRVDDAKALIADSGLKILACDDLDEAARMVVKLSEIVTLAKQAHVDVKFQLPI

SEQ ID NO: 19405 - protein, 283 aa, Homo sapiens
MASGTTTTAVKIGIIGGTGLDDPEILEGRTEKYVDTPFGKPSDALILGKIKNVDCVLLARHGRQHTIMPSKVNYQANIWALKEEGCTHVIVTTACGSLREEIQPGDIVIIDQFIDRTTMRPQSFYDGSHSCARGVCHIPMAEPFCPKTREVLIETAKKLGLRCHSKGTMVTIEGPRFSSRAESFMFRTWGADVINMTTVPEVVLAKEAGICYASIAMATDYDCWKEHEEAVSVDRVLKTLKENANKAKSLLLTTIPQIGSTEWSETLHNLKNMAQFSVLLPRH

SEQ ID NO: 19406 - protein, 587 aa, Homo sapiens
MAATLDLKSKEEKDAELDKRIEALRRKNEALIRRYQEIEEDRKKAELEGVAVTAPRKGRSVEKENVAVESEKNLGPSRRSPGTPRPPGASKGGRTPPQQGGRAGMGRASRSWEGSPGEQPRGGGAGGRGRRGRGRGSPHLSGAGDTSISDRKSKEWEERRRQNIEKMNEEMEKIAEYERNQREGVLEPNPVRNFLDDPRRRSGPLEESERDRREESRRHGRNWGGPDFERVRCGLEHERQGRRAGLGSAGDMTLSMTGRERSEYLRWKQEREKIDQERLQRHRKPTGQWRREWDAEKTDGMFKDGPVPAHEPSHRYDDQAWARPPKPPTFGEFLSQHKAEASSRRRRKSSRPQAKAAPRAYSDHDDRWETKEGAASPAPETPQPTSPETSPKETPMQPPEIPAPAHRPPEDEGEENEGEEDEEWEDISEDEEEEEIEVEEGDEEEPAQDHQAPEAAPTGIPCSEQAHGVPFSPEEPLLEPQAPGTPSSPFSPPSGHQPVSDWGEEVELNSPRTTHLAGALSPGGGQSAPAFPESGPSLRGTQEAEEEGSEATPEAGPEGQETAEITDFQRVRFCKVVAAPPLPGAAR

SEQ ID NO: 19407 - protein, 254 aa, Homo sapiens
MEPNSLQWVGSPCGLHGPYIFYKAFQFHLEGKPRILSLGDFFFVRCTPKDPICIAELQLLWEERTSRQLLSSSKLYFLPEDTPQGRNSDHGEDEVIAVSEKVIVKLEDLVKWVHSDFSKWRCGFHAGPVKTEALGRNGQKEALLKYRQSTLNSGLNFKDVLKEKADLGEDEEETNVIVLSYPQYCRYRSMLKRIQDKPSSILTDQFALALGGIAVVSRNPQILYCRDTFDHPTLIENESICDEFGGRLTSHCSY

SEQ ID NO: 19408 - protein, 886 aa, Homo sapiens
MRLHLLLLLALCGAGTTAAELSYSLRGNWSICNGNGSLELPGAVPGCVHSALFQQGLIQDSYYRFNDLNYRWVSLDNWTYSKEFKIPFEISKWQKVNLILEGVDTVSKILFNEVTIGETDNMFNRYSFDITNVVRDVNSIELRFQSAVLYAAQQSKAHTRYQVPPDCPPLVQKGECHVNFVRKEQCSFSWDWGPSFPTQGIWKDVRIEAYNICHLNYFTFSPIYDKSAQEWNLEIESTFDVVSSKPVGGQVIVAIPKLQTQQTYSIELQPGKRIVELFVNISKNITVETWWPHGHGNQTGYNMTVLFELDGGLNIEKSAKVYFRTVELIEEPIKGSPGLSFYFKINGFPIFLKGSNWIPADSFQDRVTSELLRLLLQSVVDANMNTLRVWGGGIYEQDEFYELCDELGIMVWQDFMFACALYPTDQGFLDSVTAEVAYQIKRLKSHPSIIIWSGNNENEEALMMNWYHISFTDRPIYIKDYVTLYVKNIRELVLAGDKSRPFITSSPTNGAETVAEAWVSQNPNSNYFGDVHFYDYISDCWNWKVFPKARFASEYGYQSWPSFSTLEKVSSTEDWSFNSKFSLHRQHHEGGNKQMLYQAGLHFKLPQSTDPLRTFKDTIYLTQVMQAQCVKTETEFYRRSRSEIVDQQGHTMGALYWQLNDIWQAPSWASLEYGGKWKMLHYFAQNFFAPLLPVGFENENTFYIYGVSDLHSDYSMTLSVRVHTWSSLEPVCSRVTERFVMKGGEAVCLYEEPVSELLRRCGNCTRESCVVSFYLSADHELLSPTNYHFLSSPKEAVGLCKAQITGASLNPRLCSQTYREEISNPTKITSISMTPASLSALVLEQQKLMLPWQLPGQAGMSRMNLVPVAALGPSLEQLGGHHLSAR

SEQ ID NO: 19409 - protein, 2969 aa, Homo sapiens
MWDPRAARMDLTAYAELLKESGNQVLKNGNFSLAIRKYDEAIQILLQLYQWGVPPRDLAVLLCNKSNAFFSLGKWNEAFVAAKECLQWDPTYVKGYYRAGYSLLRLHQPYEAARMFFEGLRLVQRSQDQAPVADFLVGVFTTMSSDSIVLQSFLPCFDHIFTTGFPTEVWQSVIEKLAKKGLWHSFLLLSAKKDRLPRNIHVPELSLKSLFEKYVFIGLYEKMEQVPKLVQWLISIGASVETIGPYPLHALMRLCIQARENHLFRWLMDHKPEWKGRINQKDGDGCTVLHVVAAHSPGYLVKRQTEDVQMLLRFGADPTLLDRQSRSVVDVLKRNKNFKAIEKINSHLEKLATCSKDLSGFSNGDGPTSENDIFRKVLEQLVKYMNSGNRLLHKNFLKQEVVQRFLRLLSTLQEIPPDLVCDINQDCATTVFKFLLEKQRWPEVLLLLTRKVSGEPPLGDCLIKDCNFSDLDICTIIPHLSTWDQRKKQLLGCLIDSGALPDGLQESQERPVVTCLKHEDFELAFLLLTKGADPRAISLTEGDTPLHAALHIFLEIKADIGFSFLSHLLDLFWSNPTEFDYLNPNVQDSNGNTLMHILFQKGMLKRVKKLLDLLVKFDINFNLKNKEGKDARHRIKKNDSLLLAWNKALMENRRRSRQDSAAHLGKLSKSTAPGHTSQLKSQGSFKSVPCGATARTLPEGSAVPDSWETLPGTQVTRKEPGALRPCSLRDCLMQDITVLIQQVEVDPSFPEDCLQSSEPLEAGAGKEGKKDDKPTLGAGAPDCSEVGEGHAQVGLGALQLVPDDNRGKEGNDDQDDWSTQEIEACLQDFDNMTWEIECTSEMLKKLSSKVMTKVIKKKIILAIQQLGNGEWTQGLQKRLKHLKGSIQLFEAKLDKGARMLWELAIDFSPRCSENPEKIIATEQNTCAMEKSGRIYTEIIRIWDIVLDHCKLADSIKAICNAYNRGLSCVLRKKLKGINKGQVSANMKIQKRIPRCYVEDTEAEKGREHVNPEYFPPASAVETEYNIMKFHSFSTNMAFNILNDTTATVEYPFRVGELEYAVIDLNPRPLEPIILIGRSGTGKTTCCLYRLWKKFHVYWEKAEQAGSPLLAKQVWLKRRLEVEPGKESPGGEEEEEEEDEEEEDSIEVETVESIDEQEYEACAGGAGVEPAGDGQAAEVCAPEHPHQLEHLHQIFVTKNHVLCQEVQRNFIELSKSTKATSHYKPLDPNIHKLQDLRDENFPLFVTSKQLLLLLDASLPKPFFLRNEDGSLKRTIIGWSAQEESTIPSWQEDEEEAEVDGDYSEEDKAVEMRTGDSDPRVYVTFEVFKNEIWPKMTKGRTAYNPALIWKEIKSFLKGSFEALSCPHGRLTEEVYKKLGRKRCPNFKEDRSEIYSLFSLYQQIRSQKGYFDEEDVLYNISRRLSKLRVLPWSIHELYGDEIQDFTQAELALLMKCINDPNSMFLTGDTAQSIMKGVAFRFSDLRSLFHYASRNTIDKQCAVRKPKKIHQLYQNYRSHSGILNLASGVVDLLQFYFPESFDRLPRDSGLFDGPKPTVLESCSVSDLAILLRGNKRKTQPIEFGAHQVILVANETAKEKIPEELGLALVLTIYEAKGLEFDDVLLYNFFTDSEAYKEWKIISSFTPTSTDSREENRPLVEVPLDKPGSSQGRSLMVNPEMYKLLNGELKQLYTAITRARVNLWIFDENREKRAPAFKYFIRRDFVQVVKTDENKDFDDSMFVKTSTPAEWIAQGDYYAKHQCWKVAAKCYQKGGAFEKEKLALAHDTALSMKSKKVSPKEKQLEYLELAKTYLECKEPTLSLKCLSYAKEFQLSAQLCERLGKIRDAAYFYKRSQCYKDAFRCFEQIQEFDLALKMYCQEELFEEAAIAVEKYEEMLKTKTLPISKLSYSASQFYLEAAAKYLSANKMKEMMAVLSKLDIEDQLVFLKSRKRLAEAADLLNREGRREEAALLMKQHGCLLEAARLTADKDFQASCLLGAARLNVARDSDIEHTKDILREALDICYQTGQLSGIAEAHFLQGVILRDFQKLRDAFFKFDTLNHSAGVVEALYEAASQCEAEPEKILGLAPGGLEILLSLVRALKRVTNNAEKEMVKSCFEFFGISQVDAKYCQIAQNDPGPILRIIFDLDLNLREKKTKDHFLIMTDQVKLALNKHLLGRLCQITRSLLGKTYRGVCMRFIVGLKCEDENCEHFHRPLRRCEAKCLVQSKMNLVAINGLLLEAKKVFPKILAEELKEIDYILSTDMYGLCKSILDVLFPKHFHQRVLSENPMACKEILKPNYKSFRFYRFALKEYIHFLFENESARNRRESTDLWLSAMQAFLLSSNYPEEFEKLLHQEEDNYNRELKALESEKDERGRGRGSRIKGIEGKFGMLAPNRDDENMDKTHLCFIRLLENCIDQFYVYRNPEDYKRLFFRFMNVLIKRCKEPLIPSIGNTVALLEFQFIHCGVVLARLWKNVILCLPKSYIALLHYWEFLFSKKDKELGDVFSIIQEYKPKDVTRAIQDFRFHLSYLAKVLCGYENVNFNVLLDAFSEIDYVVSGEAERTLVLCLVMLVNAEEILQPYCKPLLYRHFREIESRLQLMSMDCPGQVPERLLKVVKRVLVAVNVKSVAEALQDLLFERDEEYLMDCDWRWDPVHTKGSIVRGLYYEEVRLNRLLCLDPVDYFAEPECEFGQDEMDELALEDRDHVLATILSQKQRKASIQRKLRRACLVVSLCISWRRRVGTQMERVREEAREPRAGNFKKADVDRTQCDLCGVKFTRGPENYFSPSKAFEGAASEVAVLSRAELEREECQERNSESYEQHIHLEHHQRQQVAYQKYSEFFHEKVDPAIDEGKLVVQDIEQSVWIHSHVGSKEHSHMLQKVQEHIKRVSDMVEDLYRRKAWAGAEEAMTRLVNILILSVRDARDWLMKTETRLKKEGIVQEDDYENEVEDFGELRPRRRSRKCGKQRKY

SEQ ID NO: 19410 - protein, 1121 aa, Homo sapiens
MASLTAYDKDVSSGSYNLSSATTGSYYSCVSQITIGYDVAGPVAIGLTHWKNPYVQGRPTLPSDLPLFVSKDAGIPVYHRSFTRKTDQATPLSCPASLSITPVPSYSSSSQETLSQDTTGLSLSIHGAEKRLQIHQRRSVASRPASRRRLPVVRHSSLPPGRRSIKMEASSSGITNGKTKVFHPEGGVDLQGYQLDMQILPDGPKSDVDFSEILNAIQEMAKDVNILFDELEAVSSPCKDDDSLLHPGNLTSTSDDASRLEAGGETVPERNKSNGLYFRDGKCRIDYILVYRKSNPQTEKREVFERNIRAEGLQMEKESSLINSDIIFVKLHAPWEVLGRYAEQMNVRMPFRRKIYYLPRRYKFMSRIDKQISRFRRWLPKKPMRLDKETLPDLEENDCYTAPFSQQRIHHFIIHNKETFFNNATRSRIVHHILQRIKYEEGKNKIGLNRLLTNGSYEAAFPLHEGSYRSKNSIRTHGAENHRHLLYECWASWGVWYKYQPLDLVRRYFGEKIGLYFAWLGWYTGMLFPAAFIGLFVFLYGVTTLDHSQVSKEVCQATDIIMCPVCDKYCPFMRLSDSCVYAKVTHLFDNGATVFFAVFMAVWATVFLEFWKRRRAVIAYDWDLIDWEEEEEEIRPQFEAKYSKKERMNPISGKPEPYQAFTDKCSRLIVSASGIFFMICVVIAAVFGIVIYRVVTVSTFAAFKWALIRNNSQVATTGTAVCINFCIIMLLNVLYEKVALLLTNLEQPRTESEWENSFTLKMFLFQFVNLNSSTFYIAFFLGRFTGHPGAYLRLINRWRLEECHPSGCLIDLCMQMGIIMVLKQTWNNFMELGYPLIQNWWTRRKVRQEHGPERKISFPQWEKDYNLQPMNAYGLFDEYLEMILQFGFTTIFVAAFPLAPLLALLNNIIEIRLDAYKFVTQWRRPLASRAKDIGIWYGILEGIGILSVITNAFVIAITSDFIPRLVYAYKYGPCAGQGEAGQKCMVGYVNASLSVFRISDFENRSEPESDGSEFSGTPLKYCRYRDYRDPPHSLVPYGYTLQFWHVLAARLAFIIVFEHLVFCIKHLISYLIPDLPKDLRDRMRREKYLIQEMMYEAELERLQKERKERKKNGKAHHNEWP

SEQ ID NO: 19411 - protein, 200 aa, Homo sapiens
MKTILGFKGLFYLHSLIWTCAGDWSAIQVHCTQFWFFARIKPTIFYNLYVNPDEVFLGDGCHVTHVLPNVYYEFFYHPHDCGIVTQPLQEVLLLKTKIRYISRDSTVRSEMPLSCVVHNQHHLLNAVEMRDGETDNVNEWEIEVRIHIANEDMGSNFCNTILNLTATLPRSSNEYLYCKRRNCSVPFDIERQFGISAMIA

SEQ ID NO: 19412 - protein, 353 aa, Homo sapiens
MELTELLLVVMLLLTARLTLSSPAPPACDLRVLSKLLRDSHVLHSRLSQCPEVHPLPTPVLLPAVDFSLGEWKTQMEETKAQDILGAVTLLLEGVMAARGQLGPTCLSSLLGQLSGQVRLLLGALQSLLGTQLPPQGRTTAHKDPNAIFLSFQHLLRGKVRFLMLVGGSTLCVRRAPPTTAVPSRTSLVLTLNELPNRTSGLLETNFTASARTTGSGLLKWQQGFRAKIPGLLNQTSRSLDQIPGYLNRIHELLNGTRGLFPGPSRRTLGAPDISSGTSDTGSLPPNLQPGYSPSPTHPPTGQYTLFPLPPTLPTPVVQLHPLLPDPSAPTPTPTSPLLNTSYTHSQNLSQEG

SEQ ID NO: 19413 - protein, 924 aa, Homo sapiens
MWRLRRAAVACEVCQSLVKHSSGIKGSLPLQKLHLVSRSIYHSHHPTLKLQRPQLRTSFQQFSSLTNLPLRKLKFSPIKYGYQPRRNFWPARLATRLLKLRYLILGSAVGGGYTAKKTFDQWKDMIPDLSEYKWIVPDIVWEIDEYIDFGSPEETAFRATDRGSESDKHFRKVSDKEKIDQLQEELLHTQLKYQRILERLEKENKELRKLVLQKDDKGIHHRKLKKSLIDMYSEVLDVLSDYDASYNTQDHLPRVVVVGDQSAGKTSVLEMIAQARIFPRGSGEMMTRSPVKVTLSEGPHHVALFKDSSREFDLTKEEDLAALRHEIELRMRKNVKEGCTVSPETISLNVKGPGLQRMVLVDLPGVINTVTSGMAPDTKETIFSISKAYMQNPNAIILCIQDGSVDAERSIVTDLVSQMDPHGRRTIFVLTKVDLAEKNVASPSRIQQIIEGKLFPMKALGYFAVVTGKGNSSESIEAIREYEEEFFQNSKLLKTSMLKAHQVTTRNLSLAVSDCFWKMVRESVEQQADSFKATRFNLETEWKNNYPRLRELDRNELFEKAKNEILDEVISLSQVTPKHWEEILQQSLWERVSTHVIENIYLPAAQTMNSGTFNTTVDIKLKQWTDKQLPNKAVEVAWETLQEEFSRFMTEPKGKEHDDIFDKLKEAVKEESIKRHKWNDFAEDSLRVIQHNALEDRSISDKQQWDAAIYFMEEALQARLKDTENAIENMVGPDWKKRWLYWKNRTQEQCVHNETKNELEKMLKCNEEHPAYLASDEITTVRKNLESRGVEVDPSLIKDTWHQVYRRHFLKTALNHCNLCRRGFYYYQRHFVDSELECNDVVLFWRIQRMLAITANTLRQQLTNTEVRRLEKNVKEVLEDFAEDGEKKIKLLTGKRVQLAEDLKKVREIQEKLDAFIEALHQEK

SEQ ID NO: 19414 - protein, 1763 aa, Homo sapiens
MAKPTSKDSGLKEKFKILLGLGTPRPNPRSAEGKQTEFIITAEILRELSMECGLNNRIRMIGQICEVAKTKKFEEHAVEALWKAVADLLQPERPLEARHAVLALLKAIVQGQGERLGVLRALFFKVIKDYPSNEDLHERLEVFKALTDNGRHITYLEEELADFVLQWMDVGLSSEFLLVLVNLVKFNSCYLDEYIARMVQMICLLCVRTASSVDIEVSLQVLDAVVCYNCLPAESLPLFIVTLCRTINVKELCEPCWKLMRNLLGTHLGHSAIYNMCHLMEDRAYMEDAPLLRGAVFFVGMALWGAHRLYSLRNSPTSVLPSFYQAMACPNEVVSYEIVLSITRLIKKYRKELQVVAWDILLNIIERLLQQLQTLDSPELRTIVHDLLTTVEELCDQNEFHGSQERYFELVERCADQRPESSLLNLISYRAQSIHPAKDGWIQNLQALMERFFRSESRGAVRIKVLDVLSFVLLINRQFYEEELINSVVISQLSHIPEDKDHQVRKLATQLLVDLAEGCHTHHFNSLLDIIEKVMARSLSPPPELEERDVAAYSASLEDVKTAVLGLLVILQTKLYTLPASHATRVYEMLVSHIQLHYKHSYTLPIASSIRLQAFDFLLLLRADSLHRLGLPNKDGVVRFSPYCVCDYMEPERGSEKKTSGPLSPPTGPPGPAPAGPAVRLGSVPYSLLFRVLLQCLKQESDWKVLKLVLGRLPESLRYKVLIFTSPCSVDQLCSALCSMLSGPKTLERLRGAPEGFSRTDLHLAVVPVLTALISYHNYLDKTKQREMVYCLEQGLIHRCASQCVVALSICSVEMPDIIIKALPVLVVKLTHISATASMAVPLLEFLSTLARLPHLYRNFAAEQYASVFAISLPYTNPSKFNQYIVCLAHHVIAMWFIRCRLPFRKDFVPFITKGLRSNVLLSFDDTPEKDSFRARSTSLNERPKRIQTSLTSASLGSADENSVAQADDSLKNLHLELTETCLDMMARYVFSNFTAVPKRSPVGEFLLAGGRTKTWLVGNKLVTVTTSVGTGTRSLLGLDSGELQSGPESSSSPGVHVRQTKEAPAKLESQAGQQVSRGARDRVRSMSGGHGLRVGALDVPASQFLGSATSPGPRTAPAAKPEKASAGTRVPVQEKTNLAAYVPLLTQGWAEILVRRPTGNTSWLMSLENPLSPFSSDINNMPLQELSNALMAAERFKEHRDTALYKSLSVPAASTAKPPPLPRSNTVASFSSLYQSSCQGQLHRSVSWADSAVVMEEGSPGEVPVLVEPPGLEDVEAALGMDRRTDAYSRSSSVSSQEEKSLHAEELVGRGIPIERVVSSEGGRPSVDLSFQPSQPLSKSSSSPELQTLQDILGDPGDKADVGRLSPEVKARSQSGTLDGESAAWSASGEDSRGQPEGPLPSSSPRSPSGLRPRGYTISDSAPSRRGKRVERDALKSRATASNAEKVPGINPSFVFLQLYHSPFFGDESNKPILLPNESQSFERSVQLLDQIPSYDTHKIAVLYVGEGQSNSELAILSNEHGSYRYTEFLTGLGRLIELKDCQPDKVYLGGLDVCGEDGQFTYCWHDDIMQAVFHIATLMPTKDVDKHRCDKKRHLGNDFVSIVYNDSGEDFKLGTIKGQFNFVHVIVTPLDYECNLVSLQCRKDMEGLVDTSVAKIVSDRNLPFVARQMALHANMASQVHHSRSNPTDIYPSKWIARLRHIKRLRQRICEEAAYSNPSLPLVHPPSHSKAPAQTPAEPTPGYEVGQRKRLISSVEDFTEFV

SEQ ID NO: 19415 - protein, 483 aa, Homo sapiens
MARGPCNAPRWASLMVLVAIGTAVTAAVNPGVVVRISQKGLDYASQQGTAALQKELKRIKIPDYSDSFKIKHLGKGHYSFYSMDIREFQLPSSQISMVPNVGLKFSISNANIKISGKWKAQKRFLKMSGNFDLSIEGMSISADLKLGSNPTSGKPTITCSSCSSHINSVHVHISKSKVGWLIQLFHKKIESALRNKMNSQVCEKVTNSVSSELQPYFQTLPVMTKIDSVAGINYGLVAPPATTAETLDVQMKGEFYSENHHNPPPFAPPVMEFPAAHDRMVYLGLSDYFFNTAGLVYQEAGVLKMTLRDDMIPKESKFRLTTKFFGTFLPEVAKKFPNMKIQIHVSASTPPHLSVQPTGLTFYPAVDVQAFAVLPNSSLASLFLIGMHTTGSMEVSAESNRLVGELKLDRLLLELKHSNIGPFPVELLQDIMNYIVPILVLPRVNEKLQKGFPLPTPARVQLYNVVLQPHQNFLLFGADVVYK

SEQ ID NO: 19416 - protein, 287 aa, Homo sapiens
MCYLFRLHPVIKAFLCGSISGTCSTLLFQPLDLLKTRLQTLQPSDHGSRRVGMLAVLLKVVRTESLLGLWKGMSPSIVRCVPGVGIYFGTLYSLKQYFLRGHPPTALESVMLGVGSRSVAGVCMSPITVIKTRYESGKYGYESIYAALRSIYHSEGHRGLFSGLTATLLRDAPFSGIYLMFYNQTKNIVPHDQVDATLIPITNFSCGIFAGILASLVTQPADVIKTHMQLYPLKFQWIGQAVTLIFKDYGLRGFFQGGIPRALRRTLMAAMAWTVYEEMMAKMGLKS

SEQ ID NO: 19417 - protein, 928 aa, Homo sapiens
MDRAALRAAAMGEKKEGGGGGDAAAAEGGAGAAASRALQQCGQLQKLIDISIGSLRGLRTKCAVSNDLTQQEIRTLEAKLVRYICKQRQCKLSVAPGERTPELNSYPRFSDWLYTFNVRPEVVQEIPRDLTLDALLEMNEAKVKETLRRCGASGDECGRLQYALTCLRKVTGLGGEHKEDSSWSSLDARRESGSGPSTDTLSAASLPWPPGSSQLGRAGNSAQGPRSISVSALPASDSPTPSFSEGLSDTCIPLHASGRLTPRALHSFITPPTTPQLRRHTKLKPPRTPPPPSRKVFQLLPSFPTLTRSKSHESQLGNRIDDVSSMRFDLSHGSPQMVRRDIGLSVTHRFSTKSWLSQVCHVCQKSMIFGVKCKHCRLKCHNKCTKEAPACRISFLPLTRLRRTESVPSDINNPVDRAAEPHFGTLPKALTKKEHPPAMNHLDSSSNPSSTTSSTPSSPAPFPTSSNPSSATTPPNPSPGQRDSRFNFPAAYFIHHRQQFIFPDISAFAHAAPLPEAADGTRLDDQPKADVLEAHEAEAEEPEAGKSEAEDDEDEVDDLPSSRRPWRGPISRKASQTSVYLQEWDIPFEQVELGEPIGQGRWGRVHRGRWHGEVAIRLLEMDGHNQDHLKLFKKEVMNYRQTRHENVVLFMGACMNPPHLAIITSFCKGRTLHSFVRDPKTSLDINKTRQIAQEIIKGMGYLHAKGIVHKDLKSKNVFYDNGKVVITDFGLFGISGVVREGRRENQLKLSHDWLCYLAPEIVREMTPGKDEDQLPFSKAADVYAFGTVWYELQARDWPLKNQAAEASIWQIGSGEGMKRVLTSVSLGKEVSEILSACWAFDLQERPSFSLLMDMLEKLPKLNRRLSHPGHFWKSADRWRSRYYGKGRYGHPDFKSSCPILEEYINSSKVVPRFERFGLGVLESSNPKM

SEQ ID NO: 19418 - protein, 1581 aa, Homo sapiens
MRGQAAAPGPVWILAPLLLLLLLLGRRARAAAGADAGPGPEPCATLVQGKFFGYFSAAAVFPANASRCSWTLRNPDPRRYTLYMKVAKAPVPCSGPGRVRTYQFDSFLESTRTYLGVESFDEVLRLCDPSAPLAFLQASKQFLQMRRQQPPQHDGLRPRAGPPGPTDDFSVEYLVVGNRNPSRAACQMLCRWLDACLAGSRSSHPCGIMQTPCACLGGEAGGPAAGPLAPRGDVCLRDAVAGGPENCLTSLTQDRGGHGATGGWKLWSLWGECTRDCGGGLQTRTRTCLPAPGVEGGGCEGVLEEGRQCNREACGPAGRTSSRSQSLRSTDARRREELGDELQQFGFPAPQTGDPAAEEWSPWSVCSSTCGEGWQTRTRFCVSSSYSTQCSGPLREQRLCNNSAVCPVHGAWDEWSPWSLCSSTCGRGFRDRTRTCRPPQFGGNPCEGPEKQTKFCNIALCPVDGNWNEWSSWSACSASCSQGRQQRTRECNGPSYGGAECQGHWVETRDCFLQQCPVDGKWQAWASWGSCSVTCGAGSQRRERVCSGPFFGGAACQGPQDEYRQCGTQRCPEPHEICDEDNFGAVIWKETPAGEVAAVRCPRNATGLILRRCELDEEGIAYWEPPTYIRCVSIDYRNIQMMTREHLAKAQRGLPGEGVSEVIQTLVEISQDGTSYSGDLLSTIDVLRNMTEIFRRAYYSPTPGDVQNFVQILSNLLAEENRDKWEEAQLAGPNAKELFRLVEDFVDVIGFRMKDLRDAYQVTDNLVLSIHKLPASGATDISFPMKGWRATGDWAKVPEDRVTVSKSVFSTGLTEADEASVFVVGTVLYRNLGSFLALQRNTTVLNSKVISVTVKPPPRSLRTPLEIEFAHMYNGTTNQTCILWDETDVPSSSAPPQLGPWSWRGCRTVPLDALRTRCLCDRLSTFAILAQLSADANMEKATLPSVTLIVGCGVSSLTLLMLVIIYVSVWRYIRSERSVILINFCLSIISSNALILIGQTQTRNKVVCTLVAAFLHFFFLSSFCWVLTEAWQSYMAVTGHLRNRLIRKRFLCLGWGLPALVVAISVGFTKAKGYSTMNYCWLSLEGGLLYAFVGPAAAVVLVNMVIGILVFNKLVSKDGITDKKLKERAGASLWSSCVVLPLLALTWMSAVLAVTDRRSALFQILFAVFDSLEGFVIVMVHCILRREVQDAVKCRVVDRQEEGNGDSGGSFQNGHAQLMTDFEKDVDLACRSVLNKDIAACRTATITGTLKRPSLPEEEKLKLAHAKGPPTNFNSLPANVSKLHLHGSPRYPGGPLPDFPNHSLTLKRDKAPKSSFVGDGDIFKKLDSELSRAQEKALDTSYVILPTATATLRPKPKEEPKYSIHIDQMPQTRLIHLSTAPEASLPARSPPSRQPPSGGPPEAPPAQPPPPPPPPPPPPQQPLPPPPNLEPAPPSLGDPGEPAAHPGPSTGPSTKNENVATLSVSSLERRKSRYAELDFEKIMHTRKRHQDMFQDLNRKLQHAAEKDKEVLGPDSKPEKQQTPNKRPWESLRKAHGTPTWVKKELEPLQPSPLELRSVEWERSGATIPLVGQDIIDLQTEV

SEQ ID NO: 19419 - protein, 791 aa, Homo sapiens
MYAFYSLLIYIFYSLFRRDGGAAAAAEPGDPAQRARKPRGRRRPDLPAPELWTELTGLAASSEPEDGSEGAAEGRAAAVSLEEALLRLAEFLSVQLGAEESCGGPADLGQSGEVPSLLTVTSQLLALLAWLRSPRGRQALLQGTQPAPRVRPPSPDGSTSQEESPSHFTAVPGEPLGDETQGQQPLQLEEDQRAWQRLEQLILGQLEELKQQLEQQEEELGRLRLGVGATDSEKRVQHLTLENEALKQSLSLMRDLLLHWGPGPPIRAPQEEAEALLELQGRLQEAQDTTEALRAQLGVQEVQLQGLQGALQQLQQETEQNCRRELQQMHGQLAGLRARMASLRQGCGDLRGLVSTFTQSCQGSLSEARGQVSWALGALSSGGPGTQLPEGQQGPPAGCPGRLPELKGNIRVLCRLRPGTSSSLVSVEPGPGGTVTTCYRGRHRRFRLDWVFPPDASQEEVFRELEPAVLSCLRGYSVCIFTYGQTGTGKTYSMEGPPEDPGIVPRALQSLFREMGAGRQHRVTLSMVEIYNEAVRDLLAPGPPERLAVRQGPEGQGGIQVAGLTHWDVPNLETLHQMLKLGRSNRATAATAMNQRSSRSHALVTLTLRAASPPRAPGTAGTLHLVDLAGSERARKAGAAGPPRGDPDGARRLREAQTINRSLLALGGVMAALRAHRPHVPFRDSQLTRLLQPALGPGTTAVLLLQISTRPEDLGETVCSLKFADRVGQVELGPARRRRVPRSSGTPSSLSTDTPLTGTPCTPTPSPGSPPCPSPDNGSGSALAPAEGLPL

SEQ ID NO: 19420 - protein, 1166 aa, Homo sapiens
MSLKPQQQQQQQQQQQQQQQQQQQQQQQPPPAAANVRKPGGSGLLASPAAAPSPSSSSVSSSSATAPSSVVAATSGGGRPGLGRGRNSNKGLPQSTISFDGIYANMRMVHILTSVVGSKCEVQVKNGGIYEGVFKTYSPKCDLVLDAAHEKSTESSSGPKREEIMESILFKCSDFVVVQFKDMDSSYAKRDAFTDSAISAKVNGEHKEKDLEPWDAGELTANEELEALENDVSNGWDPNDMFRYNEENYGVVSTYDSSLSSYTVPLERDNSEEFLKREARANQLAEEIESSAQYKARVALENDDRSEEEKYTAVQRNSSEREGHSINTRENKYIPPGQRNREVISWGSGRQNSPRMGQPGSGSMPSRSTSHTSDFNPNSGSDQRVVNGGVPWPSPCPSPSSRPPSRYQSGPNSLPPRAATPTRPPSRPPSRPSRPPSHPSAHGSPAPVSTMPKRMSSEGPPRMSPKAQRHPRNHRVSAGRGSISSGLEFVSHNPPSEAATPPVARTSPSGGTWSSVVSGVPRLSPKTHRPRSPRQNSIGNTPSGPVLASPQAGIIPTEAVAMPIPAASPTPASPASNRAVTPSSEAKDSRLQDQRQNSPAGNKENIKPNETSPSFSKAENKGISPVVSEHRKQIDDLKKFKNDFRLQPSSTSESMDQLLNKNREGEKSRDLIKDKIEPSAKDSFIENSSSNCTSGSSKPNSPSISPSILSNTEHKRGPEVTSQGVQTSSPACKQEKDDKEEKKDAAEQVRKSTLNPNAKEFNPRSFSQPKPSTTPTSPRPQAQPSPSMVGHQQPTPVYTQPVCFAPNMMYPVPVSPGVQPLYPIPMTPMPVNQAKTYRAGKVKYLELELLRYVPNMPQQRQDQHHQSAMMHPASAAGPPIAATPPAYSTQYVAYSPQQFPNQPLVQHVPHYQSQHPHVYSPVIQGNARMMAPPTHAQPGLVSSSATQYGAHEQTHAMYACPKLPYNKETSPSFYFAISTGSLAQQYAHPNATLHPHTPHPQPSATPTGQQQSQHGGSHPAPSPVQHHQHQAAQALHLASPQQQSAIYHAGLAPTPPSMTPASNTQSPQNSFPAAQQTVFTIHPSHVQPAYTNPPHMAHVPQAHVQSGMVPSHPTAHAPMMLMTTQPPGGPQAALAQSALQPIPVSTTAHFPYMTHPSVQAHHQQQL

SEQ ID NO: 19421 - protein, 210 aa, Homo sapiens
MPHTLWMVWVLGVIISLSKEESSNQASLSCDRNGICKGSSGSLNSIPSGLTEAVKSLDLSNNRITYISNSDLQSERDAYWVENLMVQELENFNPPFKLCLHKRDFIPGKWIIDNIIDSIEKSHKTVFVLSENFVKSEWCKYELDFSHFRLFDENNDAAILILLEPIEKKAIPQRFCKLRKIMNTKTYLEWPMDEAQREGFWVNLRAAIKS

SEQ ID NO: 19422 - protein, 56 aa, Homo sapiens
MSRINKNVVLALLTLTSSAFLLFQLYYYKHYLSTKNGAGLSKSKGSRIGFDSTQWK

SEQ ID NO: 19423 - protein, 284 aa, Homo sapiens
MSMLPSFGFTQEQVACVCEVLQQGGNLERLGRFLWSLPACDHLHKNESVLKAKAVVAFHRGNFRELYKILESHQFSPHNHPKLQQLWLKAHYVEAEKLRGRPLGAVGKYRVRRKFPLPRTIWDGEETSYCFKEKSRGVLREWYAHNPYPSPREKRELAEATGLTTTQVSNWFKNRRQRDRAAEAKERENTENNNSSSNKQNQLSPLEGGKPLMSSSEEEFSPPQSPDQNSVLLLQGNMGHARSSNYSLPGLTASQPSHGLQTHQHQLQDSLLGPLTSSLVDLGS

SEQ ID NO: 19424 - protein, 965 aa, Homo sapiens
MWRLRRAAVACEVCQSLVKHSSGIKGSLPLQKLHLVSRSIYHSHHPTLKLQRPQLRTSFQQFSSLTNLPLRKLKFSPIKYGYQPRRNFWPARLATRLLKLRYLILGSAVGGGYTAKKTFDQWKDMIPDLSEYKWIVPDIVWEIDEYIDFEKIRKALPSSEDLVKLAPDFDKIVESLSLLKDFFTSGSPEETAFRATDRGSESDKHFRKVSDKEKIDQLQEELLHTQSKIWKLKYQRILERLEKENKELRKLVLQKDDKGIHHRKLKKSLIDMYSEVLDVLSDYDASYNTQDHLPRVVVVGDQSAGKTSVLEMIAQARIFPRGSGEMMTRSPVKVTLSEGPHHVALFKDSSREFDLTKEEDLAALRHEIELRMRKNVKEGCTVSPETISLNVKGPGLQRMVLVDLPGVINTVTSGMAPDTKETIFSISKAYMQNPNAIILCIQDGSVDAERSIVTDLVSQMDPHGRRTIFVLTKVDLAEKNVASPSRIQQIIEGKLFPMKALGYFAVVTGKGNSSESIEAIREYEEEFFQNSKLLKTSMLKAHQVTTRNLSLAVSDCFWKMVRESVEQQADSFKATRFNLETEWKNNYPRLRELDRNELFEKAKNEILDEVISLSQVTPKHWEEILQQSLWERVSTHVIENIYLPAAQTMNSGTFNTTVDIKLKQWTDKQLPNKAVEVAWETLQEEFSRFMTEPKGKEHDDIFDKLKEAVKEESIKRHKWNDFAEDSLRVIQHNALEDRSISDKQQWDAAIYFMEEALQARLKDTENAIENMVGPDWKKRWLYWKNRTQEQCVHNETKNELEKMLKCNEEHPAYLASDEITTVRKNLESRGVEVDPSLIKDTWHQVYRRHFLKTALNHCNLCRRGFYYYQRHFVDSELECNDVVLFWRIQRMLAITANTLRQQLTNTEVRRLEKNVKEVLEDFAEDGEKKIKLLTGKRVQLAEDLKKVREIQEKLDAFIEALHQEK

SEQ ID NO: 19425 - protein, 128 aa, Homo sapiens
MAVLLLLLRALRRGPGPGPRPLWGPGPAWSPGFPARPGRGRPYMASRPPGDLAEAGGRALQSLQLRLLTPTFEGINGLLLKQHLVQNPVRLWQLLGGTFYFNTSRLKQKNKEKDKSKGKAPEEDEESA

SEQ ID NO: 19426 - protein, 434 aa, Homo sapiens
MNVVFAVKQYISKMIEDSGPGMKVLLMDKETTGIVSMVYTQSEILQKEVYLFERIDSQNREIMKHLKAICFLRPTKENVDYIIQELRRPKYTIYFIYFSNVISKSDVKSLAEADEQEVVAEVQQVITKEYELFEFRRTEVPPLLLILDRCDDAITPLLNQWTYQAMVHELLGINNNRIDLSRVPGISKDLREVVLSAENDEFYANNMYLNFAEIGSNIKNLMEDFQKKKPKEQQKLESIADMKAFVENYPQFKKMSGTVSKHVTVVGELSRLVSERNLLEVSEVEQELACQNDHSSALQNIKRLLQNPKVTEFDAARLVMLYALHYERHSSNSLPGLMMDLRNKGVSEKYRKLVSAVVEYGGKRVRGSDLFSPKDAVAITKQFLKGLKGVENVYTQHQPFLHETLDHLIKGRLKENLYPYLGPSTLRDRIASCL

SEQ ID NO: 19427 - protein, 311 aa, Homo sapiens
MSDTLTADVIGRRVEVNGEHATVRFAGVVPPVAGPWLGVEWDNPERGKHDGSHEGTVYFKCRHPTGGSFIRPNKVNFGTDFLTAIKNRYVLEDGPEEDRKEQIVTIGNKPVETIGFDSIMKQQSQLSKLQEVSLRNCAVSCAGEKGGVAEACPNIRKVDLSKNLLSSWDEVIHIADQLRHLEVLNVSENKLKFPSGSVLTGTLSVLKVLVLNQTGITWAEAHAQCGGSRHGLDMQKDASKFVDLCVLQKCSTSNCIISAKDHTSMRMNVAKASEVTGRFNSQFKTCAICRTVCRMGAAVCRGVPRPGGTLP

SEQ ID NO: 19428 - protein, 596 aa, Homo sapiens
MSDNQSWNSSGSEEDPETESGPPVERCGVLSKWTNYIHGWQDRWVVLKNNALSYYKSEDETEYGCRGSICLSKAVITPHDFDECRFDISVNDSVWYLRAQDPDHRQQWIDAIEQHKTESGYGSESSLRRHGSMVSLVSGASGYSATSTSSFKKGHSLREKLAEMETFRDILCRQVDTLQKYFDACADAVSKDELQRDKVVEDDEDDFPTTRSDGDFLHSTNGNKEKLFPHVTPKGINGIDFKGEAITFKATTAGILATLSHCIELMVKREDSWQKRLDKETEKKRRTEEAYKNAMTELKKKSHFGGPDYEEGPNSLINEEEFFDAVEAALDRQDKIEEQSEKVRLHWPTSLPSGDAFSSVGTHRFVQKVEEMVQNHMTYSLQDVGGDANWQLVVEEGEMKVYRREVEENGIVLDPLKATHAVKGVTGHEVCNYFWNVDVRNDWETTIENFHVVETLADNAIIIYQTHKRVWPASQRDVLYLSVIRKIPALTENDPETWIVCNFSVDHDSAPLNNRCVRAKINVAMICQTLVSPPEGNQEISRDNILCKITYVANVNPGGWAPASVLRAVAKREYPKFLKRFTSYVQEKTAGKPILF

SEQ ID NO: 19429 - protein, 758 aa, Homo sapiens
MAVLLLLLRALRRGPGPGPRPLWGPGPAWSPGFPARPGRGRPYMASRPPGDLAEAGGRALQSLQLRLLTPTFEGINGLLLKQHLVQNPVRLWQLLGGTFYFNTSRLKQKNKEKDKSKGKAPEEDEEERRRRERDDQMYRERLRTLLVIAVVMSLLNALSTSGGSISWNDFVHEMLAKGEVQRVQVVPESDVVEVYLHPGAVVFGRPRLALMYRMQVANIDKFEEKLRAAEDELNIEAKDRIPVSYKRTGFFGNALYSVGMTAVGLAILWYVFRLAGMTGREGGFSAFNQLKMARFTIVDGKMGKGVSFKDVAGMHEAKLEVREFVDYLKSPERFLQLGAKVPKGALLLGPPGCGKTLLAKAVATEAQVPFLAMAGPEFVEVIGGLGAARVRSLFKEARARAPCIVYIDEIDAVGKKRSTTMSGFSNTEEEQTLNQLLVEMDGMGTTDHVIVLASTNRADILDGALMRPGRLDRHVFIDLPTLQERREIFEQHLKSLKLTQSSTFYSQRLAELTPGFSGTAKKSKILSKEEQKVVAFHESGHALVGWMLEHTEAVMKVSITPRTNAALGFAQMLPRDQHLFTKEQLFERMCMALGGRASEALSFNEVTSGAQDDLRKVTRIAYSMVKQFGMAPGIGPISFPEAQEGLMGIGRRPFSQGLQQMMDHEARLLVAKAYRHTEKVLQDNLDKLQALANALLEKEVINYEDIEALIGPPPHGPKKMIAPQRWIDAQREKQDLGEEETEETQQPPLGGEEPTWPK

SEQ ID NO: 19430 - protein, 55 aa, Homo sapiens
MSKRPSYAPPPTPAPATQMPSTPGFVGYNPYSHLAYNNYRLGGNPGTNSRVTEIS

SEQ ID NO: 19431 - protein, 460 aa, Homo sapiens
MQLPRWWELGDPCAWTGQGRGTRRMSPATTGTFLLTVYSIFSKVHSDRNVYPSAGVLFVHVLEREYFKGEFPPYPKPGEISNDPITFNTNLMGYPDRPGWLRYIQRTPYSDGVLYGSPTAENVGKPTIIEITAYNRRTFETARHNLIINIMSAEDFPLPYQAEFFIKNMNVEEMLASEVLGDFLGAVKNVWQPERLNAINITSALDRGGRVPLPINDLKEGVYVMVGADVPFSSCLREVENPQNQLRCSQEMEPVITCDKKFRTQFYIDWCKISLVDKTKQVSTYQEVIRGEGILPDGGEYKPPSDSLKSRDYYTDFLITLAVPSAVALVLFLILAYIMCCRREGVEKRNMQTPDIQLVHHSAIQKSTKELRDMSKNREIAWPLSTLPVFHPVTGEIIPPLHTDNYDSTNMPLMQTQQNLPHQTQIPQQQTTGDFRLTTFQRFEVNGIPEERKLTEAMNL

SEQ ID NO: 19432 - protein, 164 aa, Homo sapiens
MAVLLLLLRALRRGPGPGPRPLWGPGPAWSPGFPARPGRGRPYMASRPPGDLAEAGGRALQSLQLRLLTPTFEGINGLLLKQHLVQNPVRLWQLLGGTFYFNTSRLKQKNKEKDKSKGKAPEEDEVFDQTPSNWIHGHCELALCSRRADCICDGSDGLGRSFLF

SEQ ID NO: 19433 - protein, 155 aa, Homo sapiens
MEERGDSEPTPGCSGLGPGGVRGFGDGGGAPSWAPEDAWMGTHPKYLEMMELDIGDATQVYVAFLVYLDLMESKSWHEVNCVGLPELQLICLVGTEIEGEGLQTVVPTPITASLSHNSCTQKKAHMRTQQEGGCLQAKKRGLIRDGMFLHFGLDF

SEQ ID NO: 19434 - protein, 211 aa, Homo sapiens
MSLQWTAVATFLYAEVFVVLLLCIPFISPKRWQKIFKSRLVELLVSYGNTFFVVLIVILVLLVIDAVREIRKYDDVTEKVNLQNNPGAMEHFHMKLFRAQRNLYIAGFSLLLSFLLRRLVTLISQQATLLASNEAFKKQAESASEAAKKYMEENDQLKKGAAVDGELEKAENQVLAMRKQSEGLTKEYDRLLEEHAKLQAAVDGPMDKKEE

SEQ ID NO: 19435 - protein, 197 aa, Homo sapiens
MQRASRLKRELHMLATEPPPGITCWQDKDQMDDLRAQILGGANTPYEKGVFKLEVIIPERYPFEPPQIRFLTPIYHPNIDSAGRICLDVLKLPPKGAWRPSLNIATVLTSIQLLMSEPNPDDPLMADISSEFKYNKPAFLKNARQWTEKHARQKQKADEEEMLDNLPEAGDSRVHNSTQKRKASQLVGIEKKFHPDV

SEQ ID NO: 19436 - protein, 240 aa, Homo sapiens
MELNEIMSSECHSSVCAKIVQLLGQNEVDYRQKQVVILSQDSFYRVLTSEQKAKALKGQFNFDHPDAFDNELILKTLKEITEGKTVQIPVYDFVSHSRKEETVTVYPADVVLFEGILAFYSQEVRDLFQMKLFVDTDADTRLSRRVLRDISERGRDLEQILSQYITFVKPAFEEFCLPTKKYADVIIPRGADNLVAINLIVQHIQDILNGGPSKRQTNGCLNGYTPSRKRQASESSSRPH

SEQ ID NO: 19437 - protein, 600 aa, Homo sapiens
MSEETVSESQFSLKTAALRVFDLPLTWYYSLSQIKFSPVAKKLFVVTAVSAISVIFLAHHFKRKRGKKKGKILPWEPEHLILEYTKRAASDKGSSCSSSRQNLTLSLSSTKDKGSQVCNYANGGLFSKYSGSAQSLASVQSVNSCHSCACGNSNSWDKADEDDIKLVNIPVTTPENLYLMGMELFEEALRRWEQALTFRNRQAEDEACGSIKLGAGDAIAEENVDDIISTEFIHKLEALLQRAYRLQEEFEATLGASDPNSLADDIDKDTDITMKGNVEDFGLRDTLSIASTDSFASAAELAEHREVRHTYSLESLCHCPFYEEAMHLVEEGKIYSRVLRTEMLECLGDSDFLAKLHCIRQAFQVILSESANRIFLAESGRKILSALIVKARKNPKKFEDVFDEMIYFLEQTDHWGSTEMELAARGVKNLNFYDVVLDFILMDSFEDLENPPTSIQNVVNNRWLNSSFKETAVASSCWSVLKQKRQQMKIPDGFFAHFYAICEHISPVLAWGFLGPRNSLYDLCCFFKNQVLLFLKDIFDFEKVRYSSTETLAEDLMQLLIRRTELLMAYLEADALRHTSSCLSSHGHVMSTGLLEAKVQ

SEQ ID NO: 19438 - protein, 229 aa, Homo sapiens
MTAEFLSLLCLGLCLGYEDEKKNEKPPKPSLHAWPSSVVEAESNVTLKCQAHSQNVTFVLRKVNDSGYKQEQSSAENEAEFPFTDLKPKDAGRYFCAYKTTASHEWSESSEHLQLVVTGSLPEPLLSVNVDPGMTPGLRTLRCLTPYNGTECIVIALLKMGIPEPLQVRQVRKNQTDFMLWNVTSNDSGNYSCVYYLSNSSHLASFPSNKLEIWVTDKHDELEAPSMKT

SEQ ID NO: 19439 - protein, 132 aa, Homo sapiens
MAAALFVLLGFALLGTHGASGAAGTVFTTVEDLGSKILLTCSLNDSATEVTGHRWLKGGVVLKEDALPGQKTEFKAPTRPSSRSACAATWPPSGPSWASWLRCWCWSPSSSSTRSAGSPRTSWMMTTPALHP

SEQ ID NO: 19440 - protein, 903 aa, Homo sapiens
MASVWQRLGFYASLLKRQLNGGPDVIKWERRVIPGCTRSIYSATGKWTKEYTLQTRKDVEKWWHQRIKEQASKISEADKSKPKFYVLSMFPYPSGKLHMGHVRVYTISDTIARFQKMRGMQVINPMGWDAFGLPAENAAVERNLHPQSWTQSNIKHMRKQLDRLGLCFSWDREITTCLPDYYKWTQYLFIKLYEAGLAYQKEALVNWDPVDQTVLANEQVDEHGCSWRSGAKVEQKYLRQWFIKTTAYAKAMQDALADLPEWYGIKGMQAHWIGDCVGCHLDFTLKVHGQATGEKLTAYTATPEAIYGTSHVAISPSHRLLHGHSSLKEALRMALVPGKDCLTPVMAVNMLTQQEVPVVILAKADLEGSLDSKIGIPSTSSEDTILAQTLGLAYSEVIETLPDGTERLSSSAEFTGMTRQDAFLALTQKARGKRVGGDVTSDKLKDWLISRQRYWGTPIPIVHCPVCGPTPVPLEDLPVTLPNIASFTGKGGPPLAMASEWVNCSCPRCKGAAKRETDTMDTFVDSAWYYFRYTDPHNPHSPFNTAVADYWMPVDLYIGGKEHAVMHLFYARFFSHFCHDQKMVKHREPFHKLLAQGLIKGQTFRLPSGQYLQREEVDLTGSVPVHAKTKEKLEVTWEKMSKSKHNGVDPEEVVEQYGIDTIRLYILFAAPPEKDILWDVKTDALPGVLRWQQRLWTLTTRFIEARASGKSPQPQLLSNKEKAEARKLWEYKNSVISQVTTHFTEDFSLNSAISQLMGLSNALSQASQSVILHSPEFEDALCALMVMAAPLAPHVTSEIWAGLALVPRKLCAHYTWDASVLLQAWPAVDPEFLQQPEVVQMAVLINNKACGKIPVPQQVARDQDKVHEFVLQSELGVRLLQGRSIKKSFLSPRTALINFLVQD

SEQ ID NO: 19441 - protein, 40 aa, Homo sapiens
MKLRGVSLAAGLFLLALSLWGQPAEAAEETLFATPVTQAF

SEQ ID NO: 19442 - protein, 267 aa, Homo sapiens
MPKGGCPKAPQQEELPLSSDMVEKQTGKKDKDKVSLTKTPKLERGDGGKEVRERASKRKLPFTAGANGEQKDSDTEKQGPERKRIKKEPVTRKAGLLFGMGLSGIRAGYPLSERQQVALLMQMTAEESANSPVDTTPKHPSQSTVCQKGTPNSASKTKDKVNKRNERGETRLHRAAIRGDARRIKELISEGADVNVKDFAGWTALHEACNRGYYDVAKQLLAAGAEVNTKGLDDDTPLHDAANNGHYKVGIPPFFTHPACPGIWVVL

SEQ ID NO: 19443 - protein, 671 aa, Homo sapiens
MASGGSGGVSVPALWSEVNRYGQNGDFTRALKTVNKILQINKDDVTALHCKVVCLIQNGSFKEALNVINTHTKVLANNSLSFEKAYCEYRLNRIENALKTIESANQQTDKLKELYGQVLYRLERYDECLAVYRDLVRNSQDDYDEERKTNLSAVVAAQSNWEKVVPENLGLQEGTHELCYNTACALIGQGQLNQAMKILQKAEDLCRRSLSEDTDGTEEDPQAELAIIHGQMAYILQLQGRTEEALQLYNQIIKLKPTDVGLLAVIANNIITINKDQNVFDSKKKVKLTNAEGVEFKLSKKQLQAIEFNKALLAMYTNQAEQCRKISASLQSQSPEHLLPVLIQAAQLCREKQHTKAIELLQEFSDQHPENAAEIKLTMAQLKISQGNISKACLILRSIEELKHKPGMVSALVTMYSHEEDIDSAIEVFTQAIQWYQNHQPKSPAHLSLIREAANFKLKYGRKKEAISDLQQLWKQNPKDIHTLAQLISAYSLVDPEKAKALSKHLPSSDSMSLKVDVEALENSAGATYIRKKGGKVTGDSQPKEQGQGDLKKKKKKKKGKLPKNYDPKVTPDPERWLPMRERSYYRGRKKGKKKDQIGKGTQGATAGASSELDASKTVSSPPTSPRPGSAATVSASTSNIIPPRHQKPAGAPATKKKQQQKKKKGGKGGW

SEQ ID NO: 19444 - protein, 759 aa, Homo sapiens
MGLPALEFSDCCLDSPHFRETLKSHEAELDKTNKFIKELIKDGKSLISALKNLSSAKRKFADSLNEFKFQCIGDAETDDEMCIARSLQEFATVLRNLEDERIRMIENASEVLITPLEKFRKEQIGAAKEAKKKYDKETEKYCGILEKHLNLSSKKKESQLQEADSQVDLVRQHFYEVSLEYVFKVQEVQERKMFEFVEPLLAFLQGLFTFYHHGYELAKDFGDFKTQLTISIQNTRNRFEGTRSEVESLMKKMKENPLEHKTISPYTMEGYLYVQEKRHFGTSWVKHYCTYQRDSKQITMVPFDQKSGGKGGEDESVILKSCTRRKTDSIEKRFCFDVEAVDRPGVITMQALSEEDRRLWMEAMDGREPVYNSNKDSQSEGTAQLDSIGFSIIRKCIHAVETRGINEQGLYRIVGVNSRVQKLLSVLMDPKTASETETDICAEWEIKTITSALKTYLRMLPGPLMMYQFQRSFIKAAKLENQESRVSEIHSLVHRLPEKNRQMLQLLMNHLANVANNHKQNLMTVANLGVVFGPTLLRPQEETVAAIMDIKFQNIVIEILIENHEKIFNTVPDMPLTNAQLHLSRKKSSDSKPPSCSERPLTLFHTVQSTEKQEQRNSIINSSLESVSSNPNSILNSSSSLQPNMNSSDPDLAVVKPTRPNSLPPNPSPTSPLSPSWPMFSAPSSPMPTSSTSSDSSPVSTPFRKAKALYACKAEHDSELSFTAGTVFDNVHPSQEPGWLEGTLNGKTGLIPENYVEFL

SEQ ID NO: 19445 - protein, 228 aa, Homo sapiens
MRTHTRGAPSVFFIYLLCFVSAYITDENPEVMIPFTNANYDSHPMLYFSRAEVAELQLRAASSHEHIAARLTEAVHTMLSSPLEYLPPWDPKDYSARWNEIFGNNLGALAMFCVLYPENIEARDMAKDYMERMAAQPSWLVKDAPWDEVPLAHSLVGFATAYDFLYNYLSKTQQEKFLEVIANASGYMYETSYRRGWGFQYLHNHQPTNCMALLTGSLVLMNQGMMAA

SEQ ID NO: 19446 - protein, 1740 aa, Homo sapiens
MFRQFYLWTCLASGIILGSLFEICLGQYDDDCKLARGGPPATIVAIDEESRNGTILVDNMLIKGTAGGPDPTIELSLKDNVDYWVLMDPVKQMLFLNSTGRVLDRDPPMNIHSIVVQVQCINKKVGTIIYHEVRIVVRDRNDNSPTFKHESYYATVNELTPVGTTIFTGFSGDNGATDIDDGPNGQIEYVIQYNPDDPTSNDTFEIPLMLTGNIVLRKRLNYEDKTRYFVIIQANDRAQNLNERRTTTTTLTVDVLDGDDLGPMFLPCVLVPNTRDCRPLTYQAAIPELRTPEELNPIIVTPPIQAIDQDRNIQPPSDRPGILYSILVGTPEDYPRFFHMHPRTAELSLLEPVNRDFHQKFDLVIKAEQDNGHPLPAFAGLHIEILDENNQSPYFTMPSYQGYILESAPVGATISDSLNLTSPLRIVALDKDIEDTKDPELHLFLNDYTSVFTVTQTGITRYLTLLQPVDREEQQTYTFSITAFDGVQESEPVIVNIQVMDANDNTPTFPEISYDVYVYTDMRPGDSVIQLTAVDADEGSNGEITYEILVGAQGDFIINKTTGLITIAPGVEMIVGRTYALTVQAADNAPPAERRNSICTVYIEVLPPNNQSPPRFPQLMYSLEISEAMRVGAVLLNLQATDREGDSITYAIENGDPQRVFNLSETTGILTLGKALDRESTDRYILIITASDGRPDGTSTATVNIVVTDVNDNAPVFDPYLPRNLSVVEEEANAFVGQVKATDPDAGINGQVHYSLGNFNNLFRITSNGSIYTAVKLNREVRDYYELVVVATDGAVHPRHSTLTLAIKVLDIDDNSPVFTNSTYTVLVEENLPAGTTILQIEAKDVDLGANVSYRIRSPEVKHFFALHPFTGELSLLRSLDYEAFPDQEASITFLVEAFDIYGTMPPGIATVTVIVKDMNDYPPVFSKRIYKGMVAPDAVKGTPITTVYAEDADPPGLPASRVRYRVDDVQFPYPASIFEVEEDSGRVITRVNLNEEPTTIFKLVVVAFDDGEPVMSSSATVKILVLHPGEIPRFTQEEYRPPPVSELATKGTMVGVISAAAINQSIVYSIVSGNEEDTFGINNITGVIYVNGPLDYETRTSYVLRVQADSLEVVLANLRVPSKSNTAKVYIEIQDENNHPPVFQKKFYIGGVSEDARMFTSVLRVKATDKDTGNYSVMAYRLIIPPIKEGKEGFVVETYTGLIKTAMLFHNMRRSYFKFQVIATDDYGKGLSGKADVLVSVVNQLDMQVIVSNVPPTLVEKKIEDLTEILDRYVQEQIPGAKVVVESIGARRHGDAFSLEDYTKCDLTVYAIDPQTNRAIDRNELFKFLDGKLLDINKDFQPYYGEGGRILEIRTPEAVTSIKKRGESLGYTEGALLALAFIIILCCIPAILVVLVSYRQFKVRQAECTKTARIQAALPAAKPAVPAPAPVAAPPPPPPPPPGAHLYEELGDSSIWSFCWQLVICMRTCAIWRTLTRRGYGSEQQQLLRPSLLKPEELSMESGIDPGQEYGQDYYSYEHGYEMPQYGSRRRLLPPAGQEEYGEVVGEAEEEYEEEEWARKRMIKLVVDREYETSSTGEDSAPECQRNRLHHPSIHSNINGNIYIAQNGSVVRTRRACLTDNLKVASPVRLGGPFKKLDKLAVTHEENVPLNTLSKGPFSTEKMNARPTLVTFAPCPVGTDNTAVKPLRNRLKSTVEQESMIDSKNIKEALEFHSDHTQSDDEELWMGPWNNLHIPMTKL

SEQ ID NO: 19447 - protein, 232 aa, Homo sapiens
MLGAMFRAGTPMPPNLNSQGGGHYFIDRDGKAFRHILNFLRLGRLDLPRGYGETALLRAEADFYQIRPLLDALRELEASQGTPAPTAALLHADVDVSPRLVHFSARRGPHHYELSSVQVDTFRANLFCTDSECLGALRARFGVASGDRAEGSPHFHLEWAPRPVELPEVEYGRLGLQPLWTGGPGERREVVGTPSFLEEVLRVALEHGFRLDSVFPDPEDLLNSRSLRFVRH

SEQ ID NO: 19448 - protein, 231 aa, Homo sapiens
MRWRTILLQYCFLLITCLLTALEAVPIDIDKTKVQNIHPVESAKIEPPDTGLYYDEYLKQVIDVLETDKHFREKLQKADIEEIKSGRLSKELDLVSHHVRTKLDELKRQEVGRLRMLIKAKLDSLQDIGMDHQALLKQFDHLNHLNPDKFESTDLDMLIKAATSDLEHYDKTRHEEFKKYEMMKEHERREYLKTLNEEKRKEEESKFEEMKKKHENHPKVNHPVHREAKIN

SEQ ID NO: 19449 - protein, 463 aa, Homo sapiens
MAVLLLLLRALRRGPGPGPRPLWGPGPAWSPGFPARPGRGRPYMASRPPGDLAEAGGRALQSLQLRLLTPTFEGINGLLLKQHLVQNPVRLWQLLGGTFYFNTSRLKQKNKEKDKSKGKAPEEDEEERRRRERDDQMYRERLRTLLVIAVVMSLLNALSTSGGSISWNDFVHEMLAKGEVQRVQVVPESDVVEVYLHPGAVVFGRPRLALMYRMQVANIDKFEEKLRAAEDELNIEAKDRIPVSYKRTGFFGNALYSVGMTAVGLAILWYVFRLAGMTGREGGFSAFNQLKMARFTIVDGKMGKGVSFKDVAGMHEAKLEVREFVDYLKSPERFLQLGAKVPKGALLLGPPGCGKTLLAKAVATEAQVPFLAMAGPEFVEVIGGLGAARVRSLFKEARARAPCIVYIDEIDAVGKKRSTTMSGFSNTEEEQTLNQLLVEMDVFYAEIEELKLVYPYHGVLHSD

SEQ ID NO: 19450 - protein, 601 aa, Homo sapiens
MSEETVSESQFSLKTAALRVFDLPLTWYYSLSQIKFSPVAKKLFVVTAVSAISVIFLAHHFKRKRGKKKGKILPWEPEHLILEYTKRAASDKGSSCSSSRQNLTLSLSSTKDKGSQVCNYANGGLFSKYSGSAQSLASVQSVNSCHSCACGNSNSWDKADEDDIKLVNIPVTTPENLYLMGMELFEEALRRWEQALTFRNRQAEDEACGSIKLGAGDAIAEENVDDIISTEFIHKLEALLQRAYRLQEEFEATLGASDPNSLADDIDKDTDITMKGNVEDFGLRDTLSIASTDSFASAAELAEHREVRHTYSLESLCHCPFYEEAMHLVEEGKIYSRVLRTEMLECLGDSDFLAKLHCIRQAFQVILSESANRIFLAESGRKILSALIVKARKNPKKFEDVFDEMIYFLEQTDHWGSTEMELAARGVKNLNFYDVVLDFILMDSFEDLENPPTSIQNVVNNRWLNSSFKETAVASSCWSVLKQKRQQMKQIPDGFFAHFYAICEHISPVLAWGFLGPRNSLYDLCCFFKNQVLLFLKDIFDFEKVRYSSTETLAEDLMQLLIRRTELLMAYLEADALRHTSSCLSSHGHVMSTGLLEAKVQ

SEQ ID NO: 19451 - protein, 879 aa, Homo sapiens
MRLHLLLLLALCGAGTTAAELSYSLRGNWSICNGNGSLELPGAVPGCVHSALFQQGLIQDSYYRFNDLNYRWVSLDNWTYSKEFKIPFEISKWQKVNLILEGVDTVSKILFNEVTIGETDNMFNRYSFDITNVVRDVNSIELRFQSAVLYAAQQSKAHTRYQVPPDCPPLVQKGECHVNFVRKEQCSFSWDWGPSFPTQGIWKDVRIEAYNICHLNYFTFSPIYDKSAQEWNLEIESTFDVVSSKPVGGQVIVAIPKLQTQQTYSIELQPGKRIVELFVNISKNITVETWWPHGHGNQTGYNMTVLFELDGGLNIEKSAKVYFRTVELIEEPIKGSPGLSFYFKINGFPIFLKGSNWIPADSFQDRVTSELLRLLLQSVVDANMNTLRVWGGGIYEQDEFYELCDELGIMVWQDFMFACALYPTDQGFLDSVTAEVAYQIKRLKSHPSIIIWSGNNENEEALMMNWYHISFTDRPIYIKDYVTLYVKNIRELVLAGDKSRPFITSSPTNGAETVAEAWVSQNPNSNYFGDVHFYDYISDCWNWKVFPKARFASEYGYQSWPSFSTLEKVSSTEDWSFNSKFSLHRQHHEGGNKQMLYQAGLHFKLPQSTDPLRTFKDTIYLTQVMQAQCVKTETEFYRRSRSEIVDQQGHTMGALYWQLNDIWQAPSWASLEYGGKWKMLHYFAQNFFAPLLPVGFENENTFYIYGVSDLHSDYSMTLSVRVHTWSSLEPVCSRVTERFVMKGGEAVCLYEEPVSELLRRCGNCTRESCVVSFYLSADHELLSPTNYHFLSSPKEAVGLCKAQITAIISQQGDIFVFDLETSAVAPFVWLDVGSIPGRFSDNGFLMTEKTRTILFYPWEPTSKNELEQSFHVTSLTDIY

SEQ ID NO: 19452 - protein, 193 aa, Homo sapiens
MKDFVRLQSSFLLCTILTLSEQESVSVGCTSSMFWVVAEPTLLGQDHILHSDEASLGTGCPVTNVTAKGYEFNYPATQCGIQKEVFSYVTVFYSALHCNIMHKGVTGKIPLMCIVYGSSLDTTSSTIHNNLTEFQNDPPATNSYSPWNLTNASLFGLTRIPYFQNSSVEASHQSLLLNMSHPLVHESANVAIF

SEQ ID NO: 19453 - protein, 1215 aa, Homo sapiens
MALKMVKGSIDRMFDKNLQDLVRGIRNHKEDEAKYISQCIDEIKQELKQDNIAVKANAVCKLTYLQMLGYDISWAAFNIIEVMSASKFTFKRIGYLAASQSFHEGTDVIMLTTNQIRKDLSSPSQYDTGVALTGLSCFVTPDLARDLANDIMTLMSHTKPYIRKKAVLIMYKVFLKYPESLRPAFPRLKEKLEDPDPGVQSAAVNVICELARRNPKNYLSLAPLFFKLMTSSTNNWVLIKIIKLFGALTPLEPRLGKKLIEPLTNLIHSTSAMSLLYECVNTVIAVLISLSSGMPNHSASIQLCVQKLRILIEDSDQNLKYLGLLAMSKILKTHPKSVQSHKDLILQCLDDKDESIRLRALDLLYGMVSKKNLMEIVKKLMTHVDKAEGTTYRDELLTKIIDICSQSNYQYITNFEWYISILVELTRLEGTRHGHLIAAQMLDVAIRVKAIRKFAVSQMSALLDSAHLLASSTQRNGICEVLYAAAWICGEFSEHLQEPHHTLEAMLRPRVTTLPGHIQAVYVQNVVKLYASILQQKEQAGEAEGAQAVTQLMVDRLPQFVQSADLEVQERASCILQLVKHIQKLQAKDVPVAEEVSALFAGELNPVAPKAQKKVPVPEGLDLDAWINEPLSDSESEDERPRAVFHEEEQRRPKHRPSEADEEELARRREARKQEQANNPFYIKSSPSPQKRYQDTPGVEHIPVVQIDLSVPLKVPGLPMSDQYVKLEEERRHRQKLEKDKRRKKRKEKEKKGKRRHSSLPTESDEDIAPAQQVDIVTEEMPENALPSDEDDKDPNDPYRALDIDLDKPLADSEKLPIQKHRNTETSKSPEKDVPMVEKKSKKPKKKEKKHKEKERDKEKKKEKEKKAEDLDFWLSTTPPPAPAPAPAPVPSTGELSVNTVTTPKDECEDAKTEAQGEEDDAEGQDQDKKSPKPKKKKHRKEKEERTKGKKKSKKQPPGSEEAAGEPVQNGAPEEEQLPPESSYSLLAENSYVKMTCDIRGSLQEDSQVTVAIVLENRSSSILKGMELSVLDSLNARMARPQGSSVHDGVPVPFQLPPGVSNEAQYVFTIQSIVMAQKLKGTLSFIAKNDEGATHEKLDFRLHFSCSSYLITTPCYSDAFAKLLESGDLSMSSIKVDGIRMSFQNLLAKICFHHHFSVVERVDSCASMYSRSIQGHHVCLLVKKGENSVSVDGKCSDSTLLSNLLEEMKATLAKC

SEQ ID NO: 19454 - protein, 641 aa, Homo sapiens
MAVLLLLLRALRRGPGPGPRPLWGPGPAWSPGFPARPGRGRPYMASRPPGDLAEAGGRALQSLQLRLLTPTFEGINGLLLKQHLVQNPVRLWQLLGGTFYFNTSRLKQKNKEKDKSKGKAPEEDEEERRRRERDDQMYRERLRTLLVIAVVMSLLNALSTSGGSISWNDFVHEMLAKGEVQRVQVVPESDVVEVYLHPGAVVFGRPRLALMYRMQVANIDKFEEKLRAAEDELNIEAKDRIPVSYKRTGFFGNALYSVGMTAVGLAILWYVFRLAGMTGREGGFSAFNQLKMARFTIVDGKMGKGVSFKDVAGMHEAKLEVREFVDYLKERREIFEQHLKSLKLTQSSTFYSQRLAELTPGFSGADIANICNEAALHAAREGHTSVHTLNFEYAVERVLAGTAKKSKILSKEEQKVVAFHESGHALVGWMLEHTEAVMKVSITPRTNAALGFAQMLPRDQHLFTKEQLFERMCMALGGRASEALSFNEVTSGAQDDLRKVTRIAYSMVKQFGMAPGIGPISFPEAQEGLMGIGRRPFSQGLQQMMDHEARLLVAKAYRHTEKVLQDNLDKLQALANALLEKEVINYEDIEALIGPPPHGPKKMIAPQRWIDAQREKQDLGEEETEETQQPPLGGEEPTWPK

SEQ ID NO: 19455 - protein, 158 aa, Homo sapiens
MGLLVFVRNLLLALCLFLVLGFLYYSAWKLHLLQWEEDSNSVVLSFDSAGQTLGSEYDRLGFLLNLDSKLFSKPAPMFLDDSFRKWARIREFVPPFGIKGQDNLIKAILSVTKEYRLTPALDSLRCRRCIIVGNGGVLANKSLGSRIDDYDIVVRPRL

SEQ ID NO: 19456 - protein, 343 aa, Homo sapiens
MLKPSLPFTSLLFLQLPLLGVGLNTTILTPNGNEDTTADFFLTTMPTDSLSVSTLPLPEVQCFVFNVEYMNCTWNSSSEPQPTNLTLHYWYKNSDNDKVQKCSHYLFSEEITSGCQLQKKEIHLYQTFVVQLQDPREPRRQATQMLKLQNLVIPWAPENLTLHKLSESQLELNWNNRFLNHCLEHLVQYRTDWDHSWTEQSVDYRHKFSLPSVDGQKRYTFRVRSRFNPLCGSAQHWSEWSHPIHWGSNTSKENPFLFALEAVVISVGSMGLIISLLCVYFWLERTMPRIPTLKNLEDLVTEYHGNFSSQAPPLGILVIHNYQQLSPACPAWASSAYEIHLPL

SEQ ID NO: 19457 - protein, 130 aa, Homo sapiens
MEERGDSEPTPGCSGLGPGGVRGFGDGGGAPSWAPEDAWMGTHPKYLEMMELDIGDATQVYVAFLVYLDLMESKSWHEVNCVGLPELQLICLVGTEIEGEGLQTVVPTPITASLSHNRSGPGREDLLHCC

SEQ ID NO: 19458 - protein, 248 aa, Homo sapiens
MAGLNSLEAVKRKIQALQQQADEAEDRAQGLQRELDGERERREKAEGDVAALNRRIQLVEEELDRAQERLATALQKLEEAEKAADESERGMKVIENRAMKDEEKMEIQEMQLKEAKHIAEEADRKYEEVARKLVILEGELERAEERAEVSELKCGDLEEELKNVTNNLKSLEAASEKYSEKEDKYEEEIKLLSDKLKEAETRAEFAERTVAKLEKTIDDLEEKLAQAKEENVGLHQTLDQTLNELNCI

SEQ ID NO: 19459 - protein, 291 aa, Homo sapiens
MNGEEEFFDAVTGFDSDNSSGEFSEANQKVTGMIDLDTSKNNRIGKTGERPSQENGIQKHRTSLPAPMFSRSDFSVWTILKKCVGLELSKITMPIAFNEPLSFLQRITEYMEHVYLIHRASCQPQPLERMQSVAAFAVSAVASQWERTGKPFNPLLGETYELIREDLGFRFISEQVSHHPPISAFHSEGLNHDFLFHGSIYPKLKFWGKSVEAEPRGTITLELLKHNEAYTWTNPTCCVHNVIIGKLWIEQYGTVEILNHRTGHKCVLHFKPCGLFGKELHKVEGHIQDKK

SEQ ID NO: 19460 - protein, 397 aa, Homo sapiens
MRLHLLLLLALCGAGTTAAELSYSLRGNWSICNGNGSLELPGAVPGCVHSALFQQGLIQDSYYRFNDLNYRWVSLDNWTYSKEFKIPFEISKWQKVNLILEGVDTVSKILFNEVTIGETDNMFNRYSFDITNVVRDVNSIELRFQSAVLYAAQQSKAHTRYQVPPDCPPLVQKGECHVNFVRKEQCSFSWDWGPSFPTQGIWKDVRIEAYNICHLNYFTFSPIYDKSAQEWNLEIESTFDVVSSKPVGGQVIVAIPKLQTQQTYSIELQPGKRIVELFVNISKNITVETWWPHGHGNQTGYNMTVLFELDGGLNIEKSAKVYFRTVELIEEPIKGSPGLSFYFKINGFPIFLKGSNWIPADSFQDRVTSEFWGWVGCGPSAQLGQLVTAPFTVCCGC

SEQ ID NO: 19461 - protein, 661 aa, Homo sapiens
MSHVAVENALGLDQQFAGLDLNSSDNQSGGSTASKGRYIPPHLRNREATKGFYDKDSSGWSSSKDKDAYSSFGSRSDSRGKSSFFSDRGSGSRGRFDDRGRSDYDGIGSRGDRSGFGKFERGGNSRWCDKSDEDDWSKPLPPSERLEQELFSGGNTGINFEKYDDIPVEATGNNCPPHIESFSDVEMGEIIMGNIELTRYTRPTPVQKHAIPIIKEKRDLMACAQTGSGKTAAFLLPILSQIYSDGPGEALRAMKENGRYGRRKQYPISLVLAPTRELAVQIYEEARKFSYRSRVRPCVVYGGADIGQQIRDLERGCHLLVATPGRLVDMMERGKIGLDFCKYLVLDEADRMLDMGFEPQIRRIVEQDTMPPKGVRHTMMFSATFPKEIQMLARDFLDEYIFLAVGRVGSTSENITQKVVWVEESDKRSFLLDLLNATGKDSLTLVFVETKKGADSLEDFLYHEGYACTSIHGDRSQRDREEALHQFRSGKSPILVATAVAARGLDISNVKHVINFDLPSDIEEYVHRIGRTGRVGNLGLATSFFNERNINITKDLLDLLVEAKQEVPSWLENMAYEHHYKGSSRGRSKSRFSGGFGARDYRQSSGASSSSFSSSRASSSRSGGGGHGSSRGFGGGGYGGFYNSDGYGGNYNSQGVDWWGN

SEQ ID NO: 19462 - protein, 1392 aa, Homo sapiens
MARLSFWSQGVELARSTRCFSPEDISGKAPVLGTGMAVDMGMSFMGLPLAGQKHCPKSGQMEAMVMTCSLCHQDLPGMGSHLLSCQHLLRKDCFQGLIQELGQIAKAHETVADELISCPGCERVYLTRDVTEHFFLHCVPTEQPKMARNCSECKEKRAAHILCTYCNRWLCSSCTEEHRHSPVPGGPFFPRAQKGSPGVNGGPGDFTLYCPLHTQEVLKLFCETCDMLTCHSCLVVEHKEHRCRHVEEVLQNQRMLLEGVTTQVAHKKSSLQTSAKQIEDRIFEVKHQHRKVENQIKMAKMVLMNELNKQANGLIEELEGITNERKRKLEQQLQSIMVLNRQFEHVQNFINWAVCSKTSVPFLFSKELIVFQMQRLLETSCNTDPGSPWSIRFTWEPNFWTKQLASLGCITTEGGQMSRADAPAYGGLQGSSPFYQSHQSPVAQQEALSHPSHKFQSPAVCSSSVCCSHCSPVSPSLKGQVPPPSIHPAHSFRQPPEMVPQQLGSLQCSALLPREKELACSPHPPKLLQPWLETQPPVEQESTSQRLGQQLTSQPVCIVPPQDVQQGAHAQPTLQTPSIQVQFGHHQKLKLSHFQQQPQQQLPPPPPPLPHPPPPLPPPPQQPHPPLPPSQHLASSQHESPPGPACSQNMDIMHHKFELEEMQKDLELLLQAQQPSLQLSQTKSPQHLQQTIVGQINYIVRQPAPVQSQSQEETLQATDEPPASQGSKPALPLDKNTAAALPQASGEETPLSVPPVDSTIQHSSPNVVRKHSTSLSIMGFSNTLEMELSSTRLERPLEPQIQSVSNLTAGAPQAVPSLLSAPPKMVSSLTSVQNQAMPSLTTSHLQTVPSLVHSTFQSMPNLISDSPQAMASLASDHPQAGPSLMSGHTQAVPSLATCPLQSIPPVSDMQPETGSSSSSGRTSGSLCPRDGADPSLENALCKMESEDSTRFTDLLGQGPIVPGLDAPKDLAIPSELEEPINLSVKKPPLAPVVSTSTALQQYQNPKECENFEQGALELDAKENQSIRAFNSEHKIPYVRLERLKICAASSGEMPVFKLKPQKNDQDGSFLLIIECGTESSSMSIKVSQDRLSEATQAPGLEGRKVTVTSLAGQRPPEVEGTSPEEHRLIPRTPGAKKGPPAPIENEDFCAVCLNGGELLCCDRCPKVFHLSCHVPALLSFPGGEWVCTLCRSLTQPEMEYDCENACYNQPGMRASPGLSMYDQKKCEKLVLSLCCNNLSLPFHEPVSPLARHYYQIIKRPMDLSIIRRKLQKKDPAHYTTPEEVVSDVRLMFWNCAKFNYPDSEVAEAGRCLEVFFEGWLKEIYPEKRFAQPRQEDSDSEEVSSESGCSTPQGFPWPPYMQEGIQPKRRRRHMENERAKRMSFRLANSISQV

SEQ ID NO: 19463 - protein, 284 aa, Homo sapiens
MDAIKKKMQMLKLDKENAIDRAEQAEADKKQAEDRCKQLEEEQQALQKKLKGTEDEVEKYSESVKEAQEKLEQAEKKATDAEADVASLNRRIQLVEEELDRAQERLATALQKLEEAEKAADESERGMKVIENRAMKDEEKMELQEMQLKEAKHIAEDSDRKYEEVARKLVILEGELERSEERAEVAESRARQLEEELRTMDQALKSLMASEEEYSTKEDKYEEEIKLLEEKLKEAETRAEFAERSVAKLEKTIDDLEDEVYAQKMKYKAISEELDNALNDITSL

SEQ ID NO: 19464 - protein, 780 aa, Homo sapiens
MAVLLLLLRALRRGPGPGPRPLWGPGPAWSPGFPARPGRGRPYMASRPPGDLAEAGGRALQSLQLRLLTPTFEGINGLLLKQHLVQNPVRLWQLLGGTFYFNTSRLKQKNKEKDKSKGKAPEEDEEERRRRERDDQMYRERLRTLLVIAVVMSLLNALSTSGGSISWNDFVHEMLAKGEVQRVQVVPESDVVEVYLHPGAVVFGRPRLALMYRMQVANIDKFEEKLRAAEDELNIEAKDRIPVSYKRTGFFGNALYSVGMTAVGLAILWYVFRLAGMTGREGGFSAFNQLKMARFTIVDGKMGKGVSFKDVAGMHEAKLEVREFVDYLKSPERFLQLGAKVPKGALLLGPPGCGKTLLAKAVATEAQVPFLAMAGPEFVEVIGGLGAARVRSLFKEARARAPCIVYIDEIDAVGKKRSTTMSGFSNTEEEQTLNQLLVEMDGMGTTDHVIVLASTNRADILDGALMRPGRLDRHVFIDLPTLQERREIFEQHLKSLKLTQSSTFYSQRLAELTPGFSGADIANICNEAALHAAREGHTSVHTLNFEYAVERVLAGTAKKSKILSKEEQKVVAFHESGHALVGWMLEHTEAVMKMLPRDQHLFTKEQLFERMCMALGGRASEALSFNEVTSGAQDDLRKVTRIAYSMVKQFGMAPGIGPISFPEAQEGLMGIGRRPFSQGLQQMMDHEARLLVAKAYRHTEKVLQDNLDKLQALANALLEKEVINYEDIEALIGPPPHGPKKMIAPQRWIDAQREKQDLGEEETEETQQPPLGGEEPTWPK

SEQ ID NO: 19465 - protein, 230 aa, Homo sapiens
MNLEGLEMVAVLVVLALFVKVLEQFGLFEPVSLEDSVDDEFELSTVCHRPEGLEQLQEQTKFTRKELQVLYRGFKNECPSGIVNEENFKQIYSQFFPQGDSSTYATFLFNAFDTNHDGSVSFEDFVAGLSVILRGTVDDRLNWAFNLYDLNKDGCITKEEMLDIMKSIYDMMGKYTYPALREEAPREHVESFFQKMDRNKDGVVTIEEFIESCQKDENIMRSMQLFDNVI

SEQ ID NO: 19466 - protein, 925 aa, Homo sapiens
MRLHLLLLLALCGAGTTAAELSYSLRGNWSICNGNGSLELPGAVPGCVHSALFQQGLIQDSYYRFNDLNYRWVSLDNWTYSKEFKIPFEISKWQKVNLILEGVDTVSKILFNEVTIGETDNMFNRYSFDITNVVRDVNSIELRFQSAVLYAAQQSKAHTRYQVPPDCPPLVQKGECHVNFVRKEQCSFSWDWGPSFPTQGIWKDVRIEAYNICHLNYFTFSPIYDKSAQEWNLEIESTFDVVSSKPVGGQVIVAIPKLQTQQTYSIELQPGKRIVELFVNISKNITVETWWPHGHGNQTGYNMTVLFELDGGLNIEKSAKVYFRTVELIEEPIKGSPGLSFYFKINGFPIFLKGSNWIPADSFQDRVTSELFHKKMKFFSRHSHGIIGSIFFLFKCSSPLPAGAGLAVVLQPNWANWLRLLLQSVVDANMNTLRVWGGGIYEQDEFYELCDELGIMVWQDFMFACALYPTDQGFLDSVTAEVAYQIKRLKSHPSIIIWSGNNENEEALMMNWYHISFTDRPIYIKDYVTLYVKNIRELVLAGDKSRPFITSSPTNGAETVAEAWVSQNPNSNYFGDVHFYDYISDCWNWKVFPKARFASEYGYQSWPSFSTLEKVSSTEDWSFNSKFSLHRQHHEGGNKQMLYQAGLHFKLPQSTDPLRTFKDTIYLTQVMQAQCVKTETEFYRRSRSEIVDQQGHTMGALYWQLNDIWQAPSWASLEYGGKWKMLHYFAQNFFAPLLPVGFENENTFYIYGVSDLHSDYSMTLSVRVHTWSSLEPVCSRVTERFVMKGGEAVCLYEEPVSELLRRCGNCTRESCVVSFYLSADHELLSPTNYHFLSSPKEAVGLCKAQITAIISQQGDIFVFDLETSAVAPFVWLDVGSIPGRFSDNGFLMTEKTRTILFYPWEPTSKNELEQSFHVTSLTDIY

SEQ ID NO: 19467 - protein, 265 aa, Homo sapiens
MAWPKLPAPWLLLCTWLPAGCLSLLVTVQHTERYVTLFASIILKCDYTTSAQLQDVVVTWRFKSFCKDPIFDYYSASYQAALSLGQDPSNDCNDNQREVRIVAQRRGQNEPVLGVDYRQRKITIQNRADLVINEVMWWDHGVYYCTIEAPGDTSGDPDKEVKLIVLHWLTVIFIILGALLLLLLIGVCWCQCCPQYCCCYIRCPCCPAHCCCPEEALARHRYMKQAQALGPQMMGKPLYWGADRSSQVSSYPMHPLLQRASRRCQ

SEQ ID NO: 19468 - protein, 1842 aa, Homo sapiens
MQRPAELSVFRSKEVRRKGACLQKQKSLTNLSLTSDGERRPTVRISNWFGNAAKASQREANYAERRSLSKFLSRSVQSLYHTSSSAWNLLPAGGSQSDSEDLEELSARRGLEGESDEDSRSEDENVSSKPSSISRSWAEEEGESCLREGTAHLDEEVILTMLGDLEQALYTDLLGEDPETRRMRTVKNIADLRQNLEETMSSLRGTQISHSTLETTFDSTVTTEVNGRTIPNLTSRPTPMTWRLGQACPRLQAGDAPSLGAGYPRSGTSRFIHTDPSRFMYTTPLRRAAVSRLGNMSQIDMSEKASSDLDMSSEVDVGGYMSDGDILGKSLRTDDINSGYMTDGGLNLYTRSLNRIPDTATSRDIIQRGVHDVTVDADSWDDSSSVSSGLSDTLDNISTDDLNTTSSVSSYSNITVPSRKNTQLRTDSEKRSTTDETWDSPEELKKPEEDFDSHGDAGGKWKTVSSGLPEDPEKAGQKASLSVSQTGSWRRGMSAQGGAPSRQKAGTSALKTPGKTDDAKASEKGKAPLKGSSLQRSPSDAGKSSGDEGKKPPSGIGRSTATSSFGFKKPSGVGSSAMITSSGATITSGSATLGKIPKSAAIGGKSNAGRKTSLDGSQNQDDVVLHVSSKTTLQYRSLPRPSKSSTSGIPGRGGHRSSTSSIDSNVSSKSAGATTSKLREPTKIGSGRSSPVTVNQTDKEKEKVAVSDSESVSLSGSPKSSPTSASACGAQGLRQPGSKYPDIASPTFRRLFGAKAGGKSASAPNTEGVKSSSVMPSPSTTLARQGSLESPSSGTGSMGSAGGLSGSSSPLFNKPSDLTTDVISLSHSLASSPASVHSFTSGGLVWAANMSSSSAGSKDTPSYQSMTSLHTSSESIDLPLSHHGSLSGLTTGTHEVQSLLMRTGSVRSTLSERYTPSSRQANQEEGKEWLRSHSTGGLQDTGNQSPLVSPSAMSSSAAGKYHFSNLVSPTNLSQFNLPGPSMMRSNSIPAQDSSFDLYDDSQLCGSATSLEERPRAISHSGSFRDSMEEVHGSSLSLVSSTSSLYSTAEEKAHSEQIHKLRRELVASQEKVATLTSQLSANAHLVAAFEKSLGNMTGRLQSLTMTAEQKESELIELRETIEMLKAQNSAAQAAIQGALNGPDHPPKDLRIRRQHSSESVSSINSATSHSSIGSGNDADSKKKKKKNWLRSSFKQAFGKKKSTKPPSSHSDIEELTDSSLPASPKLPHNAGDCGSASMKPSQSASAICECTEAEAEIILQLKSELREKELKLTDIRLEALSSAHHLDQIREAMNRMQNEIEILKAENDRLKAETGNTAKPTRPPSESSSSTSSSSSRQSLGLSLNNLNITEAVSSDILLDDAGDATGHKDGRSVKIIVSISKGYGRAKDQKSQAYLIGSIGVSGKTKWDVLDGVIRRLFKEYVFRIDTSTSLGLSSDCIASYCIGDLIRSHNLEVPELLPCGYLVGDNNIITVNLKGVEENSLDSFVFDTLIPKPITQRYFNLLMEHHRIILSGPSGTGKTYLANKLAEYVITKSGRKKTEDAIATFNVDHKSSKELQQYLANLAEQCSADNNGVELPVVIILDNLHHVGSLSDIFNGFLNCKYNKCPYIIGTMNQGVSSSPNLELHHNFRWVLCANHTEPVKGFLGRYLRRKLIEIEIERNIRNNDLVKIIDWIPKTWHHLNSFLETHSSSDVTIGPRLFLPCPMDVEGSRVWFMDLWNYSLVPYILEAVREGLQMYGKRTPWEDPSKWVLDTYPWSSATLPQESPALLQLRPEDVGYESCTSTKEATTSKHIPQTDTEGDPLMNMLMKLQEAANYSSTQSCDSESTSHHEDILDSSLESTL

SEQ ID NO: 19469 - protein, 841 aa, Homo sapiens
MKLWIHLFYSSLLACISLHSQTPVLSSRGSCDSLCNCEEKDGTMLINCEAKGIKMVSEISVPPSRPFQLSLLNNGLTMLHTNDFSGLTNAISIHLGFNNIADIEIGAFNGLGLLKQLHINHNSLEILKEDTFHGLENLEFLQADNNFITVIEPSAFSKLNRLKVLILNDNAIESLPPNIFRFVPLTHLDLRGNQLQTLPYVGFLEHIGRILDLQLEDNKWACNCDLLQLKTWLENMPPQSIIGDVVCNSPPFFKGSILSRLKKESICPTPPVYEEHEDPSGSLHLAATSSINDSRMSTKTTSILKLPTKAPGLIPYITKPSTQLPGPYCPIPCNCKVLSPSGLLIHCQERNIESLSDLRPPPQNPRKLILAGNIIHSLMKSDLVEYFTLEMLHLGNNRIEVLEEGSFMNLTRLQKLYLNGNHLTKLSKGMFLGLHNLEYLYLEYNAIKEILPGTFNPMPKLKVLYLNNNLLQVLPPHIFSGVPLTKVNLKTNQFTHLPVSNILDDLDLLTQIDLEDNPWDCSCDLVGLQQWIQKLSKNTVTDDILCTSPGHLDKKELKALNSEILCPGLVNNPSMPTQTSYLMVTTPATTTNTADTILRSLTDAVPLSVLILGLLIMFITIVFCAAGIVVLVLHRRRRYKKKQVDEQMRDNSPVHLQYSMYGHKTTHHTTERPSASLYEQHMVSPMVHVYRSPSFGPKHLEEEEERNEKEGSDAKHLQRSLLEQENHSPLTGSNMKYKTTNQSTEFLSFQDASSLYRNILEKERELQQLGITEYLRKNIAQLQPDMEAHYPGAHEELKLMETLMYSRPRKVLVEQTKNEYFELKANLHAEPDYLEVLEQQT

SEQ ID NO: 19470 - protein, 332 aa, Homo sapiens
MVTKAFVLLAIFAEASAKSCAPNKADVILVFCYPKTIITKIPECPYGWEVHQLALGGLCYNGVHEGGYYQFVIPDLSPKNKSYCGTQSEYKPPIYHFYSHIVSNDTTVIVKNQPVNYSFSCTYHSTYLVNQAAFDQRVATVHVKNGSMGTFESQLSLNFYTNAKFSIKKEAPFVLEASEIGSDLFAGVEAKGLSIRFKVVLNSCWATPSADFMYPLQWQLINKGCPTDETVLVHENGRDHRATFQFNAFRFQNIPKLSKVWLHCETFICDSEKLSCPVTCDKRKRLLRDQTGGVLVVELSLRSRGFSSLYSFSAHLSGAEGARSRGLPLTSP

SEQ ID NO: 19471 - protein, 384 aa, Homo sapiens
MTVARPSVPAALPLLGELPRLLLLVLLCLPAVWGDCGLPPDVPNAQPALEGRTSFPEDTVITYKCEESFVKIPGEKDSVICLKGSQWSDIEEFCNRSCEVPTRLNSASLKQPYITQNYFPVGTVVEYECRPGYRREPSLSPKLTCLQNLKWSTAVEFCKKKSCPNPGEIRNGQIDVPGGILFGATISFSCNTGYKLFGSTSSFCLISGSSVQWSDPLPECREIYCPAPPQIDNGIIQGERDHYGYRQSVTYACNKGFTMIGEHSIYCTVNNDEGEWSGPPPECRGKSLTSKVPPTVQKPTTVNVPTTEVSPTSQKTTTKTTTPNAQATRSTPVSRTTKHFHETTPNKGSGTTSGTTRLLSALQVRPFEVSGSSHISSKKMMCIL

SEQ ID NO: 19472 - protein, 874 aa, Homo sapiens
MPKSYEALVQHVIEDHERIGYQVTAMIGHTNVVVPRSKPLMLIAPKPQDKKSMGLPPRIGSLASGNVRSLPSQQMVNRLSIPKPNLNSTGVNMMSSVHLQQNNYGVKSVGQGYSVGQSMRLGLGGNAPVSIPQQSQSVKQLLPSGNGRSYGLGSEQRSQAPARYSLQSANASSLSSGQLKSPSLSQSQASRVLGQSSSKPAAAATGPPPGNTSSTQKWKICTICNELFPENVYSVHFEKEHKAEKVPAVANYIMKIHNFTSKCLYCNRYLPTDTLLNHMLIHGLSCPYCRSTFNDVEKMAAHMRMVHIDEEMGPKTDSTLSFDLTLQQGSHTNIHLLVTTYNLRDAPAESVAYHAQNNPPVPPKPQPKVQEKADIPVKSSPQAAVPYKKDVGKTLCPLCFSILKGPISDALAHHLRERHQVIQTVHPVEKKLTYKCIHCLGVYTSNMTASTITLHLVHCRGVGKTQNGQDKTNAPSRLNQSPSLAPVKRTYEQMEFPLLKKRKLDDDSDSPSFFEEKPEEPVVLALDPKGHEDDSYEARKSFLTKYFNKQPYPTRREIEKLAASLWLWKSDIASHFSNKRKKCVRDCEKYKPGVLLGFNMKELNKVKHEMDFDAEWLFENHDEKDSRVNASKTADKKLNLGKEDDSSSDSFENLEEESNESGSPFDPVFEVEPKISNDNPEEHVLKVIPEDASESEEKLDQKEDGSKYETIHLTEEPTKLMHNASDSEVDQDDVVEWKDGASPSESGPGSQQVSDFEDNTCEMKPGTWSDESSQSEDARSSKPAAKKKATMQGDREQLKWKNSSYGKVEGFWSKDQSQWKNASENDERLSNPQIEWQNSTIDSEDGEQFDNMTDGVAEPMHGSLAGVKLSSQQA

SEQ ID NO: 19473 - protein, 1525 aa, Homo sapiens
MRTTKVYKLVIHKKGFGGSDDELVVNPKVFPHIKLGDIVEIAHPNDEYSPLLLQVKSLKEDLQKETISVDQTVTQVFRLRPYQDVYVNVVDPKDVTLDLVELTFKDQYIGRGDMWRLKKSLVSTCAYITQKVEFAGIRAQAGELWVKNEKVMCGYISEDTRVVFRSTSAMVYIFIQMSCEMWDFDIYGDLYFEKAVNGFLADLFTKWKEKNCSHEVTVVLFSRTFYDAKSVDEFPEINRASIRQDHKGRFYEDFYKVVVQNERREEWTSLLVTIKKLFIQYPVLVRLEQAEGFPQGDNSTSAQGNYLEAINLSFNVFDKHYINRNFDRTGQMSVVITPGVGVFEVDRLLMILTKQRMIDNGIGVDLVCMGEQPLHAVPLFKLHNRSAPRDSRLGDDYNIPHWINHSFYTSKSQLFCNSFTPRIKLAGKKPASEKAKNGRDTSLGSPKESENALPIQVDYDAYDAQVFRLPGPSRAQCLTTCRSVRERESHSRKSASSCDVSSSPSLPSRTLPTEEVRSQASDDSSLGKSANILMIPHPHLHQYEVSSSLGYTSTRDVLENMMEPPQRDSSAPGRFHVGSAESMLHVRPGGYTPQRALINPFAPSRMPMKLTSNRRRWMHTFPVGMNPRTQNKDSLEDSVSTSPDPILTLSAPPVVPGFCCTVGVDWKSLTTPACLPLTTDYFPDRQGLQNDYTEGCYDLLPEADIDRRDEDGVQMTAQQVFEEFICQRLMQGYQIIVQPKTQKPNPAVPPPLSSSPLYSRGLVSRNRPEEEDQYWLSMGRTFHKVTLKDKMITVTRYLPKYPYESAQIHYTYSLCPSHSDSEFVSCWVEFSHERLEEYKWNYLDQYICSAGSEDFSLIESLKFWRTRFLLLPACVTATKRITEGEAHCDIYGDRPRADEDEWQLLDGFVRFVEGLNRIRRRHRSDRMMRKGTAMKGLQMTGPISTHSLESTAPPVGKKGTSALSALLEMEASQKCLGEQQAAVHGGKSSAQSAESSSVAMTPTYMDSPRKDGAFFMEFVRSPRTASSAFYPQVSVDQTATPMLDGTSLGICTGQSMDRGNSQTFGNSQNIGEQGYSSTNSSDSSSQQLVASSLTSSSTLTEILEAMKHPSTGVQLLSEQKGLSPYCFISAEVVHWLVNHVEGIQTQAMAIDIMQKMLEEQLITHASGEAWRTFIYGFYFYKIVTDKEPDRVAMQQPATTWHTAGVDDFASFQRKWFEVAFVAEELVHSEIPAFLLPWLPSRPASYASRHSSFSRSFGGRSQAAALLAATVPEQRTVTLDVDVNNRTDRLEWCSCYYHGNFSLNAAFEIKLHWMAVTAAVLFEMVQGWHRKATSCGFLLVPVLEGPFALPSYLYGDPLRAQLFIPLNISCLLKEGSEHLFDSFEPETYWDRMHLFQEAIAHRFGFVQDKYSASAFNFPAENKPQYIHVTGTVFLQLPYSKRKFSGQQRRRRNSTSSTNQNMFCEERVGYNWAYNTMLTKTWRSSATGDEKFADRLLKDFTDFCINRDNRLVTFWTSCLEKMHASAP

SEQ ID NO: 19474 - protein, 570 aa, Homo sapiens
MNVVFAVKQYISKMIEDSGPGMKVLLMDKETTGIVSMVYTQSEILQKEVYLFERIDSQNREIMKHLKAICFLRPTKENVDYIIQELRRPKYTIYFIYFSNVISKSDVKSLAEADEQEVVAEVQEFYGDYIAVNPHLFSLNILGCCQGRNWDPAQLSRTTQGLTALLLSLKKCPMIRYQLSSEAAKRLAECVKQVITKEYELFEFRRTEVPPLLLILDRCDDAITPLLNQWTYQAMVHELLGINNNRIDLSRVPGISKDLREVVLSAENDEFYANNMYLNFAEIGSNIKNLMEDFQKKKPKEQQKLESIADMKAFVENYPQFKKMSGTVSKHVTVVGELSRLVSERNLLEVSEVEQELACQNDHSSALQNIKRLLQNPKVTEFDAARLVMLYALHYERHSSNSLPGLMMDLRNKGVSEKYRKLVSAVVEYGGKRVRGSDLFSPKDAVAITKQFLKGLKGVENVYTQHQPFLHETLDHLIKGRLKENLYPYLGPSTLRDRPQDIIVFVIGGATYEEALTVYNLNRTTPGVRIVLGGTTVHNTKSFLEEVLASGLHSRSKESSQVTSRSASRR

SEQ ID NO: 19475 - protein, 901 aa, Homo sapiens
MQKIMHISVLLSPVLWGLIFGVSSNSIQIGGLFPRGADQEYSAFRVGMVQFSTSEFRLTPHIDNLEVANSFAVTNAFCSQFSRGVYAIFGFYDKKSVNTITSFCGTLHVSFITPSFPTDGTHPFVIQMRPDLKGALLSLIEYYQWDKFAYLYDSDRGLSTLQAVLDSAAEKKWQVTAINVGNINNDKKDEMYRSLFQDLELKKERRVILDCERDKVNDIVDQVITIGKHVKGYHYIIANLGFTDGDLLKIQFGGANVSGFQIVDYDDSLVSKFIERWSTLEEKEYPGAHTTTIKYTSALTYDAVQVMTEAFRNLRKQRIEISRRGNAGDCLANPAVPWGQGVEIERALKQVQVEGLSGNIKFDQNGKRINYTINIMELKTNGPRKIGYWSEVDKMVVTLTELPSGNDTSGLENKTVVVTTILESPYVMMKKNHEMLEGNERYEGYCVDLAAEIAKHCGFKYKLTIVGDGKYGARDADTKIWNGMVGELVYGKADIAIAPLTITLVREEVIDFSKPFMSLGISIMIKKPQKSKPGVFSFLDPLAYEIWMCIVFAYIGVSVVLFLVSRFSPYEWHTEEFEDGRETQSSESTNEFGIFNSLWFSLGAFMQQGCDISPRSLSGRIVGGVWWFFTLIIISSYTANLAAFLTVERMVSPIESAEDLSKQTEIAYGTLDSGSTKEFFRRSKIAVFDKMWTYMRSAEPSVFVRTTAEGVARVRKSKGKYAYLLESTMNEYIEQRKPCDTMKVGGNLDSKGYGIATPKGSSLRNAVNLAVLKLNEQGLLDKLKNKWWYDKGECGSGGGDSKEKTSALSLSNVAGVFYILVGGLGLAMLVALIEFCYKSRAEAKRMKMTLNDAMRNKARLSITGSTGENGRVMTPEFPKAVHAVPYVSPGMGMNVSVTDLS

SEQ ID NO: 19476 - protein, 221 aa, Homo sapiens
MRPRLWLLLAAQLTVLHGNSVLQQTPAYIKVQTNKMVMLSCEAKISLSNMCIYWLRQRQAPSSDSHHEFLTLWDSAKGTIHGEEVEQEKIAVFRDASRFILNLTSVKPEDSGIYFCMIVGSPELTFGKGTQLSVVDFLPTTAQPTKKSTLKKRVCRLPRPETQKGPLCSPVTLGLLVAGVLVLLVSLGVAMHLCCRRRRARLRFMKQPRSCELFSHFPMDA

SEQ ID NO: 19477 - protein, 493 aa, Homo sapiens
MAVLLLLLRALRRGPGPGPRPLWGPGPAWSPGFPARPGRGRPYMASRPPGDLAEAGGRALQSLQLRLLTPTFEGINGLLLKQHLVQNPVRLWQLLGGTFYFNTSRLKQKNKEKDKSKGKAPEEDEGMGTTDHVIVLASTNRADILDGALMRPGRLDRHVFIDLPTLQERREIFEQHLKSLKLTQSSTFYSQRLAELTPGFSGADIANICNEAALHAAREGHTSVHTLNFEYAVERVLAGTAKKSKILSKEEQKVVAFHESGHALVGWMLEHTEAVMKVSITPRTNAALGFAQMLPRDQHLFTKEQLFERMCMALGGRASEALSFNEVTSGAQDDLRKVTRIAYSMVKQFGMAPGIGPISFPEAQEGLMGIGRRPFSQGLQQMMDHEARLLVAKAYRHTEKVLQDNLDKLQARALCVTWGSCLGPLDCRPQPAAAASGQVWAVPSPAEAGLPVDPCSSRLTKQLCRARAHHSGSHNGSKAAAGKRPSGKGSDKL

SEQ ID NO: 19478 - protein, 353 aa, Homo sapiens
MSQEPTTYSLFLFLFLSHGVSSYTVPNSRQDLHPLLQNMAEEIIDGSYLNALLDLIQFQSSHVWTDDLSHRVLAYLNSRNVAFTIPSLQAAVENHLEQRLHQPQKLLEDLRKTDAQQFRTAMKCLLEDKKDGLDLKDIIIDLGEIRERALQSPGVNRSLFLITLERCFQMLNSLECVEILGKVLRGSSGSFLQPDITERLPRDLREDAFKNLSAVFKDLYDKTSAHSQRALYSWMTGILQTSSNATDDSASWVSAEHLWVLGRYMVHLSFEEITKISPIEIGLFISYDNATKQLDMVYDITPELAQAFLERISSSNFNMRNTSTIHSSKQNSWTLPWRTRPSMRPWVLCRMQL

SEQ ID NO: 19479 - protein, 2299 aa, Homo sapiens
MDFLIIFLLLFIGTSETQVDVSNVVPGTRYDITISSISTTYTSPVTRIVTTNVTKPGPPVFLAGERVGSAGILLSWNTPPNPNGRIISYIVKYKEVCPWMQTVYTQVRSKPDSLEVLLTNLNPGTTYEIKVAAENSAGIGVFSDPFLFQTAESAPGKVVNLTVEAYNASAVKLIWYLPRQPNGKITSFKISVKHARSGIVVKDVSIRVEDILTGKLPECNENSESFLWSTASPSPTLGRVTPPSRTTHSSSTLTQNEISSVWKEPISFVVTHLRPYTTYLFEVSAATTEAGYIDSTIVRTPESVPEGPPQNCVTGNITGKSFSILWDPPTIVTGKFSYRVELYGPSGRILDNSTKDLKFAFTNLTPFTMYDVYIAAETSAGTGPKSNISVFTPPDVPGAVFDLQLAEVESTQVRITWKKPRQPNGIINQYRVKVLVPETGIILENTLLTGNNEYINDPMAPEIVNIVEPMVGLYEGSAEMSSDLHSLATFIYNSHPDKNFPARNRAEDQTSPVVTTRNQYITDIAAEQLSYVIRRLVPFTEHMISVSAFTIMGEGPPTVLSVRTRQQVPSSIKIINYKNISSSSILLYWDPPEYPNGKITHYTIYAMELDTNRAFQITTIDNSFLITGLKKYTKYKMRVAASTHVGESSLSEENDIFVRTSEDEPESSPQDVEVIDVTADEIRLKWSPPEKPNGIIIAYEVLYKNIDTLYMKNTSTTDIILRNLRPHTLYNISVRSYTRFGHGNQVSSLLSVRTSETVPDSAPENITYKNISSGEIELSFLPPSSPNGIIQKYTIYLKRSNGNEERTINTTSLTQNIKVLKKYTQYIIEVSASTLKGEGVRSAPISILTEEDAPDSPPQDFSVKQLSGVTVKLSWQPPLEPNGIILYYTVYVWNRSSLKTINVTETSLELSDLDYNVEYSAYVTASTRFGDGKTRSNIISFQTPEGAPSDPPKDVYYANLSSSSIILFWTPPSKPNGIIQYYSVYYRNTSGTFMQNFTLHEVTNDFDNMTVSTIIDKLTIFSYYTFWLTASTSVGNGNKSSDIIEVYTDQDIPEGFVGNLTYESISSTAINVSWVPPAQPNGLVFYYVSLILQQTPRHVRPPLVTYERSIYFDNLEKYTDYILKITPSTEKGFSDTYTAQLYIKTEEDVPETSPIINTFKNLSSTSVLLSWDPPVKPNGAIISYDLTLQGPNENYSFITSDNYIILEELSPFTLYSFFAAARTRKGLGPSSILFFYTDESVPLAPPQNLTLINCTSDFVWLKWSPSPLPGGIVKVYSFKIHEHETDTIYYKNISGFKTEAKLVGLEPVSTYSIRVSAFTKVGNGNQFSNVVKFTTQESVPDVVQNMQCMATSWQSVLVKWDPPKKANGIITQYMVTVERNSTKVSPQDHMYTFIKLLANTSYVFKVRASTSAGEGDESTCHVSTLPETVPSVPTNIAFSDVQSTSATLTWIRPDTILGYFQNYKITTQLRAQKCKEWESEECVEYQKIQYLYEAHLTEETVYGLKKFRWYRFQVAASTNAGYGNASNWISTKTLPGPPDGPPENVHVVATSPFSISISWSEPAVITGPTCYLIDVKSVDNDEFNISFIKSNEENKTIEIKDLEIFTRYSVVITAFTGNISAAYVEGKSSAEMIVTTLESAPKDPPNNMTFQKIPDEVTKFQLTFLPPSQPNGNIQVYQALVYREDDPTAVQIHNLSIIQKTNTFVIAMLEGLKGGHTYNISVYAVNSAGAGPKVPMRITMDIKAPARPKTKPTPIYDATGKLLVTSTTITIRMPICYYSDDHGPIKNVQVLVTETGAQHDGNVTKWYDAYFNKARPYFTNEGFPNPPCTEGKTKFSGNEEIYIIGADNACMIPGNEDKICNGPLKPKKQYLFKFRATNIMGQFTDSDYSDPVKTLGEGLSERTVEIILSVTLCILSIILLGTAIFAFARIRQKQKEGGTYSPQDAEIIDTKLKLDQLITVADLELKDERLTRLLSYRKSIKPISKKSFLQHVEELCTNNNLKFQEEFSELPKFLQDLSSTDADLPWNRAKNRFPNIKPYNNNRVKLIADASVPGSDYINASYISGYLCPNEFIATQGPLPGTVGDFWRMVWETRAKTLVMLTQCFEKGRIRCHQYWPEDNKPVTVFGDIVITKLMEDVQIDWTIRDLKIERHGDCMTVRQCNFTAWPEHGVPENSAPLIHFVKLVRASRAHDTTPMIVHCSAGVGRTGVFIALDHLTQHINDHDFVDIYGLVAELRSERMCMVQNLAQYIFLHQCILDLLSNKGSNQPICFVNYSALQKMDSLDAMEGDVELEWEETTM

SEQ ID NO: 19480 - protein, 112 aa, Homo sapiens
MAWTARDRGALGLLLLGLCLCAAQRGPPGEQGPPGPPGPPGVPGIDGIDGDRGPKGPPGPPGPAGEPGKPGAPGKPGTPGADAGVQWHDLGSLQPLPPGFKRFSCLSLQLPE

SEQ ID NO: 19481 - protein, 162 aa, Homo sapiens
MDSLVVLVLCLSCLLLLSLWRQSSGRGKLPPGPTPLPVIGNILQIGIKDISKSLTNLSKVYGPVFTLYFGLKPIVVLHGYEAVKEALIDLGEEFSGRGIFPLAERANRGFGIVFSNGKKWKEIRRFSLMTLRNFGMGKRSIEDRVQEEARCLVEELRKTKGG

SEQ ID NO: 19482 - protein, 484 aa, Homo sapiens
MAASMFYGRLVAVATLRNHRPRTAQRAAAQVLGSSGLFNNHGLQVQQQQQRNLSLHEYMSMELLQEAGVSVPKGYVAKSPDEAYAIAKKLGSKDVVIKAQVLAGGRGKGTFESGLKGGVKIVFSPEEAKAVSSQMIGKKLFTKQTGEKGRICNQVLVCERKYPRREYYFAITMERSFQGPVLIGSSHGGVNIEDVAAESPEAIIKEPIDIEEGIKKEQALQLAQKMGFPPNIVESAAENMVKLYSLFLKYDATMIEINPMVEDSDGAGPPGSHIELSCHIHLTWNRSGILCMDAKINFDSNSAYRQKKIFDLQDWTQEDERDKDAAKANLNYIGLDGNIGCLVNGAGLAMATMDIIKLHGGTPANFLDVGGGATVHQVTEAFKLITSDKKVLAILVNIFGGIMRCDVIAQGIVMAVKDLEIKIPVVVRLQGTRVDDAKALIADSGLKILACDDLDEAARMVVKLSEIVTLAKQAHVDVKFQLPI

SEQ ID NO: 19483 - protein, 507 aa, Homo sapiens
MAVLLLLLRALRRGPGPGPRPLWGPGPAWSPGFPARPGRGRPYMASRPPGDLAEAGGRALQSLQLRLLTPTFEGINGLLLKQHLVQNPVRLWQLLGGTFYFNTSRLKQKNKEKDKSKGKAPEEDEEERRRRERDDQMYRERLRTLLVIAVVMSLLNALSTSGGSISWNDFVHEMLAKGEVQRVQVVPESDVVEVYLHPGAVVFGRPRLALMYRMQVANIDKFEEKLRAAEDELNIEAKDRIPVSYKRTGFFGNALYSVGMTAVGLAILWYVFRLAGMTGREGGFSAFNQLKMARFTIVDGKMGKGVSFKDVAGMHEAKLEVREFVDYLKSPERFLQLGAKVPKGALLLGPPGCGKTLLAKAVATEAQVPFLAMAGPEFVEVIGGLGAARVRSLFKEARARAPCIVYIDEIDAVGKKRSTTMSGFSNTEEEQTLNQLLVEMDATLPGDHEEAQRKDPRLLLSHGAHRVTEGNGGSFALLGLPFALKIETTFLSDLSPKASVYQTIFST

SEQ ID NO: 19484 - protein, 339 aa, Homo sapiens
MAVLLLLLRALRRGPGPGPRPLWGPGPAWSPGFPARPGRGRPYMASRPPGDLAEAGGRALQSLQLRLLTPTFEGINGLLLKQHLVQNPVRLWQLLGGTFYFNTSRLKQKNKEKDKSKGKAPEEDEEERRRRERDDQMYRERLRTLLVIAVVMSLLNALSTSGGSISWNDFVHEMLAKGEVQRVQVVPESDVVEVYLHPGAVVFGRPRLALMYRMQVANIDKFEEKLRAAEDELNIEAKDRIPVSYKRTGFFGNALYSVGMTAVGLAILWYVFRLAGMTGREGGFSAFNQLKMARFTIVDGKMGKGVSFKDVAGMHEAKLEVREFVDYLKVKAAWAGREV

SEQ ID NO: 19485 - protein, 189 aa, Homo sapiens
MGLLVFVRNLLLALCLFLVLGFLYYSAWKLHLLQWEEDSNSVVLSFDSAGQTLGSEYDRLGFLLNLDSKLPAELATKYANFSEGACKPGYASALMTAIFPRFSKPAPMFLDDSFRKWARIREFVPPFGIKGQDNLIKAILSVTKEYRLTPALDSLRCRRCIIVGNGGVLANKSLGSRIDDYDIVVRPRL

SEQ ID NO: 19486 - protein, 41 aa, Homo sapiens
MSRSLLLWFLLFLLLLPPLPVLLADPGAPTPAPGHLCPLRP

SEQ ID NO: 19487 - protein, 349 aa, Homo sapiens
MAAEEEEVDSADTGERSGWLTGWLPTWCPTSISHLKEAEEKMLKCVPCTYKKEPVRISNGNKIWTLKFSHNISNKTPLVLLHGFGGGLGLWALNFGDLCTNRPVYAFDLLGFGRSSRPRFDSDAEEVENQFVESIEEWRCALGLDKMILLGHNLGGFLAAAYSLKYPSRVNHLILVEPWGFPERPDLADQDRPIPVWIRALGAALTPFNPLAGLRIAGPFGLSLVQRLRPDFKRKYSSMFEDDTVTEYIYHCNVQTPSGETAFKNMTIPYGWAKRPMLQRIGKMHPDIPVSVIFGARSCIDGNSGTSIQSLRPHSYVKTIAILGAGHYVYADQPEEFNQKVKEICDTVD

SEQ ID NO: 19488 - protein, 795 aa, Homo sapiens
MAVLLLLLRALRRGPGPGPRPLWGPGPAWSPGFPARPGRGRPYMASRPPGDLAEAGGRALQSLQLRLLTPTFEGINGLLLKQHLVQNPVRLWQLLGGTFYFNTSRLKQKNKEKDKSKGKAPEEDEEERRRRERDDQMYRERLRTLLVIAVVMSLLNALSTSGGSISWNDFVHEMLAKGEVQRVQVVPESDVVEVYLHPGAVVFGRPRLALMYRMQVANIDKFEEKLRAAEDELNIEAKDRIPVSYKRTGFFGNALYSVGMTAVGLAILWYVFRLAGMTGREGGFSAFNQLKMARFTIVDGKMGKGVSFKDVAGMHEAKLEVREFVDYLKSPERFLQLGAKVPKGALLLGPPGCGKTLLAKAVATEAQVPFLAMAGPEFVEVIGGLGAARVRSLFKEARARAPCIVYIDEIDAVGKKRSTTMSGFSNTEEEQTLNQLLVEMDGMGTTDHVIVLASTNRADILDGALMRPGRLDRHVFIDLPTLQERREIFEQHLKSLKLTQSSTFYSQRLAELTPGFSGADIANICNEAALHAAREGHTSVHTLNFEYAVERVLAGTAKKSKILSKEEQKVVAFHESGHALVGWMLEHTEAVMKVSITPRTNAALGFAQMLPRDQHLFTKEQLFERMCMALGGRASEALSFNEVTSGAQDDLRKVTRIAYSMVKQFGMAPGIGPISFPEAQEGLMGIGRRPFSQGLQQMMDHEARLLVAKAYRHTEKVLQDNLDKLQALANALLEKEVINYEDIEALIGPPPHGPKKMIAPQRWIDAQREKQDLGEEETEETQQPPLGGEEPTWPK

SEQ ID NO: 19489 - protein, 133 aa, Homo sapiens
MRKHVLAASFSMLSLLVIMGDTDSKTDSSFIMDSDPRRCMRHHYVDSISHPLYKCSSKMVLLARCEGHCSQASRSEPLVSFSTVLKQPFRSSCHCCRPQTSKLKALRLRCSGGMRLTATYRYILSCHCEECNS

SEQ ID NO: 19490 - protein, 409 aa, Homo sapiens
MQPPPSLCGRALVALVLACGLSRIWGEERGFPPDRATPLLQTAEIMTPPTKTLWPKGSNASLARSLAPAEVPKGDRTAGSPPRTISPPPCQGPIEIKETFKYINTVVSCLVFVLGIIGNSTLLRIIYKNKCMRNGPNILIASLALGDLLHIVIDIPINVYKLLAEDWPFGAEMCKLVPFIQKASVGITVLSLCALSIDRYRAVASWSRIKGIGVPKWTAVEIVLIWVVSVVLAVPEAIGFDIITMDYKGSYLRICLLHPVQKTAFMQFYKTAKDWWLFSFYFCLPLAITAFFYTLMTCEMLRKKSGMQIALNDHLKQRREVAKTVFCLVLVFALCWLPLHLSRILKLTLYNQNDPNRCELLSFLLVLDYIGINMASLNSCINPIALYLVSKRFKNCFKVRDYPKIKSSL

SEQ ID NO: 19491 - protein, 62 aa, Homo sapiens
MRLHLLLLLALCGAGTTAAELSYSLRGNWSICNGNGSLELPGAVPGCVHSALFQQGLIQKEQ

SEQ ID NO: 19492 - protein, 342 aa, Homo sapiens
MVTKAFVLLAIFAEASAKSCAPNKADVILVFCYPKTIITKIPECPYGWEVHQLALGGLCYNGVHEGGYYQFVIPDLSPKNKSYCGTQSEYKPPIYHFYSHIVSNDTTVIVKNQPVNYSFSCTYHSTYLVNQAAFDQSPYAKFSPLFRVATVHVKNGSMGTFESQLSLNFYTNAKFSIKKEAPFVLEASEIGSDLFAGVEAKGLSIRFKVVLNSCWATPSADFMYPLQWQLINKGCPTDETVLVHENGRDHRATFQFNAFRFQNIPKLSKVWLHCETFICDSEKLSCPVTCDKRKRLLRDQTGGVLVVELSLRSRGFSSLYSFSAHLSGAEGARSRGLPLTSP

SEQ ID NO: 19493 - protein, 213 aa, Homo sapiens
MKAVVQRVTRASVTVGGEQISAIGRGICVLLGISLEDTQKELEHMVRKILNLRVFEDESGKHWSKSVMDKQYEILCVSQFTLQCVLKGNKPDFHLAMPTEQAEGFYNSFLEQLRKTYRPELIKDGKFGAYMQVHIQNDGPVTIELESPAPGTATSDPKQTDSRSVSQAGVQWRDLRSLQAPPPGFMPFFGLSLPSSWDYRHVPPCPANFFVFF

SEQ ID NO: 19494 - protein, 139 aa, Homo sapiens
MRTHTRGAPSVFFIYLLCFVSAYITDENPEVMIPFTNANYDSHPMLYFSRAEVAELQLRAASSHEHIAARLTEAVHTMLSSPLEYLPPWDPKDYSARWNEIFGNNLGALAMFCVLYPENIEARDMAKDYMERMAAQPSW

SEQ ID NO: 19495 - protein, 470 aa, Homo sapiens
MGLQACLLGLFALILSGKCSYSPEPDQRRTLPPGWVSLGRADPEEELSLTFALRQQNVERLSELVQAVSDPSSPQYVGGLHRFPPTSSLRQRPEPQVTGTVGLHLGVTPSVIRKRYNLTSQDVGSGTSNNSQACAQFLEQYFHDSDLAQFMRLFGGNFAHQASVARVVGQQGRGRAGIEASLDVQYLMSAGANISTWVYSSPGRHEGQEPFLQWLMLLSNESALPHVHTVSYGDDEDSLSSAYIQRVNTELMKAAARGLTLLFASGDSGAGCWSVSGRHQFRPTFPASSPYVTTVGGTSFQEPFLITNEIVDYISGGGFSNVFPRPSYQEEAVTKFLSSSPHLPPSSYFNASGRAYPDVAALSDGYWVVSNRVPIPWVSGTSASTPVFGGILSLINEHRILSGRPPLGFLNPRLYQQHGAGLFDVTRGCHESCLDEEVEGQGFCSGPGWDPVTGWGTPNFPALLKTLLNP

SEQ ID NO: 19496 - protein, 130 aa, Homo sapiens
MASDLIRTILAVALISKLGTAVDAELMPSGAILQNKRENLPRVCHALAFLGMARCQDLFLVRLQGWKLGTRFQDGPRSTPQEEGGSPQRKRGMPVQIHFLLKSFLSSPITFAFISLARTVSLATAICKIV

SEQ ID NO: 19497 - protein, 110 aa, Homo sapiens
MSRINKNVVLALLTLTSSAFLLFQLYYYKHYLSTKNGAGLSKSKGSRIGFDSTQWNQLDTFPRSVNDCIDNNLEDVFRSIFHLILKMFIFLRRLLIESRDHMCYLIICIF

SEQ ID NO: 19498 - protein, 273 aa, Homo sapiens
MKKTQTWILTCIYLQLLLFNPLVKTEGICRNRVTNNVKDVTKLVANLPKDYMITLKYVPGMDVLPSHCWISEMVVQLSDSLTDLLDKFSNISEGLSNYSIIDKLVNIVDDLVECVKENSSKDLKKSFKSPEPRLFTPEEFFRIFNRSIDAFKDFVVASETSDCVVSSTLSPEKDSRVSVTKPFMLPPVAASSLRNDSSSSNRKAKNPPGDSSLHWAAMALPALFSLIIGFAFGALYWKKRQPSLTRAVENIQINEEDNEISMLQEKEREFQEV

SEQ ID NO: 19499 - protein, 659 aa, Homo sapiens
MYRERLRTLLVIAVVMSLLNALSTSGGSISWNDFVHEMLAKGEVQRVQVVPESDVVEVYLHPGAVVFGRPRLALMYRMQVANIDKFEEKLRAAEDELNIEAKDRIPVSYKRTGFFGNALYSVGMTAVGLAILWYVFRLAGMTGREGGFSAFNQLKMARFTIVDGKMGKGVSFKDVAGMHEAKLEVREFVDYLKSPERFLQLGAKVPKGALLLGPPGCGKTLLAKAVATEAQVPFLAMAGPEFVEVIGGLGAARVRSLFKEARARAPCIVYIDEIDAVGKKRSTTMSGFSNTEEEQTLNQLLVEMDGMGTTDHVIVLASTNRADILDGALMRPGRLDRHVFIDLPTLQERREIFEQHLKSLKLTQSSTFYSQRLAELTPGFSGADIANICNEAALHAAREGHTSVHTLNFEYAVERVLAGTAKKSKILSKEEQKVVAFHESGHALVGWMLEHTEAVMKVSITPRTNAALGFAQMLPRDQHLFTKEQLFERMCMALGGRASEALSFNEVTSGAQDDLRKVTRIAYSMVKQFGMAPGIGPISFPEAQEGLMGIGRRPFSQGLQQMMDHEARLLVAKAYRHTEKVLQDNLDKLQALANALLEKEVINYEDIEALIGPPPHGPKKMIAPQRWIDAQREKQDLGEEETEETQQPPLGGEEPTWPK

SEQ ID NO: 19500 - protein, 464 aa, Homo sapiens
MGVSKLDILYRRLLLTKLFIRGWGRPEDLKRLFEFRKMIGNRERCQNLVSSDYPVHIDKIEEQSDCKILDGHFVSPMAHYVPDIMPIESVIARFQFIVPKEWNSKYRPVCIHLAGTGDHHYWRRRTLMARPMIKEARMASLLLENPYYGCRKPKDQVRSSLKNVSDLFVMGGALVLESAALLHWLEREGYGPLGMTGISMGGHMASLAVSNWPKPMPLIPCLSWSTASGVFTTGVLSKSINWRELEKQYYTQTVYEEEIIHMLEYCGTDSFKMGQEFVKHFTSSADKLTNLNLVSRTLNLDISNQVVSQKPADCHNSSKTSVSATSEGLLLQDTSKMKRFNQTLSTNKSGYTSRNPQSYHLLSKEQSRNSLRKESLIFMKGVMDECTHVANFSVPVDPSLIIVVQAKEDAYIPRTGVRSLQEIWPGCEIRYLEGGHISAYLFKQGLFRQAIYDAFDRFLHKYAN

SEQ ID NO: 19501 - protein, 2308 aa, Homo sapiens
MNIVRKLNLMIPWSIFLLHVLLFSLQEYICASSILMGTSKNGFNENRQKRALLAAQFEATSPRYFFHDAINWGESKIKGSCPYECLNGAFCSKTGTCDCQIFQALGTRCQIIPNMGNGRDGICKTWGQYHFETFDGIYYYFPGNCSYIFAKDCGDLEPRYTVWVHNSPKCLGSVYSCYRSISLFFSNQEEIRIYGHEIKKNGISLTLPQTIGQIFIEKLADYILVKTTFGFSLAWDGISGIYLKLSEDHKGKSCGLCGNYNDIQSDDFIILQEDYTEDIAMFANSWSVQTPDDTKCVLTPSDFPNPCSSGMPAFEAIFFKCQILLQFPFLSCHEYIDPYLYIASCVNDLCKTDDDETYCRAATEYARACSHAGYPIQDWRDDFPACTDKCDDSFVHRDCISCCPPTCTFEKQCLGSNLHCLDGCYCPDGLVMDNGTCISLENCPCGFHGLAYSVGSKIEQECTECVCVGGVWNCTEQDCPVQCSVVGDSHFTTFDGRHYSFIGMCQYILVKGTGKDKFTITLQKAPCEQNLGLVCLQSITLILEDDFNKQVTLGRGGQILTSPNQGFNLNGIVEIQTLSSLFILLKTTFGLKILFAIDGERIYIQLTSAWKRRTLGLCGTFNGNIRDDFLSPSGMIEGTPQLHANAWRVSSTCFAPVHVPVVDPCNINQQNIGYAAHCDVIHQELFAPCHIYISPGLYYQLCRHDACKCGSSCLCNALAHYAYLCGQHGVPIDFRTQISFCAVVCQKGMLYHHCSSFCLHSCISLSSPEQCSDDCAEGCNCPEGKFYEDTLNFCVPIFHCRCHYRGSVYQPGELIPTPSGLCQCSNGTVKCDELATPSAVHICPEGKEYFDCRFPDPELPAGGVNCETTCANLAMNFTCTPSSPCISGCVCAPGMAEHRGKCYVPESCPCIWKDWEYLSGEVIATPCYTCVCRRGMFNCTYYPCPAVCTIYGDRHYYSFDGLEYDYISDCQVFLIKKQSGFFLENKSTYQLWKAGYYIVVYFPEKDITILWDRKTTIHIKVGPQWKNKLSGLCGNFDKCTSNDMTTSNNLEVRNARVFGDSWALGQCESPDETIKPCEAHQNKFPYAKKECSILYSDIFASCRNVIDVTSFAKNCHEDTCNCNLGGDCECLCTSIAAYAYKCCQEGISIHWRSSTVCSLDCEYYNEGLGEGPYMLASYGQSGLVLGANMTSRSVFCLPRSSVHTSLFFYFMITPGLFKEKVSSLALVSLESAERPNYFLYVHDNDTLSLELWEANSAFHRRATFFHHQGLWIPGYSAFELYSKKGFFIIFTDSSVKASKYDDSEEFKHSSSFSIEEIQAAVPYRKMCEWRYEPCATPCFKTCSDPEALACKFLPPVEGCLPYCPKNMILDEVTLKCVYPRDCIPVIPTEPTLMPPAKPTVPMFTVWEMITPSDITVFDMLTPTTGLECEPQKFDPVYDCSQYICLNMEWQLYNWSLNCPKDVEMPDCGFRGRPVQVNSDICCPEWECPCRCSMLSELSIITFDGNNAALYSMASYILVRIPGEIIVAHIEKCSMNQNGNSLKKLAPSGRISGLCFKKLNVTTPIHKIIVNRLARKVEVDSIVVPLPFSSQELSIEDSGSMYVITTPAGLIIKWSHLTGIIDIHFGFRFNLSSYTEGLCGICNEDPDDDLRMQNGTIITNMEDIGLFIESWEIEKSFEVTMRRPVRNCTEHDCSQCIDLLNRRIFIPCHDKVSPEDFCEKMWINYTYFWNYECDALSAYVALCNKFDICIQWRTPDYCSLSCPEGKEYQPCVRPCEARTCLNQWFYGHTSCLNLREDCVCKVGTILHRPHSAQCIPEKECACTDSEDQPRTAGEIWNGGIDECTLYKCLENGSIIPIEPDCDEEPTPVCEREAEVVMGIIDKWTCCSKEVCGCDTTLCETSIPTCTNSQKLIVGHSPLSCCPQYKCECDPLKCPSISTPECREDQFMIQVRQEEPCCFSPFCVCESCTKPVPLCHDGEFLTVDLNSTHFCCPQYYCVCEPNLCPMPLLNCAEDMNLVKENVSGQCCPTWHCECNCENLIMPTCEVGEFTAIDHNFQSDCGCIQYLCEKDDVCVFQEVSVLNPGQSMIKYLEEDFCYAIECLEEKDNHTGFHTLNFTLVNCSKKCDVHQVYTPSPSDYGCCGTCKNVSCKFHMENGTSVVYAVGSTWHYNCTTYECVKTDEGAIILNYTMVCPPFNETECKMNEGIVKLYNEGCCKICKREERICQKVIIKSVIRKQDCMSQSPINVASCDGKCPSATIYNINIESHLRFCKCCRENGVRNLSVPLYCSGNGTEIMYTLQEPIDCTCQWN

SEQ ID NO: 19502 - protein, 346 aa, Homo sapiens
MAASQAVEEMRSRVVLGEFGVRNVHTTDFPGNYSGYDDAWDQDRFEKNFRVDVVHMDENSLEFDMVGIDAAIANAFRRILLAEVPTMAVEKVLVYNNTSIVQDEILAHRLGLIPIHADPRLFEYRNQGDEEGTEIDTLQFRLQVRCTRNPHAAKDSSDPNELYVNHKVYTRHMTWIPLGNQADLFPEGTIRPVHDDILIAQLRPGQEIDLLMHCVKGIGKDHAKFSPVATASYRLLPDITLLEPVEGEAAEELSRCFSPGVIEVQEVQGKKVARVANPRLDTFSREIFRNEKLKKVVRLARVRDHYIFSVESTGVLPPDVLVSEAIKVLMGKCRRFLDELDAVQMD

SEQ ID NO: 19503 - protein, 616 aa, Homo sapiens
RRERDDQMYRERLRTLLVIAVVMSLLNALSTSGGSISWNDFVHEMLAKGEVQRVQVVPESDVVEVYLHPGAVVFGRPRLALMYRMQVANIDKFEEKLRAAEDELNIEAKDRIPVSYKRTGFFGNALYSVGMTAVGLAILWYVFRLAGMTGREGGFSAFNQLKMARFTIVDGKMGKGVSFKDVAGMHEAKLEVREFVDYLKSPERFLQLGAKVPKGALLLGPPGCGKTLLAKAVATEAQVPFLAMAGPEFVEVIGGLGAARVRSLFKEARARAPCIVYIDEIDAVGKKRSTTMSGFSNTEEEQTLNQLLVEMDGMGTTDHVIVLASTNRADILDGALMRPGRLDRHVFIDLPTLQERREIFEQHLKSLKLTQSSTFYSQRLAELTPGFSGADIANICNEAALHAAREGHTSVHTLNFEYAVERVLAGTAKKSKILSKEEQKVVAFHESGHALVGWMLEHTEAVMKVSITPRTNAALGFAQMLPRDQHLFTKEQLFERMCMALGGRASEALSFNEVTSGAQDDLRKVTRIAYSMVKQFGMAPGIGPISFPEAQEGLMGIGRRPFSQGLQQMMDHFPPLTGSKTAGGQGLQTHREGAAGQPGQVAGAGKRPSGKGSDKL

SEQ ID NO: 19504 - protein, 728 aa, Homo sapiens
MVAERTHKAAATGARGPGELGAPGTVALVAARAERGARLPSPGSCGLLTLALCSLALSLLAHFRTAELQARVLRLEAERGEQQMETAILGRVNQLLDEKWKLHSRRRREAPKTSPGCNCPPGPPGPTGRPGLPGDKGAIGMPGRVGVKGQPGEKGSPGDAGLSIIGPRGPPGQPGTRGFPGFPGPIGLDGKPGHPGPKGDMGLTGPPGQPGPQGQKGEKGQCGEYPHRLLPLLNSVRLAPPPVIKRRTFQGEQSQASIQGPPGPPGPPGPSGPLGHPGLPGPMGPPGLPGPPGPKGDPGIQGYHGRKGERGMPGMPGKHGAKGAPGIAVAGMKGEPGIPGTKGDPGAEGKPGPPGLLGKRGQRGEKGAEGSPGLPGLLGQKGEKGDAGNSIGGGRGEPGPPGLPGPPGPKGEAGVDGQVGPPGQPGDKGERGAAGEQGPDGPKGSKGEPGKGEMVDYNGNINEALQEIRTLALMGPPGLPGQIGPPGAPGIPGQKGEIGLPGPPGHDGEKGPRGKPGDMGPPGPQGPPGKDGPPGVKGENGHPGSPGEKGEKGETGQAGSPGEKGEAGEKGNPGAEVPGLPGPEGPPGPPGLQGVPGPKGEAGLDGAKGEKGFQGEKGDRGPLGLPGASGLDGRPGPPGTPGPIGVPGPAGPKGERGSKGDPGMTGPTGAAGLPGLHGPPGDKGNRGERGKKGSRGPKGDKGDQGAPGLDAPCPLGEDGLPVQGCWNK

SEQ ID NO: 19505 - protein, 63 aa, Homo sapiens
MQIELSTCFFLCLLRFCFSATRRYYLGAVELSWDYMQSDLDFLLECQNLFHSTPQSCTKRLCL

SEQ ID NO: 19506 - protein, 145 aa, Homo sapiens
MYGKIIFVLLLSEIVSISALSTTEVAMHTSTSSSVTKSYISSQTNDTHKRDTYAATPRAHEVSEISVRTVYPPEEETGERVQLAHHFSEPEITLIIFGVMAGVIGTILLISYGIRRLIKRQVINENLFTKPNVERTQRRHKTSVK

SEQ ID NO: 19507 - protein, 589 aa, Homo sapiens
MTSSASGIYGNFGQANYSAAKLGLLGLANSLAIEGRKSNIHCNTIAPNAGSRMTQTVMPEDLVEALKPEYVAPLVLWLCHESCEENGGLFEVGAGWIGKLRWERTLGAIVRQKNHPMTPEAVKANWKKICDFENASKPQSIQESTGSIIEVLSKIDSEGGVSANHTSRATSTATSGFAGAIGQKLPPFSYAYTELEAIMYALGVGASIKDPKDLKFIYEGSSDFSCLPTFGVIIGQKSMMGGGLAEIPGLSINFAKVLHGEQYLELYKPLPRAGKLKCEAVVADVLDKGSGVVIIMDVYSYSEKELICHNQFSLFLVGSGGFGGKRTSDKVKVAVAIPNRPPDAVLTDTTSLNQAALYRLSGDWNPLHIDPNFASLAGFDKPILHGLCTFGFSARRVLQQFADNDVSRFKAIKARFAKPVYPGQTLQTEMWKEGNRIHFQTKVQETGDIVISNAYVDLAPTSGTSAKTPSEGGKLQSTFVFEEIGRRLKDIGPEVVKKVNAVFEWHITKGGNIGAKWTIDLKSGSGKVYQGPAKGAADTTIILSDEDFMEVVLGKLDPQKAFFSGRLKARGNIMLSQKLQMILKDYAKL

SEQ ID NO: 19508 - protein, 2965 aa, Homo sapiens [sequence omitted]

SEQ ID NO: 19509 - protein, 282 aa, Homo sapiens
MDSLVVLVLCLSCLLLLSLWRQSSGRGKLPPGPTPLPVIGNILQIGIKDISKSLTNLSKVYGPVFTLYFGLKPIVVLHGYEAVKEALIDLGEEFSGRGIFPLAERANRGFGIVFSNGKKWKEIRRFSLMTLRNFGMGKRSIEDRVQEEARCLVEELRKTKASPCDPTFILGCAPCNVICSIIFHKRFDYKDQQFLNLMEKLNENIKILSSPWIQICNNFSPIIDYFPGTHNKLLKNVAFMKSYILEKVKEHQESMDMNNPQDFIDCFLMKMEKLKSRKRLNV

SEQ ID NO: 19510 - protein, 32 aa, Homo sapiens
MPHTLWMVWVLGVIISLSKEESSNQASLSCDR

SEQ ID NO: 19511 - protein, 161 aa, Homo sapiens
MWVTKLLPALLLQHVLLHLLLLPIAIPYAEGQRKRRNTIHEFKKSAKTTLIKIDPALKIKTKKVNTADQCANRCTRNKGLPFTCKAFVFDKARKQCLWFPFNSMSSGVKKEFGHEFDLYENKDYIRNCIIGKGRSYKGTVSITKSGIKCQPWSSMIPHEHR

SEQ ID NO: 19512 - protein, 137 aa, Homo sapiens
MEERGDSEPTPGCSGLGPGGVRGFGDGGGAPSWAPEDAWMGTHPKYLEMMELDIGDATQVYVAFLVYLDLMESKSWHEVNCVGLPELQLICLVGTEIEGEGLQTVVPTPITASLSHNRYWRATFEEGKYLATLKDLH

SEQ ID NO: 19513 - protein, 456 aa, Homo sapiens
MAVLLLLLRALRRGPGPGPRPLWGPGPAWSPGFPARPGRGRPYMASRPPGDLAEAGGRALQSLQLRLLTPTFEGINGLLLKQHLVQNPVRLWQLLGGTFYFNTSRLKQKNKEKDKSKGKAPEEDEEERRRRERDDQMYRERLRTLLVIAVVMSLLNALSTSGGSISWNDFVHEMLAKGEVQRVQVVPESDVVEVYLHPGAVVFGRPRLALMYRMQVANIDKFEEKLRAAEDELNIEAKDRIPVSYKRTGFFGNALYSVGMTAVGLAILWYVFRLAGMTGREGGFSAFNQLKMARFTIVDGKMGKGVSFKDVAGMHEAKLEVREFVDYLKLGAKVPKGALLLGPPGCGKTLLAKAVATEAQVPFLAMAGPEFVEVIGGLGAARVRSLFKEARARAPCIVYIDEIDAVGKKRSTTMSGFSNTEEEQTLNQLLVEMDVFYAEIEELKLVYPYHGVLHSD

SEQ ID NO: 19514 - protein, 439 aa, Homo sapiens
MTVARPSVPAALPLLGELPRLLLLVLLCLPAVWGDCGLPPDVPNAQPALEGRTSFPEDTVITYKCEESFVKIPGEKDSVICLKGSQWSDIEEFCNRSCEVPTRLNSASLKQPYITQNYFPVGTVVEYECRPGYRREPSLSPKLTCLQNLKWSTAVEFCKKKSCPNPGEIRNGQIDVPGGILFGATISFSCNTGYKLFGSTSSFCLISGSSVQWSDPLPECREIYCPAPPQIDNGIIQGERDHYGYRQSVTYACNKGFTMIGEHSIYCTVNNDEGEWSGPPPECRGKSLTSKVPPTVQKPTTVNVPTTEVSPTSQKTTTKTTTPNAQATRSTPVSRTTKHFHETTPNKGSGTTSGTTRLLSETVFHRVIQDGLDLLASRSACLGLPKCWDYRREPPHLARAHVFHVDRFAWDASNHGLADLAKEELRRKYTQVYRLFLVS

SEQ ID NO: 19515 - protein, 1764 aa, Homo sapiens
MAKPTSKDSGLKEKFKILLGLGTPRPNPRSAEGKQTEFIITAEILRELSMECGLNNRIRMIGQICEVAKTKKFEEHAVEALWKAVADLLQPERPLEARHAVLALLKAIVQGQGERLGVLRALFFKVIKDYPSNEDLHERLEVFKALTDNGRHITYLEEELADFVLQWMDVGLSSEFLLVLVNLVKFNSCYLDEYIARMVQMICLLCVRTASSVDIEVSLQVLDAVVCYNCLPAESLPLFIVTLCRTINVKELCEPCWKLMRNLLGTHLGHSAIYNMCHLMEDRAYMEDAPLLRGAVFFVGMALWGAHRLYSLRNSPTSVLPSFYQAMACPNEVVSYEIVLSITRLIKKYRKELQVVAWDILLNIIERLLQQLQTLDSPELRTIVHDLLTTVEELCDQNEFHGSQERYFELVERCADQRPESSLLNLISYRAQSIHPAKDGWIQNLQALMERFFRSESRGAVRIKVLDVLSFVLLINRQFYEEELINSVVISQLSHIPEDKDHQVRKLATQLLVDLAEGCHTHHFNSLLDIIEKVMARSLSPPPELEERDVAAYSASLEDVKTAVLGLLVILQTKLYTLPASHATRVYEMLVSHIQLHYKHSYTLPIASSIRLQAFDFLLLLRADSLHRLGLPNKDGVVRFSPYCVCDYMEPERGSEKKTSGPLSPPTGPPGPAPAGPAVRLGSVPYSLLFRVLLQCLKQESDWKVLKLVLGRLPESLRYKVLIFTSPCSVDQLCSALCSMLSGPKTLERLRGAPEGFSRTDLHLAVVPVLTALISYHNYLDKTKQREMVYCLEQGLIHRCASQCVVALSICSVEMPDIIIKALPVLVVKLTHISATASMAVPLLEFLSTLARLPHLYRNFAAEQYASVFAISLPYTNPSKFNQYIVCLAHHVIAMWFIRCRLPFRKDFVPFITKGLRSNVLLSFDDTPEKDSFRARSTSLNERPKSRIQTSLTSASLGSADENSVAQADDSLKNLHLELTETCLDMMARYVFSNFTAVPKRSPVGEFLLAGGRTKTWLVGNKLVTVTTSVGTGTRSLLGLDSGELQSGPESSSSPGVHVRQTKEAPAKLESQAGQQVSRGARDRVRSMSGGHGLRVGALDVPASQFLGSATSPGPRTAPAAKPEKASAGTRVPVQEKTNLAAYVPLLTQGWAEILVRRPTGNTSWLMSLENPLSPFSSDINNMPLQELSNALMAAERFKEHRDTALYKSLSVPAASTAKPPPLPRSNTVASFSSLYQSSCQGQLHRSVSWADSAVVMEEGSPGEVPVLVEPPGLEDVEAALGMDRRTDAYSRSSSVSSQEEKSLHAEELVGRGIPIERVVSSEGGRPSVDLSFQPSQPLSKSSSSPELQTLQDILGDPGDKADVGRLSPEVKARSQSGTLDGESAAWSASGEDSRGQPEGPLPSSSPRSPSGLRPRGYTISDSAPSRRGKRVERDALKSRATASNAEKVPGINPSFVFLQLYHSPFFGDESNKPILLPNESQSFERSVQLLDQIPSYDTHKIAVLYVGEGQSNSELAILSNEHGSYRYTEFLTGLGRLIELKDCQPDKVYLGGLDVCGEDGQFTYCWHDDIMQAVFHIATLMPTKDVDKHRCDKKRHLGNDFVSIVYNDSGEDFKLGTIKGQFNFVHVIVTPLDYECNLVSLQCRKDMEGLVDTSVAKIVSDRNLPFVARQMALHANMASQVHHSRSNPTDIYPSKWIARLRHIKRLRQRICEEAAYSNPSLPLVHPPSHSKAPAQTPAEPTPGYEVGQRKRLISSVEDFTEFV

SEQ ID NO: 19516 - protein, 551 aa, Homo sapiens
MAENWKNCFEEELICPICLHVFVEPVQLPCKHNFCRGCIGEAWAKDSGLVRCPECNQAYNQKPGLEKNLKLTNIVEKFNALHVEKPPAALHCVFCRRGPPLPAQKVCLRCEAPCCQSHVQTHLQQPSTARGHLLVEADDVRAWSCPQHNAYRLYHCEAEQVAVCQYCCYYSGAHQGHSVCDVEIRRNEIRKMLMKQQDRLEEREQDIEDQLYKLESDKRLVEEKVNQLKEEVRLQYEKLHQLLDEDLRQTVEVLDKAQAKFCSENAAQALHLGERMQEAKKLLGSLQLLFDKTEDVSFMKNTKSVKILMDRTQTCTSSSLSPTKIGHLNSKLFLNEVAKKEKQLRKMLEGPFSTPVPFLQSVPLYPCGVSSSGAEKRKHSTAFPEASFLETSSGPVGGQYGAAGTASGEGQSGQPLGPCSSTQHLVALPGGAQPVHSSPVFPPSQYPNGSAAQQPMLPQYGGRKILVCSVDNCYCSSVANHGGHQPYPRSGHFPWTVPSQEYSHPLPPTPSVPQSLPSLAVRDWLDASQQPGHQDFYRVYGQPSTKHYVTS

SEQ ID NO: 19517 - protein, 258 aa, Homo sapiens
MAVLLLLLRALRRGPGPGPRPLWGPGPAWSPGFPARPGRGRPYMASRPPGDLAEAGGRALQSLQLRLLTPTFEGINGLLLKQHLVQNPVRLWQLLGGTFYFNTSRLKQKNKEKDKSKGKAPEEDEEERRRRERDDQMYRERLRTLLVIAVVMSLLNALSTSGGSISWNDFVHEMLAKGEVQRVQVVPESDVVEVYLHPGAVVFGRPRLALMYRMQVANIDKFEEKLRAAEDELNIEAKDRIPVSYKRTGFFGKLILPA

SEQ ID NO: 19518 - protein, 121 aa, Homo sapiens
MAVKKIAIFGATGQTGLTTLAQAVQAGYEVTVLVRDSSRLPSEGPRPAHVVVGDVLQAADVDKTVAGQDAVIVLLGTRNDLSPTTVMSEGARNIVAAMKAHGVDKLSCSGTLPRCPHDCRL

SEQ ID NO: 19519 - protein, 558 aa, Homo sapiens
MAVQPKETLQLESAAEVGFVRFFQGMPEKPTTTVRLFDRGDFYTAHGEDALLAAREVFKTQGVIKYMGPAGAKNLQSVVLSKMNFESFVKDLLLVRQYRVEVYKNRAGNKASKENDWYLAYKASPGNLSQFEDILFGNNDMSASIGVVGVKMSAVDGQRQVGVGYVDSIQRKLGLCEFPDNDQFSNLEALLIQIGPKECVLPGGETAGDMGKLRQIIQRGGILITERKKADFSTKDIYQDLNRLLKGKKGEQMNSAVLPEMENQVAVSSLSAVIKFLELLSDDSNFGQFELTTFDFSQYMKLDIAAVRALNLFQGSVEDTTGSQSLAALLNKCKTPQGQRLVNQWIKQPLMDKNRIEERLNLVEAFVEDAELRQTLQEDLLRRFPDLNRLAKKFQRQAANLQDCYRLYQGINQLPNVIQALEKHEGKHQKLLLAVFVTPLTDLRSDFSKFQEMIETTLDMDQVENHEFLVKPSFDPNLSELREIMNDLEKKMQSTLISAARDLGLDPGKQIKLDSSAQFGYYFRVTCKEEKVLRNNKNFSTVDIQKNGVKFTNRVYQK

SEQ ID NO: 19520 - protein, 590 aa, Homo sapiens
IIRGYLGKWTLVIKTITLVLAVSSGLSLGKEGPLVHVACCCGNILCHCFNKYRKNEAKRREVLSAAAAAGVSVAFGAPIGGVLFSLEEVSYYFPLKTLWRSFFAALVAAFTLRSINPFGNSRLVLFYVEFHTPWHLFELVPFILLGIFGGLWGALFIRTNIAWCRKRKTTQLGKYPVIEVLVVTAITAILAFPNEYTRMSTSELISELFNDCGLLDSSKLCDYENRFNTSKGGELPDRPAGVGVYSAMWQLALTLILKIVITIFTFGMKAQFLPPVLCWSGEFRLLPDGPRIRIPSGLFIPSMAVGAIAGRLLGVGMEQLAYYHQEWTVFNSWCSQGADCITPGLYAMVGAAACLGGVTRMTVSLVVIMFELTGGLEYIVPLMAAAMTSKWVADALGREGIYDAHIRLNGYPFLEAKEEFAHKTLAMDVMKPRRNDPLLTVLTQDSMTVEDVETIISETTYSGFPVVVSRESQRLVGFVLRRDLIISIENARKKQDGVVSTSIIYFTEHSPPLPPYTPPTLKLRNILDLSPFTVTDLTPMEIVVDIFRKLGLRQCLVTHNGRLLGIITKKDVLKHIAQMANQDPDSILFN

SEQ ID NO: 19521 - protein, 3069 aa, Homo sapiens
MVFESVVVDVLNRFLGDYVVDLDTSQLSLGIWKGAVALKNLQIKENALSQLDVPFKVKVGHIGNLKLIIPWKNLYTQPVEAVLEEIYLLIVPSSRIKYDPLKEEKQLMEAKQQELKRIEEAKQKVVDQEQHLPEKQDTFAEKLVTQIIKNLQVKISSIHIRYEDDITNRDKPLSFGISLQNLSMQTTDQYWVPCLHDETEKLVRKLIRLDNLFAYWNVKSQMFYLSDYDNSLDDLKNGIVNENIVPEGYDFVFRPISANAKLVMNRRSDFDFSAPKINLEIELHNIAIEFNKPQYFSIMELLESVDMMAQNLPYRKFKPDVPLHHHAREWWAYAIHGVLEVNVCPRLWMWSWKHIRKHRQKVKQYKELYKKKLTSKKPPGELLVSLEELEKTLDVFNITIARQTAEVEVKKAGYKIYKEGVKDPEDNKGWFSWLWSWSEQNTNEQQPDVQPETLEEMLTPEEKALLYEAIGYSETAVDPTLLKTFEALKFFVHLKSMSIVLRENHQKPELVDIVIEEFSTLIVQRPGAQAIKFETKIDSFHITGLPDNSEKPRLLSSLDDAMSLFQITFEINPLDETVSQRCIIEAEPLEIIYDARTVNSIVEFFRPPKEVHLAQLTAATLTKLEEFRSKTATGLLYIIETQKVLDLKINLKASYIIVPQDGIFSPTSNLLLLDLGHLKVTSKSRSELPDVKQGEANLKEIMDRAYDSFDIQLTSVQLLYSRVGDNWREARKLSVSTQHILVPMHFNLELSKAMVFMDVRMPKFKIYGKLPLISLRISDKKLQGIMELIESIPKPEPVTEVSAPVKSFQIQTSTSLGTSQISQKIIPLLELPSVSEDDSEEEFFDAPCSPLEEPLQFPTGVKSIRTRKLQKQDCSVNMTTFKIRFEVPKVLIEFYHLVGDCELSVVEILVLGLGAEIEIRTYDLKANAFLKEFCLKCPEYLDENKKPVYLVTTLDNTMEDLLTLEYVKAEKNVPDLKSTYNNVLQLIKVNFSSLDIHLHTEALLNTINYLHNILPQSEEKSAPVSTTETEDKGDVIKKLALKLSTNEDIITLQILAELSCLQIFIQDQKCNISEIKIEGLDSEMIMRPSETEINAKLRNIIVLDSDITAIYKKAVYITGKEVFSFKMVSYMDATAGSAYTDMNVVDIQVNLIVGCIEVVFVTKFLYSILAFIDNFQAAKQALAEATVQAAGMAATGVKELAQRSSRMALDINIKAPVVVIPQSPVSENVFVADFGLITMTNTFHMITESQSSPPPVIDLITIKLSEMRLYRSRFINDAYQEVLDLLLPLNLEVVVERNLCWEWYQEVPCFNVNAQLKPMEFILSQEDITTIFKTLHGNIWYEKDGSASPAVTKDQYSATSGVTTNASHHSGGATVVTAAVVEVHSRALLVKTTLNISFKTDDLTMVLYSPGPKQASFTDVRDPSLKLAEFKLENIISTLKMYTDGSTFSSFSLKNCILDDKRPHVKKATPRMIGLTVGFDKKDMMDIKYRKVRDGCVTDAVFQEMYICASVEFLQTVANVFLEAYTTGTAVETSVQTWTAKEEVPTQESVKWEINVIIKNPEIVFVADMTKNDAPALVITTQCEICYKGNLENSTMTAAIKDLQVRACPFLPVKRKGKITTVLQPCDLFYQTTQKGTDPQVIDMSVKSLTLKVSPVIINTMITITSALYTTKETIPEETASSTAHLWEKKDTKTLKMWFLEESNETEKIAPTTELVPKGEMIKMNIDSIFIVLEAGIGHRTVPMLLAKSRFSGEGKNWSSLINLHCQLELEVHYYNEMFGVWEPLLEPLEIDQTEDFRPWNLGIKMKKKAKMAIVESDPEEENYKVPEYKTVISFHSKDQLNITLSKCGLVMLNNLVKAFTEAATGSSADFVKDLAPFMILNSLGLTISVSPSDSFSVLNIPMAKSYVLKNGESLSMDYIRTKDNDHFNAMTSLSSKLFFILLTPVNHSTADKIPLTKVGRRLYTVRHRESGVERSIVCQIDTVEGSKKVTIRSPVQIRNHFSVPLSVYEGDTLLGTASPENEFNIPLGSYRSFIFLKPEDENYQMCEGIDFEEIIKNDGALLKKKCRSKNPSKESFLINIVPEKDNLTSLSVYSEDGWDLPYIMHLWPPILLRNLLPYKIAYYIEGIENSVFTLSEGHSAQICTAQLGKARLHLKLLDYLNHDWKSEYHIKPNQQDISFVSFTCVTEMEKTDLDIAVHMTYNTGQTVVAFHSPYWMVNKTGRMLQYKADGIHRKHPPNYKKPVLFSFQPNHFFNNNKVQLMVTDSELSNQFSIDTVGSHGAVKCKGLKMDYQVGVTIDLSSFNITRIVTFTPFYMIKNKSKYHISVAEEGNDKWLSLDLEQCIPFWPEYASSKLLIQVERSEDPPKRIYFNKQENCILLRLDNELGGIIAEVNLAEHSTVITFLDYHDGAATFLLINHTKNELVQYNQSSLSEIEDSLPPGKAVFYTWADPVGSRRLKWRCRKSHGEVTQKDDMMMPIDLGEKTIYLVSFFEGLQRIILFTEDPRVFKVTYESEKAELAEQEIAVALQDVGISLVNNYTKQEVAYIGITSSDVVWETKPKKKARWKPMSVKHTEKLEREFKEYTESSPSEDKVIQLDTNVPVRLTPTGHNMKILQPHVIALRRNYLPALKVEYNTSAHQSSFRIQIYRIQIQNQIHGAVFPFVFYPVKPPKSVTMDSAPKPFTDVSIVMRSAGHSQISRIKYFKVLIQEMDLRLDLGFIYALTDLMTEAEVTENTEVELFHKDIEAFKEEYKTASLVDQSQVSLYEYFHISPIKLHLSVSLSSGREEAKDSKQNGGLIPVHSLNLLLKSIGATLTDVQDVVFKLAFFELNYQFHTTSDLQSEVIRHYSKQAIKQMYVLILGLDVLGNPFGLIREFSEGVEAFFYEPYQGAIQGPEEFVEGMALGLKALVGGAVGGLAGAASKITGAMAKGVAAMTMDEDYQQKRREAMNKQPAGFREGITRGGKGLVSGFVSGITGIVTKPIKGAQKGGAAGFFKGVGKGLVGAVARPTGGIIDMASSTFQGIKRATETSEVESLRPPRFFNEDGVIRPYRLRDGTGNQMLQASKSLI

SEQ ID NO: 19522 - protein, 444 aa, Homo sapiens
MTTEGGPPPAPLRRACSPVPGALQAALMSPPPAAAAAAAAAPETTSSSSSSSSASCASSSSSSNSASAPSAACKSAGGGGAGAGSGGAKKASSGLRRPEKPPYSYIALIVMAIQSSPSKRLTLSEIYQFLQARFPFFRGAYQGWKNSVRHNLSLNECFIKLPKGLGRPGKGHYWTIDPASEFMFEEGSFRRRPRGFRRKCQALKPMYHRVVSGLGFGASLLPQGFDFQAPPSAPLGCHSQGGYGGLDMMPAGYDAGAGAPSHAHPHHHHHHHVPHMSPNPGSTYMASCPVPAGPGGVGAAGGGGGGDYGPDSSSSPVPSSPAMASAIECHSPYTSPAAHWSSPGASPYLKQPPALTPSSNPAASAGLHSSMSSYSLEQSYLHQNAREDLSVGLPRYQHHSTPVCDRKDFVLNFNGISSFHPSASGSYYHHHHQSVCQDIKPCVM

SEQ ID NO: 19523 - protein, 210 aa, Homo sapiens
MRPRLWLLLAAQLTVLHGNSVLQQTPAYIKVQTNKMVMLSCEAKISLSNMCIYWLRQRQAPSSDSHHEFLTLWDSAKGTIHGEEVEQEKIAVFRDASRFILNLTSVKPEDSGIYFCMIVGSPELTFGKGTQLSVVDFLPTTAQPTKKSTLKKRVCRLPRPETQKGPLCSPVTLGLLVAGVLVLLVSLGVAMHLCCRRRRARLRFMKQFYK

SEQ ID NO: 19524 - protein, 705 aa, Homo sapiens
MIDSVKLRRDSAADFFSHYEYLCALQNSVPLPAVRACLREGVLDFNADRLRGVDWAPLLSTLKINKDLPLVSIKSFFQPWLGDTGSDMNKFCRSRVPAIRYKDVTFQLCKALKGCLSISSVLKNLELNGLILRERDLTILAKGLNKSASLVHLSLANCPIGDGGLEIICQGIKSSITLKTVNFTGCNLTWQGADHMAKILKYQTMRRHEETWAESLRYRRPDLDCMAGLRRITLNCNTLIGDLGACAFADSLSEDLWLRALDLQQCGLTNEGAKALLEALETNTTLVVLDIRKNPLIDHSMMKAVIKKVLQNGRSAKSEYQWITSPSVKEPSKTAKQKRRTIILGSGHKGKATIRIGLATKKPVSSGRKHSLGKEYYAPAPLPPGVSGFLPWRTAERAKRHRGFPLIKTRDICNQLQQPGFPVTVTVESPSSSEVEEVDDSSESVHEVPEKTSIEQEALQEKLEECLKQLKEERVIRLKVDKRVSELEHENAQLRNINFSLSEALHAQSLTNMILDDEGVLGSIENSFQKFHAFLDLLKDAGLGQLATMAGIDQSDFQLLGHPQMTSTVSNPPKEEKKALEDEKPEPKQNALGQMQNIQVSICMQSAYNEGTLMKFQKITGDARIPLPLDSFPVPVSTPEGLGTSSNNLGVPATEQRQESFEGFIARMCSPSPDATSGTGSQRKEEELSRNSRSSSEKKTKTESH

SEQ ID NO: 19525 - protein, 32 aa, Homo sapiens
MMSASRLAGTLIPAMAFLSCVRPESWEPCVEV

SEQ ID NO: 19526 - protein, 334 aa, Homo sapiens
MLKPSLPFTSLLFLQLPLLGVGLNTTILTPNGNEDTTADFFLTTMPTDSLSVSTLPLPEVQCFVFNVEYMNCTWNSSSEPQPTNLTLHYWYKNSDNDKVQKCSHYLFSEEITSGCQLQKKEIHLYQTFVVQLQDPREPRRQATQMLKLQNLVIPWAPENLTLHKLSESQLELNWNNRFLNHCLEHLVQYRTDWDHSWTEQSVDYRHKFSLPSVDGQKRYTFRVRSRFNPLCGSAQHWSEWSHPIHWGSNTSKENPFLFALEAVVISVGSMGLIISLLCVYFWLERTMPRIPTLKNLEDLVTEYHGNFSAWSGVSKGLAESLQPDYSERLCLGTL

SEQ ID NO: 19527 - protein, 353 aa, Homo sapiens
MGSLYSEYLNPNKVQEHYNYTKETLETQETTSRQVASAFIVILCCAIVVENLLVLIAVARNSKFHSAMYLFLGNLAASDLLAGVAFVANTLLSGSVTLRLTPVQWFAREGSAFITLSASVFSLLAIAIERHVAIAKVKLYGSDKSCRMLLLIGASWLISLVLGGLPILGWNCLGHLEACSTVLPLYAKHYVLCVVTIFSIILLAIVALYVRIYCVVRSSHADMAAPQTLALLKTVTIVLGVFIVCWLPAFSILLLDYACPVHSCPILYKAHYFFAVSTLNSLLNPVIYTWRSRDLRREVLRPLQCWRPGVGVQGRRRGGTPGHHLLPLRSSSSLERGMHMPTSPTFLEGNTVV

SEQ ID NO: 19528 - protein, 311 aa, Homo sapiens
MSDNQSWNSSGSEEDPETESGPPVERCGVLSKWTNYIHGWQDRWVVLKNNALSYYKSEDETEYGCRGSICLSKAVITPHDFDECRFDISVNDSVWYLRAQDPDHRQQWIDAIEQHKTESGYGSESSLRRHGSMVSLVSGASGYSATSTSSFKKGHSLREKLAEMETFRDILCRQVDTLQKYFDACADAVSKDELQRDKVVEDDEDDFPTTRSDGDFLHSTNGNKEKLFPHVTPKGINGIDFKGEAITFKATTAGILATLSHCIELMVKREDSWQKRLDKETEKKRRTEEAYKNAMTELKKKSHFGGPDYEV

SEQ ID NO: 19529 - protein, 234 aa, Homo sapiens
MACPQLPPLLLLVLVVLLKAGVNYNTPFTDIVTSENSMETSPVSSLISSPFAHSTHSSGEPPKSYSSTMSLETDSITHLSPSSSGATPTIQPSPSSTDSRMIPSSPQPETITHPSSGSPSAELTPSSHSTLPSSESLTPHWSPTSHSPGTEPLTSTDQTLEPPGPAPGDTGPRELHRNPSVVVVVCLLVSLLLIGSVVMAVRFCHRNESKFENLDEVSMGSVNDRLSFAHHLQE

SEQ ID NO: 19530 - protein, 775 aa, Homo sapiens
MASAGHIITLLLWGYLLELWTGGHTADTTHPRLRLSHKELLNLNRTSIFHSPFGFLDLHTMLLDEYQERLFVGGRDLVYSLSLERISDGYKEIHWPSTALKMEECIMKGKDAGECANYVRVLHHYNRTHLLTCGTGAFDPVCAFIRVGYHLEDPLFHLESPRSERGRGRCPFDPSSSFISTLIGSELFAGLYSDYWSRDAAIFRSMGRLAHIRTEHDDERLLKEPKFVGSYMIPDNEDRDDNKVYFFFTEKALEAENNAHAIYTRVGRLCVNDVGGQRILVNKWSTFLKARLVCSVPGMNGIDTYFDELEDVFLLPTRDHKNPVIFGLFNTTSNIFRGHAICVYHMSSIRAAFNGPYAHKEGPEYHWSVYEGKVPYPRPGSCASKVNGGRYGTTKDYPDDAIRFARSHPLMYQAIKPAHKKPILVKTDGKYNLKQIAVDRVEAEDGQYDVLFIGTDNGIVLKVITIYNQEMESMEEVILEELQIFKDPVPIISMEISSKRQQLYIGSASAVAQVRFHHCDMYGSACADCCLARDPYCAWDGISCSRYYPTGTHAKRRFRRQDVRHGNAAQQCFGQQFVGDALDKTEEHLAYGIENNSTLLECTPRSLQAKVIWFVQKGRETRKEEVKTDDRVVKMDLGLLFLRLHKSDAGTYFCQTVEHSFVHTVRKITLEVVEEEKVEDMFNKDDEEDRHHRMPCPAQSSISQGAKPWYKEFLQLIGYSNFQRVEEYCEKVWCTDRKRKKLKMSPSKWKYANPQEKKLRSKPEHYRLPRHTLDS

SEQ ID NO: 19531 - protein, 284 aa, Homo sapiens
MDAIKKKMQMLKLDKENAIDRAEQAEADKKQAEDRCKQLEEEQQALQKKLKGTEDEVEKYSESVKEAQEKLEQAEKKATDAEADVASLNRRIQLVEEELDRAQERLATALQKLEEAEKAADESERGMKVIENRAMKDEEKMELQEMQLKEAKHIAEDSDRKYEEVARKLVILEGELERSEERAEVAESKCGDLEEELKIVTNNLKSLEAQADKYSTKEDKYEEEIKLLEEKLKEAETRAEFAERSVAKLEKTIDDLEDEVYAQKMKYKAISEELDNALNDITSL

SEQ ID NO: 19532 - protein, 133 aa, Homo sapiens
MRQRLLPSVTSLLLVALLFPGSSQARHVNHSATEALGELRERAPGQGTNGFQLLRHAVKRDLLPPRTPPYQGDVPLGIRNTICRMQQGICRLFFCHSGEKKRDISSDPWNRCCVSNTDEEGKEKPEMDGRSGI

SEQ ID NO: 19533 - protein, 583 aa, Homo sapiens
MPKPINVRVTTMDAELEFAIQPNTTGKQLFDQVVKTVGLREVWFFGLQYVDSKGYSTWLKLNKKVTQQDVKKENPLQFKFRAKFFPEDVSEELIQEITQRLFFLQVKEAILNDEIYCPPETAVLLASYAVQAKYGDYNKEIHKPGYLANDRLLPQRVLEQHKLTKEQWEERIQNWHEEHRGMLREDSMMEYLKIAQDLEMYGVNYFEIKNKKGTELWLGVDALGLNIYEHDDKLTPKIGFPWSEIRNISFNDKKFVIKPIDKKAPDFVFYAPRLRINKRILALCMGNHELYMRRRKPDTIEVQQMKAQAREEKHQKQLERAQLENEKKKREIAEKEKERIEREKEELMERLKQIEEQTIKAQKELEEQTRKALELDQERKRAKEEAERLEKERRAAEEAKSAIAKQAADQMKNQEQLAAELAEFTAKIALLEEAKKKKEEEATEWQHKAFAAQEDLEKTKEELKTVMSAPPPPPPPPVIPPTENEHDEHDENNAEASAELSNEGVMNHRSEEERVTETQKNERVKKQLQALSSELAQARDETKKTQNDVLHAENVKAGRDKYKTLRQIRQGNTKQRIDEFEAM

SEQ ID NO: 19534 - protein, 38 aa, Homo sapiens
MSALLSLCFVLPLAAPGHGTQGWEPCTACSSLKAWAEC

SEQ ID NO: 19535 - protein, 744 aa, Homo sapiens
MYAFYSLLIYIFYSLFRRDGGAAAAAEPGDPAQRARKPRGRRRPDLPAPELWTELTGLAASSEPEDGSEGAAEGRAAAVSLEEALLRLAEFLSVQLGAEESCGGPADLGQSGEVPSLLTVTSQLLALLAWLRSPRGRQALLQGTQPAPRVRPPSPDGSTSQEESPSHFTAVPGEPLGDETQGQQPLQLEEDQRAWQRLEQLILGQLEELKQQLEQQEEELGRLRLGVGATDSEKRVQHLTLENEALKQSLSLMRDLLLHWGPGPPIRAPQEEAEALLELQGRLQEAQDTTEALRAQLQQETEQNCRRELQQMHGQLAGLRARMASLRQGCGDLRGLVSTFTQSCQGSLSEARGQVSWALGALSSGGPGTQLPEGQQGPPAGCPGRLPELKGNIRVLCRLRPGTSSSLVSVEPGPGGTVTTCYRGRHRRFRLDWVFPPDASQEEVFRELEPAVLSCLRGYSVCIFTYGQTGTGKTYSMEGPPEDPGIVPRALQSLFREMGAGRQHRVTLSMVEIYNEAVRDLLAPGPPERLAVRQGPEGQGGIQVAGLTHWDVPNLETLHQMLKLGRSNRATAATAMNQRSSRSHALVTLTLRAASPPRAPGTAGTLHLVDLAGSERARKAGAAGPPRGDPDGARRLREAQTINRSLLALGGVMAALRAHRPHVPFRDSQLTRLLQPALGPGTTAVLLLQISTRPEDLGETVCSLKFADRVGQVELGPARRRRVPRSSGTPSSLSTDTPLTGTPC

SEQ ID NO: 19536 - protein, 174 aa, Homo sapiens
MEKTQETVQRILLEPYKYLLQLPGKQVRTKLSQAFNHWLKVPEDKLQIIIEVTEMLHNASLLIDDIEDNSKLRRGFPVAHSIYGIPSVINSANYVYFLGLEKVLTLDHPDAVKLFTRQLLELHQGQGLDIYWRDNYTCPTEEEYKAMVLQKTGGLFGLAPYHLLKNLLFSRNSK

SEQ ID NO: 19537 - protein, 592 aa, Homo sapiens
MAVSGFTLGTCILLLHISYVANYPNGKVTQSCHGMIPEHGHSPQSVPVHDIYVSQMTFRPGDQIEVTLSGHPFKGFLLEARNAEDLNGPPIGSFTLIDSEVSQLLTCEDIQGSAVSHRSASKKTEIKVYWNAPSSAPNHTQFLVTVVEKYKIYWVKIPGPIISQPNAFPFTTPKATVVPLPTLPPVSHLTKPFSASDCGNKKFCIRSPLNCDPEKEASCVFLSFTRDDQSVMVEMSGPSKGYLSFALSHDQWMGDDDAYLCIHEDQTVYIQPSHLTGRSHPVMDSRDTLEDMAWRLADGVMQCSFRRNITLPGVKNRFDLNTSYYIFLADGAANDGRIYKHSQQPLITYEKYDVTDSPKNIGGSHSVLLLKVHGALMFVAWMTTVSIGVLVARFFKPVWSKAFLLGEAAWFQVHRMLMFTTTVLTCIAFVMPFIYRGGWSRHAGYHPYLGCIVMTLAVLQPLLAVFRPPLHDPRRQMFNWTHWSMGTAARIIAVAAMFLGMDLPGLNLPDSWKTYAMTGFVAWHVGTEVVLEVHAYRLSRKVEILDDDRIQILQSFTAVETEGHAFKKAVLAIYVCGNVTFLIIFLSAINHL

SEQ ID NO: 19538 - protein, 495 aa, Homo sapiens
MLLLGLLLLLPLLAGARLLWNWWKLRSLHLPPLAPGFLHLLQPDLPIYLLGLTQKFGPIYRLHLGLQDVVVLNSKRTIEEAMVKKWADFAGRPEPLTYKLVSRNYPDLSLGDYSLLWKAHKKLTRSALLLGIRDSMEPVVEQLTQEFCERMRAQPGTPVAIEEEFSLLTCSIICYLTFGDKIKDDNLMPAYYKCIQEVLKTWSHWSIQIVDVIPFLRFFPNPGLRRLKQAIEKRDHIVEMQLRQHKESLVAGQWRDMMDYMLQGVAQPSMEEGSGQLLEGHVHMAAVDLLIGGTETTANTLSWAVVFLLHHPEIQQRLQEELDHELGPGASSSRVPYKDRARLPLLNATIAEVLRLRPVVPLALPHRTTRPSSISGYDIPEGTVIIPNLQGAHLDETVWERPHEFWPDRFLEPGKNSRALAFGCGARVCLGEPLARLELFVVLTRLLQAFTLLPSGDALPSLQPLPHCSVILKMQPFQVRLQPRGMGAHSPGQSQ

SEQ ID NO: 19539 - protein, 1056 aa, Homo sapiens
MAVLKLTDQPPLVQAIFSGDPEEIRMLIHKTEDVNTLDSEKRTPLHVAAFLGDAEIIELLILSGARVNAKDNMWLTPLHRAVASRSEEAVQVLIKHSADVNARDKNWQTPLHVAAANKAVKCAEVIIPLLSSVNVSDRGGRTALHHAALNGHVEMVNLLLAKGANINAFDKKDRRALHWAAYMGHLDVVALLINHGAEVTCKDKKGYTPLHAAASNGQINVVKHLLNLGVEIDEINVYGNTALHIACYNGQDAVVNELIDYGANVNQPNNNGFTPLHFAAASTHGALCLELLVNNGADVNIQSKDGKSPLHMTAVHGRFTRSQTLIQNGGEIDCVDKDGNTPLHVAARYGHELLINTLITSGADTAKCGIHSMFPLHLAALNAHSDCCRKLLSSGFEIDTPDKFGRTCLHAAAAGGNVECIKLLQSSGADFHKKDKCGRTPLHYAAANCHFHCIETLVTTGANVNETDDWGRTALHYAAASDMDRNKTILGNAHDNSEELERARELKEKEATLCLEFLLQNDANPSIRDKEGYNSIHYAAAYGHRQCLELLLERTNSGFEESDSGATKSPLHLAAYNGHHQALEVLLQSLVDLDIRDEKGRTALDLAAFKGHTECVEALINQGASIFVKDNVTKRTPLHASVINGHTLCLRLLLEIADNPEAVDVKDAKGQTPLMLAVAYGHIDAVSLLLEKEANVDTVDILGCTALHRGIMTGHEECVQMLLEQEVSILCKDSRGRTPLHYAAARGHATWLSELLQMALSEEDCCFKDNQGYTPLHWACYNGNENCIEVLLEQKCFRKFIGNPFTPLHCAIINDHGNCASLLLGAIDSSIVSCRDDKGRTPLHAAAFADHVECLQLLLRHSAPVNAVDNSGKTALMMAAENGQAGAVDILVNSAQADLTVKDKDLNTPLHLACSKGHEKCALLILDKIQDESLINEKNNALQTPLHVAARNGLKVVVEELLAKGACVLAVDENGHTPALACAPNKDVADCLALILATMMPFSPSSTMMAVNFVCLKKDNLSRTTLSNLGSMVSLCSNNVGSEDGYNENDSDSETF

SEQ ID NO: 19540 - protein, 25 aa, Homo sapiens
MCCTKSLLLAALMSVLLLHLCGESE

SEQ ID NO: 19541 - protein, 660 aa, Homo sapiens
MSHVAVENALGLDQQFAGLDLNSSDNQSGGSTASRRYIPPHLRNREATKGFYDKDSSGWSSSKDKDAYSSFGSRSDSRGKSSFFSDRGSGSRGRFDDRGRSDYDGIGSRGDRSGFGKFERGGNSRWCDKSDEDDWSKPLPPSERLEQELFSGGNTGINFEKYDDIPVEATGNNCPPHIESFSDVEMGEIIMGNIELTRYTRPTPVQKHAIPIIKEKRDLMACAQTGSGKTAAFLLPILSQIYSDGPGEALRAMKENGRYGRRKQYPISLVLAPTRELAVQIYEEARKFSYRSRVRPCVVYGGADIGQQIRDLERGCHLLVATPGRLVDMMERGKIGLDFCKYLVLDEADRMLDMGFEPQIRRIVEQDTMPPKGVRHTMMFSATFPKEIQMLARDFLDEYIFLAVGRVGSTSENITQKVVWVEESDKRSFLLDLLNATGKDSLTLVFVETKKGADSLEDFLYHEGYACTSIHGDRSQRDREEALHQFRSGKSPILVATAVAARGLDISNVKHVINFDLPSDIEEYVHRIGRTGRVGNLGLATSFFNERNINITKDLLDLLVEAKQEVPSWLENMAYEHHYKGSSRGRSKSRFSGGFGARDYRQSSGASSSSFSSSRASSSRSGGGGHGSSRGFGGGGYGGFYNSDGYGGNYNSQGVDWWGN

SEQ ID NO: 19542 - protein, 801 aa, Homo sapiens
MFAPPTALPPPPPLTSGSLQVAGHPAGSTYSEQDILRQELNTRFLASQSADRGASLGPPPYLRTEFHQHQHQHQHTHQHTHQHTFTPFPHAIPPTAIMPTPAPPMFDKYPTKVDPFYRHSLFHSYPPAVSGIPPMIPPTGPFGSLQGAFQPKTSNPIDVAARPGTVPHTLLQKDPRLTDPFRPMLRKPGKWCAMHVHIAWQIYHHQQKVKKQMQSDPHKLDFGLKPEFLSRPPGPSLFGAIHHPHDLARPSTLFSAAGAAHPTGTPFGPPPHHSNFLNPAAHLEPFNRPSTFTGLAAVGGNAFGGLGNPSVTPNSMFGHKDGPSVQNFSNPHEPWNRLHRTPPSFPTPPPWLKPGELERSASAAAHDRDRDVDKRDSSVSKDDKERESVEKRHSSHPSPAPVLPVNALGHTRSSTEQIRAHLNTEAREKDKPKERERDHSESRKDLAADEHKAKEGHLPEKDGHGHEGRAAGEEAKQLARVPSPYVRTPVVESARPNSTSSREAEPRKGEPAYENPKKSSEVKVKEERKEDHDLPPEAPQTHRASEPPPPNSSSSVHPGPLASMPMTVGVTGIHPMNSISSLDRTRMMTPFMGISPLPGGERFPYPSFHWDPIRDPLRDPYRELDIHRRDPLGRDFLLRNDPLHRLSTPRLYEADRSFRDREPHDYSHHHHHHHHPLSVDPRREHERGGHLDERERLHMLREDYEHTRLHSVHPASLDGHLPHPSLITPGLPSMHYPRISPTAGNQNGLLNKTPPTAALSAPPPLISTLGGRPVSPRRTTPLSAEIRERPPSHTLKDIEAR

SEQ ID NO: 19543 - protein, 361 aa, Homo sapiens
MESIFHEKQEGSLCAQHCLNNLLQGEYFSPVELSSIAHQLDEEERMRMAEGGVTSEDYRTFLQQPSGNMDDSGFFSIQVISNALKVWGLELILFNSPEYQRLRIDPINERSFICNYKEHWFTVRKLGKQWFNLNSLLTGPELISDTYLALFLAQLQQEGYSIFVVKGDLPDCEADQLLQMIRVQQMHRPKLIGEELAQLKEQRVHKTDLERVLEANDGSGMLDEDEEDLQRALALSRQEIDMEDEEADLRRAIQLSMQGSSRNISQDMTQTSGTNLTSEELRKRREAYFEKQQQKQQQQQQQQQQGDLSGQSSHPCERPATSSGALGSDLGDAMSEEDMLQAAVTMSLETVRNDLKTEGKK

SEQ ID NO: 19544 - protein, 1258 aa, Homo sapiens
MDGPTRGHGLRKKRRSRSQRDRERRSRGGLGAGAAGGGGAGRTRALSLASSSGSDKEDNGKPPSSAPSRPRPPRRKRRESTSAEEDIIDGFAMTSFVTFEALEKDVALKPQERVEKRQTPLTKKKREALTNGLSFHSKKSRLSHPHHYSSDRENDRNLCQHLGKRKKMPKALRQLKPGQNSCRDSDSESASGESKGFHRSSSRERLSDSSAPSSLGTGYFCDSDSDQEEKASDASSEKLFNTVIVNKDPELGVGTLPEHDSQDAGPIVPKISGLERSQEKSQDCCKEPIFEPVVLKDPCPQVAQPIPQPQTEPQLRAPSPDPDLVQRTEAPPQPPPLSTQPPQGPPEAQLQPAPQPQVQRPPRPQSPTQLLHQNLPPVQAHPSAQSLSQPLSAYNSSSLSLNSLSSRSSTPAKTQPAPPHISHHPSASPFPLSLPNHSPLHSFTPTLQPPAHSHHPNMFAPPTALPPPPPLTSGSLQVAGHPAGSTYSEQDILRQELNTRFLASQSADRGASLGPPPYLRTEFHQHQHQHQHTHQHTHQHTFTPFPHAIPPTAIMPTPAPPMFDKYPTKVDPFYRHSLFHSYPPAVSGIPPMIPPTGPFGSLQGAFQPKTSNPIDVAARPGTVPHTLLQKDPRLTDPFRPMLRKPGKWCAMHVHIAWQIYHHQQKVKKQMQSDPHKLDFGLKPEFLSRPPGPSLFGAIHHPHDLARPSTLFSAAGAAHPTGTPFGPPPHHSNFLNPAAHLEPFNRPSTFTGLAAVGGNAFGGLGNPSVTPNSMFGHKDGPSVQNFSNPHEPWNRLHRTPPSFPTPPPWLKPGELERSASAAAHDRDRDVDKRDSSVSKDDKERESVEKRHSSHPSPAPVLPVNALGHTRSSTEQIRAHLNTEAREKDKPKERERDHSESRKDLAADEHKAKEGHLPEKDGHGHEGRAAGEEAKQLARVPSPYVRTPVVESARPNSTSSREAEPRKGEPAYENPKKSSEVKVKEERKEDHDLPPEAPQTHRASEPPPPNSSSSVHPGPLASMPMTVGVTGIHPMNSISSLDRTRMMTPFMGISPLPGGERFPYPSFHWDPIRDPLRDPYRELDIHRRDPLGRDFLLRNDPLHRLSTPRLYEADRSFRDREPHDYSHHHHHHHHPLSVDPRREHERGGHLDERERLHMLREDYEHTRLHSVHPASLDGHLPHPSLITPGLPSMHYPRISPTAGNQNGLLNKTPPTAALSAPPPLISTLGGRPVSPRRTTPLSAEIRERPPSHTLKDIEAR

SEQ ID NO: 19545 - protein, 840 aa, Homo sapiens
MAGPGSTGGQIGAAALAGGARSKVAPSVDFDHSCSDSVEYLTLNFGPFETVHRWRRLPPCDEFVGARRSKHTVVAYKDAIYVFGGDNGKTMLNDLLRFDVKDCSWCRAFTTGTPPAPRYHHSAVVYGSSMFVFGGYTGDIYSNSNLKNKNDLFEYKFATGQWTEWKIEGRLPVARSAHGATVYSDKLWIFAGYDGNARLNDMWTIGLQDRELTCWEEVAQSGEIPPSCCNFPVAVCRDKMFVFSGQSGAKITNNLFQFEFKDKTWTRIPTEHLLRGSPPPPQRRYGHTMVAFDRHLYVFGGAADNTLPNELHCYDVDFQTWEVVQPSSDSEVGGAEVPERACASEEVPTLTYEERVGFKKSRDVFGLDFGTTSAKQPTQPASELPSGRLFHAAAVISDAMYIFGGTVDNNIRSGEMYRFQFSCYPKCTLHEDYGRLWESRQFCDVEFVLGEKEECVQGHVAIVTARSRWLRRKITQARERLAQKLEQEAAPVPREAPGVAAGGARPPLLHVAIREAEARPFEVLMQFLYTDKIKYPRKGHVEDVLLIMDVYKLALSFQLCRLEQLCRQYIEASVDLQNVLVVCESAARLQLSQLKEHCLNFVVKESHFNQVIMMKEFERLSSPLIVEIVRRKQQPPPRTPLDQPVDIGTSLIQDMKAYLEGAGAEFCDITLLLDGHPRPAHKAILAARSSYFEAMFRSFMPEDGQVNISIGEMVPSRQAFESMLRYIYYGEVNMPPEDSLYLFAAPYYYGFYNNRLQAYCKQNLEMNVTVQNVLQILEAADKTQALDMKRHCLHIIVHQFTKVSKLPTLRSLSQQLLLDIIDSLASHISDKQCAELGADI

SEQ ID NO: 19546 - protein, 684 aa, Homo sapiens
MAGPRACAPLLLLLLLGELLAAAGAQRVGLPGPPGPPGPPGKPGQDGIDGEAGPPGLPGPPGPKGAPGKPGKPGEAGLPGLPGVDGLTGRDGPPGPKGAPGERGSLGPPGPPGLGGKGLPGPPGEAGVSGPPGGIGLRGPPGPSGLPGLPGPPGPPGPPGHPGVLPEGATDLQCPSICPPGPPGPPGMPGFKGPTGYKGEQGEVGKDGEKGDPGPPGPAGLPGSVGLQGPRGLRGLPGPLGPPGDRGPIGFRGPPGIPGAPGKAGDRGERGPEGFRGPKGDLGRPGPKGTPGVAGPSGEPGMPGKDGQNGVPGLDGQKGEAGRNGAPGEKGPNGLPGLPGRAGSKGEKGERGRAGELGEAGPSGEPGVPGDAGMPGERGEAGHRGSAGALGPQGPPGAPGVRGFQGQKGSMGDPGLPGPQGLRGDVGDRGPGGAAGPKGDQGIAGSDGLPGDKGELGPSGLVGPKGESGSRGELGPKGTQGPNGTSGVQGVPGPPGPLGLQGVPGVPGITGKPGVPGKEASEQRIRELCGGMISEQIAQLAAHLRKPLAPGSIGRPGPAGPPGPPGPPGSIGHPGARGPPGYRGPTGELGDPGPRGNQGDRGDKGAAGAGLDGPEGDQGPQGPQGVPGTSKDGQDGAPGEPGPPGDPGLPGAIGAQGTPGICDTSACQGAVLGGVGEKSGSRSS

SEQ ID NO: 19547 - protein, 1044 aa, Homo sapiens
MRYRASALGSDGVRVTMESALTARDRVGVQDFVLLENFTSEAAFIENLRRRFRENLIYTYIGPVLVSVNPYRDLQIYSRQHMERYRGVSFYEVPPHLFAVADTVYRALRTERRDQAVMISGESGAGKTEATKRLLQFYAETCPAPERGGAVRDRLLQSNPVLEAFGNAKTLRNDNSSRFGKYMDVQFDFKGAPVGGHILSYLLEKSRVVHQNHGERNFHIFYQLLEGGEEETLRRLGLERNPQSYLYLVKGQCAKVSSINDKSDWKVVRKALTVIDFTEDEVEDLLSIVASVLHLGNIHFAANEESNAQVTTENQLKYLTRLLSVEGSTLREALTHRKIIAKGEELLSPLNLEQAAYARDALAKAVYSRTFTWLVGKINRSLASKDVESPSWRSTTVLGLLDIYGFEVFQHNSFEQFCINYCNEKLQQLFIELTLKSEQEEYEAEGIAWEPVQYFNNKIICDLVEEKFKGIISILDEECLRPGEATDLTFLEKLEDTVKHHPHFLTHKLADQRTRKSLGRGEFRLLHYAGEVTYSVTGFLDKNNDLLFRNLKETMCSSKNPIMSQCFDRSELSDKKRPETVATQFKMSLLQLVEILQSKEPAYVRCIKPNDAKQPGRFDEVLIRHQVKYLGLLENLRVRRAGFAYRRKYEAFLQRYKSLCPETWPTWAGRPQDGVAVLVRHLGYKPEEYKMGRTKIFIRFPKTLFATEDALEVRRQSLATKIQAAWRGFHWRQKFLRVKRSAICIQSWWRGTLGRRKAAKRKWAAQTIRRLIRGFVLRHAPRCPENAFFLDHVRTSFLLNLRRQLPQNVLDTSWPTPPPALREASELLRELCIKNMVWKYCRSISPEWKQQLQQKAVASEIFKGKKDNYPQSVPRLFISTRLGTDEISPRVLQALGSEPIQYAVPVVKYDRKGYKPRSRQLLLTPNAVVIVEDAKVKQRIDYANLTGISVSSLSDSLFVLHVQRADNKQKGDVVLQSDHVIETLTKTALSANRVNSININQGSITFAGGPGRDGTIDFTPGSELLITKAKNGHLAVVAPRLNSR

SEQ ID NO: 19548 - protein, 174 aa, Homo sapiens
MSSAAADHWAWLLVLSFVFGCNVLRILLPSFSSFMSRVLQKDAEQESQMRAEIQDMKQELSTVNMMDEFARYARLERKINKMTDKLKTHVKARTAQLAKIKWVISVAFYVLQAALMISLIWKYYSVPVAVVPSKWITPLDRLVAFPTRVAGGVGITCWILVCNKVVAIVLHPFS

SEQ ID NO: 19549 - protein, 373 aa, Homo sapiens
MEEPEEPADSGQSLVPVYIYSPEYVSMCDSLAKIPKRASMVHSLIEAYALHKQMRIVKPKVASMEEMATFHTDAYLQHLQKVSQEGDDDHPDSIEYGLGYDCPATEGIFDYAAAIGGATITAAQCLIDGMCKVAINWSGGWHHAKKDEASGFCYLNDAVLGILRLRRKFERILYVDLDLHHGDGVEDAFSFTSKVMTVSLHKFSPGFFPGTGDVSDVGLGKGRYYSVNVPIQDGIQDEKYYQICESVLKEVYQAFNPKAVVLQLGADTIAGDPMCSFNMTPVGIGKCLKYILQWQLATLILGGGGYNLANTARCWTYLTGVILGKTLSSEIPDHEFFTAYGPDYVLEITPSCRPDRNEPHRIQQILNYIKAIY

SEQ ID NO: 19550 - protein, 556 aa, Homo sapiens
MRVLGGRCGALLACLLLVLPVSEANFLSKQQASQVLVRKRRANSLLEETKQGNLERECIEELCNKEEAREVFENDPETDYFYPKYLVCLRSFQTGLFTAARQSTNAYPDLRSCVNAIPDQCSPLPCNEDGYMSCKDGKASFTCTCKPGWQGEKCEFDINECKDPSNINGGCSQICDNTPGSYHCSCKNGFVMLSNKKDCKDVDECSLKPSICGTAVCKNIPGDFECECPEGYRYNLKSKSCEDIDECSENMCAQLCVNYPGGYTCYCDGKKGFKLAQDQKSCEVVSVCLPLNLDTKYELLYLAEQFAGVVLYLKFRLPEISRFSAEFDFRTYDSEGVILYAESIDHSAWLLIALRGGKIEVQLKNEHTSKITTGGDVINNGLWNMVSVEELEHSISIKIAKEAVMDINKPGPLFKPENGLLETKVYFAGFPRKVESELIKPINPRLDGCIRSWNLMKQGASGIKEIIQEKQNKHCLVTVEKGSYYPGSGIAQFHIDYNNVSSAEGWHVNVTLNIRPSTGTGVMLALVSGNNTVPFAVSLVDSTSEKSQMFHSVPHQ

SEQ ID NO: 19551 - protein, 165 aa, Homo sapiens
MGWDLTVKMLAGNEFQVSLSSSMSVSELKAQITQKIGVHAFQQRLAVHPSGVALQDRVPLASQGLGPGSTVLLVVDKCDEPLSILVRNNKGRSSTYEVRLTQTVAHLKQQVSGLEGVQDDLFWLTFEGKPLEDQLPLGEYGLKPLSTVFMNLRLRGGGTEPGGRS

SEQ ID NO: 19552 - protein, 355 aa, Homo sapiens
MEERTITIEIPEVLKKQLEDDCYYINRRKRLVKLPCQTNIITILESYVKHFAINAAFSANERPRHHHVMPHANMNVHYIPAEKNVDLCKEMVDGLRITFDYTLPLVLLYPYEQAQYKKVTSSKFFLPIKESATSTNRSQEELSPSPPLLNPSTPQSTESQPTTGEPATPKRRKAEPEALQSLRRSTRHSANCDRLSESSASPQPKRRQQDTSASMPKLFLHLEKKTPVHSRSSSPIPLTPSKEGSAVFAGFEGRRTNEINEVLSWKLVPDNYPPGDQPPPPSYIYGAQHLLRLFVKLPEILGKMSFSEKNLKALLKHFDLFLRFLAEYHDDFFPESAYVAACEAHYSTKNPRAIY

SEQ ID NO: 19553 - protein, 287 aa, Homo sapiens
MYCDNRNLKYLPFVPSRMKYVYFQNNQITSIQEGVFDNATGLLWIALHGNQITSDKVGRKVFSKLRHLERLYLDHNNLTRMPGPLPRSLRELHLDHNQISRVPNNALEGLENLTALYLQHNEIQEVGSSMRGLRSLILLDLSYNHLRKVPDGLPSALEQLYMEHNNVYTVPDSYFRGAPKLLYVRLSHNSLTNNGLASNTFNSSSLLELDLSYNQLQKIPPVNTNLENLYLQGNRINEFSISSFCTVVDVVNFSKLQVLRLDGNEIKRSAMPADAPLCLRLASLIEI

SEQ ID NO: 19554 - protein, 4655 aa, Homo sapiens
MDRGPAAVACTLLLALVACLAPASGQECDSAHFRCGSGHCIPADWRCDGTKDCSDDADEIGCAVVTCQQGYFKCQSEGQCIPNSWVCDQDQDCDDGSDERQDCSQSTCSSHQITCSNGQCIPSEYRCDHVRDCPDGADENDCQYPTCEQLTCDNGACYNTSQKCDWKVDCRDSSDEINCTEICLHNEFSCGNGECIPRAYVCDHDNDCQDGSDEHACNYPTCGGYQFTCPSGRCIYQNWVCDGEDDCKDNGDEDGCESGPHDVHKCSPREWSCPESGRCISIYKVCDGILDCPGREDENNTSTGKYCSMTLCSALNCQYQCHETPYGGACFCPPGYIINHNDSRTCVEFDDCQIWGICDQKCESRPGRHLCHCEEGYILERGQYCKANDSFGEASIIFSNGRDLLIGDIHGRSFRILVESQNRGVAVGVAFHYHLQRVFWTDTVQNKVFSVDINGLNIQEVLNVSVETPENLAVDWVNNKIYLVETKVNRIDMVNLDGSYRVTLITENLGHPRGIAVDPTVGYLFFSDWESLSGEPKLERAFMDGSNRKDLVKTKLGWPAGVTLDMISKRVYWVDSRFDYIETVTYDGIQRKTVVHGGSLIPHPFGVSLFEGQVFFTDWTKMAVLKANKFTETNPQVYYQASLRPYGVTVYHSLRQPYATNPCKDNNGGCEQVCVLSHRTDNDGLGFRCKCTFGFQLDTDERHCIAVQNFLIFSSQVAIRGIPFTLSTQEDVMVPVSGNPSFFVGIDFDAQDSTIFFSDMSKHMIFKQKIDGTGREILAANRVENVESLAFDWISKNLYWTDSHYKSISVMRLADKTRRTVVQYLNNPRSVVVHPFAGYLFFTDWFRPAKIMRAWSDGSHLLPVINTTLGWPNGLAIDWAASRLYWVDAYFDKIEHSTFDGLDRRRLGHIEQMTHPFGLAIFGEHLFFTDWRLGAIIRVRKADGGEMTVIRSGIAYILHLKSYDVNIQTGSNACNQPTHPNGDCSHFCFPVPNFQRVCGCPYGMRLASNHLTCEGDPTNEPPTEQCGLFSFPCKNGRCVPNYYLCDGVDDCHDNSDEQLCGTLNNTCSSSAFTCGHGECIPAHWRCDKRNDCVDGSDEHNCPTHAPASCLDTQYTCDNHQCISKNWVCDTDNDCGDGSDEKNCNSTETCQPSQFNCPNHRCIDLSFVCDGDKDCVDGSDEVGCVLNCTASQFKCASGDKCIGVTNRCDGVFDCSDNSDEAGCPTRPPGMCHSDEFQCQEDGICIPNFWECDGHPDCLYGSDEHNACVPKTCPSSYFHCDNGNCIHRAWLCDRDNDCGDMSDEKDCPTQPFRCPSWQWQCLGHNICVNLSVVCDGIFDCPNGTDESPLCNGNSCSDFNGGCTHECVQEPFGAKCLCPLGFLLANDSKTCEDIDECDILGSCSQHCYNMRGSFRCSCDTGYMLESDGRTCKVTASESLLLLVASQNKIIADSVTSQVHNIYSLVENGSYIVAVDFDSISGRIFWSDATQGKTWSAFQNGTDRRVVFDSSIILTETIAIDWVGRNLYWTDYALETIEVSKIDGSHRTVLISKNLTNPRGLALDPRMNEHLLFWSDWGHHPRIERASMDGSMRTVIVQDKIFWPCGLTIDYPNRLLYFMDSYLDYMDFCDYNGHHRRQVIASDLIIRHPYALTLFEDSVYWTDRATRRVMRANKWHGGNQSVVMYNIQWPLGIVAVHPSKQPNSVNPCAFSRCSHLCLLSSQGPHFYSCVCPSGWSLSPDLLNCLRDDQPFLITVRQHIIFGISLNPEVKSNDAMVPIAGIQNGLDVEFDDAEQYIYWVENPGEIHRVKTDGTNRTVFASISMVGPSMNLALDWISRNLYSTNPRTQSIEVLTLHGDIRYRKTLIANDGTALGVGFPIGITVDPARGKLYWSDQGTDSGVPAKIASANMDGTSVKTLFTGNLEHLECVTLDIEEQKLYWAVTGRGVIERGNVDGTDRMILVHQLSHPWGIAVHDSFLYYTDEQYEVIERVDKATGANKIVLRDNVPNLRGLQVYHRRNAAESSNGCSNNMNACQQICLPVPGGLFSCACATGFKLNPDNRSCSPYNSFIVVSMLSAIRGFSLELSDHSETMVPVAGQGRNALHVDVDVSSGFIYWCDFSSSVASDNAIRRIKPDGSSLMNIVTHGIGENGVRGIAVDWVAGNLYFTNAFVSETLIEVLRINTTYRRVLLKVTVDMPRHIVVDPKNRYLFWADYGQRPKIERSFLDCTNRTVLVSEGIVTPRGLAVDRSDGYVYWVDDSLDIIARIRINGENSEVIRYGSRYPTPYGITVFENSIIWVDRNLKKIFQASKEPENTEPPTVIRDNINWLRDVTIFDKQVQPRSPAEVNNNPCLENNGGCSHLCFALPGLHTPKCDCAFGTLQSDGKNCAISTENFLIFALSNSLRSLHLDPENHSPPFQTINVERTVMSLDYDSVSDRIYFTQNLASGVGQISYATLSSGIHTPTVIASGIGTADGIAFDWITRRIYYSDYLNQMINSMAEDGSNRTVIARVPKPRAIVLDPCQGYLYWADWDTHAKIERATLGGNFRVPIVNSSLVMPSGLTLDYEEDLLYWVDASLQRIERSTLTGVDREVIVNAAVHAFGLTLYGQYIYWTDLYTQRIYRANKYDGSGQIAMTTNLLSQPRGINTVVKNQKQQCNNPCEQFNGGCSHICAPGPNGAECQCPHEGNWYLANNRKHCIVDNGERCGASSFTCSNGRCISEEWKCDNDNDCGDGSDEMESVCALHTCSPTAFTCANGRCVQYSYRCDYYNDCGDGSDEAGCLFRDCNATTEFMCNNRRCIPREFICNGVDNCHDNNTSDEKNCPDRTCQSGYTKCHNSNICIPRVYLCDGDNDCGDNSDENPTYCTTHTCSSSEFQCASGRCIPQHWYCDQETDCFDASDEPASCGHSERTCLADEFKCDGGRCIPSEWICDGDNDCGDMSDEDKRHQCQNQNCSDSEFLCVNDRPPDRRCIPQSWVCDGDVDCTDGYDENQNCTRRTCSENEFTCGYGLCIPKIFRCDRHNDCGDYSDERGCLYQTCQQNQFTCQNGRCISKTFVCDEDNDCGDGSDELMHLCHTPEPTCPPHEFKCDNGRCIEMMKLCNHLDDCLDNSDEKGCGINECHDPSISGCDHNCTDTLTSFYCSCRPGYKLMSDKRTCVDIDECTEMPFVCSQKCENVIGSYICKCAPGYLREPDGKTCRQNSNIEPYLIFSNRYYLRNLTIDGYFYSLILEGLDNVVALDFDRVEKRLYWIDTQRQVIERMFLNKTNKETIINHRLPAAESLAVDWVSRKLYWLDARLDGLFVSDLNGGHRRMLAQHCVDANNTFCFDNPRGLALHPQYGYLYWADWGHRAYIGRVGMDGTNKSVIISTKLEWPNGITIDYTNDLLYWADAHLGYIEYSDLEGHHRHTVYDGALPHPFAITIFEDTIYWTDWNTRTVEKGNKYDGSNRQTLVNTTHRPFDIHVYHPYRQPIVSNPCGTNNGGCSHLCLIKPGGKGFTCECPDDFRTLQLSGSTYCMPMCSSTQFLCANNEKCIPIWWKCDGQKDCSDGSDELALCPQRFCRLGQFQCSDGNCTSPQTLCNAHQNCPDGSDEDRLLCENHHCDSNEWQCANKRCIPESWQCDTFNDCEDNSDEDSSHCASRTCRPGQFRCANGRCIPQAWKCDVDNDCGDHSDEPIEECMSSAHLCDNFTEFSCKTNYRCIPKWAVCNGVDDCRDNSDEQGCEERTCHPVGDFRCKNHHCIPLRWQCDGQNDCGDNSDEENCAPRECTESEFRCVNQQCIPSRWICDHYNDCGDNSDERDCEMRTCHPEYFQCTSGHCVHSELKCDGSADCLDASDEADCPTRFPDGAYCQATMFECKNHVCIPPYWKCDGDDDCGDGSDEELHLCLDVPCNSPNRFRCDNNRCIYSHEVCNGVDDCGDGTDETEEHCRKPTPKPCTEYEYKCGNGHCIPHDNVCDDADDCGDWSDELGCNKGKERTCAENICEQNCTQLNEGGFICSCTAGFETNVFDRTSCLDINECEQFGTCPQHCRNTKGSYECVCADGFTSMSDRPGKRCAAEGSSPLLLLPDNVRIRKYNLSSERFSEYLQDEEYIQAVDYDWDPKDIGLSVVYYTVRGEGSRFGAIKRAYIPNFESGRNNLVQEVDLKLKYVMQPDGIAVDWVGRHIYWSDVKNKRIEVAKLDGRYRKWLISTDLDQPAAIAVNPKLGLMFWTDWGKEPKIESAWMNGEDRNILVFEDLGWPTGLSIDYLNNDRIYWSDFKEDVIETIKYDGTDRRVIAKEAMNPYSLDIFEDQLYWISKEKGEVWKQNKFGQGKKEKTLVVNPWLTQVRIFHQLRYNKSVPNLCKQICSHLCLLRPGGYSCACPQGSSFIEGSTTECDAAIELPINLPPPCRCMHGGNCYFDETDLPKCKCPSGYTGKYCEMAFSKGISPGTTAVAVLLTILLIVVIGALAIAGFFHYRRTGSLLPALPKLPSLSSLVKPSENGNGVTFRSGADLNMDIGVSGFGPETAIDRSMAMSEDFVMEMGKQPIIFENPMYSARDSAVKVVQPIQVTVSENVDNKNYGSPINPSEIVPETNPTSPAADGTQVTKWNLFKRKSKQTTNFENPIYAQMENEQKESVAATPPPSPSLPAKPKPPSRRDPTPTYSATEDTFKDTANLVKEDSEV

SEQ ID NO: 19555 - protein, 1117 aa, Homo sapiens
MVLAGPLAVSLLLPSLTLLVSHLSSSQDVSSEPSSEQQLCALSKHPTVAFEDLQPWVSNFTYPGARDFSQLALDPSGNQLIVGARNYLFRLSLANVSLLQATEWASSEDTRRSCQSKGKTEWCEREISSIAPGELCCLLLSFLPQEECQNYVRVLIVAGRKVFMCGTNAFSPMCTSRQVGNLSRTIEKINGVARCPYDPRHNSTAVISSQGELYAATVIDFSGRDPAIYRSLGSGPPLRTAQYNSKWLNEPNFVAAYDIGLFAYFFLRENAVEHDCGRTVYSRVARVCKNDVGGRFLLEDTWTTFMKARLNCSRPGEVPFYYNELQSAFHLPEQDLIYGVFTTNVNSIAASAVCAFNLSAISQAFNGPFRYQENPRAAWLPIANPIPNFQCGTLPETGPNENLTERSLQDAQRLFLMSEAVQPVTPEPCVTQDSVRFSHLVVDLVQAKDTLYHVLYIGTESGTILKALSTASRSLHGCYLEELHVLPPGRREPLRSLRILHSARALFVGLRDGVLRVPLERCAAYRSQGACLGARDPYCGWDGKQQRCSTLEDSSNMSLWTQNITACPVRNVTRDGGFGPWSPWQPCEHLDGDNSGSCLCRARSCDSPRPRCGGLDCLGPAIHIANCSRNGAWTPWSSWALCSTSCGIGFQVRQRSCSNPAPRHGGRICVGKSREERFCNENTPCPVPIFWASWGSWSKCSSNCGGGMQSRRRACENGNSCLGCGVEFKTCNPEGCPEVRRNTPWTPWLPVNVTQGGARQEQRFRFTCRAPLADPHGLQFGRRRTETRTCPADGSGSCDTDALVEVLLRSGSTSPHTVSGGWAAWGPWSSCSRDCELGFRVRKRTCTNPEPRNGGLPCVGDAAEYQDCNPQACPVRGAWSCWTSWSPCSASCGGGHYQRTRSCTSPAPSPGEDICLGLHTEEALCATQACPEGWSPWSEWSKCTDDGAQSRSRHCEELLPGSSACAGNSSQSRPCPYSEIPVILPASSMEEATDCAGFNLIHLVATGISCFLGSGLLTLAVYLSCQHCQRQSQESTLVHPATPNHLHYKGGGTPKNEKYTPMEFKTLNKNNLIPDDRANFYPLQQTNVYTTTYYPSPLNKHSFRPEASPGQRCFPNS

SEQ ID NO: 19556 - protein, 205 aa, Homo sapiens
MWLLVSVILISRISSVGGEGLCFFPFVENGHSESSGQTHLEGDTVQIICNTGYRLQNNENNISCVERGWSTPPKCRSTISAEKCGPPPPIDNGDITSFLLSVYAPGSSVEYQCQNLYQLEGNNQITCRNGQWSEPPKCLDPCVISQEIMEKYNIKLKWTNQQKLYSRTGDIVEFVCKSGYHPTKSHSFRAMCQNGKLVYPSCEEK

SEQ ID NO: 19557 - protein, 34 aa, Homo sapiens
MAQFVRNLVEKTPALVNAAVTYSKPRLATFWKLC

SEQ ID NO: 19558 - protein, 216 aa, Homo sapiens
MEGAPPGSLALRLLLFVALPASGWLTTGAPEPPPLSGAPQDGIRINVTTLKDDGDISKQQVVLNITYESGQVYVNDLPVNSGVTRISCQTLIVKNENLENLEEKEYFGIVSVRILVHEWPMTSGSSLQLIVIQEEVVEIDGKQVQQKDVTEIDILVKNRGVLRHSNYTLPLEESMLYSISRDSDILFTLPNLSKKEKVLVHCKPLASILSGMWKPL

SEQ ID NO: 19559 - protein, 1366 aa, Homo sapiens
MKSGSGGGSPTSLWGLLFLSAALSLWPTSGEICGPGIDIRNDYQQLKRLENCTVIEGYLHILLISKAEDYRSYRFPKLTVITEYLLLFRVAGLESLGDLFPNLTVIRGWKLFYNYALVIFEMTNLKDIGLYNLRNITRGAIRIEKNADLCYLSTVDWSLILDAVSNNYIVGNKPPKECGDLCPGTMEEKPMCEKTTINNEYNYRCWTTNRCQKMCPSTCGKRACTENNECCHPECLGSCSAPDNDTACVACRHYYYAGVCVPACPPNTYRFEGWRCVDRDFCANILSAESSDSEGFVIHDGECMQECPSGFIRNGSQSMYCIPCEGPCPKVCEEEKKTKTIDSVTSAQMLQGCTIFKGNLLINIRRGNNIASELENFMGLIEVVTGYVKIRHSHALVSLSFLKNLRLILGEEQLEGNYSFYVLDNQNLQQLWDWDHRNLTIKAGKMYFAFNPKLCVSEIYRMEEVTGTKGRQSKGDINTRNNGERASCESDVLHFTSTTTSKNRIIITWHRYRPPDYRDLISFTVYYKEAPFKNVTEYDGQDACGSNSWNMVDVDLPPNKDVEPGILLHGLKPWTQYAVYVKAVTLTMVENDHIRGAKSEILYIRTNASVPSIPLDVLSASNSSSQLIVKWNPPSLPNGNLSYYIVRWQRQPQDGYLYRHNYCSKDKIPIRKYADGTIDIEEVTENPKTEVCGGEKGPCCACPKTEAEKQAEKEEAEYRKVFENFLHNSIFVPRPERKRRDVMQVANTTMSSRSRNTTAADTYNITDPEELETEYPFFESRVDNKERTVISNLRPFTLYRIDIHSCNHEAEKLGCSASNFVFARTMPAEGADDIPGPVTWEPRPENSIFLKWPEPENPNGLILMYEIKYGSQVEDQRECVSRQEYRKYGGAKLNRLNPGNYTARIQATSLSGNGSWTDPVFFYVQAKRYENFIHLIIALPVAVLLIVGGLVIMLYVFHRKRNNSRLGNGVLYASVNPEYFSAADVYVPDEWEVAREKITMSRELGQGSFGMVYEGVAKGVVKDEPETRVAIKTVNEAASMRERIEFLNEASVMKEFNCHHVVRLLGVVSQGQPTLVIMELMTRGDLKSYLRSLRPEMENNPVLAPPSLSKMIQMAGEIADGMAYLNANKFVHRDLAARNCMVAEDFTVKIGDFGMTRDIYETDYYRKGGKGLLPVRWMSPESLKDGVFTTYSDVWSFGVVLWEIATLAEQPYQGLSNEQVLRFVMEGGLLDKPDNCPDMLFELMRMCWQYNPKMRPSFLEIISSIKEEMEPGFREVSFYYSEENKLPEPEELDLEPENMESVPLDPSASSSSLPLPDRHSGHKAENGPGPGVLVLRASFDERQPYAHMNGGRKNERALPLPQSSTC

SEQ ID NO: 19560 - protein, 322 aa, Homo sapiens
MSKTLGSGACGEVKLAFERKTCKKVAIKIISKRKFAIGSAREADPALNVETEIEILKKLNHPCIIKIKNFFDAEDYYIVLELMEGGELFDKVVGNKRLKEATCKLYFYQMLLAVQYLHENGIIHRDLKPENVLLSSQEEDCLIKITDFGHSKILGETSLMRTLCGTPTYLAPEVLVSVGTAGYNRAVDCWSLGVILFICLSGYPPFSEHRTQVSLKDQITSGKYNFIPEVWAEVSEKALDLVKKLLVVDPKARFTTEEALRHPWLQDEDMKRKFQDLLSEENESTALPQVLAQPSTSRKRPREGEAEGAETTKRPAVCAAVL

SEQ ID NO: 19561 - protein, 675 aa, Homo sapiens
MMQESGTETKSNGSAIQNGSGGSNHLLECGGLREGRSNGETPAVDIGAADLAHAQQQQQQALQVARQLLLQQQQQQQVSGLKSPKRNDKQPALQVPVSVAMMTPQVITPQQMQQILQQQVLSPQQLQVLLQQQQALMLQQQLQEFYKKQQEQLQLQLLQQQHAGKQPKEQQQVATQQLAFQQQLLQMQQLQQQHLLSLQRQGLLTIQPGQPALPLQPLAQGMIPTELQQLWKEVTSAHTAEETTGNNHSSLDLTTTCVSSSAPSKTSLIMNPHASTNGQLSVHTPKRESLSHEEHPHSHPLYGHGVCKWPGCEAVCEDFQSFLKHLNSEHALDDRSTAQCRVQMQVVQQLELQLAKDKERLQAMMTHLHVKSTEPKAAPQPLNLVSSVTLSKSASEASPQSLPHTPTTPTAPLTPVTQGPSVITTTSMHTVGPIRRRYSDKYNVPISSDIAQNQEFYKNAEVRPPFTYASLIRQAILESPEKQLTLNEIYNWFTRMFAYFRRNAATWKNAVRHNLSLHKCFVRVENVKGAVWTVDEVEFQKRRPQKISGNPSLIKNMQSSHAYCTPLNAALQASMAENSIPLYTTASMGNPTLGNLASAIREELNGAMEHTNSNESDSSPGRSPMQAVHPVHVKEEPLDPEEAEGPLSLVTTANHSPDFDHDRDYEDEPVNEDME

SEQ ID NO: 19562 - protein, 183 aa, Homo sapiens
MASRAGPRAAGTDGSDFQHRERVAMHYQMSVTLKYEIKKLIYVHLVIWLLLVAKMSVGHLRLLSHDQVAMPYQWEYPYLLSILPSLLGLLSFPRNNISYLVLSMISMGLFSIAPLIYGSMEMFPAAQQLYRHGKAYRFLFGFSAVSIMYLVLVLAVQVHAWQLYYSKKLLDSWFTSTQEKKHK

SEQ ID NO: 19563 - protein, 279 aa, Homo sapiens
MAPRRVRSFLRGLPALLLLLLFLGPWPAASHGGKYSREKNQPKPSPKRESGEEFRMEKLNQLWEKAQRLHLPPVRLAELHADLKIQERDELAWKKLKLDGLDEDGEKEARLIRNLNVILAKYGLDGKKDARQVTSNSLSGTQEDGLDDPRLEKLWHKAKTSGKFSGEELDKLWREFLHHKEKVHEYNVLLETLSRTEEIHENVISPSDLSDIKGSVLHSRHTELKEKLRSINQGLDRLRRVSHQGYSTEAGSRSRLGLFGSSQEPECLTFTSTTSCWRP

SEQ ID NO: 19564 - protein, 767 aa, Homo sapiens
MATEGGKTSEPENNNKKPKTSGSQDSQPSPLALLAATCSKIGTPGENQATGQQQIIIDPSQGLVQLQNQPQQLELVTTQLAGNAWQLVASTPPASKENNVSQPASSSSSSSSSNNGSASPTKTKSGNSSTPGQFQVIQVQNPSGSVQYQVIPQLQTVEGQQIQINPTSSSSLQDLQGQIQLISAGNNQAILTAANRTASGNILAQNLANQTVPVQIRPGVSIPLQLQTLPGTQAQVVTTLPINIGGVTLALPVINNVAAGGGTGQVGQPAATADSGTSNGNQLVSTPTNTTTSASTMPESPSSSTTCTTTASTSLTSSDTLVSSADTGQYASTSASSSERTIEESQTPAATESEAQSSSQLQPNGMQNAQDQSNSLQQVQIVGQPILQQIQIQQPQQQIIQAIPPQSFQLQSGQTIQTIQQQPLQNVQLQAVNPTQVLIRAPTLTPSGQISWQTVQVQNIQSLSNLQVQNAGLSQQLTITPVSSSGGTTLAQIAPVAVAGAPITLNTAQLASVPNLQTVSVANLGAAGVQVQGVPVTITSVAGQQQGQDGVKVQQATIAPVTVAVGGIANATIGAVSPDQLTQVHLQQGQQTSDQEVQPGKRLRRVACSCPNCREGEGRGSNEPGKKKQHICHIEGCGKVYGKTSHLRAHLRWHTGERPFICNWMFCGKRFTRSDELQRHRRTHTGEKRFECPECSKRFMRSDHLSKHVKTHQNKKGGGTALAIVTSGELDSSVTEVLGSPRIVTVAAISQDSNPATPNVSTNMEEF

SEQ ID NO: 19565 - protein, 1153 aa, Homo sapiens
MALRVLLLTALTLCHGFNLDTENAMTFQENARGFGQSVVQLQGSRVVVGAPQEIVAANQRGSLYQCDYSTGSCEPIRLQVPVEAVNMSLGLSLAATTSPPQLLACGPTVHQTCSENTYVKGLCFLFGSNLRQQPQKFPEALRGCPQEDSDIAFLIDGSGSIIPHDFRRMKEFVSTVMEQLKKSKTLFSLMQYSEEFRIHFTFKEFQNNPNPRSLVKPITQLLGRTHTATGIRKVVRELFNITNGARKNAFKILVVITDGEKFGDPLGYEDVIPEADREGVIRYVIGVGDAFRSEKSRQELNTIASKPPRDHVFQVNNFEALKTIQNQLREKIFAIEGTQTGSSSSFEHEMSQEGFSAAITSNGPLLSTVGSYDWAGGVFLYTSKEKSTFINMTRVDSDMNDAYLGYAAAIILRNRVQSLVLGAPRYQHIGLVAMFRQNTGMWESNANVKGTQIGAYFGASLCSVDVDSNGSTDLVLIGAPHYYEQTRGGQVSVCPLPRGQRARWQCDAVLYGEQGQPWGRFGAALTVLGDVNGDKLTDVAIGAPGEEDNRGAVYLFHGTSGSGISPSHSQRIAGSKLSPRLQYFGQSLSGGQDLTMDGLVDLTVGAQGHVLLLRSQPVLRVKAIMEFNPREVARNVFECNDQVVKGKEAGEVRVCLHVQKSTRDRLREGQIQSVVTYDLALDSGRPHSRAVFNETKNSTRRQTQVLGLTQTCETLKLQLPNCIEDPVSPIVLRLNFSLVGTPLSAFGNLRPVLAEDAQRLFTALFPFEKNCGNDNICQDDLSITFSFMSLDCLVVGGPREFNVTVTVRNDGEDSYRTQVTFFFPLDLSYRKVSTLQNQRSQRSWRLACESASSTEVSGALKSTSCSINHPIFPENSEVTFNITFDVDSKASLGNKLLLKANVTSENNMPRTNKTEFQLELPVKYAVYMVVTSHGVSTKYLNFTASENTSRVMQHQYQVSNLGQRSLPISLVFLVPVRLNQTVIWDRPQVTFSENLSSTCHTKERLPSHSDFLAELRKAPVVNCSIAVCQRIQCDIPFFGIQEEFNATLKGNLSFDWYIKTSHNHLLIVSTAEILFNDSVFTLLPGQGAFVRSQTETKVEPFEVPNPLPLIVGSSVGGLLLLALITAALYKLGFFKRQYKDMMSEGGPPGAEPQ

SEQ ID NO: 19566 - protein, 195 aa, Homo sapiens
MLEKFCNSTFWNSSFLDSPEADLPLCFEQTVLVWIPLGYLWLLAPWQLLHVYKSRTKRSSTTKLYLAKQVFVGFLLILAAIELALVLTEDSGQATVPAVRYTNPSLYLGTWLLVLLIQYSRQWCVQKNSWFLSLFWILSILCGTFQFQTLIRTLLQGDNSNLAYSCLFFISYGFQILILIFSAFSENNESSNVRF

SEQ ID NO: 19567 - protein, 216 aa, Homo sapiens
MWLLVSVILISRISSVGGEEEGWSPTPKCLRLCFFPFVENGHSESSGQTHLEGDTVQIICNTGYRLQNNENNISCVERGWSTPPKCRSTISAEKCGPPPPIDNGDITSFLLSVYAPGSSVEYQCQNLYQLEGNNQITCRNGQWSEPPKCLDPCVISQEIMEKYNIKLKWTNQQKLYSRTGDIVEFVCKSGYHPTKSHSFRAMCQNGKLVYPSCEEK

SEQ ID NO: 19568 - protein, 504 aa, Homo sapiens
MISAVSSPWLTQLSHFCDVAAFTASSLSSLGAAGGFPGAASPGADPYGPREPPPPPPRYDPCAAAAPGAPGPPPPPHAYPFAPAAGAATSAAAEPEGPGASCAAAAKAPVKKNAKVAGVSVQLEMKALWDEFNQLGTEMIVTKAGRRMFPTFQVKLFGMDPMADYMLLMDFVPVDDKRYRYAFHSSSWLVAGKADPATPGRVHYHPDSPAKGAQWMKQIVSFDKLKLTNNLLDDNGHIILNSMHRYQPRFHVVYVDPRKDSEKYAEENFKTFVFEETRFTAVTAYQNHRITQLKIASNPFAKGFRDCDPEDWPRNHRPGALPLMSAFARSRNPVASPTQPSGTEKDAAEARREFQRDAGGPAVLGDPAHPPQLLARVLSPSLPGAGGAGGLVPLPGAPGGRPSPPNPELRLEAPGASEPLHHHPYKYPAAAYDHYLGAKSRPAPYPLPGLRGHGYHPHAHPHHHHHPVSPAAAAAAAAAAAAAAANMYSSAGAAPPGSYDYCPR

SEQ ID NO: 19569 - protein, 418 aa, Homo sapiens
MPMLLPHPHQHFLKGLLRAPFRCYHFIFHSSTHLGSGIPCAQPFNSLGLHCTKWMLLSDGLKRKLCVQTTLKDHTEGLSDKEQRFVDKLYTGLIQGQRACLAEAITLVESTHSRKKELAQVLLQKVLLYHREQEQSNKGKPLAFRVGLSGPPGAGKSTFIEYFGKMLTERGHKLSVLAVDPSSCTSGGSLLGDKTRMTELSRDMNAYIRPSPTRGTLGGVTRTTNEAILLCEGAGYDIILIETVGVGQSEFAVADMVDMFVLLLPPAGGDELQGIKRGIIEMADLVAVTKSDGDLIVPARRIQAEYVSALKLLRKRSQVWKPKVIRISARSGEGISEMWDKMKDFQDLMLASGELTAKRRKQQKVWMWNLIQESVLEHFRTHPTVREQIPLLEQKVLIGALSPGLAADFLLKAFKSRD

SEQ ID NO: 19570 - protein, 91 aa, Homo sapiens
MPVPWFLLSLALGRSPVVLSLERLVGPQDATHCSPGLSCRLWGATKFWAWNSFSSHPLLHTQTVTYSACLGTSCLLRAPCWRLRTCRQSWC

SEQ ID NO: 19571 - protein, 288 aa, Homo sapiens
MRLLPRLLLLLLLVFPATVLFRGGPRGLLAVAQDLTEDEETVEDSIIEDEDDEAEVEEDEPTDLVEDKEEEDVSGEPEASPSADTTILFVKGEDFPANNIVKFLVGFTNKGTEDFIVESLDASFRYPQDYQFYIQNFTALPLNTVVPPQRQATFEYSFIPAEPMGGRPFGLVINLNYKDLNGNVFQDAVFNQTVTVIEREDGLDGETIFMYMFLAGLGLLVIVGLHQLLESRKRKRPIQKVEMGTSSQNDVDMSWIPQETLNQINKASPRRLPRKRAQKRSVGSDDID

SEQ ID NO: 19572 - protein, 734 aa, Homo sapiens
MTKFQEAVTFKDVAVAFTEEELGLLDSAQRKLYRDVMLENFRNLVSVGHQSFKPDMISQLEREEKLWMKELQTQRGDRNQNEMATLHKAGLRCFSLGELSCWQIKRHIASKLARSQDSMINIEGKSSQFPKHHDSPCQVGAGESIQASVDDNCLVNHIGDHSSIIENQEFPTGKVPNSWSKIYLNETQNYQRSCKQTQMKNKLCIFAPYVDIFSCISHHHDDNIVHKRDKVHSNSDCGKDTLKVSPLTQRSIHTGQKTYQGNECEEAFNDSSSLELHKQVHLGKKSPACSTHEKDTSYSSGIPVQQSVRTGKKRYWCHECGKGFSQSSNLQTHQRVHTGEKPYTCHECGKSFNQSSHLYAHLPIHTGEKPYRCDSCGKGFSRSTDLNIHCRVHTGEKPYKCEVCGKGFTQRSHLQAHERIHTGEKPYKCGDCGKRFSCSSNLHTHQRVHTEEKPYKCDECGKCFSLSFNLHSHQRVHTGEKPYKCEECGKGFSSASSFQSHQRVHTGEKPFRCNVCGKGFSQSSYFQAHQRVHTGEKPYKCEVCGKRFNWSLNLHNHQRVHTGEKPYKCEECGKGFSQASNLQAHQSVHTGEKPFKCDACQKRFSQASHLQAHQRVHTGEKPYKCDTCGKAFSQRSNLQVHQIIHTGEKPFKCEECGKEFSWSAGLSAHQRVHTGEKPYTCQQCGKGFSQASHFHTHQRVHTGERPYICDVCCKGFSQRSHLIYHQRVHTGGNL

SEQ ID NO: 19573 - protein, 199 aa, Homo sapiens
MQLRNPELHLGCALALRFLALVSWDIPGARALDNGLARTPTMGWLHWERFMCNLDCQEEPDSCISEKLFMEMAELMVSEGWKDAGYEYLCIDDCWMAPQRDSEGRLQADPQRFPHGIRQLANYVHSKGLKLGIYADVGNKTCAGFPGSFGYYDIDAQTFADWGVDLLKFDGCYCDSLENLADAQLYRNPTVLQSLAKFC

SEQ ID NO: 19574 - protein, 2266 aa, Homo sapiens
MRDLRAQVTSGLLPFPEVTLQALGEDEITLESVLRGKFAAGKNGLACLACGPQLEVVNSITGERLSAYRFSGVNEQPPVVLAVKEFSWQKRTGLLIGLEETEGSVLCLYDLGISKVVKAVVLPGRVTAIEPIINHGGASASTQHLHPSLRWLFGVAAVVTDVGQILLVDLCLDDLSCNQNEVEASDLEVLTGIPAEVPHIRESVMRQGRHLCFQLVSPTGTAVSTLSYISRTNQLAVGFSDGYLALWNMKSMKREYYIQLESGQVPVYAVTFQEPENDPRNCCYLWAVQSTQDSEGDVLSLHLLQLAFGNRKCLASGQILYEGLEYCEERYTLDLTGGMFPLRGQTSNTKLLGCQSIEKFRSHGDREEGVNEALSPDTSVSVFTWQVNIYGQGKPSVYLGLFDINRWYHAQMPDSLRSGEYLHNCSYFALWSLESVVSRTSPHGILDILVHERSLNRGVPPSYPPPEQFFNPSTYNFDATCLLNSGVVHLTCTGFQKETLTFLKKSGPSLNELIPDGYNRCLVAGLLSPRFVDVQPSSLSQEEQLEAILSAAIQTSSLGLLTGYIRRWITEEQPNSATNLRFVLEWTWNKVVLTKEEFDRLCVPLFDGSCHFMDPQTIQSIQQCYLLLSNLNIVLSCFASEAREITERGLIDLSNKFVVSHLICQYAQVVLWFSHSGLLPEGIDDSVQLSRLCYNYPVIQNYYTSRRQKFERLSRGKWNPDCLMIDGLVSQLGERIEKLWKRDEGGTGKYPPASLHAVLDMYLLDGVTEAAKHSITIYLLLDIMYSFPNKTDTPIESFPTVFAISWGQVKLIQGFWLIDHNDYESGLDLLFHPATAKPLSWQHSKIIQAFMSQGEHRQALRYIQTMKPTVSSGNDVILHLTVLLFNRCMVEAWNFLRQHCNRLNIEELLKHMYEVCQEMGLMEDLLKLPFTDTEQECLVKFLQSSASVQNHEFLLVHHLQRANYVPALKLNQTLKINVMNDRDPRLRERSLARNSILDQYGKILPRVHRKLAIERAKPYHLSTSSVFRLVSRPKPLSAVPKQVVTGTVLTRSVFINNVLSKIGEVWASKEPINSTTPFNSSKIEEPSPIVYSLPAPELPEAFFGTPISKASQKISRLLDLVVQPVPRPSQCSEFIQQSSMKSPLYLVSRSLPSSSQLKGSPQAISRASELHLLETPLVVKKAKSLAMSVTTSGFSEFTPQSILRSTLRSTPLASPSPSPGRSPQRLKETRISFVEEDVHPKWIPGAADDSKLEVFTTPKKCAVPVETEWLKSKDRTTSFFLNSPEKEHQEMDEGSQSLEKLDVSKGNSSVSITSDETTLEYQDAPSPEDLEETVFTASKPKSSSTALTTNVTEQTEKDGDKDVFASEVTPSDLQKQMGNLEDAETKDLLVAAEAFSELNHLSPVQGTEASLCAPSVYEGKIFTQKSKVPVLDEGLTSVETYTPAIRANDNKSMADVLGDGGNSSLTISEGPIVSERRLNQEVALNLKEDHEVEVGVLKESVDLPEEKLPISDSPPDTQEIHVIEQEKLEAQDSGEEARNLSFNELYPSGTLKLQYNFDTIDQQFCDLADNKDTAECDIAEVDGELFVAQSNFTLILEGEEGEVEPGDFASSDVLPKAANTATEEKLVCSGENDNHGQIANLPSAVTSDQKSQKVDTLPYVPEPIKVAIAENLLDVIKDTRSKEITSDTMEQSIHETIPLVSQNIMCPTKLVKSAFKTAQETSTMTMNVSQVDDVVSSKTRTRGQRIQNVNVKSAQQEASADVATPKMPGQSVRKKTRKAKEISEASENIYSDVRGLSQNQQIPQNSVTPRRGRRKKEVNQDILENTSSVEQELQITTGRESKRLKSSQLLEPAVEETTKKEVKVSSVTKRTPRRIKRSVENQESVEIINDLKVSTVTSPSRMIRKLRSTNLDASENTGNKQDDKSSDKQLRIKHVRRVRGREVSPSDVREDSNLESSQLTVQAEFDMSAIPRKRGRPRKINPSEDVGSKAVKEERSPKKKEAPSIRRRSTRNTPAKSENVDVGKPALGKSILVPNEELSMVMSSKKKLTKKTESQSQKRSLHSVSEERTDEMTHKETNEQEERLLATASFTKSSRSSRTRSSKAILLPDLSEPNNEPLFSPASEVPRKAKAKKIEVPAQLKELVSDLSSQFVISPPALRSRQKNTSNKNKLEDELKDDAQSVETLGKPKAKRIRTSKTKQASKNTEKESAWSPPPIEIRLISPLASPADGVKSKPRKTTEVTGTGLGRNRKKLSSYPKQILRRKML

SEQ ID NO: 19575 - protein, 1367 aa, Homo sapiens
MKSGSGGGSPTSLWGLLFLSAALSLWPTSGEICGPGIDIRNDYQQLKRLENCTVIEGYLHILLISKAEDYRSYRFPKLTVITEYLLLFRVAGLESLGDLFPNLTVIRGWKLFYNYALVIFEMTNLKDIGLYNLRNITRGAIRIEKNADLCYLSTVDWSLILDAVSNNYIVGNKPPKECGDLCPGTMEEKPMCEKTTINNEYNYRCWTTNRCQKMCPSTCGKRACTENNECCHPECLGSCSAPDNDTACVACRHYYYAGVCVPACPPNTYRFEGWRCVDRDFCANILSAESSDSEGFVIHDGECMQECPSGFIRNGSQSMYCIPCEGPCPKVCEEEKKTKTIDSVTSAQMLQGCTIFKGNLLINIRRGNNIASELENFMGLIEVVTGYVKIRHSHALVSLSFLKNLRLILGEEQLEGNYSFYVLDNQNLQQLWDWDHRNLTIKAGKMYFAFNPKLCVSEIYRMEEVTGTKGRQSKGDINTRNNGERASCESDVLHFTSTTTSKNRIIITWHRYRPPDYRDLISFTVYYKEAPFKNVTEYDGQDACGSNSWNMVDVDLPPNKDVEPGILLHGLKPWTQYAVYVKAVTLTMVENDHIRGAKSEILYIRTNASVPSIPLDVLSASNSSSQLIVKWNPPSLPNGNLSYYIVRWQRQPQDGYLYRHNYCSKDKIPIRKYADGTIDIEEVTENPKTEVCGGEKGPCCACPKTEAEKQAEKEEAEYRKVFENFLHNSIFVPRPERKRRDVMQVANTTMSSRSRNTTAADTYNITDPEELETEYPFFESRVDNKERTVISNLRPFTLYRIDIHSCNHEAEKLGCSASNFVFARTMPAEGADDIPGPVTWEPRPENSIFLKWPEPENPNGLILMYEIKYGSQVEDQRECVSRQEYRKYGGAKLNRLNPGNYTARIQATSLSGNGSWTDPVFFYVQAKTGYENFIHLIIALPVAVLLIVGGLVIMLYVFHRKRNNSRLGNGVLYASVNPEYFSAADVYVPDEWEVAREKITMSRELGQGSFGMVYEGVAKGVVKDEPETRVAIKTVNEAASMRERIEFLNEASVMKEFNCHHVVRLLGVVSQGQPTLVIMELMTRGDLKSYLRSLRPEMENNPVLAPPSLSKMIQMAGEIADGMAYLNANKFVHRDLAARNCMVAEDFTVKIGDFGMTRDIYETDYYRKGGKGLLPVRWMSPESLKDGVFTTYSDVWSFGVVLWEIATLAEQPYQGLSNEQVLRFVMEGGLLDKPDNCPDMLFELMRMCWQYNPKMRPSFLEIISSIKEEMEPGFREVSFYYSEENKLPEPEELDLEPENMESVPLDPSASSSSLPLPDRHSGHKAENGPGPGVLVLRASFDERQPYAHMNGGRKNERALPLPQSSTC

SEQ ID NO: 19576 - protein, 52 aa, Homo sapiens
PGGGGQTPRRPQGASFALAAAAALLFGSDMEDGPSNNASCFRRLTECFLSPK

SEQ ID NO: 19577 - protein, 146 aa, Homo sapiens
MWLLVSVILISRISSVGGEVSAEKCGPPPPIDNGDITSFLLSVYAPGSSVEYQCQNLYQLEGNNQITCRNGQWSEPPKCLDPCVISQEIMEKYNIKLKWTNQQKLYSRTGDIVEFVCKSGYHPTKSHSFRAMCQNGKLVYPSCEEK

SEQ ID NO: 19578 - protein, 169 aa, Homo sapiens
MDPARPLGLSILLLFLTEAALGDAAQEPTGNNAEICLLPLDYGPCRALLLRYYYDRYTQSCRQFLYGGCEGNANNFYTWEACDDACWRIEIPKVCRLQVSVDDQCEGSTEKYFFNLSSMTCEKFFSGGCHRNRIENRFPDEATCMGFCAPKKIPSFCYSPKDEGLCSAN

SEQ ID NO: 19579 - protein, 701 aa, Homo sapiens
MMKRQLHRMRQLAQTGSLGRTPETAEFLGEDLLQVEQRLEPAKRAAHNIHKRLQACLQGQSGADMDKRVKKLPLMALSTTMAESFKELDPDSSMGKALEMSCAIQNQLARILAEFEMTLERDVLQPLSRLSEEELPAILKHKKSLQKLVSDWNTLKSRLSQATKNSGSSQGLGGSPGSHSHTTMANKVETLKEEEEELKRKVEQCRDEYLADLYHFVTKEDSYANYFIRLLEIQADYHRRSLSSLDTALAELRENHGQADHSPSMTATHFPRVYGVSLATHLQELGREIALPIEACVMMLLSEGMKEEGLFRLAAGASVLKRLKQTMASDPHSLEEFCSDPHAVAGALKSYLRELPEPLMTFDLYDDWMRAASLKEPGARLQALQEVCSRLPPENLSNLRYLMKFLARLAEEQEVNKMTPSNIAIVLGPNLLWPPEKEGDQAQLDAASVSSIQVVGVVEALIQSADTLFPGDINFNVSGLFSAVTLQDTVSDRLASEELPSTAVPTPATTPAPAPAPAPAPAPALASAATKERTESEVPPRPASPKVTRSPPETAAPVEDMARRTKRPAPARPTMPPPQVSGSRSSPPAPPLPPGSGSPGTPQALPRRLVGSSLRAPTVPPPLPPTPPQPARRQSRRSPASPSPASPGPASPSPVSLSNPAQVDLGAATAEGGAPEAISGVPTPPAIPPQPRPRSLASETN

SEQ ID NO: 19580 - protein, 437 aa, Homo sapiens
MQLPRWWELGDPCAWTGQGRGTRRMSPATTGTFLLTVYSIFSKVHSDRNVYPSAGVLFVHVLEREYFKGEFPPYPKPGEISNDPITFNTNLMGYPDRPGWLRYIQRTPYSDGVLYGSPTAENVGKPTIIEITAYNRRTFETARHNLIINIMSAEDFPLPYQAEFFIKNMNVEEMLASEVLGDFLGAVKNVWQPERLNAINITSALDRGGRVPLPINDLKEGVYVMVGADVPFSSCLREVENPQNQLRCSQEMEPVITCDKKFRTQFYIDWCKISLVDKTKQVSTYQEVIRGEGILPDGGEYKPPSDSLKSRDYYTDFLITLAVPSAVALVLFLILAYIMCCRREGVEKRNMQTPDIQLVHHSAIQKSTKELRDMSKNREIAWPLSTLPVFHPVTGEIIPPLHTDNYDSTNMPLMQTQQNLPHQTQIPQQQTTGKWYP

SEQ ID NO: 19581 - protein, 241 aa, Homo sapiens
MDPARPLGLSILLLFLTEAALGDAAQEPTGNNAEICLLPLDYGPCRALLLRYYYDRYTQSCRQFLYGGCEGNANNFYTWEACDDACWRIEKVPKVCRLQVSVDDQCEGSTEKYFFNLSSMTCEKFFSGGCHRNRIENRFPDEATCMGFCAPKKSKYDFYVPSFCYSPKDEGLCSANVTRYYFNPRYRTCDAFTYTGCGGNDNNFVSREDCKRACAKALKKKKKMPKLRFASRIRKIRKKQF

SEQ ID NO: 19582 - protein, 250 aa, Homo sapiens
MEERTITIEIPEVLKKQLEDDCYYINRRKRLVKLPCQTNIITILESYVKHFAINAAFSANERPRHHHVMPHANMNVHYIPAEKNVDLCKEMVDGLRITFDYTLPLVLLYPYEQAQYKKVTSSKFFLPIKESATSTNRSQEELSPSPPLLNPSTPQSTESQPTTGEPATPKRRKAEPEALQSLRRSTRHSANCDRLSESSASPQPKRRQQDTSASMPKLFLHLEKSRFILGCPRPGRASVYFVFSQCQAWC

SEQ ID NO: 19583 - protein, 71 aa, Homo sapiens
MDMWTALLILQALLLPSLADGATPALRFVAVGDWGGVPNAPFHTAREMANAKEIARTVQILGADFILSLGD

SEQ ID NO: 19584 - protein, 1055 aa, Homo sapiens
MALDYLLLLLLASAVAAMEETLMDTRTATAELGWTANPASGWEEVSGYDENLNTIRTYQVCNVFEPNQNNWLLTTFINRRGAHRIYTEMRFTVRDCSSLPNVPGSCKETFNLYYYETDSVIATKKSAFWSEAPYLKVDTIAADESFSQVDFGGRLMKVNTEVRSFGPLTRNGFYLAFQDYGACMSLLSVRVFFKKCPSIVQNFAVFPETMTGAESTSLVIARGTCIPNAEEVDVPIKLYCNGDGEWMVPIGRCTCKPGYEPENSVACKACPAGTFKASQEAEGCSHCPSNSRSPAEASPICTCRTGYYRADFDPPEVACTSVPSGPRNVISIVNETSIILEWHPPRETGGRDDVTYNIICKKCRADRRSCSRCDDNVEFVPRQLGLTECRVSISSLWAHTPYTFDIQAINGVSSKSPFPPQHVSVNITTNQAAPSTVPIMHQVSATMRSITLSWPQPEQPNGIILDYEIRYYEKEHNEFNSSMARSQTNTARIDGLRPGMVYVVQVRARTVAGYGKFSGKMCFQTLTDDDYKSELREQLPLIAGSAAAGVVFVVSLVAISIVCSRKRAYSKEAVYSDKLQHYSTGRGSPGMKIYIDPFTYEDPNEAVREFAKEIDVSFVKIEEVIGAGEFGEVYKGRLKLPGKREIYVAIKTLKAGYSEKQRRDFLSEASIMGQFDHPNIIRLEGVVTKSRPVMIITEFMENGALDSFLRQNDGQFTVIQLVGMLRGIAAGMKYLAEMNYVHRDLAARNILVNSNLVCKVSDFGLSRYLQDDTSDPTYTSSLGGKIPVRWTAPEAIAYRKFTSASDVWSYGIVMWEVMSFGERPYWDMSNQDVINAIEQDYRLPPPMDCPAALHQLMLDCWQKDRNSRPRFAEIVNTLDKMIRNPASLKTVATITAVPSQPLLDRSIPDFTAFTTVDDWLSAIKMVQYRDSFLTAGFTSLQLVTQMTSEHHLGRPSEEDPEQHSFYEGPDKSVTNGNGMRTLVSWGRRGGKRTRVKGDQRLTTVECTGETGFSAEECISISEESTGPVASRQSPFLSDRSMFEMPWETKYIIIKI

SEQ ID NO: 19585 - protein, 721 aa, Homo sapiens
MAAPVVAPPGVVVSRANKRSGAGPGGSGGGGARGAEEEPPPPLQAVLVADSFDRRFFPISKDQPRVLLPLANVALIDYTLEFLTATGVQETFVFCCWKAAQIKEHLLKSKWCRPTSLNVVRIITSELYRSLGDVLRDVDAKALVRSDFLLVYGDVISNINITRALEEHRLRRKLEKNVSVMTMIFKESSPSHPTRCHEDNVVVAVDSTTNRVLHFQKTQGLRRFAFPLSLFQGSSDGVEVRYDLLDCHISICSPQVAQLFTDNFDYQTRDDFVRGLLVNEEILGNQIHMHVTAKEYGARVSNLHMYSAVCADVIRRWVYPLTPEANFTDSTTQSCTHSRHNIYRGPEVSLGHGSILEENVLLGSGTVIGSNCFITNSVIGPGCHIGDNVVLDQTYLWQGVRVAAGAQIHQSLLCDNAEVKERVTLKPRSVLTSQVVVGPNITLPEGSVISLHPPDAEEDEDDGEFSDDSGADQEKDKVKMKGYNPAEVGAAGKGYLWKAAGMNMEEEEELQQNLWGLKINMEEESESESEQSMDSEEPDSRGGSPQMDDIKVFQNEVLGTLQRGKEENISCDNLVLEINSLKYAYNISLKEVMQVLSHVVLEFPLQQMDSPLDSSRYCALLLPLLKAWSPVFRNYIKRAADHLEALAAIEDFFLEHEALGISMAKVLMAFYQLEILAEETILSWFSQRDTTDKGQQLRKNQQLQRFIQWLKEAEEESSEDD

SEQ ID NO: 19586 - protein, 539 aa, Homo sapiens
MNLERLRKRVRQYLDQQQYQSALFWADKVASLSREEPQDIYWLAQCLYLTAQYHRAAHALRSRKLDKLYEACRYLAARCHYAAKEHQQALDVLDMEEPINKRLFEKYLKDESGFKDPSSDWEMSQSSIKSSICLLRGKIYDALDNRTLATYSYKEALKLDVYCFEAFDLLTSHHMLTAQEEKELLESLPLSKLCNEEQELLRFLFENKLKKYNKPSETVIPESVDGLQENLDVVVSLAERHYYNCDFKMCYKLTSVVMEKDPFHASCLPVHIGTLVELNKANELFYLSHKLVDLYPSNPVSWFAVGCYYLMVGHKNEHARRYLSKATTLEKTYGPAWIAYGHSFAVESEHDQAMAAYFTAAQLMKGCHLPMLYIGLEYGLTNNSKLAERFFSQALSIAPEDPFVMHEVGVVAFQNGEWKTAEKWFLDALEKIKAIGNEVTVDKWEPLLNNLGHVCRKLKKYAEALDYHRQALVLIPQNASTYSAIGYIHSLMGNFENAVDYFHTALGLRRDDTFSVTMLGHCIEMYIGDSEAYIAPNWK

SEQ ID NO: 19587 - protein, 173 aa, Homo sapiens
MEKWYLMTVVVLIGLTVRWTVSLNSYSGAGKPPMFGDYEAQRHWQEITFNLPVKQWYFNSSDNNLQYWGLDYPPLTAYHSLLCAYVAKFINPDWIALHTSRGYESQAHKLFMRTTVLIADLLIYIPAVVLYCCCLKEISTKKKIANALCILLYPGLILIDYGHFQYNSVCVAS

SEQ ID NO: 19588 - protein, 135 aa, Homo sapiens
MSRVLQKDAEQESQMRAEIQDMKQELSTVNMMDEFARYARLERKINKMTDKLKTHEKCPAVSSSECHLPGPVSCDEERFLRAARVLRDPGHSVCTVRELSLWLGKQTEGPVQAQDKLDSHQGFVYCAHWEIRRKI

SEQ ID NO: 19589 - protein, 266 aa, Homo sapiens
MVKVTFNSALAQKEAKKDEPKSGEEALIIPPDAVAVDCKDPDDVVPVGQRRAWCWCMCFGLAFMLAGVILGGAYLYKYFALQPDDVYYCGIKYIKDDVILNEPSADAPAALYQTIEENIKIFEEEEVEFISVPVPEFADSDPANIVHDFNKKLTAYLDLNLDKCYVIPLNTSIVMPPRNLLELLINIKAGTYLPQSYLIHEHMVITDRIENIDHLGFFIYRLCHDKETYKLQRRETIKGIQKREASNCFAIRHFENKFAVETLICS

SEQ ID NO: 19590 - protein, 175 aa, Homo sapiens
MVIIIVLNLIFGVIIDTFADLRSEKQKKEEILKTTCFICGLERDKFDNKTVTFEEHIKEEHNMWHYLCFIVLVKVKDSTEYTGPESYVAEMIKERNLDWFPRMRAMSLVSSDSEGEQNELRNLQEKLESTMKLVTNLSGQLSELKDQMTEQRKQKQRIGLLGHPPHMNVNPQQPA

SEQ ID NO: 19591 - protein, 443 aa, Homo sapiens
MVRGRISRLSVRDVRFPTSLGGHGADAMHTDPDYSAAYVVIETDAEDGIKGCGITFTLGKGTEVVVCAVNALAHHVLNKDLKDIVGDFRGFYRQLTSDGQLRWIGPEKGVVHLATAAVLNAVWDLWAKQEGKPVWKLLVDMDPRMLVSCIDFRYITDVLTEEDALEILQKGQIGKKEREKQMLAQGYPAYTTSCAWLGYSDDTLKQLCAQALKDGWTRFKVKVGADLQDDMRRCQIIRDMIGPEKTLMMDANQRWDVPEAVEWMSKLAKFKPLWIEEPTSPDDILGHATISKALVPLGIGIATGEQCHNRVIFKQLLQAKALQFLQIDSCRLGSVNENLSVLLMAKKFEIPVCPHAGGVGLCELVQHLIIFDYISVSASLENRVCEYVDHLHEHFKYPVMIQRASYMPPKDPGYSTEMKEESVKKHQYPDGEVWKKLLPAQEN

SEQ ID NO: 19592 - protein, 319 aa, Homo sapiens
MELTELLLVVMLLLTARLTLSSPAPPACDLRVLSKLLRDSHVLHSRLSQCPEVHPLPTPVLLPAVDFSLGEWKTQMEETKAQDILGAVTLLLEGVMAARGQLGPTCLSSLLGQLSGQVRLLLGALQSLLGTQDHSSQGSQCHLPELPTPAPRKGAFPDACRRVHPLRQAGPTHHSCPQQNLSSPHTERAPKQDFWIVGDKLHCLSQNYWLWASEVAAGIQSQDSWSAEPNLQVPGPNPRIPEQDTRTLEWNSWTLSWTLTQDPRSPGHFLRNIRHRLPATQPPAWIFSFPNPSSYWTVYALPSSTHLAHPCGPAPPPAS

SEQ ID NO: 19593 - protein, 285 aa, Homo sapiens
MPGARSGGSGGDGSNSGSYSGDASGAVTVWEVVSLLGKLLGTVVALKVVLYLLRVCLAMAWKSGGASHSELIHNLRKNGIIKTDKVFEVMLATDRSHYAKCNPYMDSPQSIGFQATISAPHMHAYALELLFDQLHEGAKALDVGSGSGILTACFARMVGCTGKVIGIDHIKELVDDSVNNVRKDDPTLLSSGRVQLVVGDGRMGYAEEAPYDAIHVGAAAPVVPQALIDQLKPGGRLILPVGPAGGNQMLEQYDKLQDGSIKMKPLMGVIYVPLTDKEKQWSRWK

SEQ ID NO: 19594 - protein, 1235 aa, Homo sapiens
MIQGTLEPDGPLWGWDWDSDNDWDSAVLALLALAVVAATALALHWFGSGHDQEAAEPVSTALGAQPHQAGGAELALQPKSKVSDGSEGQSPGQGKPEPPGRGQQSPVPAAAPGGGLAAMARLPLKTAVEEARREALGQQRGSATPAAPRAEGKEPPRPGTALLGRSEAGGMSAPLLIHFTPRSPGSEAEAETGGVRASSRQAAGPAGQQDTGPWQAGAGPSGSMGRGRGRRRRMDAGSGDRARRPRKLDPLRLGAAGSVWDAVDGAAALDAHARGLPTGPPLAQEPALPALPAPRALQPGSQTEGSGAKGGWSREASGVPAPGGGWPWVSREVPGTRSFGPAPDSTRPWLESPPQGRPLSSQGPGATGAYDAGEAGADSSRDNSPAADLGPTRPPEQAKPAAAGHSRAPSRSREPRPRSASPPAAPGPGFPPEALTLPSPSDFLPLEVTQDPSVGENLRAAPAPSSASAQVLTSAPASVLAPALASSPSSAPTSATTSTSSPTSAPAPAPTSAPTSTPAPAPSPAAAATPAPAPVPVPTLTPPSPALTPVPTPALSPAPTPALTPAASPALTPVPTPALSPAPTPAPTPAASPAPAPTSAPTPTPAASPAPADGSKPQESVALPRRYQEGQVSASWGNLIAMVLRSHPFPRQDRPQGSVPRAVPGSPVGPSTSTHSEDRHGPSSSVGTVIGTGTGGLVEAGGQPQPRSSETNGSPSPDPPPGLRGEGTREKSLDPLPQAAMPRGPAQPPAQRPPGPAASSSARRSQPVPQLRKRSRCEIAPSSEQEVRPAASGDPQGEAPGEGGSPAGRSGALTEKQEEARKLMVFLQRPGGWGVVEGPRKPSSRALEPATAAALRRRLDLGSCLDVLAFAQQHGEPGLAQETYALMSDNLLRVLGDPCLYRRLSAADRERILSLRTGRGRAVLGVLVLPSLYQGGRSGLPRGPRGEEPPAAAPVSLPLPAHLHVFNPRENTWRPLTQVPEEAPLRGCGLCTMHNYLFLAGGIRGSGAKAVCSNEVFCYNPLTNIWSQVRPMQQARAQLKLVALDGLLYAIGGECLYSMECYDPRTDAWTPRAPLPAGTFPVAHEAVACRGDIYVTGGHLFYRLLRYSPVKDAWDECPYSASHRRSSDIVALGGFLYRFDLLRGVGAAVMRYNTVTGSWSRAASLPLPAPAPLHCTTLGNTIYCLNPQVTATFTVSGGTAQFQAKELQPFPLGSTGVLSPFILTLPPEDRLQTSL

SEQ ID NO: 19595 - protein, 818 aa, Homo sapiens
MWSWKCLLFWAVLVTATLCTARPSPTLPEQAQPWGAPVEVESFLVHPGDLLQLRCRLRDDVQSINWLRDGVQLAESNRTRITGEEVEVQDSVPADSGLYACVTSSPSGSDTTYFSVNVSDALPSSEDDDDDDDSSSEEKETDNTKPNPVAPYWTSPEKMEKKLHAVPAAKTVKFKCPSSGTPNPTLRWLKNGKEFKPDHRIGGYKVRYATWSIIMDSVVPSDKGNYTCIVENEYGSINHTYQLDVVERSPHRPILQAGLPANKTVALGSNVEFMCKVYSDPQPHIQWLKHIEVNGSKIGPDNLPYVQILKTAGVNTTDKEMEVLHLRNVSFEDAGEYTCLAGNSIGLSHHSAWLTVLEALEERPAVMTSPLYLEIIIYCTGAFLISCMVGSVIVYKMKSGTKKSDFHSQMAVHKLAKSIPLRRQVSADSSASMNSGVLLVRPSRLSSSGTPMLAGVSEYELPEDPRWELPRDRLVLGKPLGEGCFGQVVLAEAIGLDKDKPNRVTKVAVKMLKSDATEKDLSDLISEMEMMKMIGKHKNIINLLGACTQDGPLYVIVEYASKGNLREYLQARRPPGLEYCYNPSHNPEEQLSSKDLVSCAYQVARGMEYLASKKCIHRDLAARNVLVTEDNVMKIADFGLARDIHHIDYYKKTTNGRLPVKWMAPEALFDRIYTHQSDVWSFGVLLWEIFTLGGSPYPGVPVEELFKLLKEGHRMDKPSNCTNELYMMMRDCWHAVPSQRPTFKQLVEDLDRIVALTSNQEYLDLSMPLDQYSPSFPDTRSSTCSSGEDSVFSHEPLPEEPCLPRHPAQLANGGLKRR

SEQ ID NO: 19596 - protein, 1545 aa, Homo sapiens
MLEKFCNSTFWNSSFLDSPEADLPLCFEQTVLVWIPLGYLWLLAPWQLLHVYKSRTKRSSTTKLYLAKQVFVGFLLILAAIELALVLTEDSGQATVPAVRYTNPSLYLGTWLLVLLIQYSRQWCVQKNSWFLSLFWILSILCGTFQFQTLIRTLLQGDNSNLAYSCLFFISYGFQILILIFSAFSENNESSNNPSSIASFLSSITYSWYDSIILKGYKRPLTLEDVWEVDEEMKTKTLVSKFETHMKRELQKARRALQRRQEKSSQQNSGARLPGLNKNQSQSQDALVLEDVEKKKKKSGTKKDVPKSWLMKALFKTFYMVLLKSFLLKLVNDIFTFVSPQLLKLLISFASDRDTYLWIGYLCAILLFTAALIQSFCLQCYFQLCFKLGVKVRTAIMASVYKKALTLSNLARKEYTVGETVNLMSVDAQKLMDVTNFMHMLWSSVLQIVLSIFFLWRELGPSVLAGVGVMVLVIPINAILSTKSKTIQVKNMKNKDKRLKIMNEILSGIKILKYFAWEPSFRDQVQNLRKKELKNLLAFSQLQCVVIFVFQLTPVLVSVVTFSVYVLVDSNNILDAQKAFTSITLFNILRFPLSMLPMMISSMLQASVSTERLEKYLGGDDLDTSAIRHDCNFDKAMQFSEASFTWEHDSEATVRDVNLDIMAGQLVAVIGPVGSGKSSLISAMLGEMENVHGHITIKGTTAYVPQQSWIQNGTIKDNILFGTEFNEKRYQQVLEACALLPDLEMLPGGDLAEIGEKGINLSGGQKQRISLARATYQNLDIYLLDDPLSAVDAHVGKHIFNKVLGPNGLLKGKTRLLVTHSMHFLPQVDEIVVLGNGTIVEKGSYSALLAKKGEFAKNLKTFLRHTGPEEEATVHDGSEEEDDDYGLISSVEEIPEDAASITMRRENSFRRTLSRSSRSNGRHLKSLRNSLKTRNVNSLKEDEELVKGQKLIKKEFIETGKVKFSIYLEYLQAIGLFSIFFIILAFVMNSVAFIGSNLWLSAWTSDSKIFNSTDYPASQRDMRVGVYGALGLAQGIFVFIAHFWSAFGFVHASNILHKQLLNNILRAPMRFFDTTPTGRIVNRFAGDISTVDDTLPQSLRSWITCFLGIISTLVMICMATPVFTIIVIPLGIIYVSVQMFYVSTSRQLRRLDSVTRSPIYSHFSETVSGLPVIRAFEHQQRFLKHNEVRIDTNQKCVFSWITSNRWLAIRLELVGNLTVFFSALMMVIYRDTLSGDTVGFVLSNALNITQTLNWLVRMTSEIETNIVAVERITEYTKVENEAPWVTDKRPPPDWPSKGKIQFNNYQVRYRPELDLVLRGITCDIGSMEKIGVVGRTGAGKSSLTNCLFRILEAAGGQIIIDGVDIASIGLHDLREKLTIIPQDPILFSGSLRMNLDPFNNYSDEEIWKALELAHLKSFVASLQLGLSHEVTEAGGNLSIGQRQLLCLGRALLRKSKILVLDEATAAVDLETDNLIQTTIQNEFAHCTVITIAHRLHTIMDSDKVMVLDNGKIIECGSPEELLQIPGPFYFMAKEAGIENVNSTKF

SEQ ID NO: 19597 - protein, 141 aa, Homo sapiens
MEMLQGLLLLLLLSMGGAWASREPLRPWCHPINAILAVEKEGCPVCITVNTTICAGYCPTMMRVLQAVLPPLPQVVCTYRDVRFESIRLPGCPRGVDPVVSFPVALSCRCGPCRRSTSDCGGPKDHPLTCDHPQLSGLLFL

SEQ ID NO: 19598 - protein, 454 aa, Homo sapiens
MALQLGRLSSGPCWLVARGGCGGPRAWSQCGGGGLRAWSQRSAAGRVCRPPGPAGTEQSRGLGHGSTSRGGPWVGTGLAAALAGLVGLATAAFGHVQRAEMLPKTSGTRATSLGRPEEEEDELAHRCSSFMAPPVTDLGELRRRPGDMKTKMELLILETQAQVCQALAQVDGGANFSVDRWERKEGGGGISCVLQDGCVFEKAGVSISVVHGNLSEEAAKQMRSRGKVLKTKDGKLPFCAMGVSSVIHPKNPHAPTIHFNYRYFEVEEADGNKQWWFGGGCDLTPTYLNQEDAVHFHRTLKEACDQHGPDLYPKFKKWCDDYFFIAHRGERRGIGGIFFDDLDSPSKEEVFRFVQSCARAVVPSYIPLVKKHCDDSFTPQEKLWQQLRRGRYVEFNLLYDRGTKFGLFTPGSRIESILMSLPLTARWEYMHSPSENSKEAEILEVLRHPRDWVR

SEQ ID NO: 19599 - protein, 1255 aa, Homo sapiens
MANGTADVRKLFIFTTTQNYFGLMSELWDQPLLCNCLEINNFLDDGNQMLLRVQRSDAGISFSNTIEFGDTKDKVLVFFKLRPEVITDENLHDNILVSSMLESPISSLYQAVRQVFAPMLLKDQEWSRNFDPKLQNLLSELEAGLGIVLRRSDTNLTKLKFKEDDTRGILTPSDEFQFWIEQAHRGNKQISKERANYFKELFETIAREFYNLDSLSLLEVVDLVETTQDVVDDVWRQTEHDHYPESRMLHLLDIIGGSFGRFVQKKLGTLNLWEDPYYLVKESLKAGISICEQWVIVCNHLTGQVWQRYVPHPWKNEKYFPETLDKLGKRLEEVLAIRTIHEKFLYFLPASEEKIICLTRVFEPFTGLNPVQYNPYTEPLWKAAVSQYEKIIAPAEQKIAGKLKNYISEIQDSPQQLLQAFLKYKELVKRPTISKELMLERETLLARLVDSIKDFRLDFENRCRGIPGDASGPLSGKNLSEVVNSIVWVRQLELKVDDTIKIAEALLSDLPGFRCFHQSAKDLLDQLKLYEQEQFDDWSRDIQSGLSDSRSGLCIEASSRIMELDSNDGLLKVHYSDRLVILLREVRQLSALGFVIPAKIQQVANIAQKFCKQAIILKQVAHFYNSIDQQMIQSQRPMMLQSALAFEQIIKNSKAGSGGKSQITWDNPKELEGYIQKLQNAAERLATENRKLRKWHTTFCEKVVVLMNIDLLRQQQRWKDGLQELRTGLATVEAQGFQASDMHAWKQHWNHQLYKALEHQYQMGLEALNENLPEINIDLTYNYLFTFRQGRLQFRPPFEEIRAKYYREMKRFIGIPNQFKGVGEAGDESIFSIMIDRNASGFLTIFSKAEDLFRRLSAVLHQHKEWIVIGQVDMEALVEKHLFTVHDWEKNFKALKIKGKEVERLPSAVKVDCLNINCNPVKTVIDDLIQKLFDLLVLSLKKSIQAHLHEIDTFVTEAMEVLTIMPQSVEEIGDANLQYSKLQERKPEILPLFQEAEDKNRLLRTVAGGGLETISNLKAKWDKFELMMESHQLMIKDQIEVMKGNVKSRLQIYYQELEKFKARWDQLKPGDDVIETGQHNTLDKSAKLIKEKKIEFDDLEVTRKKLVDDCHHFRLEEPNFSLASSISKDIESCAQIWAFYEEFQQGFQEMANEDWITFRTKTYLFEEFLMNWHDRLRKVEEHSVMTVKLQSEVDKYKIVIPILKYVRGEHLSPDHWLDLFRLLGLPRGTSLEKLLFGDLLRVADTIVAKAADLKV

SEQ ID NO: 19600 - protein, 705 aa, Homo sapiens
MWLLYLLVPALFCRAGGSIPIPQKLFGEVTSPLFPKPYPNNFETTTVITVPTGYRVKLVFQQFDLEPSEGCFYDYVKISADKKSLGRFCGQLGSPLGNPPGKKEFMSQGNKMLLTFHTDFSNEENGTIMFYKGFLAYYQAVDLDECASRSKSGEEDPQPQCQHLCHNYVGGYFCSCRPGYELQEDRHSCQAECSSELYTEASGYISSLEYPRSYPPDLRCNYSIRVERGLTLHLKFLEPFDIDDHQQVHCPYDQLQIYANGKNIGEFCGKQRPPDLDTSSNAVDLLFFTDESGDSRGWKLRYTTEIIKCPQPKTLDEFTIIQNLQPQYQFRDYFIATCKQGYQLIEGNQVLHSFTAVCQDDGTWHRAMPRCKIKDCGQPRNLPNGDFRYTTTMGVNTYKARIQYYCHEPYYKMQTRAGSRESEQGVYTCTAQGIWKNEQKGEKIPRCLPVCGKPVNPVEQRQRIIGGQKAKMGNFPWQVFTNIHGRGGGALLGDRWILTAAHTLYPKEHEAQSNASLDVFLGHTNVEELMKLGNHPIRRVSVHPDYRQDESYNFEGDIALLELENSVTLGPNLLPICLPDNDTFYDLGLMGYVSGFGVMEEKIAHDLRFVRLPVANPQACENWLRGKNRMDVFSQNMFCAGHPSLKQDACQGDSGGVFAVRDPNTDRWVATGIVSWGIGCSRGYGFYTKVLNYVDWIKKEMEEED

SEQ ID NO: 19601 - protein, 588 aa, Homo sapiens
MECLYYFLGFLLLAARLPLDAAKRFHDVLGNERPSAYMREHNQLNGWSSDENDWNEKLYPVWKRGDMRWKNSWKGGRVQAVLTSDSPALVGSNITFAVNLIFPRCQKEDANGNIVYEKNCRNEAGLSADPYVYNWTAWSEDSDGENGTGQSHHNVFPDGKPFPHHPGWRRWNFIYVFHTLGQYFQKLGRCSVRVSVNTANVTLGPQLMEVTVYRRHGRAYVPIAQVKDVYVVTDQIPVFVTMFQKNDRNSSDETFLKDLPIMFDVLIHDPSHFLNYSTINYKWSFGDNTGLFVSTNHTVNHTYVLNGTFSLNLTVKAAAPGPCPPPPPPPRPSKPTPSLGTWMKLETIILSKLSQGQKTKRRMFSFTGPAGDNPLELSRIPDENCQINRYGHFQATITIVEGILEVNIIQMTDVLMPVPWPESSLIDFVVTCQGSIPTEVCTIISDPTCEITQNTVCSPVDVDEMCLLTVRRTFNGSGTYCVNLTLGDDTSLALTSTLISVPDRDPASPLRMANSALISVGCLAIFVTVISLLVYKKHKEYNPIENSPGNVVRSKGLSVFLNRAKAVFFPGNQEKDPLLKNQEFKGVS

SEQ ID NO: 19602 - protein, 708 aa, Homo sapiens
MRVLGGRCGALLACLLLVLPVSEANFCLYFRNDFIYNRACISVLVGLSGCNFFYSICFLSKQQASQVLVRKRRANSLLEETKQGNLERECIEELCNKEEAREVFENDPETDYFYPKYLVCLRSFQTGLFTAARQSTNAYPDLRSCVNAIPDQCSPLPCNEDGYMSCKDGKASFTCTCKPGWQGEKCEFDINECKDPSNINGGCSQICDNTPGSYHCSCKNGFVMLSNKKDCKDVDECSLKPSICGTAVCKNIPGDFECECPEGYRYNLKSKSCEDIDECSENMCAQLCVNYPGGYTCYCDGKKGFKLAQDQKSCEVVSVCLPLNLDTKYELLYLAEQFAGVVLYLKFRLPEISRFSAEFDFRTYDSEGVILYAESIDHSAWLLIALRGGKIEVQLKNEHTSKITTGGDVINNGLWNMVSVEELEHSISIKIAKEAVMDINKPGPLFKPENGLLETKVYFAGFPRKVESELIKPINPRLDGCIRSWNLMKQGASGIKEIIQEKQNKHCLVTVEKGSYYPGSGIAQFHIDYNNVSSAEGWHVNVTLNIRPSTGTGVMLALVSGNNTVPFAVSLVDSTSEKSQDILLSVENTVIYRIQALSLCSDQQSHLEFRVNRNNLELSTPLKIETISHEDLQRQLAVLDKAMKAKVATYLGGLPDVPFSATPVNAFYNGCMEVNINGVQLDLDEAISKHNDIRAHSCPSVWKKTKNS

SEQ ID NO: 19603 - protein, 347 aa, Homo sapiens
MVSSQKLEKPIEMGSSEPLPIADGDRRRKKKRRGRATDSLPGKFEDMYKLTSELLGEGAYAKVQGAVSLQNGKEYAVKIIEKQAGHSRSRVFREVETLYQCQGNKNILELIEFFEDDTRFYLVFEKLQGGSILAHIQKQKHFNEREASRVVRDVAAALDFLHTKGIAHRDLKPENILCESPEKVSPVKICDFDLGSGMKLNNSCTPITTPELTTPCGSAEYMAPEVVEVFTDQATFYDKRCDLWSLGVVLYIMLSGYPPFVGHCGADCGWDRGEVCRVCQNKLFESIQEGKYEFPDKDWAHISSEAKDLISKLLVRDAKQRLSAAQVLQHPWVQGEQQHNGPDALRS

SEQ ID NO: 19604 - protein, 706 aa, Homo sapiens
MDPGWGQRDVGWAALLILFAASLLTVFAWLLQYARGLWLARARGDRGPGPALAGEPAGSLRELGVWRSLLRLRATRAGAAEEPGVRGLLASLFAFKSFRENWQRAWVRALNEQACRNGSSIQIAFEEVPQLPPRASISHVTCVDQSEHTMVLRCQLSAEEVRFPVSVTQQSPAAVSMETYHVTLTLPPTQLEVNLEEIPGEGLLISWAFTDRPDLSLTVLPKLQARERGEEQVELSTIEELIKDAIVSTQPAMMVNLRACSAPGGLVPSEKPPMMPQAQPAIPRPNRLFLRQLRASHLGNELEGTEELCCVAELDNPMQQKWTKPARAGSEVEWTEDLALDLGPQSRELTLKVLRSSSCGDTELLGQATLPVGSPSRPLSRRQLCPLTPGPGKALGPAATMAVELHYEEGSPRNLGTPTSSTPRPSITPTKKIELDRTIMPDGTIVTTVTTVQSRPRIDGKLDSPSRSPSKVEVTEKTTTVLSESSGPSNTSHSSSRDSHLSNGLDPVAETAIRQLTEPSGRVAKKTPTKRSTLIISGVSKVPIAQDELALSLGYAASLEASVQDDAGTSGGPSSPPSDPPAMSPGPLDALSSPTSVQEADETTRSDISERPSVDDIESETGSTGALETRSLKDHKVSFLRSGTKLIFRRRPRQKEAGLSQSHDDLSNATATPSVRKKAGSFSRRLIKRFSFKSKPKANGNPSPQL

SEQ ID NO: 19605 - protein, 1194 aa, Homo sapiens
MGKEQELLEAARTGHLPAVEKLLSGKRLSSGFGGGGGGGSGGGGGGSGGGGGGLGSSSHPLSSLLSMWRGPNVNCVDSTGYTPLHHAALNGHKDVVEVLLRNDALTNVADSKGCYPLHLAAWKGDAQIVRLLIHQGPSHTRVNEQNALEIKELKKYGPFDPYINAKNNDNETALHCAAQYGHTEVVKVLLEELTDPTMRNNKFETPLDLAALYGRLEVVKMLLNAHPNLLSCNTKKHTPLHLAARNGHKAVVQVLLDAGMDSNYQTEMGSALHEAALFGKTDVVQILLAAGTDVNIKDNHGLTALDTVRELPSQKSQQIAALIEDHMTGKRSTKEVDKTPPPQPPLISSMDSISQKSQGDVEKAVTELIIDFDANAEEEGPYEALYNAISCHSLDSMASGRSSDQDSTNKEAEAAGVKPAGVRPRERPPPPAKPPPDEEEEDHIDKKYFPLTASEVLSMRPRIHGSAAREEDEHPYELLLTAETKKVVLVDGKTKDHRRSSSSRSQDSAEGQDGQVPEQFSGLLHGSSPVCEVGQDPFQLLCTAGQSHPDGSPQQGACHKASMQLEETGVHAPGASQPSALDQSKRVGYLTGLPTTNSRSHPETLTHTASPHPGGAEEGDRSGARSRAPPTSKPKAELKLSRSLSKSDSDLLTCSPTEDATMGSRSESLSNCSIGKKRLEKSPSFASEWDEIEKIMSSIGEGIDFSQERQKISGLRTLEQSVGEWLESIGLQQYESKLLLNGFDDVHFLGSNVMEEQDLRDIGISDPQHRRKLLQAARSLPKVKALGYDGNSPPSVPSWLDSLGLQDYVHSFLSSGYSSIDTVKNLWELELVNVLKVQLLGHRKRIIASLADRPYEEPPQKPPRFSQLRCQDLLSQTSSPLSQNDSCTGRSADLLLPPGDTGRRRHDSLHDPAAPSRAERFRIQEEHREAKLTLRPPSLAAPYAPVQSWQHQPEKLIFESCGYEANYLGSMLIKDLRGTESTQDACAKMRKSTEHMKKIPTIILSITYKGVKFIDASNKNVIAEHEIRNISCAAQDPEDLCTFAYITKDLQTSHHYCHVFSTVDVNLTYEIILTLGQAFEVAYQLALQAQKSRATGASAAEMIETKSSKPVPKPRVGVRKSAVPLPPDSRCCYCHTCTTHRPSYLPLPSVSPGVKLEPPDMDQDAQSHASVSWVVDPKPDSKRSLSTKYETTIF

SEQ ID NO: 19606 - protein, 1596 aa, Homo sapiens
MESRETLSSSRQRGGESDFLPVSSAKPPAAPGCAGEPLLSTPGPGKGIPVGGERMEPEEEDELGSGRDVDSNSNADSEKWVAGDGLEEQEFSIKEANFTEGSLKLKIQTTKRAKKPPKNLENYICPPEIKITIKQSGDQKVSRAGKNSKATKEEERSHSKKKLLTASDLAASDLKGFQPQAYERPQKHSTLHYDTGLPQDFTGDTLKPKHQQKSSSQNHMDWSTNSDSGPVTQNCFISPESGRETASTSKIPALEPVASFAKAQGKKGSAGNTWSQLSNNNKDLLLGGVAPSPSSHSSPAPPSSSAECNGLQPLVDQDGGGTKEPPEPPTVGSKKKSSKKDVISQTIPNPDLDWVKNAQKAFDNTEGKREGYSADSAQEASPARQNVSSASNPENDSSHVRITIPIKAPSLDPTNHKRKKRQSIKAVVEKIMPEKALASGITMSSEVVNRILSNSEGNKKDPRVPKLSKMIENESPSVGLETGGNAEKVIPGGVSKPRKPPMVMTPPTCTDHSPSRKLPEIQHPKFAAKRRWTCSKPKPSTMLREAVMATSDKLMLEPPSAYPITPSSPLYTNTDSLTVITPVKKKRGRPKKQPLLTVETIHEGTSTSPVSPISREFPGTKKRKRRRNLAKLAQLVPGEDKPMSEMKFHKKVGKLGVLDKKTIKTINKMKTLKRKNILNQILSCSSSVALKAKAPPETSPGAAAIESKLGKQINVSKRGTIYIGKKRGRKPRAELPPPSEEPKTAIKHPRPVSSQPDVPAVPSNFQSLVASSPAAMHPLSTQLGGSNGNLSPASTETNFSELKTMPNLQPISALPTKTQKGIHSGTWKLSPPRLMANSPSHLCEIGSLKEITLSPVSESHSEETIPSDSGIGTDNNSTSDQAEKSSESRRRYSFDFCSLDNPEAIPSDTSTKNRHGHRQKHLIVDNFLAHESLKKPKHKRKRKSLQNRDDLQFLADLEELITKFQVFRISHRSYTFYHENPYPSIFRINFDHYYPVPYIQYDPLLYLRRTSDLKSKKKRGRPAKTNDTMTKVPFLQGFSYPIPSGSYYAPYGMPYTSMPMMNLGYYGQYPAPLYLSHTLGAASPFMRPTVPPPQFHTNSHVKMSGAAKHKAKHGVHLQGPVSMGLGDMQPSLNPPKVGSASLSSGRLHKRKHKHKHKHKEDRILGTHDNLSGLFAGKATGFSSHILSERLSSADKELPLVSEKNKHKEKQKHQHSEAGHKASKNNFEVDTLSTLSLSDAQHWTQAKEKGDLSSEPVDSCTKRYSGSGGDGGSTRSENLDVFSEMNPSNDKWDSDVSGSKRRSYEGFGTYREKDIQAFKMNRKERSSYDSSMSPGMPSPHLKVDQTAVHSKNEGSVPTMMTRKKPAAVDSVTIPPAPVLSLLAASAATSDAVGSSLKKRFKRREIEAIQCEVRKMCNYTKILSTKKNLDHVNKILKAKRLQRQSKTGNNFVKKRRGRPRKQPTQFDEDSRDQMPVLEKCIDLPSKRGQKPSLSPLVLEPAASQDTIMATIEAVIHMAREAPPLPPPPPPPLPPPPPPPLPPPPPLPKTPRGGKRKHKPQAPAQPPQQSPPQQPLPQEEEVKAKRQRKSRGSESEVLP

SEQ ID NO: 19607 - protein, 723 aa, Homo sapiens
MLSSMAAAGSVKAALQVAEVLEAIVSCCVGPEGRQVLCTKPTGEVLLSRNGGRLLEALHLEHPIARMIVDCVSSHLKKTGDGAKTFIIFLCHLLRGLHAITDREKDPLMCENIQTHGRHWKNCSRWKFISQALLTFQTQILDGIMDQYLSRHFLSIFSSAKERTLCRSSLELLLEAYFCGRVGRNNHKFISQLMCDYFFKCMTCKSGIGVFELVDDHFVELNVGVTGLPVSDSRIIAGLVLQKDFSVYRPADGDMRMVIVTETIQPLFSTSGSEFILNSEAQFQTSQFWIMEKTKAIMKHLHSQNVKLLISSVKQPDLVSYYAGVNGISVVECLSSEEVSLIRRIIGLSPFVPPQAFSQCEIPNTALVKFCKPLILRSKRYVHLGLISTCAFIPHSIVLCGPVHGLIEQHEDALHGALKMLRQLFKDLDLNYMTQTNDQNGTSSLFIYKNSGESYQAPDPGNGSIQRPYQDTVAENKDALEKTQTYLKVHSNLVIPDVELETYIPYSTPTLTPTDTFQTVETLTCLSLERNRLTDYYEPLLKNNSTAYSTRGNRIEISYENLQVTNITRKGSMLPVSCKLPNMGTSQSYLSSSMPAGCVLPVGGNFEILLHYYLLNYAKKCHQSEETMVSMIIANALLGIPKVLYKSKTGKYSFPHTYIRAVHALQTNQPLVSSQTGLESVMGKYQLLTSVLQCLTKILTIDMVITVKRHPQKVHNQDSEDEL

SEQ ID NO: 19608 - protein, 165 aa, Homo sapiens
MADGVDHIDIYADVGEEFNQEAEYGGHDQIDLYDDVISPSANNGDAPEDRDYMDTLPPTVGDDVGKGAAPNVVYTYTGKRIALYIGNLTWWTTDEDLTEAVHSLGVNDILEIKFFENRANGQSKGTFHHSKKEPCTWLAVTPISSLPICWQLLTCSGYACSGHFI

SEQ ID NO: 19609 - protein, 676 aa, Homo sapiens
MMQESGTETKSNGSAIQNGSGGSNHLLECGGLREGRSNGETPAVDIGAADLAHAQQQQQQALQVARQLLLQQQQQQQVSGLKSPKRNDKQPALQVPVSVAMMTPQVITPQQMQQILQQQVLSPQQLQVLLQQQQALMLQQQLQEFYKKQQEQLQLQLLQQQHAGKQPKEQQQVATQQLAFQQQLLQMQQLQQQHLLSLQRQGLLTIQPGQPALPLQPLAQGMIPTELQQLWKEVTSAHTAEETTGNNHSSLDLTTTCVSSSAPSKTSLIMNPHASTNGQLSVHTPKRESLSHEEHPHSHPLYGHGVCKWPGCEAVCEDFQSFLKHLNSEHALDDRSTAQCRVQMQVVQQLELQLAKDKERLQAMMTHLHVKSTEPKAAPQPLNLVSSVTLSKSASEASPQSLPHTPTTPTAPLTPVTQGPSVITTTSMHTVGPIRRRYSDKYNVPISSADIAQNQEFYKNAEVRPPFTYASLIRQAILESPEKQLTLNEIYNWFTRMFAYFRRNAATWKNAVRHNLSLHKCFVRVENVKGAVWTVDEVEFQKRRPQKISGNPSLIKNMQSSHAYCTPLNAALQASMAENSIPLYTTASMGNPTLGNLASAIREELNGAMEHTNSNESDSSPGRSPMQAVHPVHVKEEPLDPEEAEGPLSLVTTANHSPDFDHDRDYEDEPVNEDME

SEQ ID NO: 19610 - protein, 237 aa, Homo sapiens
HYSTASFVLAWLLRIEPFTTYFLNLQGGKFDHADRTFSSISRAWRNSQRDTSDIKELIPEFYYLPEMFVNFNNYNLGVMDDGTVVSDVELPPWAKTSEEFVHINRLQGPEAVRALNVFYYLTYEGAVNLNSITDPVLREAVEAQIRSFGQTPSQLLIEPHPPRGSAMQVYLLLQSPLMFTDKAQQDVIMVLKFPSNSPVTHVAANTQPGLATPAVITVTANRLFAVNKWHNLPAHQG

SEQ ID NO: 19611 - protein, 357 aa, Homo sapiens
MAPRRVRSFLRGLPALLLLLLFLGPWPAASHGGKYSREKNQPKPSPKRESGEEFRMEKLNQLWEKAQRLHLPPVRLAELHADLKIQERDELAWKKLKLDGLDEDGEKEARLIRNLNVILAKYGLDGKKDARQVTSNSLSGTQEDGLDDPRLEKLWHKAKTSGKFSGEELDKLWREFLHHKEKVHEYNVLLETLSRTEEIHENVISPSDLSDIKGSVLHSRHTELKEKLRSINQGLDRLRRVSHQGYSTEAEFEEPRVIDLWDLAQSANLTDKELEAFREELKHFEAKIEKHNHYQKQLEIAHEKLRHAESVGDGERVSRSREKHALLEGRTKELGYTVKKHLQDLSGRISRARHNEL

SEQ ID NO: 19612 - protein, 80 aa, Homo sapiens
MFPLVKSALNRLQVRSIQQTMARQSHQKRTPDFHDKYGNAVLASGATFCIVTWTYVATQVGIEWNLSPVGRVTPKEWRNQ

SEQ ID NO: 19613 - protein, 396 aa, Homo sapiens
MALLTNLLPLCCLALLALPAQSCGPGRGPVGRRRYARKQLVPLLYKQFVPGVPERTLGASGPAEGRVARGSERFRDLVPNYNPDIIFKDEENSGADRLMTERCKERVNALAIAVMNMWPGVRLRVTEGWDEDGHHAQDSLHYEGRALDITTSDRDRNKYGLLARLAVEAGFDWVYYESRNHVHVSVKADNSLAVRAGGCFPGNATVRLWSGERKGLRELHRGDWVLAADASGRVVPTPVLLFLDRDLQRRASFVAVETEWPPRKLLLTPWHLVFAARGPAPAPGDFAPVFARRLRAGDSVLAPGGDALRPARVARVAREEAVGVFAPLTAHGTLLVNDVLASCYAVLESHQWAHRAFAPLRLLHALGALLPGGAVQPTGMHWYSRLLYRLAEELLG

SEQ ID NO: 19614 - protein, 1316 aa, Homo sapiens
LDGNSWLLCYGFLYLALYAQVSQSKPCERTGSCFSGRCVNSTCLCDPGWVGDQCQHCQGRFKLTEPSGYLTDGPINYKYKTKCTWLIEGYPNAVLRLRFNHFATECSWDHMYVYDGDSIYAPLIAVLSGLIVPEIRGNETVPEVVTTSGYALLHFFSDAAYNLTGFNIFYSINSCPNNCSGHGKCTTSVSVPSQVYCECDKYWKGEACDIPYCKANCGSPDHGYCDLTGEKLCVCNDSWQGPDCSLNVPSTESYWILPNVKPFSPSVGRASHKAVLHGKFMWVIGGYTFNYSSFQMVLNYNLESSIWNVGTPSRGPLQRYGHSLALYQENIFMYGGRIETNDGNVTDELWVFNIHSQSWSTKTPTVLGHGQQYAVEGHSAHIMELDSRDVVMIIIFGYSAIYGYTSSIQEYHISSNTWLVPETKGAIVQGGYGHTSVYDEITKSIYVHGGYKALPGNKYGLVDDLYKYEVNTKTWTILKESGFARYLHSAVLINGAMLIFGGNTHNDTSLSNGAKCFSADFLAYDIACDEWKILPKPNLHRDVNRFGHSAVVINGSMYIFGGFSSVLLNDILVYKPPNCKAFRDEELCKNAGPGIKCVWNKNHCESWESGNTNNILRAKCPPKTAASDDRCYRYADCASCTANTNGCQWCDDKKCISANSNCSMSVKNYTKCHVRNEQICNKLTSCKSCSLNLNCQWDQRQQECQALPAHLCGEGWSHIGDACLRVNSSRENYDNAKLYCYNLSGNLASLTTSKEVEFVLDEIQKYTQQKVSPWVGLRKINISYWGWEDMSPFTNTTLQWLPGEPNDSGFCAYLERAAVAGLKANPCTSMANGLVCEKPVVSPNQNARPCKKPCSLRTSCSNCTSNGMECMWCSSTKRCVDSNAYIISFPYGQCLEWQTATCSPQNCSGLRTCGQCLEQPGCGWCNDPSNTGRGHCIEGSSRGPMKLIGMHHSEMVLDTNLCPKEKNYEWSFIQCPACQCNGHSTCINNNVCEQCKNLTTGKQCQDCMPGYYGDPTNGGQCTACTCSGHANICHLHTGKCFCTTKGIKGDQCQLCDSENRYVGNPLRGTCYYSLLIDYQFTFSLLQEDDRHHTAINFIANPEQSNKNLDISINASNNFNLNITWSVGSTAGTISGEETSIVSKNNIKEYRDSFSYEKFNFRSNPNITFYVYVSNFSWPIKIQIAFSQHNTIMDLVQFFVTFFSCFLSLLLVAAVVWKIKQTCWASRRREQLLRERQQMASRPFASVDVALEVGAEQTEFLRGPLEGAPKPIAIEPCAGNRAAVLTVFLCLPRGSSGAPPPGQSEHSPEPTAQKILL

SEQ ID NO: 19615 - protein, 160 aa, Homo sapiens
MKVLLLKDAKEDDCGQDPYIRELGLYGLEATLIPVLSFEFLSLPSFSEKLSHPEDYGGLIFTSPRAVEAAELCLEQNNKTEVWERSLKEKWNAKSVYVVGNATASLVSKIGLDTEGETCGNAEKLAEYICSRESSALPLLFPCGNLKREILPKALKDKEA

SEQ ID NO: 19616 - protein, 77 aa, Homo sapiens
MKLLTGLVFCSLVLGVSSRSFFSFLGEAFDGARDMWRAYSDMREANYIGSDKYFHARGNYDAAKRGPGGAWAAEVIT

SEQ ID NO: 19617 - protein, 55 aa, Homo sapiens
MEAGGFLDSLIYGACVVFTLGMFSAGLSDLRHMRMTRSVDNVQFLPFLTTEVKLR

SEQ ID NO: 19618 - protein, 63 aa, Homo sapiens
MSLRNLWRDYKVLVVMVPLVGLIHLGWYRIKSSPVFQIPKNDDIPEQDSLGLSNLQKSQIQGK

SEQ ID NO: 19619 - protein, 161 aa, Homo sapiens
MDPARPLGLSILLLFLTEAALGDAAQEPTDYGPCRALLLRYYYDRYTQSCRQFLYGGCEGNANNFYTWEACDDACWRIEKVPKVCRLQVSVDDQCEGSTEKYFFNLSSMTCEKFFSGGCHRNRIENRFPDEATCMGFCAPKKIPSFCYSPKDEGLCSANVT

SEQ ID NO: 19620 - protein, 753 aa, Homo sapiens
MQKRQGYCSYCRVQYNNLEQDVLQHHPYHCQESSSTQDETHVNTGSSSEVVHLDDAFSEEEEEDEDKVEDEDATEERPSEVSEPIEELHSRPHKSQEGTQEVSVRPSVIQKLEKGQQQPLEFVHKIGASVRKCNLVDIGQATNNRSNLVRPPVICNAPASCLPESSNDRPVTANTTSLPPAAHLDSVSKCDPNKVEKYLEQPDGASRNPVPSSHVETTSFSYQKHKESNRKSLRMNSDKLVLWKDVKSQGKTLSAGLKFHERMGTKGSLRVKSPSKLAVNPNKTDMPSNKGIFEDTIAKNHEEFFSNMDCTQEEKHLVFNKTAFWEQKCSVSSEMKFDCISLQSASDQPQETAQDLSLWKEEQIDQEDNYESRGSEMSFDCSSSFHSLTDQSKVSAKEVNLSKEVRTDVQYKNNKSYVSKISSDCDDILHLVTNQSQMIVKEISLQNARHISLVDQSYESSSSETNFDCDASPQSTSDYPQQSVTEVNLPKEVHIGLVDKNYGSSSSEVSADSVFPLQSVVDRPPVAVTETKLRKKAHTSLVDNYGSSCSETSFDCDVSLESVVDHPQLTVKGRNLKGRQVHLKHKKRKPSSAKAHLDCDVSLGTVADESQRAVEKINLLKEKNADLMDMNCESHGPEMGFQADAQLADQSQVAEIERQKVDVDLENKSVQSSRSSLSSDSPASLYHSAHDEPQEALDEVNLKELNIDMEVRSYDCSSSELTFDSDPPLLSVTEQSHLDAEGKERHIDLEDES

SEQ ID NO: 19621 - protein, 1028 aa, Homo sapiens
MGVAGRNRPGAAWAVLLLLLLLPPLLLLAGAVPPGRGRAAGPQEDVDECAQGLDDCHADALCQNTPTSYKCSCKPGYQGEGRQCEDIDECGNELNGGCVHDCLNIPGNYRCTCFDGFMLAHDGHNCLDVDECLENNGGCQHTCVNVMGSYECCCKEGFFLSDNQHTCIHRSEEGLSCMNKDHGCSHICKEAPRGSVACECRPGFELAKNQRDCILTCNHGNGGCQHSCDDTADGPECSCHPQYKMHTDGRSCLEREDTVLEVTESNTTSVVDGDKRVKRRLLMETCAVNNGGCDRTCKDTSTGVHCSCPVGFTLQLDGKTCKDIDECQTRNGGCDHFCKNIVGSFDCGCKKGFKLLTDEKSCQDVDECSLDRTCDHSCINHPGTFACACNRGYTLYGFTHCGDTNECSINNGGCQQVCVNTVGSYECQCHPGYKLHWNKKDCVEVKGLLPTSVSPRVSLHCGKSGGGDGCFLRCHSGIHLSSGLQGAYSVTCGSSSPLRNKQQKSNDSAFGDVTTIRTSVTFKLNEGKCSLKNAELFPEGLRPALPEKHSSVKESFRYVNLTCSSGKQVPGAPGRPSTPKEMFITVEFELETNQKEVTASCDLSCIVKRTEKRLRKAIRTLRKAVHREQFHLQLSGMNLDVAKKPPRTSERQAESCGVGQGHAENQCVSCRAGTYYDGARERCILCPNGTFQNEEGQMTCEPCPRPGNSGALKTPEAWNMSECGGLCQPGEYSADGFAPCQLCALGTFQPEAGRTSCFPCGGGLATKHQGATSFQDCETRVQCSPGHFYNTTTHRCIRCPVGTYQPEFGKNNCVSCPGNTTTDFDGSTNITQCKNRRCGGELGDFTGYIESPNYPGNYPANTECTWTINPPPKRRILIVVPEIFLPIEDDCGDYLVMRKTSSSNSVTTYETCQTYERPIAFTSRSKKLWIQFKSNEGNSARGFQVPYVTYDEDYQELIEDIVRDGRLYASENHQEILKDKKLIKALFDVLAHPQNYFKYTAQESREMFPRSFIRLLRSKVSRFLRPYK

SEQ ID NO: 19622 - protein, 304 aa, Homo sapiens
MIQNSRPSLLQPQDVGDTVETLMLHPVIKAFLCGSISGTCSTLLFQPLDLLKTRLQTLQPSDHGSRRVGMLAVLLKVVRTESLLGLWKGMSPSIVRCVPGVGIYFGTLYSLKQYFLRGHPPTALESVMLGVGSRSVAGVCMSPITVIKTRYESGKYGYESIYAALRSIYHSEGHRGLFSGLTATLLRDAPFSGIYLMFYNQTKNIVPHDQVDATLIPITNFSCGIFAGILASLVTQPADVIKTHMQLYPLKFQWIGQAVTLIFKDYGLRGFFQGGIPRALRRTLMAAMAWTVYEEMMAKMGLKS

SEQ ID NO: 19623 - protein, 38 aa, Homo sapiens
MRQSLLFLTSVVPFVLAPRPPDDPGFGPHQRLATLEIC

SEQ ID NO: 19624 - protein, 645 aa, Homo sapiens
MYFPSWLSQLYRGLSRPIRRTTQPIWGSLYRSLLQSSQRRIPEFSSFVVRTNTCGELRSSHLGQEVTLCGWIQYRRQNTFLVLRDFDGLVQVIIPQDESAASVKKILCEAPVESVVQVSGTVISRPAGQENPKMPTGEIEIKVKTAELLNACKKLPFEIKNFVKKTEALRLQYRYLDLRSFQMQYNLRLRSQMVMKMREYLCNLHGFVDIETPTLFKRTPGGAKEFLVPSREPGKFYSLPQSPQQFKQLLMVGGLDRYFQVARCYRDEGSRPDRQPEFTQIDIEMSFVDQTGIQSLIEGLLQYSWPNDKDPVVVPFPTMTFAEVLATYGTDKPDTRFGMKIIDISDVFRNTEIGFLQDALSKPHGTVKAICIPEGAKYLKRKDIESIRNFAADHFNQEILPVFLNANRNWNSPVANFIMESQRLELIRLMETQEEDVVLLTAGEHNKACSLLGKLRLECADLLETRGVVLRDPTLFSFLWVVDFPLFLPKEENPRELESAHHPFTAPHPSDIHLLYTEPKKARSQHYDLVLNGNEIGGGSIRIHNAELQRYILATLLKEDVKMLSHLLQALDYGAPPHGGIALGLDRLICLVTGSPSIRDVIAFPKSFRGHDLMSNTPDSVPPEELKPYHIRVSKPTDSKAERAH

SEQ ID NO: 19625 - protein, 637 aa, Homo sapiens
MGLLSQGSPLSWEETKRHADHVRRHGILQFLHIYHAVKDRHKDVLKWGDEVEYMLVSFDHENKKVRLVLSGEKVLETLQEKGERTNPNHPTLWRPEYGSYMIEGTPGQPYGGTMSEFNTVEANMRKRRKEATSILEENQALCTITSFPRLGCPGFTLPEVKPNPVEGGASKSLFFPDEAINKHPRFSTLTRNIRHRRGEKVVINVPIFKDKNTPSPFIETFTEDDEASRASKPDHIYMDAMGFGMGNCCLQVTFQACSISEARYLYDQLATICPIVMALSAASPFYRGYVSDIDCRWGVISASVDDRTREERGLEPLKNNNYRISKSRYDSIDSYLSKCGEKYNDIDLTIDKEIYEQLLQEGIDHLLAQHVAHLFIRDPLTLFEEKIHLDDANESDHFENIQSTNWQTMRFKPPPPNSDIGWRVEFRPMEVQLTDFENSAYVVFVVLLTRVILSYKLDFLIPLSKVDENMKVAQKRDAVLQGMFYFRKDICKGGNAVVDGCGKAQNSTELAAEEYTLMSIDTIINGKEGVFPGLIPILNSYLENMEVDVDTRCSILNYLKLIKKRASGELMTVARWMREFIANHPDYKQDSVITDEMNYSLILKCNQIANELCECPELLGSAFRKVKYSGSKTDSSN

SEQ ID NO: 19626 - protein, 63 aa, Homo sapiens
MEAGGFLDSLIYGACVVFTLGMFSAGLSDLRHMRMTRSVDNVQFLPFLTTEVNVLCSYRLQPC

SEQ ID NO: 19627 - protein, 116 aa, Homo sapiens
MPGKMVVILGASNILWIMFAASQAFKIETTPESRYLAQIGDSVSLTCSTTGCESPFFSWRTQIDSPLNGKVTNEGTTSTLTMNPVSFGNEHSYLCTATCESRKLEKGIQVEIYCWR

SEQ ID NO: 19628 - protein, 126 aa, Homo sapiens
MVAMAAGPSGCLVPAFGLRLLLATVLQAVSAFGAEFSSEACRELGFSSNLLCSSCDLLGQFNLLQLDPDCRGCCQEEAQFETKKLYAGAILEVCGUKLGRFPQVQAFVRSDKPKLFRGLQIKAGRQ

SEQ ID NO: 19629 - protein, 56 aa, Homo sapiens
MRQSLLFLTSVVPFVLAPRPPDDPGFGPHQRLEKLDSLLSDYDILSLSNIQQHSAF

SEQ ID NO: 19630 - protein, 1092 aa, Homo sapiens
MVLAGPLAVSLLLPSLTLLVSHLSSSQDVSSEPSSEQQLCALSKHPTVAFEDLQPWVSNFTYPGARDFSQLALDPSGNQLIVGARNYLFRLSLANVSLLQATEWASSEDTRRSCQSKGKTEEECQNYVRVLIVAGRKVFMCGTNAFSPMCTSRQVGNLSRTIEKINGVARCPYDPRHNSTAVISSQGELYAATVIDFSGRDPAIYRSLGSGPPLRTAQYNSKWLNEPNFVAAYDIGLFAYFFLRENAVEHDCGRTVYSRVARVCKNDVGGRFLLEDTWTTFMKARLNCSRPGEVPFYYNELQSAFHLPEQDLIYGVFTTNVNSIAASAVCAFNLSAISQAFNGPFRYQENPRAAWLPIANPIPNFQCGTLPETGPNENLTERSLQDAQRLFLMSEAVQPVTPEPCVTQDSVRFSHLVVDLVQAKDTLYHVLYIGTESGTILKALSTASRSLHGCYLEELHVLPPGRREPLRSLRILHSARALFVGLRDGVLRVPLERCAAYRSQGACLGARDPYCGWDGKQQRCSTLEDSSNMSLWTQNITACPVRNVTRDGGFGPWSPWQPCEHLDGDNSGSCLCRARSCDSPRPRCGGLDCLGPAIHIANCSRNGAWTPWSSWALCSTSCGIGFQVRQRSCSNPAPRHGGRICVGKSREERFCNENTPCPVPIFWASWGSWSKCSSNCGGGMQSRRRACENGNSCLGCGEFKTCNPEGCPEVRRNTPWTPWLPVNVTQGGARQEQRFRFTCRAPLADPHGLQFGRRRTETRTCPADGSGSCDTDALVEVLLRSGSTSPHTVSGGWAAWGPWSSCSRDCELGFRVRKRTCTNPEPRNGGLPCVGDAAEYQDCNPQACPVRGAWSCWTSWSPCSASCGGGHYQRTRSCTSPAPSPGEDICLGLHTEEALCATQACPEGWSPWSEWSKCTDDGAQSRSRHCEELLPGSSACAGNSSQSRPCPYSEIPVILPASSMEEATDCAGFNLIHLVATGISCFLGSGLLTLAVYLSCQHCQRQSQESTLVHPATPNHLHYKGGGTPKNEKYTPMEFKTLNKNNLIPDDRANFYPLQQTNVYTTTYYPSPLNKHSFRPEASPGQRCFPNS

SEQ ID NO: 19631 - protein, 554 aa, Homo sapiens
MAARPAATLAWSLLLLSSALLREGCRARFVAERDSEDDGEEPVVFPESPLQSPTVLVAVLARNAAHTLPHFLGCLERLDYPKSRMAIWAATDHNVDNTTEIFREWLKNVQRLYHYVEWRPMDEPESYPDEIGPKHWPTSRFAHVMKLRQAALRTAREKWSDYILFIDVDNFLTNPQTLNLLIAENKTIVAPMLESRGLYSNFWCGITPKGFYKRTPDYVQIREWKRTGCFPVPMVHSTFLIDLRKEASDKLTFYPPHQDYTWTFDDIIVFAFSSRQAGIQMYLCNREHYGYLPIPLKPHQTLQEDIENLIHVQIEAMIDRPPMEPSQYVSVVPKYPDKMGFDEIFMINLKRRKDRRDRMLRTLYEQEIEVKIVEAVDGKALNTSQLKALNIEMLPGYRDPYSSRPLTRGEIGCFLSHYSVWKEVIDRELEKTLVIEDDVRFEHQFKKKLMKLMDNIDQAQLDWELIYIGRKRMQVKEPEKAVPNVANLVEADYSYWTLGYVISLEGAQKLVGANPFGKMLPVDEFLPVMYNKHPVLLSSPHCHLFQTLSDDCQR

SEQ ID NO: 19632 - protein, 296 aa, Homo sapiens
GMKLPWLYVGMCFSSFCWHIEDHWSYSINYLHWGEPKTWYGVPGYAAEQLENVMKKLAPELFVSQPDLLHQLVTIMNPNTLMTHEVPVYRTNQCAGEFVITFPRAYHSGFNQGFNFAEAVNFCTVDWLPLGRQCVEHYRLLHRYCVFSHDEMICKMASKADVLDVVVASTVQKDMAIMIEDEKALRETVRKLGVIDSERMDFELLPDDERQCVKCKTTCFMSAISCSCKPGLLVCLHHVKELCSCPPYKYKLRYRYTLDDLYPMMNALKLRAESYNEWALNVNEALEAKINKKKSM

SEQ ID NO: 19633 - protein, 1061 aa, Homo sapiens
MAAMAPALTDAAAEAHHIRFKLAPPSSTLSPGSAENNGNANILIAANGTKRKAIAAEDPSLDFRNNPTKEDLGKLQPLVASYLCSDVTSVPSKESLKLQGVFSKQTVLKSHPLLSQSYELRAELLGRQPVLEFSLENLRTMNTSGQTALPQAPVNGLAKKLTKSSTHSDHDNSTSLNGGKRALTSSALHGGEMGGSESGDLKGGMTNCTLPHRSLDVEHTTLYSNNSTANKSSVNSMEQPALQGSSRLSPGTDSSSNLGGVKLEGKKSPLSSILFSALDSDTRITALLRRQADIESRARRLQKRLQVVQAKQVERHIQHQLGGFLEKTLSKLPNLESLRPRSQLMLTRKAEAALRKAASETTTSEGLSNFLKSNSISEELERFTASGIANLRCSEQAFDSDVTDSSSGGESDIEEEELTRADPEQRHVPLRRRSEWKWAADRAAIVSRWNWLQAHVSDLEYRIRQQTDIYKQIRANKGLIVLGEVPPPEHTTDLFLPLSSEVKTDHGTDKLIESVSQPLENHGAPIIGHISESLSTKSCGALRPVNGVINTLQPVLADHIPGDSSDAEEQLHKKQRLNLVSSSSDGTCVAARTRPVLSCKKRRLVRPNSIVPLSKKVHRNSTIRPGCDVNPSCALCGSGSINTMPPEIHYEAPLLERLSQLDSCVHPVLAFPDDVPTSLHFQSMLKSQWQNKPFDKIKPPKKLSLKHRAPMPGSLPDSARKDRHKLVSSFLTTAKLSHHQTRPDRTHRQHLDDVGAVPMVERVTAPKAERLLNPPPPVHDPNHSKMRLRDHSSERSEVLKHHTDMSSSSYLAATHHPPHSPLVRQLSTSSDSPAPASSSSQVTASTSQQPVRRRRGESSFDINNIVIPMSVAATTRVEKLQYKEILTPSWREVDLQSLKGSPDEENEEIEDLSDAAFAALHAKCEEMERARWLWTTSVPPQRRGSRSPISPELHSAPLTPVARDTPRHLASEDTRCSTPELGLDEQSVQPWERRTFPLAHSPQAECEDQLDAQERAARCTRRTSGSKTGRETEAAPTSPPIVPLKSRHLVAAATAQRPTHR

SEQ ID NO: 19634 - protein, 411 aa, Homo sapiens
MATTATMATSGSARKRLLKEEDMTKVEFETSEEVDVTPTFDTMGLREDLLRGIYAYGFEKPSAIQQRAIKQIIKGRDVIAQSQSGTGKTATFSISVLQCLDIQVRETQALILAPTRELAVQIQKGLLALGDYMNVQCHACIGGTNVGEDIRKLDYGQHVVAGTPGRVFDMIRRRSLRTRAIKMLVLDEADEMLNKGFKEQIYDVYRYLPPATQVVLISATLPHEILEMTNKFMTDPIRILVKRDELTLEGIKQFFVAVEREEWKFDTLCDLYDTLTITQAVIFCNTKRKVDWLTEKMREANFTVSSMHGDMPQKERESIMKEFRSGASRVLISTDVWARGLDVPQVSLIINYDLPNNRELYIHRIGRSGRYGRKGVAINFVKNDDIRILRDIEQYYSTQIDEMPMNVADLI

SEQ ID NO: 19635 - protein, 475 aa, Homo sapiens
MESKALLVLTLAVWLQSLTASRGGVAAADQRRDFIDIESKFALRTPEDTAEDTCHLIPGVAESVATCHFNHSSKTFMVIHGWTVTGMYESWVPKLVAALYKREPDSNVIVVDWLSRAQEHYPVSAGYTKLVGQDVARFINWMEEEFNYPLDNVHLLGYSLGAHAAGIAGSLTNKKVNRITGLDPAGPNFEYAEAPSRLSPDDADFVDVLHTFTRGSPGRSIGIQKPVGHVDIYPNGGTFQPGCNIGEAIRVIAERGLGDVDQLVKCSHERSIHLFIDSLLNEENPSKAYRCSSKEAFEKGLCLSCRKNRCNNLGYEINKVRAKRSSKMYLKTRSQMPYKVFHYQVKIHFSGTESETHTNQAFEISLYGTVAESENIPFTLPEVSTNKTYSFLIYTEVDIGELLMLKLKWKSDSYFSWSDWWSSPGFAIQKIRVKAGETQKKVIFCSREKVSHLQKGKAPAVFVKCHDKSLNKKSG

SEQ ID NO: 19636 - protein, 664 aa, Homo sapiens
MEYEEITLERGNSGLGFSIAGGTDNPHIGDDPSIFITKIIPGGAAAQDGRLRVNDSILFVNEVDVREVTHSAAVEALKEAGSIVRLYVMRRKPPAEKVMEIKLIKGPKGLGFSIAGGVGNQHIPGDNSIYVTKIIEGGAAHKDGRLQIGDKILAVNSVGLEDVMHEDAVAALKNTYDVVYLKVAKPSNAYLSDSYAPPDITTSYSQHLDNEISHSSYLGTDYPTAMTPTSPRRYSPVAKDLLGEEDIPREPRRIVIHRGSTGLGFNIVGGEDGEGIFISFILAGGPADLSGELRKGDQILSVNGVDLRNASHEQAAIALKNAGQTVTIIAQYKPEEYSRFEAKIHDLREQLMNSSLGSGTASLRSNPKRGFYIRALFDYDKTKDCGFLSQALSFRFGDVLHVIDASDEEWWQARRVHSDSETDDIGFIPSKRRVERREWSRLKAKDWGSSSGSQGREDSVLSYETVTQMEVHYARPIIILGPTKDRANDDLLSEFPDKFGSCVPHTTRPKREYEIDGRDYHFVSSREKMEKDIQAHKFIEAGQYNSHLYGTSVQSVREVAEQGKHCILDVSANAVRRLQAAHLHPIAIFIRPRSLENVLEINKRITEEQARKAFDRATKLEQEFTECFSAIVEGDSFEEIYHKVKRVIEDLSGPYIWVPARERL

SEQ ID NO: 19637 - protein, 4491 aa, Homo sapiens
MMPAQYALTSSLVLLVLLSTARAGPFSSRSNVTLPAPRPPPQPGGHTVGAGVGSPSSQLYEHTVEGGEKQVVFTHRINLPPSTGCGCPPGTEPPVLASEVQALRVRLEILEELVKGLKEQCTGGCCPASAQAGTGQTDVRTLCSLHGVFDLSRCTCSCEPGWGGPTCSDPTDAEIPPSSPPSASGSCPDDCNDQGRCVRGRCVCFPGYTGPSCGWPSCPGDCQGRGRCVQGVCVCRAGFSGPDCSQRSCPRGCSQRGRCEGGRCVCDPGYTGDDCGMRSCPRGCSQRGRCENGRCVCNPGYTGEDCGVRSCPRGCSQRGRCKDGRCVCDPGYTGEDCGTRSCPWDCGEGGRCVDGRCVCWPGYTGEDCSTRTCPRDCRGRGRCEDGECICDTGYSGDDCGVRSCPGDCNQRGRCEDGRCVCWPGYTGTDCGSRACPRDCRGRGRCENGVCVCNAGYSGEDCGVRSCPGDCRGRGRCESGRCMCWPGYTGRDCGTRACPGDCRGRGRCVDGRCVCNPGFTGEDCGSRRCPGDCRGHGLCEDGVCVCDAGYSGEDCSTRSCPGGCRGRGQCLDGRCVCEDGYSGEDCGVRQCPNDCSQHGVCQDGVCICWEGYVSEDCSIRTCPSNCHGRGRCEEGRCLCDPGYTGPTCATRMCPADCRGRGRCVQGVCLCHVGYGGEDCGQEEPPASACPGGCGPRELCRAGQCVCVEGFRGPDCAIQTCPGDCRGRGECHDGSCVCKDGYAGEDCGEEVPTIEGMRMHLLEETTVRTEWTPAPGPVDAYEIQFIPTTEGASPPFTARVPSSASAYDQRGLAPGQEYQVTVRALRGTSWGLPASKTITTMIDGPQDLRVVAVTPTTLELGWLRPQAEVDRFVVSYVSAGNQRVRLEVPPEADGTLLTDLMPGVEYVVTVTAERGRAVSYPASVRANTAPGHYSYPEVRPPAPPPKSRPRPAPAPRPPRPPWPSRPAEEREEESPPRPSLSQPPRRPWGNLTAELSRFRGTVQDLERHLRAHGYPLRANQTYTSVARHIHEYLQRRLLAAAPAGSPAPPPRHPRPTASPDPGTRKRDSNQGIYGLSPEGVDRVAASRHPKPEVLGSSADGALLVSLDGLRGQFERVVLRWRPQPPAEGPGGELTVPGTTRTVSLPDLRPGTTYHVEVHGVRAGQTSKSYAFITTTGSSPLGLLGTTDEPPPSGPSTTQGAQAPLLQQRPQELGELRVLGRDETGRLRVVWTAQPDTFAYFQLRMRVPEGPGAHEEVLPGDVRQALVPPPPPGTPYELSLHGVPPGGKPSDPIIYQGIMDKDEEKPGKSSGPPRLGELTVTDRTSDSLLLRWTVPEGEFDSFVIQYKDRDGQPQVVPVEGPQRSAVITSLDPGRKYKFVLYGFVGKKRHGPLVAEAKILPQSDPSPGTPPHLGNLWVTDPTPDSLHLSWTVPEGQFDTFMVQYRDRDGRPQVVPVEGPERSFVVSSLDPDHKYRFTLFGIANKKRYGPLTADGTTAPERKEEPPRPEFLEQPLLGELTVTGVTPDSLRLSWTVAQGPFDSFMVQYKDAQGQPQAVPVAGDENEVTVPGLDPDRKYKMNLYGLRGRQRVGPESVVAKTAPQEDVDETPSPTELGTEAPESPEEPLLGELTVTGSSPDSLSLFWTVPQGSFDSFTVQYKDRDGRPRAVRVGGKESEVTVGGLEPGHKYKMHLYGLHEGQRVGPVSAVGVTAPQQEETPPATESPLEPRLGELTVTDVTPNSVGLSWTVPEGQFDSFIVQYKDKDGQPQVVPVAADQREVTVYNLEPERKYKMNMYGLHDGQRMGPLSVVIVTAPLPPAPATEASKPPLEPRLGELTVTDITPDSVGLSWTVPEGEFDSFVVQYKDRDGQPQVVPVAADQREVTIPDLEPSRKYKFLLFGIQDGKRRSPVSVEAKTVARGDASPGAPPRLGELWVTDPTPDSLRLSWTVPEGQFDSFVVQFKDKDGPQVVPVEGHERSVTVTPLDAGRKYRFLLYGLLGKKRHGPLTADGTTEARSAMDDTGTKRPPKPRLGEELQVTTVTQNSVGLSWTVPEGQFDSFVVQYKDRDGQPQVVPVEGSLREVSVPGLDPAHRYKLLLYGLHHGKRVGPISAVAITAGREETETETTAPTPPAPEPHLGELTVEEATSHTLHLSWMVTEGEFDSFEIQYTDRDGQLQMVRIGGDRNDITLSGLESDHRYLVTLYGFSDGKHVGPVHVEALTVPEEEKPSEPPTATPEPPIKPRLGELTVTDATPDSLSLSWTVPEGQFDHFLVQYRNGDGQPKAVRVPGHEEGVTISGLEPDHKYKMNLYGFHGGQRMGPVSVVGVTAAEEETPSPTEPSMEAPEPAEEPLLGELTVTGSSPDSLSLSWTVPQGRFDSFTVQYKDRDGRPQVVRVGGEESEVTVGGLEPGRKYKMHLYGLHEGRRVGPVSAVGVTAPEEESPDAPLAKLRLGQMTVRDITSDSLSLSWTVPEGQFDHFLVQFKNGDGQPKAVRVPGHEDGVTISGLEPDHKYKMNLYGFHGGQRVGPVSAVGLTAPGKDEEMAPASTEPPTPEPPIKPRLEELTVTDATPDSLSLSWTVPEGQFDHFLVQYKNGDGQPKATRVPGHEDRVTISGLEPDNKYKMNLYGFHGGQRVGPVSAIGVTAAEEETPSPTEPSMEAPEPPEEPLLGELTVTGSSPDSLSLSWTVPQGRFDSFTVQYKDRDGRPQVVRVGGEESEVTVGGLEPGRKYKMHLYGLHEGRRVGPVSTVGVTAPQEDVDETPSPTEPGTEAPGPPEEPLLGELTVTGSSPDSLSLSWTVPQGRFDSFTVQYKDRDGRPQAVRVGGQESKVTVRGLEPGRKYKMHLYGLHEGRRLGPVSAVGVTEDEAETTQAVPTMTPEPPIKPRLGELTMTDATPDSLSLSWTVPEGQFDHFLVQYRNGDGQPKAVRVPGHEDGVTISGLEPDHKYKMNLYGFHGGQRVGPISVIGVTAAEEETPSPTELSTEAPEPPEEPLLGELTVTGSSPDSLSLSWTIPQGHFDSFTVQYKDRDGRPQVMRVRGEESEVTVGGLEPGRKYKMHLYGLHEGRRVGPVSTVGVTAPEDEAETTQAVPTTTPEPPNKPRLGELTVTDATPDSLSLSWMVPEGQFDHFLVQYRNGDGQPKVVRVPGHEDGVTISGLEPDHKYKMNLYGFHGGQRVGPISVIGVTAAEEETPAPTEPSTEAPEPPEEPLLGELTVTGSSPDSLSLSWTIPQGRFDSFTVQYKDRDGRPQVVRVRGEESEVTVGGLEPGCKYKMHLYGLHEGQRVGPVSAVGVTAPKDEAETTQAVPTMTPEPPIKPRLGELTVTDATPDSLSLSWMVPEGQFDHFLVQYRNGDGQPKAVRVPGHEDGVTISGLEPDHKYKMNLYGFHGGQRVGPVSAIGVTEEETPSPTEPSTEAPEAPEEPLLGELTVTGSSPDSLSLSWTVPQGRFDSFTVQYKDRDGQPQVVRVRGEESEVTVGGLEPGRKYKMHLYGLHEGQRVGPVSTVGITAPLPTPLPVEPRLGELAVAAVTSDSVGLSWTVAQGPFDSFLVQYRDAQGQPQAVPVSGDLRAVAVSGLDPARKYKFLLFGLQNGKRHGPVPVEARTAPDTKPSPRLGELTVTDATPDSVGLSWTVPEGEFDSFVVQYKDKDGRLQVVPVAANQREVTVQGLEPSRKYRFLLYGLSGRKRLGPISADSTTAPLEKELPPHLGELTVAEETSSSLRLSWTVAQGPFDSFVVQYRDTDGQPRAVPVAADQRTVTVEDLEPGKKYKFLLYGLLGGKRLGPVSALGMTAPEEDTPAPELAPEAPEPPEEPRLGVLTVTDTTPDSMRLSWSVAQGPFDSFVVQYEDTNGQPQALLVDGDQSKILISGLEPSTPYRFLLYGLHEGKRLGPLSAEGTTGLAPAGQTSEESRPRLSQLSVTDVTTSSLRLNWEAPPGAFDSFLLRFGVPSPSTLEPHPRPLLQRELMVPGTRHSAVLRDLRSGTLYSLTLYGLRGPHKADSIQGTARTLSPVLESPRDLQFSEIRETSAKVNWMPPPSRADSFKVSYQLADGGEPQSVQVDGQARTQKLQGLIPGARYEVTVVSVRGFEESEPLTGFLTTVPDGPTQLRALNLTEGFAVLHWKPPQNPVDTYDVQVTAPGAPPLQAETPGSAVDYPLHDLVLHTNYTATVRGLRGPNLTSPASITFTTGLEAPRDLEAKEVTPRTALLTWTEPPVRPAGYLLSFHTPGGQNQEILLPGGITSHQLLGLFPSTSYNARLQAMWGQSLLPPVSTSFTTGGLRIPFPRDCGEEMQNGAGASRTSTIFLNGNRERPLNVFCDMETDGGGWLVFQRRMDGQTDFWRDWEDYAHGFGNISGEFWLGNEALHSLTQAGDYSMRVDLRAGDEAVFAQYDSFHVDSAAEYYRLHLEGYHGTAGDSMSYHSGSVFSARDRDPNSLLISCAVSYRGAWWYRNCHYANLNGLYGSTVDHQGVSWYHWKGFEFSVPFTEMKLRPRNFRSPAGGG

SEQ ID NO: 19638 - protein, 194 aa, Homo sapiens
MEKWYLMTVVVLIGLTVRWTVSLNSYSGAGKPPMFGDYEAQRHWQEITFNLPVKQWYFNSSDNNLQYWGLDYPPLTAYHSLLCAYVAKFINPDWIALHTSRGYESQAHKLFMRTTVLIADLLIYIPAVVLYCCCLKEISTKKKIANALCILLYPGLILIDYGHFQWNFTTPCHFFAFYLASVLKKASKERGLCC

SEQ ID NO: 19639 - protein, 612 aa, Homo sapiens
MATAATIPSVATATAAALGEVEDEGLLASLFRDRFPEAQWRERPDVGRYLRELSGSGLERLRREPERLAEERAQLLQQTRDLAFANYKTFIRGAECTERIHRLFGDVEASLGRLLDRLPSFQQSCRNFVKEAEEISSNRRMNSLTLNRHTEILEILEIPQLMDTCVRNSYYEEALELAAYVRRLERKYSSIPVIQGIVNEVRQSMQLMLSQLIQQLRTNIQLPACLRVIGYLRRMDVFTEAELRVKFLQARDAWLRSILTAIPNDDPYFHITKTIEASRVHLFDIITQYRAIFSDEDPLLPPAMGEHTVNESAIFHGWVLQKVSQFLQVLETDLYRGIGGHLDSLLGQCMYFGLSFSRVGADFRGQLAPVFQRVAISTFQKAIQETVEKFQEEMNSYMLISAPAILGTSNMPAAVPATQPGTLQPPMVLLDFPPLACFLNNILVAFNDLRLCCPVALAQDVTGALEDALAKVTKIILAFHRAEEAAFSSGEQELFVQFCTVFLEDLVPYLNRCLQVLFPPAQIAQTLGIPPTQLSKYGNLGHVNIGAIQEPLAFILPKRETLFTLDDQALGPELTAPAPEPPAEEPRLEPAGPACPEGGRAETQAEPPSVGP

SEQ ID NO: 19640 - protein, 244 aa, Homo sapiens
MSVVLRLRNPGLNITALMWCLLCARHCFKNFTDVKTTVVYPATEKHLQKYLRQDLRLIRETGDDYRNITLPHLESQSLSIQWVYNILDKKAEADRIVFENPDPSDGFVLIPDLKWNQQQLDDLYLIAICHRRGIRSLRDLTPEHLPLLRNILHQGQEAILQRYRMKGDHLRVYLHYLPSYYHLHVHFTALGFEAPGSGVERAHLLAEVIENLECDPRHYQQRTLTFALRADDPLLKLLQEAQQS

SEQ ID NO: 19641 - protein, 774 aa, Homo sapiens
MSGGHQLQLAALWPWLLMATLQAGFGRTGLVLAAAVESERSAEQKAIIRVIPLKMDPTGKLNLTLEGVFAGVAEITPAEGKLMQSHPLYLCNASDDDNLEPGFISIVKLESPRRAPRPCLSLASKARMAGERGASAVLFDITEDRAAAEQLQQPLGLTWPVVLIWGNDAEKLMEFVYKNQKAHVRIELKEPPAWPDYDVWILMTVVGTIFVIILASVLRIRCRPRHSRPDPLQQRTAWAISQLATRRYQASCRQARGEWPDSGSSCSSAPVCAICLEEFSEGQELRVISCLHEFHRNCVDPWLHQHRTCPLCMFNITEGDSFSQSLGPSRSYQEPGRRLHLIRQHPGHAHYHLPAAYLLGPSRSAVARPPRPGPFLPSQEPGMGPRHHRFPRAAHPRAPGEQQRLAGAQHPYAQGWGLSHLQSTSQHPAACPVPLRRARPPDSSGSGESYCTERSGYLADGPASDSSSGPCHGSSSDSVVNCTDISLQGVHGSSSTFCSSLSSDFDPLVYCSPKGDPQRVDMQPSVTSRPRSLDSVVPTGETQVSSHVHYHRHRHHHYKKRFQWHGRKPGPETGVPQSRPPIPRTQPQPEPPSPDQQVTRSNSAAPSGRLSNPQCPRALPEPAPGPVDASSICPSTSSLFNLQKSSLSARHPQRKRRGGPSEPTPGSRPQDATVHPACQIFPHYTPSVAYPWSPEAHPLICGPPGLDKRLLPETPGPCYSNSQPVWLCLTPRQPLEPHPPGEGPSEWSSDTAEGRPCPYPHCQVLSAQPDYRPV

SEQ ID NO: 19642 - protein, 490 aa, Homo sapiens
MRFTFTSRCLALFLLLNHPTPILPAFSNQTYPTIEPKPFLYVVGRKKMMDAQYKCYDRMQQLPAYQGEGPYCNRTWDGWLCWDDTPAGVLSYQFCPDYFPDFDPSEKVTKYCDEKGVWFKHPENNRTWSNYTMCNAFTPEKLKNAYVLYYLAIVGHSLSIFTLVISLGIFVFFRKLTTIFPLNWKYRKALSLGCQRVTLHKNMFLTYILNSMIIIIHLVEVVPNGELVRRDPVSCKILHFFHQYMMACNYFWMLCEGIYLHTLIVVAVFTEKQRLRWYYLLGWGFPLVPTTIHAITRAVYFNDNCWLSVETHLLYIIHGPVMAALVVNFFFLLNIVRVLVTKMRETHEAESHMYLKAVKATMILVPLLGIQFVVFPWRPSNKMLGKIYDYVMHSLIHFQGFFVATIYCFCNNEVQTTVKRQWAQFKIQWNQRWGRRPSNRSARAAAAAAEAGDIPIYICHQELRNEPANNQGEESAEIIPLNIIEQESSA

SEQ ID NO: 19643 - protein, 540 aa, Homo sapiens
MATSGAASAELVIGWCIFGLLLLAILAFCWIYVRKYQSRRESEVVSTITAIFSLAIALITSALLPVDIFLVSYMKNQNGTFKDWANANVSRQIEDTVLYGYYTLYSVILFCVFFWIPFVYFYYEEKDDDDTSKCTQIKTALKYTLGFVVICALLLLVGAFVPLNVPNNKNSTEWEKVKSLFEELGSSHGLAALSFSISSLTLIGMLAAITYTAYGMSALPLNLIKGTRSAAYERLENTEDIEEVEQHIQTIKSKSKDGRPLPARDKRALKQFEERLRTLKKRERHLEFIENSWWTKFCGALRPLKIVWGIFFILVALLFVISLFLSNLDKALHSAGIDSGFIIFGANLSNPLNMLLPLLQTVFPLDYILITIIIMYFIFTSMAGIRNIGIWFFWIRLYKIRRGRTRPQALLFLCMILLLIVLHTSYMIYSLAPQYVMYGSQNYLIETNITSDNHKGNSTLSVPKRCDADAPEDQCTVTRTYLFLHKFWFFSAAYYFGNWAFLGVFLIGLIVSCCKGKKSVIEGVDEDSDISDDEPSVYSA

SEQ ID NO: 19644 - protein, 130 aa, Homo sapiens
MNAPLGGIWLWLPLLLTWLTPEVNSSWWYMRATGGSSRVMCDNVPGLVSSQRQLCHRHPDVMRAISQGVAEWTAECQHQFRQHRWNCNTLDRDHSLFGRVLLRIGNLPLFMPSPQLELYLPSPGPVAKEK

SEQ ID NO: 19645 - protein, 241 aa, Homo sapiens
MAVFLQLLPLLLSRAQGNPGASLDGRPGDRVNLSCGGVSHPIRWVWAPSFPACKGLSKGRRPILWASSSGTPTVPPLQPFVGRLRSLDSGIRRLELLLSAGDSGTFFCKGRHEDESRTVLHVLGDRTYCKAPGPTHGSVYPQLLIPLLGAGLVLGLGALGLVWWLHRRLPPQPIRPLPRFAPLVKTEPQRPVKEEEPKIPGDLDQEPSLLYADLDHLALSRPRRLSTADPADASTIYAVVV

SEQ ID NO: 19646 - protein, 69 aa, Homo sapiens
MGAGGASFRALAWASLPLLGPPACALCEDTLCCGESPQERPGSRRSLPGSLSEKSPSMEPSAATPFRVT

SEQ ID NO: 19647 - protein, 364 aa, Homo sapiens
MAHRFPALTQEQKKELSEIAQSIVANGKGILAADESVGTMGNRLQRIKVENTEENRRQFREILFSVDSSINQSIGGVILFHETLYQKDSQGKLFRNILKEKGIVVGIKLDQGGAPLAGTNKETTIQGLDGLSERCAQYKKDGVDFGKWRAVLRIADQCPSSLAIQENANALARYASICQQNGLVPIVEPEVIPDGDHDLEHCQYVTEKVLAAVYKALNDHHVYLEGTLLKPNMVTAGHACTKKYTPEQVAMATVTALHRTVPAAVPGICFLSGGMSEEDATLNLNAINLCPLPKPWKLSFSYGRALQASALAAWGGKAANKEATQEAFMKRAMANCQAAKGQYVHTGSSGAASTQSLFTACYTY

SEQ ID NO: 19648 - protein, 386 aa, Homo sapiens
MKRRNADCSKLRRPLKRNRITEGIYGSTFLYLKFLVVWALVLLADFVLEFRFEYLWPFWLFIRSVYDSFRYQGLAFSVFFVCVAFTSNIICLLFIPIQWLFFAASTYVWVQYVWHTERGVCLPTVSLWILFVYIEAAIRFKDLKNFHVDLCRPFAAHCIGYPVVTLGFGFKSYVSYKMRLRKQKEVQKENEFYMQLLQQALPPEQQMLQKQEKEAEEAAKGLPDMDSSILIHHNGGIPANKKLSTTLPEIEYREKGKEKDKDAKKHNLGINNNNILQPVDSKIQEIEYMENHINSKRLNNDLVGSTENLLKEDSCTASSKNYKNASGVVNSSPRSHSATNGSIPSSSSKNEKKQKCTSKSPSTHKDLMENCIPNNQLSKPDALVRH

SEQ ID NO: 19649 - protein, 230 aa, Homo sapiens
MEKWYLMTVVVLIGLTVRWTVSLNSYSGAGKPPMFGDYEAQRHWQEITFNLPVKQWYFNSSDNNLQYWGLDYPPLTAYHSLLCAYVAKFINPDWIALHTSRGYESQAHKLFMRTTVLIADLLIYIPAVVLYCCCLKEISTKKKIANALCILLYPGLILIDYGHFQYNSVSLGFALWGVLGISCDCDLLGSLAFCLAINYKQMELYHALPFFCFLLGKCFKKGLKGKGNGI

SEQ ID NO: 19650 - protein, 501 aa, Homo sapiens
MQARYSVSDPNALGVVPYLSEQNYYRAAGSYGGMASPMGVYSGHPEQYSAGMGRSYAPYHHHQPAAPKDLVKPPYSYIALITMAIQNAPEKKITLNGIYQFIMDRFPFYRENKQGWQNSIRHNLSLNECFVKVPRDDKKPGKGSYWTLDPDSYNMFENGSFLRRRRRFKKKDVSKEKEERAHLKEPPPAASKGAPATPHLADAPKEAEKKVVIKSEAASPALPVITKVETLSPESALQGSPRSAASTPAGSPDGSLPEHHAAAPNGLPGFSVENIMTLRTSPPGGELSPGAGRAGLVVPPLALPYAAAPPAAYGQPCAQGLEAGAAGGYQCSMRAMSLYTGAERPAHMCVPPALDEALSDHPSGPTSPLSALNLAAGQEGALAATGHHHQHHGHHHPQAPPPPPAPQPQPTPQPGAAAAQAASWYLNHSGDLNHLPGHTFAAQQQTFPNVREMFNSHRLGIENSTLGESQVSGNASCQLPYRSTPPLYRHAAPYSYDCTKY

SEQ ID NO: 19651 - protein, 401 aa, Homo sapiens
MRGANAWAPLCLLLAAATQLSRQQSPERPVFTCGGILTGESGFIGSEGFPGVYPPNSKCTWKITVPEGKVVVLNFRFIDLESDNLCRYDFVDVYNGHANGQRIGRFCGTFRPGALVSSGNKMMVQMISDANTAGNGFMAMFSAAEPNERGDQYCGGLLDRPSGSFKTPNWPDRDYPAGVTCVWHIVAPKNQLIELKFEKFDVERDNYCRYDYVAVFNGGEVNDARRIGKYCGDSPPAPIVSERNELLIQFLSDLSLTADGFIGHYIFRPKKLPTTTEQPVTTTFPVTTGLKPTVALCQQKCRRTGTLEGNYCSSDFVLLAFAFTVTSLQNVFFCSISRHCYHNHHSRWEFARHSLDHQHLQRGKFGDSAGGQEHECQADCRLQAVPSPQKRSKLHYYGPSR

SEQ ID NO: 19652 - protein, 1036 aa, Homo sapiens
MEPQDLELELCKKHHFGINKPEKIIPSPDDSKFLLKTFTHIKSNVSAPNKKKVKESKEKEKLERRLLEELLKMFMDSESFYYSLTYDLTNSVQRQSTGERDGRPLWQKVDDRFFWNKYMIQDLTEIGTPDVDFWIIPMIQGFVQIEELVVNYTESSDDEKSSPETPPQESTCVDDIHPRFLVALISRRSRHRAGMRYKRRGVDKNGNVANYVETEQLIHVHNHTLSFVQTRGSVPVFWSQVGYRYNPRPRLDRSEKETVAYFCAHFEEQLNIYKKQVIINLVDQAGREKIIGDAYLKQVLLFNNSHLTYVSFDFHEHCRGMKFENVQTLTDAIYDIILDMKWCWVDEAGVICKQEGIFRVNCMDCLDRTNVVQAAIARVVMEQQLKKLGVMPPEQPLPVKCNRIYQIMWANNGDSISRQYAGTAALKGDFTRTGERKLAGVMKDGVNSANRYYLNRFKDAYRQAVIDLMQGIPVTEDLYSIFTKEKEHEALHKENQRSHQELISQLLQSYMKLLLPDDEKFHGGWALIDCDPSLIDATHRDVDVLLLLSNSAYYVAYYDDEVDKVNQYQRLSLENLEKIEIGPEPTLFGKPKFSCMRLHYRYKEASGYFHTLRAVMRNPEEDGKDTLQCIAEMLQITKQAMGSDLPIIEKKLERKSSKPHEDIIGIRSQNQGSLAQGKNFLMSKFSSLNQKVKQTKSNVNIGNLRKLGNFTKPEMKVNFLKPNLKVNLWKSDSSLETMENTGVMDKVQAESDGDMSSDNDSYHSDEFLTNSKSDEDRQLANSLESVGPIDYVLPSCGIIASAPRLGSRSQSLSSTDSSVHAPSEITVAHGSGLGKGQESPLKKSPSAGDVHILTGFAKPMDIYCHRFVQDAQNKVTHLSETRSVSQQASQERNQMTNQVSNETQSESTEQTPSRPSQLDVSLSATGPQFLSVEPAHSVASQKTPTSASSMLELETGLHVTPSPSESSSSRAVSPFAKIRSSMVQVASITQAGLTHGINFAVSKVQKSPPEPEIINQVQQNELKKMFIQCQTRIIQI

SEQ ID NO: 19653 - protein, 584 aa, Homo sapiens
MVKIVTVKTQAYQDQKPGTSGLRKRVKVFQSSANYAENFIQSIISTVEPAQRQEATLVVGGDGRFYMKEAIQLIARIAAANGIGRLVIGQNGILSTPAVSCIIRKIKAIGGIILTASHNPGGPNGDFGIKFNISNGGPAPEAITDKIFQISKTIEEYAVCPDLKVDLGVLGKQQFDLENKFKPFTVEIVDSVEAYATMLRSIFDFSALKELLSGPNRLKIRIDAMHGVVGPYVKKILCEELGAPANSAVNCVPLEDFGGHHPDPNLTYAADLVETMKSGEHDFGAAFDGDGDRNMILGKHGFFVNPSDSVAVIAANIFSIPYFQQTGVRGFARSMPTSGALDRVASATKIALYETPTGWKFFGNLMDASKLSLCGEESFGTGSDHIREKDGLWAVLAWLSILATRKQSVEDILKDHWQKYGRNFFTRYDYEEVEAEGANKMMKDLEALMFDRSFVGKQFSANDKVYTVEKADNFEYSDPVDGSISRNQGLRLIFTDGSRIVFRLSGTGSAGATIRLYIDSYEKDVAKINQDPQTGSHSVAQAGVQWHNLSSLQHPPSGLKQSSYLSYLSSSDYRSCWPPLFPLL

SEQ ID NO: 19654 - protein, 807 aa, Homo sapiens
MFSAGAESLLHQAREIQDEELKKFCSRICKLLQAEDLGPDTLDSLQRLFLIISATKYSRRLEKTCVDLLQATLGLPACPEQLQVLCAAILREMSPSDSLSLAWDHTQNSRQLSLVASVLLAQGDRNEEVRAVGQGVLRALESRQPEGPSLRHLLPVMAKVVVLSPGTLQEDQATLLSKRLVDWLRYASLQQGLPHSGGFFSTPRARQPGPVTEVDGAVATDFFTVLSSGHRFTDDQWLNVQAFSMLRAWLLHSGPEGPGTLDTDDRSEQEGSTLSVISATSSAGRLLPPRERLREVAFEYCQRLIEQSNRRALRKGDSDLQKACLVEAVLVLDVLCRQDPSFLYRSLSCLKALHGRVRGDPASVRVLLPLAHFFLSHGEAAAVDSEAVYQHLFTRIPVEQFHSPMLAFEFIQFCRDNLHLFSGHLSTLRLSFPNLFKFLAWNSPPLTSEFVALLPALVDAGTALEMLHALLDLPCLTAVLDLQLRSAPAASERPLWDTSLRAPSCLEAFRDPQFQGLFQYLLRPKASGATERLAPLHQLLQPMAGCARVAQCAQAVPTLLQAFFSAVTQVADGSLINQLALLLLGRSDSLYPAPGYAAGVHSVLSSQFLALCTLKPSLVVELARDLLEFLGSVNGLCSRASLVTSVVWAIGEYLSVTYDRRCTVEQINKFFEALEALLFEVTQCRPSAALPRCPPQVVTVLMTTLTKLASRSQDLIPRASLLLSKMRTLAHSPATSSTHSEEGAEAIRTRATELLTLLKMPSVAQFVLTPSTEVCSPRYHRDANTALPLALRTVSRLVEREAGLMPG

SEQ ID NO: 19655 - protein, 86 aa, Homo sapiens
MATPARAPESPPSADPALVAGPAEEAECPPPRQPQPAQNVLAAPRLRAPSSRGLGAAEFGGAAGNVEAPGETFAQRKIHLQIARQR

SEQ ID NO: 19656 - protein, 1503 aa, Homo sapiens
MEAATTLHPGPRPALPLGGPGPLGEFLPPPECPVFEPSWEEFADPFAFIHKIRPIAEQTGICKVRPPPDWQPPFACDVDKLHFTPRIQRLNELELVAEEGGFAVVCKDRKWTKIATKMGFAPGKAVGSHIRGHYERILNPYNLFLSGDSLRCLQKPNLTTDTKDKEYKPHDIPQRQSVQPSETCPPARRAKRMRAEAMNIKIEPEETTEARTHNLRRRMGCPTPKCENEKEMKSSIKQEPIERKDYIVENEKEKPKSRSKKATNAVDLYVCLLCGSGNDEDRLLLCDGCDDSYHTFCLIPPLHDVPKGDWRCPKCLAQECSKPQEAFGFEQAARDYTLRTFGEMADAFKSDYFNMPVHMVPTELVEKEFWRLVSTIEEDVTVEYGADIASKEFGSGFPVRDGKIKLSPEEEEYLDSGWNLNNMPVMEQSVLAHITADICGMKLPWLYVGMCFSSFCWHIEDHWSYSINYLHWGEPKTWYGVPGYAAEQLENVMKKLAPELFVSQPDLLHQLVTIMNPNTLMTHEVPVYRTNQCAGEFVITFPRAYHSGFNQGFNFAEAVNFCTVDWLPLGRQCVEHYRLLHRYCVFSHDEMICKMASKADVLDVVVASTVQKDMAIMIEDEKALRETVRKLGVIDSERMDFELLPDDERQCVKCKTTCFMSAISCSCKPGLLVCLHHVKELCSCPPYKYKLRYRYTLDDLYPMMNALKLRAESYNEWALNVNEALEAKINKKKSLVSFKALIEESEMKKFPDNDLLRHLRLVTQDAEKCASVAQQLLNGKRQTRYRSGGGKSQNQLTVNELRQFVTQLYALPCVLSQTPLLKDLLNRVEDFQQHSQKLLSEETPSAAELQDLLDVSFEFDVELPQLAEMRIRLEQARWLEEVQQACLDPSSLTLDDMRRLIDLGVGLAPYSAVEKAMARLQELLTVSEHWDDKAKSLLKARPRHSLNSLATAVKEIEEIPAYLPNGAALKDSVQRARDWLQDVEGLQAGGRVPVLDTLIELVTRGRSIPVHLNSLPRLETLVAEVQAWKECAVNTFLTENSPYSLLEVLCPRCDIGLLGLKRKQRKLKEPLPNGKKKSTKLESLSDLERALTESKETASAMATLGEARLREMEALQSLRLANEGKLLSPLQDVDIKICLCQKAPAAPMIQCELCRDAFHTSCVAVPSISQGLRIWLCPHCRRSEKPPLEKILPLLASLQRIRVRLPEGDALRYMIERTVNWQHRAQQLLSSGNLKFVQDRVGSGLLYSRWQASAGQVSDTNKVSQPPGTTSFSLPDDWDNRTSYLHSPFSTGRSCIPLHGVSPEVNELLMEAQLLQVSLPEIQELYQTLLAKPSPAQQTDRSSPVRPSSEKNDCCRGKRDGINSLERKLKRRLEREGLSSERWERVKKMRTPKKKKIKLSHPKDMNNFKLERERSYELVRSAETHSLPSDTSYSEQEDSEDEDAICPAVSCLQPEGDEVDWVQCDGSCNQWFHQVCVGVSPEMAEKEDYICVRCTVKDAPSRK

SEQ ID NO: 19657 - protein, 493 aa, Homo sapiens
MARAPLGVLLLLGLLGRGVGKNEELRLYHHLFNNYDPGSRPVREPEDTVTISLKVTLTNLISLNEKEETLTTSVWIGIDWQDYRLNYSKDDFGGIETLRVPSELVWLPEIVLENNIDGQFGVAYDANVLVYEGGSVTWLPPAIYRSVCAVEVTYFPFDWQNCSLIFRSQTYNAEEVEFTFAVDNDGKTINKIDIDTEAYTENGEWAIDFCPGVIRRHHGGATDGPGETDVIYSLIIRRKPLFYVINIIVPCVLISGLVLLAYFLPAQAGGQKCTVSINVLLAQTVFLFLIAQKIPETSLSVPLLGRFLIFVMVVATLIVMNCVIVLNVSQRTPTTHAMSPRLRHVLLELLPRLLGSPPPPEAPRAASPPRRASSVGLLLRAEELILKKPRSELVFEGQRHRQGTWTAAFCQSLGAAAPEVRCCVDAVNFVAESTRDQEATGEEVSDWVRMGNALDNICFWAALVLFSVGSSLIFLGAYFNRVPDLPYAPCIQP

SEQ ID NO: 19658 - protein, 59 aa, Homo sapiens
MRQSLLFLTSVVPFVLAPRPPDDPGFGPHQRLAFGKKKRSTDFNTCRNTTNFFSFEKAF

SEQ ID NO: 19659 - protein, 1177 aa, Homo sapiens
MVWRLVLLALWVWPSTQAGHQDKDTTFDLFSISNINRKTIGAKQFRGPDPGVPAYRFVRFDYIPPVNADDLSKITKIMRQKEGFFLTAQLKQDGKSRGTLLALEGPGLSQRQFEIVSNGPADTLDLTYWIDGTRHVVSLEDVGLADSQWKNVTVQVAGETYSLHVGCDLIDSFALDEPFYEHLQAEKSRMYVAKGSARESHFRGLLQNVHLVFENSVEDILSKKGCQQGQGAEINAISENTETLRLGPHVTTEYVGPSSERRPEVCERSCEELGNMVQELSGLHVLVNQLSENLKRVSNDNQFLWELIGGPPKTRNMSACWQDGRFFAENETWVVDSCTTCTCKKFKTICHQITCPPATCASPSFVEGECCPSCLHSVDGEEGWSPWAEWTQCSVTCGSGTQQRGRSCDVTSNTCLGPSIQTRACSLSKCDTRSECRAVRQDGGWSHWSPWSSCSVTCGVGNITRIRLCNSPVPQMGGKNCKGSGRETKACQGAPCPIDGRWSPWSPWSACTVTCAGGIRERTRVCNSPEPQYGGKACVGDVQERQMCNKRSCPVDGCLSNPCFPGAQCSSFPDGSWSCGSCPVGFLGNGTHCEDLDECALVPDICFSTSKVPRCVNTQPGFHCLPCPPRYRGNQPVGVGLEAAKTEKQVCEPENPCKDKTHNCHKHAECIYLGHFSDPMYKCECQTGYAGDGLICGEDSDLDGWPNLNLVCATNATYHCIKDNCPHLPNSGQEDFDKDGIGDACDDDDDNDGVTDEKDNCQLLFNPRQADYDKDEVGDRCDNCPYVHNPAQIDTDNNGEGDACSVDIDGDDVFNERDNCPYVYNTDQRDTDGDGVGDHCDNCPLVHNPDQTDVDNDLVGDQCDNNEDIDDDGHQNNQDNCPYISNANQADHDRDGQGDACDPDDDNDGVPDDRDNCRLVFNPDQEDLDGDGRGDICKDDFDNDNIPDIDDVCPENNAISETDFRNFQMVPLDPKGTTQIDPNWVIRHQGKELVQTANSDPGIAVGFDEFGSVDFSGTFYVNTDRDDDYAGFVFGYQSSSRFYVVMWKQVTQTYWEDQPTRAYGYSGVSLKVVNSTTGTGEHLRNALWHTGNTPGQVRTLWHDPRNIGWKDYTAYRWHLTHRPKTGYIRVLVHEGKQVMADSGPIYDQTYAGGRLGLFVFSQEMVYFSDLKYECRDI

SEQ ID NO: 19660 - protein, 201 aa, Homo sapiens
IHPGSPSAWPPRARAALRLWLGCVCFALVQADSPSAPVNVTVRHLKANSAVVSWDVLEDEVVIGFAISQQEVNTTTRSCALWDLEEDTEYIVHVQAISIQGQSPASEPVLFKTPREAEKMASKNKDEVTMKEMGRNQQLRTGEVLIIVVVLFMWAGVIALFCRQYDIIKDNEPNNNKEKTKSASETSTPEHQGGGLLRSKI

SEQ ID NO: 19661 - protein, 64 aa, Homo sapiens
NFDAQQFAGTWLLVAVGSACRFLQEQGHRAEATTLHVAPQGTAMAVSTFRKLPRRPRGCARGCR

SEQ ID NO: 19662 - protein, 454 aa, Homo sapiens
MEDYLQGCRAALQESRPLHVVLGNEACDLDSTVSALALAFYLAKKVHIPESILIFRDEIDLHALYQAGQLTLILVDHHILSKSDTALEEAVAEVLDHRPIEPKHCPPCHVSVELVGSCATLVTERILQGAPEILDRQTAALLHGTIILDCVNMDLKIGKATPKDSKYVEKLEALFPDLPKRNDIFDSLQKAKFDVSGLTTEQMLRKDQKTIYRQGVKVAISAIYMDLEAFLQRSNLLADLHAFCQAHSYDVLVAMTIFFNTHNEPVRQLAIFCPHVALQTTGQSLAMLPRLVSNSWTQVIHQPQLPRVLELQICEVLERSHSPPLKLTPASSTHPNLHAYLQGNTQVSRKKLLPLLQEALSAYFDSMKIPSGQPETADVSREQVDKELDRASNSLISGLSQDEEDPPLPPTPMNSLVDECPLDQGLPKLSAEAVFEKCSQISLSQSTTASLSKK

SEQ ID NO: 19663 - protein, 161 aa, Homo sapiens
MHRSEPFLKMSLLILLFLGLAEACTPREVATKEKINLLKGIIGLMSRLSPDGLRHNITSLKMPPLVSPQDRTEEEIKKILGLLSLQVLHEETSGCKEEVKPFSGTTPSRKPLPKRKNTWNFLKCAYMVMTYLFVSYNKGDWCYCHYCNLELDIRDDPCCSF

SEQ ID NO: 19664 - protein, 561 aa, Homo sapiens
MRWILCWSLTLCLMAQTALGALHTKRPQVVTKYGTLQGKQMHVGKTPIQVFLGVPFSRPPLGILRFAPPEPPEPWKGIRDATTYPPGCLQESWGQLASMYVSTRERYKWLRFSEDCLYLNVYAPARAPGDPQLPVMVWFPGGAFIVGAASSYEGSDLAAREKVVLVFLQHRLGIFGFLSTDDSHARGNWGLLDQMAALRWVQENIAAFGGDPGNVTLFGQSAGAMSISGLMMSPLASGLFHRAISQSGTALFRLFITSNPLKVAKKVAHLAGCNHNSTQILVNCLRALSGTKVMRVSNKMRFLQLNFQRDPEEIIWSMSPVVDGVVIPDDPLVLLTQGKVSSVPYLLGVNNLEFNWLLPYIMKFPLNRQAMRKETITKMLWSTRTLLNITKEQVPLVVEEYLDNVNEHDWKMLRNRMMDIVQDATFVYATLQTAHYHRDAGLPVYLYEFEHHARGIIVKPRTDGADHGDEMYFLFGGPFATGLSMGKEKALSLQMMKYWANFARTGNPNDGNLPCWPRYNKDEKYLQLDFTTRVGMKLKEKKMAFWMSLYQSQRPEKQRQF

SEQ ID NO: 19665 - protein, 361 aa, Homo sapiens
MGRDQRAVAGPALRRWLLLGTVTVGFLAQSVLAGVKKFDVPCGGRDCSGGCQCYPEKGGRGQPGPVGPQGYNGPPGLQGFPGLQGRKGDKGERGAPGVTGPKGDVGARGVSGFPGADGIPGHPGQGGPRGRPGYDGCNGTQGDSGPQGPPGSEGFTGPPGPQGPKGQKGEPYALPKEERDRYRGEPGEPGLVGFQGPPGRPGHVGQMGPVGAPGRPGPPGPPGPKGQQGNRGLGFYGVKGEKGDVGQPGPNGIPSDTLHPIIAPTGVTFHPDQYKGEKGSEGEPGIRGISLKGEEGIMGFPGLRGYPGLSGEKGSPGQKGSRGLDGYQGPDGPRGPKGEAGDPGPPGLPAYSPHPSLAKGV

SEQ ID NO: 19666 - protein, 340 aa, Homo sapiens
MLLPLLRSSCFPSSSPGGGGGSGGGGGGGDPGAESRPAAQLQRGAHGPPGPLQRAEAEPGADPPRAAEAEGAPGPGARSRGAGGGGRRAEREPHACMDPGAALQRRAGGGGGLGAGSPALSGGQGRRRKQPPRPADFKLQVIIIGSRGVGKTSLMERFTDDTFCEACKSTVGVDFKIKTVELRGKKIRLQIWDTAGQERFNSITSAYYRSAKGIILVYDITKKETFDDLPKWMKMIDKYASEDAELLLVGNKLDCETDREITRQQGEKFAQQITGMRFCEASAKDNFNVDEIFLKLVDDILKKMPLDILRNELSNSILSLQPEPEIPPELPPPRPHVRCC

SEQ ID NO: 19667 - protein, 321 aa, Homo sapiens
MSEQSKDLSDPNFAAEAPNSEVHSSPGVSEGVPPSATLAEPQSPPLGPTAAPQAAPPPQAPNDEGDPKALQQAAEEGRAHQAPSAAQPGPAPPAPAQLVQKAHELMWYVLVKDQKKMIIWFPDMVKDVIGSYKKWCRSILRRTSLILARVFGLHLRLTSLHTMEFALVKALEPEELDRVALSNRMPMTGLLLMILSLIYVKGRGARESAVWNVLRILGLRPWKKHSTFGDVRKLITEEFVQMNYLKYQRVPYVEPPEYEFFWGSRASREITKMQIMEFLARVFKKDPQAWPSRYREALEEARALREANPTAHYPRSSVSED

SEQ ID NO: 19668 - protein, 1321 aa, Homo sapiens
MSDSVILRSIKKFGEENDGFESDKSYNNDKKSRLQDEKKGDGVRVGFFQLFRFSSSTDIWLMFVGSLCAFLHGIAQPGVLLIFGTMTDVFIDYDVELQELQIPGKACVNNTIVWTNSSLNQNMTNGTRCGLLNIESEMIKFASYYAGIAVAVLITGYIQICFWVIAAARQIQKMRKFYFRRIMRMEIGWFDCNSVGELNTRFSDDINKINDAIADQMALFIQRMTSTICGFLLGFFRGWKLTLVIISVSPLIGIGAATIGLSVSKFTDYELKAYAKAGVVADEVISSMRTVAAFGGEKREVERYEKNLVFAQRWGIRKGIVMGFFTGFVWCLIFLCYALAFWYGSTLVLDEGEYTPGTLVQIFLSVIVGALNLGNASPCLEAFATGRAAATSIFETIDRKPIIDCMSEDGYKLDRIKGEIEFHNVTFHYPSRPEVKILNDLNMVIKPGEMTALVGPSGAGKSTALQLIQRFYDPCEGMVTVDGHDIRSLNIQWLRDQIGIVEQEPVLFSTTIAENIRYGREDATMEDIVQAAKEANAYNFIMDLPQQFDTLVGEGGGQMSGGQKQRVAIARALIRNPKILLLDMATSALDNESEAMVQEVLSKIQHGHTIISVAHRLSTVRAADTIIGFEHGTAVERGTHEELLERKGVYFTLVTLQSQGNQALNEEDIKDATEDDMLARTFSRGSYQDSLRASIRQRSKSQLSYLVHEPPLAVVDHKSTYEEDRKDKDIPVQEEVEPAPVRRILKFSAPEWPYMLVGSVGAAVNGTVTPLYAFLFSQILGTFSIPDKEEQRSQINGVCLLFVAMGCVSLFTQFLQGYAFAKSGELLTKRLRKFGFRAMLGQDIAWFDDLRNSPGALTTRLATDASQVQGAAGSQIGMIVNSFTNVTVAMIIAFSFSWKLSLVILCFFPFLALSGATQTRMLTGFASRDKQALEMVGQITNEALSNIRTVAGIGKERRFIEALETELEKPFKTAIQKANIYGFCFAFAQCIMFIANSASYRYGGYLISNEGLHFSYVFRVISAVVLSATALGRAFSYTPSYAKAKISAARFFQLLDRQPPISVYNTAGEKWDNFQGKIDFVDCKFTYPSRPDSQVLNGLSVSISPGQTLAFVGSSGCGKSTSIQLLERFYDPDQGKVMIDGHDSKKVNVQFLRSNIGIVSQEPVLFACSIMDNIKYGDNTKEIPMERVIAAAKQAQLHDFVMSLPEKYETNVGSQGSQLSRGEKQRIAIARAIVRDPKILLLDEATSALDTESEKTVQVALDKAREGRTCIVIAHRLSTIQNADIIAVMAQGVVIEKGTHEELMAQKGAYYKLVTTGSPIS

SEQ ID NO: 19669 - protein, 145 aa, Homo sapiens
GITCCVLLLLNCSGVPMSLASSFLTGSVAKCENEGEVLQIPFITDNPCIMCVCLVAPMKEIPITAPSNGRARLSLVFYASARRALSQSLGCAVLFIVKTLWSIWECAAPHVQAVCLRVCSIKKGRNFSQKEANVPSVPALSEESV

SEQ ID NO: 19670 - protein, 73 aa, Homo sapiens
MAGVKALVALSFSGAIGLTFLMLGCALEDYGSNGEPAALCWQAMQSFSLQFKGFSLYLEEEMILAGSSGSTLF

SEQ ID NO: 19671 - protein, 177 aa, Homo sapiens
MPRLLRLSLLWLGLLLVRFSRELSDISSARKLCGRYLVKEIEKLCGHANWSQFRFEEETPFSRLIAQASEKVEAYSPYQFESPQTASPARGRGTNPVSTSWEEAVNSWEMQSLPEYKDKKGYSPLGLLEFAGGPLQMLFAWVSPAEAAEQQRLLPVPSSGSFIPEGHPLDASQSFPV

SEQ ID NO: 19672 - protein, 105 aa, Homo sapiens
CGALLACLLLVLPVSEANFLSKQQASQVLVRKRRANSLLEETKQGNLERECIEELCNKEEAREVFENDPETDYFYPKYLAPCCVTQAGVLWPALSSLQLLSPWFK

SEQ ID NO: 19673 - protein, 91 aa, Homo sapiens
MAQFVRNLVEKTPALVNAAVTYSKPRLATFWYYAKVELVPPTPAEIPRAIQSLKKIVNSAQTGSFKQLTVKVPQLKRDEETLETVLRRLKR

SEQ ID NO: 19674 - protein, 155 aa, Homo sapiens
MTPGKTSLVSLLLLLSLEAIVKAGITIPRNPGCPNSEDKNFPRTVMVNLNIHNRNTNTNPKRSSDYYNRSTSPWNLHRNEDPERYPSVIWEAKCRHLGCINADGNVDYHMNSVPIQQEILVLRREPPHCPNSFRLEKILVSVGCTCVTPIVHHVA

SEQ ID NO: 19675 - protein, 334 aa, Homo sapiens
MMQESGTETKSNGSAIQNGSGGSNHLLECGGLREGRSNGETPAVDIGAADLAHAQQQQQQALQVARQLLLQQQQQQQVSGLKSPKRNDKQPALQVPVSVAMMTPQVITPQQMQQILQQQVLSPQQLQVLLQQQQALMLQQQLQEFYKKQQEQLQLQLLQQQHAGKQPKEQQQVATQQLAFQQQLLQMQQLQQQHLLSLQRQGLLTIQPGQPALPLQPLAQGMIPTELQQLWKEVTSAHTAEETTGNNHSSLDLTTTCVSSSAPSKTSLIMNPHASTNGQLSVHTPKRESLSHEEHPHSHPLYGHGVCKWPGCEAVCEDFQSFLNLQKTKNACKP

SEQ ID NO: 19676 - protein, 824 aa, Homo sapiens
MSLLGDPLQALPPSAAPTGPLLAPPAGATLNRLREPLLRRLSELLDQAPEGRGWRRLAELAGSRGRLRLSCLDLEQCSLKVLEPEGSPSLCLLKLMGEKGCTVTELSDFLQAMEHTEVLQLLSPPGIKITVNPESKAVLAGQFVKLCCRATGHPFVQYQWFKMNKEIPNGNTSELIFNAVHVKDAGFYVCRVNNNFTFEFSQWSQLDVCDIPESFQRSVDGVSESKLQICVEPTSQKLMPGSTLVLQCVAVGSPIPHYQWFKNELPLTHETKKLYMVPYVDLEHQGTYWCHVYNDRDSQDSKKVEIIIGRTDEAVECTEDELNNLGHPDNKEQTTDQPLAKDKVALLIGNMNYREHPKLKAPLVDVYELTNLLRQLDFKVVSLLDLTEYEMRNAVDEFLLLLDKGVYGLLYYAGHGYENFGNSFMVPVDAPNPYRSENCLCVQNILKLMQEKETGLNVFLLDMCRKRNDYDDTIPILDALKVTANIVFGYATCQGAEAFEIQHSGLANGIFMKFLKDRLLEDKKITVLLDEVAEDMGKCHLTKGKQALEIRSSLSEKRALTDPIQGTEYSAESLVRNLQWAKAHELPESMCLKFDCGVQIQLGFAAEFSNVMIIYTSIVYKPPEIIMCDAYVTDFPLDLDIDPKDANKGTPEETGSYLVSKDLPKHCLYTRLSSLQKLKEHLVFTVCLSYQYSGLEDTVEDKQEVNVGKPLIAKLDMHRGLGRKTCFQTCLMSNGPYQSSAATSGGAGHYHSLQDPFHGVYHSHPGNPSNVTPADSCHCSRTPDAFISSFAHHASCHFSRSNVPVETTDEIPFSFSDRLRISEK

SEQ ID NO: 19677 - protein, 910 aa, Homo sapiens
MSKTNKSKSGSRSSRSRSASRSRSRSFSKSRSRSRSLSRSRKRRLSSRSRSRSYSPAHNRERNHPRVYQNRDFRGHNRGYRRPYYFRGRNRGFYPWGQYNRGGYGNYRSNWQNYRQAYSPRRGRSRSRSPKRRSPSPRSRSHSRNSDKSSSDRSRRSSSSRSSSNHSRVESSKRKSAKEKKSSSKDSRPSQAAGDNQGDEAKEQTFSGGTSQDTKASESSKPWPDATYGTGSASRASAVSELSPRERSPALKSPLQSVVVRRRSPRPSPVPKPSPPLSSTSQMGSTLPSGAGYQSGTHQGQFDHGSGSLSPSKKSPVGKSPPSTGSTYGSSQKEESAASGGAAYTKRYLEEQKTENGKDKEQKQTNTDKEKIKEKGSFSDTGLGDGKMKSDSFAPKTDSEKPFRGSQSPKRYKLRDDFEKKMADFHKEEMDDQDKDKAKGRKESEFDDEPKFMSKVIGANKNQEEEKSGKWEGLVYAPPGKEKQRKTEELEEESFPERSKKEDRGKRSEGGHRGFVPEKNFRVTAYKAVQEKSSSPPPRKTSESRDKLGAKGDFPTGKSSFSITREAQVNVRMDSFDEDLARPSGLLAQERKLCRDLVHSNKKEQEFRSIFQHIQSAQSQRSPSELFAQHIVTIVHHVKEHHFGSSGMTLHERFTKYLKRGTEQEAAKNKKSPEIHRRIDISPSTFRKHGLAHDEMKSPREPGYKAEGKYKDDPVDLRLDIERRKKHKERDLKRGKSRESVDSRDSSHSRERSAEKTEKTHKGSKKQKKHRRARDRSRSSSSSSQSSHSYKAEEYTEETEEREESTTGFDKSRLGTKDFVGPSERGGGRARGTFQFRARGRGWGRGNYSGNNNNNSNNDFQKRNREEEWDPEYTPKSKKYYLHDDREGEGSDKWAYVVILETFNLGNFDS

SEQ ID NO: 19678 - protein, 335 aa, Homo sapiens
MMQESGTETKSNGSAIQNGSGGSNHLLECGGLREGRSNGETPAVDIGAADLAHAQQQQQQALQVARQLLLQQQQQQQVSGLKSPKRNDKQPALQVPVSVAMMTPQVITPQQMQQILQQQVLSPQQLQVLLQQQQALMLQQQQLQEFYKKQQEQLQLQLLQQQHAGKQPKEQQQVATQQLAFQQQLLQMQQLQQQHLLSLQRQGLLTIQPGQPALPLQPLAQGMIPTELQQLWKEVTSAHTAEETTGNNHSSLDLTTTCVSSSAPSKTSLIMNPHASTNGQLSVHTPKRESLSHEEHPHSHPLYGHGVCKWPGCEAVCEDFQSFLNLQKTKNACKP

SEQ ID NO: 19679 - protein, 973 aa, Homo sapiens
MEVTCLLLLALIPFHCRGQGVYAPAQAQIVHAGQACVVKEDNISERVYTIREGDTLMLQCLVTGHPRPQVRWTKTAGSASDKFQETSVFNETLRIERIARTQGGRYYCKAENGVGVPAIKSIRVDVQYLDEPMLTVHQTVSDVRGNFYQEKTVFLRCTVNSNPPARFIWKRGSDTLSHSQDNGVDIYEPLYTQGETKVLKLKNLRPQDYASYTCQVSVRNVCGIPDKAITFRLTNTTAPPALKLSVNETLVVNPGENVTVQCLLTGGDPLPQLQWSHGPGPLPLGALAQGGTLSIPSVQARDSGYYNCTATNNVGNPAKKTVNLLVRSMKNATFQITPDVIKESENIQLGQDLKLSCHVDAVPQEKVTYQWFKNGKPARMSKRLLVTRNDPELPAVTSSLELIDLHFSDYGTYLCMASFPGAPVPDLSVEVNISSETVPPTISVPKGRAVVTVREGSPAELQCEVRGKPRPPVLWSRVDKEAALLPSGLPLEETPDGKLRLERVSRDMSGTYRCQTARYNGFNVRPREAQVQLNVQFPPEVEPSSQDVRQALGRPVLLRCSLLRGSPQRIASAVWRFKGQLLPPPPVVPAAAEAPDHAELRLDAVTRDSSGSYECSVSNDVGSAACLFQVSAKAYSPEFYFDTPNPTRSHKLSKNYSYVLQWTQREPDAVDPVLNYRLSIRQLNQHNAVVKAIPVRRVEKGQLLEYILTDLRVPHSYEVRLTPYTTFGAGDMASRIIHYTEPINSPNLSDNTCHFEDEKICGYTQDLTDNFDWTRQNALTQNPKRSPNTGPPTDISGTPEGYYMFIETSRPRELGDRARLVSPLYNASAKFYCVSFFYHMYGKHIGSLNLLVRSRNKGALDTHAWSLSGNKGNVWQQAHVPISPSGPFQIIFEGVRGPGYLGDIAIDDVTLKKGECPRKQTDPNKGILLCGLDSEDLHPGLLPVNLCAFVHSANTNQTLPLWKPLFNGRDGQM

SEQ ID NO: 19680 - protein, 135 aa, Homo sapiens [sequence omitted]

SEQ ID NO: 19681 - protein, 109 aa, Homo sapiens
MTMRSLLRTPFLCGLLWAFCAPGARAEEPAASFSQPGSMGLDKNTVHDQEHIMEHLEGVINKPEAEMSPQELQLHYFKMHDYDGNNLLDGLELSTAITHVHKEGVNRHH

SEQ ID NO: 19682 - protein, 291 aa, Homo sapiens
MEERTITIEIPEVLKKQLEDDCYYINRRKRLVKLPCQTNIITILESYVKHFAINAAFSANERPRHHHVMPHANMNVHYIPAEKNVDLCKEMVDGLRITFDYTLPLVLLYPYEQAQYKKVTSSKFFLPIKESATSTNRSQEELSPSPPLLNPSTPQSTESQPTTGEPATPKRRKAEPEALQSLRRSTRHSANCDRLSESSASPQPKRRQQDTSASMPKLFLHLEKTSPAVLTPSGVLLSIILLELPKVIPVPFCVQVPISLCTSCPCHIHKLLRERSDLLIVSPHHSSVLVA

SEQ ID NO: 19683 - protein, 925 aa, Homo sapiens
MERDGCAGGGSRGGEGGRAPREGPAGNGRDRGRSHAAEAPGDPQAAASLLAPMDVGEEPLEKAARARTAKDPNTYKVLSLVLSVCVLTTILGCIFGLKPSCAKEVKSCKGRCFERTFGNCRCDAACVELGNCCLDYQETCIEPEHIWTCNKFRCGEKRLTRSLCACSDDCKDKGDCCINYSSVCQGEKSWVEEPCESINEPQCPAGFETPPTLLFSLDGFRAEYLHTWGGLLPVISKLKKCGTYTKNMRPVYPTKTFPNHYSIVTGLYPESHGIIDNKMYDPKMNASFSLKSKEKFNPEWYKGEPIWVTAKYQGLKSGTFFWPGSDVEINGIFPDIYKMYNGSVPFEERILAVLQWLQLPKDERPHFYTLYLEEPDSSGHSYGPVSSEVIKALQRVDGMVGMLMDGLKELNLHRCLNLILISDHGMEQGSCKKYIYLNKYLGDVKNIKVIYGPAARLRPSDVPDKYYSFNYEGIARNLSCREPNQHFKPYLKHFLPKRLHFAKSDRIEPLTFYLDPQWQLALNPSERKYCGSGFHGSDNVFSNMQALFVGYGPGFKHGIEADTFENIEVYNLMCDLLNLTPAPNNGTHGSLNHLLKNPVYTPKHPKEVHPLVQCPFTRNPRDNLGCSCNPSILPIEDFQTQFNLTVAEEKIIKHETLPYGRPRVLQKENTICLLSQHQFMSGYSQDILMPLWTSYTVDRNDSFSTEDFSNCLYQDFRIPLSPVHKCSFYKNNTKVSYGFLSPPQLNKNSSGIYSEALLTTNIVPMYQSFQVIWRYFHDTLLRKYAEERNGVNVVSGPVFDFDYDGRCDSLENLRQKRRVIRNQEILIPTHFFIVLTSCKDTSQTPLHCENLDTLAFILPHRTDNSESCVHGKHDSSWVEELLMLHRARITDVEHITGLSFYQQRKEPVSDILKLKTHLPTFSQED

SEQ ID NO: 19684 - protein, 45 aa, Homo sapiens
MVKVTFNSALAQKEAKKDEPKSGEEALIIPPDAVAVDCKFYLGPC

SEQ ID NO: 19685 - protein, 233 aa, Homo sapiens
MEPTAPSLTEEDLTEVKKDALENLRVYLCEKIIAERHFDHLRAKKILSREDTEEISCRTSSRKRAGKLLDYLQENPKGLDTLVESIRREKTQNFLIQKITDEVLKLRNIKLEHLKGLKCSSCEPFPDGATNNLSRSNSDESNFSEKLRASTVMYHPEGESSTTPFFSTNSSLNLPVLEVGRTENTIFSSTTLPRPGDPGAPPLPPDLQLEEEGTCANSSEMFLPLRSRTVSRQ

SEQ ID NO: 19686 - protein, 210 aa, Homo sapiens
MCFGLAFMLAGVILGGAYLYKYFALQPDDVYYCGIKYIKDDVILNEPSADAPAALYQTIEENIKIFEEEEVEFISVPVPEFADSDPANIVHDFNKKLTAYLDLNLDKCYVIPLNTSIVMPPRNLLELLINIKAGTYLPQSYLIHEHMVITDRIENIDHLGFFIYRLCHDKETYKLQRRETIKGIQKREASNCFAIRHFENKFAVETLICS

SEQ ID NO: 19687 - protein, 424 aa, Homo sapiens
MVSSQKLEKPIEMGSSEPLPIADGDRRRKKKRRGRATDSLPGKFEDMYKLTSELLGEGAYAKVQGAVSLQNGKEYAVKIIEKQAGHSRSRVFREVETLYQCQGNKNILELIEFFEDDTRFYLVFEKLQGGSILAHIQKQKHFNEREASRVVRDVAAALDFLHTKGIAHRDLKPENILCESPEKVSPVKICDFDLGSGMKLNNSCTPITTPELTTPCGSAEYMAPEVVEVFTDQATFYDKRCDLWSLGVVLYIMLSGYPPFVGHCGADCGWDRGEVCRVCQNKLFESIQEGKYEFPDKDWAHISSEAKDLISKLLVRDAKQRLSAAQVLQHPWVQGQAPEKGLPTPQVLQRNSSTMDLTLFAAEAIALNRQLSQHEENELAEEPEALADGLCSMKLSPPCKSRLARRRALAQAGRGEDRSPPTAL

SEQ ID NO: 19688 - protein, 104 aa, Homo sapiens
MATSGAASAELVIGWCIFGLLLLAILAFCWIYVRKYQSRRESEVVSTITAIFSLAIALITSALLPVDIFLVSYMKNQNGTFKDWANANVSRQIEDTVLYGYYTN

SEQ ID NO: 19689 - protein, 272 aa, Homo sapiens
MLLVQGQFPRQCPRRGRGPLARVASPSLPAARGHFRCCFCEFFRCTRVLLKRQLRSPRSAEPAEPQPCCPGTKTNSPKIRSYVEDRASWCTGWPWTSLPLAAVASLPALGGGASVSLRCWAADRPNRHAWYPRGVRQETTKTDAMTEADVNPKAYPLADAHLTKKLLDLVQQSCNYKQLRKGANEATKTLNRGISEFIVMAADAEPLEIILHLPLLCEDKNVPYVFVRSKQALGRACGVSRPVIACSVTIKEGSQLKQQIQSIQQSIERLLV

SEQ ID NO: 19690 - protein, 470 aa, Homo sapiens
MQLRNPELHLGCALALRFLALVSWDIPGARALDNGLARTPTMGWLHWERFMCNLDCQEEPDSCISWSFALVAQAGVQCHDLGSPQPPPPRFKQFSCLILASSWNYSEKLFMEMAELMVSEGWKDAGYEYLCIDDCWMAPQRDSEGRLQADPQRFPHGIRQLANYVHSKGLKLGIYADVGNKTCAGFPGSFGYYDIDAQTFADWGVDLLKFDGCYCDSLENLADGYKHMSLALNRTGRSIVYSCEWPLYMWPFQKPNYTEIRQYCNHWRNFADIDDSWKSIKSILDWTSFNQERIVDVAGPGGWNDPDMLVIGNFGLSWNQQVTQMALWAIMAAPLFMSNDLRHISPQAKALLQDKDVIAINQDPLGKQGYQLRQGDNFEVWERPLSGLAWAVAMINRQEIGGPRSYTIAVASLGKGVACNPACFITQLLPVKRKLGFYEWTSRLRSHINPTGTVLLQLENTMQMSLKDLL

SEQ ID NO: 19691 - protein, 74 aa, Homo sapiens
MSFFNFAMPLFITITSYSLMEQKLGKSGHLQVPALIAKMVPTINAINYALGNEMVCRGIWQCLSPQKREKDRTK

SEQ ID NO: 19692 - protein, 642 aa, Homo sapiens
MLTLQTWLVQALFIFLTTESTGELLDPCGYISPESPVVQLHSNFTAVCVLKEKCMDYFHVNANYIVWKTNHFTIPKEQYTIINRTASSVTFTDIASLNIQLTCNILTFGQLEQNVYGITIISGLPPEKPKNLSCIVNEGKKMRCEWDGGRETHLETNFTLKSEWATHKFADCKAKRDTPTSCTVDYSTVYFVNIEVWVEAENALGKVTSDHINFDPVYKVKPNPPHNLSVINSEELSSILKLTWTNPSIKSVIILKYNIQYRTKDASTWSQIPPEDTASTRSSFTVQDLKPFTEYVFRIRCMKEDGKGYWSDWSEEASGITYEDRPSKAPSFWYKIDPSHTQGYRTVQLVWKTLPPFEANGKILDYEVTLTRWKSHLQNYTVNATKLTVNLTNDRYLATLTVRNLVGKSDAAVLTIPACDFQATHPVMDLKAFPKDNMLWVEWTTPRESVKKYILEWCVLSDKAPCITDWQQEDGTVHRTYLRGNLAESKCYLITVTPVYADGPGSPESIKAYLKQAPPSKGPTVRTKKVGKNEAVLEWDQLPVDVQNGFIRNYTIFYRTIIGNETAVNVDSSHTEYTLSSLTSDTLYMVRMAAYTDEGGKDGPEFTFTTPKFVSWIHYGFFTWLESCQRGPYSLVEEILHK

SEQ ID NO: 19693 - protein, 236 aa, Homo sapiens
MMVVLLGATTLVLVAVAPWVLSAAAGGKNLKSPQKVEVDIIDDNFILRWNRSDESVGNVTFSFDYQKTGMDNWIKLSGCQNITSTKCNFSSLKLNVYEEIKLRIRAEKENTSSWYEVDSFTPFRKAQIGPPEVHLEAEDKAIVIHISPGTKDSVMWALDGLSFTYSLVIWKNSSGVEERIENIYSRHKIYKLSPETTYCLKVKAALLTSWKIGVYSPVHCIKTTVCILGGRGRWIT

SEQ ID NO: 19694 - protein, 631 aa, Homo sapiens
MNGDSRAAVVTSPPPTTAPHKERYFDRVDENNPEYLRERNMAPDLRQDFNMMEQKKRVSMILQSPAFCEELESMIQEQFKKGKNPTGLLALQQIADFMTTNVPNVYPAAPQGGMAALNMSLGMVTPVNDLRGSDSIAYDKGEKLLRCKLAAFYRLADLFGWSQLIYNHITTRVNSEQEHFLIVPFGLLYSEVTASSLVKINLQGDIVDRGSTNLGVNQAGFTLHSAIYAARPDVKCVVHIHTPAGAAVSAMKCGLLPISPEALSLGEVAYHDYHGILVDEEEKVLIQKNLGPKSKVLILRNHGLVSVGESVEEAFYYIHNLVVACEIQVRTLASAGGPDNLVLLNPEKYKAKSRSPGSPVGEGTGSPPKWQIGEQEFEALMRMLDNLGYRTGYPYRYPALREKSKKYSDVEVPASVTGYSFASDGDSGTCSPLRHSFQKQQREKTRWLNSGRGDEASEEGQNGSSPKSKTKWTKEDGHRTSTSAVPNLFVPLNTNPKEVQEMRNKIREQNLQDIKTAGPQSQVLCGVVMDRSLVQGELVTASKAIIEKEYQPHVIVSTTGPNPFTTLTDRELEEYRREVERKQKGSEENLDEAREQKEKSPPDQPAVPHPPPSTPIKLEEGDGCAREYLLP

SEQ ID NO: 19695 - protein, 251 aa, Homo sapiens
MAGSSSLEAVRRKIRSLQEQADAAEERAGTLQRELDHERKLRETAEADVASLNRRIQLVEEELDRAQERLATALQKLEEAEKAADESERGMKVIESRAQKDEEKMEIQEIQLKEAKHIAEDADRKYEEVARKLVIIESDLERAEERAELSEGKCAELEEELKTVTNNLKSLEAQAEKYSQKEDRYEEEIKVLSDKLKEAETRAEFAERSVTKLEKSIDDLEDKFLCFTSPKTPSSSWMSHLSELCICLFSS

SEQ ID NO: 19696 - protein, 546 aa, Homo sapiens
GLLPRRRRCFPARAPLLRVALCLLCWTPAAVRAVPELGLWLETVNDKSGPLIFRKTMFNSTDIKLSVKSFHCSGPVKFTIVWHLKYHTCHNEHSNLEELFQKHKLSVDEDFCHYLKNDNCWTTKNENLDCNSDSQVFPSLNNKELINIRNVSNQERSMDVVARTQKDGFHIFIVSIKTENTDASWNLNVSLSMIGPHGYISASDWPLMIFYMVMCIVYILYGILWLTWSACYWKDILRIQFWIAAVIFLGMLEKAVFYSEYQNISNTGLSTQGLLIFAELISAIKRTLARLLVIIVSLGYGIVKPRLGTVMHRVIGLGLLYLIFAAVEGVMRVIGVSDSDLVLLASLPLSLLDSGLCWWIFISLAQTMKTLRLRKNTVKFSLYRHFKNTLIFAVLASIVFMGWTTKTFRIAKCQSDWMERWVDDAFWSFLFSLILIVIMFLWRPSANNQRYAFMPLIDDSDDEIEEFMVTSENLTEGIKLRASKSVSNGTAKPATSENFDEDLKWVEENIPSSFTDVALPVLVDSDEEIMTRSEMAEKMFSSEKIM

SEQ ID NO: 19697 - protein, 380 aa, Homo sapiens
MQVHSMSASAPAAEGEGTPTQPASEKEPEMPGPREESEEEEDEDDEEEEEEEKEKSLIVEGKREKKKVERLTMQVSSLQREPFTIAQGKGQKLCEIERIHFFLSKKKTDELRNLHKLLYNRPGTVSSLKKNVGQFSGFPFEKGSVQYKKKEEMLKKFRNAMLKSICEVLDLERSGVNSELVKRILNFLMHPKPSGKPLPKSKKTCSKGSKKERNSSGMARKAKRTKCPEILSDESSSDEDEKKNKEESSDDEDKESEEEPPKKTAKREKPKQKATSKSKKSVKSANVKKADSSTTKKNQNSSKKESESEDSSDDEPLIKKLKKPPTDEELKETIKKLLASANLEEVTMKQICKKVYENYPTYDLTERKDFIKTTVKELIS

SEQ ID NO: 19698 - protein, 317 aa, Homo sapiens
MRPDRAEAPGPPAMAAGGPGAGSAAPVSSTSSLPLAALNMRVRRRLSLFLNVRTQVAADWTALAEEMDFEYLEIRQLETQADPTGRLLDAWQGRPGASVGRLLELLTKLGRDDVLLELGPSIEEDCQKYILKQQQEEAEKPLQVAAVDSSVPRTAELAGITTLDDPLGHMPERFDAFICYCPSDIQFVQEMIRQLEQTNYRLKLCVSDRDVLPGTCVWSIASELIEKRLARRPRGGCRRMVVVVSDDYLQSKECDFQTKFALSLSPGAHQKRLIPIKYKAMKKEFPSILRFITVCDYTNPCTKSWFWTRLAKALSLP

SEQ ID NO: 19699 - protein, 913 aa, Homo sapiens
MKGKERSPVKAKRSRGGEDSTSRGERSKKLGGSGGSNGSSSGKTDSGGGSRRSLHLDKSSSRGGSREYDTGGGSSSSRLHSYSSPSTKNSSGGGESRSSSRGGGGESRSSGAASSAPGGGDGAEYKTLKISELGSQLSDEAVEDGLFHEFKRFGDVSVKISHLSGSGSGDERVAFVNFRRPEDARAAKHARGRLVLYDRPLKIEAVYVSRRRSRSPLDKDTYPPSASVVGASVGGHRHPPGGGGGQRSLSPGGAALGYRDYRLQQLALGRLPPPPPPPLPRDLERERDYPFYERVRPAYSLEPRVGAGAGAAPFREVDEISPEDDQRANRTLFLGNLDITVTESDLRRAFDRFGVITEVDIKRPSRGQTSTYGFLKFENLDMSHRAKLAMSGKIIIRNPIKIGYGKATPTTRLWVGGLGPWVPLAALAREFDRFGTIRTIDYRKGDSWAYIQYESLDAAHAAWTHMRGFPLGGPDRRLRVDFADTEHRYQQQYLQPLPLTHYELVTDAFGHRAPDPLRGARDRTPPLLYRDRDRDLYPDSDWVPPPPPVRERSTRTAATSVPAYEPLDSLDRRRDGWSLDRDRGDRDLPSSRDQPRKRRLPEESGGRHLDRSPESDRPRKRHCAPSPDRSPELSSSRDRYNSDNDRSSRLLLERPSPIRDRRGSLEKSQGDKRDRKNSASAERDRKHRTTAPTEGKSPLKKEDRSDGSAPSTSTASSKLKSPSQKQDGGTAPVASASPKLCLAWQGMLLLKNSNFPSNMHLLQGDLQVASSLLVEGSTGGKVAQLKITQRLRLDQPKLDEVTRRIKVAGPNGYAILLAVPGSSDSRSSSSSAASDTATSTQRPLRNLVSYLKQKQAAGVISLPVGGNKDKENTGVLHAFPPCEFSQQFLDSPAKALAKSEEDYLVMIIVRGAS

SEQ ID NO: 19700 - protein, 375 aa, Homo sapiens
MSASAPAAEGEGTPTQPASEKEPEMPGPREESEEEEDEDDEEEEEEEKEKSLIVEGKREKKKVERLTMQVSSLQREPFTIAQGKGQKLCEIERIHFFLSKKKTDELRNLHKLLYNRPGTVSSLKKNVGQFSGFPFEKGSVQYKKKEEMLKKFRNAMLKSICEVLDLERSGVNSELVKRILNFLMHPKPSGKPLPKSKKTCSKGSKKERNSSGMARKAKRTKCPEILSDESSSDEDEKKNKEESSDDEDKESEEEPPKKTAKREKPKQKATSKSKKSVKSANVKKADSSTTKKNQNSSKKESESEDSSDDEPLIKKLKKPPTDEELKETIKKLLASANLEEVTMKQICKKVYENYPTYDLTERKDFIKTTVKELIS

SEQ ID NO: 19701 - protein, 935 aa, Homo sapiens [sequence omitted]

SEQ ID NO: 19702 - protein, 1010 aa, Homo sapiens
MLLTLIILLPVVSKFSFVSLSAPQHWSCPEGTLAGNGNSTCVGPAPFLIFSHGNSIFRIDTEGTNYEQLVVDAGVSVIMDFHYNEKRIYWVDLERQLLQRVFLNGSRQERVCNIEKNVSGMAINWINEEVIWSNQQEGIITVTDMKGNNSHILLSALKYPANVAVDPVERFIFWSSEVAGSLYRADLDGVGVKALLETSEKITAVSLDVLDKRLFWIQYNREGSNSLICSCDYDGGSVHISKHPTQHNLFAMSLFGDRIFYSTWKMKTIWIANKHTGKDMVRINLHSSFVPLGELKVVHPLAQPKAEDDTWEPDVNECAFWNHGCTLGCKNTPGSYYCTCPVGFVLLPDGKRCHQLVSCPRNVSECSHDCVLTSEGPLCFCPEGSVLERDGKTCSGCSSPDNGGCSQLCVPLSPVSWECDCFPGYDLQLDEKSCAASGPQPFLLFANSQDIRHMHFDGTDYGTLLSQQMGMVYALDHDPVENKIYFAHTALKWIERANMDGSQRERLIEEGVDVPEGLAVDWIGRRFYWTDRGKSLIGRSDLNGKRSKIITKENISQPRGIAVHPMAKRLFWTDTGINPRIESSSLQGLGRLVIASSDLIWPSGITIDFLTDKLYWCDAKQSVIEMANLDGSKRRRLTQNDVGHPFAVAVFEDYVWFSDWAMPSVMRVNKRTGKDRVRLQGSMLKPSSLVVVHPLAKPGADPCLYQNGGCEHICKKRLGTAWCSCREGFMKASDGKTCLALDGHQLLAGGEVDLKNQVTPLDILSKTRVSEDNITESQHMLVAEIMVSDIDECQLGEHSCGENASCTNTEGGYTCMCAGRLSEPGLICPDSTPPPHLREDDHHYSVRNSDSECPLSHDGYCLHDGVCMYIEALDKYACNCVVGYIGERCQYRDLKWWELRHAGHGQQQKVIVVAVCVVVLVMLLLLSLWGAHYYRTQKLLSKNPKNPYEESSRDVRSRRPADTEDGMSSCPQPWGQCNQLHGGRSPSYVEWAQSKAAGFQYPVIRAPVPR

SEQ ID NO: 19703 - protein, 1000 aa, Homo sapiens
MADKVRRQRPRRRVCWALVAVLLADLLALSDTLAVMSVDLGSESMKVAIVKPGVPMEIVLNKESRRKTPVIVTLKENERFFGDSAASMAIKNPKATLRYFQHLLGKQADNPHVALYQARFPEHELTFDPQRQTVHFQISSQLQFSPEEVLGMVLNYSRSLAEDFAEQPIKDAVITVPVFFNQAERRAVLQAARMAGLKVLQLINDNTATALSYGVFRRKDINTTAQNIMFYDMGSGSTVCTIVTYQMVKTKEAGMQPQLQIRGVGFDRTLGGLEMELRLRERLAGLFNEQRKGQRAKDVRENPRAMAKLLREANRLKTVLSANADHMAQIEGLMDDVDFKAKVTRVEFEELCADLFERVPGPVQQALQSAEMSLDEIEQVILVGGATRVPRVQEVLLKAVGKEELGKNINADEAAAMGAVYQAAALSKAFKVKPFVVRDAVVYPILVEFTREVEEEPGIHSLKHNKRVLFSRMGPYPQRKVITFNRYSHDFNFHINYGDLGFLGPEDLRVFGSQNLTTVKLKGVGDSFKKYPDYESKGIKAHFNLDESGVLSLDRVESVFETLVEDSAEEESTLTKLGNTISSLFGGGTTPDAKENGTDTVQEEEESPAEGSKDEPGEQVELKEEAEAPVEDGSQPPPPEPKGDATPEGEKATEKENGDKSEAQKPSEKAEAGPEGVAPAPEGEKKQKPARKRRMVEEIGVELVVLDLPDLPEDKLAQSVQKLQDLTLRDLEKQEREKAANSLEAFIFETQDKLYQPEYQEVSTEEQREEISGKLSAASTWLEDEGVGATTVMLKEKLAELRKLCQGLFFRVEERKKWPERLSALDNLLNHSSMFLKGARLIPEMDQIFTEVEMTTLEKVINETWAWKNATLAEQAKLPATEKPVLLSKDIEAKMMALDREVQYLLNKAKFTKPRPRPKDKNGTRAEPPLNASASDQGEKVIPPAGQTEDAEPISEPEKVETAGSEPGDTEPLELGGPGAEPEQKEQSTGQKRPLKNDEL

SEQ ID NO: 19704 - protein, 1513 aa, Homo sapiens
MRILKRFLACIQLLCVCRLDWANGYYRQQRKLVEEIGWSYTGALNQKNWGKKYPTCNSPKQSPINIDEDLTQVNVNLKKLKFQGWDKTSLENTFIHNTGKTVEINLTNDYRVSGGVSEMVFKASKITFHWGKCNMSSDGSEHSLEGQKFPLEMQIYCFDADRFSSFEEAVKGKGKLRALSILFEVGTEENLDFKAIIDGVESVSRFGKQAALDPFILLNLLPNSTDKYYIYNGSLTSPPCTDTVDWIVFKDTVSISESQLAVFCEVLTMQQSGYVMLMDYLQNNFREQQYKFSRQVFSSYTGKEEIHEAVCSSEPENVQADPENYTSLLVTWERPRVVYDTMIEKFAVLYQQLDGEDQTKHEFLTDGYQDLGAILNNLLPNMSYVLQIVAICTNGLYGKYSDQLIVDMPTDNPELDLFPELIGTEEIIKEEEEGKDIEEGAIVNPGRDSATNQIRKKEPQISTTTHYNRIGTKYNEAKTNRSPTRGSEFSGKGDVPNTSLNSTSQPVTKLATEKDISLTSQTVTELPPHTVEGTSASLNDGSKTVLRSPHMNLSGTAESLNTVSITEYEEESLLTSFKLDTGAEDSSGSSPATSAIPFISENISQGYIFSSENPETITYDVLIPESARNASEDSTSSGSEESLKDPSMEGNVWFPSSTDITAQPDVGSGRESFLQTNYTEIRVDESEKTTKSFSAGPVMSQGPSVTDLEMPHYSTFAYFPTEVTPHAFTPSSRQQDLVSTVNVVYSQTTQPVYNAVPSDPILVETPKVDKISSTMLHLIVSNSASSENMLHSTSVPVFDVSPTSHMHSASLQEASNSSHESRIGLAEGLESEKKAVIPLVIVSALTFICLVVLVGILIYWRKCFQTAHFYLEDSTSPRVISTPPTPIFPISDDVGAIPIKHFPKHVADLHASSGFTEEFETLKEFYQEVQSCTVDLGITADSSNHPDNKHKNRYINIVAYDHSRVKLAQLAEKDGKLTDYINANYVDGYNRPKAYIAAQGPLKSTAEDFWRMIWEHNVEVIVMITNLVEKGRRKCDQYWPADGSEEYGNFLVTQKSVQVLAYYTVRNFTLRNTKIKKGSQKGRPSGRVVTQYHYTQWPDMGVPEYSLPVLTFVRKAAYAKRHAVGPVVVHCSAGVGRTGTYIVLDSMLQQIQHEGTVNIFGFLKHIRSQRNYLVQTEEQYVFIHDTLVEAILSKETEVLDSHIHAYVNALLIPGPAGKTKLEKQFQLLSQSNIQQSDYSAALKQCNREKNRTSSIIPVERSRVGISSLSGEGTDYINASYIMGYYQSNEFIITQHPLLHTIKDFWRMIWDHNAQLVVMIPDGQNMAEDEFVYWPNKDEPINCESFKVTLMAEEHKCLSNEEKLIIQDFILEATQDDYVLEVRHFQCPKWPNPDSPISKTFELISVIKEEAANRDGPMIVHDEHGGVTAGTFCALTTLMHQLEKENSVDVYQVAKMINLMRPGVFADIEQYQFLYKVILSLVSTRQEENPSTSLDSNGAALPDGNIAESLESLV

SEQ ID NO: 19705 - protein, 429 aa, Homo sapiens
MRSLGANMAAALRAAGVLLRDPLASSSWRVCQPWRWKSGAAAAAVTTETAQHAQGAKPQVQPQKRYESNIRKPKTGILMLNMGGPETLGDVHDFLLRLFLDRDLMTLPIQNKLAPFIAKRRTPKIQEQYRRIGGGSPIKIWTSKQGEGMVKLLDELSPNTAPHKYYIGFRYVHPLTEEAIEEMERDGLERAIAFTQYPQYSCSTTGSSLNAIYRYYNQVGRKPTMKWSTIDRWPTHHLLIQCFADHILKELDHFPLEKRSEVVILFSAHSLPMSVVNRGDPYPQEVSATVQKVMERLEYCNPYRLVWQSKVGPMPWLGPQTDESIKGLCERGRKNILLVPIAFTSDHIETLYELDIEYSQVLAKECGVENIRRAESLNGNPLFSKALADLVHSHIQSNELCSKQLTLSCPLCVNPVCRETKSFFTSQQL

SEQ ID NO: 19706 - protein, 158 aa, Homo sapiens
MLIDDTSSEIFDELYKVTKEHTHNKKEAHKIMKDLIKVAIKIGILYRNNQFSQEELVIVEKFRKKLNQTAMTIVSFYEVEYTFDRNVLSNLLHECKDLVHELVQRHLTPRTHGRINHVFNHFADVEFLSTLYSLDGDCRPNLKRICEGINKLLDEKVL

SEQ ID NO: 19707 - protein, 650 aa, Homo sapiens
MGPASPAARGLSRRPGQPPLPLLLPLLLLLLRAQPAIGSLAGGSPGAAEAPGSAQVAGLCGRLTLHRDLRTGRWEPDPQRSRRCLRDPQRVLEYCRQMYPELQIARVEQATQAIPMERWCGGSRSGSCAHPHHQVVPFRCLPGEFVSEALLVPEGCRFLHQERMDQCESSTRRHQEAQEACSSQGLILHGSGMLLPCGSDRFRGVEYVCCPPPGTPDPSGTAVGDPSTRSWPPGSRVEGAEDEEEEESFPQPVDDYFVEPPQAEEEEETVPPPSSHTLAVVGKVTPTPRPTDGVDIYFGMPGEISEHEGFLRAKMDLEERRMRQINEVMREWAMADNQSKNLPKADRQALNEHFQSILQTLEEQVSGERQRLVETHATRVIALINDQRRAALEGFLAALQADPPQAERVLLALRRYLRAEQKEQRHTLRHYQHVAAVDPEKAQQMRFQVHTHLQVIEERVNQSLGLLDQNPHLAQELRPQIQELLHSEHLGPSELEAPAPGGSSEDKGGLQPPDSKDDTPMTLPKGSTEQDAASPEKEKMNPLEQYERKVNASVPRGFPFHSSEIQRDELAPAGTGVSREAVSGLLIMGAGGGSLIVLSMLLLRRKKPYGAISHGVVEVDPMLTLEEQQLRELQRHGYENPTYRFLEERP

SEQ ID NO: 19708 - protein, 114 aa, Homo sapiens
MGIQGGSVLFGLLLVLAVFCHSGHSLQCYNCPNPTADCKTAVNCSSDFDACLITKADTHPLRGGGQDSYACSYKLRSVVFQALHGIGVGISLCCPGWPQAILSLQPPKVLGLQV

SEQ ID NO: 19709 - protein, 2347 aa, Homo sapiens
MRILKRFLACIQLLCVCRLDWANGYYRQQRKLVEEIGWSYTGALNQKNWGKKYPTCNSPKQSPINIDEDLTQVNVNLKKLKFQGWDKTSLENTFIHNTGKTVEINLTNDYRVSGGVSEMVFKASKITFHWGKCNMSSDGSEHSLEGQKFPLEMQIYCFDADRFSSFEEAVKGKGKLRALSILFEVGTEENLDFKAIIDGVESVSRFGKQAALDPFILLNLLPNSTDKYYIYNGSLTSPPCTDTVDWIVFKDTVSISESQLAVFCEVLTMQQSGYVMLMDYLQNNFREQQYKFSRQVFSSYTGKEEIHEAVCSSEPENVQADPENYTSLLVTWERPRVVYDTMIEKFAVLYQQLDGEDQTKHEFLTDGYQDLGAILNNLLPNMSYVLQIVAICTNGLYGKYSDQLIVDMPTDNPELDLFPELIGTEEIIKEEEEGKDIEEGAIVNPGRDSATNQIRKKEPQISTTTHYNRIGTKYNEAKTNRSPTRGSEFSGKGDVPNTSLNSTSQPVTKLATEKDISLTSQTVTELPPHTVEGTSASLNDGSKTVLRSPHMNLSGTAESLNTVSITEYEEESLLTSFKLDTGAEDSSGSSPATSAIPFISENISQGYIFSSENPETITYDVLIPESARNASEDSTSSGSEESLKDPSMEGNVWFPSSTDITAQPDVGSGRESFLQTNYTEIRVDESEKTTKSFSAGPVMSQGPSVTDLEMPHYSTFAYFPTEVTPHAFTPSSRQQDLVSTVNVVYSQTTQPVYNGETPLQPSYSSEVFPLVTPLLLDNQILNTTPAASSSDSALHATPVFPSVDVSFESILSSYDGAPLLPFSSASFSSELFRHLHTVSQILPQVTSATESDKVPLHASLPVAGGDLLLEPSLAQYSDVLSTTHAASETLEFGSESGVLYKTLMFSQVEPPSSDAMMHARSSGPEPSYALSDNEGSQHIFTVSYSSAIPVHDSVGVTYQGSLFSGPSHIPIPKSSLITPTASLLQPTHALSGDGEWSGASSDSEFLLPDTDGLTALNISSPVSVAEFTYTTSVFGDDNKALSKSEIIYGNETELQIPSFNEMVYPSESTVMPNMYDNVNKLNASLQETSVSISSTKGMFPGSLAHTTTKVFDHEISQVPENNFSVQPTHTVSQASGDTSLKPVLSANSEPASSDPASSEMLSPSTQLLFYETSASFSTEVLLQPSFQASDVDTLLKTVLPAVPSDPILVETPKVDKISSTMLHLIVSNSASSENMLHSTSVPVFDVSPTSHMHSASLQGLTISYASEKYEPVLLKSESSHQVVPSLYSNDELFQTANLEINQAHPPKGRHVFATPVLSIDEPLNTLINKLIHSDEILTSTKSSVTGKVFAGIPTVASDTFVSTDHSVPIGNGHVAITAVSPHRDGSVTSTKLLFPSKATSELSHSAKSDAGLVGGGEDGDTDDDGDDDDDDRGSDGLSIHKCMSCSSYRESQEKVMNDSDTHENSLMDQNNPISYSLSENSEEDNRVTSVSSDSQTGMDRSPGKSPSANGLSQKHNDGKEENDIQTGSALLPLSPESKAWAVLTSDEESGSGQGTSDSLNENETSTDFSFADTNEKDADGILAAGDSEITPGFPQSPTSSVTSENSEVFHVSEAEASNSSHESRIGLAEGLESEKKAVIPLVIVSALTFICLVVLVGILIYWRKCFQTAHFYLEDSTSPRVISTPPTPIFPISDDVGAIPIKHFPKHVADLHASSGFTEEFEEVQSCTVDLGITADSSNHPDNKHKNRYINIVAYDHSRVKLAQLAEKDGKLTDYINANYVDGYNRPKAYIAAQGPLKSTAEDFWRMIWEHNVEVIVMITNLVEKGRRKCDQYWPADGSEEYGNFLVTQKSVQVLAYYTVRNFTLRNTKIKKGSQKGRPSGRVVTQYHYTQWPDMGVPEYSLPVLTFVRKAAYAKRHAVGPVVVHCSAGVGRTGTYIVLDSMLQQIQHEGTVNIFGFLKHIRSQRNYLVQTEEQYVFIHDTLVEAILSKETEVLDSHIHAYVNALLIPGPAGKTKLEKQFQGLTLSPRLECRGTISAHCNLPLPGLTDPPTSASRVARTILLSQSNIQQSDYSAALKQCNREKNRTSSIIPVERSRVGISSLSGEGTDYINASYIMGYYQSNEFIITQHPLLHTIKDFWRMIWDHNAQLVVMIPDGQNMAEDEFVYWPNKDEPINCESFKVTLMAEEHKCLSNEEKLIIQDFILEATQDDYVLEVRHFQCPKWPNPDSPISKTFELISVIKEEAANRDGPMIVHDEHGGVTAGTFCALTTLMHQLEKENSVDVYQVAKMINLMRPGVFADIEQYQFLYKVILSLVSTRQEENPSTSLDSNGAALPDGNIAESLESLV

SEQ ID NO: 19710 - protein, 304 aa, Homo sapiens
MTALSARMLTRSRSLGPGAGPRGCREEPGPLRRREAAAEARKSHSPVKRPRKAQRLRVAYEGSDSEKGEGAEPLKVPVWEPQDWQQQLVNIRAMRNKKDAPVDHLGTEHCYDSSAPPKVRRYQVLLSLMLSSQTKDQVTAGAMQRLRARGLTVDSILQTDDATLGKLIYPVGFWRSKVKYIKQTSAILQQHYGGDIPASVAELVALPGVGPKMAHLAMAVAWGTVSGIAVDTHVHRIANRLRWTKKATKSPEETRAALEEWLPRELWHEINGLLVGFGQQTCLPVHPRCHACLNQALCPAAQGL

SEQ ID NO: 19711 - protein, 89 aa, Homo sapiens
MAWQGLVLAACLLMFPSTTADCLSRCSLCAVKTQDGPKPINPLICSLQCQAALLPSEEWERCQSFLSFFTPSTLGLNDKEDLGSKSVGE

SEQ ID NO: 19712 - protein, 2354 aa, Homo sapiens
MRILKRFLACIQLLCVCRLDWANGYYRQQRKLVEEIGWSYTGALNQKNWGKKYPTCNSPKQSPINIDEDLTQVNVNLKKLKFQGWDKTSLENTFIHNTGKTVEINLTNDYRVSGGVSEMVFKASKITFHWGKCNMSSDGSEHSLEGQKFPLEMQIYCFDADRFSSFEEAVKGKGKLRALSILFEVGTEENLDFKAIIDGVESVSRFGKQAALDPFILLNLLPNSTDKYYIYNGSLTSPPCTDTVDWIVFKDTVSISESQLAVFCEVLTMQQSGYVMLMDYLQNNFREQQYKFSRQVFSSYTGKEEIHEAVCSSEPENVQADPENYTSLLVTWERPRVVYDTMIEKFAVLYQQLDGEDQTKHEFLTDGYQDLGAILNNLLPNMSYVLQIVAICTNGLYGKYSDQLIVDMPTDNPELDLFPELIGTEEIIKEEEEGKDIEEGAIVNPGRDSATNQIRKKEPQISTTTHYNRIGTKYNEAKTNRSPTRGSEFSGKGDVPNTSLNSTSQPVTKLATEKDISLTSQTVTELPPHTVEGTSASLNDGSKTVLRSPHMNLSGTAESLNTVSITEYEEESLLTSFKLDTGAEDSSGSSPATSAIPFISENISQGYIFSSENPETITYDVLIPESARNASEDSTSSGSEESLKDPSMEGNVWFPSSTDITAQPDVGSGRESFLQTNYTEIRVDESEKTTKSFSAGPVMSQGPSVTDLEMPHYSTFAYFPTEVTPHAFTPSSRQQDLVSTVNVVYSQTTQPVYNGETPLQPSYSSEVFPLVTPLLLDNQILNTTPAASSSDSALHATPVFPSVDVSFESILSSYDGAPLLPFSSASFSSELFRHLHTVSQILPQVTSATESDKVPLHASLPVAGGDLLLEPSLAQYSDVLSTTHAASETLEFGSESGVLYKTLMFSQVEPPSSDAMMHARSSGPEPSYALSDNEGSQHIFTVSYSSAIPVHDSVGVTYQGSLFSGPSHIPIPKSSLITPTASLLQPTHALSGDGEWSGASSDSEFLLPDTDGLTALNISSPVSVAEFTYTTSVFGDDNKALSKSEIIYGNETELQIPSFNEMVYPSESTVMPNMYDNVNKLNASLQETSVSISSTKGMFPGSLAHTTTKVFDHEISQVPENNFSVQPTHTVSQASGDTSLKPVLSANSEPASSDPASSEMLSPSTQLLFYETSASFSTEVLLQPSFQASDVDTLLKTVLPAVPSDPILVETPKVDKISSTMLHLIVSNSASSENMLHSTSVPVFDVSPTSHMHSASLQGLTISYASEKYEPVLLKSESSHQVVPSLYSNDELFQTANLEINQAHPPKGRHVFATPVLSIDEPLNTLINKLIHSDEILTSTKSSVTGKVFAGIPTVASDTFVSTDHSVPIGNGHVAITAVSPHRDGSVTSTKLLFPSKATSELSHSAKSDAGLVGGGEDGDTDDDGDDDDDDRGSDGLSIHKCMSCSSYRESQEKVMNDSDTHENSLMDQNNPISYSLSENSEEDNRVTSVSSDSQTGMDRSPGKSPSANGLSQKHNDGKEENDIQTGSALLPLSPESKAWAVLTSDEESGSGQGTSDSLNENETSTDFSFADTNEKDADGILAAGDSEITPGFPQSPTSSVTSENSEVFHVSEAEASNSSHESRIGLAEGLESEKKAVIPLVIVSALTFICLVVLVGILIYWRKCFQTAHFYLEDSTSPRVISTPPTPIFPISDDVGAIPIKHFPKHVADLHASSGFTEEFETLKEFYQEVQSCTVDLGITADSSNHPDNKHKNRYINIVAYDHSRVKLAQLAEKDGKLTDYINANYVDGYNRPKAYIAAQGPLKSTAEDFWRMIWEHNVEVIVMITNLVEKGRRKCDQYWPADGSEEYGNFLVTQKSVQVLAYYTVRNFTLRNTKIKKGSQKGRPSGRVVTQYHYTQWPDMGVPEYSLPVLTFVRKAAYAKRHAVGPVVVHCSAGVGRTGTYIVLDSMLQQIQHEGTVNIFGFLKHIRSQRNYLVQTEEQYVFIHDTLVEAILSKETEVLDSHIHAYVNALLIPGPAGKTKLEKQFQGLTLSPRLECRGTISAHCNLPLPGLTDPPTSASRVARTILLSQSNIQQSDYSAALKQCNREKNRTSSIIPVERSRVGISSLSGEGTDYINASYIMGYYQSNEFIITQHPLLHTIKDFWRMIWDHNAQLVVMIPDGQNMAEDEFVYWPNKDEPINCESFKVTLMAEEHKCLSNEEKLIIQDFILEATQDDYVLEVRHFQCPKWPNPDSPISKTFELISVIKEEAANRDGPMIVHDEHGGVTAGTFCALTTLMHQLEKENSVDVYQVAKMINLMRPGVFADIEQYQFLYKVILSLVSTRQEENPSTSLDSNGAALPDGNIAESLESLV

SEQ ID NO: 19713 - protein, 866 aa, Homo sapiens
MFSMRIVCLVLSVVGTAWTADSGEGDFLAEGGGVRGPRVVERHQSACKDSDWPFCSDEDWNYKCPSGCRMKGLIDEVNQDFTNRINKLKNSLFEYQKNNKDSHSLTTNIMEILRGDFSSANNRDNTYNRVSEDLRSRIEVLKRKVIEKVQHIQLLQKNVRAQLVDMKRLEVDIDIKIRSCRGSCSRALAREVDLKDYEDQQKQLEQVIAKDLLPSRDRQHLPLIKMKPVPDLVPGNFKSQLQKVPPEWKALTDMPQMRMELERPGGNEITRGGSTSYGTGSETESPRNPSSAGSWNSGSSGPGSTGNRNPGSSGTGGTATWKPGSSGPGSTGSWNSGSSGTGSTGNQNPGSPRPGSTGTWNPGSSERGSAGHWTSESSVSGSTGQWHSESGSFRPDSPGSGNARPNNPDWGTFEEVSGNVSPGTRREYHTEKLVTSKGDKELRTGKEKVTSGSTTTTRRSCSKTVTKTVIGPDGHKEVTKEVVTSEDGSDCPEAMDLGTLSGIGTLDGFRHRHPDEAAFFDTASTGKTFPGFFSPMLGEFVSETESRGSESGIFTNTKESSSHHPGIAEFPSRGKSSSYSKQFTSSTSYNRGDSTFESKSYKMADEAGSEADHEGTHSTKRGHAKSRPVRDCDDVLQTHPSGTQSGIFNIKLPGSSKIFSVYCDQETSLGGWLLIQQRMDGSLNFNRTWQDYKRGFGSLNDEGEGEFWLGNDYLHLLTQRGSVLRVELEDWAGNEAYAEYHFRVGSEAEGYALQVSSYEGTAGDALIEGSVEEGAEYTSHNNMQFSTFDRDADQWEENCAEVYGGGWWYNNCQAANLNGIYYPGGSYDPRNNSPYEIENGVVWVSFRGADYSLRAVRMKIRPLVTQ

SEQ ID NO: 19714 - protein, 91 aa, Homo sapiens
MAWQGLVLAACLLMFPSTTADCLSRCSLCAVKTQDGPKPINPLICSLQCQAALLPSEEWERCQSFLSFFTPSTLGLNDKEDLGSKSVGEGP

SEQ ID NO: 19715 - protein, 574 aa, Homo sapiens
MKATWIRLLKRAKGGRLKNSDICGSADSYTSRPSDSDVSLEEDREAVRREAERQAQAQLEKAKTKPVAFAVRTNVSYSAAHEDDVPVPGMAISFEAKDFLHVKEKFNNDWWIGRLVKEGCEIGFIPSPVKLENMRLQHEQRAKQGKFYSSKSGGNSSSSLGDIVPSSRKSTPPSSAKQKQKSTEHTPPYDVVPSMRPVVLVGPSLKGYEVTDMMQKALFDFLKHRFEGRISITRVTADISLAKRSVLNNPSKHAIIERSNTRSSLAEVQSEIERIFELARTLQLVVLDADTINHPAQLSKTSLAPIIVYVKISSPKVLQRLIKSRGKSQAKHLNVQMVAADKLAQCPPELFDVILDENQLEDACEHLADYLEAYWKATHPPSSSLPNPLLSRTLATSSLPLSPTLASNSQGSQGDQRTDRSAPIRSASQAEEEPSVEPVKKSQHRSSSSAPHHNHRSGTSRGLSRQETFDSETQESRDSAYVEPKEDYSHDHVDHYASHRDHNHRDETHGSSDHRHRESRHRSRDVDREQDHNECNKQRSRHKSKDRYCEKDGEVISKKRNEAGEWNRDVYIRQ

SEQ ID NO: 19716 - protein, 335 aa, Homo sapiens
MLGIWTLLPLVLTSVARLSSKSVNAQVTDINSKGLELRKTVTTVETQNLEGLHHDGQFCHKPCPPGERKARDCTVNGDEPDCVPCQEGKEYTDKAHFSSKCRRCRLCDEGHGLEVEINCTRTQNTKCRCKPNFFCNSTVCEHCDPCTKCEHGIIKECTLTSNTKCKEEGSRSNLGWLCLLLLPIPLIVWVKRKEVQKTCRKHRKENQGSHESPTLNPETVAINLSDVDLSKYITTIAGVMTLSQVKGFVRKNGVNEAKIDEIKNDNVQDTAEQKVQLLRNWHQLHGKKEAYDTLIKDLKKANLCTLAEKIQTIILKDITSDSENSNFRNEIQSLV

SEQ ID NO: 19717 - protein, 1339 aa, Homo sapiens
MAPRCPWPWPRRRRLLDVLAPLVLLLGVRAASAEPERISEEVGLLQLLGDPPPQQVTQTDDPDVGLAYVFGPDANSGQVARYHFPSLFFRDFSLLFHIRPATEGPGVLFAITDSAQAMVLLGVKLSGVQDGHQDISLLYTEPGAGQTHTAASFRLPAFVGQWTHLALSVAGGFVALYVDCEEFQRMPLARSSRGLELEPGAGLFVAQAGGADPDKFQGVIAELKVRRDPQVSPMHCLDEEGDDSDGASGDSGSGLGDARELLREETGAALKPRLPAPPPVTTPPLAGGSSTEDSRSEEVEEQTTVASLGAQTLPGSDSVSTWDGSVRTPGGRVKEGGLKGQKGEPGVPGPPGRAGPPGSPCLPGPPGLPCPVSPLGPAGPALQTVPGPQGPPGPPGRDGTPGRDGEPGDPGEDGKPGDTGPQGFPGTPGDVGPKGDKGDPGVGERGPPGPQGPPGPPGPSFRHDKLTFIDMEGSGFGGDLEALRGPRGFPGPPGPPGVPGLPGEPGRFGVNSSDVPGPAGLPGVPGREGPPGFPGLPGPPGPPGREGPPGRTGQKGSLGEAGAPGHKGSKGAPGPAGARGESGLAGAPGPAGPPGPPGPPGPPGPGLPAGFDDMEGSGGPFWSTARSADGPQGPPGLPGLKGDPGVPGLPGAKGEVGADGVPGFPGLPGREGIAGPQGPKGDRGSRGEKGDPGKDGVGQPGLPGPPGPPGPVVYVSEQDGSVLSVPGPEGRPGFAGFPGPAGPKGNLGSKGERGSPGPKGEKGEPGSIFSPDGGALGPAQKGAKGEPGFRGPPGPYGRPGYKGEIGFPGRPGRPGMNGLKGEKGEPGDASLGFGMRGMPGPPGPPGPPGPPGTPVYDSNVFAESSRPGPPGLPGNQGPPGPKGAKGEVGPPGPPGQFPFDFLQLEAEMKGEKGDRGDAGQKGERGEPGGGGFFGSSLPGPPGPPGPPGPRGYPGIPGPKGESIRGQPGPPGPQGPPGIGYEGRQGPPGPPGPPGPPSFPGPHRQTISVPGPPGPPGPPGPPGTMGASSGVRLWATRQAMLGQVHEVPEGWLIFVAEQEELYVRVQNGFRKVQLEARTPLPRGTDNEVAALQPPVVQLHDSNPYPRREHPHPTARPWRADDILASPPRLPEPQPYPGAPHHSSYVHLRPARPTSPPAHSHRDFQPVLHLVALNSPLSGGMRGIRGADFQCFQQARAVGLAGTFRAFLSSRLQDLYSIVRRADRAAVPIVNLKDELLFPSWEALFSGSEGPLKPGARIFSFDGKDVLRHPTWPQKSVWHGSDPNGRRLTESYCETWRTEAPSATGQASSLLGGRLLGQSAASCHHAYIVLCIENSFMTASK

SEQ ID NO: 19718 - protein, 270 aa, Homo sapiens
MMVVLLGATTLVLVAVAPWVLSAAAGGKNLKSPQKVEVDIIDDNFILRWNRSDESVGNVTFSFDYQKTGMDNWIKLSGCQNITSTKCNFSSLKLNVYEEIKLRIRAEKENTSSWYEVDSFTPFRKAQIGPPEVHLEAEDKAIVIHISPGTKDSVMWALDGLSFTYSLVIWKNSSGVEERIENIYSRHKIYKLSPETTYCLKVKAALLTSWKIGVYSPVHCIKTTVENELPPPENIEVSVQNQNYVLKWDYTYANMTFQVQWLHLYFRRPR

SEQ ID NO: 19719 - protein, 534 aa, Homo sapiens
MLCCWSPEKPAYPARAPAWGCLLRVLGWFNSPRTSSETERSNDSGNGEHKSERKSPEENLQGAVKSFCTSASGAPLGPKGDGHYPWSCPVTHTREKIYAICSDYAFLNQATSIYKTPNPSRSPCLPDSTSLSAGNNSSRYIGIPTSTSEIIYNEENSLENLSNSLGKLPLAWEIDKSEFDGVTTNSKHKSGNAKKQVSKRKTSDKKGRYQKECPQHSPLEDIKQRKVLDLRRWYCISRPQYKTSCGISSLISCWNFLYSTMGAGNLPPITQEEALHILGFQPPFEDIRFGPFTGNTTLMRWFRQINDHFHVKGCSYVLYKPHGKNKTAGETASGALSKLTRGLKDESLAYIYHCQNHYFCPIGFEATPVKANKAFSRGPLSPQEVEYWILIGESSRKHPAIHCKKWADIVTDLNTQNPEYLDIRHLERGLQYRKTKKVGGNLHCIIAFQRLNWQRFGLWNFPFGTIRQESQPPTHAQGIAKSESEDNISKKQHGRLGRSFSASFHQDSAWKKMSSIHERRNSGYQGYSDYDGND

SEQ ID NO: 19720 - protein, 1274 aa, Homo sapiens
MARQPEEEETAVARARRPPLWLLCLVACWLLGAGAEADFSILDEAQVLASQMRRLAAEELGVVTMQRIFNSFVYTEKISNGESEVQQLAKKIREKFNRYLDVVNRNKQVVEASYTAHLTSPLTAIQDCCTIPPSMMEFDGNFNTNVSRTISCDRLSTTVNSRAFNPGRDLNSVLADNLKSNPGIKWQYFSSEEGIFTVFPAHKFRCKGSYEHRSRPIYVSTVRPQSKHIVVILDHGASVTDTQLQIAKDAAQVILSAIDEHDKISVLTVADTVRTCSLDQCYKTFLSPATSETKRKMSTFVSSVKSSDSPTQHAVGFQKAFQLIRSTNNNTKFQANTDMVIIYLSAGITSKDSSEEDKKATLQVINEENSFLNNSVMILTYALMNDGVTGLKELAFLRDLAEQNSGKYGVPDRMALPVIKGSMMVLNQLSNLETTVGRFYTNLPNRMIDEAVFSLPFSDEMGDGLIMTVSKPCYFGNLLLGIVGVDVNLAYILEDVTYYQDSLASYTFLIDDKGYTLMHPSLTRPYLLSEPPLHTDIIHYENIPKFELVRQNILSLPLGSQIIAVPVNSSLSWHINKLRETGKEAYNVSYAWKMVQDTSFILCIVVIQPEIPVKQLKNLNTVPSSKLLYHRLDLLGQPSACLHFKQLATLESPTIMLSAGSFSSPYEHLSQPETKRMVEHYTAYLSDNTRLIANPGLKFSVRNEVMATSHVTDEWMTQMEMSSLNTYIVRRYIATPNGVLRIYPGSLMDKAFDPTRRQWYLHAVANPGLISLTGPYLDVGGAGYVVTISHTIHSSSTQLSSGHTVAVMGIDFTLRYFYKVLMDLLPVCNQDGGNKIRCFIMEDRGYLVAHPTLIDPKGHAPVEQQHITHKEPLVANDILNHPNFVKKNLCNSFSDRTVQRFYKFNTSLAGDLTNLVHGSHCSKYRLARIPGTNAFVGIVNETCDSLAFCACSMVDRLCLNCHRMEQNECECPCECPLEVNECTGNLTNAENRNPSCEVHQEPVTYTAIDPGLQDALHQCVNSRCSQRLESGDCFGVLDCEWCMVDSDGKTHLDKPYCAPQKECFGGIVGAKSPYVDDMGAIGDEVITLNMIKSAPVGPVAGGIMGCIMVLVLAVYAYRHQIHRRSHQHMSPLAAQEMSVRMSNLENDRDERDDDSHEDRGIISNTRFIAAVIERHAHSPERRRRYWGRSGTESDHGYSTMSPQEDSENPPCNNDPLSAGVDVGNHDEDLDLDTPPQTAALLSHKFHHYRSHHPTLHHSHHLQAAVTVHTVDAEC

SEQ ID NO: 19721 - protein, 296 aa, Homo sapiens
MGILLGLLLLGHLTVDTYGRPILEVPESVTGPWKGDVNLPCTYDPLQGYTQVLVKWLVQRGSDPVTIFLRDSSGDHIQQAKYQGRLHVSHKVPGDVSLQLSTLEMDDRSHYTCEVTWQTPDGNQVVRDKITELRVQKLSVSKPTVTTGSGYGFTVPQGMRISLQCQARGSPPISYIWYKQQTNNQEPIKVATLSTLLFKPAVIADSGSYFCTAKGQVGSEQHSDIVKFVVKDSSKLLKTKTEAPTTMTYPLKATSTVKQSWDWTTDMDGYLGETSAGPAFRHNGNMCLKWLSGNMF

SEQ ID NO: 19722 - protein, 2851 aa, Homo sapiens
MTLEGLYLARGPLARLLLAWSALLCMAGGQGRWDGALEAAGPGRVRRRGSPGILQGPNVCGSRFHAYCCPGWRTFPGRSQCVVPICRRACGEGFCSQPNLCTCADGTLAPSCGVSRGSGCSVSCMNGGTCRGASCLCQKGYTGTVCGQPICDRGCHNGGRCIGPNRCACVYGFMGPQCERDYRTGPCFGQVGPEGCQHQLTGLVCTKALCCATVGRAWGLPCELCPAQPHPCRRGFIPNIHTGACQDVDECQAVPGLCQGGSCVNMVGSFHCRCPVGHRLSDSSAACEDVNECLSLSGLCSGGDCTNTVGSYVCTCSQGFASSLDGTHCLNYRAGACFSVLFGGRCAGDLAGHYTRRQCCCDRGRCWAAGPVPELCPPRGSNEFQQLCAQRLPLLPGHPGLFPGLLGFGSNGMGPPLGPARLNPHGSDARGIPSLGPGNSNIGTATLNQTIDICRHFTNLCLNGRCLPTPSSYRCECNVGYTQDVRGECIDVDECTSSPCHHGDCVNIPGTYHCRCYPGFQATPTRQACVDVDECIVSGGLCHLGRCVNTEGSFQCVCNAGFELSPDGKNCVDHNECATSTMCVNGVCLNEDGSFSCLCKPGFLLAPGGHYCMDIDECQTPGICVNGHCTNTEGSFRCQCLGGLAVGTDGRVCVDTHVRSTCYGAIEKGSCARPFPGTVTKSECCCANPDHGFGEPCQLCPAKDSAEFQALCSSGLGITTDGRDINECALDPEVCANGVCENLRGSYRCVCNLGYEAGASGKDCTDVDECALNSLLCDNGWCQNSPGSYSCSCPPGFHFWQDTEICKDVDECLSSPCVSGVCRNLAGSYTCKCGPGSRLDPSGTFCLDSTKGTCWLKIQESRCEVNLQGASLRSECCATLGAAWGSPCERCEIDPACARGFARMTGVTCDDVNECESFPGVCPNGRCVNTAGSFRCECPEGLMLDASGRLCVDVRLEPCFLRWDEDECGVTLPGKYRMDVCCCSIGAVWGVECEACPDPESLEFASLCPRGLGFASRDFLSGRPFYKDVNECKVFPGLCTHGTCRNTVGSFHCACAGGFALDAQERNCTDIDECRISPDLCGQGTCVNTPGSFECECFPGYESGFMLMKNCMDVDECARDPLLCRGGTCTNTDGSYKCQCPPGHELTAKGTACEDIDECSLSDGLCPHGQCVNVIGAFQCSCHAGFQSTPDRQGCVDINECRVQNGGCDVHCINTEGSYRCSCGQGYSLMPDGRACADVDECEENPRVCDQGHCTNMPGGHRCLCYDGFMATPDMRTCVDVDECDLNPHICLHGDCENTKGSFVCHCQLGYMVRKGATGCSDVDECEVGGHNCDSHASCLNIPGSFSCRCLPGWVGDGFECHDLDECVSQEHRCSPRGDCLNVPGSYRCTCRQGFAGDGFFCEDRDECAENVDLCDNGQCLNAPGGYRCECEMGFDPTEDHRACQDVDECAQGNLCAFGSCENLPGMFRCICNGGYELDRGGGNCTDINECADPVNCINGVCINTPGSYLCSCPQDFELNPSGVGCVDTRAGNCFLETHDRGDSGISCSAEIGVGVTRASCCCSLGRAWGNPCELCPMANTTEYRTLCPGGEGFQPNRITVILEDIDECQELPGLCQGGDCVNTFGSFQCECPPGYHLSEHTRICEDIDECSTHSGICGPGTCYNTLGNYTCVCPAEYLQVNGGNNCMDMRKSVCFRHYNGTCQNELAFNVTRKMCCCSYNIGQAWNRPCEACPTPISPDYQILCGNQAPGFLTDIHTGKPLDIDECGEIPAICANGICINQIGSFRCECPAGFNYNSILLACEDVDECGSRESPCQQNADCINIPGSYRCKCTRGYKLSPGGACVGRNECREIPNVCSHGDCMDTEGSYMCLCHRGFQASADQTLCMDIDECDRQPCGNGTCKNIIGSYNCLCFPGFVVTHNGDCVDFDECTTLVGQVCRFGHCLNTAGSFHCLCQDGFELTADGKNCVDTNECLSLAGTCLPGTCQNLEGSFRCICPPGFQVQSDHCIDIDECSEEPNLCLFGTCTNSPGSFQCLCPPGFVLSDNGHRCFDTRQSFCFTRFEAGKCSVPKAFNTTKTRCCCSKRPGEGWGDPCELCPQEGSAAFQELCPFGHGAVPGPDDSREDVNECAENPGVCTNGVCVNTDGSFRCECPFGYSLDFTGINCVDTDECSVGHPCGQGTCTNVIGGFECACADGFEPGLMMTCEDIDECSLNPLLCAFRCHNTEGSYLCTCPAGYTLREDGAMCRDVDECADGQQDCHARGMECKNLIGTFACVCPPGMRPLPGSGEGCTDDNECHAQPDLCVNGRCVNTAGSFRCDCDEGFQPSPTLTECHDIRQGPCFAEVLQTMCRSLSSSSEAVTRAECCCGGGRGWGPRCELCPLPGTSAYRKLCPHGSGYTAEGRDVDECRMLAHLCAHGECINSLGSFRCHCQAGYTPDATATTCLDMDECSQVPKPCTFLCKNTKGSFLCSCPRGYLLEEDGRTCKDLDECTSRQHNCQFLCVNTVGAFTCRCPPGFTQHHQACFDNDECSAQPGPCGAHGHCHNTPGSFRCECHQGFTLVSSGHGCEDVNECDGPHRCQHGCQNQLGGYRCSCPQGFTQHSQWAQCVDENECALSPPTCGSASCRNTLGGFRCVCPSGFDFDQALGGCQEVDECAGRRGPCSYSCANTPGGFLCGCPQGYFRAGQGHCVSGLGFSPGPQDTPDKEELLSSEACYECKINGLSPRDRPRRSAHRDHQVNLATLDSEALLTLGLNLSHLGRAERILELRPALEGLEGRIRYVIVRGNEQGFFRMHHLRGVSSLQLGRRRPGPGTYRLEVVSHMAGPWGVQPEGQPGPWGQALRLKVQLQLL

SEQ ID NO: 19723 - protein, 501 aa, Homo sapiens
MDLGAITKYSALHAKPNGLILQYGTAGFRTKAEHLDHVMFRMGLLAVLRSKQTKSTIGVMVTASHNPEEDNGVKLVDPLGEMLAPSWEEHATCLANAEEQDMQRVLIDISEKEAVNLQQDAFVVIGRDTRPSSEKLSQSVIDGVTVLGGQFHDYGLLTTPQLHYMVYCRNTGGRYGKATIEGYYQKLSKAFVELTKQASCSGDEYRSLKVDCANGIGALKLREMEHYFSQGLSVQLFNDGSKGKLNHLCGADFVKSHQKPPQGMEIKSNERCCSFDGDADRIVYYYHDADGHFHLIDGDKIATLISSFLKELLVEIGESLNIGVVQTAYANGSSTRYLEEVMKVPVYCTKTGVKHLHHKAQEFDIGVYFEANGHGTALFSTAVEMKIKQSAEQLEDKKRKAAKMLENIIDLFNQVADRRVISTTDAERQAVTPPGLQEAINDLVKKYKLSRAFVRPSGTEDVVRVYAEADSQESADHLAHEVSLAVFQLAGGIGERPQPGF

SEQ ID NO: 19724 - protein, 285 aa, Homo sapiens
MTTNAGPLHPYWPQHLRLDNFVPNDRPTWHILAGLFSVTGVLVVTTWLLSGRAAVVPLGTWRRLSLCWFAVCGFIHLVIEGWFVLYYEDLLGDQAFLSQLWKEYAKGDSRYILGDNFTVCMETITACLWGPLSLWVVIAFLRQHPLRFILQLVVSVERPHQQKALTRCDSLTMDFPASRTKCESFLPPEFRSFAVDPQITSLDVLQHILIRAFDLSGKKNFGISYLGRDRLGQEVYLSLLSDWDLSTAFATASKPYLQLRVDIRPSEDSEYSVPPGALLWNPFTP

SEQ ID NO: 19725 - protein, 277 aa, Homo sapiens
MAPRPRARPGVAVACCWLLTVVLRCCVSFNVDVKNSMTFSGPVEDMFGYTVQQYENEEGKWVLIGSPLVGQPKNRTGDVYKCPVGRGESLPCVKLDLPVNTSIPNVTEVKENMTFGSTLVTNPNGGFLACGPLYAYRCGHLHYTTGICSDVSPTFQVVNSIAPVQECSTQLDIVIVLDGSNSIYPWDSVTAFLNDLLERMDIGPKQTQVGIVQYGENVTHEFNLNKYSSTEEVLVAAKKIVQRGGRQTMTALGIDTARRHSRKPGVPEEELKKSWLL

SEQ ID NO: 19726 - protein, 508 aa, Homo sapiens
MWETMRNLASIGKKWKDQNIKDHYKHRGRNLRSHMLERLYQTKDGSQRGGIFSQFANQNLSKKIPGVKLCESIVYGEVSMGQSSLNRHIKDHSGHEPKEYQEYGEKPDTRNQCWKPFSSHHSFRTHEIIHTGEKLYDCKECGKTFFSLKRIRRHIITHSGYTPYKCKVCGKAFDYPSRFRTHERSHTGEKPYECQECGKAFTCITSVRRHMIKHTGDGPYKCKVCGKPFHSLSSFQVHERIHTGEKPFKCKQCGKAFSCSPTLRIHERTHTGEKPYECKQCGKAFSYLPSLRLHERIHTGEKPFVCKQCGKAFRSASTFQIHERTHTGEKPYECKECGEAFSCIPSMRRHMIKHTGEGPYKCKVCGKPFHSLSPFRIHERTHTGEKPYVCKHCGKAFVSSTSIRIHERTHTGEKPYECKQCGKAFSYLNSFRTHEMIHTGEKPFECKRCGKAFRSSSSFRLHERTHTGQKPYHCKECGKAYSCRASFQRHMLTHAEDGPPYKCMWESL

SEQ ID NO: 19727 - protein, 459 aa, Homo sapiens
MSERKEGRGKGKGKKKERGSGKKPESAAGSQSPALPPRLKEMKSQESAAGSKLVLRCETSSEYSSLRFKWFKNGNELNRKNKPQNIKIQKKPGKSELRINKASLADSGEYMCKVISKLGNDSASANITIVESNEIITGMPASTEGAYVSSESPIRISVSTEGANTSSSTSTSTTGTSHLVKCAEKEKTFCVNGGECFMVKDLSNPSRYLCKCPNEFTGDRCQNYVMASFYKAEELYQKRVLTITGICIALLVVGIMCVVAYCKTKKQRKKLHDRLRQSLRSERNNMMNIANGPHHPNPPPENVQLVNQYVSKNVISSEHIVEREAETSFSTSHYTSTAHHSTTVTQTPSHSWSNGHTESILSESHSVIVMSSVENSRHSSPTGGPRGRLNGTGGPRECNSFLRHARETPDSYRDSPHSERHNLIAELRRNKAHRSKCMQIQLSATHLRSSSIPHLGFIL

SEQ ID NO: 19728 - protein, 2555 aa, Homo sapiens
MPPLLAPLLCLALLPALAARGPRCSQPGETCLNGGKCEAANGTEACVCGGAFVGPRCQDPNPCLSTPCKNAGTCHVVDRRGVADYACSCALGFSGPLCLTPLDNACLTNPCRNGGTCDLLTLTEYKCRCPPGWSGKSCQQADPCASNPCANGGQCLPFEASYICHCPPSFHGPTCRQDVNECGQKPGLCRHGGTCHNEVGSYRCVCRATHTGPNCERPYVPCSPSPCQNGGTCRPTGDVTHECACLPGFTGQNCEENIDDCPGNNCKNGGACVDGVNTYNCRCPPEWTGQYCTEDVDECQLMPNACQNGGTCHNTHGGYNCVCVNGWTGEDCSENIDDCASAACFHGATCHDRVASFYCECPHGRTGLLCHLNDACISNPCNEGSNCDTNPVNGKAICTCPSGYTGPACSQDVDECSLGANPCEHAGKCINTLGSFECQCLQGYTGPRCEIDVNECVSNPCQNDATCLDQIGEFQCICMPGYEGVHCEVNTDECASSPCLHNGRCLDKINEFQCECPTGFTGHLCQYDVDECASTPCKNGAKCLDGPNTYTCVCTEGYTGTHCEVDIDECDPDPCHYGSCKDGVATFTCLCRPGYTGHHCETNINECSSQPCRHGGTCQDRDNAYLCFCLKGTTGPNCEINLDDCASSPCDSGTCLDKIDGYECACEPGYTGSMCNINIDECAGNPCHNGGTCEDGINGFTCRCPEGYHDPTCLSEVNECNSNPCVHGACRDSLNGYKCDCDPGWSGTNCDINNNECESNPCVNGGTCKDMTSGYVCTCREGFSGPNCQTNINECASNPCLNQGTCIDDVAGYKCNCLLPYTGATCEVVLAPCAPSPCRNGGECRQSEDYESFSCVCPTGWQGQTCEVDINECVLSPCRHGASCQNTHGGYRCHCQAGYSGRNCETDIDDCRPNPCHNGGSCTDGINTAFCDCLPGFRGTFCEEDINECASDPCRNGANCTDCVDSYTCTCPAGFSGIHCENNTPDCTESSCFNGGTCVDGINSFTCLCPPGFTGSYCQHDVNECDSQPCLHGGTCQDGCGSYRCTCPQGYTGPNCQNLVHWCDSSPCKNGGKCWQTHTQYRCECPSGWTGLYCDVPSVSCEVAAQRQGVDVARLCQHGGLCVDAGNTHHCRCQAGYTGSYCEDLVDECSPSPCQNGATCTDYLGGYSCKCVAGYHGVNCSEEIDECLSHPCQNGGTCLDLPNTYKCSCPRGTQGVHCEINVDDCNPPVDPVSRSPKCFNNGTCVDQVGGYSCTCPPGFVGERCEGDVNECLSNPCDARGTQNCVQRVNDFHCECRAGHTGRRCESVINGCKGKPCKNGGTCAVASNTARGFICKCPAGFEGATCENDARTCGSLRCLNGGTCISGPRSPTCLCLGPFTGPECQFPASSPCLGGNPCYNQGTCEPTSESPFYRCLCPAKFNGLLCHILDYSFGGGAGRDIPPPLIEEACELPECQEDAGNKVCSLQCNNHACGWDGGDCSLNFNDPWKNCTQSLQCWKYFSDGHCDSQCNSAGCLFDGFDCQRAEGQCNPLYDQYCKDHFSDGHCDQGCNSAECEWDGLDCAEHVPERLAAGTLVVVVLMPPEQLRNSSFHFLRELSRVLHTNVVFKRDAHGQQMIFPYYGREEELRKHPIKRAAEGWAAPDALLGQVKASLLPGGSEGGRRRRELDPMDVRGSIVYLEIDNRQCVQASSQCFQSATDVAAFLGALASLGSLNIPYKIEAVQSETVEPPPPAQLHFMYVAAAAFVLLFFVGCGVLLSRKRRRQHGQLWFPEGFKVSEASKKKRREPLGEDSVGLKPLKNASDGALMDDNQNEWGDEDLETKKFRFEEPVVLPDLDDQTDHRQWTQQHLDAADLRMSAMAPTPPQGEVDADCMDVNVRGPDGFTPLMIASCSGGGLETGNSEEEEDAPAVISDFIYQGASLHNQTDRTGETALHLAARYSRSDAAKRLLEASADANIQDNMGRTPLHAAVSADAQGVFQILIRNRATDLDARMHDGTTPLILAARLAVEGMLEDLINSHADVNAVDDLGKSALHWAAAVNNVDAAVVLLKNGANKDMQNNREETPLFLAAREGSYETAKVLLDHFANRDITDHMDRLPRDIAQERMHHDIVRLLDEYNLVRSPQLHGAPLGGTPTLSPPLCSPNGYLGSLKPGVQGKKVRKPSSKGLACGSKEAKDLKARRKKSQDGKGCLLDSSGMLSPVDSLESPHGYLSDVASPPLLPSPFQQSPSVPLNHLPGMPDTHLGIGHLNVAAKPEMAALGGGGRLAFETGPPRLSHLPVASGTSTVLGSSSGGALNFTVGGSTSLNGQCEWLSRLQSGMVPNQYNPLRGSVAPGPLSTQAPSLQHGMVGPLHSSLAASALSQMMSYQGLPSTRLATQPHLVQTQQVQPQNLQMQQQNLQPANIQQQQSLQPPPPPPQPHLGVSSAASGHLGRSFLSGEPSQADVQPLGPSSLAVHTILPQESPALPTSLPSSLVPPVTAAQFLTPPSQHSYSSPVDNTPSHQLQVPEHPFLTPSPESPDQWSSSSPHSNVSDWSEGVSSPPTSMQSQIARIPEAFK

SEQ ID NO: 19729 - protein, 669 aa, Homo sapiens
MLTFFLVSGGSLWLFVEFVLSLLEKMQTQEILRILRLPELGDLGQFFRSLSATTLDSGGARRSVIGSGPQLLTHYYDDARTMYQVFRRGLSISGNGPCLGFRKPKQPYQWLSYQEVADRAEFLGSGLLQHNCKACTDQFIGVFAQNRPEWIIVELACYTYSMVVVPLYDTLGPGAIRYIINTADISTVIVDKPQKAVLLLEHVERKETPGLKLIILMDPFEEALKERGQKCGVVIKSMQAVEDCGQENHQAPVPPQPDDLSIVCFTSGTTGNPKGAMLTHGNVVADFSGFLKVTEKVIFPRQDDVLISFLPLAHMFERVIQSVVYCHGGRVGFFQGDIRLLSDDMKALCPTIFPVVPRLLNRMYDKIFSQANTPLKRWLLEFAAKRKQAEVRSGIIRNDSIWDELFFNKIQASLGGCVRMIVTGAAPASPTVLGFLRAALGCQVYEGYGQTECTAGCTFTTPGDWTSGHVGAPLPCNHIKLVDVEELNYWACKGEGEICVRGPNVFKGYLKDPDRTKEALDSDGWLHTGDIGKWLPGEYVAPEKIENIYIRSQPVAQIYVHGDSLKAFLVGIVVPDPEVMPSWAQKRGIEGTYADLCTNKDLKKAILEDMVRLGKESGLHSFEQVKAIHIHSDMFSVQNGLLTPTLKAKRPELREYFKKQIEELYSISM

SEQ ID NO: 19730 - protein, 67 aa, Homo sapiens
MMVVLLGATTLVLVAVAPWVLSAAAGGKNLKSPQKVEVDIIDDNFILRWNRSDESVGNVTFSFDYQN

SEQ ID NO: 19731 - protein, 661 aa, Homo sapiens
MQANGAGGGGGGGGGGGGGGGGGGGQGQTPELACLSAQNGESSPSSSSSAGDLAHANGLLPSAPSAASNNSNSLNVNNGVPGGAAAASSATVAAASATTAASSSLATPELGSSLKKKKRLSQSDEDVIRLIGQHLNGLGLNQTVDLLMQESGCRLEHPSATKFRNHVMEGDWDKAENDLNELKPLVHSPHAIVVRGALEISQTLLGIIVRMKFLLLQQKYLEYLEDGKVLEALQVLRCELTPLKYNTERIHVLSGYLMCSHAEDLRAKAEWEGKGTASRSKLLDKLQTYLPPSVMLPPRRLQTLLRQAVELQRDRCLYHNTKLDNNLDSVSLLIDHVCSRRQFPCYTQQILTEHCNEVWFCKFSNDGTKLATGSKDTTVIIWQVDPDTHLLKLLKTLEGHAYGVSYIAWSPDDNYLVACGPDDCSELWLWNVQTGELRTKMSQSHEDSLTSVAWNPDGKRFVTGGQRGQFYQCDLDGNLLDSWEGVRVQCLWCLSDGKTVLASDTHQRIRGYNFEDLTDRNIVQEDHPIMSFTISKNGRLALLNVATQGVHLWDLQDRVLVRKYQGVTQGFYTIHSCFGGHNEDFIASGSEDHKVYIWHKRSELPIAELTGHTRTVNCVSWNPQIPSMMASASDDGTVRIWGPAPFIDHQNIEEECSSMDS

SEQ ID NO: 19732 - protein, 3616 aa, Homo sapiens
METCDSPPISRQENGQSTSKLCGTTQLDNEVPEKVAGMEPDRENSSTDDNLKTDERKSEALLGFSVENAAATQVTSAKEIPCNECATSFPSLQKYMEHHCPNARLPVLKDDNESEISELEDSDVENLTGEIVYQPDGSAYIIEDSKESGQNAQTGANSKLFSTAMFLDSLASAGEKSDQSASAPMSFYPQIINTFHIASSLGKPFTADQAFPNTSALAGVGPVLHSFRVYDLRHKREKDYLTSDGSAKNSCVSKDVPNNVDLSKFDGCVSDGKRKPVLMCFLCKLSFGYIRSFVTHAVHDHRMTLNDEEQKLLSNKCVSAIIQGIGKDKEPLISFLEPKKSTSVYPHFSTTNLIGPDPTFRGLWSAFHVENGDSLPAGFAFLKGSASTSSSAEQPLGITQMPKAEVNLGGLSSLVVNTPITSVSLSHSSSESSKMSESKDQENNCERPKESNVLHPNGECPVKSEPTEPGDEDEEDAYSNELDDEEVLGELTDSIGNKDFPLLNQSISPLSSSVLKFIEKGTSSSSATVSDDTEKKKQTAAVRASGSVASNYGISGKDFADASASKDSATAAHPSEIARGDEDSSATPHQHGFTPSTPGTPGPGGDGSPGSGIECPKCDTVLGSSRSLGGHMTMMHSRNSCKTLKCPKCNWHYKYQQTLEAHMKEKHPEPGGSCVYCKTGQPHPRLARGESYTCGYKPFRCEVCNYSTTTKGNLSIHMQSDKHLNNVQNLQNGNGEQVFGHSAPAPNTSLSGCGTPSPSKPKQKPTWRCEVCDYETNVARNLRIHMTSEKHMHNMMLLQQNMKQIQHNLHLGLAPAEAELYQYYLAQNIGLTGMKLENPADPQLMINPFQLDPATAAALAPGLVNNELPPEIRLASGQLMGDDLSLLTAGELSPYISDPALKLFQCAVCNKFTSDSLEALSVHVSSERSLPEEEWRAVIGDIYQCKLCNYNTQLKANFQLHCKTDKHMQKYQLVAHIKEGGKSNEWRLKCIAIGNPVHLKCNACDYYTNSVDKLRLHTTNHRHEAALKLYKHLQKQEGAVNPESCYYYCAVCDYTTKVKLNLVQHVRSVKHQQTEGLRKLQLHQQGLAPEEDNLSEIFFVKDCPPNELETASLGARTCDDDLTEQQLRSTSEEQSEEAEGAIKPTAVAEDDEKDTSERDNSEGKNSNKDSGIITPEKELKVSVAGGTQPLLLAKEEDVATKRSKPTEDNKFCHEQFYQCPYCNYNSRDQSRIQMHVLSQHSVQPVICCPLCQDVLSNKMHLQLHLTHLHSVSPDCVEKLLMTVPVPDVMMPNSMLLPAAASEKSERDTPAAVTAEGSGKYSGESPMDDKSMAGLEDSKANVEVKNEEQKPTKEPLEVSEWNKNSSKDVKIPDTLQDQLNEQQKRQPLSVSDRHVYKYRCNHCSLAFKTMQKLQIHSQYHAIRAATMCNLCQRSFRTFQALKKHLEAGHPELSEAELQQLYASLPVNGELWAESETMSQDDHGLEQEMEREYEVDHEGKASPVGSDSSSIPDDMGSEPKRTLPFRKGPNFTMEKFLDPSRPYKCTVCKESFTQKNILLVHYNSVSHLHKLKKVLQEASSPVPQETNSNTDNKPYKCSICNVAYSQSSTLEIHMRSVLHQTKARAAKLEPSGHVAGGHSIAANVNSPGQGMLDSMSLAAVNSKDTHLDAKELNKKQTPDLISAQPAHHPPQSPAQIQMQLQHELQQQAAFFQPQFLNPAFLPHFPMTPEALLQFQQPQFLFPFYIPGTEFSLGPDLGLPGSATFGMPGMTGMAGSLLEDLKQQIQTQHHVGQTQLQILQQQAQQYQATQPQLQPQKQQQQPPPPQQQQQQQASKLLKQEQSNIVSADCQIMKDVPSYKEAEDISEKPEKPKQEFISEGEGLKEGKDTKKQKSLEPSIPPPRIASGARGNAAKALLENFGFELVIQYNENRQKVQKKGKSGEGENTDKLECGTCGKLFSNVLILKSHQEHVHGQFFPYAALEKFARQYREAYDKLYPISPSSPETPPPPPPPPPLPPAPPQPSSMGPVKIPNTVSTPLQAPPPTPPPPPPPPPPPPPPPPPPPPSAPPQVQLPVSLDLPLFPSIMMQPVQHPALPPQLALQLPQMDALSADLTQLCQQQLGLDPNFLRHSQFKRPRTRITDDQLKILRAYFDINNSPSEEQIQEMAEKSGLSQKVIKHWFRNTLFKERQRNKDSPYNFSNPPITVLEDIRIDPQPTSLEHYKSDASFSKRSSRTRFTDYQLRVLQDFFDTNAYPKDDEIEQLSTVLNLPTRVIVVWFQNARQKARKSYENQAETKDNEKRELTNERYIRTSNMQYQCKKCNVVFPRIFDLITHQKKQCYKDEDDDAQDESQTEDSMDATDQVVYKHCTVSGQTDAAKNAAAPAASSGSGTSTPLIPSPKPEPEKTSPKPEYPAEKPKQSDPSPPSQGTKPALPLASTSSDPPQASTAQPQPQPQPPKQPQLIGRPPSASQTPVPSSPLQISMTSLQNSLPPQLLQYQCDQCTVAFPTLELWQEHQHMHFLAAQNQFLHSPFLERPMDMPYMIFDPNNPLMTGQLLGSSLTQMPPQASSSHTTAPTTVAASLKRKLDDKEDNNCSEKEGGNSGEDQHRDKRLRTTITPEQLEILYEKYLLDSNPTRKMLDHIAREVGLKKRVVQVWFQNTRARERKGQFRAVGPAQSHKRCPFCRALFKAKSALESHIRSRHWNEGKQAGYSLPPSPLISTEDGGESPQKYIYFDYPSLPLTKIDLSSENELASTVSTPVSKTAELSPKNLLSPSSFKAECSEDVENLNAPPAEAGYDQNKTDFDETSSINTAISDATTGDEGNTEMESTTGSSGDVKPALSPKEPKTLDTLPKPATTPTTEVCDDKFLFSLTSPSIHFNDKDGDHDQSFYITDDPDDNADRSETSSIADPSSPNPFGSSNPFKSKSNDRPGHKRFRTQMSNLQLKVLKACFSDYRTPTMQECEMLGNEIGLPKRVVQVWFQNARAKEKKFKINIGKPFMINQGGTEGTKPECTLCGVKYSARLSIRDHIFSKQHISKVRETVGSQLDREKDYLAPTTVRQLMAQQELDRIKKASDVLGLTVQQPGMMDSSSLHGISLPTAYPGLPGLPPVLLPGMNGPSSLPGFPQNSNTLTPPGAGMLGFPTSATSSPALSLSSAPTKPLLQTPPPPPPPPPPPPSSSLSGQQTEQQNKESEKKQTKPNKVKKIKEEELEATKPEKHPKKEEKISSALSVLGKVVGETHVDPIQLQALQNAIAGDPASFIGGQFLPYFIPGFASYFTPQLPGTVQGGYFPPVCGMESLFPYGPTMPQTLAGLSPGALLQQYQQYQQNLQESLQKQQKQQQEQQQKPVQAKTSKVESDQPQNSNDASETKEDKSTATESTKEEPQLESKSADFSDTYVVPFVKYEFICRKCQMMFTDEDAAVNHQKSFCYFGQPLIDPQETVLRVPVSKYQCLACDVAISGNEALSQHLQSSLHKEKTIKQAMRNAKEHVRLLPHSVCSPNPNTTSTSQSAASSNNTYPHLSCFSMKSWPNILFQASARRAASPPSSPPSLSLPSTVTSSLCSTSGVQTSLPTESCSDESDSELSQKLEDLDNSLEVKAKPASGLDGNFNSIRMDMFSV

SEQ ID NO: 19733 - protein, 1261 aa, Homo sapiens
MEGYPWWPCLVYNHPFDGTFIREKGKSVRVHVQFFDDSPTRGWVSKRLLKPYTGSKSKEAQKGGHFYSAKPEILRAMQRADEALNKDKIKRLELAVCDEPSEPEEEEEMEVGTTYVTDKSEEDNEIESEEEVQPKTQGSRRSSRQIKKRRVISDSESDIGGSDVEFKPDTKEEGSSDEISSGVGDSESEGLNSPVKVARKRKRMVTGNGSLKRKSSRKETPSATKQATSISSETKNTLRAFSAPQNSESQAHVSGGGDDSSRPTVWYHETLEWLKEEKRRDEHRRRPDHPDFDASTLYVPEDFLNSCTPGMRKWWQIKSQNFDLVICYKVGKFYELYHMDALIGVSELGLVFMKGNWAHSGFPEIAFGRYSDSLVQKGYKVARVEQTETPEMMEARCRKMAHISKYDRVVRREICRIITKGTQTYSVLEGDPSENYSKYLLSLKEKEEDSSGHTRAYGVCFVDTSLGKFFIGQFSDDRHCSRFRTLVAHYPPVQVLFEKGNLSKETKTILKSSLSCSLQEGLIPGSQFWDASKTLRTLLEEEYFREKLSDGIGVMLPQVLKGMTSESDSIGLTPGEKSELALSALGGCVFYLKKCLIDQELLSMANFEEYIPLDSDTVSTTRSGAIFTKAYQRMVLDAVTLNNLEIFLNGTNGSTEGTLLERVDTCHTPFGKRLLKQWLCAPLCNHYAINDRLDAIEDLMVVPDKISEVVELLKKLPDLERLLSKIHNVGSPLKSQNHPDSRAIMYEETTYSKKKIIDFLSALEGFKVMCKIIGIMEEVADGFKSKILKQVISLQTKNPEGRFPDLTVELNRWDTAFDHEKARKTGLITPKAGFDSDYDQALADIRENEQSLLEYLEKQRNRIGCRTIVYWGIGRNRYQLEIPENFTTRNLPEEYELKSTKKGCKRYWTKTIEKKLANLINAEERRDVSLKDCMRRLFYNFDKNYKDWQSAVECIAVLDVLLCLANYSRGGDGPMCRPVILLPEDTPPFLELKGSRHPCITKTFFGDDFIPNDILIGCEEEEQENGKAYCVLVTGPNMGGKSTLMRQAGLLAVMAQMGCYVPAEVCRLTPIDRVFTRLGASDRIMSGESTFFVELSETASILMHATAHSLVLVDELGRGTATFDGTAIANAVVKELAETIKCRTLFSTHYHSLVEDYSQNVAVRLGHMACMVENECEDPSQETITFLYKFIKGACPKSYGFNAARLANLPEEVIQKGHRKAREFEKMNQSLRLFREVCLASERSTVDAEAVHKLLTLIKEL

SEQ ID NO: 19734 - protein, 186 aa, Homo sapiens
MGSSGLLSLLVLFVLLANVQGPGLTDWLFPRRCPKIREECEFQERDVCTKDRQCQDNKKCCVFSCGKKCLDLKQDVCEMPKETGPCLAYFLHWWYDKKDNTCSMFVYGGCQGNNNNFQSKANCLNTCKNKQPCPKIKVECEVEEIDQCTKPRDCPENMKCCPFSRGKKCLDFRKVSLTLYHKEELE

SEQ ID NO: 19735 - protein, 274 aa, Homo sapiens
MGAGNLPPITQEEALHILGFQPPFEDIRFGPFTGNTTLMRWFRQINDHFHVKGCSYVLYKPHGKNKTAGETASGALSKLTRGLKDESLAYIYHCQNHYFCPIGFEATPVKANKAFSRGPLSPQEVEYWILIGESSRKHPAIHCKKWADIVTDLNTQNPEYLDIRHLERGLQYRKTKKVGGNLHCIIAFQRLNWQRFGLWNFPFGTIRQESQPPTHAQGIAKSESEDNISKKQHGRLGRSFSASFHQDSAWKKMSSIHERRNSGYQGYSDYDGND

SEQ ID NO: 19736 - protein, 285 aa, Homo sapiens
MIPWVLLACALPCAADPLLGAFARRDFRKGSPQLVCSLPGPQGPPGPPGAPGPSGMMGRMGFPGKDGQDGHDGDRGDSGEEGPPGRTGNRGKPGPKGKAGAIGRAGPRGPKGVNGTPGKHGTPGKKGPKGKKGEPGLPGPCSCGSGHTKSAFSVAVTKSYPRERLPIKFDKILMNEGGHYNASSGKFVCGVPGIYYFTYDITLANKHLAIGLVHNGQYRIRTFDANTGNHDVASGSTILALKQGDEVWLQIFYSEQNGLFYDPYWTDSLFTGFLIYADQDDPNEV

SEQ ID NO: 19737 - protein, 128 aa, Homo sapiens
MMVVLLGATTLVLVAVAPWVLSAAAGGKNLKSPQKVEVDIIDDNFILRWNRSDESVGNVTFSFDYQKTGMDNWIKLSGCQNITSTKCNFSSLKLNVYEEIKLRIRAEKENTSSWYEVDSFTPFRKGKD

SEQ ID NO: 19738 - protein, 966 aa, Homo sapiens
MTLLEPEMLMMAVQSVLQLKLQQRRTREELVSQGIMPPLKSPAAFHEQRRSLERARTEDYLKRKIRSRPERSELVRMHILEETSAEPSLQAKQLKLKRARLADDLNEKIAQRPGPMELVEKNILPVESSLKEAIIVGQVNYPKVADSSSFDEDSSDALSPEQPASHESQGSVPSPLEARVSEPLLSATSASPTQVVSQLPMGRDSREMLFLAEQPPLPPPPLLPPSLTNGTTIPTAKSTPTLIKQSQPKSASEKSQRSKKAKELKPKVKKLKYHQYIPPDQKQDRGAPPMDSSYAKILQQQQLFLQLQILNQQQQQHHNYQAILPAPPKSAGEALGSSGTPPVRSLSTTNSSSSSGAPGPCGLARQNSTSLTGKPGALPANLDDMKVAELKQELKLRSLPVSGTKTELIERLRAYQDQISPVPGAPKAPAATSILHKAGEVVVAFPAARLSTGPALVAAGLAPAEVVVATVASSGVVKFGSTGSTPPVSPTPSERSLLSTGDENSTPGDTFGEMVTSPLTQLTLQASPLQILVKEEGPRAGSCCLSPGGRAELEGRDKDQMLQEKDKQIEALTRMLRQKQQLVERLKLQLEQEKRAQQPAPAPAPLGTPVKQENSFSSCQLSQQPLGPAHPFNPSLAAPATNHIDPCAVAPGPPSVVVKQEALQPEPEPVPAPQLLLGPQGPSLIKGVAPPTLITDSTGTHLVLTVTNKNADSPGLSSGSPQQPSSQPGSPAPAPSAQMDLEHPLQPLFGTPTSLLKKEPPGYEEAMSQQPKQQENGSSSQQMDDLFDILIQSGEISADFKEPPSLPGKEKPSPKTVCGSPLAAQPSPSAELPQAAPPPPGSPSLPGRLEDFLESSTGLPLLTSGHDGPEPLSLIDDLHSQMLSSTAILDHPPSPMDTSELHFVPEPSSTMGLDLADGHLDSMDWLELSSGGPVLSLAPLSTTAPSLFSTDFLDGHDLQLHWDSCL

SEQ ID NO: 19739 - protein, 1004 aa, Homo sapiens
MHPDATDSGGAGPSPARAAGAGGRPVSGFRGERRPESPGDAEAAAAAAPGAPGGRSWWKPVAVAALAAVALSFLGPGSGEAAGAAGLSSVLFRLSLYLSCAAAAFLLGILFALVCRSPRAQPPDFAAAWSRLAATSAARRPPGSPVYGNSHESAQSRRVVISHNMDKALKEVFDYSYRDYILSWYGNLSRDEGQLYHLLLEDFWEIARQLHHRLSHVDVVKVVCNDVVRTLLTHFCDLKAANARHEEQPRPFVLHACLRNSDDEVRFLQTCSRVLVFCLLPSKDVQSLSLRIMLAEILTTKVLKPVVELLSNPDYINQMLLAQLAYREQMNEHHKRAYTYAPSYEDFIKLINSNSDVEFLKQLRYQIVVEIIQATTISSFPQLKRHKGKETAAMKADLLRARNMKRYINQLTVAKKQCEKRIRILGGPAYDQQEDGALDEGEGPQSQKILQFEDILANTFYREHFGMYMERMDKRALISFWESVEHLKNANKNEIPQLVGEIYQNFFVESKEISVEKSLYKEIQQCLVGNKGIEVFYKIQEDVYETLKDRYYPSFIVSDLYEKLLIKEEEKHASQMISNKDEMGPRDEAGEEAVDDGTNQINEQASFAVNKLRELNEKLEYKRQALNSIQNAPKPDKKIVSKLKDEIILIEKERTDLQLHMARTDWWCENLGMWKASITSGEVTEENGEQLPCYFVMVSLQEVGGVETKNWTVPRRLSEFQNLHRKLSECVPSLKKVQLPSLSKLPFKSIDQKFMEKSKNQLNKFLQNLLSDERLCQSEALYAFLSPSPDYLKVIDVQGKKNSFSLSSFLERLPRDFFSHQEEETEEDSDLSDYGDDVDGRKDALAEPCFMLIGEIFELRGMFKWVRRTLIALVQVTFGRTINKQIRDTVSWIFSEQMLVYYINIFRDAFWPNGKLAPPTTIRSKEQSQETKQRAQQKLLENIPDMLQSLVGQQNARHGIIKIFNALQETRANKHLLYALMELLLIELCPELRVHLDQLKAGQV

SEQ ID NO: 19740 - protein, 1348 aa, Homo sapiens
MVIKTDELPAAAPADSAREHGSQAGGKGRPGAAELPSVMLLNGDCPESLKKEAAAAEPPRENGLDEAGPGDETTGQEVIVIQDTGFSVKILAPGIEPFSLQVSPQEMVQEIHQVLMDREDTCHRTCFSLHLDGNVLDHFSELRSVEGLQEGSVLRVVEEPYTVREARIHVRHVRDLLKSLDPSDAFNGVDCNSLSFLSVFTDGDLGDSGKRKKGLEMDPIDCTPPEYILPGSRERPLCPLQPQNRDWKPLQCLKVLTMSGWNPPPGNRKMHGDLMYLFVITAEDRQVSITASTRGFYLNQSTAYHFNPKPASPRFLSHSLVELLNQISPTFKKNFAVLQKKRVQRHPFERIATPFQVYSWTAPQAEHAMDCVRAEDAYTSRLGYEEHIPGQTRDWNEELQTTRELPRKNLPERLLRERAIFKVHSDFTAAATRGAMAVIDGNVMAINPSEETKMQMFIWNNIFFSLGFDVRDHYKDFGGDVAAYVAPTNDLNGVRTYNAVDVEGLYTLGTVVVDYRGYRVTAQSIIPGILERDQEQSVIYGSIDFGKTVVSHPRYLELLERTSRPLKILRHQVLNDRDEEVELCSSVECKGIIGNDGRHYILDLLRTFPPDLNFLPVPGEELPEECARAGFPRAHRHKLCCLRQELVDAFVEHRYLLFMKLAALQLMQQNASQLETPSSLENGGPSSLESKSEDPPGQEAGSEEEGSSASGLAKVKELAETIAADDGTADPRSREVIRNACKAVGSISSTAFDIRFNPDIFSPGVRFPESCQDEVRDQKQLLKDAAAFLLSCQIPGLVKDCMEHAVLPVDGATLAEVMRQRGINMRYLGKVLELVLRSPARHQLDHVFKIGIGELITRSAKHIFKTYLQGVELSGLSAAISHFLNCFLSSYPNPVAHLPADELVSKKRNKRRKNRPPGAADNTAWAVMTPQELWKNICQEAKNYFDFDLECETVDQAVETYGLQKITLLREISLKTGIQVLLKEYSFDSRHKPAFTEEDVLNIFPVVKHVNPKASDAFHFFQSGQAKVQQGFLKEGCELINEALNLFNNVYGAMHVETCACLRLLARLHYIMGDYAEALSNQQKAVLMSERVMGTEHPNTIQEYMHLALYCFASSQLSTALSLLYRARYLMLLVFGEDHPEMALLDNNIGLVLHGVMEYDLSLRFLENALAVSTKYHGPKALKVALSHHLVARVYESKAEFRSALQHEKEGYTIYKTQLGEDHEKTKESSEYLKCLTQQAVALQRTMNEIYRNGSSANIPPLKFTAPSMASVLEQLNVINGILFIPLSQKDLENLKAEVARRHQLQEASRNRDRAEEPMATEPAPAGAPGDLGSQPPAAKDPSPSVQG

SEQ ID NO: 19741 - protein, 164 aa, Homo sapiens
MLALLGLSQALNILLGLKGLAPAEISAVCEKGNFNVAHGLAWSYYIGYLRLILPELQARIRTYNQHYNNLLRGAVSQRLYILLPLDCGVPDNLSMADPNIRFLDKLPQQTGDHAGIKDRVYSNSIYELLENGQRNLQMTAASRCPRRFSGTCGRRKRKRLLWAA

SEQ ID NO: 19742 - protein, 129 aa, Homo sapiens
ACLVSLCLCIAGLKWVFVDKIFEYDSPTHLDPGGLGQDPIISLDATAASAVWVSSEAYTSPVSRAQSESEVQVTVQGDKAVVSFEPSAAPTPKNRIFAFSFLPSTAPSFPSPTRNPELHLHPPLGQAIL

SEQ ID NO: 19743 - protein, 975 aa, Homo sapiens
MAAEEVLQTVDHYKTEIERLTKELTETTHEKIQAAEYGLVVLEEKLTLKQQYDELEAEYDSLKQELEQLKEAFGQSFSIHRKVAEDGETREETLLQESASKEAYYLGKILEMQNELKQSRAVVTNVQAENERLTAVVQDLKENNEMVELQRIRMKDEIREYKFREARLLQDYTELEEENITLQKLVSTLKQNQVEYEGLKHEIKRFEEETVLLNSQLEDAIRLKEIAEHQLEEALETLKNEREQKNNLRKELSQYISLNDNHISISVDGLKFAEDGSEPNNDDKMNGHIHGPLVKLNGDYRTPTLRKGESLNPVSDLFSELNISEIQKLKQQLMQVEREKAILLANLQESQTQLEHTKGALTEQHERVHRLTEHVNAMRGLQSSKELKAELDGEKGRDSGEEAHDYEVDINGLEILECKYRVAVTEVIDLKAEIKALKEKYNKSVENYTDEKAKYESKIQMYDEQVTSLEKTTKESGEKMAHMEKELQKMTSIANENHSTLNTAQDELVTFSEELAQLYHHVCLCNNETPNRVMLDYYRQSRVTRSGSLKGPDDPRGLLSPRLARRGVSSPVETRTSSEPVAKESTEASKEPSPTKTPTISPVITAPPSSPVLDTSDIRKEPMNIYNLNAIIRDQIKHLQKAVDRSLQLSRQRAAARELAPMIDKDKEALMEEILKLKSLLSTKREQIATLRAVLKANKQTAEVALANLKNKYENEKAMVTETMTKLRNELKALKEDAATFSSLRAMFATRCDEYVTQLDEMQRQLAAAEDEKKTLNTLLRMAIQQKLALTQRLEDLEFDHEQSRRSKGKLGKSKIGSPKVSGEASVTVPTIDTYLLHSQGPQTPNIRVSSGTQRKRQFSPSLCDQSRPRTSGASYLQNLLRVPPDPTSTESFLLKGPPSMSEFIQGHRLSKEKRLTVAPPDCQQPAASVPPQCSQLAGRQDCPTVSPDTALPEEQPHSSSQCAPLHCLSKPPHP

SEQ ID NO: 19744 - protein, 2059 aa, Homo sapiens
MRILKRFLACIQLLCVCRLDWANGYYRQQRKLVEEIGWSYTGALNQKNWGKKYPTCNSPKQSPINIDEDLTQVNVNLKKLKFQGWDKTSLENTFIHNTGKTVEINLTNDYRVSGGVSEMVFKASKITFHWGKCNMSSDGSEHSLEGQKFPLEMQIYCFDADRFSSFEEAVKGKGKLRALSILFEVGTEENLDFKAIIDGVESVSRFGKQAALDPFILLNLLPNSTDKYYIYNGSLTSPPCTDTVDWIVFKDTVSISESQLAVFCEVLTMQQSGYVMLMDYLQNNFREQQYKFSRQVFSSYTGKEEIHEAVCSSEPENVQADPENYTSLLVTWERPRVVYDTMIEKFAVLYQQLDGEDQTKHEFLTDGYQDLGAILNNLLPNMSYVLQIVAICTNGLYGKYSDQLIVDMPTDNPELDLFPELIGTEEIIKEEEEGKDIEEGAIVNPGRDSATNQIRKKEPQISTTTHYNRIGTKYNEAKTNRSPTRGSEFSGKGDVPNTSLNSTSQPVTKLATEKDISLTSQTVTELPPHTVEGTSASLNDGSKTVLRSPHMNLSGTAESLNTVSITEYEEESLLTSFKLDTGAEDSSGSSPATSAIPFISENISQGYIFSSENPETITYDVLIPESARNASEDSTSSGSEESLKDPSMEGNVWFPSSTDITAQPDVGSGRESFLQTNYTEIRVDESEKTTKSFSAGPVMSQGPSVTDLEMPHYSTFAYFPTEVTPHAFTPSSRQQDLVSTVNVVYSQTTQPVYNDGLTALNISSPVSVAEFTYTTSVFGDDNKALSKSEIIYGNETELQIPSFNEMVYPSESTVMPNMYDNVNKLNASLQETSVSISSTKGMFPGSLAHTTTKVFDHEISQVPENNFSVQPTHTVSQASGDTSLKPVLSANSEPASSDPASSEMLSPSTQLLFYETSASFSTEVLLQPSFQASDVDTLLKTVLPAVPSDPILVETPKVDKISSTMLHLIVSNSASSENMLHSTSVPVFDVSPTSHMHSASLQGLTISYASEKYEPVLLKSESSHQVVPSLYSNDELFQTANLEINQAHPPKGRHVFATPVLSIDEPLNTLINKLIHSDEILTSTKSSVTGKVFAGIPTVASDTFVSTDHSVPIGNGHVAITAVSPHRDGSVTSTKLLFPSKATSELSHSAKSDAGLVGGGEDGDTDDDGDDDDDDRGSDGLSIHKCMSCSSYRESQEKVMNDSDTHENSLMDQNNPISYSLSENSEEDNRVTSVSSDSQTGMDRSPGKSPSANGLSQKHNDGKEENDIQTGSALLPLSPESKAWAVLTSDEESGSGQGTSDSLNENETSTDFSFADTNEKDADGILAAGDSEITPGFPQSPTSSVTSENSEVFHVSEAEASNSSHESRIGLAEGLESEKKAVIPLVIVSALTFICLVVLVGILIYWRKCFQTAHFYLEDSTSPRVISTPPTPIFPISDDVGAIPIKHFPKHVADLHASSGFTEEFETLKEFYQEVQSCTVDLGITADSSNHPDNKHKNRYINIVAYDHSRVKLAQLAEKDGKLTDYINANYVDGYNRPKAYIAAQGPLKSTAEDFWRMIWEHNVEVIVMITNLVEKGRRKCDQYWPADGSEEYGNFLVTQKSVQVLAYYTVRNFTLRNTKIKKGSQKGRPSGRVVTQYHYTQWPDMGVPEYSLPVLTFVRKAAYAKRHAVGPVVVHCSAGVGRTGTYIVLDSMLQQIQHEGTVNIFGFLKHIRSQRNYLVQTEEQYVFIHDTLVEAILSKETEVLDSHIHAYVNALLIPGPAGKTKLEKQFQLLSQSNIQQSDYSAALKQCNREKNRTSSIIPVERSRVGISSLSGEGTDYINASYIMGYYQSNEFIITQHPLLHTIKDFWRMIWDHNAQLVVMIPDGQNMAEDEFVYWPNKDEPINCESFKVTLMAEEHKCLSNEEKLIIQDFILEATQDDYVLEVRHFQCPKWPNPDSPISKTFELISVIKEEAANRDGPMIVHDEHGGVTAGTFCALTTLMHQLEKENSVDVYQVAKMINLMRPGVFADIEQYQFLYKVILSLVSTRQEENPSTSLDSNGAALPDGNIAESLESLV

SEQ ID NO: 19745 - protein, 56 aa, Homo sapiens
MRILKRFLACIQLLCVCRLDTMQKLHSSVCQNLAASPQRRLENLAFILDGQVLRLG

SEQ ID NO: 19746 - protein, 207 aa, Homo sapiens
MDKDCEMKRTTLDSPLGKLELSGCEQGLHEIKLLGKGTSAADAVEVPAPAAVLGGPEPLMQCTAWLNAYFHQPEAIEEFPVPALHHPVFQQESFTRQVLWKLLKVVKFGEVISYQQLAALAGNPKAARAVGGAMRGNPVPILIPCHRVVCSSGAVGNYSGGLAVKEWLLAHEGHRLGKPGLGGSSGLAGAWLKGAGATSGSPPAGRN

SEQ ID NO: 19747 - protein, 396 aa, Homo sapiens
MAEMATATRLLGWRVASWRLRPPLAGFVSQRAHSLLPVDDAINGLSEEQRQEFWKQLGNLGVLGITAPVQYGGSGLGYLEHVLVMEEISRASGAVGLSYGAHSNLCINQLVRNGNEAQKEKYLPKLISGEYIGALAMSEPNAGSDVVSMKLKAEKKGNHYILNGNKFWITNGPDADVLIVYAKTDLAAVPASRGITAFIVEKGMPGFSTSKKLDKLGMRGSNTCELIFEDCKIPAANILGHENKGVYVLMSGLDLERLVLAGGPLGLMQAVLDHTIPYLHVREAFGQKIGHFQLMQGKMADMYTRLMACRQYVYNVAKACDEGHCTAKDCAGVILYSAECATQVALDGIQCFGGNGYINDFPMGRFLRDAKLYEIGAGTSEVRRLVIGRAFNADFH

SEQ ID NO: 19748 - protein, 914 aa, Homo sapiens
MFPVFSGCFQELQEKNKSLELVSFEEVAVHFTWEEWQDLDDAQRTLYRDVMLETYSSLVSLGHYITKPEMIFKLEQGAEPWIVEETPNLRLSAVQIIDDLIERSHESHDRFFWQIVITNSNTSTQERVELGKTFNLNSNHVLNLIINNGNSSGMKPGQFNDCQNMLFPIKPGETQSGEKPHVCDITRRSHRHHEHLTQHHKIQTLLQTFQCNEQGKTFNTEAMFFIHKRVHIVQTFGKYNEYEKACNNSAVIVQVITQVGQPTCCRKSDFTKHQQTHTGEKPYECVECEKPSISKSDLMLQCKMPTEEKPYACNWCEKLFSYKSSLIIHQRIHTGEKPYGCNECGKTFRRKSFLTLHERTHTGDKPYKCIECGKTFHCKSLLTLHHRTHSGEKPYQCSECGKTFSQKSYLTIHHRTHTGEKPYACDHCEEAFSHKSRLTVHQRTHTGEKPYECNECGKPFINKSNLRLHQRTHTGEKPYECNECGKTFHRKSFLTIHQWTHTGEKPYECNECGKTFRCKSFLTVHQRTHAGEKPYACNECGKTYSHKSYLTVHHRTHTGEKPYECNECGKSFHCKSFLTIHQRTHAGKKPYECNECEKTFINKLNLGIHKRTHTGERPYECNECGKTFRQKSNLSTHQGTHTGEKPYVCNECGKTFHRKSFLTIHQRTHTGKNRMDVMNVEKLFVRNHTLLYIRELTPGKSPMNVMNVENPFIRRQIFRSIKVFTRGRNPMNVANVEKPCQKSVLTVHHRTHTGEKPYECNECGKTFCHKSNLSTHQGTHSGEKPYECDECRKTFYDKTVLTIHQRTHTGEKPFECKECRKTFSQKSKLFVHHRTHTGEKPFRCNECRKTFSQKSGLSIHQRTHTGEKPYECKECGKTFCQKSHLSRHQQTHIGEKSDVAEAGYVFPQNHSFFP

SEQ ID NO: 19749 - protein, 184 aa, Homo sapiens
MSRTAYTVGALLLLLGTLLPAAEGKKKGSQGAIPPPDKAQHNDSEQTQSPQQPGSRNRGRGQGRGTAMPGEEVLESSQEALHVTERKYLKRDWCKTQPLKQTIHEEGCNSRTIINRFCYGQCNSFYIPRHIRKEEGSFQSCSFCKPKKFTTMMVTLNCPELQPPTKKKRVTRVKQCRCISIDLD

SEQ ID NO: 19750 - protein, 118 aa, Homo sapiens
MAWQGLVLAACLLMFPSTTADCLSRCSLCAVKTQDGPKPINPLICSLQCQAALLPSEEWERCQSFLSFFTPSTLGLNDKEDLGSKSVGEGPYSELAKLSGSFLKELEKSKFLPSISTK

SEQ ID NO: 19751 - protein, 517 aa, Homo sapiens
MHGGQGPLLLLLLLAVCLGAQGRNQEERLLADLMQNYDPNLRPAERDSDVVNVSLKLTLTNLISLNEREEALTTNVWIEMQWCDYRLRWDPRDYEGLWVLRVPSTMVWRPDIVLENNVDGVFEVALYCNVLVSPDGCIYWLPPAIFRSACSISVTYFPFDWQNCSLIFQSQTYSTNEIDLQLSQEDGQTIEWIFIDPEAFTENGEWAIQHRPAKMLLDPAAPAQEAGHQKVVFYLLIQRKPLFYVINIIAPCVLISSVAILIHFLPAKAGGQKCTVAINVLLAQTVFLFLVAKKVPETSQAVPLISKYLTFLLVVTILIVVNAVVVLNVSLRSPHTHSMARGVRKVFLRLLPQLLRMHVRPLAPAAVQDTQSRLQNGSSGWSITTGEEVALCLPRSELLFQQWQRQGLVAAALEKLEKGPELGLSQFCGSLKQAAPAIQACVEACNLIACARHQQSHFDNGNEEWFLVGRVLDRVCFLAMLSLFICGTAGIFLMAHYNRVPALPFPGDPRPYLPSPD

SEQ ID NO: 19752 - protein, 2069 aa, Homo sapiens
MSQPPLLPASAETRKFTRALSKPGTAAELRQSVSEVVRGSVLLAKPKLIEPLDYENVIVQKKTQILNDCLREMLLFPYDDFQTAILRRQGRYICSTVPAKAEEEAQSLFVTECIKTYNSDWHLVNYKYEDYSGEFRQLPNKVVKLDKLPVHVYEVDEEVDKDEDAASLGSQKGGITKHGWLYKGNMNSAISVTMRSFKRRFFHLIQLGDGSYNLNFYKDEKISKEPKGSIFLDSCMGVVQNNKVRRFAFELKMQDKSSYLLAADSEVEMEEWITILNKILQLNFEAAMQEKRNGDSHEDDEQSKLEGSGSGLDSYLPELAKSAREAEIKLKSESRVKLFYLDPDAQKLDFSSAEPEVKSFEEKFGKRILVKCNDLSFNLQCCVAENEEGPTTNVEPFFVTLSLFDIKYNRKISADFHVDLNHFSVRQMLATTSPALMNGSGQSPSVLKGILHEAAMQYPKQGIFSVTCPHPDIFLVARIEKVLQGSITHCAEPYMKSSDSSKVAQKVLKNAKQACQRLGQYRMPFAWAARTLFKDASGNLDKNARFSAIYRQDSNKLSNDDMLKLLADFRKPEKMAKLPVILGNLDITIDNVSSDFPNYVNSSYIPTKQFETCSKTPITFEVEEFVPCIPKHTQPYTIYTNHLYVYPKYLKYDSQKSFAKARNIAICIEFKDSDEEDSQPLKCIYGRPGGPVFTRSAFAAVLHHHQNPEFYDEIKIELPTQLHEKHHLLLTFFHVSCDNSSKGSTKKRDVVETQVGYSWLPLLKDGRVVTSEQHIPVSANLPSGYLGYQELGMGRHYGPEIKWVDGGKPLLKISTHLVSTVYTQDQHLHNFFQYCQKTESGAQALGNELVKYLKSLHAMEGHVMIAFLPTILNQLFRVLTRATQEEVAVNVTRVIIHVVAQCHEEGLESHLRSYVKYAYKAEPYVASEYKTVHEELTKSMTTILKPSADFLTSNKLLKYSWFFFDVLIKSMAQHLIENSKVKLLRNQRFPASYHHAVETVVNMLMPHITQKFRDNPEASKNANHSLAVFIKRCFTFMDRGFVFKQINNYISCFAPGDPKTLFEYKFEFLRVVCNHEHYIPLNLPMPFGKGRIQRYQDLQLDYSLTDEFCRNHFLVGLLLREVGTALQEFREVRLIAISVLKNLLIKHSFDDRYASRSHQARIATLYLPLFGLLIENVQRINVRDVSPFPVNAGMTVKDESLALPAVNPLVTPQKGSTLDNSLHKDLLGAISGIASPYTTSTPNINSVRNADSRGSLISTDSGNSLPERNSEKSNSLDKHQQSSTLGNSVVRCDKLDQSEIKSLLMCFLYILKSMSDDALFTYWNKASTSELMDFFTISEVCLHQFQYMGKRYIARTGMMHARLQQLGSLDNSLTFNHSYGHSDADVLHQSLLEANIATEVCLTALDTLSLFTLAFKNQLLADHGHNPLMKKVFDVYLCFLQKHQSETALKNVFTALRSLIYKFPSTFYEGRADMCAALCYEILKCCNSKLSSIRTEASQLLYFLMRNNFDYTGKKSFVRTHLQVIISVSQLIADVVGIGGTRFQQSLSIINNCANSDRLIKHTSFSSDVKDLTKRIRTVLMATAQMKEHENDPEMLVDLQYSLAKSYASTPELRKTWLDSMARIHVKNGDLSEAAMCYVHVTALVAEYLTRKEAVQWEPPLLPHSHSACLRRSRGGVFRQGCTAFRVITPNIDEEASMMEDVGMQDVHFNEDVLMELLEQCADGLWKAERYELIADIYKLIIPIYEKRRDFERLAHLYDTLHRAYSKVTEVMHSGRRLLGTYFRVAFFGQAAQYQFTDSETDVEGFFEDEDGKEYIYKEPKLTPLSEISQRLLKLYSDKFGSENVKMIQDSGKVNPKDLDSKYAYIQVTHVIPFFDEKELQERKTEFERSHNIRRFMFEMPFTQTGKRQGGVEEQCKRRTILTAIHCFPYVKKRIPVMYQHHTDLNPIEVAIDEMSKKVAELRQLCSSAEVDMIKLQLKLQGSVSVQVNAGPLAYARAFLDDTNTKRYPDNKVKLLKEVFRQFVEACGQALAVNERLIKEDQLEYQEEMKANYREMAKELSEIMHEQLG

SEQ ID NO: 19753 - protein, 1301 aa, Homo sapiens
MKIITYFCIWAVAWAIPVPQSKPLERHVEKSMNLHLLARSNVSVQDELNASGTIKESGVLVHEGDRGRQENTQDGHKGEGNGSKWAEVGGKSFSTYSTLANEEGNIEGWNGDTGKAETYGHDGIHGKEENITANGIQGQVSIIDNAGATNRSNTNGNTDKNTQNGDVGDAGHNEDVAVVQEDGPQVAGSNNSTDNEDEIIENSCRNEGNTSEITPQINSKRNGTKEAEVTPGTGEDAGLDNSDGSPSGNGADEDEDEGSGDDEDEEAGNGKDSSNNSKGQEGQDHGKEDDHDSSIGQNSDSKEYYDPEGKEDPHNEVDGDKTSKSEENSAGIPEDNGSQRIEDTQKLNHRESKRVENRITKESETHAVGKSQDKGIEIKGPSSGNRNITKEVGKGNEGKEDKGQHGMILGKGNVKTQGEVVNIEGPGQKSEPGNKVGHSNTGSDSNSDGYDSYDFDDKSMQGDDPNSSDESNGNDDANSESDNNSSSRGDASYNSDESKDNGNGSDSKGAEDDDSDSTSDTNNSDSNGNGNNGNDDNDKSDSGKGKSDSSDSDSSDSSNSSDSSDSSDSDSSDSNSSSDSDSSDSDSSDSSDSDSSDSSNSSDSSDSSDSSDSSDSSDSSDSKSDSSKSESDSSDSDSKSDSSDSNSSDSSDNSDSSDSSNSSNSSDSSDSSDSSDSSSSSDSSNSSDSSDSSDSSNSSESSDSSDSSDSDSSDSSDSSNSNSSDSDSSNSSDSSDSSNSSDSSDSSDSSNSSDSSDSSDSSNSSDSSDSSDSSDSSDSSNSSDSNDSSNSSDSSDSSNSSDSSNSSDSSDSSDSSDSDSSNSSDSSNSSDSSDSSNSSDSSDSSDSSDGSDSDSSNRSDSSNSSDSSDSSDSSNSSDSSDSSDSNESSNSSDSSDSSNSSDSDSSDSSNSSDSSDSSNSSDSSESSNSSDNSNSSDSSNSSDSSDSSDSSNSSDSSNSSDSSNSSDSSDSNSSDSSDSSNSSDSSDSSDSSDSSDSSDSSNSSDSSDSSDSSDSSNSSDSSNSSDSSNSSDSSDSSDSSDSSDSSDSSDSSDSSNSSDSSDSSDSSDSSDSSDSSDSSDSSESSDSSDSSNSSDSSDSSDSSDSSDSSDSSDSSDSSDSSNSSDSSDSSDSSDSSDSSNSSDSSDSSESSDSSDSSDSSDSSDSSDSSDSSDSSDSSNSSDSSDSSDSSDSSDSSDSSDSSDSSDSSDSSDSSDSSDSSDSSDSSDSSDSNESSDSSDSSDSSDSSNSSDSSDSSDSSDSTSDSNDESDSQSKSGNGNNNGSDSDSDSEGSDSNHSTSDD

SEQ ID NO: 19754 - protein, 260 aa, Homo sapiens
MLALLGLSQALNILLGLKGLAPAEISAVCEKGNFNVAHGLAWSYYIGYLRLILPELQARIRTYNQHYNNLLRGAVSQRLYILLPLDCGVPDNLSMADPNIRFLDKLPQQTGDHAGIKDRVYSNSIYELLENGQRAGTCVLEYATPLQTLFAMSQYSQAGFSREDRLEQAKLFCRTLEDILADAPESQNNCRLIAYQEPADDSSFSLSQEVLRHLRQEEKEEVTVGSLKTSAVPSTSTMSQEPELLISGMEKPLPLRTDFS

SEQ ID NO: 19755 - protein, 2053 aa, Homo sapiens
MWLVTFLLLLDSLHKARPEDVGTSLYFVNDSLQQVTFSSSVGVVVPCPAAGSPSAALRWYLATGDDIYDVPHIRHVHANGTLQLYPFSPSAFNSFIHDNDYFCTAENAAGKIRSPNIRVKAVFREPYTVRVEDQRSMRGNVAVFKCLIPSSVQEYVSVVSWEKDTVSIIPEHRFFITYHGGLYISDVQKEDALSTYRCITKHKYSGETRQSNGARLSVTDPAESIPTILDGFHSQEVWAGHTVELPCTASGYPIPAIRWLKDGRPLPADSRWTKRITGLTISDLRTEDSGTYICEVTNTFGSAEATGILMVIDPLHVTLTPKKLKTGIGSTVILSCALTGSPEFTIRWYRNTELVLPDEAISIRGLSNETLLITSAQKSHSGAYQCFATRKAQTAQDFAIIALEDGTPRIVSSFSEKVVNPGEQFSLMCAAKGAPPPTVTWALDDEPIVRDGSHRTNQYTMSDGTTISHMNVTGPQIRDGGVYRCTARNLVGSAEYQARINVRGPPSIRAMRNITAVAGRDTLINCRVIGYPYYSIKWYKDALLLPDNHRQVVFENGTLKLTDVQKGMDEGEYLCSVLIQPQLSISQSVHVAVKVPPLIQPFEFPPASIGQLLYIPCVVSSGDMPIRITWRKDGQVIISGSGVTIESKEFMSSLQISSVSLKHNGNYTCIASNAAATVSRERQLIVRVPPRFVVQPNNQDGIYGKAGVLNCSVDGYPPPKVMWKHAKGSGNPQQYHPVPLTGRIQILPNSSLLIRHVLEEDIGYYLCQASNGVGTDISKSMFLTVKIPAMITSHPNTTIAIKGHAKELNCTARGERPIIIRWEKGDTVIDPDRVMRYAIATKDNGDEVVSTLKLKPADRGDSVFFSCHAINSYGEDRGLIQLTVQEPPDPPELEIREVKARSMNLRWTQRFDGNSIITGFDIEYKNKSDSWDFKQSTRNISPTINQANIVDLHPASVYSIRMYSFNKIGRSEPSKELTISTEEAAPDGPPMDVTLQPVTSQSIQVTWKAPKKELQNGVIRGYQIGYRENSPGSNGQYSIVEMKATGDSEVYTLDNLKKFAQYGVVVQAFNRAGTGPSSSEINATTLEDVPSQPPENVRALSITSDVAVISWSEPPRSTLNGVLKGYRVIFWSLYVDGEWGEMQNITTTRERVELRGMEKFTNYSVQVLAYTQAGDGVRSSVLYIQTKEDVPGPPAGIKAVPSSASSVVVSWLPPTKPNGVIRKYTIFCSSPGSGQPAPSEYETSPEQLFYRIAHLNRGQQYLLWVAAVTSAGRGNSSEKVTIEPAGKAPAKIISFGGTVTTPWMKDVRLPCNSVGDPAPAVKWTKDSEDSAIPVSMDGHRLIHTNGTLLLRAVKAEDSGYYTCTATNTGGFDTIIVNLLVQVPPDQPRLTVSKTSASSITLTWIPGDNGGSSIRGFVLQYSVDNSEEWKDVFISSSERSFKLDSLKCGTWYKVKLAAKNSVGSGRISEIIEAKTHGREPSFSKDQHLFTHINSTHARLNLQGWNNGGCPITAIVLEYRPKGTWAWQGLRANSSGEVFLTELREATWYELRMRACNSAGCGNETAQFATLDYDGSTIPPIKSAQGEGDDVKKLFTIGCPVILATLGVALLFIVRKKRKEKRLKRLRDAKSLAEMLISKNNRSFDTPVKGPPQGPRLHIDIPRVQLLIEDKEGIKQLGDDKATIPVTDAEFSQAVNPQSFCTGVSLHHPTLIQSTGPLIDMSDIRPGTNPVSRKNVKSAHSTRNRYSSQWTLTKCQASTPARTLTSDWRTVGSQHGVTVTESDSYSASLSQDTDKGRNSMVSTESASSTYEELARAYEHAKLEEQLQHAKFEITECFISDSSSDQMTTGTNENADSMTSMSTPSEPGICRFTASPPKPQDADRGKNVAVPIPHRANKSDYCNLPLYAKSEAFFRKADGREPCPVVPPREASIRNLARTYHTQARHLTLDPASKSLGLPHPGAPAAASTATLPQRTLAMPAPPAGTAPPAPGPTPAEPPTAPSAAPPAPSTEPPRAGGPHTKMGGSRDSLLEMSTSGVGRSQKQGAGAYSKSYTLV

SEQ ID NO: 19756 - protein, 150 aa, Homo sapiens
MNIKGSPWKGSLLLLLVSNLLLCQSVAPLPICPGGAARCQVTLRDLFDRAVVLSHYIHNLSSEMFSEFDKRYTHGRGFITKAINSCHTSSLATPEDKEQAQQMNQKDFLSLIVSILRSWNEPLYHLVTEVRGMQEAPEAILSKAVEIEEQ

SEQ ID NO: 19757 - protein, 20 aa, Homo sapiens
MAWQGLVLAACLLMFPSTTA

SEQ ID NO: 19758 - protein, 1009 aa, Homo sapiens
MNGEYRGRGFGRGRFQSWKRGRGGGNFSGKWREREHRPDLSKTTGKRTSEQTPQFLLSTKTPQSMQSTLDRFIPYKGWKLYFSEVYSDSSPLIEKIQAFEKFFTRHIDLYDKDEIERKGSILVDFKELTEGGEVTNLIPDIATELRDAPEKTLACMGLAIHQVLTKDLERHAAELQAQEGLSNDGETMVNVPHIHARVYNYEPLTQLKNVRANYYGKYIALRGTVVRVSNIKPLCTKMAFLCAACGEIQSFPLPDGKYSLPTKCPVPVCRGRSFTALRSSPLTVTMDWQSIKIQELMSDDQREAGRIPRTIECELVHDLVDSCVPGDTVTITGIVKVSNAEEGSRNKNDKCMFLLYIEANSISNSKGQKTKSSEDGCKHGMLMEFSLKDLYAIQEIQAEENLFKLIVNSLCPVIFGHELVKAGLALALFGGSQKYADDKNRIPIRGDPHILVVGDPGLGKSQMLQAACNVAPRGVYVCGNTTTTSGLTVTLSKDSSSGDFALEAGALVLGDQGICGIDEFDKMGNQHQALLEAMEQQSISLAKAGVVCSLPARTSIIAAANPVGGHYNKAKTVSENLKMGSALLSRFDLVFILLDTPNEHHDHLLSEHVIAIRAGKQRTISSATVARMNSQDSNTSVLEVVSEKPLSERLKVVPGETIDPIPHQLLRKYIGYARQYVYPRLSTEAARVLQDFYLELRKQSQRLNSSPITTRQLESLIRLTEARARLELREEATKEDAEDIVEIMKYSMLGTYSDEFGNLDFERSQHGSGMSNRSTAKRFISALNNVAERTYNNIFQFHQLRQIAKELNIQYENPWTIPNMLSMTRIGLAPVLGYLIIEEDFNIALGVFALAGLTDLLDGFIARNWANQRSALGSALDPLADKILISILYVSLTYADLIPVPLTYMIISRDVMLIAAVFYVRYRTLPTPRTLAKYFNPCYATARLKPTFISKVNTAVQLILVAASLAAPVFNYADSIYLQILWCFTAFTTAASAYSYYHYGRKTVQVIKD

SEQ ID NO: 19759 - protein, 361 aa, Homo sapiens [sequence omitted]

SEQ ID NO: 19760 - protein, 137 aa, Homo sapiens
MRLSRAFAWPLLCSIATTVKAPFATAPSDCGGHYTDEYGRIFNYAGPKTECVWIIELNPGEIVTVAIPDLKGFACGKEYVEVLDGPPGSESLDRICKAFSTFYYSSSNIITIKYSREPSHPPTFFEIYYFVDAWSTH

SEQ ID NO: 19761 - protein, 709 aa, Homo sapiens
MGHRTAMPEPRGSSQLRVNAAFAARYNRYREREELQRLKDRYGDRDSSSDSSSESDSSDERVEFDPQQERDFYKTLSLLKKKDPRIYQKDATFYNRTASSSDSEEDPEALEKQKKVRPMYLKDYERKVILEKAGKYVDEENSDGETSNHRLQETSSQSYVEEQKQLKESFRAFVEDSEDEDGAGEGGSSLLQKRAKTRQEKAQEEADYIEWLKGQKEIRNPDSLKELTHLKEYWNDPELDEGERFLRDYILNKRYEEEEEEEEDEEEMEEEEGVHGPPVQLAVDDSSDEGELFLKKQEDFEQKYNFRFEEPDSASVKTYPRSIASSVRRKDERRKEKREETRERKKREKAKKQEELKQLKNLKRKEILAKLEKLRKVTGNEMLGLEEGDLEDDFDPAQHDQLMQKCFGDEYYGAVEEEKPQFEEEEGLEDDWNWDTWDGPEQEGDWSQQELHCEDPNFNMDADYDPSQPRKKKREAPLTGKKKRKSPFAAAVGQEKPVFEPGDKTFEEYLDEYYRLDYEDIIDDLPCRFKYRTVVPCDFGLSTEEILAADDKELNRWCSLKKTCMYRSEQEELRDKRAYSQKAQNSWKKRQVFKSLCREEAETPAEATGKPQRDEAGPQRQLPALDGSLMGPESPPAQEEEAPVSPHKKPAPQKRRRAKKARLLGPTVMLGGCEFSRQRLQAFGLNPKRLHFRQLGRQRRKQQGPKNSS

SEQ ID NO: 19762 - protein, 426 aa, Homo sapiens
MEEEDEEARALLAGGPDEADRGAPAAPGALPALCDPSRLAHRLLVLLLMCFLGFAIFAMIILLPFRLKLNEWGTIIFSCFVCIGQVVFALGGIFNAFWLMEFGRFVFGIGGESLAVAQNTYAVSWFKGKELNLVFGLQLSMARIGSTVNMNLMGWLYSKIEALLGSAGHTTLGITLMIGGITCILSLICALALAYLDQRAERILHKEQGKTGEVIKLTDVKDFSLPLWLIFIICVCYYVAVFPFIGLGKVFFTEKFGFSSQAASAINSVVYVISAPMSPVFGLLVDKTGKNIIWVLCAVAATLVSHMMLAFTMWNPWIAMCLLGLSYSLLACALWPMVAFVVPEHQLGTAYGFMQSIQNLGLAIISIIAGMILDSRGYLFLEVFFIACVSLSLLSVVLLYLVNRAQGGNLNYSARQREEIKFSHTE

SEQ ID NO: 19763 - protein, 2413 aa, Homo sapiens; identical to SEQ ID NO: 8532

SEQ ID NO: 19764 - protein, 653 aa, Homo sapiens
MRLPDLRPWTSLLLVDAALLWLLQGPLGTLLPQGLPGLWLEGTLRLGGLWGLLKLRGLLGFVGTLLLPLCLATPLTVSLRALVAGASRAPPARVASAPWSWLLVGYGAAGLSWSLWAVLSPPGAQEKEQDQVNNKVLMWRLLKLSRPDLPLLVAAFFFLVLAVLGETLIPHYSGRVIDILGGDFDPHAFASAIFFMCLFSFGSSLSAGCRGGCFTYTMSRINLRIREQLFSSLLRQDLGFFQETKTGELNSRLSSDTTLMSNWLPLNANVLLRSLVKVVGLYGFMLSISPRLTLLSLLHMPFTIAAEKVYNTRHQEVLREIQDAVARAGQVVREAVGGLQTVRSFGAEEHEVCRYKEALEQCRQLYWRRDLERALYLLVRRVLHLGVQMLMLSCGLQQMQDGELTQGSLLSFMIYQESVGSYVQTLVYIYGDMLSNVGAAEKVFSYMDRQPNLPSPGTLAPTTLQGVVKFQDVSFAYPNRPDRPVLKGLTFTLRPGEVTALVGPNGSGKSTVAALLQNLYQPTGGQVLLDEKPISQYEHCYLHSQVVSVGQEPVLFSGSVRNNIAYGLQSCEDDKVMAAAQAAHADDFIQEMEHGIYTDVGEKGSQLAAGQKQRLAIARALVRDPRVLILDEATSALDVQCEQAKTLWKFMIF

SEQ ID NO: 19765 - protein, 383 aa, Homo sapiens
MILLQHAVLPPPKQPSPSPPMSVATRSTGTLQLPPQKPFGQEASLPLAGEEELSKGGEQDCALEELCKPLYCKLCNVTLNSAQQAQAHYQGKNHGKKLRNYYAANSCPPPARMSNVVEPAATPVVPVPPQMGSFKPGGRVILATENDYCKLCDASFSSPAVAQAHYQGKNHAKRLRLAEAQSNSFSESSELGQRRARKEGNEFKMMPNRRNMYTVQNNSGPYFNPRSRQRIPRDLAMCVTPSGQFYCSMCNVGAGEEMEFRQHLESKQHKSKDTEMLSALRCHCWGMEGFCVSNSRLFFLPFGASFSDMKLKPDLKGQWCSGKRVDVGIRPKLNLRPSSYRRCHHESLLQPLDTVSSLLESIKENGKRDSRHTKRINMELKAM

SEQ ID NO: 19766 - protein, 44 aa, Homo sapiens
MLRPALPWLYLGLCSLLVGEAEAPSPVDPLERSRPYAVLRGQNL

SEQ ID NO: 19767 - protein, 48 aa, Homo sapiens
MSDNDDIEVESDADKRAHHNALERKRRDHIKDSFHSLRDSVPSLQGEK

SEQ ID NO: 19768 - protein, 415 aa, Homo sapiens
MRLFRWLLKQPVPKQIERYSRFSPSPLSIKQFLDFGRDNACEKTSYMFLRKELPVRLANTMREVNLLPDNLLNRPSVGLVQSWYMQSFLELLEYENKSPEDPQVLDNFLQVLIKVRNRHNDVVPTMAQGVIEYKEKFGFDPFISTNIQYFLDRFYTNRISFRMLINQHTLLFGGDTNPVHPKHIGSIDPTCNVADVVKDAYETAKMLCEQYYLVAPELEVEEFNAKAPDKPIQVVYVPSHLFHMLFELFKNSMRATVELYEDRKEGYPAVKTLVTLGKEDLSIKISDLGGGVPLRKIDRLFNYMYSTAPRPSLEPTRAAPLAGFGYGLPISRLYARYFQGDLKLYSMEGVGTDAVIYLKALSSESFERLPVFNKSAWRHYKTTPEADDWSNPSSEPRDASKYKAKQDKIKTNRTF

SEQ ID NO: 19769 - protein, 418 aa, Homo sapiens
MRACAGPRLGAAMMEGLDDGPDFLSEEDRGLKAINVDLQSDAALQVDISDALSERDKVKFTVHTKSSLPNFKQNEFSVVRQHEEFIWLHDSFVENEDYAGYIIPPAPPRPDFDASREKLQKLGEGEGSMTKEEFTKMKQELEAEYLAIFKKTVAMHEVFLCRVAAHPILRRDLNFHVFLEYNQDLSVRGKNKKEKLEDFFKNMVKSADGVIVSGVKDVDDFFEHERTFLLEYHNRVKDASAKSDRMTRSHKSAADDYNRIGSSLYALGTQDSTDICKFFLKVSELFDKTRKIEARVSADEDLKLSDLLKYYLRESQAAKDLLYRRSRSLVDYENANKALDKARAKNKDVLQAETSQQLCCQKFEKISESAKQELIDFKTRRVAAFRKNLVELAELELKHAKGNLQLLQNCLAVLNGDT

SEQ ID NO: 19770 - protein, 818 aa, Homo sapiens
MAQWEMLQNLDSPFQDQLHQLYSHSLLPVDIRQYLAVWIEDQNWQEAALGSDDSKATMLFFHFLDQLNYECGRCSQDPESLLLQHNLRKFCRDIQPFSQDPTQLAEMIFNLLLEEKRILIQAQRAQLEQGEPVLETPVESQQHEIESRILDLRAMMEKLVKSISQLKDQQDVFCFRYKIQAKGKTPSLDPHQTKEQKILQETLNELDKRRKEVLDASKALLGRLTTLIELLLPKLEEWKAQQQKACIRAPIDHGLEQLETWFTAGAKLLFHLRQLLKELKGLSCLVSYQDDPLTKGVDLRNAQVTELLQRLLHRAFVVETQPCMPQTPHRPLILKTGSKFTVRTRLLVRLQEGNESLTVEVSIDRNPPQLQGFRKFNILTSNQKTLTPEKGQSQGLIWDFGYLTLVEQRSGGSGKGSNKGPLGVTEELHIISFTVKYTYQGLKQELKNQQFFSNPPKAPWSLLGPALSWQFSSYVGRGLNSDQLSMLRNKLFGQNCRTEDPLLSWADFTKRESPPGKLPFWTWLDKILELVHDHLKDLWNDGRIMGFVSRSQERRLLKKTMSGTFLLRFSESSEGGITCSWVEHQDDDKVLIYSVQPYTKEVLQSLPLTEIIRHYQLLTEENIPENPLRFLYPRIPRDEAFGCYYQEKVNLQERRKYLKHRLIVVSNRQVDELQQPLELKPEPELESLELELGLVPEPELSLDLEPLLKAGLDLGPELESVLESTLEPVIEPTLCMVSQTVPEPDQGPVSQPVPEPDLPCDLRHLNTEPMEIFRNCVKIEEIMPNGDPLLAGQNTVDEVYVSRPSHFYTDGPLMPSDF

SEQ ID NO: 19771 - protein, 1186 aa, Homo sapiens
MGVQGLWKLLECSGRQVSPEALEGKILAVDISIWLNQALKGVRDRHGNSIENPHLLTLFHRLCKLLFFRIRPIFVFDGDAPLLKKQTLVKRRQRKDLASSDSRKTTEKLLKTFLKRQAIKTAFRSKRDEALPSLTQVRRENDLYVLPPLQEEEKHSSEEEDEKEWQERMNQKQALQEEFFHNPQAIDIESEDFSSLPPEVKHEILTDMKEFTKRRRTLFEAMPEESDDFSQYQLKGLLKKNYLNQHIEHVQKEMNQQHSGHIRRQYEDEGGFLKEVESRRVVSEDTSHYILIKGIQAKTVAEVDSESLPSSSKMHGMSFDVKSSPCEKLKTEKEPDATPPSPRTLLAMQAALLGSSSEEELESENRRQARGRNAPAAVDEGSISPRTLSAIKRALDDDEDVKVCAGDDVQTGGPGAEEMRINSSTENSDEGLKVRDGKGIPFTATLASSSVNSAEEHVASTNEGREPTDSVPKEQMSLVHVGTEAFPISDESMIKDRKDRLPLESAVVRHSDAPGLPNGRELTPASPTCTNSVSKNETHAEVLEQQNELCPYESKFDSSLLSSDDETKCKPNSASEVIGPVSLQETSSIVSVPSEAVDNVENVVSFNAKEHENFLETIQEQQTTESAGQDLISIPKAVEPMEIDSEESESDGSFIEVQSVISDEELQAEFPETSKPPSEQGEEELVGTREGEAPAESESLLRDNSERDDVDGEPQEAEKDAEDSLHEWQDINLEELETLESNLLAQQNSLKAQKQQQERIAATVTGQMFLESQELLRLFGIPYIQAPMEAEAQCAILDLTDQTSGTITDDSDIWLFGARHVYRNFFNKNKFVEYYQYVDFHNQLGLDRNKLINLAYLLGSDYTEGIPTVGCVTAMEILNEFPGHGLEPLLKFSEWWHEAQKNPKIRPNPHDTKVKKKLRTLQLTPGFPNPAVAEAYLKPVVDDSKGSFLWGKPDLDKIREFCQRYFGWNRTKTDESLFPVLKQLDAQQTQLRIDSFFRLAQQEKEDAKRIKSQRLNRAVTCMLRKEKEAAASEIEAVSVAMEKEFELLDKAKGKTQKRGITNTLEESSSLKRKRLSDSKGKNTCGGFLGETCLSESSDGSSSEDAESSSLMNVQRRTAAKEPKTSASDSQNSVKEAPVKNGGATTSSSSDSDDDGGKEKMVLVTARSVFGKKRRKLRRARGRKRKT

SEQ ID NO: 19772 - protein, 677 aa, Homo sapiens
MREFEVLKKLNHKNIVKLFAIEEETTTRHKVLIMEFCPCGSLYTVLEEPSNAYGLPESEFLIVLRDVVGGMNHLRENGIVHRDIKPGNIMRVIGEDGQSVYKLTDFGAARELEDDEQFVSLYGTEEYLHPDMYERAVLRKDHQKKYGATVDLWSIGVTFYHAATGSLPFRPFEGPRRNKEVMYKIITGKPSGAISGVQKAENGPIDWSGDMPVSCSLSRGLQVLLTPVLANILEADQEKCWGFDQFFAETSDILHRMVIHVFSLQQMTAHKIYIHSYNTATIFHELVYKQTKIISSNQELIYEGRRLVLEPGRLAQHFPKTTEENPIFVVSREPLNTIGLIYEKISLPKVHPRYDLDGDASMAKAITGVVCYACRIASTLLLYQELMRKGIRWLIELIKDDYNETVHKKTEVVITLDFCIRNIEKTVKVYEKLMKINLEAAELGEISDIHTKLLRLSSSQGTIETSLQDIDSRLSPGGSLADAWAHQEGTHPKDRNVEKLQVLLNCMTEIYYQFKKDKAERRLAYNEEQIHKFDKQKLYYHATKAMTHFTDECVKKYEAFLNKSEEWIRKMLHLRKQLLSLTNQCFDIEEEVSKYQEYTNELQETLPQKMFTASSGIKHTMTPIYPSSNTLVEMTLGMKKLKEEMEGVVKELAENNHILERFGSLTMDGGLRNVDCL

SEQ ID NO: 19773 - protein, 505 aa, Homo sapiens
MKLSPQPSCVNLGMMWTWALWMLPSLCKFSLAALPAKPENISCVYYYRKNLTCTWSPGKETSYTQYTVKRTYAFGEKHDNCTTNSSTSENRASCSFFLPRITIPDNYTIEVEAENGDGVIKSHMTYWRLENIAKTEPPKIFRVKPVLGIKRMIQIEWIKPELAPVSSDLKYTLRFRTVNSTSWMEVNFAKNRKDKNQTYNLTGLQPFTEYVIALRCAVKESKFWSDWSQEKMGMTEEEAPCGLELWRVLKPAEADGRRPVRLLWKKARGAPVLEKTLGYNIWYYPESNTNLTETMNTTNQQLELHLGGESFWVSMISYNSLGKSPVATLRIPAIQEKSFQCIEVMQACVAEDQLVVKWQSSALDVNTWMIEWFPDVDSEPTTLSWESVSQATNWTIQQDKLKPFWCYNISVYPMLHDKVGEPYSIQAYAKEGVPSEGPETKVENIGVKTVTITWKEIPKSERKGIICNYTIFYQAEAKTVNSSILQYGLESLKRKTSYIVQVMAS

SEQ ID NO: 19774 - protein, 1548 aa, Homo sapiens
MKGSEVSLEKKKKIKMPVKRLREVVSQNHGDHLVLLKDELPCVPPALSANKRLPVGTGTSLNGTSRGSSDLTSARNCYQPLLENPMVSESDFSKDVAVQVLPLDKIEENNKQKANDIFISQYTMGQKDALRTVLKQKAQSMPVFKEVKVHLLEDAGIEKDAVTQETRISPSGIDSATTVAAATAAAIATAAPLIKVQSDLEAKVNSVTELLSKLQETDKHLQRVTEQQTSIQRKQEKLHCHDHEKQMNVFMEQHIRHLEKLQQQQIDIQTHFISAALKTSSFQPVSMPSSRAVEKYSVKPEHPNLGSCNPSLYNTFASKQAPLKEVEDTSFDKQKSPLETPAPRRFAPVPVSRDDELSKRENLLEEKENMEVSCHRGNVRLLEQILNNNDSLTRKSESSNTTSLTRSKIGWTPEKTNRFPSCEELETTKVTMQKSDDVLHDLGQKEKETNSMVQPKESLSMLKLPDLPQNSVKLQTTNTTRSVLKDAEKILRGVQNNKKVLEENLEAIIRAKDGAAMYSLINALSTNREMSEKIRIRKTVDEWIKTISAEIQDELSRTDYEQKRFDQKNQRTKKGQNMTKDIRTNTQDKTVNKSVIPRKHSQKQIEEHFRNLPMRGMPASSLQKERKEGLLKATTVIQDEDYMLQVYGKPVYQGHRSTLKKGPYLRFNSPSPKSRPQRPKVIERVKGTKVKSIRTQTDFYATKPKKMDSKMKHSVPVLPHGDQQYLFSPSREMPTFSGTLEGHLIPMAILLGQTQSNSDTMPPAGVIVSKPHPVTVTTSIPPSSRKVETGVKKPNIAIVEMKSEKKDPPQLTVQVLPSVDIDSISNSSADVLSPLSSPKEASLPPVQTWIKTPEIMKVDEEEVKFPGTNFDEIIDVIQEEEKCDEIPDSEPILEFNRSVKADSTKYNGPPFPPVASTFQPTADILDKVIERKETLENSLIQWVEQEIMSRIISGLFPVQQQIAPSISVSVSETSEPLTSDIVEGTSSGALQLFVDAGVPVNSNVIKHFVNEALAETIAVMLGDREAKKQGPVATGVSGDASTNETYLPARVCTPLPTPQPTPPCSPSSPAKECVLVKTPDSSPCDSDHDMAFPVKEICAEKGDDMPAIMLVNTPTVTPTTTPPPAAAVFTPTLSDISIDKLKVSSPELPKPWGDGDLPLEEENPNSPQEELHPRAIVMSVAKDEEPESMDFPAQPPPPEPVPFMPFPAGTKAPSPSQMPGSDSSTLESTLSVTVTETETLDKPISEGEILFSCGQKLAPKILEDIGLYLTNLNDSLSSTLHDAVEMEDDPPSEGQVIRMSHKKFHADAILSFAKQNQESAVSQQAVYHSEDLENSVGELSEGQRPQLTAAAENILMGHSLYMQPPVTNTQSLDQQCDPKPLSRQFDTVSGSIYEDSCASHGPMSLGELELEPNSKLVLPTTLLTAQENDVNLPVAAEDFSQYQLKQNQDVKQVEHKPSQSYLRVRNKSDIAPSQQQVSPGDMDRTQIELNPYLTCVFSGGKAVPLSASQMPPAKMSVMLPSVNLEDCSQSLSLSTMQEDMESSGADTF

SEQ ID NO: 19775 - protein, 127 aa, Homo sapiens
MAGGKAGKDSGKAKTKAVSRSQRAGLQFPVGRIHRHLKSRTTSHGRVGATAAVYSAAILEYLTAEVLELAGNASKDLKVKRITPRHLQLAIRGDEELDSLIKATIAGGVIPHIHKSLIGKKGQQKTV

SEQ ID NO: 19776 - protein, 503 aa, Homo sapiens
MALIPDLAMETWLLLAVSLVLLYLYGTHSHGLFKKLGIPGPTPLPFLGNILSYHKGFCMFDMECHKKYGKVWGFYDGQQPVLAITDPDMIKTVLVKECYSVFTNRRPFGPVGFMKSAISIAEDEEWKRLRSLLSPTFTSGKLKEMVPIIAQYGDVLVRNLRREAETGKPVTLKDVFGAYSMDVITSTSFGVNIDSLNNPQDPFVENTKKLLRFDFLDPFFLSITVFPFLIPILEVLNICVFPREVTNFLRKSVKRMKESRLEDTQKHRVDFLQLMIDSQNSKETESHKALSDLELVAQSIIFIFAGYETTSSVLSFIMYELATHPDVQQKLQEEIDAVLPNKAPPTYDTVLQMEYLDMVVNETLRLFPIAMRLERVCKKDVEINGMFIPKGVVVMIPSYALHRDPKYWTEPEKFLPERFSKKNKDNIDPYIYTPFGSGPRNCIGMRFALMNMKLALIRVLQNFSFKPCKETQIPLKLSLGGLLQPEKPVVLKVESRDGTVSGA

SEQ ID NO: 19777 - protein, 115 aa, Homo sapiens
MAWQGLVLAACLLMFPSTTADCLSRCSLCAVKTQDGPKPINPLICSLQCQAALLPSEEWERCQSFLSFFTPSTLGLNDKEDLGSKSVGEGPYSELAKLSGSFLKELEKSKFLPSI

SEQ ID NO: 19778 - protein, 1908 aa, Homo sapiens
MRILKRFLACIQLLCVCRLDWANGYYRQQRKLVEEIGWSYTGALNQKNWGKKYPTCNSPKQSPINIDEDLTQVNVNLKKLKFQGWDKTSLENTFIHNTGKTVEINLTNDYRVSGGVSEMVFKASKITFHWGKCNMSSDGSEHSLEGQKFPLEMQIYCFDADRFSSFEEAVKGKGKLRALSILFEVGTEENLDFKAIIDGVESVSRFGKQAALDPFILLNLLPNSTDKYYIYNGSLTSPPCTDTVDWIVFKDTVSISESQLAVFCEVLTMQQSGYVMLMDYLQNNFREQQYKFSRQVFSSYTGKEEIHEAVCSSEPENVQADPENYTSLLVTWERPRVVYDTMIEKFAVLYQQLDGEDQTKHEFLTDGYQDLGAILNNLLPNMSYVLQIVAICTNGLYGKYSDQLIVDMPTDNPELDLFPELIGTEEIIKEEEEGKDIEEGAIVNPGRDSATNQIRKKEPQISTTTHYNRIGTKYNEAKTNRSPTRGSEFSGKGDVPNTSLNSTSQPVTKLATEKDISLTSQTVTELPPHTVEGTSASLNDGSKTVLRSPHMNLSGTAESLNTVSITEYEEESLLTSFKLDTGAEDSSGSSPATSAIPFISENISQGYIFSSENPETITYDVLIPESARNASEDSTSSGSEESLKDPSMEGNVWFPSSTDITAQPDVGSGRESFLQTNYTEIRVDESEKTTKSFSAGPVMSQGPSVTDLEMPHYSTFAYFPTEVTPHAFTPSSRQQDLVSTVNVVYSQTTQPVYNAVPSDPILVETPKVDKISSTMLHLIVSNSASSENMLHSTSVPVFDVSPTSHMHSASLQGLTISYASEKYEPVLLKSESSHQVVPSLYSNDELFQTANLEINQAHPPKGRHVFATPVLSIDEPLNTLINKLIHSDEILTSTKSSVTGKVFAGIPTVASDTFVSTDHSVPIGNGHVAITAVSPHRDGSVTSTKLLFPSKATSELSHSAKSDAGLVGGGEDGDTDDDGDDDDDDRGSDGLSIHKCMSCSSYRESQEKVMNDSDTHENSLMDQNNPISYSLSENSEEDNRVTSVSSDSQTGMDRSPGKSPSANGLSQKHNDGKEENDIQTGSALLPLSPESKAWAVLTSDEESGSGQGTSDSLNENETSTDFSFADTNEKDADGILAAGDSEITPGFPQSPTSSVTSENSEVFHVSEAEASNSSHESRIGLAEGLESEKKAVIPLVIVSALTFICLVVLVGILIYWRKCFQTAHFYLEDSTSPRVISTPPTPIFPISDDVGAIPIKHFPKHVADLHASSGFTEEFETLKEFYQEVQSCTVDLGITADSSNHPDNKHKNRYINIVAYDHSRVKLAQLAEKDGKLTDYINANYVDGYNRPKAYIAAQGPLKSTAEDFWRMIWEHNVEVIVMITNLVEKGRRKCDQYWPADGSEEYGNFLVTQKSVQVLAYYTVRNFTLRNTKIKKGSQKGRPSGRVVTQYHYTQWPDMGVPEYSLPVLTFVRKAAYAKRHAVGPVVVHCSAGVGRTGTYIVLDSMLQQIQHEGTVNIFGFLKHIRSQRNYLVQTEEQYVFIHDTLVEAILSKETEVLDSHIHAYVNALLIPGPAGKTKLEKQFQGLTLSPRLECRGTISAHCNLPLPGLTDPPTSASRVARTILLSQSNIQQSDYSAALKQCNREKNRTSSIIPVERSRVGISSLSGEGTDYINASYIMGYYQSNEFIITQHPLLHTIKDFWRMIWDHNAQLVVMIPDGQNMAEDEFVYWPNKDEPINCESFKVTLMAEEHKCLSNEEKLIIQDFILEATQDDYVLEVRHFQCPKWPNPDSPISKTFELISVIKEEAANRDGPMIVHDEHGGVTAGTFCALTTLMHQLEKENSVDVYQVAKMINLMRPGVFADIEQYQFLYKVILSLVSTRQEENPSTSLDSNGAALPDGNIAESLESLV

SEQ ID NO: 19779 - protein, 229 aa, Homo sapiens
MELVRRLMPLTLLILSCLAELTMAEAEGNASCTVSLGGANMAETHKAMILQLNPSENCTWTIERPENKSIRIIFSYVQLDPDGSCESENIKVFDGTSSNGPLLGQVCSKNDYVPVFESSSSTLTFQIVTDSARIQRTVFVFYYFFSPNISIPNCGGYLDTLEGSFTSPNYPKPHPELAYCVWHIQVEKDYKIKLNFKEILLCQFLPGIFCFLHLNLCRKHQHYIFNLLF

SEQ ID NO: 19780 - protein, 598 aa, Homo sapiens
MDDYSLDEFRRRWQEELAQAQAPKKRRRPEAAERRARRPEVGSGRGEQASGDPALAQRLLEGAGRPPAARATRAEGQDVASRSRSPLAREGAGGGEQLVDQLIRDLNEMNDVPFFDIQLPYELAINIFQYLDRKELGRCAQVSKTWKVIAEDEVLWYRLCQQEGHLPDSSISDYSCWKLIFQECRAKEHMLRTNWKNRKGAVSELEHVPDTVLCDVHSHDGVVIAGYTSGDVRVWDTRTWDYVAPFLESEDEEDEPGMQPNVSFVRINSSLAVAAYEDGFLNIWDLRTGKYPVHRFEHDARIQALALSQDDATVATASAFDVVMLSPNEEGYWQIAAEFEVPKLVQYLEIVPETRRYPVAVAAAGDLMYLLKAEDSARTLLYAHGPPVTCLDVSANQVAFGVQGLGWVYEGSKILVYSLEAGRRLLKLGNVLRDFTCVNLSDSPPNLMVSGNMDGRVRIHDLRSGNIALSLSAHQLRVSAVQMDDWKIVSGGEEGLVSVWDYRMNQKLWEVYSGHPVQHISFSSHSLITANVPYQTVMRNADLDSFTTHRRHRGLIRAYEFAVDQLAFQSPLPVCRSSCDAMATHYYDLALAFPYNHV

SEQ ID NO: 19781 - protein, 68 aa, Homo sapiens
MAWQGLVLAACLLMFPSTTADCLSRCSLCAVKTQDGPKPINPLICSLQCQAALLPSEEWERCQSFLSF

SEQ ID NO: 19782 - protein, 84 aa, Homo sapiens
MPLAKDLLHPSPEEEKRKHKKKRLVQSPNSYFMDVKCPGCYKITTVFSHAQTVVLCVGCSTVLCQPTGGKARLTEGCSFRRKQH

SEQ ID NO: 19783 - protein, 94 aa, Homo sapiens
MKILLFFCILLFFGVLIPPARSEGHHITFSRWKSCTAIGGRCKNQCDDSEFRISYCARPTTHCCVTECDPTDPNNWIPKDSVGTQEWYPKDSRH

SEQ ID NO: 19784 - protein, 1494 aa, Homo sapiens
MRILKRFLACIQLLCVCRLDWANGYYRQQRKLVEEIGWSYTGALNQKNWGKKYPTCNSPKQSPINIDEDLTQVNVNLKKLKFQGWDKTSLENTFIHNTGKTVEINLTNDYRVSGGVSEMVFKASKITFHWGKCNMSSDGSEHSLEGQKFPLEMQIYCFDADRFSSFEEAVKGKGKLRALSILFEVGTEENLDFKAIIDGVESVSRFGKQAALDPFILLNLLPNSTDKYYIYNGSLTSPPCTDTVDWIVFKDTVSISESQLAVFCEVLTMQQSGYVMLMDYLQNNFREQQYKFSRQVFSSYTGKEEIHEAVCSSEPENVQADPENYTSLLVTWERPRVVYDTMIEKFAVLYQQLDGEDQTKHEFLTDGYQDLGAILNNLLPNMSYVLQIVAICTNGLYGKYSDQLIVDMPTDNPELDLFPELIGTEEIIKEEEEGKDIEEGAIVNPGRDSATNQIRKKEPQISTTTHYNRIGTKYNEAKTNRSPTRGSEFSGKGDVPNTSLNSTSQPVTKLATEKDISLTSQTVTELPPHTVEGTSASLNDGSKTVLRSPHMNLSGTAESLNTVSITEYEEESLLTSFKLDTGAEDSSGSSPATSAIPFISENISQGYIFSSENPETITYDVLIPESARNASEDSTSSGSEESLKDPSMEGNVWFPSSTDITAQPDVGSGRESFLQTNYTEIRVDESEKTTKSFSAGPVMSQGPSVTDLEMPHYSTFAYFPTEVTPHAFTPSSRQQDLVSTVNVVYSQTTQPVYNEASNSSHESRIGLAEGLESEKKAVIPLVIVSALTFICLVVLVGILIYWRKCFQTAHFYLEDSTSPRVISTPPTPIFPISDDVGAIPIKHFPKHVADLHASSGFTEEFETLKEFYQEVQSCTVDLGITADSSNHPDNKHKNRYINIVAYDHSRVKLAQLAEKDGKLTDYINANYVDGYNRPKAYIAAQGPLKSTAEDFWRMIWEHNVEVIVMITNLVEKGRRKCDQYWPADGSEEYGNFLVTQKSVQVLAYYTVRNFTLRNTKIKKGSQKGRPSGRVVTQYHYTQWPDMGVPEYSLPVLTFVRKAAYAKRHAVGPVVVHCSAGVGRTGTYIVLDSMLQQIQHEGTVNIFGFLKHIRSQRNYLVQTEEQYVFIHDTLVEAILSKETEVLDSHIHAYVNALLIPGPAGKTKLEKQFQGLTLSPRLECRGTISAHCNLPLPGLTDPPTSASRVARTILLSQSNIQQSDYSAALKQCNREKNRTSSIIPVERSRVGISSLSGEGTDYINASYIMGYYQSNEFIITQHPLLHTIKDFWRMIWDHNAQLVVMIPDGQNMAEDEFVYWPNKDEPINCESFKVTLMAEEHKCLSNEEKLIIQDFILEATQDDYVLEVRHFQCPKWPNPDSPISKTFELISVIKEEAANRDGPMIVHDEHGGVTAGTFCALTTLMHQLEKENSVDVYQVAKMINLMRPGVFADIEQYQFLYKVILSLVSTRQEENPSTSLDSNGAALPDGNIAESLESLV

SEQ ID NO: 19785 - protein, 426 aa, Homo sapiens
MAEMATATRLLGWRVASWRLRPPLAGFVSQRAHSLLPVDDAINGLSEEQRQLRQTMAKFLQEHLAPKAQEIDRSNEFKNLREFWKQLGNLGVLGITAPVQYGGSGLGYLEHVLVMEEISRASGAVGLSYGAHSNLCINQLVRNGNEAQKEKYLPKLISGEYIGALAMSEPNAGSDVVSMKLKAEKKGNHYILNGNKFWITNGPDADVLIVYAKTDLAAVPASRGITAFIVEKGMPGFSTSKKLDKLGMRGSNTCELIFEDCKIPAANILGHENKGVYVLMSGLDLERLVLAGGPLGLMQAVLDHTIPYLHVREAFGQKIGHFQLMQGKMADMYTRLMACRQYVYNVAKACDEGHCTAKDCAGVILYSAECATQVALDGIQCFGGNGYINDFPMGRFLRDAKLYEIGAGTSEVRRLVIGRAFNADFH

SEQ ID NO: 19786 - protein, 152 aa, Homo sapiens
MKEYVLLLFLALCSAKPFFSPSHIALKNMMLKDMEDTDDDDDDDDDDDDDDEDNSLFPTREPRSHFFPFDLFPMCPFGCQCYSRVVHCSDLGLTSVPTNIPFDTRMLDLQNNKIKEIKENDFKGLTSLYIIIKFQQWNLRILNDTKNYKGWA

SEQ ID NO: 19787 - protein, 710 aa, Homo sapiens
MLSLQYPDVYRDETAVQDYHGHKICDPYAWLEDPDSEQTKAFVEAQNKITVPFLEQCPIRGLYKERMTELYDYPKYSCHFKKGKRYFYFYNTGLQNQRVLYVQDSLEGEARVFLDPNILSDDGTVALRGYAFSEDGEYFAYGLSASGSDWVTIKFMKVDGAKELPDVLERVKFSCMAWTHDGKGMFYNSYPQQDGKSDGTETSTNLHQKLYYHVLGTDQSEDILCAEFPDEPKWMGGAELSDDGRYVLLSIREGCDPVNRLWYCDLQQESSGIAGILKWVKLIDNFEGEYDYVTNEGTVFTFKTNRQSPNYRVINIDFRDPEESKWKVLVPEHEKDVLEWIACVRSNFLVLCYLHDVKNILQLHDLTTGALLKTFPLDVGSIVGYSGQKKDTEIFYQFTSFLSPGIIYHCDLTKEELEPRVFREVTVKGIDASDYQTVQIFYPSKDGTKIPMFIVHKKGIKLDGSHPAFLYGYGGFNISITPNYSVSRLIFVRHMGGILAVANIRGGGEYGETWHKGGILANKQNCFDDFQCAAEYLIKEGYTSPKRLTINGGSNGGLLVAACANQRPDLFGCVIAQVGVMDMLKFHKYTIGHAWTTDYGCSDSKQHFEWLVKYSPLHNVKLPEADDIQYPSMLLLTADHDDRVVPLHSLKFIATLQYIVGRSRKQSNPLLIHVDTKAGHGAGKPTAKVIEEVSDMFAFIARCLNVDWIP

SEQ ID NO: 19788 - protein, 138 aa, Homo sapiens
MAWQGLVLAACLLMFPSTTADCLSRCSLCAVKTQDGPKPINPLICSLQCQAALLPSEEWERCQSFLSFFTPSTLGLNDKEDLGSKSVGEGPYSELAKLSGSFLKELEKSKFLPSISTKENTLSKSLEEKLRGLSDGFR

SEQ ID NO: 19789 - protein, 188 aa, Homo sapiens
MGTPLDGGSRVPIGCPAKLRRVTRKKVAPDLEGWLSLAKARYAMGAKSVGPLQYASHMEPQVCLHASEAQEGLQKFKVVRAGVHAPEEVGPREAGLRRRKGPTKTPEPESSEAPQDPLNWFGILVPHSLRQAQASFRDGVLEAKKRKCFLERVIQCVVSPAAEQEAEDESCPEDWAAAVPAETSAKAI

SEQ ID NO: 19790 - protein, 645 aa, Homo sapiens
MRPRKAFLLLLLLGLVQLLAVAGAEGPDEDSSNRENAIEDEEEEEEEDDDEEEDDLEVKEENGVLVLNDANFDNFVADKDTVLLEFYAPWCGHCKQFAPEYEKIANILKDKDPPIPVAKIDATSASVLASRFDVSGYPTIKILKKGQAVDYEGSRTQEEIVAKVREVSQPDWTPPPEVTLVLTKENFDEVVNDADIILVEFYAPWCGHCKKLAPEYEKAAKELSKRSPPIPLAKVDATAETDLAKRFDVSGYPTLKIFRKGRPYDYNGPREKYGIVDYMIEQSGPPSKEILTLKQVQEFLKDGDDVIIIGVFKGESDPAYQQYQDAANNLREDYKFHHTFSTEIAKFLKVSQGQLVVMQPEKFQSKYEPRSHMMDVQGSTQDSAIKDFVLKYALPLVGHRKVSNDAKRYTRRPLVVVYYSVDFSFDYRAATQFWRSKVLEVAKDFPEYTFAIADEEDYAGEVKDLGLSESGEDVNAAILDESGKKFAMEPEEFDSDTLREFVTAFKKGKLKPVIKSQPVPKNNKGPVKVVVGKTFDSIVMDPKKDVLIEFYAPWCGHCKQLEPVYNSLAKKYKGQKGLVIAKMDATANDVPSDRYKVEGFPTIYFAPSGDKKNPVKFEGGDRDLEHLSKFIEEHATKLSRTKEEL

SEQ ID NO: 19791 - protein, 2308 aa, Homo sapiens
MRILKRFLACIQLLCVCRLDWANGYYRQQRKLVEEIGWSYTGALNQKNWGKKYPTCNSPKQSPINIDEDLTQVNVNLKKLKFQGWDKTSLENTFIHNTGKTVEINLTNDYRVSGGVSEMVFKASKITFHWGKCNMSSDGSEHSLEGQKFPLEMQIYCFDADRFSSFEEAVKGKGKLRALSILFEVGTEENLDFKAIIDGVESVSRFGKQAALDPFILLNLLPNSTDKYYIYNGSLTSPPCTDTVDWIVFKDTVSISESQLAVFCEVLTMQQSGYVMLMDYLQNNFREQQYKFSRQVFSSYTGKEEIHEAVCSSEPENVQADPENYTSLLVTWERPRVVYDTMIEKFAVLYQQLDGEDQTKHEFLTDGYQDLGAILNNLLPNMSYVLQIVAICTNGLYGKYSDQLIVDMPTDNPELDLFPELIGTEEIIKEEEEGKDIEEGAIVNPGRDSATNQIRKKEPQISTTTHYNRIGTKYNEAKTNRSPTRGSEFSGKGDVPNTSLNSTSQPVTKLATEKDISLTSQTVTELPPHTVEGTSASLNDGSKTVLRSPHMNLSGTAESLNTVSITEYEEESLLTSFKLDTGAEDSSGSSPATSAIPFISENISQGYIFSSENPETITYDVLIPESARNASEDSTSSGSEESLKDPSMEGNVWFPSSTDITAQPDVGSGRESFLQTNYTEIRVDESEKTTKSFSAGPVMSQGPSVTDLEMPHYSTFAYFPTEVTPHAFTPSSRQQDLVSTVNVVYSQTTQPVYNGETPLQPSYSSEVFPLVTPLLLDNQILNTTPAASSSDSALHATPVFPSVDVSFESILSSYDGAPLLPFSSASFSSELFRHLHTVSQILPQVTSATESDKVPLHASLPVAGGDLLLEPSLAQYSDVLSTTHAASETLEFGSESGVLYKTLMFSQVEPPSSDAMMHARSSGPEPSYALSDNEGSQHIFTVSYSSAIPVHDSVGVTYQGSLFSGPSHIPIPKSSLITPTASLLQPTHALSGDGEWSGASSDSEFLLPDTDGLTALNISSPVSVAEFTYTTSVFGDDNKALSKSEIIYGNETELQIPSFNEMVYPSESTVMPNMYDNVNKLNASLQETSVSISSTKGMFPGSLAHTTTKVFDHEISQVPENNFSVQPTHTVSQASGDTSLKPVLSANSEPASSDPASSEMLSPSTQLLFYETSASFSTEVLLQPSFQASDVDTLLKTVLPAVPSDPILVETPKVDKISSTMLHLIVSNSASSENMLHSTSVPVFDVSPTSHMHSASLQGLTISYASEKYEPVLLKSESSHQVVPSLYSNDELFQTANLEINQAHPPKGRHVFATPVLSIDEPLNTLINKLIHSDEILTSTKSSVTGKVFAGIPTVASDTFVSTDHSVPIGNGHVAITAVSPHRDGSVTSTKLLFPSKATSELSHSAKSDAGLVGGGEDGDTDDDGDDDDDDRGSDGLSIHKCMSCSSYRESQEKVMNDSDTHENSLMDQNNPISYSLSENSEEDNRVTSVSSDSQTGMDRSPGKSPSANGLSQKHNDGKEENDIQTGSALLPLSPESKAWAVLTSDEESGSGQGTSDSLNENETSTDFSFADTNEKDADGILAAGDSEITPGFPQSPTSSVTSENSEVFHVSEAEASNSSHESRIGLAEGLESEKKAVIPLVIVSALTFICLVVLVGILIYWRKCFQTAHFYLEDSTSPRVISTPPTPIFPISDDVGAIPIKHFPKHVADLHASSGFTEEFEEVQSCTVDLGITADSSNHPDNKHKNRYINIVAYDHSRVKLAQLAEKDGKLTDYINANYVDGYNRPKAYIAAQGPLKSTAEDFWRMIWEHNVEVIVMITNLVEKGRRKCDQYWPADGSEEYGNFLVTQKSVQVLAYYTVRNFTLRNTKIKKGSQKGRPSGRVVTQYHYTQWPDMGVPEYSLPVLTFVRKAAYAKRHAVGPVVVHCSAGVGRTGTYIVLDSMLQQIQHEGTVNIFGFLKHIRSQRNYLVQTEEQYVFIHDTLVEAILSKETEVLDSHIHAYVNALLIPGPAGKTKLEKQFQLLSQSNIQQSDYSAALKQCNREKNRTSSIIPVERSRVGISSLSGEGTDYINASYIMGYYQSNEFIITQHPLLHTIKDFWRMIWDHNAQLVVMIPDGQNMAEDEFVYWPNKDEPINCESFKVTLMAEEHKCLSNEEKLIIQDFILEATQDDYVLEVRHFQCPKWPNPDSPISKTFELISVIKEEAANRDGPMIVHDEHGGVTAGTFCALTTLMHQLEKENSVDVYQVAKMINLMRPGVFADIEQYQFLYKVILSLVSTRQEENPSTSLDSNGAALPDGNIAESLESLV

SEQ ID NO: 19792 - protein, 154 aa, Homo sapiens
MKVSAAALAVILIATALCAPASASPYSSDTTPCCFAYIARPLPRAHIKEYFYTSGKCSNPAVVHRSRMPKREGQQVWQDFLYDSRLNKGKLCHPKEPPSVCQPREEMGSGVHQLFGDELGWRVLEPELTQICLFLLALVLAWEASPHYPTPPAP

SEQ ID NO: 19793 - protein, 1487 aa, Homo sapiens
MRILKRFLACIQLLCVCRLDWANGYYRQQRKLVEEIGWSYTGALNQKNWGKKYPTCNSPKQSPINIDEDLTQVNVNLKKLKFQGWDKTSLENTFIHNTGKTVEINLTNDYRVSGGVSEMVFKASKITFHWGKCNMSSDGSEHSLEGQKFPLEMQIYCFDADRFSSFEEAVKGKGKLRALSILFEVGTEENLDFKAIIDGVESVSRFGKQAALDPFILLNLLPNSTDKYYIYNGSLTSPPCTDTVDWIVFKDTVSISESQLAVFCEVLTMQQSGYVMLMDYLQNNFREQQYKFSRQVFSSYTGKEEIHEAVCSSEPENVQADPENYTSLLVTWERPRVVYDTMIEKFAVLYQQLDGEDQTKHEFLTDGYQDLGAILNNLLPNMSYVLQIVAICTNGLYGKYSDQLIVDMPTDNPELDLFPELIGTEEIIKEEEEGKDIEEGAIVNPGRDSATNQIRKKEPQISTTTHYNRIGTKYNEAKTNRSPTRGSEFSGKGDVPNTSLNSTSQPVTKLATEKDISLTSQTVTELPPHTVEGTSASLNDGSKTVLRSPHMNLSGTAESLNTVSITEYEEESLLTSFKLDTGAEDSSGSSPATSAIPFISENISQGYIFSSENPETITYDVLIPESARNASEDSTSSGSEESLKDPSMEGNVWFPSSTDITAQPDVGSGRESFLQTNYTEIRVDESEKTTKSFSAGPVMSQGPSVTDLEMPHYSTFAYFPTEVTPHAFTPSSRQQDLVSTVNVVYSQTTQPVYNEASNSSHESRIGLAEGLESEKKAVIPLVIVSALTFICLVVLVGILIYWRKCFQTAHFYLEDSTSPRVISTPPTPIFPISDDVGAIPIKHFPKHVADLHASSGFTEEFEEVQSCTVDLGITADSSNHPDNKHKNRYINIVAYDHSRVKLAQLAEKDGKLTDYINANYVDGYNRPKAYIAAQGPLKSTAEDFWRMIWEHNVEVIVMITNLVEKGRRKCDQYWPADGSEEYGNFLVTQKSVQVLAYYTVRNFTLRNTKIKKGSQKGRPSGRVVTQYHYTQWPDMGVPEYSLPVLTFVRKAAYAKRHAVGPVVVHCSAGVGRTGTYIVLDSMLQQIQHEGTVNIFGFLKHIRSQRNYLVQTEEQYVFIHDTLVEAILSKETEVLDSHIHAYVNALLIPGPAGKTKLEKQFQGLTLSPRLECRGTISAHCNLPLPGLTDPPTSASRVARTILLSQSNIQQSDYSAALKQCNREKNRTSSIIPVERSRVGISSLSGEGTDYINASYIMGYYQSNEFIITQHPLLHTIKDFWRMIWDHNAQLVVMIPDGQNMAEDEFVYWPNKDEPINCESFKVTLMAEEHKCLSNEEKLIIQDFILEATQDDYVLEVRHFQCPKWPNPDSPISKTFELISVIKEEAANRDGPMIVHDEHGGVTAGTFCALTTLMHQLEKENSVDVYQVAKMINLMRPGVFADIEQYQFLYKVILSLVSTRQEENPSTSLDSNGAALPDGNIAESLESLV

SEQ ID NO: 19794 - protein, 162 aa, Homo sapiens
MASMQTTGRRVEVWFPKRLQKELLALQNDPPPGMTLNEKSVQNSITQWIVDMEGAPGTLYEGEKFQLLFKFSSRYPFDSPQVMFTGENIPVHPHVYSNGHICLSILTEDWSPALSVQSVCLSIISMLSSCKEKRRPPDNSFYVRTCNKNPKKTKWWYHDDTC

SEQ ID NO: 19795 - protein, 167 aa, Homo sapiens
MNIKGSPWKGSLLLLLVSNLLLCQSVAPLPICPGGAARCQVTLRDLFDRAVVLSHYIHNLSSEMFSEFDKRYTHGRGFITKAINSCHTSSLATPEDKEQAQQMNVHPETKENEIYPVWSGLPSLQMADEESRLSAYYNLLHCLRRDSHKIDNYLKLLKCRIIHNNNC

SEQ ID NO: 19796 - protein, 325 aa, Homo sapiens
MSLLRSLRVFLVARTGSYPAGSLLRQSPQPRHTFYAGPRLSASASSKELLMKLRRKTGYSFVNCKKALETCGGDLKQAEIWLHKEAQKEGWSKAAKLQGRKTKEGLIGLLQEGNTTVLVEVNCETDFVSRNLKFQLLVQQVALGTMMHCQTLKDQPSAYSKGFLNSSELSGLPAGPDREGSLKDQLALAIGKLGENMILKRAAWVKVPSGFYVGSYVHGAMQSPSLHKLVLGKYGALVICETSEQKTNLEDVGRRLGQHVVGMAPLSVGSLDDEPGGEAETKMLSQPYLLDPSITLGQYVQPQGVSVVDFVRFECGEGEEAAETE

SEQ ID NO: 19797 - protein, 149 aa, Homo sapiens
MAWQGLVLAACLLMFPSTTADCLSRCSLCAVKTQDGPKPINPLICSLQCQAALLPSEEWERCQSFLSFFTPSTLGLNDKEDLGSKSVGEGPYSELAKLSGSFLKELEKSKFLPSISTKENTLSKSLEEKLRGLSDGFREGAESELMRDA

SEQ ID NO: 19798 - protein, 274 aa, Homo sapiens
MPALRPALLWALLALWLCCAAPAHALQCRDGYEPCVNEGMCVTYHNGTGYCKCPEGFLGEYCQHRDPCEKNRCQNGGTCVAQAMLGKATCRCASGFTGEDCQYSTSHPCFVSRPCLNGGTCHMLSRDTYECTCQVGFTGKECQWTDACLSHPCANGSTCTTVANQFSCKCLTGFTGQKCETDVNECDIPGHCQHGGTCLNLPGSYQCQCPQGFTGQYCDSLYVPCAPSPCVNGGTCRQTGDFTFECNCLPETVRNKRNRALGKGQASLEWKRTR

SEQ ID NO: 19799 - protein, 822 aa, Homo sapiens
MATPRGRTKKKASFDHSPDSLPLRSSGRQAKKKATETTDEDEDGGSEKKYRKCEKAGCTATCPVCFASASERCAKNGYTSRWYHLSCGEHFCNECFDHYYRSHKDGYDKYTTWKKIWTSNGKTEPSPKAFMADQQLPYWVQCTKPECRKWRQLTKEIQLTPQIAKTYRCGMKPNTAIKPETSDHCSLPEDLRVLEVSNHWWYSMLILPPLLKDSVAAPLLSAYYPDCVGMSPSCTSTNRAAATGNASPGKLEHSKAALSVHVPGMNRYFQPFYQPNECGKALCVRPDVMELDELYEFPEYSRDPTMYLALRNLILALWYTNCKEALTPQKCIPHIIVRGLVRIRCVQEVERILYFMTRKGLINTGVLSVGADQYLLPKDYHNKSVIIIGAGPAGLAAARQLHNFGIKVTVLEAKDRIGGRVWDDKSFKGVTVGRGAQIVNGCINNPVALMCEQLGISMHKFGERCDLIQEGGRITDPTIDKRMDFHFNALLDVVSEWRKDKTQLQDVPLGEKIEEIYKAFIKESGIQFSELEGQVLQFHLSNLEYACGSNLHQVSARSWDHNEFFAQFAGDHTLLTPGYSVIIEKLAEGLDIQLKSPVQCIDYSGDEVQVTTTDGTGYSAQKVLVTVPLALLQKGAIQFNPPLSEKKMKAINSLGAGIIEKIALQFPYRFWDSKVQGADFFGHVPPSASKRGLFAVFYDMDPQKKHSVLMSVIAGEAVASVRTLDDKQVLQQCMATLRELFKEQEVPDPTKYFVTRWSTDPWIQMAYSFVKTGGSGEAYDIIAEDIQGTVFFAGEATNRHFPQTVTGAYLSGVREASKIAAF

SEQ ID NO: 19800 - protein, 356 aa, Homo sapiens
MSGVRGLSRLLSARRLALAKAWPTVLQTGTRGFHFTVDGNKRASAKVSDSISAQYPVVDHEFDAVVVGAGGAGLRAAFGLSEAGFNTACVTKLFPTRSHTVAAQGGINAALGNMEEDNWRWHFYDTVKGSDWLGDQDAIHYMTEQAPAAVVELENYGMPFSRTEDGKIYQRAFGGQSLKFGKGGQAHRCCCVADRTGHSLLHTLYGRSLRYDTSYFVEYFALDLLMENGECRGVIALCIEDGSIHRIRAKNTVVATGGYGRTYFSCTSAHTSTGDGTAMITRAGLPCQDLEFVQFHPTGIYGAGCLITEGCRGEGGILINSQGERFMERYAPVAKDLASRDVVSRSMTLEIREGRS

SEQ ID NO: 19801 - protein, 353 aa, Homo sapiens
MRLRFWLLIWLLLGFISHQPTPVSFLKTIFWSRNGHDGSMDVQQRAWRSNRSRQKGLRSICMHTKKRVSSFRGNKIGLKDVITLRRHVETKVRAKIRKRKVTTKINRHDKINGKRKTARKQKMFQRAQELRRRAEDYHKCKIPPSARKPLCNWVRMAAAEHCHSSGLPYWLYLTAETLKNRMGRQPPPPTQQHSITDNSLSLKTPPECLLTPLPPSVDDNIKECPLAPLPPSPLPPSVDDNLKECLFVPLPPSPLPPSVDDNLKECLFVPLPPSPLPPSVDDNLKTPPLATQEAEVEKPPKPKRWRVDEVEQSPKPKRQREAEAQQLPKPKRRRLSKLRTRHCTQAWAIRINP

SEQ ID NO: 19802 - protein, 1550 aa, Homo sapiens
MDPSAPQPRAETSGKDIWHPGERCLAPSPDNGKLCEASIKSITVDENGKSFAVVLYADFQERKIPLKQLQEVKFVKDCPRNLIFDDEDLEKPYFPNRKFPSSSVAFKLSDNGDSIPYTINRYLRDYQREGTRFLYGHYIHGGGCILGDDMGLGKTVQVISFLAAVLHKKGTREDIENNMPEFLLRSMKKEPLSSTAKKMFLIVAPLSVLYNWKDELDTWGYFRVTVLHGNRKDNELIRVKQRKCEIALTTYETLRLCLDELNSLEWSAVIVDEAHRIKNPKARVTEVMKALKCNVRIGLTGTILQNNMKELWCVMDWAVPGLLGSGTYFKKQFSDPVEHGQRHTATKRELATGRKAMQRLAKKMSGWFLRRTKTLIKDQLPKKEDRMVYCSLTDFQKAVYQTVLETEDVTLILQSSEPCTCRSGQKRRNCCYKTNSHGETVKTLYLSYLTVLQKVANHVALLQAASTSKQQETLIKRICDQVFSRFPDFVQKSKDAAFETLSDPKYSGKMKVLQQLLNHCRKNRDKVLLFSFSTKLLDVLQQYCMASGLDYRRLDGSTKSEERLKIVKEFNSTQDVNICLVSTMAGGLGLNFVGANVVVLFDPTWNPANDLQAIDRAYRIGQCRDVKVLRLISLGTVEEIMYLRQIYKQQLHCVVVGSENAKRYFEAVQGSKEHQGELFGIHNLFKFRSQGSCLTKDILEREGQVEAGIMTATTWLKEGPPAHKLEMPRQPDCQECRGTEQAAEPLAKEACDLCSDFSDEEPVGATGIKTAKNKAPDSSKASSSPGQLTLLQCGFSKLLETKCKAVEDSDGNTASDDESSDEQPTCLSTEAKDAGCEKNQDSLGTSKHQKLDNILNPKEKHIFYKSEKILEQNISSKSDEKKIKNTDKHCILQNVTESEDSDVICPTQYTTERFPDNSIRFKPPLEGSEDSETEHTVKTRNNDNSRNTDDKRNGIISKKLSPENTTLKSILKRKGTSDISDESDDIEISSKSRVRKRASSLRFKRIKETKKELHNSPKTMNKTNQVYAANEDHNSQFIDDYSSSDESLSVSHFSFSKQSHRPRTIRDRTSFSSKLPSHNKKNSTFIPRKPMKCSNEKVVNQEQSYESMDKFLDGVQEVAYIHSNQNVIGSSKAENHMSRWAAHDVFELKQFSQLPANIAVCSSKTYKEKVDADTLPHTKKGQQPSEGSISLPLYISNPVNQKKKKVYHTNQTTFIIGETPKGIRRKQFEEMASYFNSSSVNEFAKHITNATSEERQKMLRDFYASQYPEVKEFFVDSVSQFNNSSFEKGEQRTRKKSDKRESLIKPRLSDSETLSFKDSTNKISQVCSLKTYKRKSVKFQNHISYREEVFFNDAETKKSPVSSTQEIDSGKNSQASEDTVTSRSLNSESETRERRLENTMKDQQDLTRTGISRKEPLLKLENKKIENPVLENTSVISLLGDTSILDDLFKSHGNSPTQLPKKVLSGPMEKAKQRPKDFWDILNEQNDESLSKLTDLAVIETLCEKAPLAAPFKRREEPATSLWKSNEKFLWKKFSPSDTDENATNTQSTT

SEQ ID NO: 19803 - protein, 875 aa, Homo sapiens
MPVRKQDTQRALHLLEEYRSKLSQTEDRQLRSSIERVINIFQSNLFQALIDIQEFYEVTLLDNPKCIDRSKPSEPIQPVNTWEISSLPSSTVTSETLPSSLSPSVEKYRYQDEDTPPQEHISPQITNEVIGPELVHVSEKNLSEIENVHGFVSHSHISPIKVNGTDADYEYEEITLERGNSGLGFSIAGGTDNPHIGDDSSIFITKIITGGAAAQDGRLRVNDCILRVNEVDVRDVTHSKAVEALKEAGSIVRLYVKRRKPVSEKIMEIKLIKGPKGLGFSIAGGVGNQHIPGDNSIYVTKIIEGGAAHKDGKLQIGDKLLAVNNVCLEEVTHEEAVTALKNTSDFVYLKVAKPTSMYMNDGYAPPDITNSSSQPVDNHVSPSSFLGQTPASPARYSPVSKAVLGDDEITREPRKVVLHRGSTGLGFNIVGGEDGEGIFISFILAGGPADLSGELRKGDRIISVNSVDLRAASHEQAAAALKNAGQAVTIVAQYRPEEYSRFEAKIHDLREQMMNSSISSGSGSLRTSQKRSLYVRALFDYDKTKDSGLPSQGLNFKFGDILHVINASDDEWWQARQVTPDGESDEVGVIPSKRRVEKKERARLKTVKFNSKTRDKGQSFNDKRKKNLFSRKFPFYKNKDQSEQETSDADQHVTSNASDSESSYRGQEEYVLSYEPVNQQEVNYTRPVIILGPMKDRINDDLISEFPDKFGSCVPHTTRPKRDYEVDGRDYHFVTSREQMEKDIQEHKFIEAGQYNNHLYGTSVQSVREVAEKGKHCILDVSGNAIKRLQIAQLYPISIFIKPKSMENIMEMNKRLTEEQARKTFERAMKLEQEFTEHFTAIVQGDTLEDIYNQVKQIIEEQSGSYIWVPAKEKL

SEQ ID NO: 19804 - protein, 164 aa, Homo sapiens
MPAFNRLFPLASLVLIYWVSVCFPVCVEVPSETEAVQGNPMKLRCISCMKREEVEATTVVEWFYRPEGGKDFLIYEYRNGHQEVESPFQGRLQWNGSKDLQDVSITVLNVTLNDSGLYTCNVSREFEFEAHRPFVKTTRLIPLRVTEEVITRATSSPSVASLIT

SEQ ID NO: 19805 - protein, 892 aa, Homo sapiens
MPVRKQDTQRALHLLEEYRSKLSQTEDRQLRSSIERVINIFQSNLFQALIDIQEFYEVTLLDNPKCIDRSKPSEPIQPVNTWEISSLPSSTVTSETLPSSLSPSVEKYRYQDEDTPPQEHISPQITNEVIGPELVHVSEKNLSEIENVHGFVSHSHISPIKANPPPVLVNTDSLETPTYVNGTDADYEYEEITLERGNSGLGFSIAGGTDNPHIGDDSSIFITKIITGGAAAQDGRLRVNDCILRVNEVDVRDVTHSKAVEALKEAGSIVRLYVKRRKPVSEKIMEIKLIKGPKGLGFSIAGGVGNQHIPGDNSIYVTKIIEGGAAHKDGKLQIGDKLLAVNNVCLEEVTHEEAVTALKNTSDFVYLKVAKPTSMYMNDGYAPPDITNSSSQPVDNHVSPSSFLGQTPASPARYSPVSKAVLGDDEITREPRKVVLHRGSTGLGFNIVGGEDGEGIFISFILAGGPADLSGELRKGDRIISVNSVDLRAASHEQAAAALKNAGQAVTIVAQYRPEEYSRFEAKIHDLREQMMNSSISSGSGSLRTSQKRSLYVRALFDYDKTKDSGLPSQGLNFKFGDILHVINASDDEWWQARQVTPDGESDEVGVIPSKRRVEKKERARLKTVKFNSKTRDKGSFNDKRKKNLFSRKFPFYKNKDQSEQETSDADQHVTSNASDSESSYRGQEEYVLSYEPVNQQEVNYTRPVIILGPMKDRINDDLISEFPDKFGSCVPHTTRPKRDYEVDGRDYHFVTSREQMEKDIQEHKFIEAGQYNNHLYGTSVQSVREVAEKGKHCILDVSGNAIKRLQIAQLYPISIFIKPKSMENIMEMNKRLTEEQARKTFERAMKLEQEFTEHFTAIVQGDTLEDIYNQVKQIIEEQSGSYIWVPAKEKL

SEQ ID NO: 19806 - protein, 888 aa, Homo sapiens
MGLPEPGPLRLLALLLLLLLLLLLQLQHLAAAAADPLLGGQGPAKDCEKDQFQCRNERCIPSVWRCDEDDDCLDHSDEDDCPKKTCADSDFTCDNGHCIHERWKCDGEEECPDGSDESEATCTKQVCPAEKLSCGPTSHKCVPASWRCDGEKDCEGGADEAGCATLCAPHEFQCGNRSCLAAVFVCDGDDDCGDGSDERGCADPACGPREFRCGGDGGGACIPERWVCDRQFDCEDRSDEAAELCGRPGPGATSAPAACATASQFACRSGECVHLGWRCDGDRDCKDKSDEADCPLGTCRGDEFQCGDGTCVLAIKHCNQEQDCPDGSDEAGCLQGLNECLHNNGGCSHICTDLKIGFECTCPAGFQLLDQKTCGDIDECKDPDACSQICVNYKGYFKCECYPGYEMDLLTKNCKAAAGKSPSLIFTNRHEVRRIDLVKRNYSRLIPMLKNVVALDVEVATNRIYWCDLSYRKIYSAYMDKASDPKEQEVLIDEQLHSPEGLAVDWVHKHIYWTDSGNKTISVATVDGGRRRTLFSRNLSEPRAIAVDPLRGFMYWSDWGDQAKIEKSGLNGVDRQTLVSDNIEWPNGITLDLLSQRLYWVDSKLHQLSSIDFSGGNRKTLISSTDFLSHPFGIAVFEDKVFWTDLENEAIFSANRLNGLEISILAENLNNPHDIVIFHELKQPRAPDACELSVQPNGGCEYLCLPAPQISSHSPKYTCACPDTMWLGPDMKRCYRDANEDSKMGSTVTAAVIGIIVPIVVIALLCMSGYLIWRNWKRKNTKSMNFDNPVYRKTTEEEDEDELHIGRTAQIGHVYPAAISSFDRPLWAEPCLGETREPEDPAPALKELFVLPGEPRSQLHQLPKNPLSELPVVKSKRVALSLEDDGLP

SEQ ID NO: 19807 - protein, 38 aa, Homo sapiens
MQFRLFSFALIILNCMDYSHCQGNRWRRSKRAWRSLIV

SEQ ID NO: 19808 - protein, 348 aa, Homo sapiens
MVWPWVAMASRWGPLIGLAPCCLWLLGAVLLMDASARPANHSSTRERVANREENEILPPDHLNGVKLEMDGHLNRGFHQEVFLGKDLGGFDEDAEPRRSRRKLMVIFSKVDVNTDRKISAKEMQRWIMEKTAEHFQEAMEESKTHFRAVDPDGDGHVSWDEYKVKFLASKGHSEKEVADAIRLNEELKVDEETQEVLENLKDRWYQADSPPADLLLTEEEFLSFLHPEHSRGMLRFMVKEIVRDLDQDGDKQLSVPEFISLPVGTVENQQGQDIDDNWVKDRKKEFEELIDSNHDGIVTAEELENVPTLPLQPIGTLNSHFVRLAAELGGGKATLTCAPLARRATWTP

SEQ ID NO: 19809 - protein, 51 aa, Homo sapiens
MSSTRSQNPHGLKQIGLDQIWDDLRAGIQQVYTRQSMAKSRYMELYTYPPA

SEQ ID NO: 19810 - protein, 2412 aa, Homo sapiens
MGISTVILEMCLLWGQVLSTGGWIPRTTDYASLIPSEVPLDPTVAEGSPFPSESTLESTVAEGSPISLESTLESTVAEGSLIPSESTLESTVAEGSDSGLALRLVNGDGRCQGRVEILYRGSWGTVCDDSWDTNDANVVCRQLGCGWAMSAPGNAWFGQGSGPIALDDVRCSGHESYLWSCPHNGWLSHNCGHGEDAGVICSAAQPQSTLRPESWPVRISPPVPTEGSESSLALRLVNGGDRCRGRVEVLYRGSWGTVCDDYWDTNDANVVCRQLGCGWAMSAPGNAQFGQGSGPIVLDDVRCSGHESYLWSCPHNGWLTHNCGHSEDAGVICSAPQSRPTPSPDTWPTSHASTAGPESSLALRLVNGGDRCQGRVEVLYRGSWGTVCDDSWDTSDANVVCRQLGCGWATSAPGNARFGQGSGPIVLDDVRCSGYESYLWSCPHNGWLSHNCQHSEDAGVICSAAHSWSTPSPDTLPTITLPASTVGSESSLALRLVNGGDRCQGRVEVLYRGSWGTVCDDSWDTNDANVVCRQLGCGWAMLAPGNARFGQGSGPIVLDDVRCSGNESYLWSCPHNGWLSHNCGHSEDAGVICSGPESSLALRLVNGGDRCQGRVEVLYRGSWGTVCDDSWDTNDANVVCRQLGCGWATSAPGNARFGQGSGPIVLDDVRCSGHESYLWSCPNNGWLSHNCGHHEDAGVICSAAQSRSTPRPDTLSTITLPPSTVGSESSLTLRLVNGSDRCQGRVEVLYRGSWGTVCDDSWDTNDANVVCRQLGCGWATSAPGNARFGQGSGPIVLDDVRCSGHESYLWSCPHNGWLSHNCGHHEDAGVICSVSQSRPTPSPDTWPTSHASTAGPESSLALRLVNGGDRCQGRVEVLYRGSWGTVCDDSWDTSDANVVCRQLGCGWATSAPGNARFGQGSGPIVLDDVRCSGYESYLWSCPHNGWLSHNCQHSEDAGVICSAAHSWSTPSPDTLPTITLPASTVGSESSLALRLVNGGDRCQGRVEVLYQGSWGTVCDDSWDTNDANVVCRQLGCGWAMSAPGNARFGQGSGPIVLDDVRCSGHESYLWSCPHNGWLSHNCGHSEDAGVICSASQSRPTPSPDTWPTSHASTAGSESSLALRLVNGGDRCQGRVEVLYRGSWGTVCDDYWDTNDANVVCRQLGCGWAMSAPGNARFGQGSGPIVLDDVRCSGHESYLWSCPHNGWLSHNCGHHEDAGVICSASQSQPTPSPDTWPTSHASTAGSESSLALRLVNGGDRCQGRVEVLYRGSWGTVCDDYWDTNDANVVCRQLGCGWATSAPGNARFGQGSGPIVLDDVRCSGHESYLWSCPHNGWLSHNCGHHEDAGVICSASQSQPTPSPDTWPTSHASTAGSESSLALRLVNGGDRCQGRVEVLYRGSWGTVCDDYWDTNDANVVCRQLGCGWATSAPGNARFGQGSGPIVLDDVRCSGHESYLWSCPHNGWLSHNCGHHEDAGVICSASQSQPTPSPDTWPTSRASTAGSESTLALRLVNGGDRCRGRVEVLYQGSWGTVCDDYWDTNDANVVCRQLGCGWAMSAPGNAQFGQGSGPIVLDDVRCSGHESYLWSCPHNGWLSHNCGHHEDAGVICSAAQSQSTPRPDTWLTTNLPALTVGSESSLALRLVNGGDRCRGRVEVLYRGSWGTVCDDSWDTNDANVVCRQLGCGWAMSAPGNARFGQGSGPIVLDDVRCSGNESYLWSCPHKGWLTHNCGHHEDAGVICSATQINSTTTDWWHPTTTTTARPSSNCGGFLFYASGTFSSPSYPAYYPNNAKCVWEIEVNSGYRINLGFSNLKLEAHHNCSFDYVEIFDGSLNSSLLLGKICNDTRQIFTSSYNRMTIHFRSDISFQNTGFLAWYNSFPSDATLRLVNLNSSYGLCAGRVEIYHGGTWGTVCDDSWTIQEAEVVCRQLGCGRAVSALGNAYFGSGSGPITLDDVECSGTESTLWQCRNRGWFSHNCNHREDAGVICSGNHLSTPAPFLNITRPNNYSCGGFLSQPSGDFSSPFYPGNYPNNAKCVWDIEVQNNYRVTVIFRDVQLEGGCNYDYIEVFDGPYRSSPLIARVCDGARGSFTSSSNFMSIRFISDHSITRRGFRAEYYSSPSNDSTNLLCLPNHMQASVSRSYLQSLGFSASDLVISTWNGYYECRPQITPNLVIFTIPYSGCGTFKQADNDTIDYSNFLTAAVSGGIIKRRTDLRIHVSCRMLQNTWVDTMYIANDTIHVANNTIQVEEVQYGNFDVNISFYTSSSFLYPVTSRPYYVDLNQDLYVQAEILHSDAVLTLFVDTCVASPYSNDFTSLTYDLIRSGCVRDDTYGPYSSPSLRIARFRFRAFHFLNRFPSVYLRCKMVVCRAYDPSSRCYRGCVLRSKRDVGSYQEKVDVVLGPIQLQTPPRREEEPR

SEQ ID NO: 19811 - protein, 925 aa, Homo sapiens
MPVRKQDTQRALHLLEEYRSKLSQTEDRQLRSSIERVINIFQSNLFQALIDIQEFYEVTLLDNPKCIDRSKPSEPIQPVNTWEISSLPSSTVTSETLPSSLSPSVEKYRYQDEDTPPQEHISPQITNEVIGPELVHVSEKNLSEIENVHGFVSHSHISPIKPTEAVLPSPPTVPVIPVLPVPAENTVILPTIPQANPPPVLVNTDSLETPTYVNGTDADYEYEEITLERGNSGLGFSIAGGTDNPHIGDDSSIFITKIITGGAAAQDGRLRVNDCILRVNEVDVRDVTHSKAVEALKEAGSIVRLYVKRRKPVSEKIMEIKLIKGPKGLGFSIAGGVGNQHIPGDNSIYVTKIIEGGAAHKDGKLQIGDKLLAVNNVCLEEVTHEEAVTALKNTSDFVYLKVAKPTSMYMNDGYAPPDITNSSSQPVDNHVSPSSFLGQTPASPARYSPVSKAVLGDDEITREPRKVVLHRGSTGLGFNIVGGEDGEGIFISFILAGGPADLSGELRKGDRIISVNSVDLRAASHEQAAAALKNAGQAVTIVAQYRPEEYSRFEAKIHDLREQMMNSSISSGSGSLRTSQKRSLYVRALFDYDKTKDSGLPSQGLNFKFGDILHVINASDDEWWQARQVTPDGESDEVGVIPSKRRVEKKERARLKTVKFNSKTRDKGSFNDKRKKNLFSRKFPFYKNKDQSEQETSDADQHVTSNASDSESSYRGQEEYVLSYEPVNQQEVNYTRPVIILGPMKDRINDDLISEFPDKFGSCVPHTTRPKRDYEVDGRDYHFVTSREQMEKDIQEHKFIEAGQYNNHLYGTSVQSVREVAEKGKHCILDVSGNAIKRLQIAQLYPISIFIKPKSMENIMEMNKRLTEEQARKTFERAMKLEQEFTEHFTAIVQGDTLEDIYNQVKQIIEEQSGSYIWVPAKEKL

SEQ ID NO: 19812 - protein, 1245 aa, Homo sapiens
MGSVTGAVLKTLLLLSTQNWNRVEAGNSYDCDDPLVSALPQASFSSSSELSSSHGPGFARLNRRDGAGGWSPLVSNKYQWLQIDLGERMEVTAVATQGGYGSSNWVTSYLLMFSDSGWNWKQYRQEDSIWGFSGNANADSVVYYRLQPSIKARFLRFIPLEWNPKGRIGMRIEVFGCAYRSEVVDLDGKSSLLYRFDQKSLSPIKDIISLKFKTMQSDGILLHREGPNGDHITLQLRRARLFLLINSGEAKLPSTSTLVNLTLGSLLDDQHWHSVLIQRLGKQVNFTVDEHRHHFHARGEFNLMNLDYEISFGGIPAPGKSVSFPHRNFHGCLENLYYNGVDIIDLAKQQKPQIIAMGNVSFSCSQPQSMPVTFLSSRSYLALPDFSGEEEVSATFQFRTWNKAGLLLFSELQLISGGILLFLSDGKLKSNLYQPGKLPSDITAGVELNDGQWHSVSLSAKKNHLSVAVDGQMASAAPLLGPEQIYSGGTYYFGGCPDKSFGSKCKSPLGGFQGCMRLISISGKVVDLISVQQGSLGNFSDLQIDSCGISDRCLPNYCEHGGECSQSWSTFHCNCTNTGYRGATCHNSIYEQSCEAYKHRGNTSGFYYIDSDGSGPLEPFLLYCNMTETAWTIIQHNGSDLTRVRNTNPENPYAGFFEYVASMEQLQATINRAEHCEQEFTYYCKKSRLVNKQDGTPLSWWVGRTNETQTYWGGSSPDLQKCTCGLEGNCIDSQYYCNCDADRNEWTNDTGLLAYKEHLPVTKIVITDTGRLHSEAAYKLGPLLCQGDRSFWNSASFDTEASYLHFPTFHGELSADVSFFFKTTASSGVFLENLGIADFIRIELRSPTVVTFSFDVGNGPFEISVQSPTHFNDNQWHHVRVERNMKEASLQVDQLTPKTQPAPADGHVLLQLNSQLFVGGTATRQRGFLGCIRSLQLNGMTLDLEERAQVTPEVQPGCRGHCSSYGKLCRNGGKCRERPIGFFCDCTFSAYTGPFCSNEISAYFGSGSSVIYNFQENYLLSKNSSSHAASFHGDMKLSREMIKFSFRTTRTPSLLLFVSSFYKEYLSVIIAKNGSLQIRYKLNKYQEPDVVNFDFKNMADGQLHHIMINREEGVVFIEIDDNRRRQVHLSSGTEFSAVKSLVLGRILEHSDVDQDTALAGAQGFTGCLSAVQLSHVAPLKAALHPSHPDPVTVTGHVTESSCMAQPGTDATSRERTHSFADHSGTIDDREPLANAIKSDSAVIGG

SEQ ID NO: 19813 - protein, 111 aa, Homo sapiens
MAAARPARGPELPLLGLLLLLLLGDPGRGAASSGNATGPGPRSAGGSARRSAAVTGPPPPLSHCGRAAPCEPLRYNVCLGSVLPYGATSTLLAGDSDSQEEAHGKLVLWSG

SEQ ID NO: 19814 - protein, 335 aa, Homo sapiens
MRILHVNGFNGEGGEEDPQAARSNSDGEKATKVQDIKNNLKEAIETIVAAMSNLVPPVELANPENQFRVDYILSVMNVPDFDFPPEFYEHAKALWEDEGVRACYERSNEYQLIDCAQYFLDKIDVIKQADYVPSDQDLLRCRVLTSGIFETKFQVDKVNFHMFDVGGQRDERRKWIQCFNDVTAIIFVVASSSYNMVIREDNQTNRLQEALNLFKSIWNNRWLRTISVILFLNKQDLLAEKVLAGKSKIEDYFPEFARYTTPEDATPEPGEDPRVTRAKYFIRDEFLRISTASGDGRHYCYPHFTCAVDTENIRRVFNDCRDIIQRMHLRQYELL

SEQ ID NO: 19815 - protein, 1133 aa, Homo sapiens
MGISTVILEMCLLWGQVLSTGGWIPRTTDYASLIPSEVPLDPTVAEGSPFPSESTLESTVAEGSPISLESTLESTVAEGSLIPSESTLESTVAEGSDSGLALRLVNGDGRCQGRVEILYRGSWGTVCDDSWDTNDANVVCRQLGCGWAMSAPGNAWFGQGSGPIALDDVRCSGHESYLWSCPHNGWLSHNCGHGEDAGVICSAPQSRPTPSPDTWPTSHASTAGSESSLALRLVNGGDRCQGRVEVLYRGSWGTVCDDYWDTNDANVVCRQLGCGWATSAPGNARFGQGSGPIVLDDVRCSGHESYLWSCPHNGWLSHNCGHHEDAGVICSASQSQPTPSPDTWPTSRASTAGSESTLALRLVNGGDRCRGRVEVLYQGSWGTVCDDYWDTNDANVVCRQLGCGWAMSAPGNAQFGQGSGPIVLDDVRCSGHESYLWSCPHNGWLSHNCGHHEDAGVICSATQINSTTTDWWHPTTTTTARPSSNCGGFLFYASGTFSSPSYPAYYPNNAKCVWEIEVNSGYRINLGFSNLKLEAHHNCSFDYVEIFDGSLNSSLLLGKICNDTRQIFTSSYNRMTIHFRSDISFQNTGFLAWYNSFPSDATLRLVNLNSSYGLCAGRVEIYHGGTWGTVCDDSWTIQEAEVVCRQLGCGRAVSALGNAYFGSGSGPITLDDVECSGTESTLWQCRNRGWFSHNCNHREDAGVICSGNHLSTPAPFLNITRPNTDYSCGGFLSQPSGDFSSPFYPGNYPNNAKCVWDIEVQNNYRVTVIFRDVQLEGGCNYDYIEVFDGPYRSSPLIARVCDGARGSFTSSSNFMSIRFISDHSITRRGFRAEYYSSPSNDSTNLLCLPNHMQASVSRSYLQSLGFSASDLVISTWNGYYECRPQITPNLVIFTIPYSGCGTFKQADNDTIDYSNFLTAAVSGGIIKRRTDLRIHVSCRMLQNTWVDTMYIANDTIHVANNTIQVEEVQYGNFDVNISFYTSSSFLYPVTSRPYYVDLNQDLYVQAEILHSDAVLTLFVDTCVASPYSNDFTSLTYDLIRSGCVRDDTYGPYSSPSLRIARFRFRAFHFLNRFPSVYLRCKMVVCRAYDPSSRCYRGCVLRSKRDVGSYQEKVDVVLGPIQLQTPPRREEEPR

SEQ ID NO: 19816 - protein, 320 aa, Homo sapiens
MRILHVNGFNGDEKATKVQDIKNNLKEAIETIVAAMSNLVPPVELANPENQFRVDYILSVMNVPDFDFPPEFYEHAKALWEDEGVRACYERSNEYQLIDCAQYFLDKIDVIKQADYVPSDQDLLRCRVLTSGIFETKFQVDKVNFHMFDVGGQRDERRKWIQCFNDVTAIIFVVASSSYNMVIREDNQTNRLQEALNLFKSIWNNRWLRTISVILFLNKQDLLAEKVLAGKSKIEDYFPEFARYTTPEDATPEPGEDPRVTRAKYFIRDEFLRISTASGDGRHYCYPHFTCAVDTENIRRVFNDCRDIIQRMHLRQYELL

SEQ ID NO: 19817 - protein, 2532 aa, Homo sapiens
MGISTVILEMCLLWGQVLSTGGWIPRTTDYASLIPSEVPLDPTVAEGSPFPSESTLESTVAEGSPISLESTLESTVAEGSLIPSESTLESTVAEGSDSGLALRLVNGDGRCQGRVEILYRGSWGTVCDDSWDTNDANVVCRQLGCGWAMSAPGNAWFGQGSGPIALDDVRCSGHESYLWSCPHNGWLSHNCGHGEDAGVICSAAQPQSTLRPESWPVRISPPVPTEGSESSLALRLVNGGDRCRGRVEVLYRGSWGTVCDDYWDTNDANVVCRQLGCGWAMSAPGNAQFGQGSGPIVLDDVRCSGHESYLWSCPHNGWLTHNCGHSEDAGVICSAPQSRPTPSPDTWPTSHASTAGPESSLALRLVNGGDRCQGRVEVLYRGSWGTVCDDSWDTSDANVVCRQLGCGWATSAPGNARFGQGSGPIVLDDVRCSGYESYLWSCPHNGWLSHNCQHSEDAGVICSDTLPTITLPASTVGSESSLALRLVNGGDRCQGRVEVLYRGSWGTVCDDSWDTNDANVVCRQLGCGWAMLAPGNARFGQGSGPIVLDDVRCSGNESYLWSCPHNGWLSHNCGHSEDAGVICSGPESSLALRLVNGGDRCQGRVEVLYRGSWGTVCDDSWDTNDANVVCRQLGCGWATSAPGNARFGQGSGPIVLDDVRCSGHESYLWSCPNNGWLSHNCGHHEDAGVICSAAQSRSTPRPDTLSTITLPPSTVGSESSLTLRLVNGSDRCQGRVEVLYRGSWGTVCDDSWDTNDANVVCRQLGCGWATSAPGNARFGQGSGPIVLDDVRCSGHESYLWSCPHNGWLSHNCGHHEDAGVICSVSQSRPTPSPDTWPTSHASTAGPESSLALRLVNGGDRCQGRVEVLYRGSWGTVCDDSWDTSDANVVCRQLGCGWATSAPGNARFGQGSGPIVLDDVRCSGYESYLWSCPHNGWLSHNCQHSEDAGVICSAAHSWSTPSPDTLPTITLPASTVGSESSLALRLVNGGDRCQGRVEVLYQGSWGTVCDDSWDTNDANVVCRQLGCGWAMSAPGNARFGQGSGPIVLDDVRCSGHESYLWSCPHNGWLSHNCGHSEDAGVICSASQSRPTPSPDTWPTSHASTAGSESSLALRLVNGGDRCQGRVEVLYRGSWGTVCDDYWDTNDANVVCRQLGCGWAMSAPGNARFGQGSGPIVLDDVRCSGHESYLWSCPHNGWLSHNCGHHEDAGVICSASQSQPTPSPDTWPTSHASTAGSESSLALRLVNGGDRCQGRVEVLYRGSWGTVCDDYWDTNDANVVCRQLGCGWATSAPGNARFGQGSGPIVLDDVRCSGHESYLWSCPHNGWLSHNCGHHEDAGVICSASQSQPTPSPDTWPTSHASTAGSESSLALRLVNGGDRCQGRVEVLYRGSWGTVCDDYWDTNDANVVCRQLGCGWATSAPGNARFGQGSGPIVLDDVRCSGHESYLWSCPHNGWLSHNCGHHEDAGVICSASQSQPTPSPDTWPTSHASTAGSESSLALRLVNGGDRCQGRVEVLYRGSWGTVCDDYWDTNDANVVCRQLGCGWATSAPGNARFGQGSGPIVLDDVRCSGHESYLWSCPHNGWLSHNCGHHEDAGVICSASQSQPTPSPDTWPTSRASTAGSESTLALRLVNGGDRCRGRVEVLYQGSWGTVCDDYWDTNDANVVCRQLGCGWAMSAPGNAQFGQGSGPIVLDDVRCSGHESYLWSCPHNGWLSHNCGHHEDAGVICSAAQSQSTPRPDTWLTTNLPALTVGSESSLALRLVNGGDRCRGRVEVLYRGSWGTVCDDSWDTNDANVVCRQLGCGWAMSAPGNARFGQGSGPIVLDDVRCSGNESYLWSCPHKGWLTHNCGHHEDAGVICSATQINSTTTDWWHPTTTTTARPSSNCGGFLFYASGTFSSPSYPAYYPNNAKCVWEIEVNSGYRINLGFSNLKLEAHHNCSFDYVEIFDGSLNSSLLLGKICNDTRQIFTSSYNRMTIHFRSDISFQNTGFLAWYNSFPSDATLRLVNLNSSYGLCAGRVEIYHGGTWGTVCDDSWTIQEAEVVCRQLGCGRAVSALGNAYFGSGSGPITLDDVECSGTESTLWQCRNRGWFSHNCNHREDAGVICSGNHLSTPAPFLNITRPNTDYSCGGFLSQPSGDFSSPFYPGNYPNNAKCVWDIEVQNNYRVTVIFRDVQLEGGCNYDYIEVFDGPYRSSPLIARVCDGARGSFTSSSNFMSIRFISDHSITRRGFRAEYYSSPSNDSTNLLCLPNHMQASVSRSYLQSLGFSASDLVISTWNGYYECRPQITPNLVIFTIPYSGCGTFKQADNDTIDYSNFLTAAVSGGIIKRRTDLRIHVSCRMLQNTWVDTMYIANDTIHVANNTIQVEEVQYGNFDVNISFYTSSSFLYPVTSRPYYVDLNQDLYVQAEILHSDAVLTLFVDTCVASPYSNDFTSLTYDLIRSGCVRDDTYGPYSSPSLRIARFRFRAFHFLNRFPSVYLRCKMVVCRAYDPSSRCYRGCVLRSKRDVGSYQEKVDVVLGPIQLQTPPRREEEPR

SEQ ID NO: 19818 - protein, 565 aa, Homo sapiens
MVNPTLGVHEADLLKTSGTLISFIYPAQNPELLNKLSQRKTTVLAMDQVPRVTIAQGYDALSSMANIAGYKAVVLAANHFGRFFTGQITAAGKVPPAKILIVGGGVAGLASAGAAKSMGAIVRGFDTRAAALEQFKSLGAEPLEVDLKESGEGQGGYAKEMSKEFIEAEMKLFAQQCKEVDILISTALIPGKKAPVLFNKEMIESMKEGSVVVDLAAEAGGNFETTKPGELYIHKGITHIGYTDLPSRMATQASTLYSNNITKLLKAISPDKDNFYFDVKDDFDFGTMGHVIRGTVVMKDGKVIFPAPTPKNIPQGAPVKQKTVAELEAEKAATITPFRKTMSTASAYTAGLTGILGLGIAAPNLAFSQMVTTFGLAGIVGYHTVWGVTPALHSPLMSVTNAISGLTAVGGLALMGGHLYPSTTSQGLAALAAFISSVNIAGGFLVTQRMLDMFKRPTDPPEYNYLYLLPAGTFVGGYLAALYSGYNIEQIMYLGSGLCCVGALAGLSTQGTARLGNALGMIGVAGGLAATLGVLKPGPELLAQMSGAMALGGTIGKHLWASAFM

SEQ ID NO: 19819 - protein, 2393 aa, Homo sapiens
MGISTVILEMCLLWGQVLSTGGWIPRTTDYASLIPSEVPLDPTVAEGSPFPSESTLESTVAEGSPISLESTLESTVAEGSLIPSESTLESTVAEGSDSGLALRLVNGDGRCQGRVEILYRGSWGTVCDDSWDTNDANVVCRQLGCGWAMSAPGNAWFGQGSGPIALDDVRCSGHESYLWSCPHNGWLSHNCGHGEDAGVICSAAQPQSTLRPESWPVRISPPVPTEGSESSLALRLVNGGDRCRGRVEVLYRGSWGTVCDDYWDTNDANVVCRQLGCGWAMSAPGNAQFGQGSGPIVLDDVRCSGHESYLWSCPHNGWLTHNCGHSEDAGVICSAPQSRPTPSPDTWPTSHASTAGPESSLALRLVNGGDRCQGRVEVLYRGSWGTVCDDSWDTSDANVVCRQLGCGWATSAPGNARFGQGSGPIVLDDVRCSGYESYLWSCPHNGWLSHNCQHSEDAGVICSAAHSWSTPSPDTLPTITLPASTVGSESSLALRLVNGGDRCQGRVEVLYRGSWGTVCDDSWDTNDANVVCRQLGCGWAMLAPGNARFGQGSGPIVLDDVRCSGNESYLWSCPHNGWLSHNCGHSEDAGVICSGPESSLALRLVNGGDRCQGRVEVLYRGSWGTVCDDSWDTNDANVVCRQLGCGWATSAPGNARFGQGSGPIVLDDVRCSGHESYLWSCPNNGWLSHNCGHHEDAGVICSAAQSRSTPRPDTLSTITLPPSTVGSESSLTLRLVNGSDRCQGRVEVLYRGSWGTVCDDSWDTNDANVVCRQLGCGWATSAPGNARFGQGSGPIVLDDVRCSGHESYLWSCPHNGWLSHNCGHHEDAGVICSVSQSRPTPSPDTWPTSHASTAGPESSLALRLVNGGDRCQGRVEVLYRGSWGTVCDDSWDTSDANVVCRQLGCGWATSAPGNARFGQGSGPIVLDDVRCSGYESYLWSCPHNGWLSHNCQHSEDAGVICSAAHSWSTPSPDTLPTITLPASTVGSESSLALRLVNGGDRCQGRVEVLYQGSWGTVCDDSWDTNDANVVCRQLGCGWAMSAPGNARFGQGSGPIVLDDVRCSGHESYLWSCPHNGWLSHNCGHSEDAGVICSASQSRPTPSPDTWPTSHASTAGSESSLALRLVNGGDRCQGRVEVLYRGSWGTVCDDYWDTNDANVVCRQLGCGWAMSAPGNARFGQGSGPIVLDDVRCSGHESYLWSCPHNGWLSHNCGHHEDAGVICSASQSQPTPSPDTWPTSHASTAGSESSLALRLVNGGDRCQGRVEVLYRGSWGTVCDDYWDTNDANVVCRQLGCGWATSAPGNARFGQGSGPIVLDDVRCSGHESYLWSCPHNGWLSHNCGHHEDAGVICSASQSQPTPSPDTWPTSHASTAGSESSLALRLVNGGDRCQGRVEVLYRGSWGTVCDDYWDTNDANVVCRQLGCGWATSAPGNARFGQGSGPIVLDDVRCSGHESYLWSCPHNGWLSHNCGHHEDAGVICSASQSQPTPSPDTWPTSRASTAGSESTLALRLVNGGDRCRGRVEVLYQGSWGTVCDDYWDTNDANVVCRQLGCGWAMSAPGNAQFGQGSGPIVLDDVRCSGHESYLWSCPHNGWLSHNCGHHEDAGVICSAAQSQSTPRPDTWLTTNLPALTVGSESSLALRLVNGGDRCRGRVEVLYRGSWGTVCDDSWDTNDANVVCRQLGCGWAMSAPGNARFGQGSGPIVLDDVRCSGNESYLWSCPHKGWLTHNCGHHEDAGVICSGPSSNCGGFLFYASGTFSSPSYPAYYPNNAKCVWEIEVNSGYRINLGFSNLKLEAHHNCSFDYVEIFDGSLNSSLLLGKICNDTRQIFTSSYNRMTIHFRSDISFQNTGFLAWYNSFPSDATLRLVNLNSSYGLCAGRVEIYHGGTWGTVCDDSWTIQEAEVVCRQLGCGRAVSALGNAYFGSGSGPITLDDVECSGTESTLWQCRNRGWFSHNCNHREDAGVICSGNHLSTPAPFLNITRPNTDYSCGGFLSQPSGDFSSPFYPGNYPNNAKCVWDIEVQNNYRVTVIFRDVQLEGGCNYDYIEVFDGPYRSSPLIARVCDGARGSFTSSSNFMSIRFISDHSITRRGFRAEYYSSPSNDSTNLLCLPNHMQASVSRSYLQSLGFSASDLVISTWNGYYECRPQITPNLVIFTIPYSGCGTFKQADNDTIDYSNFLTAAVSGGIIKRRTDLRIHVSCRMLQNTWVDTMYIANDTIHVANNTIQVEEVQYGNFDVNISFYTSSSFLYPVTSRPYYVDLNQDLYVQAEILHSDAVLTLFVDTCVASPYSNDFTSLTYDLIRSGCVRDDTYGPYSSPSLRIARFRFRAFHFLNRFPSVYLRCKMVVCRAYDPSSRCYRGCVLRSKRDVGSYQEKVDVVLGPIQLQTPPRREEEPR

SEQ ID NO: 19820 - protein, 842 aa, Homo sapiens
MPSALAIFTCRPNSHPFQERHVYLDEPIKIGRSVARCRPAQNNATFDCKVLSRNHALVWFDHKTGKFYLQDTKSSNGTFINSQRLSRGSEESPPCEILSGDIIQFGVDVTENTRKVTHGCIVSTIKLFLPDGMEARLRSDVIHAPLPSPVDKVAANTPSMYSQELFQLSQYLQEALHREQMLEQKLATLQRLLAITQEASDTSWQALIDEDRLLSRLEVMGNQLQACSKNQTEDSLRKELIALQEDKHNYETTAKESLRRVLQEKIEVVRKLSEVERSLSNTEDECTHLKEMNERTQEELRELANKYNGAVNEIKDLSDKLKVAEGKQEEIQQKGQAEKKELQHKIDEMEEKEQELQAKIEALQADNDFTNERLTALQVRLEHLQEKTLKECSSLGIQVDDFLPKINGSTEKEHLLSKSGGDCTFIHQFIECQKKLIVEGHLTKAVEETKLSKENQTRAKESDFSDTLSPSKEKSSDDTTDAQMDEQDLNEPLAKVSLLKDDLQGAQSEIEAKQEIQHLRKELIEAQELARTSKQKCFELQALLEEERKAYRNQVEESTKQIQVLQAQLQRLHIDTENLREEKDSEITSTRDELLSARDEILLLHQAAAKVASERDTDIASLQEELKKVRAELERWRKAASEYEKEITSLQNSFQLRCQQCEDQQREEATRLQGELEKLRKEWNALETECHSLKRENVLLSSELQRQEKELHNSQKQSLELTSDLSILQMSRKELENQVGSLKEQHLRDSADLKTLLSKAENQAKDVQKEYEKTQTVLSELKLKFEMTEQEKQSITDELKQCKNNLKLLREKGNNPSILQPVPAVFIGLFLAFLFWCFGPLW

SEQ ID NO: 19821 - protein, 139 aa, Homo sapiens
MGNHLSLLLFAMVACYPGNGTGYVRHVDNPNGDGRCVTCIYYLNKDWDAKVSGGILRIFPEGKAQFADIEPKFDRLLFFWSDRRNPHEVQPAYATRYAITVWYFDADERARAKVKYLTGEKGVRVELNKPSDSVGKDVF

SEQ ID NO: 19822 - protein, 226 aa, Homo sapiens
MPRVYIGRLSYNVREKDIQRFFSGYGRLLEVDLKNGYGFVEFEDSRDADDAVYELNGKELCGERVIVEHARGPRRDRDGYSYGSRSGGGGYSSRRTSGRDKYGPPVRTEYRLIVENLSSRCSWQDLKDFMRQAGEVTYADAHKERTNEGVIEFRSYSDMKRALDKLDGTEINGRNIRLIEDKPRTSHRRSYSGSRSRSRSRRRSRSRSRRSSRSRSRSISKSRSRL

SEQ ID NO: 19823 - protein, 632 aa, Homo sapiens
MKRLPLLVVFSTLLNCSYTQNCTKTPCLPNAKCEIRNGIEACYCNMGFSGNGVTICEDDNECGNLTQSCGENANCTNTEGSYYCMCVPGFRSSSNQDRFITNDGTVCIENVNANCHLDNVCIAANINKTLTKIRSIKEPVALLQEVYRNSVTDLSPTDIITYIEILAESSSLLGYKNNTISAKDTLSNSTLTEFVKTVNNFVQRDTFVVWDKLSVNHRRTHLTKLMHTVEQATLRISQSFQKTTEFDTNSTDIALKVFFFDSYNMKHIHPHMNMDGDYINIFPKRKAAYDSNGNVAVAFVYYKSIGPLLSSSDNFLLKPQNYDNSEEEERVISSVISVSMSSNPPTLYELEKITFTLSHRKGIKDYNILTRITQLGIIISLICLAICIFTFWFFSEIQSTRTTIHKNLCCSLFLAELVFLVGINTNTNKLFCSIIAGLLHYFFLAAFAWMCIEGIHLYLIVVGVIYNKGFLHKNFYIFGYLSPAVVVGFSAALGYRYYGTTKVCWLSTENNFIWSFIGPACLIILVNLLAFGVIIYKVFRHTAGLKPEVSCFENIRSCARGALALLFLLGTTWIFGVLHVVHASVVTAYLFTVSNAFQGMFIFLFLCVLSRKIQEEYYRLFKNVPCCFGCLR

SEQ ID NO: 19824 - protein, 214 aa, Homo sapiens
MSSTRSQNPHGLKQIGLDQIWDDLRAGIQQVYTRQSMAKSRYMELYTHVYNYCTSVHQSNQARGAGVPPSKSKKGQTPGGAQFVGLELYKRLKEFLKNYLTNLLKDGEDLMDESVLKFYTQQWEDYRFSSKVLNGICAYLNRHWVRRECDEGRKGIYEIYSLALVTWRDCLFRPLNKQVTNAVLKLIEKERNGETINTRLISGVVQSYGRGSSA

SEQ ID NO: 19825 - protein, 466 aa, Homo sapiens
MKIPFLLLFFLWEAESHAASRPNIILVMADDLGIGDPGCYGNKTIRTPNIDRLASGGVKLTQHLAASPLCTPSRAAFMTGRYPVRSGMASWSRTGVFLFTASSGGLPTDEITFAKLLKDQGYSTALIGKWHLGMSCHSKTDFCHHPLHHGFNYFYGISLTNLRDCKPGEGSVFTTGFKRLVFLPLQIVGVTLLTLAALNCLGLLHVPLGVFFSLLFLAALILTLFLGFLHYFRPLNCFMMRNYEIIQQPMSYDNLTQRLTVEAAQFIQRNTETPFLLVLSYLHVHTALFSSKDFAGKSQHGVYGDAVEEMDWSVGQILNLLDELRLANDTLIYFTSDQGAHVEEVSSKGEIHGGSNGIYKGGKANNWEGGIRVPGILRWPRVIQAGQKIDEPTSNMDIFPTVAKLAGAPLPEDRIIDGRDLMPLLEGKSQRSDHEFLFHYCNAYLNAVRWHPQNKTIFKKLGNISR

SEQ ID NO: 19826 - protein, 92 aa, Homo sapiens
MHRDAWLPRPAFSLTGLSLFFSLGTRNSFQPLGLGPWEYTCLGTRLAQNFNGLTLSLQCHQDGAWRSQYLPPSTSSMALTPACPAPSTPATQ

SEQ ID NO: 19827 - protein, 211 aa, Homo sapiens
MCVPGFRSSSNQDRFITNDGTVCIENVNANCHLDNVCIAANINKTLTKIRSIKEPVALLQEVYRNSVTDLSPTDIITYIEILAESSSLLGYKNNTISAKDTLSNSTLTEFVKTVNNFVQRDTFVVWDKLSVNHRRTHLTKLMHTVEQATLRISQSFQKTTEFDTNSTDIALKVFFFDSYNMKHIHPHMNMDGDYINIFPKRKAAYDSNGHR

SEQ ID NO: 19828 - protein, 508 aa, Homo sapiens
MSAAPAYSEDKGGSAGPGEPEYGHDPASGGIFSSDYKRHDDLKEMLDTNKDSLKLEAMKRIVAMIARGKNASDLFPAVVKNVACKNIEVKKLVYVYLVRYAEEQQDLALLSISTFQRGLKDPNQLIRASALRVLSSIRVPIIVPIMMLAIKEAASDMSPYVRKTAAHAIPKLYSLDSDQKDQLIEVIEKLLADKTTLVAGSVVMAFEEVCPERIDLIHKNYRKLCNLLIDVEEWGQVVIISMLTRYARTQFLSPTQNESLLEENAEKAFYGSEEDEAKGAGSEETAAAAAPSRKPYVMDPDHRLLLRNTKPLLQSRSAAVVMAVAQLYFHLAPKAEVGVIAKALVRLLRSHSEVQYVVLQNVATMSIKRRGMFEPYLKSFYIRSTDPTQIKILKLEVLTNLANETNIPTVLREFQTYIRSMDKDFVAATIQAIGRCATNIGRVRDTCLNGLVQLLSNRDELVVAESVVVIKKLLQMQPAQHGEIIKHLAKLTDNIQVFRWKEQRHWTM

SEQ ID NO: 19829 - protein, 237 aa, Homo sapiens
MVTCWRPGRLGSYFWTGAVIFLDKIDVIKQADYVPSDQDLLRCRVLTSGIFETKFQVDKVNFHMFDVGGQRDERRKWIQCFNDVTAIIFVVASSSYNMVIREDNQTNRLQEALNLFKSIWNNRWLRTISVILFLNKQDLLAEKVLAGKSKIEDYFPEFARYTTPEDATPEPGEDPRVTRAKYFIRDEFLRISTASGDGRHYCYPHFTCAVDTENIRRVFNDCRDIIQRMHLRQYELL

SEQ ID NO: 19830 - protein, 1086 aa, Homo sapiens
MVEKRCPLQRDGVYRWFSELPSPQRVEFLCGLLDLCIPLELRFLGSCLEDLARKDYHSLRDSEIKANNPADLGSLTNLTDEVVRSKLLVSLALLGSEQREAAGVLYRTLTHIDSIIHNYGLQLNEGRTGDEFLLLFTMASNHPAFSFHQKQVLRQELTQIQSSLNGGGGHGGKGAPGPGGALPTCPACHKITPRTEAPVSSVSNSLENALHTSAHSTEESLPKRPLGKHSKVSVEKIDLKGLSHTKNDRNVECSFEVLWSDSSITSVTKSSSEVTEFISKLCQLYPEENLEKLIPCLAGPDAFYVERNHVDLDSGLRYLASLPSHVLKNDHVRRFLSTSSPPQQLQSPSPGNPSLSKVGTVMGVSGRPVCGVAGIPSSQSGAQHHGQHPAGSAAPLPHCSHAGSAGSALAYRTQMDTSPAILMPSSLQTPQTQEQNGILDWLRKLRLHKYYPVFKQLSMEKFLSLTEEDLNKFESLTMGAKKKLKTQLELEKEKSERRCLNPSAPPLVTSSGVARVPPTSHVGPVQSGRGSHAAELRVEVEQPHHQLPREGSSSEYSSSSSSPMGVQAREESSDSAEENDRRVEIHLESSDKEKPVMLLNHFTSSSARPTAQVLPVQNEASSNPSGHHPLPPQMLSAASHITPIRMLNSVHKPERGSADMKLLSSSVHSLLSLEERNKGSGPRSSMKVDKSFGSAMMDVLPASAPHQPVQVLSGLSESSSMSPTVSFGPRTKVVHASTLDRVLKTAQQPALVVETSTAATGTPSTVLHAARPPIKLLLSSSVPADSAISGQTSCPNNVQISVPPAIINPRTALYTANTKVAFSAMSSMPVGPLQGGFCANSNTASPSSHPSTSFANMATLPSCPAPSSSPALSSVPESSFYSSSGGGGSTGNIPASNPNHHHHHHHQQPPAPPQPAPPPPGCIVCTSCGCSGSCGSSGLTVSYANYFQHPFSGPSVFTFPFLPFSPMCSSGYVSAQQYGGGSTFPVVHAPYSSSGTPDPVLSGQSTFAVPPMQNFMAGTAGVYQTQGLVGSSNGSSHKKSGNLSCYNCGATGHRAQDCKQPSMDFNRPGTFRLKYAPPAESLDSTD

SEQ ID NO: 19831 - protein, 1527 aa, Homo sapiens
MGISTVILEMCLLWGQVLSTGGWIPRTTDYASLIPSEVPLDPTVAEGSPFPSESTLESTVAEGSPISLESTLESTVAEGSLIPSESTLESTVAEGSDSGLALRLVNGDGRCQGRVEILYRGSWGTVCDDSWDTNDANVVCRQLGCGWAMSAPGNAWFGQGSGPIALDDVRCSGHESYLWSCPHNGWLSHNCGHGEDAGVICSAAQPQSTLRPESWPVRISPPVPTEGSESSLALRLVNGGDRCRGRVEVLYRGSWGTVCDDYWDTNDANVVCRQLGCGWAMSAPGNAQFGQGSGPIVLDDVRCSGHESYLWSCPHNGWLTHNCGHSEDAGVICSAPQSRPTPSPDTWPTSHASTAGPESSLALRLVNGGDRCQGRVEVLYRGSWGTVCDDSWDTSDANVVCRQLGCGWATSAPGNARFGQGSGPIVLDDVRCSGYESYLWSCPHNGWLSHNCQHSEDAGVICSAAHSWSTPSPDTLPTITLPASTVGSESSLALRLVNGGDRCQGRVEVLYRGSWGTVCDDYWDTNDANVVCRQLGCGWATSAPGNARFGQGSGPIVLDDVRCSGHESYLWSCPHNGWLSHNCGHHEDAGVICSASQSQPTPSPDTWPTSRASTAGSESTLALRLVNGGDRCRGRVEVLYQGSWGTVCDDYWDTNDANVVCRQLGCGWAMSAPGNAQFGQGSGPIVLDDVRCSGHESYLWSCPHNGWLSHNCGHHEDAGVICSAAQSQSTPRPDTWLTTNLPALTVGSESSLALRLVNGGDRCRGRVEVLYRGSWGTVCDDSWDTNDANVVCRQLGCGWAMSAPGNARFGQGSGPIVLDDVRCSGNESYLWSCPHKGWLTHNCGHHEDAGVICSATQINSTTTDWWHPTTTTTARPSSNCGGFLFYASGTFSSPSYPAYYPNNAKCVWEIEVNSGYRINLGFSNLKLEAHHNCSFDYVEIFDGSLNSSLLLGKICNDTRQIFTSSYNRMTIHFRSDISFQNTGFLAWYNSFPSDATLRLVNLNSSYGLCAGRVEIYHGGTWGTVCDDSWTIQEAEVVCRQLGCGRAVSALGNAYFGSGSGPITLDDVECSGTESTLWQCRNRGWFSHNCNHREDAGVICSGNHLSTPAPFLNITRPNTDYSCGGFLSQPSGDFSSPFYPGNYPNNAKCVWDIEVQNNYRVTVIFRDVQLEGGCNYDYIEVFDGPYRSSPLIARVCDGARGSFTSSSNFMSIRFISDHSITRRGFRAEYYSSPSNDSTNLLCLPNHMQASVSRSYLQSLGFSASDLVISTWNGYYECRPQITPNLVIFTIPYSGCGTFKQADNDTIDYSNFLTAAVSGGIIKRRTDLRIHVSCRMLQNTWVDTMYIANDTIHVANNTIQVEEVQYGNFDVNISFYTSSSFLYPVTSRPYYVDLNQDLYVQAEILHSDAVLTLFVDTCVASPYSNDFTSLTYDLIRSGCVRDDTYGPYSSPSLRIARFRFRAFHFLNRFPSVYLRCKMVVCRAYDPSSRCYRGCVLRSKRDVGSYQEKVDVVLGPIQLQTPPRREEEPR

SEQ ID NO: 19832 - protein, 423 aa, Homo sapiens
MKIPFLLLFFLWEAESHAASRPNIILVMADDLGIGDPGCYGNKTIRTPNIDRLASGGVKLTQHLAASPLCTPSRAAFMTGRYPVRSGMASWSRTGVFLFTASSGGLPTDEITFAKLLKDQGYSTALIGKWHLGMSCHSKTDFCHHPLHHGFNYFYGISLTNLRDCKPGEGSVFTTGFKRLVFLPLQIVGVTLLTLAALNCLGLLHVPLGVFFSLLFLAALILTLFLGFLHYFRPLNCFMMRNYEIIQQPMSYDNLTQRLTVEAAQFIQRNTETPFLLVLSYLHVHTALFSSKDFAGKSQHGVYGDAVEEMDWSVGGKANNWEGGIRVPGILRWPRVIQAGQKIDEPTSNMDIFPTVAKLAGAPLPEDRIIDGRDLMPLLEGKSQRSDHEFLFHYCNAYLNAVRWHPQNNSGSSRRTTNHCSMK

SEQ ID NO: 19833 - protein, 58 aa, Homo sapiens
MGNHLSLLLFAMVACYPGNGTGYVRHVDNPNGDGRCVTCIYYLNKDWDAKVRNNCLVF

SEQ ID NO: 19834 - protein, 1025 aa, Homo sapiens
MSAAPAYSEDKGGSAGPGEPEYGHDPASGGIFSSDYKRHDDLKEMLDTNKDSLKLEAMKRIVADPNQLIRASALRVLSSIRVPIIVPIMMLAIKEAASDMSPYVRKTAAHAIPKLYSLDSDQKDQLIEVIEKLLADKTTLVAGSVVMAFEEVCPERIDLIHKNYRKLCNLLIDVEEWGQVVIISMLTRYARTQFLSPTQNESLLEENAEKAFYGSEEDEAKGAGSEETAAAAAPSRKPYVMDPDHRLLLRNTKPLLQSRSAAVVMAVAQLYFHLAPKAEVGVIAKALVRLLRSHSEVQYVVLQNVATMSIKRRGMFEPYLKSFYIRSTDPTQIKILKLEVLTNLANETNIPTVLREFQTYIRSMDKDFVAATIQAIGRCATNIGRVRDTCLNGLVQLLSNRDELVVAESVVVIKKLLQMQPAQHGEIIKHLAKLTDNIQVPMARASILWLIGEYCEHVPRIAPDVLRKMAKSFTAEEDIVKLQVINLAAKLYLTNSKQTKLLTQYVLSLAKYDQNYDIRDRARFTRQLIVPSEQGGALSRHAKKLFLAPKPAPVLESSFKDRDHFQLGSLSHLLNAKATGYQELPDWPEEAPDPSVRNVEVPEWTKCSNREKRKEKEKPFYSDSEGESGPTESADSDPESESESDSKSSSESGSGESSSESDNEDQDEDEEKGRGSESEQSEEDGKRKTKKKVPERKGEASSSDEGSDSSSSSSESEMTSESEEEQLEPASWSRKTPPSSKSAPATKEISLLDLEDFTPPSVQPVSPPAIVSTSLAADLEGLTLTDSTLVPSLLSPVSGVGRQELLHRVAGEGLAVDYTFSRQPFSGDPHMVSVHIHFSNSSDTPIKGLHVGTPKLPAGISIQEFPEIESLAPGESATAVMGINFCDSTQAANFQLCTQTRQFYVSIQPPVGELMAPVFMSENEFKKEQGKLMGMNEITEKLMLPDTCRSDHIVVQKVTATANLGRVPCGTSDEYRFAGRTLTGGSLVLLTLDARPAGAAQLTVNSEKMVIGTMLVKDVIQALTQ

SEQ ID NO: 19835 - protein, 187 aa, Homo sapiens
MATASPSVFLLMVNGQVESAQFPEYDDLYCKYCFVYGQDWAPTAGLEEGISQITSKSQDVRQALVWNFPIDVTFKSTNPYGCCAAGLLEVQSASGLVATPVKGPQIVLSVYGPDVFGNDVVRGYGAVHVPFSPGRHKRTIPMFVPESTSKLQKFTSWFMGRRPEYTDPKVVAQGEGREATFRAVCQR

SEQ ID NO: 19836 - protein, 765 aa, Homo sapiens
LLALLLLLLLLLLLQLQHLAAAAADPLLGGQGPAKDCEKDQFQCRNERCIPSVWRCDEDDDCLDHSDEDDCPKKTCADSDFTCDNGHCIHERWKCDGEEECPDGSDESEATCTKQVCPAEKLSCGPTSHKCVPASWRCDGEKDCEGGADEAGCATSLGTCRGDEFQCGDGTCVLAIKHCNQEQDCPDGSDEAGCLQGLNECLHNNGGCSHICTDLKIGFECTCPAGFQLLDQKTCGDIDECKDPDACSQICVNYKGYFKCECYPGYEMDLLTKNCKAAAGKSPSLIFTNRHEVRRIDLVKRNYSRLIPMLKNVVALDVEVATNRIYWCDLSYRKIYSAYMDKASDPKEQEVLIDEQLHSPEGLAVDWVHKHIYWTDSGNKTISVATVDGGRRRTLFSRNLSEPRAIAVDPLRGFMYWSDWGDQAKIEKSGLNGVDRQTLVSDNIEWPNGITLDLLSQRLYWVDSKLHQLSSIDFSGGNRKTLISSTDFLSHPFGIAVFEDKVFWTDLENEAIFSANRLNGLEISILAENLNNPHDIVIFHELKQPRAPDACELSVQPNGGCEYLCLPAPQISSHSPKYTCACPDTMWLGPDMKRCYRAPQSTSTTTLASTMTRTVPATTRAPGTTVHRSTYQNHSTETPSLTAAVPSSVSVPRAPSISPSTLSPATSNHSQHYANEDSKMGSTVTAAVIGIIVPIVVIALLCMSGYLIWRNWKRKNTKSMNFDNPVYRKTTEEEDEDELHIGRTAQIGHVYPARVALSLEDDGLP

SEQ ID NO: 19837 - protein, 325 aa, Homo sapiens
MASSSGSKAEFIVGGKYKLVRKIGSGSFGDIYLAINITNGEEVAVKLESQKARHPQLLYESKLYKILQGGVGIPHIRWYGQEKDYNVLVMDLLGPSLEDLFNFCSRRFTMKTVLMLADQMISRIEYVHTKNFIHRDIKPDNFLMGIGRHCNKLFLIDFGLAKKYRDNRTRQHIPYREDKNLTGTARYASINAHLGIEQSRRDDMESLGYVLMYFNRTSLPWQGLKAATKKQKYEKISEKKMSTPVEVLCKGFPAEFAMYLNYCRGLRFEEAPDYMYLRQLFRILFRTLNHQYDYTFDWTMLKQKAAQQAASSSGQGQQAQTPTGF

SEQ ID NO: 19838 - protein, 955 aa, Homo sapiens
MGENEDEKQAQAGQVFENFVQASTCKGTLQAFNILTRHLDLDPLDHRNFYSKLKSKVTTWKAKALWYKLDKRGSHKEYKRGKSCTNTKCLIVGGGPCGLRTAIELAYLGAKVVVVEKRDSFSRNNVLHLWPFTIHDLRGLGAKKFYGKFCAGSIDHISIRQLQLILFKVALMLGVEIHVNVEFVKVLEPPEDQENQKIGWRAEFLPTDHSLSEFEFDVIIGADGRRNTLEGFRRKEFRGKLAIAITANFINRNSTAEAKVEEISGVAFIFNQKFFQDLKEETGIDLENIVYYKDCTHYFVMTAKKQSLLDKGVIINDYIDTEMLLCAENVNQDNLLSYAREAADFATNYQLPSLDFAMNHYGQPDVAMFDFTCMYASENAALVRERQAHQLLVALVGDSLLEPFWPMGTGCARGFLAAFDTAWMVKSWNQGTPPLELLAERESLYRLLPQTTPENINKNFEQYTLDPGTRYPNLNSHCVRPHQVKHLYITKELEHYPLERLGSVRRSVNLSRKESDIRPSKLLTWCQQQTEGYQHVNVTDLTTSWRSGLALCAIIHRFRPELINFDSLNEDDAVENNQLAFDVAEREFGIPPVTTGKEMASAQEPDKLSMVMYLSKFYELFRGTPLRPVDSWRKNYGENADLSLAKSSISNNYLNLTFPRKRTPRVDGQTGENDMNKRRRKGFTNLDEPSNFSSRSLGSNQECGSSKEGGNQNKVKSMANQLLAKFEESTRNPSLMKQESMRKSFPLNLGGSDTCYFCKKRVYVMERLSAEGHFFHRECFRCSICATTLRLAAYTFDCDEGKFYCKPHFIHCKTNSKQRKRRAELKQQREEEATWQEQEAPRRDTPTESSCAVAAIGTLEGSPPGISTSFFRKVLGWPLRLPRDLCNWMQGLLQAAGLHIRDNAYNYCYMYELLSLGLPLLWAFSEVLAAMYRESEGSLESICNWVLRCFPVKLR

SEQ ID NO: 19839 - protein, 1130 aa, Homo sapiens
MSAAPAYSEDKGGSAGPGEPEYGHDPASGGIFSSDYKRHDDLKEMLDTNKDSLKLEAMKRIVAMIARGKNASDLFPAVVKNVACKNIEVKKLVYVYLVRYAEEQQDLALLSISTFQRGLKDPNQLIRASALRVLSSIRVPIIVPIMMLAIKEAASDMSPYVRKTAAHAIPKLYSLDSDQKDQLIEVIEKLLADKTTLVAGSVVMAFEEVCPERIDLIHKNYRKLCNLLIDVEEWGQVVIISMLTRYARTQFLSPTQNESLLEENAEKAFYGSEEDEAKGAGSEETAAAAAPSRKPYVMDPDHRLLLRNTKPLLQSRSAAVVMAVAQLYFHLAPKAEVGVIAKALVRLLRSHSEVQYVVLQNVATMSIKRRGMFEPYLKSFYIRSTDPTQIKILKLEVLTNLANETNIPTVLREFQTYIRSMDKDFVAATIQAIGRCATNIGRVRDTCLNGLVQLLSNRDELVVAESVVVIKKLLQMQPAQHGEIIKHLAKLTDNIQVPMARASILWLIGEYCEHVPRIAPDVLRKMAKSFTAEEDIVKLQVINLAAKLYLTNSKQTKLLTQYVLSLAKYDQNYDIRDRARFTRQLIVPSEQGGALSRHAKKLFLAPKPAPVLESSFKDRDHFQLGSLSHLLNAKATGYQELPDWPEEAPDPSVRNVEVPEWTKCSNREKRKEKEKPFYSDSEGESGPTESADSDPESESESDSKSSSESGSGESSSESDNEDQDEDEEKGRGSESEQSEEDGKRKTKKKVPERKGEASSSDEGSDSSSSSSESEMTSESEEEQLEPASWSRKTPPSSKSAPATKEISLLDLEDFTPPSVQPVSPPAIVSTSLAADLEGLTLTDSTLVPSLLSPVSGVGRQELLHRVAGEGLAVDYTFSRQPFSGDPHMVSVHIHFSNSSDTPIKGLHVGTPKLPAGISIQEFPEIESLAPGESATAVMGINFCDSTQAANFQLCTQTRQFYVSIQPPVGELMAPVFMSENEFKKEQGKLMGMNEITEKLMLPDTCRSDHIVVQKVTATANLGRVPCGTSDEYSSSSPLLFPPQVCREDTDWWKPRSADPGCPASWSCPADCQQRENGDWHHAGKGCDTGSDPVTSKCCDLFGSHLYLPMTPRLSVSLIFLSLSHHPPHAR

SEQ ID NO: 19840 - protein, 258 aa, Homo sapiens
MLCGRPRSSSDNRNFLRERAGLSSAAVQTRIGNSAASRRSPAARPPVPAPPALPRGRPGTEGSTSLSAPAVLVVAVAVVVVVVSAVAWAMANYIHVPPGSPEVPKLNVTVQDQEEHRCREGALSLLQHLRPHWDPQEVTLQLFTDGITNKLIGCYVGNTMEDVVLVRIYGNKTELLVDRDEEVKSFRVLQAHGCAPQLYCTFNNGLCYEFIQGEALDPKHVCNPAIFSLSSLTLCKGKTTRCFGLTGCRGSRLLLSFF

SEQ ID NO: 19841 - protein, 478 aa, Homo sapiens
MPARSRHRPRLHSGSPPRAPPPPLEALHSGEAGRAPDSDGGSDADSEVGPGSPTRTAEAAEEEMAGPNQLCIRRWTTKHVAVWLKDEGFFEYVDILCNKHRLDGITLLTLTEYDLRSPPLEIKVLGDIKRLMLSVRKLQKIHIDVLEEMGYNSDSPMGSMTPFISALQSTDWLCNGELSHDCDGPITDLNSDQYQYMNGKNKHSVRRLDPEYWKTILSCIYVFIVFGFTSFIMVIVHERVPDMQTYPPLPDIFLDSVPRIPWAFAMTEVCGMILCYIWLLVLLLHKHRSILLRRLCSLMGTVFLLRCFTMFVTSLSVPGQHLQCTGKIYGSVWEKLHRAFAIWSGFGMTLTGVHTCGDYMFSGHTVVLTMLNFFVTEYTPRSWNFLHTLSWVLNLFGIFFILAAHEHYSIDVFIAFYITTRLFLYYHTLANTRAYQQSRRARIWFPMFSFFECNVNGTVPNEYCWPFSKPAIMKRLIG

SEQ ID NO: 19842 - protein, 1871 aa, Homo sapiens
MTTMLQKSDSNASFLRAARAGNLDKVVEYLKGGIDINTCNQNGLNALHLAAKEGHVGLVQELLGRGSSVDSATKKGNTALHIASLAGQAEVVKVLVKEGANINAQSQNGFTPLYMAAQENHIDVVKYLLENGANQSTATEDGFTPLAVALQQGHNQAVAILLENDTKGKVRLPALHIAARKDDTKSAALLLQNDHNADVQSKSGFTPLHIAAHYGNVNVATLLLNRGAAVDFTARNGITPLHVASKRGNTNMVKLLLDRGGQIDAKTRDGLTPLHCAARSGHDQVVELLLERGAPLLARTKNGLSPLHMAAQGDHVECVKHLLQHKAPVDDVTLDYLTALHVAAHCGHYRVTKLLLDKRANPNARALNGFTPLHIACKKNRIKVMELLVKYGASIQAITESGLTPIHVAAFMGHLNIVLLLLQNGASPDVTNIRGETALHMAARAGQVEVVRCLLRNGALVDARAREEQTPLHIASRLGKTEIVQLLLQHMAHPDAATTNGYTPLHISAREGQVDVASVLLEAGAAHSLATKKGFTPLHVAAKYGSLDVAKLLLQRRAAADSAGKNGLTPLHVAAHYDNQKVALLLLEKGASPHATAKNGYTPLHIAAKKNQMQIASTLLNYGAETNIVTKQGVTPLHLASQEGHTDMVTLLLDKGANIHMSTKSGLTSLHLAAQEDKVNVADILTKHGADQDAHTKLGYTPLIVACHYGNVKMVNFLLKQGANVNAKTKNGYTPLHQAAQQGHTHIINVLLQHGAKPNATTANGNTALAIAKRLGYISVVDTLKVVTEEVTTTTTTITEKHKLNVPETMTEVLDVSDEEGDDTMTGDGGEYLRPEDLKELGDDSLPSSQFLDGMNYLRYSLEGGRSDSLRSFSSDRSHTLSHASYLRDSAVMDDSVVIPSHQVSTLAKEAERNSYRLSWGTENLDNVALSSSPIHSGFLVSFMVDARGGAMRGCRHNGLRIIIPPRKCTAPTRVTCRLVKRHRLATMPPMVEGEGLASRLIEVGPSGAQFLGPVIVEIPHFAALRGKERELVVLRSENGDSWKEHFCDYTEDELNEILNGMDEVLDSPEDLEKKRICRIITRDFPQYFAVVSRIKQDSNLIGPEGGVLSSTVVPQVQAVFPEGALTKRIRVGLQAQPMHSELVKKILGNKATFSPIVTLEPRRRKFHKPITMTIPVPKASSDVMLNGFGGDAPTLRLLCSITGGTTPAQWEDITGTTPLTFVNECVSFTTNVSARFWLIDCRQIQESVTFASQVYREIICVPYMAKFVVFAKSHDPIEARLRCFCMTDDKVDKTLEQQENFAEVARSRDVEVLEGKPIYVDCFGNLVPLTKSGQHHIFSFFAFKENRLPLFVKVRDTTQEPCGRLSFMKEPKSTRGLVHQAICNLNITLPIYTKESESDQEQEEEIDMTSEKNPQDEQERIEERLAYIADHLGFSWTELARELDFTEEQIHQIRIENPNSLQDQSHALLKYWLERDGKHATDTNLVECLTKINRMDIVHLMETNTEPLQERISHSYAEIEQTITLDHSEGFSVLQEELCTAQHKQKEEQAVSKESETCDHPPIVSEEDISVGYSTFQDGVPKTEGDSSATALFPQTHKEQVQQDFSGKMQDLPEESSLEYQQEYFVTTPGTETSETQKAMIVPSSPSKTPEEVSTPAEEEKLYLQTPTSSERGGSPIIQEPEEPSEHREESSPRKTSLVIVESADNQPETCERLDEDAAFEKGDDMPEIPPETVTEEEYIDEHGHTVVKKVTRKIIRRYVSSEGTEKEEIMVQGMPQEPVNIEEGDGYSKVIKRVVLKSDTEQSEVTLCEPSILSSTSQFQAEPVEGRRVSKVVKTTVVLGERMEKHLGDSSLATDLPSAKDDFEEDNNE

SEQ ID NO: 19843 - protein, 590 aa, Homo sapiens
MEPLRAPALRRLLPPLLLLLLSLPPRARAKYVRGNLSSKEDWVFLTRFCFLSDYGRLDFRFRYPEAKCCQNILLYFDDPSQWPAVYKAGDKDCLAKESVIRPENNQVINLTTQYAWSGCQVVSEEGTRYLSCSSGRSFRSGDGLQLEYEMVLTNGKSFWTRHFSADEFGILETDVTFLLIFILIFFLSCYFGYLLKGRQLLHTTYKMFMAAAGVEVLSLLFFCIYWGQYATDGIGNESVKILAKLLFSSSFLIFLLMLILLGKGFTVTRGRISHAGSVKLSVYMTLYTLTHVVLLIYEAEFFDPGQVLYTYESPAGYGLIGLQVAAYVWFCYAVLVSLRHFPEKQPFYVPFFAAYTLWFFAVPVMALIANFGIPKWAREKIVNGIQLGIHLYAHGVFLIMTRPSAANKNFPYHVRTSQIASAGVPGPGGSQSADKAFPQHVYGNVTFISDSVPNFTELFSIPPPATSVSPAAPAPEELLAPPLEYLTPLPAPPPPPAPGPLSPPPAFRTPRAPTPRRDRPLAPAPTLPDWVLALLRTPPQTPCAVPPPPAFRGSPPAPRPPPEFAPRAPTPPFEYLAPLPRRPATQSFPD

SEQ ID NO: 19844 - protein, 899 aa, Homo sapiens
MEPVTKWSPKQVVDWTRGLDDCLQQYVHKFEREKINGEQLLQISHQDLEELGVTRIGHQELVLEAVDLLCALNYGLETDNMKNLVLKLRASSHNLQNYISSRRKSPAYDGNTSRKAPNEFLTSVVELIGAAKALLAWLDRAPFTGITDFSVTKNKIIQLCLDLTTTVQKDCFVAEMEDKVLTVVKVLNGICDKTIRSTTDPVMSQCACLEEVHLPNIKPGEGLGMYIKSTYDGLHVITGTTENSPADRSQKIHAGDEVIQVNQQTVVGWQLKNLVKKLRENPTGVVLLLKKRPTGSFNFTPAPLKNLRWKPPLVQTSPPPATTQSPESTMDTSLKKEKSAILDLYIPPPPAVPYSPRDENGSFVYGGSSKCKQPLPGPKGSESPNSFLDQESRRRRFTIADSDQLPGYSVETNILPTKMREKTPSYGKPRPLSMPADGNWMGIVDPFARPRGHGRKAFVSTKMTSYMAIDGSALVPLRQKPRRKTQGFLTMSRRRISCKDLGHADCQGWLYKKKEKGSFLSNKWKKFWVILKGSSLYWYSNQMAEKADGFVNLPDFTVERASECKKKHAFKISHPQIKTFYFAAENVQEMNVWLNKLGSAVIHQESTTKDEECYSESEQEDPEIAAETPPPPHASQTQSLTAQQASSSSPSLSGTSYSFSSLENTVKTPSSFPSSLSKERQSLPDTVNSLSAAEDEGQPITFAVQVHSPVPSEAGIHKALENSFVTSESGFLNSLSSDDTSSLSSNHDHLTVPDKPAGSKIMDKEETKVSEDDEMEKLYKSLEQASLSPLGDRRPSTKKELRKSFVKRCKNPSINEKLHKIRTLNSTLKCKEHDLAMINQLLDDPKLTARKYREWKVMNTLLIQDIYQQQRASPAPDDTDDTPQELKKSPSSPSVENSI

SEQ ID NO: 19845 - protein, 157 aa, Homo sapiens
MPELILSPATAPHPLKMFACSKFVSTPSLVKSTSQLLSRPLSAVVLKRPEILTDESLSSLAVSCPLTSLVSSRSFQTSAISRDIDTAAKFIGAGAATVGVAGSGAGIGTVFGSLIIGYARNPSLKQQLFSYAILGFALSEAMGLFCLMVAFLILFAM

SEQ ID NO: 19846 - protein, 3934 aa, Homo sapiens
MTTMLQKSDSNASFLRAARAGNLDKVVEYLKGGIDINTCNQNGLNALHLAAKEGHVGLVQELLGRGSSVDSATKKGNTALHIASLAGQAEVVKVLVKEGANINAQSQNGFTPLYMAAQENHIDVVKYLLENGANQSTATEDGFTPLAVALQQGHNQAVAILLENDTKGKVRLPALHIAARKDDTKSAALLLQNDHNADVQSKMMVNRTTESGFTPLHIAAHYGNVNVATLLLNRGAAVDFTARNGITPLHVASKRGNTNMVKLLLDRGGQIDAKTRDGLTPLHCAARSGHDQVVELLLERGAPLLARTKNGLSPLHMAAQGDHVECVKHLLQHKAPVDDVTLDYLTALHVAAHCGHYRVTKLLLDKRANPNARALNGFTPLHIACKKNRIKVMELLVKYGASIQAITESGLTPIHVAAFMGHLNIVLLLLQNGASPDVTNIRGETALHMAARAGQVEVVRCLLRNGALVDARAREEQTPLHIASRLGKTEIVQLLLQHMAHPDAATTNGYTPLHISAREGQVDVASVLLEAGAAHSLATKKGFTPLHVAAKYGSLDVAKLLLQRRAAADSAGKNGLTPLHVAAHYDNQKVALLLLEKGASPHATAKNGYTPLHIAAKKNQMQIASTLLNYGAETNIVTKQGVTPLHLASQEGHTDMVTLLLDKGANIHMSTKSGLTSLHLAAQEDKVNVADILTKHGADQDAHTKLGYTPLIVACHYGNVKMVNFLLKQGANVNAKTKNGYTPLHQAAQQGHTHIINVLLQHGAKPNATTANGNTALAIAKRLGYISVVDTLKVVTEEVTTTTTTITEKHKLNVPETMTEVLDVSDEEGDDTMTGDGGEYLRPEDLKELGDDSLPSSQFLDGMNYLRYSLEGGRSDSLRSFSSDRSHTLSHASYLRDSAVMDDSVVIPSHQVSTLAKEAERNSYRLSWGTENLDNVALSSSPIHSGFLVSFMVDARGGAMRGCRHNGLRIIIPPRKCTAPTRVTCRLVKRHRLATMPPMVEGEGLASRLIEVGPSGAQFLGPVIVEIPHFAALRGKERELVVLRSENGDSWKEHFCDYTEDELNEILNGMDEVLDSPEDLEKKRICRIITRDFPQYFAVVSRIKQDSNLIGPEGGVLSSTVVPQVQAVFPEGALTKRIRVGLQAQPMHSELVKKILGNKATFSPIVTLEPRRRKFHKPITMTIPVPKASSDVMLNGFGGDAPTLRLLCSITGGTTPAQWEDITGTTPLTFVNECVSFTTNVSARFWLIDCRQIQESVTFASQVYREIICVPYMAKFVVFAKSHDPIEARLRCFCMTDDKVDKTLEQQENFAEVARSRDVEVLEGKPIYVDCFGNLVPLTKSGQHHIFSFFAFKENRLPLFVKVRDTTQEPCGRLSFMKEPKSTRGLVHQAICNLNITLPIYTKESESDQEQEEEIDMTSEKNDETESTETSVLKSHLVNEVPVLASPDLLSEVSEMKQDLIKMTAILTTDVSDKAGSIKVKELVKAAEEEPGEPFEIVERVKEDLEKVNEILRSGTCTRDESSVQSSRSERGLVEEEWVIVSDEEIEEARQKAPLEITEYPCVEVRIDKEIKGKVEKDSTGLVNYLTDDLNTCVPLPKEQLQTVQDKAGKKCEALAVGRSSEKEGKDIPPDETQSTQKQHKPSLGIKKPVRRKLKEKQKQKEEGLQASAEKAELKKGSSEESLGEDPGLAPEPLPTVKATSPLIEETPIGSIKDKVKALQKRVEDEQKGRSKLPIRVKGKEDVPKKTTHRPHPAASPSLKSERHAPGSPSPKTERHSTLSSSAKTERHPPVSPSSKTEKHSPVSPSAKTERHSPASSSSKTEKHSPVSPSTKTERHSPVSSTKTERHPPVSPSGKTDKRPPVSPSGRTEKHPPVSPGRTEKRLPVSPSGRTDKHQPVSTAGKTEKHLPVSPSGKTEKQPPVSPTSKTERIEETMSVRELMKAFQSGQDPSKHKTGLFEHKSAKQKQPQEKGKVRVEKEKGPILTQREAQKTENQTIKRGQRLPVTGTAESKRGVRVSSIGVKKEDAAGGKEKVLSHKIPEPVQSVPEEESHRESEVPKEKMADEQGDMDLQISPDRKTSTDFSEVIKQELEDNDKYQQFRLSEETEKAQLHLDQVLTSPFNTTFPLDYMKDEFLPALSLQSGALDGSSESLKNEGVAGSPCGSLMEGTPQISSEESYKHEGLAETPETSPESLSFSPKKSEEQTGETKESTKTETTTEIRSEKEHPTTKDITGGSEERGATVTEDSETSTESFQKEATLGSPKDTSPKRQDDCTGSCSVALAKETPTGLTEEAACDEGQRTFGSSAHKTQTDSEVQESTATSDETKALPLPEASVKTDTGTESKPQGVIRSPQGLELALPSRDSEVLSAVADDSLAVSHKDSLEASPVLEDNSSHKTPDSLEPSPLKESPCRDSLESSPVEPKMKAGIFPSHFPLPAAVAKTELLTEVASVRSRLLRDPDGSAEDDSLEQTSLMESSGKSPLSPDTPSSEEVSYEVTPKTTDVSTPKPAVIHECAEEDDSENGEKKRFTPEEEMFKMVTKIKMFDELEQEAKQKRDYKKEPKQEESSSSSDPDADCSVDVDEPKHTGSGEDESGVPVLVTSESRKVSSSSESEPELAQLKKGADSGLLPEPVIRVQPPSPLPSSMDSNSSPEEVQFQPVVSKQYTFKMNEDTQEEPGKSEEEKDSESHLAEDRHAVSTEAEDRSYDKLNRDTDQPKICDGHGCEAMSPSSSAAPVSSGLQSPTGDDVDEQPVIYKESLALQGTHEKDTEGEELDVSRAESPQADCPSESFSSSSSLPHCLVSEGKELDEDISATSSIQKTEVTKTDETFENLPKDCPSQDSSITTQTDRFSMDVPVSDLAENDEIYDPQITSPYENVPSQSFFSSEESKTQTDANHTTSFHSSEVYSVTITSPVEDVVVASSSSGTVLSKESNFEGQDIKMESQQESTLWEMQSDSVSSSFEPTMSATTTVVGEQISKVIITKTDVDSDSWSEIREDDEAFEARVKEEEQKIFGLMVDRQSQGTTPDTTPARTPTEEGTPTSEQNPFLFQEGKLFEMTRSGAIDMTKRSYADESFHFFQIGQESREETLSEDVKEGATGADPLPLETSAESLALSESKETVDDEADLLPDDVSEEVEEIPASDAQLNSQMGISASTETPTKEAVSVGTKDLPTVQTGDIPPLSGVKQISCPDSSEPAVQVQLDFSTLTRSVYSDRGDDSPDSSPEEQKSVIEIPTAPMENVPFTESKSKIPVRTMPTSTPAPPSAEYESSVSEDFLSSVDEENKADEAKPKSKLPVKVPLQRVEQQLSDLDTSVQKTVAPQGQDMASIAPDNRSKSESDASSLDSKTKCPVKTRSYTETETESRERAEELELESEEGATRPKILTSRLPVKSRSTTSSCRGGTSPTKESKEHFFDLYRNSIEFFEEISDEASKLVDRLTQSEREQEIVSDDESSSALEVSVIENLPPVETEHSVPEDIFDTRPIWDESIETLIERIPDENGHDHAEDPQDEQERIEERLAYIADHLGFSWTELARELDFTEEQIHQIRIENPNSLQDQSHALLKYWLERDGKHATDTNLVECLTKINRMDIVHLMETNTEPLQERISHSYAEIEQTITLDHSEGFSVLQEELCTAQHKQKEEQAVSKESETCDHPPIVSEEDISVGYSTFQDGVPKTEGDSSATALFPQTHKEQVQQDFSGKMQDLPEESSLEYQQEYFVTTPGTETSETQKAMIVPSSPSKTPEEVSTPAEEEKLYLQTPTSSERGGSPIIQEPEEPSEHREESSPRKTSLVIVESADNQPETCERLDEDAAFEKELTEELGELEASSDEEAMVTTRVVRRRVIIQGDDMPEIPPETVTEEEYIDEHGHTVVKKVTRKIIRRYVSSEGTEKEEIMVQGMPQEPVNIEEGDGYSKVIKRVVLKSDTEQSEDNNE

SEQ ID NO: 19847 - protein, 518 aa, Homo sapiens
MLCASFLGLGLSVAIVGPTFQDLATNVNRNISSLSFIFVGRALGYLSGSVIGGFLVDVMNYFLLLGISMSATTVGLYLVPFCKTAILLTVMMSIFGVSIGILDTGGNVLILAIWGDKGAPHMQALHFSFALGAFLAPLLAKLALGPTASAENHTESDFHPALNQSSDADSEALFGVPNDKNLLWAYAVIGTYMFLVSVIFFCLFLKNSSKQEKARASAETFRRAKYHNALLCLLFLFFFFYVGAEVTYGSYVFSFATTHAGMKESEAAGLNSIFWGTFAACRGLAIFFATCLQPGTMIVLSNIGSLTSSLFLVLFDKNPICLWIATSVYGASMATTFPSGVSWIEQYTTIHGKSAAFFVIGASLGEMAIPAVIGILQGKYPDLPVVLYTSLGASIATGILFPVLYKLATSPLDRQRKEDRKSEDQKALLSSSGLNEYEEENEEEDAEKWNEMDFEMIETNDTMRHSIIETSRSSLTEPTAEVYNQYPSNALVFESSPFNTGSAHVKHLPETRTKGTNV

SEQ ID NO: 19848 - protein, 3848 aa, Homo sapiens
MTTMLQKSDSNASFLRAARAGNLDKVVEYLKGGIDINTCNQNGLNALHLAAKEGHVGLVQELLGRGSSVDSATKKGNTALHIASLAGQAEVVKVLVKEGANINAQSQNGFTPLYMAAQENHIDVVKYLLENGANQSTATEDGFTPLAVALQQGHNQAVAILLENDTKGKVRLPALHIAARKDDTKSAALLLQNDHNADVQSKMMVNRTTESGFTPLHIAAHYGNVNVATLLLNRGAAVDFTARNGITPLHVASKRGNTNMVKLLLDRGGQIDAKTRDGLTPLHCAARSGHDQVVELLLERGAPLLARTKNGLSPLHMAAQGDHVECVKHLLQHKAPVDDVTLDYLTALHVAAHCGHYRVTKLLLDKRANPNARALNGFTPLHIACKKNRIKVMELLVKYGASIQAITESGLTPIHVAAFMGHLNIVLLLLQNGASPDVTNIRGETALHMAARAGQVEVVRCLLRNGALVDARAREEQTPLHIASRLGKTEIVQLLLQHMAHPDAATTNGYTPLHISAREGQVDVASVLLEAGAAHSLATKKGFTPLHVAAKYGSLDVAKLLLQRRAAADSAGKNGLTPLHVAAHYDNQKVALLLLEKGASPHATAKNGYTPLHIAAKKNQMQIASTLLNYGAETNIVTKQGVTPLHLASQEGHTDMVTLLLDKGANIHMSTKSGLTSLHLAAQEDKVNVADILTKHGADQDAHTKLGYTPLIVACHYGNVKMVNFLLKQGANVNAKTKNGYTPLHQAAQQGHTHIINVLLQHGAKPNATTANGNTALAIAKRLGYISVVDTLKVVTEEVTTTTTTITEKHKLNVPETMTEVLDVSDEEGDDTMTGDGGEYLRPEDLKELGDDSLPSSQFLDGMNYLRYSLEGGRSDSLRSFSSDRSHTLSHASYLRDSAVMDDSVVIPSHQVSTLAKEAERNSYRLSWGTENLDNVALSSSPIHSGFLVSFMVDARGGAMRGCRHNGLRIIIPPRKCTAPTRVTCRLVKRHRLATMPPMVEGEGLASRLIEVGPSGAQFLGPVIVEIPHFAALRGKERELVVLRSENGDSWKEHFCDYTEDELNEILNGMDEVLDSPEDLEKKRICRIITRDFPQYFAVVSRIKQDSNLIGPEGGVLSSTVVPQVQAVFPEGALTKRIRVGLQAQPMHSELVKKILGNKATFSPIVTLEPRRRKFHKPITMTIPVPKASSDVMLNGFGGDAPTLRLLCSITGGTTPAQWEDITGTTPLTFVNECVSFTTNVSARFWLIDCRQIQESVTFASQVYREIICVPYMAKFVVFAKSHDPIEARLRCFCMTDDKVDKTLEQQENFAEVARSRDVEVLEGKPIYVDCFGNLVPLTKSGQHHIFSFFAFKENRLPLFVKVRDTTQEPCGRLSFMKEPKSTRGLVHQAICNLNITLPIYTKESESDQEQEEEIDMTSEKNDETESTETSVLKSHLVNEVPVLASPDLLSEVSEMKQDLIKMTAILTTDVSDKAGSIKVKELVKAAEEEPGEPFEIVERVKEDLEKVNEILRSGTCTRDESSVQSSRSERGLVEEEWVIVSDEEIEEARQKAPLEITEYPCVEVRIDKEIKGKVEKDSTGLVNYLTDDLNTCVPLPKEQLQTVQDKAGKKCEALAVGRSSEKEGKDIPPDETQSTQKQHKPSLGIKKPVRRKLKEKQKQKEEGLQASAEKAELKKGSSEESLGEDPGLAPEPLPTVKATSPLIEETPIGSIKDKVKALQKRVEDEQKGRSKLPIRVKGKEDVPKKTTHRPHPAASPSLKSERHAPGSPSPKTERHSTLSSSAKTERHPPVSPSSKTEKHSPVSPSAKTERHSPASSSSKTEKHSPVSPSTKTERHSPVSSTKTERHPPVSPSGKTDKRPPVSPSGRTEKHPPVSPGRTEKRLPVSPSGRTDKHQPVSTAGKTEKHLPVSPSGKTEKQPPVSPTSKTERIEETMSVRELMKAFQSGQDPSKHKTGLFEHKSAKQKQPQEKGKVRVEKEKGPILTQREAQKTENQTIKRGQRLPVTGTAESKRGVRVSSIGVKKEDAAGGKEKVLSHKIPEPVQSVPEEESHRESEVPKEKMADEQGDMDLQISPDRKTSTDFSEVIKQELEDNDKYQQFRLSEETEKAQLHLDQVLTSPFNTTFPLDYMKDEFLPALSLQSGALDGSSESLKNEGVAGSPCGSLMEGTPQISSEESYKHEGLAETPETSPESLSFSPKKSEEQTGETKESTKTETTTEIRSEKEHPTTKDITGGSEERGATVTEDSETSTESFQKEATLGSPKDTSPKRQDDCTGSCSVALAKETPTGLTEEAACDEGQRTFGSSAHKTQTDSEVQESTATSDETKALPLPEASVKTDTGTESKPQGVIRSPQGLELALPSRDSEVLSAVADDSLAVSHKDSLEASPVLEDNSSHKTPDSLEPSPLKESPCRDSLESSPVEPKMKAGIFPSHFPLPAAVAKTELLTEVASVRSRLLRDPDGSAEDDSLEQTSLMESSGKSPLSPDTPSSEEVSYEVTPKTTDVSTPKPAVIHECAEEDDSENGEKKRFTPEEEMFKMVTKIKMFDELEQEAKQKRDYKKEPKQEESSSSSDPDADCSVDVDEPKHTGSGEDESGVPVLVTSESRKVSSSSESEPELAQLKKGADSGLLPEPVIRVQPPSPLPSSMDSNSSPEEVQFQPVVSKQYTFKMNEDTQEEPGKSEEEKDSESHLAEDRHAVSTEAEDRSYDKLNRDTDQPKICDGHGCEAMSPSSSAAPVSSGLQSPTGDDVDEQPVIYKESLALQGTHEKDTEGEELDVSRAESPQADCPSESFSSSSSLPHCLVSEGKELDEDISATSSIQKTEVTKTDETFENLPKDCPSQDSSITTQTDRFSMDVPVSDLAENDEIYDPQITSPYENVPSQSFFSSEESKTQTDANHTTSFHSSEVYSVTITSPVEDVVVASSSSGTVLSKESNFEGQDIKMESQQESTLWEMQSDSVSSSFEPTMSATTTVVGEQISKVIITKTDVDSDSWSEIREDDEAFEARVKEEEQKIFGLMVDRQSQGTTPDTTPARTPTEEGTPTSEQNPFLFQEGKLFEMTRSGAIDMTKRSYADESFHFFQIGQESREETLSEDVKEGATGADPLPLETSAESLALSESKETVDDEADLLPDDVSEEVEEIPASDAQLNSQMGISASTETPTKEAVSVGTKDLPTVQTGDIPPLSGVKQISCPDSSEPAVQVQLDFSTLTRSVYSDRGDDSPDSSPEEQKSVIEIPTAPMENVPFTESKSKIPVRTMPTSTPAPPSAEYESSVSEDFLSSVDEENKADEAKPKSKLPVKVPLQRVEQQLSDLDTSVQKTVAPQGQDMASIAPDNRSKSESDASSLDSKTKCPVKTRSYTETETESRERAEELELESEEGATRPKILTSRLPVKSRSTTSSCRGGTSPTKESKEHFFDLYRNSIEFFEEISDEASKLVDRLTQSEREQEIVSDDESSSALEVSVIENLPPVETEHSVPEDIFDTRPIWDESIETLIERIPDENGHDHAEDPQDEQERIEERLAYIADHLGFSWTELARELDFTEEQIHQIRIENPNSLQDQSHALLKYWLERDGKHATDTNLVECLTKINRMDIVHLMETNTEPLQERISHSYAEIEQTITLDHSEGFSVLQEELCTAQHKQKEEQAVSKESETCDHPPIVSEEDISVGYSTFQDGVPKTEGDSSATALFPQTHKEQVQQDFSGKMQDLPEESSLEYQQEYFVTTPGTETSETQKAMIVPSSPSKTPEEVSTPAEEEKLYLQTPTSSERGGSPIIQEPEEPSEHREESSPRKTSLVIVESADNQPETCERLDEDAAFEKGDDMPEIPPETVTEEEYIDEHGHTVVKKDNNE

SEQ ID NO: 19849 - protein, 239 aa, Homo sapiens
MAPSVPAAEPEYPKGIRAVLLGPPGAGKGTQAPRLAENFCVCHLATGDMLRAMVASGSELGKKLKATMDAGKLVSDEMVVELIEKNLETPLCKNGFLLDGFPRTVRQAEMLDDLMEKRKEKLDSVIEFSIPDSLLIRRITGRLIHPKSGRSYHEEFNPPKEPMKDDITGEPLIRRSDDNEKALKIRLQAYHTQTTPLIEYYRKRGIHSAIDASQTPDVVFASILAAFSKATCKDLVMFI

SEQ ID NO: 19850 - protein, 174 aa, Homo sapiens
MSVSARSAAAEERSVNSSTMVAQQKNLEGYVGFANLPNQVYRKSVKRGFEFTLMVVGESGLGKSTLINSLFLTDLYSPEYPGPSHRIKKTVQVEQSKVLIKEGGVQLLLTIVDTPGFGDAVDNSNCWQPVIDYIDSKFEDYLNAESRVNRRQMPDNRVQCCLYFIAPSGHGSVP

SEQ ID NO: 19851 - protein, 3895 aa, Homo sapiens
MTTMLQKSDSNASFLRAARAGNLDKVVEYLKGGIDINTCNQNGLNALHLAAKEGHVGLVQELLGRGSSVDSATKKGNTALHIASLAGQAEVVKVLVKEGANINAQSQNGFTPLYMAAQENHIDVVKYLLENGANQSTATEDGFTPLAVALQQGHNQAVAILLENDTKGKVRLPALHIAARKDDTKSAALLLQNDHNADVQSKSGFTPLHIAAHYGNVNVATLLLNRGAAVDFTARNGITPLHVASKRGNTNMVKLLLDRGGQIDAKTRDGLTPLHCAARSGHDQVVELLLERGAPLLARTKNGLSPLHMAAQGDHVECVKHLLQHKAPVDDVTLDYLTALHVAAHCGHYRVTKLLLDKRANPNARALNGFTPLHIACKKNRIKVMELLVKYGASIQAITESGLTPIHVAAFMGHLNIVLLLLQNGASPDVTNIRGETALHMAARAGQVEVVRCLLRNGALVDARAREEQTPLHIASRLGKTEIVQLLLQHMAHPDAATTNGYTPLHISAREGQVDVASVLLEAGAAHSLATKKGFTPLHVAAKYGSLDVAKLLLQRRAAADSAGKNGLTPLHVAAHYDNQKVALLLLEKGASPHATAKNGYTPLHIAAKKNQMQIASTLLNYGAETNIVTKQGVTPLHLASQEGHTDMVTLLLDKGANIHMSTKSGLTSLHLAAQEDKVNVADILTKHGADQDAHTKLGYTPLIVACHYGNVKMVNFLLKQGANVNAKTKNGYTPLHQAAQQGHTHIINVLLQHGAKPNATTANGNTALAIAKRLGYISVVDTLKVVTEEVTTTTTTITEKHKLNVPETMTEVLDVSDEEGDDTMTGDGGEYLRPEDLKELGDDSLPSSQFLDGMNYLRYSLEGGRSDSLRSFSSDRSHTLSHASYLRDSAVMDDSVVIPSHQVSTLAKEAERNSYRLSWGTENLDNVALSSSPIHSGFLVSFMVDARGGAMRGCRHNGLRIIIPPRKCTAPTRVTCRLVKRHRLATMPPMVEGEGLASRLIEVGPSGAQFLGPVIVEIPHFAALRGKERELVVLRSENGDSWKEHFCDYTEDELNEILNGMDEVLDSPEDLEKKRICRIITRDFPQYFAVVSRIKQDSNLIGPEGGVLSSTVVPQVQAVFPEGALTKRIRVGLQAQPMHSELVKKILGNKATFSPIVTLEPRRRKFHKPITMTIPVPKASSDVMLNGFGGDAPTLRLLCSITGGTTPAQWEDITGTTPLTFVNECVSFTTNVSARFWLIDCRQIQESVTFASQVYREIICVPYMAKFVVFAKSHDPIEARLRCFCMTDDKVDKTLEQQENFAEVARSRDVEVLEGKPIYVDCFGNLVPLTKSGQHHIFSFFAFKENRLPLFVKVRDTTQEPCGRLSFMKEPKSTRGLVHQAICNLNITLPIYTKESESDQEQEEEIDMTSEKNDETESTETSVLKSHLVNEVPVLASPDLLSEVSEMKQDLIKMTAILTTDVSDKAGSIKVKELVKAAEEEPGEPFEIVERVKEDLEKVNEILRSGTCTRDESSVQSSRSERGLVEEEWVIVSDEEIEEARQKAPLEITEYPCVEVRIDKEIKGKVEKDSTGLVNYLTDDLNTCVPLPKEQLQTVQDKAGKKCEALAVGRSSEKEGKDIPPDETQSTQKQHKPSLGIKKPVRRKLKEKQKQKEEGLQASAEKAELKKGSSEESLGEDPGLAPEPLPTVKATSPLIEETPIGSIKDKVKALQKRVEDEQKGRSKLPIRVKGKEDVPKKTTHRPHPAASPSLKSERHAPGSPSPKTERHSTLSSSAKTERHPPVSPSSKTEKHSPVSPSAKTERHSPASSSSKTEKHSPVSPSTKTERHSPVSSTKTERHPPVSPSGKTDKRPPVSPSGRTEKHPPVSPGRTEKRLPVSPSGRTDKHQPVSTAGKTEKHLPVSPSGKTEKQPPVSPTSKTERIEETMSVRELMKAFQSGQDPSKHKTGLFEHKSAKQKQPQEKGKVRVEKEKGPILTQREAQKTENQTIKRGQRLPVTGTAESKRGVRVSSIGVKKEDAAGGKEKVLSHKIPEPVQSVPEEESHRESEVPKEKMADEQGDMDLQISPDRKTSTDFSEVIKQELEDNDKYQQFRLSEETEKAQLHLDQVLTSPFNTTFPLDYMKDEFLPALSLQSGALDGSSESLKNEGVAGSPCGSLMEGTPQISSEESYKHEGLAETPETSPESLSFSPKKSEEQTGETKESTKTETTTEIRSEKEHPTTKDITGGSEERGATVTEDSETSTESFQKEATLGSPKDTSPKRQDDCTGSCSVALAKETPTGLTEEAACDEGQRTFGSSAHKTQTDSEVQESTATSDETKALPLPEASVKTDTGTESKPQGVIRSPQGLELALPSRDSEVLSAVADDSLAVSHKDSLEASPVLEDNSSHKTPDSLEPSPLKESPCRDSLESSPVEPKMKAGIFPSHFPLPAAVAKTELLTEVASVRSRLLRDPDGSAEDDSLEQTSLMESSGKSPLSPDTPSSEEVSYEVTPKTTDVSTPKPAVIHECAEEDDSENGEKKRFTPEEEMFKMVTKIKMFDELEQEAKQKRDYKKEPKQEESSSSSDPDADCSVDVDEPKHTGSGEDESGVPVLVTSESRKVSSSSESEPELAQLKKGADSGLLPEPVIRVQPPSPLPSSMDSNSSPEEVQFQPVVSKQYTFKMNEDTQEEPGKSEEEKDSESHLAEDRHAVSTEAEDRSYDKLNRDTDQPKICDGHGCEAMSPSSSAAPVSSGLQSPTGDDVDEQPVIYKESLALQGTHEKDTEGEELDVSRAESPQADCPSESFSSSSSLPHCLVSEGKELDEDISATSSIQKTEVTKTDETFENLPKDCPSQDSSITTQTDRFSMDVPVSDLAENDEIYDPQITSPYENVPSQSFFSSEESKTQTDANHTTSFHSSEVYSVTITSPVEDVVVASSSSGTVLSKESNFEGQDIKMESQQESTLWEMQSDSVSSSFEPTMSATTTVVGEQISKVIITKTDVDSDSWSEIREDDEAFEARVKEEEQKIFGLMVDRQSQGTTPDTTPARTPTEEGTPTSEQNPFLFQEGKLFEMTRSGAIDMTKRSYADESFHFFQIGQESREETLSEDVKEGATGADPLPLETSAESLALSESKETVDDEADLLPDDVSEEVEEIPASDAQLNSQMGISASTETPTKEAVSVGTKDLPTVQTGDIPPLSGVKQISCPDSSEPAVQVQLDFSTLTRSVYSDRGDDSPDSSPEEQKSVIEIPTAPMENVPFTESKSKIPVRTMPTSTPAPPSAEYESSVSEDFLSSVDEENKADEAKPKSKLPVKVPLQRVEQQLSDLDTSVQKTVAPQGQDMASIAPDNRSKSESDASSLDSKTKCPVKTRSYTETETESRERAEELELESEEGATRPKILTSRLPVKSRSTTSSCRGGTSPTKESKEHFFDLYRNSIEFFEEISDEASKLVDRLTQSEREQEIVSDDESSSALEVSVIENLPPVETEHSVPEDIFDTRPIWDESIETLIERIPDENGHDHAEDPQDEQERIEERLAYIADHLGFSWTELARELDFTEEQIHQIRIENPNSLQDQSHALLKYWLERDGKHATDTNLVECLTKINRMDIVHLMETNTEPLQERISHSYAEIEQTITLDHSEGFSVLQEELCTAQHKQKEEQAVSKESETCDHPPIVSEEDISVGYSTFQDGVPKTEGDSSATALFPQTHKEQVQQDFSGKMQDLPEESSLEYQQEYFVTTPGTETSETQKAMIVPSSPSKTPEEVSTPAEEEKLYLQTPTSSERGGSPIIQEPEEPSEHREESSPRKTSLVIVESADNQPETCERLDEDAAFEKGDDMPEIPPETVTEEEYIDEHGHTVVKKVTRKIIRRYVSSEGTEKEEIMVQGMPQEPVNIEEGDGYSKVIKRVVLKSDTEQSEDNNE

SEQ ID NO: 19852 - protein, 3995 aa, Homo sapiens
MTTMLQKSDSNASFLRAARAGNLDKVVEYLKGGIDINTCNQNGLNALHLAAKEGHVGLVQELLGRGSSVDSATKKGNTALHIASLAGQAEVVKVLVKEGANINAQSQNGFTPLYMAAQENHIDVVKYLLENGANQSTATEDGFTPLAVALQQGHNQAVAILLENDTKGKVRLPALHIAARKDDTKSAALLLQNDHNADVQSKMMVNRTTESGFTPLHIAAHYGNVNVATLLLNRGAAVDFTARNGITPLHVASKRGNTNMVKLLLDRGGQIDAKTRDGLTPLHCAARSGHDQVVELLLERGAPLLARTKNGLSPLHMAAQGDHVECVKHLLQHKAPVDDVTLDYLTALHVAAHCGHYRVTKLLLDKRANPNARALNGFTPLHIACKKNRIKVMELLVKYGASIQAITESGLTPIHVAAFMGHLNIVLLLLQNGASPDVTNIRGETALHMAARAGQVEVVRCLLRNGALVDARAREEQTPLHIASRLGKTEIVQLLLQHMAHPDAATTNGYTPLHISAREGQVDVASVLLEAGAAHSLATKKGFTPLHVAAKYGSLDVAKLLLQRRAAADSAGKNGLTPLHVAAHYDNQKVALLLLEKGASPHATAKNGYTPLHIAAKKNQMQIASTLLNYGAETNIVTKQGVTPLHLASQEGHTDMVTLLLDKGANIHMSTKSGLTSLHLAAQEDKVNVADILTKHGADQDAHTKLGYTPLIVACHYGNVKMVNFLLKQGANVNAKTKNGYTPLHQAAQQGHTHIINVLLQHGAKPNATTANGNTALAIAKRLGYISVVDTLKVVTEEVTTTTTTITEKHKLNVPETMTEVLDVSDEEGDDTMTGDGGEYLRPEDLKELGDDSLPSSQFLDGMNYLRYSLEGGRSDSLRSFSSDRSHTLSHASYLRDSAVMDDSVVIPSHQVSTLAKEAERNSYRLSWGTENLDNVALSSSPIHSGFLVSFMVDARGGAMRGCRHNGLRIIIPPRKCTAPTRVTCRLVKRHRLATMPPMVEGEGLASRLIEVGPSGAQFLGPVIVEIPHFAALRGKERELVVLRSENGDSWKEHFCDYTEDELNEILNGMDEVLDSPEDLEKKRICRIITRDFPQYFAVVSRIKQDSNLIGPEGGVLSSTVVPQVQAVFPEGALTKRIRVGLQAQPMHSELVKKILGNKATFSPIVTLEPRRRKFHKPITMTIPVPKASSDVMLNGFGGDAPTLRLLCSITGGTTPAQWEDITGTTPLTFVNECVSFTTNVSARFWLIDCRQIQESVTFASQVYREIICVPYMAKFVVFAKSHDPIEARLRCFCMTDDKVDKTLEQQENFAEVARSRDVEVLEGKPIYVDCFGNLVPLTKSGQHHIFSFFAFKENRLPLFVKVRDTTQEPCGRLSFMKEPKSTRGLVHQAICNLNITLPIYTKESESDQEQEEEIDMTSEKNDETESTETSVLKSHLVNEVPVLASPDLLSEVSEMKQDLIKMTAILTTDVSDKAGSIKVKELVKAAEEEPGEPFEIVERVKEDLEKVNEILRSGTCTRDESSVQSSRSERGLVEEEWVIVSDEEIEEARQKAPLEITEYPCVEVRIDKEIKGKVEKDSTGLVNYLTDDLNTCVPLPKEQLQTVQDKAGKKCEALAVGRSSEKEGKDIPPDETQSTQKQHKPSLGIKKPVRRKLKEKQKQKEEGLQASAEKAELKKGSSEESLGEDPGLAPEPLPTVKATSPLIEETPIGSIKDKVKALQKRVEDEQKGRSKLPIRVKGKEDVPKKTTHRPHPAASPSLKSERHAPGSPSPKTERHSTLSSSAKTERHPPVSPSSKTEKHSPVSPSAKTERHSPASSSSKTEKHSPVSPSTKTERHSPVSSTKTERHPPVSPSGKTDKRPPVSPSGRTEKHPPVSPGRTEKRLPVSPSGRTDKHQPVSTAGKTEKHLPVSPSGKTEKQPPVSPTSKTERIEETMSVRELMKAFQSGQDPSKHKTGLFEHKSAKQKQPQEKGKVRVEKEKGPILTQREAQKTENQTIKRGQRLPVTGTAESKRGVRVSSIGVKKEDAAGGKEKVLSHKIPEPVQSVPEEESHRESEVPKEKMADEQGDMDLQISPDRKTSTDFSEVIKQELEDNDKYQQFRLSEETEKAQLHLDQVLTSPFNTTFPLDYMKDEFLPALSLQSGALDGSSESLKNEGVAGSPCGSLMEGTPQISSEESYKHEGLAETPETSPESLSFSPKKSEEQTGETKESTKTETTTEIRSEKEHPTTKDITGGSEERGATVTEDSETSTESFQKEATLGSPKDTSPKRQDDCTGSCSVALAKETPTGLTEEAACDEGQRTFGSSAHKTQTDSEVQESTATSDETKALPLPEASVKTDTGTESKPQGVIRSPQGLELALPSRDSEVLSAVADDSLAVSHKDSLEASPVLEDNSSHKTPDSLEPSPLKESPCRDSLESSPVEPKMKAGIFPSHFPLPAAVAKTELLTEVASVRSRLLRDPDGSAEDDSLEQTSLMESSGKSPLSPDTPSSEEVSYEVTPKTTDVSTPKPAVIHECAEEDDSENGEKKRFTPEEEMFKMVTKIKMFDELEQEAKQKRDYKKEPKQEESSSSSDPDADCSVDVDEPKHTGSGEDESGVPVLVTSESRKVSSSSESEPELAQLKKGADSGLLPEPVIRVQPPSPLPSSMDSNSSPEEVQFQPVVSKQYTFKMNEDTQEEPGKSEEEKDSESHLAEDRHAVSTEAEDRSYDKLNRDTDQPKICDGHGCEAMSPSSSAAPVSSGLQSPTGDDVDEQPVIYKESLALQGTHEKDTEGEELDVSRAESPQADCPSESFSSSSSLPHCLVSEGKELDEDISATSSIQKTEVTKTDETFENLPKDCPSQDSSITTQTDRFSMDVPVSDLAENDEIYDPQITSPYENVPSQSFFSSEESKTQTDANHTTSFHSSEVYSVTITSPVEDVVVASSSSGTVLSKESNFEGQDIKMESQQESTLWEMQSDSVSSSFEPTMSATTTVVGEQISKVIITKTDVDSDSWSEIREDDEAFEARVKEEEQKIFGLMVDRQSQGTTPDTTPARTPTEEGTPTSEQNPFLFQEGKLFEMTRSGAIDMTKRSYADESFHFFQIGQESREETLSEDVKEGATGADPLPLETSAESLALSESKETVDDEADLLPDDVSEEVEEIPASDAQLNSQMGISASTETPTKEAVSVGTKDLPTVQTGDIPPLSGVKQISCPDSSEPAVQVQLDFSTLTRSVYSDRGDDSPDSSPEEQKSVIEIPTAPMENVPFTESKSKIPVRTMPTSTPAPPSAEYESSVSEDFLSSVDEENKADEAKPKSKLPVKVPLQRVEQQLSDLDTSVQKTVAPQGQDMASIAPDNRSKSESDASSLDSKTKCPVKTRSYTETETESRERAEELELESEEGATRPKILTSRLPVKSRSTTSSCRGGTSPTKESKEHFFDLYRNSIEFFEEISDEASKLVDRLTQSEREQEIVSDDESSSALEVSVIENLPPVETEHSVPEDIFDTRPIWDESIETLIERIPDENGHDHAEDPQDEQERIEERLAYIADHLGFSWTELARELDFTEEQIHQIRIENPNSLQDQSHALLKYWLERDGKHATDTNLVECLTKINRMDIVHLMETNTEPLQERISHSYAEIEQTITLDHSEGFSVLQEELCTAQHKQKEEQAVSKESETCDHPPIVSEEDISVGYSTFQDGVPKTEGDSSATALFPQTHKEQVQQDFSGKMQDLPEESSLEYQQEYFVTTPGTETSETQKAMIVPSSPSKTPEEVSTPAEEEKLYLQTPTSSERGGSPIIQEPEEPSEHREESSPRKTSLVIVESADNQPETCERLDEDAAFEKELTEELGELEASSDEEAMVTTRVVRRRVIIQGDDMPEIPPETVTEEEYIDEHGHTVVKKVTRKIIRRYVSSEGTEKEEIMVQGMPQEPVNIEEGDGYSKVIKRVVLKSDTEQSEVTLCEPSILSSTSQFQAEPVEGRRVSKVVKTTVVLGERMEKHLGDSSLATDLPSAKDDFEEDNNE

SEQ ID NO: 19853 - protein, 160 aa, Homo sapiens
MAGKRSGWSRAALLQLLLGVNLVVMPPTRARSLRFVTLLYRHGDRSPVKTYPKDPYQEEEWPQGFGQLTKEGMLQHWELGQALRQRYHGFLNTSYHRQEVYVRSTDFDRTLMSAEANLAGLFPPNGMQRFNPNISWQPIPVHTVPITEDRSRTETLIHFS

SEQ ID NO: 19854 - protein, 1223 aa, Homo sapiens
MDTLRAVPLFSISGLFSFPYRVSHGIAGILLGEMAVCAKKRPPEEERRARANDREYNEKFQYASNCIKTSKYNILTFLPVNLFEQFQEVANTYFLFLLILQLIPQISSLSWFTTIVPLVLVLTITAVKDATDDYFRHKSDNQVNNRQSQVLINGILQQEQWMNVCVGDIIKLENNQFVAADLLLLSSSEPHGLCYIETAELDGETNMKVRQAIPVTSELGDISKLAKFDGEVICEPPNNKLDKFSGTLYWKENKFPLSNQNMLLRGCVLRNTEWCFGLVIFAGPDTKLMQNSGRTKFKRTSIDRLMNTLVLWIFGFLVCMGVILAIGNAIWEHEVGMRFQVYLPWDEAVDSAFFSGFLSFWSYIIILNTVVPISLYVSVEVIRLGHSYFINWDKKMFCMKKRTPAEARTTTLNEELGQVEYIFSDKTGTLTQNIMVFNKCSINGHSYGDVFDVLGHKAELGERPEPVDFSFNPLADKKFLFWDPSLLEAVKIGDPHTHEFFRLLSLCHTVMSEEKNEGELYYKAQSPDEGALVTAARNFGFVFRSRTPKTITVHEMGTAITYQLLAILDFNNIRKRMSVIVRNPEGKIRLYCKGADTILLDRLHHSTQELLNTTMDHLNEYAGEGLRTLVLAYKDLDEEYYEEWAERRLQASLAQDSREDRLASIYEEVENNMMLLGATAIEDKLQQGVPETIALLTLANIKIWVLTGDKQETAVNIGYSCKMLTDDMTEVFIVTGHTVLEVREELRKAREKMMDSSRSVGNGFTYQDKLSSSKLTSVLEAVAGEYALVINGHSLAHALEADMELEFLETACACKAVICCRVTPLQKAQVVELVKKYKKAVTLAIGDGANDVSMIKTAHIGVGISGQEGIQAVLASDYSFSQFKFLQRLLLVHGRWSYLRMCKFLCYFFYKNFAFTMVHFWFGFFCGFSAQTVYDQYFITLYNIVYTSLPVLAMGVFDQDVPEQRSMEYPKLYEPGQLNLLFNKREFFICIAQGIYTSVLMFFIPYGVFADATRDDGTQLADYQSFAVTVATSLVIVVSVQIGLDTGYWTAINHFFIWGSLAVYFAILFAMHSNGLFDMFPNQFRFVGNAQNTLAQPTVWLTIVLTTVVCIMPVVAFRFLRLNLKPDLSDTVRYTQLVRKKQKAQHRCMRRVGRTGSRRSGYAFSHQEGFGELIMSGKNMRLSSLALSSFTTRSSSSWIESLRRKKSDSASSPSGGADKPLKG

SEQ ID NO: 19855 - protein, 563 aa, Homo sapiens
MEPLRAPALRRLLPPLLLLLLSLPPRARAKYVRGNLSSKEDWVFLTRFCFLSDYGRLDFRFRYPEAKCCQNILLYFDDPSQWPAVYKAGDKDCLAKESVIRPENNQVINLTTQYAWSGCQVVSEEGTRYLSCSSGRSFRSVRERWWYIALSKCGGDGLQLEYEMVLTNGKSFWTRHFSADEFGILETDVTFLLIFILIFFLSCYFGYLLKGRQLLHTTYKMFMAAAGVEVLSLLFFCIYWGQYATDGIGNESVKILAKLLFSSSFLIFLLMLILLGKGFTVTRGRISHAGSVKLSVYMTLYTLTHVVLLIYEAEFFDPGQVLYTYESPAGYGLIGLQVAAYVWFCYAVLVSLRHFPEKQPFYVPFFAAYTLWFFAVPVMALIANFGIPKWAREKIVNGIQLGIHLYAHGVFLIMTRPSAANKNFPYHVRTSQIASAGVPGPGGSQSADKAFPQHVYGNVTFISDSVPNFTELFSIPPPATSAGKQVEETAVAAAVAPRGRVVTMAEPGAASPPLPARFPKAADSGWDGPTPPYQPLVPQTAAPHTGFTEYFSMHTAGGTAPPV

SEQ ID NO: 19856 - protein, 317 aa, Homo sapiens
MEVLRPQLIRIDGRNYRKNPVQEQTYQHEEDEEDFYQGSMECADEPCDAYEVEQTPQGFRSTLRAPSLLYKHIVGKRGDTRKKIEMETKTSISIPKPGQDGEIVITGQHRNGVISARTRIDVLLDTFRRKQPFTHFLAFFLNEVEVQEGFLRFQEEVLAKCSMDHGVDSSIFQNPKKLHLTIGMLVLLSEEEIQQTCEMLQQCKEEFIKLQELVDRVLERFQASGLIVKEWNSVKLHATVMNTLFRKDPNAEGRYNLYTAEGKYIFKERESFDGRNILKLFENFYFGSLKLNSIHISQRFTVDSFGNYASCGQIDFS

SEQ ID NO: 19857 - protein, 364 aa, Homo sapiens
MSGARSKLALFLCGCYVVALGAHTGEESVADHHEAEYYVAAVYEHPSILSLNPLALISRQEALELMNQNLDIYEQQVMTAAQKDVQIIVFPEDGIHGFNFTRTSIYPFLDFMPSPQVVRWNPCLEPHRFNDTEVLQRLSCMAIRGDMFLVANLGTKEPCHSSDPRCPKDGRYQFNTNVVFSNNGTLVDRYRKHNLYFEAAFDVPLKVDLITFDTPFAGRFGIFTCFDILFFDPAIRVLRDYKVKHVVYPTAWMNQLPLLAAIEIQKAFAVAFGINVLAANVHHPVLGMTGSGIHTPLESFWYHDMENPKSHLIIAQVAKNPVGLIGAENATGETDPSHRSHSVAQTGVEWHDLSSPKPLPPRLK

SEQ ID NO: 19858 - protein, 842 aa, Homo sapiens
MGYLRIFSPHPAKTGDGAQAEDLLLEVDLRDPVLQVEVGKFVSGTEMLHLAVLHSRKLCVYSVSGTLGNVEHGNQCQMKLMYEHNLQRTACNMTYGSFGGVKGRDLICIQSMDGMLMVFEQESYAFGRFLPGFLLPGPLAYSSRTDSFLTVSSCQQVESYKYQVLAFATDADKRQETEQQKLGSGKRLVVDWTLNIGEQALDICIVSFNQSASSVFVLGERNFFCLKDNGQIRFMKKLDWSPSCFLPYCSVSEGTINTLIGNHNNMLHIYQDVTLKWATQLPHIPVAVRVGCLHDLKGVIVTLSDDGHLQCSYLGTDPSLFQAPNVQSRELNYDELDVEMKELQKIIKDVNKSQGVWPMTEREDDLNVSVVVSPNFDSVSQATDVEVGTDLVPSVTVKVTLQNRVILQKAKLSVYVQPPLELTCDQFTFEFMTPDLTRTVSFSVYLKRSYTPSELEGNAVVSYSRPTDRNPDGIPRVIQCKFRLPLKLICLPGQPSKTASHKITIDTNKSPVSLLSLFPGFASQSDDDQVNVMGFHFLGGARITVLASKTSQRYRIQSEQFEDLWLITNELILRLQEYFEKQGVKDFACSFSGSIPLQEYFELIDHHFELRINGEKLEELLSERAVQFRAIQRRLLARFKDKTPAPLQHLDTLLDGTYKQVIALADAVEENQGNLFQSFTRLKSATHLVILLIALWQKLSADQVAILEAAFLPLQEDTQELGWEETVDAAISHLLKTCLSKSSKEQALNLNSQLNIPKDTSQLKKHITLLCDRLSKGGRLCLSTDAAAPQTMVMPGGCTTIPESDLEERSVEQDSTELFTNHRHLTAETPRPEVSPLQGVSE

SEQ ID NO: 19859 - protein, 1849 aa, Homo sapiens
MTTMLQKSDSNASFLRAARAGNLDKVVEYLKGGIDINTCNQNGLNALHLAAKEGHVGLVQELLGRGSSVDSATKKGNTALHIASLAGQAEVVKVLVKEGANINAQSQNGFTPLYMAAQENHIDVVKYLLENGANQSTATEDGFTPLAVALQQGHNQAVAILLENDTKGKVRLPALHIAARKDDTKSAALLLQNDHNADVQSKMMVNRTTESGFTPLHIAAHYGNVNVATLLLNRGAAVDFTARNGITPLHVASKRGNTNMVKLLLDRGGQIDAKTRDGLTPLHCAARSGHDQVVELLLERGAPLLARTKNGLSPLHMAAQGDHVECVKHLLQHKAPVDDVTLDYLTALHVAAHCGHYRVTKLLLDKRANPNARALNGFTPLHIACKKNRIKVMELLVKYGASIQAITESGLTPIHVAAFMGHLNIVLLLLQNGASPDVTNIRGETALHMAARAGQVEVVRCLLRNGALVDARAREEQTPLHIASRLGKTEIVQLLLQHMAHPDAATTNGYTPLHISAREGQVDVASVLLEAGAAHSLATKKGFTPLHVAAKYGSLDVAKLLLQRRAAADSAGKNGLTPLHVAAHYDNQKVALLLLEKGASPHATAKNGYTPLHIAAKKNQMQIASTLLNYGAETNIVTKQGVTPLHLASQEGHTDMVTLLLDKGANIHMSTKSGLTSLHLAAQEDKVNVADILTKHGADQDAHTKLGYTPLIVACHYGNVKMVNFLLKQGANVNAKTKNGYTPLHQAAQQGHTHIINVLLQHGAKPNATTANGNTALAIAKRLGYISVVDTLKVVTEEVTTTTTTITEKHKLNVPETMTEVLDVSDEEGDDTMTGDGGEYLRPEDLKELGDDSLPSSQFLDGMNYLRYSLEGGRSDSLRSFSSDRSHTLSHASYLRDSAVMDDSVVIPSHQVSTLAKEAERNSYRLSWGTENLDNVALSSSPIHSGFLVSFMVDARGGAMRGCRHNGLRIIIPPRKCTAPTRVTCRLVKRHRLATMPPMVEGEGLASRLIEVGPSGAQFLGPVIVEIPHFAALRGKERELVVLRSENGDSWKEHFCDYTEDELNEILNGMDEVLDSPEDLEKKRICRIITRDFPQYFAVVSRIKQDSNLIGPEGGVLSSTVVPQVQAVFPEGALTKRIRVGLQAQPMHSELVKKILGNKATFSPIVTLEPRRRKFHKPITMTIPVPKASSDVMLNGFGGDAPTLRLLCSITGGTTPAQWEDITGTTPLTFVNECVSFTTNVSARFWLIDCRQIQESVTFASQVYREIICVPYMAKFVVFAKSHDPIEARLRCFCMTDDKVDKTLEQQENFAEVARSRDVEVLEGKPIYVDCFGNLVPLTKSGQHHIFSFFAFKENRLPLFVKVRDTTQEPCGRLSFMKEPKSTRGLVHQAICNLNITLPIYTKESESDQEQEEEIDMTSEKNPQDEQERIEERLAYIADHLGFSWTELARELDFTEEQIHQIRIENPNSLQDQSHALLKYWLERDGKHATDTNLVECLTKINRMDIVHLMETNTEPLQERISHSYAEIEQTITLDHSEGFSVLQEELCTAQHKQKEEQAVSKESETCDHPPIVSEEDISVGYSTFQDGVPKTEGDSSATALFPQTHKEQVQQDFSGKMQDLPEESSLEYQQEYFVTTPGTETSETQKAMIVPSSPSKTPEEVSTPAEEEKLYLQTPTSSERGGSPIIQEPEEPSEHREESSPRKTSLVIVESADNQPETCERLDEDAAFEKELTEELGELEASSDEEAMVTTRVVRRRVIIQGDDMPEIPPETVTEEEYIDEHGHTVVKKVTRKIIRRYVSSEGTEKEEIMVQGMPQEPVNIEEGDGYSKVIKRVVLKSDTEQSEDNNE

SEQ ID NO: 19860 - protein, 305 aa, Homo sapiens
MAGKRSGWSRAALLQLLLGVNLVVMPPTRARSLRFVTLLYRHGDRSPVKTYPKDPYQEEEWPQGFGQLTKEGMLQHWELGQALRQRYHGFLNTSYHRQEVYVRSTDFDRTLMSAEANLAGLFPPNGMQRFNPNISWQPIPVHTVPITEDRQFLDMVANETGLTDLTLETVWNVYDTLFCEQTHGLRLPPWASPQTMQRLSRLKDFSFRFLFGIYQQAEKARLQGGVLLAQIRKNLTLMATTSQLPKLLVYSAHDTTLVALQMALDVYNGEQAPYASCHIFELYQEDSGNFSVEMYFRNESDKAPW

SEQ ID NO: 19861 - protein, 690 aa, Homo sapiens
MTPQSLLQTTLFLLSLLFLVQGAHGRGHREDFRFCSQRNQTHRSSLHYKPTPDLRISIENSEEALTVHAPFPAAHPASRSFPDPRGLYHFCLYWNRHAGRLHLLYGKRDFLLSDKASSLLCFQHQEESLAQGPPLLATSVTSWWSPQNISLPSAASFTFSFHSPPHTAAHNASVDMCELKRDLQLLSQFLKHPQKASRRPSAAPASQQLQSLESKLTSVRFMGDMVSFEEDRINATVWKLQPTAGLQDLHIHSRQEEEQSEIMEYSVLLPRTLFQRTKGRSGEAEKRLLLVDFSSQALFQDKNSSQVLGEKVLGIVVQNTKVANLTEPVVLTFQHQLQPKNVTLQCVFWVEDPTLSSPGHWSSAGCETVRRETQTSCFCNHLTYFAVLMVSSVEVDAVHKHYLSLLSYVGCVVSALACLVTIAAYLCSRVPLPCRRKPRDYTIKVHMNLLLAVFLLDTSFLLSEPVALTGSEAGCRASAIFLHFSLLTCLSWMGLEGYNLYRLVVEVFGTYVPGYLLKLSAMGWGFPIFLVTLVALVDVDNYGPIILAVHRTPEGVIYPSMCWIRDSLVSYITNLGLFSLVFLFNMAMLATMVVQILRLRPHTQKWSHVLTLLGLSLVLGLPWALIFFSFASGTFQLVVLYLFSIITSFQGFLIFIWYWSMRLQARGGPSPLKSNSDSARLPISSGSTSS

SEQ ID NO: 19862 - protein, 137 aa, Homo sapiens
MSGARSKLALFLCGCYVVALGAHTGEESVADHHEAEYYVAAVYEHPSILSLNPLALISRQEALELMNQNLDIYEQQVMTAAQKDVQIIVFPEDGIHGFNFTRTSIYPFLDFMPSPQVVRWNPCLEPHRFNDTESLTL

SEQ ID NO: 19863 - protein, 3964 aa, Homo sapiens
MTTMLQKSDSNASFLRAARAGNLDKVVEYLKGGIDINTCNQNGLNALHLAAKEGHVGLVQELLGRGSSVDSATKKGNTALHIASLAGQAEVVKVLVKEGANINAQSQNGFTPLYMAAQENHIDVVKYLLENGANQSTATEDGFTPLAVALQQGHNQAVAILLENDTKGKVRLPALHIAARKDDTKSAALLLQNDHNADVQSKMMVNRTTESGFTPLHIAAHYGNVNVATLLLNRGAAVDFTARNGITPLHVASKRGNTNMVKLLLDRGGQIDAKTRDGLTPLHCAARSGHDQVVELLLERGAPLLARTKNGLSPLHMAAQGDHVECVKHLLQHKAPVDDVTLDYLTALHVAAHCGHYRVTKLLLDKRANPNARALNGFTPLHIACKKNRIKVMELLVKYGASIQAITESGLTPIHVAAFMGHLNIVLLLLQNGASPDVTNIRGETALHMAARAGQVEVVRCLLRNGALVDARAREEQTPLHIASRLGKTEIVQLLLQHMAHPDAATTNGYTPLHISAREGQVDVASVLLEAGAAHSLATKKGFTPLHVAAKYGSLDVAKLLLQRRAAADSAGKNGLTPLHVAAHYDNQKVALLLLEKGASPHATAKNGYTPLHIAAKKNQMQIASTLLNYGAETNIVTKQGVTPLHLASQEGHTDMVTLLLDKGANIHMSTKSGLTSLHLAAQEDKVNVADILTKHGADQDAHTKLGYTPLIVACHYGNVKMVNFLLKQGANVNAKTKNGYTPLHQAAQQGHTHIINVLLQHGAKPNATTANGNTALAIAKRLGYISVVDTLKVVTEEVTTTTTTITEKHKLNVPETMTEVLDVSDEEGDDTMTGDGGEYLRPEDLKELGDDSLPSSQFLDGMNYLRYSLEGGRSDSLRSFSSDRSHTLSHASYLRDSAVMDDSVVIPSHQVSTLAKEAERNSYRLSWGTENLDNVALSSSPIHSGFLVSFMVDARGGAMRGCRHNGLRIIIPPRKCTAPTRVTCRLVKRHRLATMPPMVEGEGLASRLIEVGPSGAQFLGPVIVEIPHFAALRGKERELVVLRSENGDSWKEHFCDYTEDELNEILNGMDEVLDSPEDLEKKRICRIITRDFPQYFAVVSRIKQDSNLIGPEGGVLSSTVVPQVQAVFPEGALTKRIRVGLQAQPMHSELVKKILGNKATFSPIVTLEPRRRKFHKPITMTIPVPKASSDVMLNGFGGDAPTLRLLCSITGGTTPAQWEDITGTTPLTFVNECVSFTTNVSARFWLIDCRQIQESVTFASQVYREIICVPYMAKFVVFAKSHDPIEARLRCFCMTDDKVDKTLEQQENFAEVARSRDVEVLEGKPIYVDCFGNLVPLTKSGQHHIFSFFAFKENRLPLFVKVRDTTQEPCGRLSFMKEPKSTRGLVHQAICNLNITLPIYTKESESDQEQEEEIDMTSEKNDETESTETSVLKSHLVNEVPVLASPDLLSEVSEMKQDLIKMTAILTTDVSDKAGSIKVKELVKAAEEEPGEPFEIVERVKEDLEKVNEILRSGTCTRDESSVQSSRSERGLVEEEWVIVSDEEIEEARQKAPLEITEYPCVEVRIDKEIKGKVEKDSTGLVNYLTDDLNTCVPLPKEQLQTVQDKAGKKCEALAVGRSSEKEGKDIPPDETQSTQKQHKPSLGIKKPVRRKLKEKQKQKEEGLQASAEKAELKKGSSEESLGEDPGLAPEPLPTVKATSPLIEETPIGSIKDKVKALQKRVEDEQKGRSKLPIRVKGKEDVPKKTTHRPHPAASPSLKSERHAPGSPSPKTERHSTLSSSAKTERHPPVSPSSKTEKHSPVSPSAKTERHSPASSSSKTEKHSPVSPSTKTERHSPVSSTKTERHPPVSPSGKTDKRPPVSPSGRTEKHPPVSPGRTEKRLPVSPSGRTDKHQPVSTAGKTEKHLPVSPSGKTEKQPPVSPTSKTERIEETMSVRELMKAFQSGQDPSKHKTGLFEHKSAKQKQPQEKGKVRVEKEKGPILTQREAQKTENQTIKRGQRLPVTGTAESKRGVRVSSIGVKKEDAAGGKEKVLSHKIPEPVQSVPEEESHRESEVPKEKMADEQGDMDLQISPDRKTSTDFSEVIKQELEDNDKYQQFRLSEETEKAQLHLDQVLTSPFNTTFPLDYMKDEFLPALSLQSGALDGSSESLKNEGVAGSPCGSLMEGTPQISSEESYKHEGLAETPETSPESLSFSPKKSEEQTGETKESTKTETTTEIRSEKEHPTTKDITGGSEERGATVTEDSETSTESFQKEATLGSPKDTSPKRQDDCTGSCSVALAKETPTGLTEEAACDEGQRTFGSSAHKTQTDSEVQESTATSDETKALPLPEASVKTDTGTESKPQGVIRSPQGLELALPSRDSEVLSAVADDSLAVSHKDSLEASPVLEDNSSHKTPDSLEPSPLKESPCRDSLESSPVEPKMKAGIFPSHFPLPAAVAKTELLTEVASVRSRLLRDPDGSAEDDSLEQTSLMESSGKSPLSPDTPSSEEVSYEVTPKTTDVSTPKPAVIHECAEEDDSENGEKKRFTPEEEMFKMVTKIKMFDELEQEAKQKRDYKKEPKQEESSSSSDPDADCSVDVDEPKHTGSGEDESGVPVLVTSESRKVSSSSESEPELAQLKKGADSGLLPEPVIRVQPPSPLPSSMDSNSSPEEVQFQPVVSKQYTFKMNEDTQEEPGKSEEEKDSESHLAEDRHAVSTEAEDRSYDKLNRDTDQPKICDGHGCEAMSPSSSAAPVSSGLQSPTGDDVDEQPVIYKESLALQGTHEKDTEGEELDVSRAESPQADCPSESFSSSSSLPHCLVSEGKELDEDISATSSIQKTEVTKTDETFENLPKDCPSQDSSITTQTDRFSMDVPVSDLAENDEIYDPQITSPYENVPSQSFFSSEESKTQTDANHTTSFHSSEVYSVTITSPVEDVVVASSSSGTVLSKESNFEGQDIKMESQQESTLWEMQSDSVSSSFEPTMSATTTVVGEQISKVIITKTDVDSDSWSEIREDDEAFEARVKEEEQKIFGLMVDRQSQGTTPDTTPARTPTEEGTPTSEQNPFLFQEGKLFEMTRSGAIDMTKRSYADESFHFFQIGQESREETLSEDVKEGATGADPLPLETSAESLALSESKETVDDEADLLPDDVSEEVEEIPASDAQLNSQMGISASTETPTKEAVSVGTKDLPTVQTGDIPPLSGVKQISCPDSSEPAVQVQLDFSTLTRSVYSDRGDDSPDSSPEEQKSVIEIPTAPMENVPFTESKSKIPVRTMPTSTPAPPSAEYESSVSEDFLSSVDEENKADEAKPKSKLPVKVPLQRVEQQLSDLDTSVQKTVAPQGQDMASIAPDNRSKSESDASSLDSKTKCPVKTRSYTETETESRERAEELELESEEGATRPKILTSRLPVKSRSTTSSCRGGTSPTKESKEHFFDLYRNSIEFFEEISDEASKLVDRLTQSEREQEIVSDDESSSALEVSVIENLPPVETEHSVPEDIFDTRPIWDESIETLIERIPDENGHDHAEDPQDEQERIEERLAYIADHLGFSWTELARELDFTEEQIHQIRIENPNSLQDQSHALLKYWLERDGKHATDTNLVECLTKINRMDIVHLMETNTEPLQERISHSYAEIEQTITLDHSEGFSVLQEELCTAQHKQKEEQAVSKESETCDHPPIVSEEDISVGYSTFQDGVPKTEGDSSATALFPQTHKEQVQQDFSGKMQDLPEESSLEYQQEYFVTTPGTETSETQKAMIVPSSPSKTPEEVSTPAEEEKLYLQTPTSSERGGSPIIQEPEEPSEHREESSPRKTSLVIVESADNQPETCERLDEDAAFEKGDDMPEIPPETVTEEEYIDEHGHTVVKKVTRKIIRRYVSSEGTEKEEIMVQGMPQEPVNIEEGDGYSKVIKRVVLKSDTEQSEVTLCEPSILSSTSQFQAEPVEGRRVSKVVKTTVVLGERMEKHLGDSSLATDLPSAKDDFEEDNNE

SEQ ID NO: 19864 - protein, 71 aa, Homo sapiens
MAKATSGAAGLRLLLLLLLPLLGKDRESLCGKLPGIQWHQRPVQAAFLWCQLQHARGGHLSRGHLGDPVCE

SEQ ID NO: 19865 - protein, 1910 aa, Homo sapiens
MTTMLQKSDSNASFLRAARAGNLDKVVEYLKGGIDINTCNQNGLNALHLAAKEGHVGLVQELLGRGSSVDSATKKGNTALHIASLAGQAEVVKVLVKEGANINAQSQNGFTPLYMAAQENHIDVVKYLLENGANQSTATEDGFTPLAVALQQGHNQAVAILLENDTKGKVRLPALHIAARKDDTKSAALLLQNDHNADVQSKMMVNRTTESGFTPLHIAAHYGNVNVATLLLNRGAAVDFTARNGITPLHVASKRGNTNMVKLLLDRGGQIDAKTRDGLTPLHCAARSGHDQVVELLLERGAPLLARTKNGLSPLHMAAQGDHVECVKHLLQHKAPVDDVTLDYLTALHVAAHCGHYRVTKLLLDKRANPNARALNGFTPLHIACKKNRIKVMELLVKYGASIQAITESGLTPIHVAAFMGHLNIVLLLLQNGASPDVTNIRGETALHMAARAGQVEVVRCLLRNGALVDARAREEQTPLHIASRLGKTEIVQLLLQHMAHPDAATTNGYTPLHISAREGQVDVASVLLEAGAAHSLATKKGFTPLHVAAKYGSLDVAKLLLQRRAAADSAGKNGLTPLHVAAHYDNQKVALLLLEKGASPHATAKNGYTPLHIAAKKNQMQIASTLLNYGAETNIVTKQGVTPLHLASQEGHTDMVTLLLDKGANIHMSTKSGLTSLHLAAQEDKVNVADILTKHGADQDAHTKLGYTPLIVACHYGNVKMVNFLLKQGANVNAKTKNGYTPLHQAAQQGHTHIINVLLQHGAKPNATTANGNTALAIAKRLGYISVVDTLKVVTEEVTTTTTTITEKHKLNVPETMTEVLDVSDEEGDDTMTGDGGEYLRPEDLKELGDDSLPSSQFLDGMNYLRYSLEGGRSDSLRSFSSDRSHTLSHASYLRDSAVMDDSVVIPSHQVSTLAKEAERNSYRLSWGTENLDNVALSSSPIHSGFLVSFMVDARGGAMRGCRHNGLRIIIPPRKCTAPTRVTCRLVKRHRLATMPPMVEGEGLASRLIEVGPSGAQFLGPVIVEIPHFAALRGKERELVVLRSENGDSWKEHFCDYTEDELNEILNGMDEVLDSPEDLEKKRICRIITRDFPQYFAVVSRIKQDSNLIGPEGGVLSSTVVPQVQAVFPEGALTKRIRVGLQAQPMHSELVKKILGNKATFSPIVTLEPRRRKFHKPITMTIPVPKASSDVMLNGFGGDAPTLRLLCSITGGTTPAQWEDITGTTPLTFVNECVSFTTNVSARFWLIDCRQIQESVTFASQVYREIICVPYMAKFVVFAKSHDPIEARLRCFCMTDDKVDKTLEQQENFAEVARSRDVEVLEGKPIYVDCFGNLVPLTKSGQHHIFSFFAFKENRLPLFVKVRDTTQEPCGRLSFMKEPKSTRGLVHQAICNLNITLPIYTKESESDQEQEEEIDMTSEKNPQDEQERIEERLAYIADHLGFSWTELARELDFTEEQIHQIRIENPNSLQDQSHALLKYWLERDGKHATDTNLVECLTKINRMDIVHLMETNTEPLQERISHSYAEIEQTITLDHSEGFSVLQEELCTAQHKQKEEQAVSKESETCDHPPIVSEEDISVGYSTFQDGVPKTEGDSSATALFPQTHKEQVQQDFSGKMQDLPEESSLEYQQEYFVTTPGTETSETQKAMIVPSSPSKTPEEVSTPAEEEKLYLQTPTSSERGGSPIIQEPEEPSEHREESSPRKTSLVIVESADNQPETCERLDEDAAFEKELTEELGELEASSDEEAMVTTRVVRRRVIIQGDDMPEIPPETVTEEEYIDEHGHTVVKKVTRKIIRRYVSSEGTEKEEIMVQGMPQEPVNIEEGDGYSKVIKRVVLKSDTEQSEVTLCEPSILSSTSQFQAEPVEGRRVSKVVKTTVVLGERMEKHLGDSSLATDLPSAKDDFEEDNNE

SEQ ID NO: 19866 - protein, 843 aa, Homo sapiens
MVIIGPRGPGSQRLLLSLLLLAAWEVGSGQLHYSVYEEAKHGTFVGRIAQDLGLELAELVPRLFRVASKRHGDLLEVNLQNGILFVNSRIDREKLCGRSAECSIHLEVIVDRPLQVFHVDVEVKDINDNPPVFREREQKVPVSESAPLDSHFPLEGASDADIGVNSLLTYALSLNENFELKIKTKKDKSILPELVLRKLLDREQTPKLNLLLMVIDGGKPELTGSVQIQITVLDVNDNGPAFDKPSYKVVLSENVQNDTRVIQLNASDPDEGLNGEISYGIKMILPVSEKCMFSINPDTGEIRIYGELDFEENNAYEIQVNAIDKGIPSMAGHSMVLVEVLDVNDNVPEVMVTSLSLPVQEDAQVGTVIALISVSDRDSGANGQVICSLTPHVPFKLVSTYKNYYSLVLDSALDRESVSAYELVVTARDGGSPSLWATARVSVEVADVNDNAPAFAQPEYTVFVKENNPPGCHIFTVSAWDADAQKNALVSYSLVERRVGEHALSSYVSVHAESGKVYALQPLDHEELELLQFQVSARDAGVPPLGSNVTLQVFVLDENDNAPALLATPAGSAGGAVSELVPRSVGAGHVVAKVRAVDADSGYNAWLSYELQPAAVGAHIPFHVGLYTGEISTTRILDEADAPRHRLLVLVKDHGEPALTSTATVLVSLVENGQAPKTSSRASVGAVDPEAALVDINVYLIIAICAVSSLLVLTLLLYTALRCSAPPTVSRCAPGKPTLVCSSAVGSWSYSQQRRQRVCSAESPPKTDLMAFSPSLQLSREDCLNPPSEPRQPNPDWRYSASLRAGMHSSVHLEEAGILRAGPGGPDQQWPTVSSATPVPTME

SEQ ID NO: 19867 - protein, 203 aa, Homo sapiens
MSGARSKLALFLCGCYVVALGAHTGEESVADHHEAEYYVAAVYEHPSILSLNPLALISRQEALELMNQNLDIYEQQVMTAAQKDVQIIVFPEDGIHGFNFTRTSIYPFLDFMPSPQVVRWNPCLEPHRFNDTEGSLGGQTQAQRQKLPGGRLQLHLRKTFLTVRAAQQLNGLLGEVESLGSVQGGKITLVEGTPAFVKRLETG

SEQ ID NO: 19868 - protein, 140 aa, Homo sapiens
MSGARSKLALFLCGCYVVALGAHTGEESVADHHEAEYYVAAVYEHPSILSLNPLALISRQEALELMNQNLDIYEQQVMTAAQKDVQIIVFPEDGIHGFNFTRTSIYPFLDFMPSPQVVRWNPCLEPHRFNDTESLLGHPS

SEQ ID NO: 19869 - protein, 270 aa, Homo sapiens
MIQQPHKAATFFGCIGIDKFGEILKRKAAEAHVDAHYYEQNEQPTGTCAACITGDNRSLIANLAAANCYKKEKHLDLEKNWMLVEKARVCYIAGFFLTVSPESVLKVAHHASENNRIFTLNLSAPFISQFYKESLMKVMPYVDILFGNETEAATFAREQGFETKDIKEIAKKTQALPKMNSKRQRIVIFTQGRDDTIMATESEVTAFAVLDQDQKEIIDTNGAGDAFVGGFLSQLVSDKPLTECIRAGHYAASIIIRRTGCTFPEKPDFH

SEQ ID NO: 19870 - protein, 435 aa, Homo sapiens
MAAPSLHPSLGPGIGSPGQLHSPISTLSSPINGMGPPFSVISSPMGPHSMSVPTTPTLGFSTGSPQLSSPMNPVSSSEDIKPPLGLNGVLKVPAHPSGNMASFTKHICAICGDRSSGKHYGVYSCEGCKGFFKRTVRKDLTYTCRDNKDCLIDKRQRNRCQYCRYQKCLAMGMKREAVQEERQRGKDRNENEVESTSSANEDMPVERILEAELAVEPKTETYVEANMGLNPSSPNDPVTNICQAADKQLFTLVEWAKRIPHFSELPLDDQVILLRAGWNELLIASFSHRSIAVKDGILLATGLHVHRNSAHSAGVGAIFDRVLTELVSKMRDMQMDKTELGCLRAIVLFNPDSKGLSNPAEVEALREKVYASLEAYCKHKYPEQPGRFAKLLLRLPALRSIGLKCLEHLFFFKLIGDTPIDTFLMEMLEAPHQMT

SEQ ID NO: 19871 - protein, 543 aa, Homo sapiens
MAHAHIQGGRRAKSRFVVCIMSGARSKLALFLCGCYVVALGAHTGEESVADHHEAEYYVAAVYEHPSILSLNPLALISRQEALELMNQNLDIYEQQVMTAAQKDVQIIVFPEDGIHGFNFTRTSIYPFLDFMPSPQVVRWNPCLEPHRFNDTEVLQRLSCMAIRGDMFLVANLGTKEPCHSSDPRCPKDGRYQFNTNVVFSNNGTLVDRYRKHNLYFEAAFDVPLKVDLITFDTPFAGRFGIFTCFDILFFDPAIRVLRDYKVKHVVYPTAWMNQLPLLAAIEIQKAFAVAFGINVLAANVHHPVLGMTGSGIHTPLESFWYHDMENPKSHLIIAQVAKNPVGLIGAENATGETDPSHSKFLKILSGDPYCEKDAQEVHCDEATKWNVNAPPTFHSEMMYDNFTLVPVWGKEGYLHVCSNGLCCYLLYERPTLSKELYALGVFDGLHTVHGTYYIQVCALVRCGGLGFDTCGQEITEATGIFEFHLWGNFSTSYIFPLFLTSGMTLEVPDQLGWENDHYFLRKSRLSSGLVTAALYGRLYERD

SEQ ID NO: 19872 - protein, 162 aa, Homo sapiens
MAGKRSGWSRAALLQLLLGVNLVVMPPTRARSLRFVTLLYRHGDRSPVKTYPKDPYQEEEWPQGFGQLTKEGMLQHWELGQALRQRYHGFLNTSYHRQEVYVRSTDFDRTLMSAEANLAGLFPPNGMQRFNPNISWQPIPVHTVPITEDRQAQVTRTVEHSA

SEQ ID NO: 19873 - protein, 567 aa, Homo sapiens
MLGFLSRGPSMKLCMGLACVLSLWNTVSGIKGEAKKEKGMTFLPTTGKWVIRAPFQLTCLEIKMLRRKKMGHSRAALNPDLLLSGLREEERKEKGVAFLATTELPARSIDLSALNLTELVNGMLSRALKDSKKFFSLLSVTSYSSFAFHKFSVAVYNISNLKTVDPAKFPTRYCYCLNNRTNDLSDFTALLVDIIGNSTSYLTEIFKSTSILSVNQSNESDCIFICVMTGKSGRNLSDFWEIEEKYPIINYTFTSGLSGVLGAATRGTARTSKPTTKSQKTLPSTSPGHWTQSTPWASALRSSPWTETAAPSETEETLNTGRPPELPARATATWFSASHTLPALATRRVARTQWLTADRQTWASISSVPWAQTISEKKPGGSLWETRSSPPTTAGTEEAMNTTSLLAPAAEIMATPGSPSQASPTLGAFTHGTQTPSPTKATAPRYPQTGDLSAEWPFTAGEEPVLVPRPHQVSRCPQPLFKVGAMAAAPLTLAIQRLNPCLMELCQFFQQCLCMSQRSPRTEDMRYCLEYYSWFLKNATYICQRVKRVSHSHTLKQKCLENICKSV

SEQ ID NO: 19874 - protein, 1072 aa, Homo sapiens
MPAARRFPGLELSFPLLARLRRRLYTRLGGGRMQPEEGTGWLLELLSEVQLQQYFLRLRDDLNVTRLSHFEYVKNEDLEKIGMGRPGQRRLWEAVKRRKALCKRKSWMSKVFSGKRLEAEFPPHHSQSTFRKTSPAPGGPAGEGPLQSLTCLIGEKDLRLLEKLGDGSFGVVRRGEWDAPSGKTVSVAVKCLKPDVLSQPEAMDDFIREVNAMHSLDHRNLIRLYGVVLTPPMKMVTELAPLGSLLDRLRKHQGHFLLGTLSRYAVQVAEGMGYLESKRFIHRDLAARNLLLATRDLVKIGDFGLMRALPQNDDHYVMQEHRKVPFAWCAPESLKTRTFSHASDTWMFGVTLWEMFTYGQEPWIGLNGSQILHKIDKEGERLPRPEDCPQDIYNVMVQCWAHKPEDRPTFVALRDFLLEAQPTDMRALQDFEEPDKLHIQMNDVITVIEGRAENYWWRGQNTRTLCVGPFPRNVVTSVAGLSAQDISQPLQNSFIHTGHGDSDPRHCWGFPDRIDELYLGNPMDPPDLLSVELSTSRPPQHLGGVKKPTYDPVSEDQDPLSSDFKRLGLRKPGLPRGLWLAKPSARVPGTKASRGSGAEVTLIDFGEEPVVPALRPCAPSLAQLAMDACSLLDETPPQSPTRALPRPLHPTPVVDWDARPLPPPPAYDDVAQDEDDFEICSINSTLVGAGVPAGPSQGQTNYAFVPEQARPPPPLEDNLFLPPQGGGKPPSSAQTAEIFQALQQECMRQLQAPAGSPAPSPSPGGDDKPQVPPRVPIPPRPTRPHVQLSPAPPGEEETSQWPGPASPPRVPPREPLSPQGSRTPSPLVPPGSSPLPPRLSSSPGKTMPTTQSFASDPKYATPQVIQAPGPRAGPCILPIVRDGKKVSSTHYYLLPERPSYLERYQRFLREAQSPEEPTPLPVPLLLPPPSTPAPAAPTATVRPMPQAALDPKANFSTNNSNPGARPPPPRATARLPQRGCPGDGPEAGRPADKIQMLQAMVHGVTTEECQAALQCHGWSVQRAAQYLKVEQLFGLGLRPRGECHKVLEMFDWNLEQAGCHLLGSWGPAHHKR

SEQ ID NO: 19875 - protein, 935 aa, Homo sapiens
MSCGNEFVETLKKIGYPKADNLNGEDFDWLFEGVEDESFLKWFCGNVNEQNVLSERELEAFSILQKSGKPILEGAALDEALKTCKTSDLKTPRLDDKELEKLEDEVQTLLKLKNLKIQRRNKCQLMASVTSHKSLRLNAKEEEATKKLKQSQGILNAMITKISNELQALTDEVTQLMMFFRHSNLGQGTNPLVFLSQFSLEKYLSQEEQSTAALTLYTKKQFFQGIHEVVESSNEDNFQLLDIQTPSICDNQEILEERRLEMARLQLAYICAQHQLIHLKASNSSMKSSIKWAEESLHSLTSKAVDKENLDAKISSLTSEIMKLEKEVTQIKDRSLPAVVRENAQLLNMPVVKGDFDLQIAKQDYYTARQELVLNQLIKQKASFELLQLSYEIELRKHRDIYRQLENLVQELSQSNMMLYKQLEMLTDPSVSQQINPRNTIDTKDYSTHRLYQVLEGENKKKELFLTHGNLEEVAEKLKQNISLVQDQLAVSAQEHSFFLSKRNKDVDMLCDTLYQGGNQLLLSDQDFVKMENYEALVGFDLCNTPLSSVAQKIMSAMHSGDLVDSKTWGKSTETMEVINKSSVKYSVQLEDRKTQSPEKKDLKSLRSQTSRGSAKLSPQSFSVRLTDQLSADQKQKSISSLTLSSCLIPQYNQEASVLQKKGHKRKHFLMENINNENKGSINLKRKHITYNNLSEKTSKQMALEEDTDDAEGYLNSGNSGALKKHFCDIRHLDDWAKSQLIEMLKQAAALVITVMYTDGSTQLGADQTPVSSVRGIVVLVKRQAEGGHGCPDAPACGPVLEGFVSDDPCIYIQIEHSAIWDQEQEAHQQFARNVLFQTMKCKCPVICFNAKDFVRIVLQFFGNDGSWKHGLWFMATISYFGASSDTNFGSDGKPCHSGEQRGDGEDVSTSWGSSQGIGARSSFCCRRTVSYNEQ

SEQ ID NO: 19876 - protein, 1810 aa, Homo sapiens
MTTMLQKSDSNASFLRAARAGNLDKVVEYLKGGIDINTCNQNGLNALHLAAKEGHVGLVQELLGRGSSVDSATKKGNTALHIASLAGQAEVVKVLVKEGANINAQSQNGFTPLYMAAQENHIDVVKYLLENGANQSTATEDGFTPLAVALQQGHNQAVAILLENDTKGKVRLPALHIAARKDDTKSAALLLQNDHNADVQSKSGFTPLHIAAHYGNVNVATLLLNRGAAVDFTARNGITPLHVASKRGNTNMVKLLLDRGGQIDAKTRDGLTPLHCAARSGHDQVVELLLERGAPLLARTKNGLSPLHMAAQGDHVECVKHLLQHKAPVDDVTLDYLTALHVAAHCGHYRVTKLLLDKRANPNARALNGFTPLHIACKKNRIKVMELLVKYGASIQAITESGLTPIHVAAFMGHLNIVLLLLQNGASPDVTNIRGETALHMAARAGQVEVVRCLLRNGALVDARAREEQTPLHIASRLGKTEIVQLLLQHMAHPDAATTNGYTPLHISAREGQVDVASVLLEAGAAHSLATKKGFTPLHVAAKYGSLDVAKLLLQRRAAADSAGKNGLTPLHVAAHYDNQKVALLLLEKGASPHATAKNGYTPLHIAAKKNQMQIASTLLNYGAETNIVTKQGVTPLHLASQEGHTDMVTLLLDKGANIHMSTKSGLTSLHLAAQEDKVNVADILTKHGADQDAHTKLGYTPLIVACHYGNVKMVNFLLKQGANVNAKTKNGYTPLHQAAQQGHTHIINVLLQHGAKPNATTANGNTALAIAKRLGYISVVDTLKVVTEEVTTTTTTITEKHKLNVPETMTEVLDVSDEEGDDTMTGDGGEYLRPEDLKELGDDSLPSSQFLDGMNYLRYSLEGGRSDSLRSFSSDRSHTLSHASYLRDSAVMDDSVVIPSHQVSTLAKEAERNSYRLSWGTENLDNVALSSSPIHSGFLVSFMVDARGGAMRGCRHNGLRIIIPPRKCTAPTRVTCRLVKRHRLATMPPMVEGEGLASRLIEVGPSGAQFLGPVIVEIPHFAALRGKERELVVLRSENGDSWKEHFCDYTEDELNEILNGMDEVLDSPEDLEKKRICRIITRDFPQYFAVVSRIKQDSNLIGPEGGVLSSTVVPQVQAVFPEGALTKRIRVGLQAQPMHSELVKKILGNKATFSPIVTLEPRRRKFHKPITMTIPVPKASSDVMLNGFGGDAPTLRLLCSITGGTTPAQWEDITGTTPLTFVNECVSFTTNVSARFWLIDCRQIQESVTFASQVYREIICVPYMAKFVVFAKSHDPIEARLRCFCMTDDKVDKTLEQQENFAEVARSRDVEVLEGKPIYVDCFGNLVPLTKSGQHHIFSFFAFKENRLPLFVKVRDTTQEPCGRLSFMKEPKSTRGLVHQAICNLNITLPIYTKESESDQEQEEEIDMTSEKNPQDEQERIEERLAYIADHLGFSWTELARELDFTEEQIHQIRIENPNSLQDQSHALLKYWLERDGKHATDTNLVECLTKINRMDIVHLMETNTEPLQERISHSYAEIEQTITLDHSEGFSVLQEELCTAQHKQKEEQAVSKESETCDHPPIVSEEDISVGYSTFQDGVPKTEGDSSATALFPQTHKEQVQQDFSGKMQDLPEESSLEYQQEYFVTTPGTETSETQKAMIVPSSPSKTPEEVSTPAEEEKLYLQTPTSSERGGSPIIQEPEEPSEHREESSPRKTSLVIVESADNQPETCERLDEDAAFEKGDDMPEIPPETVTEEEYIDEHGHTVVKKVTRKIIRRYVSSEGTEKEEIMVQGMPQEPVNIEEGDGYSKVIKRVVLKSDTEQSEDNNE

SEQ ID NO: 19877 - protein, 141 aa, Homo sapiens
MSGARSKLALFLCGCYVVALGAHTGEESVADHHEAEYYVAAVYEHPSILSLNPLALISRQEALELMNQNLDIYEQQVMTAAQKDVQIIVFPEDGIHGFNFTRTSIYPFLDFMPSPQVVRWNPCLEPHRFNDTEASYVEVRF

SEQ ID NO: 19878 - protein, 434 aa, Homo sapiens
MAGKRSGWSRAALLQLLLGVNLVVMPPTRARSLRFVTLLYRHGDRSPVKTYPKDPYQEEEWPQGFGQLTKEGMLQHWELGQALRQRYHGFLNTSYHRQEVYVRSTDFDRTLMSAEANLAGLFPPNGMQRFNPNISWQPIPVHTVPITEDRLLKFPLGPCPRYEQLQNETRQTPEYQNESSRNAQFLDMVANETGLTDLTLETVWNVYDTLFCEQTHGLRLPPWASPQTMQRLSRLKDFSFRFLFGIYQQAEKARLQGGVLLAQIRKNLTLMATTSQLPKLLVYSAHDTTLVALQMALDVYNGEQAPYASCHIFELYQEDSGNFSVEMYFRNESDKAPWPLSLPGCPHRCPLQDFLRLTEPVVPKDWQQECQLASGPADTEVIVALAVCGSILFLLIVLLLTVLFRMQAQPPGYRHVADGEDHAUQPLSPLPSTS

SEQ ID NO: 19879 - protein, 652 aa, Homo sapiens
MGLKAAQKTLFPLRSIDDVVRLFAAELGREEPDLVLLSLVLGFVEHFLAVNRVIPTNVPELTFQPSPAPDPPGGLTYFPVADLSIIAALYARFTAQIRGAVDLSLYPREGGVSSRELVKKVSDVIWNSLSRSYFKDRAHIQSLFSFITGTKLDSSGVAFAVVGACQALGLRDVHLALSEDHAWVVFGPNGEQTAEVTWHGKGNEDRRGQTVNAGVAERSWLYLKGSYMRCDRKMEVAFMVCAINPSIDLHTDSLELLQLQQKLLWLLYDLGHLERYPMALGNLADLEELEPTPGRPDPLTLYHKGIASAKTYYRDEHIYPYMYLAGYHCRNRNVREALQAWADTATVIQETVSNLQCLTTIIQQWDFHPRPHAPLLILAFFLWADPDSIILHYNYCREDEEIYKEFFEVANDVIPNLLKEAASLLEAGEERPGEQSQGTQSQGSALQDPECFAHLLRFYDGICKWEEGSPTPVLHVGWATFLVQSLGRFEGQVRQKVRIVSREAEAAEAEEPWGEEAREGRRRGPRRESKPEEPPPPKKPALDKGLGTGQGAVSGPPRKPPGTVAGTARGPEGGSTAQVPAPTASPPPEGPVLTFQSEKMKGMKELLVATKINSSAIKLQLTAQSQVQMKKQKVSTPSDYTLSFLKRQRKGL

SEQ ID NO: 19880 - protein, 452 aa, Homo sapiens
MLCGRPRSSSDNRNFLRERAGLSSAAVQTRIGNSAASRRSPAARPPVPAPPALPRGRPGTEGSTSLSAPAVLVVAVAVVVVVVSAVAWAMANYIHVPPGSPEVPKLNVTVQDQEEHRCREGALSLLQHLRPHWDPQEVTLQLFTDGITNKLIGCYVGNTMEDVVLVRIYGNKTELLVDRDEEVKSFRVLQAHGCAPQLYCTFNNGLCYEFIQGEALDPKHVCNPAIFRLIARQLAKIHAIHAHNGWIPKSNLWLKMGKYFSLIPTGFADEDINKRFLSDIPSSQILQEEMTWMKEILSNLGSPVVLCHNDLLCKNIIYNEKQGDVQFIDYEYSGYNYLAYDIGNHFNEFAGVSDVDYSLYPDRELQSQWLRAYLEAYKEFKGFGTEVTEKEVEILFIQVNQFALASHFFWGLWALIQAKYSTIEFDFLGYAIVRFNQYFKMKPEVTALKVPE

SEQ ID NO: 19881 - protein, 161 aa, Homo sapiens
MLHLHHSCLCFRSWLPAMLAVLLSLAPSASSDISASRPNILLLMADDLGIGDIGCYGNNTMRTPNIDRLAEDGVKLTQHISAASLCTPSRAAFLTGRYPVRSGMVSSIGYRVLQWTGASGGLPTNETTFAKILKEKGYATGLIGRILDTLDVEGLSNSTLI

SEQ ID NO: 19882 - protein, 670 aa, Homo sapiens
MTPQSLLQTTLFLLSLLFLVQGAHGRGHREDFRFCSQRNQTHRSSLHYKPTPDLRISIENSEEALTVHAPFPAAHPASRSFPDPRGLYHFCLYWNRHAGRLHLLYGKRDFLLSDKASSLLCFQHQEESLAQGPPLLATSVTSWWSPQNISLPSAASFTFSFHSPPHTAAHNASVDMCELKRDLQLLSQFLKHPQKASRRPSAAPASQQLQSLESKLTSVRFMGDMVSFEEDRINATVWKLQPTAGLQDLHIHSRQEEEQSEIMEYSVLLPRTLFQRTKGRSGEAEKRLLLVDFSSQALFQDKNSSQVLGEKVLGIVVQNTKVANLTEPVVLTFQHQLQPKNVTLQCVFWVEDPTLSSPGHWSSAGCETVRRETQTSCFCNHLTYFAVLMVSSVEVDAVHKHYLSLLSYVGCVVSALACLVTIAAYLCSRRKPRDYTIKVHMNLLLAVFLLDTSFLLSEPVALTGSEAGCRASAIFLHFSLLTCLSWMGLEGYNLYRLVVEVFGTYVPGYLLKLSAMGWGFPIFLVTLVALVDVDNYGPIILAVHRTPEGVIYPSMCWIRDSLVSYITNLGLFSLVFLFNMAMLATMVVQILRLRPHTQKWSHVLTLLGLSLVLGLPWALIFFSFASGTFQLVVLYLFSIITSFQGCSFYVPILLSFDIKKKYMFIVENLE

SEQ ID NO: 19883 - protein, 588 aa, Homo sapiens
MLHLHHSCLCFRSWLPAMLAVLLSLAPSASSDISASRPNILLLMADDLGIGDIGCYGNNTMRTPNIDRLAEDGVKLTQHISAASLCTPSRAAFLTGRYPVRSGMVSSIGYRVLQWTGASGGLPTNETTFAKILKEKGYATGLIGKWHLGLNCESASDHCHHPLHHGFDHFYGMPFSLMGDCARWELSEKRVNLEQKLNFLFQVLALVALTLVAGKLTHLIPVSWMPVIWSALSAVLLLASSYFVGALIVHADCFLMRNHTITEQPMCFQRTTPLILQEVASFLKRNKHGPFLLFVSFLHVHIPLITMENFLGKSLHGLYGDNVEEMDWMVGRILDTLDVEGLSNSTLIYFTSDHGGSLENQLGNTQYGGWNGIYKGGKGMGGWEGGIRVPGIFRWPGVLPAGRVIGEPTSLMDVFPTVVRLAGGEVPQDRVIDGQDLLPLLLGTAQHSDHEFLMHYCERFLHAARWHQRDRTMWKVHFVTPVFQPEGAGACYGRKVCPCFGEKVVHHDPPLLFDLSRDPSETHILTPASEPVFYQVMERVQQAVWEHQRTLSPVPLQLDRLGNIWRPWLQPCCGPFPLCWCLREDDPQ

SEQ ID NO: 19884 - protein, 707 aa, Homo sapiens; identical to SEQ ID NO: 19026

SEQ ID NO: 19885 - protein, 806 aa, Homo sapiens
MEFSWGSGQESRRLLLLLLLLAAWEAGNGQLHYSVSEEAKHGTFVGRIAQDLGLELAELVPRLFRVASKGRGGLLEVNLQNGILFVNSRIDREELCRRSAECSIHLEVIVDRPLQVFHVDVEVRDINDNPPVFPATQKNLSIAESRPLDSRFPLEGASDADIGENALLTYRLSPNEYFSLEKPPDDELVKGLGLILRKSLDREEAPEIFLVLTATDGGKPELTGTVQLLITVLDANDNAPAFDRTIYKVRLLENVPNGTLVIKLNASDLDEGLNGDIVYSFSNDISPNVKSKFHIDPITGQIIVKGYIDFEESKSYEIIVEGIDKGQLPLSGHCRVIVEVEDNNDNVPDLEFKSLSLPIREDAPLGTVIALISVSDKDMGVNGLVTCSLTSHVPFKLVSTFKNYYSLVLDSALDRESVSAYELVVTARDGGSPSLWATASVSVEVADVNDNAPAFAQPEYTVFVKENNPPGCHIFTVSAWDADAQENALVSYSLVERRVGERALSSYVSVHAESGKVYALQPLDHEELELLQFQVTARDAGVPPLGSNVTLQVFVLDENDNAPALLAPRAGGTGGAVSELVPWSVGVGHVVAKVRAVDADSGYNAWLSYELQPGTGGARIPFRVGLYTGEISTTRALDETDAPRHRLLVLVKDHGEPALTATATVLVSLVESGQAPKASSRALVGAVGPDAALVDVNVYLIIAICAVSSLLVLTLLLYTALRCSALPTEGACAPGKPTLVCSSAVGSWSYSQQRRPRVCSGEGPPKTDLMAFSPSLPDSRDREDQLQTTEESFAKGEDRSWEFPPV

SEQ ID NO: 19886 - protein, 1167 aa, Homo sapiens
MSLKPQQQQQQQQQQQQQQQQQQQQQQQPPPAAANVRKPGGSGLLASPAAAPSPSSSSVSSSSATAPSSVVAATSGGGRPGLGRGRNSNKGLPQSTISFDGIYANMRMVHILTSVVGSKCEVQVKNGGIYEGVFKTYSPKCDLVLDAAHEKSTESSSGPKREEIMESILFKCSDFVVVQFKDMDSSYAKRDAFTDSAISAKVNGEHKEKDLEPWDAGELTANEELEALENDVSNGWDPNDMFRYNEENYGVVSTYDSSLSSYTVPLERDNSEEFLKREARANQLAEEIESSAQYKARVALENDDRSEEEKYTAVQRNSSEREGHSINTRENKYIPPGQRNREVISWGSGRQNSPRMGQPGSGSMPSRSTSHTSDFNPNSGSDQRVVNGVFILSFISFVLSGVPWPSPCPSPSSRPPSRYQSGPNSLPPRAATPTRPPSRPPSRPSRPPSHPSAHGSPAPVSTMPKRMSSEGPPRMSPKAQRHPRNHRVSAGRGSISSGLEFVSHNPPSEAATPPVARTSPSGGTWSSVVSGVPRLSPKTHRPRSPRQNSIGNTPSGPVLASPQAGIIPTEAVAMPIPAASPTPASPASNRAVTPSSEAKDSRLQDQRQNSPAGNKENIKPNETSPSFSKAENKGISPVVSEHRKQIDDLKKFKNDFRLQPSSTSESMDQLLNKNREGEKSRDLIKDKIEPSAKDSFIENSSSNCTSGSSKPNSPSISPSILSNTEHKRGPEVTSQGVQTSSPACKQEKDDKEEKKDAAEQVRKSTLNPNAKEFNPRSFSQPKPSTTPTSPRPQAQPSPSMVGHQQPTPVYTQPVCFAPNMMYPVPVSPGVQPLYPIPMTPMPVNQAKTYRAGKVPNMPQQRQDQHHQSAMMHPASAAGPPIAATPPAYSTQYVAYSPQQFPNQPLVQHVPHYQSQHPHVYSPVIQGNARMMAPPTHAQPGLVSSSATQYGAHEQTHAMYACPKLPYNKETSPSFYFAISTGSLAQQYAHPNATLHPHTPHPQPSATPTGQQQSQHGGSHPAPSPVQHHQHQAAQALHLASPQQQSAIYHAGLAPTPPSMTPASNTQSPQNSFPAAQQTVFTIHPSHVQPAYTNPPHMAHVPQAHVQSGMVPSHPTAHAPMMLMTTQPPGGPQAALAQSALQPIPVSTTAHFPYMTHPSVQAHHQQQL

SEQ ID NO: 19887 - protein, 312 aa, Homo sapiens
MAPGAPSSSPSPILAVLLFSSLVLSPAQAIVVYTDREVHGAVGSRVTLHCSFWSSEWVSDDISFTWRYQPEGGRDAISIFHYAKGQPYIDEVGTFKERIQWVGDPRWKDGSIVIHNLDYSDNGTFTCDVKNPPDIVGKTSQVTLYVFEKVPTRYGVVLGAVIGGVLGVVLLLLLLFYVVRYCWLRRQAALQRRLSAMEKGKLHKPGKDASKRGRQTPVLYAMLDHSRSTKAVSEKKAKGLGESRKDKKURLAGRAGDRGLGVESAKGPKVMVIEMELRKDEQSPELRPAVKSPSRTSLKNALKNMMGLNSDK

SEQ ID NO: 19888 - protein, 51 aa, Homo sapiens
MILIPRMLLVLFLLLPILSSAKAQVNPAICRYPLGMSGGQIPDEDITASSQ

SEQ ID NO: 19889 - protein, 151 aa, Homo sapiens
MAGKRSGWSRAALLQLLLGVNLVVMPPTRARSLRFVTLLYRHGDRSPVKTYPKDPYQEEEWPQGFGQLTKEGMLQHWELGQALRQRYHGFLNTSYHRQEVYVRSTDFDRTLMSAEANLAGLFPPNGMQRFNPNISWQPIPVHTVPITEDRD

SEQ ID NO: 19890 - protein, 1755 aa, Homo sapiens
MTTMLQKSDSNASFLRAARAGNLDKVVEYLKGGIDINTCNQNGLNALHLAAKEGHVGLVQELLGRGSSVDSATKKGNTALHIASLAGQAEVVKVLVKEGANINAQSQNGFTPLYMAAQENHIDVVKYLLENGANQSTATEDGFTPLAVALQQGHNQAVAILLENDTKGKVRLPALHIAARKDDTKSAALLLQNDHNADVQSKSGFTPLHIAAHYGNVNVATLLLNRGAAVDFTARNGITPLHVASKRGNTNMVKLLLDRGGQIDAKTRDGLTPLHCAARSGHDQVVELLLERGAPLLARTKNGLSPLHMAAQGDHVECVKHLLQHKAPVDDVTLDYLTALHVAAHCGHYRVTKLLLDKRANPNARALNGFTPLHIACKKNRIKVMELLVKYGASIQAITESGLTPIHVAAFMGHLNIVLLLLQNGASPDVTNIRGETALHMAARAGQVEVVRCLLRNGALVDARAREEQTPLHIASRLGKTEIVQLLLQHMAHPDAATTNGYTPLHISAREGQVDVASVLLEAGAAHSLATKKGFTPLHVAAKYGSLDVAKLLLQRRAAADSAGKNGLTPLHVAAHYDNQKVALLLLEKGASPHATAKNGYTPLHIAAKKNQMQIASTLLNYGAETNIVTKQGVTPLHLASQEGHTDMVTLLLDKGANIHMSTKSGLTSLHLAAQEDKVNVADILTKHGADQDAHTKLGYTPLIVACHYGNVKMVNFLLKQGANVNAKTKNGYTPLHQAAQQGHTHIINVLLQHGAKPNATTANGNTALAIAKRLGYISVVDTLKVVTEEVTTTTTTITEKHKLNVPETMTEVLDVSDEEGDDTMTGDGGEYLRPEDLKELGDDSLPSSQFLDGMNYLRYSLEGGRSDSLRSFSSDRSHTLSHASYLRDSAVMDDSVVIPSHQVSTLAKEAERNSYRLSWGTENLDNVALSSSPIHSGFLVSFMVDARGGAMRGCRHNGLRIIIPPRKCTAPTRVTCRLVKRHRLATMPPMVEGEGLASRLIEVGPSGAQFLGPVIVEIPHFAALRGKERELVVLRSENGDSWKEHFCDYTEDELNEILNGMDEVLDSPEDLEKKRICRIITRDFPQYFAVVSRIKQDSNLIGPEGGVLSSTVVPQVQAVFPEGALTKRIRVGLQAQPMHSELVKKILGNKATFSPIVTLEPRRRKFHKPITMTIPVPKASSDVMLNGFGGDAPTLRLLCSITGGTTPAQWEDITGTTPLTFVNECVSFTTNVSARFWLIDCRQIQESVTFASQVYREIICVPYMAKFVVFAKSHDPIEARLRCFCMTDDKVDKTLEQQENFAEVARSRDVEVLEGKPIYVDCFGNLVPLTKSGQHHIFSFFAFKENRLPLFVKVRDTTQEPCGRLSFMKEPKSTRGLVHQAICNLNITLPIYTKESESDQEQEEEIDMTSEKNPQDEQERIEERLAYIADHLGFSWTELARELDFTEEQIHQIRIENPNSLQDQSHALLKYWLERDGKHATDTNLVECLTKINRMDIVHLMETNTEPLQERISHSYAEIEQTITLDHSEGFSVLQEELCTAQHKQKEEQAVSKESETCDHPPIVSEEDISVGYSTFQDGVPKTEGDSSATALFPQTHKEQVQQDFSGKMQDLPEESSLEYQQEYFVTTPGTETSETQKAMIVPSSPSKTPEEVSTPAEEEKLYLQTPTSSERGGSPIIQEPEEPSEHREESSPRKTSLVIVESADNQPETCERLDEDAAFEKGDDMPEIPPETVTEEEYIDEHGHTVVKKDNNE

SEQ ID NO: 19891 - protein, 1155 aa, Homo sapiens
MSLKPQQQQQQQQQQQQQQQQQQQQQQQPPPAAANVRKPGGSGLLASPAAAPSPSSSSVSSSSATAPSSVVAATSGGGRPGLGRGRNSNKGLPQSTISFDGIYANMRMVHILTSVVGSKCEVQVKNGGIYEGVFKTYSPKCDLVLDAAHEKSTESSSGPKREEIMESILFKCSDFVVVQFKDMDSSYAKRDAFTDSAISAKVNGEHKEKDLEPWDAGELTANEELEALENDVSNGWDPNDMFRYNEENYGVVSTYDSSLSSYTVPLERDNSEEFLKREARANQLAEEIESSAQYKARVALENDDRSEEEKYTAVQRNSSEREGHSINTRENKYIPPGQRNREVISWGSGRQNSPRMGQPGSGSMPSRSTSHTSDFNPNSGSDQRVVNGGVPWPSPCPSPSSRPPSRYQSGPNSLPPRAATPTRPPSRPPSRPSRPPSHPSAHGSPAPVSTMPKRMSSEGPPRMSPKAQRHPRNHRVSAGRGSISSGLEFVSHNPPSEAATPPVARTSPSGGTWSSVVSGVPRLSPKTHRPRSPRQNSIGNTPSGPVLASPQAGIIPTEAVAMPIPAASPTPASPASNRAVTPSSEAKDSRLQDQRQNSPAGNKENIKPNETSPSFSKAENKGISPVVSEHRKQIDDLKKFKNDFRLQPSSTSESMDQLLNKNREGEKSRDLIKDKIEPSAKDSFIENSSSNCTSGSSKPNSPSISPSILSNTEHKRGPEVTSQGVQTSSPACKQEKDDKEEKKDAAEQVRKSTLNPNAKEFNPRSFSQPKPSTTPTSPRPQAQPSPSMVGHQQPTPVYTQPVCFAPNMMYPVPVSPGVQPLYPIPMTPMPVNQAKTYRAGKVPNMPQQRQDQHHQSAMMHPASAAGPPIAATPPAYSTQYVAYSPQQFPNQPLVQHVPHYQSQHPHVYSPVIQGNARMMAPPTHAQPGLVSSSATQYGAHEQTHAMYACPKLPYNKETSPSFYFAISTGSLAQQYAHPNATLHPHTPHPQPSATPTGQQQSQHGGSHPAPSPVQHHQHQAAQALHLASPQQQSAIYHAGLAPTPPSMTPASNTQSPQNSFPAAQQTVFTIHPSHVQPAYTNPPHMAHVPQAHVQSGMVPSHPTAHAPMMLMTTQPPGGPQAALAQSALQPIPVSTTAHFPYMTHPSVQAHHQQQL

SEQ ID NO: 19892 - protein, 3879 aa, Homo sapiens
MTTMLQKSDSNASFLRAARAGNLDKVVEYLKGGIDINTCNQNGLNALHLAAKEGHVGLVQELLGRGSSVDSATKKGNTALHIASLAGQAEVVKVLVKEGANINAQSQNGFTPLYMAAQENHIDVVKYLLENGANQSTATEDGFTPLAVALQQGHNQAVAILLENDTKGKVRLPALHIAARKDDTKSAALLLQNDHNADVQSKMMVNRTTESGFTPLHIAAHYGNVNVATLLLNRGAAVDFTARNGITPLHVASKRGNTNMVKLLLDRGGQIDAKTRDGLTPLHCAARSGHDQVVELLLERGAPLLARTKNGLSPLHMAAQGDHVECVKHLLQHKAPVDDVTLDYLTALHVAAHCGHYRVTKLLLDKRANPNARALNGFTPLHIACKKNRIKVMELLVKYGASIQAITESGLTPIHVAAFMGHLNIVLLLLQNGASPDVTNIRGETALHMAARAGQVEVVRCLLRNGALVDARAREEQTPLHIASRLGKTEIVQLLLQHMAHPDAATTNGYTPLHISAREGQVDVASVLLEAGAAHSLATKKGFTPLHVAAKYGSLDVAKLLLQRRAAADSAGKNGLTPLHVAAHYDNQKVALLLLEKGASPHATAKNGYTPLHIAAKKNQMQIASTLLNYGAETNIVTKQGVTPLHLASQEGHTDMVTLLLDKGANIHMSTKSGLTSLHLAAQEDKVNVADILTKHGADQDAHTKLGYTPLIVACHYGNVKMVNFLLKQGANVNAKTKNGYTPLHQAAQQGHTHIINVLLQHGAKPNATTANGNTALAIAKRLGYISVVDTLKVVTEEVTTTTTTITEKHKLNVPETMTEVLDVSDEEGDDTMTGDGGEYLRPEDLKELGDDSLPSSQFLDGMNYLRYSLEGGRSDSLRSFSSDRSHTLSHASYLRDSAVMDDSVVIPSHQVSTLAKEAERNSYRLSWGTENLDNVALSSSPIHSGFLVSFMVDARGGAMRGCRHNGLRIIIPPRKCTAPTRVTCRLVKRHRLATMPPMVEGEGLASRLIEVGPSGAQFLGPVIVEIPHFAALRGKERELVVLRSENGDSWKEHFCDYTEDELNEILNGMDEVLDSPEDLEKKRICRIITRDFPQYFAVVSRIKQDSNLIGPEGGVLSSTVVPQVQAVFPEGALTKRIRVGLQAQPMHSELVKKILGNKATFSPIVTLEPRRRKFHKPITMTIPVPKASSDVMLNGFGGDAPTLRLLCSITGGTTPAQWEDITGTTPLTFVNECVSFTTNVSARFWLIDCRQIQESVTFASQVYREIICVPYMAKFVVFAKSHDPIEARLRCFCMTDDKVDKTLEQQENFAEVARSRDVEVLEGKPIYVDCFGNLVPLTKSGQHHIFSFFAFKENRLPLFVKVRDTTQEPCGRLSFMKEPKSTRGLVHQAICNLNITLPIYTKESESDQEQEEEIDMTSEKNDETESTETSVLKSHLVNEVPVLASPDLLSEVSEMKQDLIKMTAILTTDVSDKAGSIKVKELVKAAEEEPGEPFEIVERVKEDLEKVNEILRSGTCTRDESSVQSSRSERGLVEEEWVIVSDEEIEEARQKAPLEITEYPCVEVRIDKEIKGKVEKDSTGLVNYLTDDLNTCVPLPKEQLQTVQDKAGKKCEALAVGRSSEKEGKDIPPDETQSTQKQHKPSLGIKKPVRRKLKEKQKQKEEGLQASAEKAELKKGSSEESLGEDPGLAPEPLPTVKATSPLIEETPIGSIKDKVKALQKRVEDEQKGRSKLPIRVKGKEDVPKKTTHRPHPAASPSLKSERHAPGSPSPKTERHSTLSSSAKTERHPPVSPSSKTEKHSPVSPSAKTERHSPASSSSKTEKHSPVSPSTKTERHSPVSSTKTERHPPVSPSGKTDKRPPVSPSGRTEKHPPVSPGRTEKRLPVSPSGRTDKHQPVSTAGKTEKHLPVSPSGKTEKQPPVSPTSKTERIEETMSVRELMKAFQSGQDPSKHKTGLFEHKSAKQKQPQEKGKVRVEKEKGPILTQREAQKTENQTIKRGQRLPVTGTAESKRGVRVSSIGVKKEDAAGGKEKVLSHKIPEPVQSVPEEESHRESEVPKEKMADEQGDMDLQISPDRKTSTDFSEVIKQELEDNDKYQQFRLSEETEKAQLHLDQVLTSPFNTTFPLDYMKDEFLPALSLQSGALDGSSESLKNEGVAGSPCGSLMEGTPQISSEESYKHEGLAETPETSPESLSFSPKKSEEQTGETKESTKTETTTEIRSEKEHPTTKDITGGSEERGATVTEDSETSTESFQKEATLGSPKDTSPKRQDDCTGSCSVALAKETPTGLTEEAACDEGQRTFGSSAHKTQTDSEVQESTATSDETKALPLPEASVKTDTGTESKPQGVIRSPQGLELALPSRDSEVLSAVADDSLAVSHKDSLEASPVLEDNSSHKTPDSLEPSPLKESPCRDSLESSPVEPKMKAGIFPSHFPLPAAVAKTELLTEVASVRSRLLRDPDGSAEDDSLEQTSLMESSGKSPLSPDTPSSEEVSYEVTPKTTDVSTPKPAVIHECAEEDDSENGEKKRFTPEEEMFKMVTKIKMFDELEQEAKQKRDYKKEPKQEESSSSSDPDADCSVDVDEPKHTGSGEDESGVPVLVTSESRKVSSSSESEPELAQLKKGADSGLLPEPVIRVQPPSPLPSSMDSNSSPEEVQFQPVVSKQYTFKMNEDTQEEPGKSEEEKDSESHLAEDRHAVSTEAEDRSYDKLNRDTDQPKICDGHGCEAMSPSSSAAPVSSGLQSPTGDDVDEQPVIYKESLALQGTHEKDTEGEELDVSRAESPQADCPSESFSSSSSLPHCLVSEGKELDEDISATSSIQKTEVTKTDETFENLPKDCPSQDSSITTQTDRFSMDVPVSDLAENDEIYDPQITSPYENVPSQSFFSSEESKTQTDANHTTSFHSSEVYSVTITSPVEDVVVASSSSGTVLSKESNFEGQDIKMESQQESTLWEMQSDSVSSSFEPTMSATTTVVGEQISKVIITKTDVDSDSWSEIREDDEAFEARVKEEEQKIFGLMVDRQSQGTTPDTTPARTPTEEGTPTSEQNPFLFQEGKLFEMTRSGAIDMTKRSYADESFHFFQIGQESREETLSEDVKEGATGADPLPLETSAESLALSESKETVDDEADLLPDDVSEEVEEIPASDAQLNSQMGISASTETPTKEAVSVGTKDLPTVQTGDIPPLSGVKQISCPDSSEPAVQVQLDFSTLTRSVYSDRGDDSPDSSPEEQKSVIEIPTAPMENVPFTESKSKIPVRTMPTSTPAPPSAEYESSVSEDFLSSVDEENKADEAKPKSKLPVKVPLQRVEQQLSDLDTSVQKTVAPQGQDMASIAPDNRSKSESDASSLDSKTKCPVKTRSYTETETESRERAEELELESEEGATRPKILTSRLPVKSRSTTSSCRGGTSPTKESKEHFFDLYRNSIEFFEEISDEASKLVDRLTQSEREQEIVSDDESSSALEVSVIENLPPVETEHSVPEDIFDTRPIWDESIETLIERIPDENGHDHAEDPQDEQERIEERLAYIADHLGFSWTELARELDFTEEQIHQIRIENPNSLQDQSHALLKYWLERDGKHATDTNLVECLTKINRMDIVHLMETNTEPLQERISHSYAEIEQTITLDHSEGFSVLQEELCTAQHKQKEEQAVSKESETCDHPPIVSEEDISVGYSTFQDGVPKTEGDSSATALFPQTHKEQVQQDFSGKMQDLPEESSLEYQQEYFVTTPGTETSETQKAMIVPSSPSKTPEEVSTPAEEEKLYLQTPTSSERGGSPIIQEPEEPSEHREESSPRKTSLVIVESADNQPETCERLDEDAAFEKELTEELGELEASSDEEAMVTTRVVRRRVIIQGDDMPEIPPETVTEEEYIDEHGHTVVKKDNNE

SEQ ID NO: 19893 - protein, 81 aa, Homo sapiens
MGLGPVFLLLAGIFPFAPPGAAAEPHSLRYNLTVLSWDGSVQSGFLAEVHLDGQPFLRYDRQKCRAKPQGQWAEDVLGNKT

SEQ ID NO: 19894 - protein, 1887 aa, Homo sapiens
MGWGSRCCCPGRLDLLCVLALLGGCLLPVCRTRVYTNHWAVKIAGGFPEANRIASKYGFINIGQIGALKDYYHFYHSRTIKRSVISSRGTHSFISMEPKVEWIQQQVVKKRTKRDYDFSRAQSTYFNDPKWPSMWYMHCSDNTHPCQSDMNIEGAWKRGYTGKNIVVTILDDGIERTHPDLMQNYDALASCDVNGNDLDPMPRYDASNENKHGTRCAGEVAAAANNSHCTVGIAFNAKIGGVRMLDGDVTDMVEAKSVSFNPQHVHIYSASWGPDDDGKTVDGPAPLTRQAFENGVRMGRRGLGSVFVWASGNGGRSKDHCSCDGYTNSIYTISISSTAESGKKPWYLEECSSTLATTYSSGESYDKKIITTDLRQRCTDNHTGTSASAPMAAGIIALALEANPFLTWRDVQHVIVRTSRAGHLNANDWKTNAAGFKVSHLYGFGLMDAEAMVMEAEKWTTVPRQHVCVESTDRQIKTIRPNSAVRSIYKASGCSDNPNRHVNYLEHVVVRITITHPRRGDLAIYLTSPSGTRSQLLANRLFDHSMEGFKNWEFMTIHCWGERAAGDWVLEVYDTPSQLRNFKTPGKLKEWSLVLYGTSVQPYSPTNEFPKVERFRYSRVEDPTDDYGTEDYAGPCDPECSEVGCDGPGPDHCNDCLHYYYKLKNNTRICVSSCPPGHYHADKKRCRKCAPNCESCFGSHGDQCMSCKYGYFLNEETNSCVTHCPDGSYQDTKKNLCRKCSENCKTCTEFHNCTECRDGLSLQGSRCSVSCEDGRYFNGQDCQPCHRFCATCAGAGADGCINCTEGYFMEDGRCVQSCSISYYFDHSSENGYKSCKKCDISCLTCNGPGFKNCTSCPSGYLLDLGMCQMGAICKDGEYVDEHGHCQTCEASCAKCQGPTQEDCTTCPMTRIFDDGRCVSNCPSWKFEFENQCHPCHHTCQRCQGSGPTHCTSCGADNYGREHFLYQGECGDSCPEGHYATEGNTCLPCPDNCELCHSVHVCTRCMKGYFIAPTNHTCQKLECGQGEVQDPDYEECVPCEEGCLGCSLDDPGTCTSCAMGYYRFDHHCYKTCPEKTYSEEVECKACDSNCGSCDQNGCYWCEEGFFLLGGSCVRKCGPGFYGDQEMGECESCHRACETCTGPGHDECSSCQEGLQLLRGMCVHATKTQEEGKFWNEAVSTANLSVVKSLLQERRRWKVQIKRDILRKLQPCHSSCKTCNGSATLCTSCPKGAYLLAQACVSSCPQGTWPSVRSGSCENCTEACAICSGADLCKKCQMQPGHPLFLHEGRCYSKCPEGSYAEDGICERCSSPCRTCEGNATNCHSCEGGHVLHHGVCQENCPERHVAVKGVCKHCPEMCQDCIHEKTCKECTPEFFLHDDMCHQSCPRGFYADSRHCVPCHKDCLECSGPKADDCELCLESSWVLYDGLCLEECPAGTYYEKETKECRDCHKSCLTCSSSGTCTTCQKGLIMNPRGSCMANEKCSPSEYWDEDAPGCKPCHVKCFHCMGPAEDQCQTCPMNSLLLNTTCVKDCPEGYYADEDSNRCAHCHSSCRTCEGRHSRQCHSCRPGWFQLGKECLLQCREGYYADNSTGRCERCNRSCKGCQGPRPTDCLSCDRFFFLLRSKGECHRSCPDHYYVEQSTQTCERCHPTCDQCKGKGALNCLSCVWSYHLMGGICTSDCLVGEYRVGEGEKFNCEKCHESCMECKGPGAKNCTLCPANLVLHMDDSHCLHCCNTSDPPSAQECCDCQDTTDECILRTSKVRPATEHFKTALFITSSMMLVLLLGAAVVVWKKSRGRVQPAAKAGYEKLADPNKSYSSYKSSYRESTSFEEDQVIEYRDRDYDEDDDDDIVYMGQDGTVYRKFKYGLLDDDDIDELEYDDESYSYYQ

SEQ ID NO: 19895 - protein, 900 aa, Homo sapiens
MNYPGRGSPRSPEHNGRGGGGGAWELGSDARPAFGGGVCCFEHLPGGDPDDGDVPLALLRGEPGLHLAPGTDDHNHHLALDPCLSDENYDFSSAESGSSLRYYSEGESGGGGSSLSLHPPQQPPLVPTNSGGGGATGGSPGERKRTRLGGPAARHRYEVVTELGPEEVRWFYKEDKKTWKPFIGYDSLRIELAFRTLLQTTGARPQGGDRDGDHVCSPTGPASSSGEDDDEDRACGFCQSTTGHEPEMVELVNIEPVCVRGGLYEVDVTQGECYPVYWNQADKIPVMRGQWFIDGTWQPLEEEESNLIEQEHLNCFRGQQMQENFDIEVSKSIDGKDAVHSFKLSRNHVDWHSVDEVYLYSDATTSKIARTVTQKLGFSKASSSGTRLHRGYVEEATLEDKPSQTTHIVFVVHGIGQKMDQGRIIKNTAMMREAARKIEERHFSNHATHVEFLPVEWRSKLTLDGDTVDSITPDKVRGLRDMLNSSAMDIMYYTSPLYRDELVKGLQQELNRLYSLFCSRNPDFEEKGGKVSIVSHSLGCVITYDIMTGWNPVRLYEQLLQKEEELPDERWMSYEERHLLDELYITKRRLKEIEERLHGLKASSMTQTPALKFKVENFFCMGSPLAVFLALRGIRPGNTGSQDHILPREICNRLLNIFHPTDPVAYRLEPLILKHYSNISPVQIHWYNTSNPLPYEHMKPSFLNPAKEPTSVSENEGISTIPSPVTSPVLSRRHYGESITNIGKASILGAASIGKGLGGMLFSRFGRSSTTQSSETSKDSMEDEKKPVASPSATTVGTQTLPHSSSGFLDSAYFRLQESFFNLPQLLFPENVMQNKDNALVELDHRIDFELREGLVESRYWSAVTSHTAYWSSLDVALFLLTFMYKHEHDDDAKPNLDPI

SEQ ID NO: 19896 - protein, 1889 aa, Homo sapiens
MEGSLAGSLAAPDRPQGPERLPGPAPRENIEGGAEAAEGEGGIFRSTRYLPVTKEGPRDILDGRGGISDGQPHPGLSEALPRVTSATHRISSCCWDGGSLDFRPGSPPPHLLGHFPGTPDGRGPWEHPLVQEAGEGILSERRFEDSVIVRTMKPHAELEGSRRFLHHRGEPRLLEKHAQGRPRFDWLQDEDEQGSPQDAGLHLDLPAQPPPLAPFRRVFVPVEDTPKTLDMAVVGGREDLEDLEGLAQPSEWGLPTSASEVATQTWTVNSEASVERLQPLLPPIRTGPYLCELLEEVAEGVASPDEDEDEEPAVFPCIECSIYFKQKEHLLEHMSQHRRAPGQEPPADLAPLACGECGWAFADPTALEQHRQLHQASREKIIEEIQKLKQVPGDEGREARLQCPKCVFGTNSSRAYVQHAKLHMREPPGQTTKEPFGGSSGAGSPSPEASALLYQPYGAAVGLSACVFCGFPAPSESLLREHVRLVHAHPHWEEDGEAYEEDPASQPGTSQDAHACFPDTAVDYFGKAEPSLAPMWRENPAGYDPSLAFGPGCQQLSIRDFPLSKPLLHGTGQRPLGRLAFPSTLASTPYSLQLGRNKSTVHPQGLGERRRPWSEEEEEEEEEEDVVLTSEMDFSPENGVFSPLATPSLIPQAALELKQAFREALQAVEATQGQQQQLRGMVPIVLVAKLGPQVMAAARVPPRLQPEELGLAGAHPLDFLLLDAPLGGPLGLDTLLDGDPAMALKHEERKCPYCPDRFHNGIGLANHVRGHLNRVGVSYNVRHFISAEEVKAIERRFSFQKKKKKVANFDPGTFSLMRCDFCGAGFDTRAGLSSHARAHLRDFGITNWELTVSPINILQELLATSAAEQPPSPLGREPGGPPGSFLTSRRPRLPLTVPFPPTWAEDPGPAYGDGLGSEENAMVAMDLGSPSLPKKSLPVPGALEQVASRLSSKVAAEVPHGSKQELQDLKAQSLTTCEVCGACFETRKGLSSHARSHLRQLGVAESESSGAPIDLLYELVKQKGLPDAHLGLPPGLAKKSSSLKEVVAGAPRPGLLSLAKPLDAPAVNKAIKSPPGFSAKGLGHPPSSPLLKKTPLALAGSPTPKNPEDKSPQLSLSPRPASPKAQWPQSEDEGPLNLTLDSDGGRELDCQLCGAWFETRKGLSSHARAHLRHLGVSDPDAKGSPIDVLHGLIRRDGVQIRLPPRRGALAHPGRPPPTSAALSLLPPPPPAKKAKLKAAGMASPWGKQDLSAAAAAGIFWASDVEPSPLNLSSGPEPARDIRCEFCGEFFENRKGLSSHARSHLRQMGVTEWYVNGSPIDTLREILKRRTQSRPGGPPNPPGPSPKALAKMMGGAGPGSSLEARSPSDLHISPLAKKLPPPPGSPLGHSPTASPPPTARKMFPGLAAPSLPKKLKPEQIRVEIKREMLPGALHGELHPSEGPWGAPREDMTPLNLSSRAEPVRDIRCEFCGEFFENRKGLSSHARSHLRQMGVTEWSVNGSPIDTLREILKKKSKPCLIKKEPPAGDLAPALAEDGPPTVAPGPVQSPLPLSPLAGRPGKPGAGPAQVPRELSLTPITGAKPSATGYLGSVAAKRPLQEDRLLPAEVKAKTYIQTELPFKAKTLHEKTSHSSTEACCELCGLYFENRKALASHARAHLRQFGVTEWCVNGSPIETLSEWIKHRPQKVGAYRSYIQGGRPFTKKFRSAGHGRDSDKRPSLGLAPGGLAVVGRSAGGEPGPEAGRAADGGERPLAASPPGTVKAEEHQRQNINKFERRQARPPDASAARGGEDTNDLQQKLEEVRQPPPRVRPVPSLVPRPPQTSLVKFVGNIYTLKCRFCEVEFQGPLSIQEEWVRHLQRHILEMNFSKADPPPEESQAPQAQTAAAEAP

SEQ ID NO: 19897 - protein, 13 aa, Homo sapiens
MGLGPVFLLLAGI

SEQ ID NO: 19898 - protein, 481 aa, Homo sapiens
MKSDCMQTTICQERKKDPIEMFHSGQLVKVCAPMVRYSKLAFRTLVRKYSCDLCYTPMIVAADFVKSIKARDSEFTTNQGDCPLIVQFAANDARLLSDAARIVCPYANGIDINCGCPQRWAMAEGYGACLINKPELVQDMVKQVRNQVETPGFSVSIKIRIHDDLKRTVDLCQKAEATGVSWITVHGRTAEERHQPVHYDSIKIIKENMSIPVIANGDIRSLKEAENVWRITGTDGVKKKMTLQWAAVATFLYAEIGLILIFCLPFIPPQRWQKIFSFNVWGKIATFWNKAFLTIIILLIVLFLDAVREVRKYSSVHTIEKSSTSRPDAYEHTQMKLFRSQRNLYISGFSLFFWLVLRRLVTLITQLAKELSNKGVLKTQAENTNKAAKKFMEENEKLKRILKSHGKDEECVLEAENKKLVEDQEKLKTELRKTSDALSKAQNDVMEMKMQSERLSKEYDQLLKEHSELQDRLERGNKKRL

SEQ ID NO: 19899 - protein, 204 aa, Homo sapiens
MGTVSSRRSWWPLPLLLLLLLLLGPAGARAQEDEDGDYEELVLALRSEEDGLAEAPEHGTTATFHRCAKDPWRLPGTYVVVLKEETHLSQSERTARRLQAQAARRGYLTKILHVFHGLLPGFLVKMSGDLLELALKLPHVDYIEEDSSVFAQSIPWNLERITPPRYRADEYQPPGVPGPGHFRWRRTLLAATCLKSSFGLAESF

SEQ ID NO: 19900 - protein, 42 aa, Homo sapiens
METGERARLILILVLQLLLRIRRNRQQRCRRVLSHRSLFPRM

SEQ ID NO: 19901 - protein, 897 aa, Homo sapiens
MFPTGFSSPSPSAAAAAQEVRSATDGNTSTTPPTSAKKRKLNSSSSSSSNSSNEREDFDSTSSSSSTPPLQPRDSASPSTSSFCLGVSVAASSHVPIQKKLRFEDTLEFVGFDAKMAEESSSSSSSSSPTAATSQQQQLKNKSILISSVASVHHANGLAKSSTTVSSFANSKPGSAKKLVIKNFKDKPKLPENYTDETWQKLKEAVEAIQNSTSIKYNLEELYQAVENLCSYKISANLYKQLRQICEDHIKAQIHQFREDSLDSVLFLKKIDRCWQNHCRQMIMIRSIFLFLDRTYVLQNSMLPSIWDMGLELFRAHIISDQKVQNKTIDGILLLIERERNGEAIDRSLLRSLLSMLSDLQIYQDSFEQRFLEETNRLYAAEGQKLMQEREVPEYLHHVNKRLEEEADRLITYLDQTTQKSLIATVEKQLLGEHLTAILQKGLNNLLDENRIQDLSLLYQLFSRVRGGVQVLLQQWIEYIKAFGSTIVINPEKDKTMVQELLDFKDKVDHIIDICFLKNEKFINAMKEAFETFINKRPNKPAELIAKYVDSKLRAGNKEATDEELEKMLDKIMIIFRFIYGKDVFEAFYKKDLAKRLLVGKSASVDAEKSMLSKLKHECGAAFTSKLEGMFKDMELSKDIMIQFKQVKYMQNQNVPGNIELTVNILTMGYWPTYVPMEVHLPPEMVKLQEIFKTFYLGKHSGRKLQWQSTLGHCVLKAEFKEGKKELQVSLFQTLVLLMFNEGEEFSLEEIKQATGIEDGELRRTLQSLACGKARVLAKNPKGKDIEDGDKFICNDDFKHKLFRIKINQIQMKETVEEQASTTERVFQDRQYQIDAAIVRIMKMRKTLSHNLLVSEVYNQLKFPVKPADLKKRIESLIDRDYMERDKENPNQYNYIA

SEQ ID NO: 19902 - protein, 574 aa, Homo sapiens
MLREFSKWGVEASPGKAWERKRSLLRGAVGRYRGATGGDLFWAPFPSWGTMEFPEHSQQLLQSLREQRSQGFLCDCTVMVGSTQFLAHRAVLASCSPFFQLFYKERELDKRDLVCIHNEIVTAPAFGLLLDFMYAGQLTLRGDTPVEDVLAAASYLHMNDIVKVCKRRLQARALAEADSTKKEEETNSQLPSLEFLSSTSRGTQPSLASAETSGHWGKGEWKGSAAPSPTVRPPDEPPMSSGADTTQPGMEVDAPHLRAPHPPVADVSLASPSSSTETIPTNYFSSGISAVSLEPLPSLDVGPESLRVVEPKDPGGPLQGFYPPASAPTSAPAPVSAPVPSQAPAPAEAELVQVKVEAIVISDEETDVSDEQPQGPERAFPSGGAVYGAQPSQPEAFEDPGAAGLEEVGPSDHFLPTDPHLPYHLLPGAGQYHRGLVTSPLPAPASLHEPLYLSSEYEAAPGSFGVFTEDVPTCKTCGKTFSCSYTLRRHATVHTRERPYECRYCLRSYTQSGDLYRHIRKAHNEDLAKRSKPDPEVGPLLGVQPLPGSPTADRQSSSGGGPPKDFVLAPKTNI

SEQ ID NO: 19903 - protein, 495 aa, Homo sapiens
MEREPAGTEEPGPPGRRRRREGRTRTVRSNLLPPPGAEDPAAGAAKGERRRRRGCAQHLADNRLKTTKYTLLSFLPKNLFEQFHRPANVYFVFIALLNFVPAVNAFQPGLALAPVLFILAITAFRDLWEDYSRHRSDHKINHLGCLVFSREEKKYVNRFWKEIHVGDFVRLRCNEIFPADILLLSSSDPDGLCHIETANLDGETNLKRRQVVRGFSELVSEFNPLTFTSVIECEKPNNDLSRFRGCIIHDNGKKAGLYKENLLLRGCTLRNTDAVVGIVIYAGHETKALLNNSGPRYKRSKLERQMNCDVLWCVLLLVCMSLFSAVGHGLWIWRYQEKKSLFYVPKSDGSSLSPVTAAVYSFLTMIIVLQVLIPISLYVSIEIVKACQVYFINQDMQLYDEETDSQLQCRALNITEDLGQIQYIFSDKTGTLTENKMVFRRCTVSGVEYSHDANEGLLRDAQWSTRLAGSISISFSGLLTGPCCFDSAPCLCLKF

SEQ ID NO: 19904 - protein, 70 aa, Homo sapiens
MLPPMALPSVSWMLLSCLMLLSQVQGEEPQRELPSARIRCPKGSKAYGSHCYALFLSPKSWTDADLACQK

SEQ ID NO: 19905 - protein, 471 aa, Homo sapiens
MAQSRVLLLLLLLPPQLHLGPVLAVRAPGFGRSGGHSLSPEENEFAEEEPVLVLSPEEPGPGPAAVSCPRDCACSQEGVVDCGGIDLREFPGDLPEHTNHLSLQNNKLEKIPPGAFSELSSLRELYLQNNYLTDEGLDNETFWKLSSLEYLDLSSNNLSRVPAGLPRSLVLLHLEKNAIRSVDANVLTPIRSLEYLLLHSNQLREQGIHPLAFQGLKRLHTVHLYNNALERVPSGLPRRVRTLMILHNQITGIGREDFATTYFLEELNLSYNRITSPQVHRDAFRKLRLLRSLDLSGNRLHTLPPGLPRNVHVLKVKRNELAALARGALVGMAQLRELYLTSNRLRSRALGPRAWVDLAHLQLLDIAGNQLTEIPEGLPESLEYLYLQNNKISAVPANAFDSTPNLKGIFLRFNKLAVGSVVDSAFRRLKHLQVLDIEGNLEFGDISKDRGRLGKEKEEEEEEEEEEEETR

SEQ ID NO: 19906 - protein, 614 aa, Homo sapiens
RLPSPGSCGLLTLALCSLALSLLAHFRTAELQARVLRLEAERGEQQMETAILGRVNQLLDEKWKLHSRRRREAPKTSPGCNCPPGPPGPTGRPGLPGVKGQPGEKGSPGDAGLSIIGPRGPPGQPGTRGFPGFPGPIGLDGKPGHPGPKGDMGLTGPPGQPGPQGQKGEKGQCGEYPHRLLPLLNSVRLAPPPVIKRRTFQGEQSQASIQGPPGPPGPPGPSGPLGHPGLPGPMGPPGLPGPPGPKGDPGIQGYHGRKGERGMPGMPGKHGAKGAPGIAVAGMKGEPGIPGTKGEKGAEGSPGLPGLLGQKGEKGDAGNSIGGGRGEPGPPGLPGPPGPKGEAGVDGQVGPPGQPGDKGERGAAGEQGPDGPKGSKGEPGKGEMVDYNGNINEALQEIRTLALMGPPGLPGQIGPPGAPGIPGQKGEIGLPGPPGHDGEKGPRGKPGDMGPPGPQGPPGKDGPPGVKGENGHPGSPGEKGEKGETGQAGSPGLQGVPGPKGEAGLDGAKGEKGFQGEKGDRGPLGLPGTPGPIGVPGPAGPKGERGSKGDPGMTGPTGAAGLPGLHGPPGDKGNRGHRGFKGEKGEPGLPGLDGLDAPCPLGEDGLPVQGCWNK

SEQ ID NO: 19907 - protein, 242 aa, Homo sapiens
MGCLLFLLLWALLQAWGSAEVPQRLFPLRCLQISSFANSSWTRTDGLAWLGELQTHSWSNDSDTVRSLKPWSQGTFSDQQWETLQHIFRVYRSSFTRDVKEFAKMLRLSYPLELQVSAGCEVHPGNASNNFFHVAFQGKDILSFQGTSWEPTQEAPLWVNLAIQVLNQDKWTRETVQWLLNGTCPQFVSGLLESGKSELKKQGGSYTSMGLIALAVLACLLFLLIVGFTSRFKRQTSYQGVL

SEQ ID NO: 19908 - protein, 2388 aa, Homo sapiens
MAENVVEPGPPSAKRPKLSSPALSASASDGTDFGSLFDLEHDLPDELINSTELGLTNGGDINQLQTSLGMVQDAASKHKQLSELLRSGSSPNLNMGVGGPGQVMASQAQQSSPGLGLINSMVKSPMTQAGLTSPNMGMGTSGPNQGPTQSTGMMNSPVNQPAMGMNTGMNAGMNPGMLAAGNGQGIMPNQVMNGSIGAGRGRQNMQYPNPGMGSAGNLLTEPLQQGSPQMGGQTGLRGPQPLKMGMMNNPNPYGSPYTQNPGQQIGASGLGLQIQTKTVLSNNLSPFAMDKKAVPGGGMPNMGQQPAPQVQQPGLVTPVAQGMGSGAHTADPEKRKLIQQQLVLLLHAHKCQRREQANGEVRQCNLPHCRTMKNVLNHMTHCQSGKSCQVAHCASSRQIISHWKNCTRHDCPVCLPLKNAGDKRNQQPILTGAPVGLGNPSSLGVGQQSAPNLSTVSQIDPSSIERAYAALGLPYQVNQMPTQPQVQAKNQQNQQPGQSPQGMRPMSNMSASPMGVNGGVGVQTPSLLSDSMLHSAINSQNPMMSENASVPSLGPMPTAAQPSTTGIRKQWHEDITQDLRNHLVHKLVQAIFPTPDPAALKDRRMENLVAYARKVEGDMYESANNRAEYYHLLAEKIYKIQKELEEKRRTRLQKQNMLPNAAGMVPVSMNPGPNMGQPQPGMTSSLNQFGQMSMAQPPIVPRQTPPLQHHGQLAQPGALNPPMGYGPRMQQPSNQGQFLPQTQFPSQGMNVTNIPLAPSSGQAPVSQAQMSSSSCPVNSPIMPPGSQGSHIHCPQLPQPALHQNSPSPVPSRTPTPHHTPPSIGAQQPPATTIPAPVPTPPAMPPGPQSQALHPPPRQTPTPPTTQLPQQVQPSLPAAPSADQPQQQPRSQQSTAASVPTPTAPLLPPQPATPLSQPAVSIEGQVSNPPSTSSTEVNSQAIAEKQPSQEVKMEAKMEVDQPEPADTQPEDISESKVEDCKMESTETEERSTELKTEIKEEEDQPSTSATQSSPAPGQSKKKIFKPEELRQALMPTLEALYRQDPESLPFRQPVDPQLLGIPDYFDIVKSPMDLSTIKRKLDTGQYQEPWQYVDDIWLMFNNAWLYNRKTSRVYKYCSKLSEVFEQEIDPVMQSLGYCCGRKLEFSPQTLCCYGKQLCTIPRDATYYSYQNRYHFCEKCFNEIQGESVSLGDDPSQPQTTINKEQFSKRKNDTLDPELFVECTECGRKMHQICVLHHEIIWPAGFVCDGCLKKSARTRKENKFSAKRLPSTRLGTFLENRVNDFLRRQNHPESGEVTVRVVHASDKTVEVKPGMKARFVDSGEMAESFPYRTKALFAFEEIDGVDLCFFGMHVQEYGSDCPPPNQRRVYISYLDSVHFFRPKCLRTAVYHEILIGYLEYVKKLGYTTGHIWACPPSEGDDYIFHCHPPDQKIPKPKRLQEWYKKMLDKAVSERIVHDYKDIFKQATEDRLTSAKELPYFEGDFWPNVLEESIKELEQEEEERKREENTSNESTDVTKGDSKNAKKKNNKKTSKNKSSLSRGNKKKPGMPNVSNDLSQKLYATMEKHKEVFFVIRLIAGPAANSLPPIVDPDPLIPCDLMDGRDAFLTLARDKHLEFSSLRRAQWSTMCMLVELHTQSQDRFVYTCNECKHHVETRWHCTVCEDYDLCITCYNTKNHDHKMEKLGLGLDDESNNQQAAATQSPGDSRRLSIQRCIQSLVHACQCRNANCSLPSCQKMKRVVQHTKGCKRKTNGGCPICKQLIALCCYHAKHCQENKCPVPFCLNIKQKLRQQQLQHRLQQAQMLRRRMASMQRTGVVGQQQGLPSPTPATPTTPTGQQPTTPQTPQPTSQPQPTPPNSMPPYLPRTQAAGPVSQGKAAGQVTPPTPPQTAQPPLPGPPPAAVEMAMQIQRAAETQRQMAHVQIFQRPIQHQMPPMTPMAPMGMNPPPMTRGPSGHLEPGMGPTGMQQQPPWSQGGLPQPQQLQSGMPRPAMMSVAQHGQPLNMAPQPGLGQVGISPLKPGTVSQQALQNLLRTLRSPSSPLQQQQVLSILHANPQLLAAFIKQRAAKYANSNPQPIPGQPGMPQGQPGLQPPTMPGQQGVHSNPAMQNMNPMQAGVQRAGLPQQQPQQQLQPPMGGMSPQAQQMNMNHNTMPSQFRDILRRQQMMQQQQQQGAGPGIGPGMANHNQFQQPQGVGYPPQQQQRMQHHMQQMQQGNMGQIGQLPQALGAEAGASLQAYQQRLLQQQMGSPVQPNPMSPQQHMLPNQAQSPHLQGQQIPNSLSNQVRSPQPVPSPRPQSQPPHSSPSPRMQPQPSPHHVSPQTSSPHPGLVAAQANPMEQGHFASPDQNSMLSQLASNPGMANLHGASATDLGLSTDNSDLNSNLSQSTLDIH

SEQ ID NO: 19909 - protein, 756 aa, Homo sapiens
MLTMGRLQLVVLGLTCCWAVASAAKLGAVYTEGGFVEGVNKKLGLLGDSVDIFKGIPFAAPTKALENPQPHPGWQGTLKAKNFKKRCLQATITQDSTYGDEDCLYLNIWVPQGRKQVSRDLPVMIWIYGGAFLMGSGHGANFLNNYLYDGEEIATRGNVIVVTFNYRVGPLGFLSTGDANLPGNYGLRDQHMAIAWVKRNIAAFGGDPNNITLFGESAGGASVSLQTLSPYNKGLIRRAISQSGVALSPWVIQKNPLFWAKKVAEKVGCPVGDAARMAQCLKVTDPRALTLAYKVPLAGLEYPMLHYVGFVPVIDGDFIPADPINLYANAADIDYIAGTNNMDGHIFASIDMPAINKGNKKVTEEDFYKLVSEFTITKGLRGAKTTFDVYTESWAQDPSQENKKKTVVDFETDVLFLVPTEIALAQHRANAKSAKTYAYLFSHPSRMPVYPKWVGADHADDIQYVFGKPFATPTGYRPQDRTVSKAMIAYWTNFAKTGDPNMGDSAVPTHWEPYTTENSGYLEITKKMGSSSMKRSLRTNFLRYWTLTYLALPTVTDQEATPVPPTGDSEATPVPPTGDSETAPVPPTGDSGAPPVPPTGDSGAPPVPPTGDSGAPPVPPTGDSGAPPVPPTGDSGAPPVPPTGDSGAPPVPPTGDSGAPPVPPTGDSGAPPVPPTGDAGPPPVPPTGDSGAPPVPPTGDSGAPPVTPTGDSETAPVPPTGDSGAPPVPPTGDSEAAPVPPTDDSKEAQMPAVIRF

SEQ ID NO: 19910 - protein, 220 aa, Homo sapiens
MNWRRKSVIGLSFDFVALNLTGFVAYSVFNIGLLWVPYIKEQFLLKYPNGVNPVNSNDVFFSLHAVVLTLIIIVQCCLYERGGQRVSWPAIGFLVLAWLFAFVTMIVAAVGVTTWLQFLFCFSYIKLAVTLVKYFPQAYMNFYYKSTEGWSIGNVLLDFTGGSFSLLQMFLQSYNNDQWTLIFGDPTKFGLGVFSIVFDVVFFIQHFCLYRKRPGYDQLN

SEQ ID NO: 19911 - protein, 888 aa, Homo sapiens
MDDSEVESTASILASVKEQEAQFEKLTRALEEERRHVSAQLERVRVSPQDANPLMANGTLTRRHQDHSHLLYSTIPRMQEPGQIVETYTEEDPEGAMSVVSVETSDDGTTRRTETTVKKVVKTVTTRTVQPVAMGPDGLPVDASSVSNNYIQTLGRDFRKNGNGGPGPYVGQAGTATLPRNFHYPPDGYSRHYEDGYPGGSDNYGSLSRVTRIEERYRPSMEGYRAPSRQDVYGPQPQVRVGGSSVDLHRFHPEPYGLEDDQRSMGYDDLDYGMMSDYGTARRTGTPSDPRRRLRSYEDMIGEEVPSDQYYWAPLAQHERGSLASLDSLRKGGPPPPNWRQPELPEVIAMLGFRLDAVKSNAAAYLQHLCYRNDKVKTDVRKLKGIPVLVGLLDHPKKEVHLGACGALKNISFGRDQDNKIAIKNCDGVPALVRLLRKARDMDLTEVITGTLWNLSSHDSIKMEIVDHALHALTDEVIIPHSGWEREPNEDCKPRHIEWESVLTNTAGCLRNVSSERSEARRKLRECDGLVDALIFIVQAEIGQKDSDSKLVENCVCLLRNLSYQVHREIPQAERYQEAAPNVANNTGPHAASCFGAKKGKGKKPIEDPANDTVDFPKRTSPARGYELLFQPEVVRIYISLLKESKTPAILEASAGAIQNLCAGRWTYGRYIRSALRQEKALSAIADLLTNEHERVVKAASGALRNLAVDARNKELIGKHAIPNLVKNLPGGQQNSSWNFSEDTVISILNTINEVIAENLEAAKKLRETQGIEKLVLINKSGNRSEKEVRAAALVLQTIWGYKELRKPLEKEGWKKSDFQVNLNNASRSQSSHSYDDSTLPLIDRNQKSDNNYSTPNERGDHNRTLDRSGDLGDMEPLKGTTPLMQKI

SEQ ID NO: 19912 - protein, 123 aa, Homo sapiens
MAPWPPKGLVPAMLWGLSLFLNLPGPIWLQPSPPPQSSPPPQPHPCHTCRGLVDSFNKGLERTIRDNFGGGNTAWEEENLSKYKDSETRLVEVLEGVCSKSDFECHRLLELSEELVESWWFHK

SEQ ID NO: 19913 - protein, 394 aa, Homo sapiens
MASMAAVLTWALALLSAFSATQARKGFWDYFSQTSGDKGRVEQIHQQKMAREPAGSVRDDLGTKEMMEASSLTAWISVPFSRTLKDSLEQDLNNMNKFLEKLRPLSGSEAPRLPQDPVGMRRQLQEELEEVKARLQPYMAEAHELVGWNLEGLRQQLKPYTMDLMEQVALRVQELQEQLRVVGEDTKAQLLGGVDEAWALLQGLQSRVVHHTGRFKELFHPYAESLVSGIGRHVQELHRSVAPHAPASPARLSRCVQVLSRKLTLKAKALHARIQQNLDQLREELSRAFAGTGTEEGAGPDPQMLSEEVRQRLQAFRQDTYLQIAAFTRAIDQETEEVQQQLAPPPPGHSAFAPEFQQTDSGKVLSKLQARLDDLWEDITHSLHDQGHSHLGDP

SEQ ID NO: 19914 - protein, 34 aa, Homo sapiens
MRMSVGLSLLLPLSGRTFLLLLSVVMAQSHWPSE

SEQ ID NO: 19915 - protein, 165 aa, Homo sapiens
MIISHFPKCVAVFALLALSVGALDTFIAAVYEHAVILPNRTETPVSKEEALLLMNKNIDVLEKAVKLAAKQVLPFYTCKGDLQFGQRVFGIHDKLFCPTCFEQGAHIIVTPEDGIYGWIFTRESIYPYLEDIPDPGVNWIPCRDPWSTIFLHLKFSLISPRIQNL

SEQ ID NO: 19916 - protein, 240 aa, Homo sapiens
MAPWPPKGLVPAMLWGLSLFLNLPGPIWLQPSPPPQSSPPPQPHPCHTCRGLVDSFNKGLERTIRDNFGGGNTAWEEENLSKYKDSETRLVEVLEGVCSKSDFECHRLLELSEELVESWWFHKQQEAPDLFQWLCSDSLKLCCPAGTFGPSCLPCPGGTERPCGGYGQCEGEGTRGGSGHCDCQAGYGGEACGQCGLGYFEAERNASHLLVLAPVPDAQDLRNQTVCNARRAGPCITSSV

SEQ ID NO: 19917 - protein, 128 aa, Homo sapiens
MKVWLLLGLLLVHEALEDVTGQHLPKNKRPKEPGENRIKPTNKKVKPKIPKMKDRDSANSAPKTQSIMMQVLDKGRFQKPAATLSLLAGQTVELRCKGSRIGWSYPAYLDTFKDSRLSVKQNERYGQL

SEQ ID NO: 19918 - protein, 841 aa, Homo sapiens
MEREPAGTEEPGPPGRRRRREGRTRTVRSNLLPPPGAEDPAAGAAKGERRRRRGCAQHLADNRLKTTKYTLLSFLPKNLFEQFHRPANVYFVFIALLNFVPAVNAFQPGLALAPVLFILAITAFRDLWEDYSRHRSDHKINHLGCLVFSREEKKYVNRFWKEIHVGDFVRLRCNEIFPADILLLSSSDPDGLCHIETANLDGETNLKRRQVVRGFSELVSEFNPLTFTSVIECEKPNNDLSRFRGCIIHDNGKKAGLYKENLLLRGCTLRNTDAVVGIVIYAGHETKALLNNSGPRYKRSKLERQMNCDVLWCVLLLVCMSLFSAVGHGLWIWRYQEKKSLFYVPKSDGSSLSPVTAAVYSFLTMIIVLQVLIPISLYVSIEIVKACQVYFINQDMQLYDEETDSQLQCRALNITEDLGQIQYIFSDKTGTLTENKMVFRRCTVSGVEYSHDANAQRLARYQEADSEEEEVVPRGGSVSQRGSIGSHQSVRVVHRTQSTKSHRRTGSRAEAKRASMLSKHTAFSSPMEKDITPDPKLLEKVSECDKSLAVARHQEHLLAHLSPELSDVFDFFIALTICNTVVVTSPDQPRTKVRVRFELKSPVKTIEDFLRRFTPSCLTSGCSSIGSLAANKSSHKLGSSFPSTPSSDGMLLRLEERLGQPTSAIASNGYSSQADNWASELAQEQESERELRYEAESPDEAALVYAARAYNCVLVERLHDQVSVELPHLGRLTFELLHTLGFDSVRKRMSVVIRHPLTDEINVYTKGADSVVMDLLQPCSSGTPTPAQLHPSSGEEVLRNIPTQFLLLSKVIFINPFPTEMPIGELHGFFRSVFACLKGLD

SEQ ID NO: 19919 - protein, 1035 aa, Homo sapiens
MENWTGRPWLYLLLLLSLPQLCLDQEVLSGHSLQTPTEEGQGPEGVWGPWVQWASCSQPCGVGVQRRSRTCQLPTVQLHPSLPLPPRPPRHPEALLPRGQGPRPQTSPETLPLYRTQSRGRGGPLRGPASHLGREETQEIRAARRSRLRDPIKPGMFGYGRVPFALPLHRNRRHPRSPPRSELSLISSRGEEAIPSPTPRAEPFSANGSPQTELPPTELSVHTPSPQAEPLSPETAQTEVAPRTRPAPLRHHPRAQASGTEPPSPTHSLGEGGFFRASPQPRRPSSQGWASPQVAGRRPDPFPSVPRGRGQQGQGPWGTGGTPHGPRLEPDPQHPGAWLPLLSNGPHASSLWSLFAPSSPIPRCSGESEQLRACSQAPCPPEQPDPRALQCAAFNSQEFMGQLYQWEPFTEAPLLPLRHAFFLLPGAGSGDSTGVQGSQRCELNCRPRGFRFYVRHTEKVQDGTLCQPGAPDICVAGRCLSPGCDGILGSGRRPDGCGVCGGDDSTCRLVSGNLTDRGGPLGYQKILWIPAGALRLQIAQLRPSSNYLALRGPGGRSIINGNWAVDPPGSYRAGGTVFRYNRPPREEGKGESLSAEGPTTQPVDVYMIFQEENPGVFYQTPLGSPAAYWKRVGHSACSASCGKGVWRPIFLCISRESGEELDERSCAAGARPPASPEPCHGTPCPPYWEAGEWTSCSRSCGPGTQHRQLQCRQEFGGGGSSVPPERCGHLPRPNITQSCQLRLCGHWEVGSPWSQCSVRCGRGQRSRQVRCVGNNGDEVSEQECASGPPQPPSREACDMGPCTTAWFHSDWSSKCSAECGTGIQRRSVVCLGSGAALGPGQGEAGAGTGQSCPTGSRPPDMRACSLGPCERTWRWYTGPWGECSSECGSGTQRRDIICVSKLGTEFNVTSPSNCSHLPRPPALQPCQGQACQDRWFSTPWSPCSRSCQGGTQTREVQCLSTNQTLSTRCPPQLRPSRKRPCNSQPCSQRPDDQCKDSSPHCPLVVQARLCVYPYYTATCCRSCAHVLERSPQDPS

SEQ ID NO: 19920 - protein, 736 aa, Homo sapiens
MWMAWCVAALSVVAVCGTSHETNTVLRVTKDVLSNAISGMLQQSDALHSALREVPLGKARGDGGGPLLGGLLGGSGSGGGGGGGLLGGLLGGGGGGGGSDLLGGGLLGGSGSSGGELLGGGGGSGGGLLGGSGGGLLGGSGGGLLGGSRGGLLGGSGGGLLGGGRHHYNDYRRIEFPRGVGDIPYNDFHVRGPPPVYTNGKKLDGIYQYGHIETNDNTAQLGGKYRYGEILESEGSIRDLRNSGYRSAENAYGGHRGLGRYRAAPVGRLHRRELQPGEIPPGVATGAVGPGGLLGTGGMLAADGILAGQGGLLGGGGLLGDGGLLGGGGVLGVLGEGGILSTVQGITGLRIVELTLPRVSVRLLPGVGVYLSLYTRVAINGKSLIGFLDIAVEVNITAKVRLTMDRTGYPRLVIERCDTLLGGIKVKLLRGLLPNLVDNLVNRVLADVLPDLLCPIVDVVLGLVNDQLGLVDSLIPLGILGSVQYTFSSLPLVTGEFLELDLNTLVGEAGGGLIDYPLGWPAVSPKPMPELPPMGDNTKSQLAMSANFLGSVLTLLQKQHALDLDITNGMFEELPPLTTATLGALIPKVFQQYPESCPLIIRIQVLNPPSVMLQKDKALVKVLATAEVMVSQPKDLETTICLIDVDTEFLASFSTEGDKLMIDAKLEKTSLNLRTSNVGNFDIGLMEVLVEKIFDLAFMPAMNAVLGSGVPLPKILNIDFSNADIDVLEDLLVLSA

SEQ ID NO: 19921 - protein, 411 aa, Homo sapiens
MSVGCACPGCSSKSFKLYSPKEPPNGNAFPPFHPGTMLDRDVGPTPMYPPTYLEPGIGRHTPYGNQTDYRIFELNKRLQNWTEECDNLWWDAFTTEFFEDDAMLTITFCLEDGPKRYTIGRTLIPRYFRSIFEGGATELYYVLKHPKEAFHSNFVSLDCDQGSMVTQHGKPMFTQVCVEGRLYLEFMFDDMMRIKTWHFSIRQHRELIPRSILAMHAQDPQMLDQLSKNITRCGLSNSTLNYLRLCVILEPMQELMSRHKTYSLSPRDCLKTCLFQKWQRMVAPPAEPTRQQPSKRRKRKMSGGSTMSSGGGNTNNSNSKKKSPASTFALSSQVPDVMVVGEPTLMGGEFGDEDERLITRLENTQFDAANGIDDEDSFNNSPALGANSPWNSKPPSSQESKSENPTSQASQ

SEQ ID NO: 19922 - protein, 103 aa, Homo sapiens
MAVLAPLIALVYSVPRLSRWLAQPYYLLSALLSAAFLLVRKLPPLCHGLPTQREDGNPCDFDWREVEILMFLSAIVMMKNRRSTLSFLLPPCCGGWDASSMIF

SEQ ID NO: 19923 - protein, 89 aa, Homo sapiens
MAQSRVLLLLLLLPPQLHLGPVLAVRAPGFGRSGGHSLSPEENEFAEEEPVLVLSPEEPGPGPAAVSCPRDCACSQEGVVDCGGIDLRE

SEQ ID NO: 19924 - protein, 463 aa, Homo sapiens
MKKRKELNALIGLAGDSRRKKPKKGPSSHRLLRTEPPDSDSESSSEEEEEFGVVGNRSRFAKGDYLRCCKICYPLCGFVILAACVVACVGLVWMQVALKEDLDALKEKFRTMESNQKSSFQEIPKLNEELLSKQKQLEKIESGEMGLNKVWINITEMNKQISLLTSAVNHLKANVKSAADLISLPTTVEGLQKSVASIGNTLNSVHLAVEALQKTVDEHKKTMELLQSDMNQHFLKETPGSNQIIPSPSATSELDNKTHSENLKQDILYLHNSLEEVNSALVGYQRQNDLKLEGMNETVSNLTQRVNLIESDVVAMSKVEKKANLSFSMMGDRSATLKRQSLDQVTNRTDTVKIQSIKKEDSSNSQVSKLREKLQLISALTNKPESNRPPETADEEQVESFTSKPSALPKFSQFLGDPVEKAAQLRPISLPGVSSTEEWLYHVTFPSAMCEGSIHFLHILPNA

SEQ ID NO: 19925 - protein, 1446 aa, Homo sapiens
MVSSGCRMRSLWFIIVISFLPNTEGFSRAALPFGLVRRELSCEGYSIDLRCPGSDVIMIESANYGRTDDKICDADPFQMENTDCYLPDAFKIMTQRCNNRTQCIVVTGSDVFPDPCPGTYKYLEVQYECVPYIFVCPGTLKAIVDSPCIYEAEQKAGAWCKDPLQAADKIYFMPWTPYRTDTLIEYASLEDFQNSRQTTTYKLPNRVDGTGFVVYDGAVFFNKERTRNIVKFDLRTRIKSGEAIINYANYHDTSPYRWGGKTDIDLAVDENGLWVIYATEQNNGMIVISQLNPYTLRFEATWETVYDKRAASNAFMICGVLYVVRSVYQDNESETGKNSIDYIYNTRLNRGEYVDVPFPNQYQYIAAVDYNPRDNQLYVWNNNFILRYSLEFGPPDPAQVPTTAVTITSSAELFKTIISTTSTTSQKGPMSTTVAGSQEGSKGTKPPPAVSTTKIPPITNIFPLPERFCEALDSKGIKWPQTQRGMMVERPCPKGTRGTASYLCMISTGTWNPKGPDLSNCTSHWVNQLAQKIRSGENAASLANELAKHTKGPVFAGDVSSSVRLMEQLVDILDAQLQELKPSEKDSAGRSYNKAIVDTVDNLLRPEALESWKHMNSSEQAHTATMLLDTLEEGAFVLADNLLEPTRVSMPTENIVLEVAVLSTEGQIQDFKFPLGIKGAGSSIQLSANTVKQNSRNGLAKLVFIIYRSLGQFLSTENATIKLGADFIGRNSTIAVNSHVISVSINKESSRVYLTDPVLFTLPHIDPDNYFNANCSFWNYSERTMMGYWSTQGCKLVDTNKTRTTCACSHLTNFAILMAHREIAYKDGVHELLLTVITWVGIVISLVCLAICIFTFCFFRGLQSDRNTIHKNLCINLFIAEFIFLIGIDKTKYAIACPIFAGLLHFFFLAAFAWMCLEGVQLYLMLVEVFESEYSRKKYYYVAGYLFPATVVGVSAAIDYKSYGTEKACWLHVDNYFIWSFIGPVTFIILLNIIFLVITLCKMVKHSNTLKPDSSRLENIKSWVLGAFALLCLLGLTWSFGLLFINEETIVMAYLFTIFNAFQGVFIFIFHCALQKKVRKEYGKCFRHSYCCGGLPTESPHSSVKASTTRTSARYSSGTQSRIRRMWNDTVRKQSESSFISGDINSTSTLNQGMTGNYLLTNPLLRPHGTNNPYNTLLAETVVCNAPSAPVFNSPGHSLNNARDTSAMDTLPLNGNFNNSYSLHKGDYNDSVQVVDCGLSLNDTAFEKMIISELVHNNLRGSSKTHNLELTLPVKPVIGGSSSEDDAIVADASSLMHSDNPGLELHHKELEAPLIPQRTHSLLYQPQKKVKSEGTDSYVSQLTAEAEDHLQSPNRDSLYTSMPNLRDSPYPESSPDMEEDLSPSRRSENEDIYYKSMPNLGAGHQLQMCYQISRGNSDGYIIPINKEGCIPEGDVREGQMQLVTSL

SEQ ID NO: 19926 - protein, 1068 aa, Homo sapiens
MGHLPTGIHGARRLLPLLWLFVLFKNATAFHVTVQDDNNIVVSLEASDVISPASVYVVKITGESKNYFFEFEEFNSTLPPPVIFKASYHGLYYIITLVVVNGNVVTKPSRSITVLTKPLPVTSVSIYDYKPSPETGVLFEIHYPEKYNVFTRVNISYWEGKDFRTMLYKDFFKGKTVFNHWLPGMCYSNITFQLVSEATFNKSTLVEYSGVSHEPKQHRTENFTEYLMVDEEAHEFVAELKEPGKYKLSVTTFSSSGSCETRKSQSAKSLSFYISPSGEWIEELTEKPQHVSVHVLSSTTALMSWTSSQENYNSTIVSVVSLTCQKQKESQRLEKQYCTQVNSSKPIIENLVPGAQYQVVIYLRKGPLIGPPSDPVTFAIVPTGIKDLMLYPLGPTAVVLSWTRPYLGVFRKYVVEMFYFNPATMTSEWTTYYEIAATVSLTASVRIANLLPAWYYNFRVTMVTWGDPELSCCDSSTISFITAPVAPEITSVEYFNSLLYISWTYGDDTTDLSHSRMLHWMVVAEGKKKIKKSVTRNVMTAILSLPPGDIYNLSVTACTERGSNTSMLRLVKLEPAPPKSLFAVNKTQTSVTLLWVEEGVADFFEVFCQQVGSSQKTKLQEPVAVSSHVVTISSLLPATAYNCSVTSFSHDSPSVPTFIAVSTMVTEMNPNVVVISVLAILSTLLIGLLLVTLIILRKKHLQMARECGAGTFVNFASLERDGKLPYNWRRSIFAFLTLLPSCLWTDYLLAFYINPWSKNGLKKRKLTNPVQLDDFDAYIKDMAKDSDYKFSLQFEELKLIGLDIPHFAADLPLNRCKNRYTNILPYDFSRVRLVSMNEEEGADYINANYIPGYNSPQEYIATQGPLPETRNDFWKMVLQQKSQIIVMLTQCNEKRRVKCDHYWPFTEEPIAYGDITVEMISEEEQDDWACRHFRINYADEMQDVMHFNYTAWPDHGVPTANAAESILQFVHMVRQQATKSKGPMIIHCSAGVGRTGTFIALDRLLQHIRDHEFVDILGLVSEMRSYRMSMVQTEEQYIFIHQCVQLMWMKKKQQFCISDVIYENVSKS

SEQ ID NO: 19927 - protein, 115 aa, Homo sapiens
MGNSCYNIVATLLLVLNFERTRSLQDPCSNCPAGTFCDNNRNQICSPCPPNSFSSAGGQRTCDICRQCKGVFRTRKECSSTSNAECDCTPGFHCLGAGCSMCEQDCKQGQELTKK

SEQ ID NO: 19928 - protein, 926 aa, Homo sapiens
MNYVGQLAGQVFVTVKELYKGLNPATLSGCIDIIVIRQPNGNLQCSPFHVRFGKMGVLRSREKVVDIEINGESVDLHMKLGDNGEAFFVQETDNDQEVIPMHLATSPILSEGASRMECQLKRGSVDRMRGLDPSTPAQVIAPSETPSSSSVVKKRRKRRRKSQLDSLKRDDNMNTSEDEDMFPIEMSSDEAMELLESSRTLPNDIPPFQDDIPEENLSLAVIYPQSASYPNSDREWSPTPSSLVDCKRTAPHLAVAAEGGLSSSCPPQSSLFHPSESPSGSRPSTPKSDSELVSKSTERTGQKNPEMLWLWGELPQAAKSSSPHKMKESSPLSSRKICDKSHFQAIHSESSDTFSDQSPTLVGGALLDQNKPQTEMQFVNEEDLETLGAAAPLLPMIEELKPPSASVVQTANKTDSPSRKRDKRSRHLGADGVYLDDLTDMDPEVAALYFPKNGDPSGLAKHASDNGARSANQSPQSVGSSGVDSGVESTSDGLRDLPSIAISLCGGLSDHREITKDAFLEQAVSYQQFVDNPAIIDDPNLVVKIGSKYYNWTTAAPLLLAMQAFQKPLPKATVESIMRDKMPKKGGRWWFSWRGRNTTIKEESKPEQCLAGKAHSTGEQPPQLSLATRVKHESSSSDEERAAAKPSNAGHLPLLPNVSYKKTLRLTSEQLKSLKLKNGPNDVVFSVTTQYQGTCRCEGTIYLWNWDDKVIISDIDGTITRSDTLGHILPTLGKDWTHQGIAKLYHKVSQNGYKFLYCSARAIGMADMTRGYLHWVNERGTVLPQGPLLLSPSSLFSALHREVIEKKPEKFKVQCLTDIKNLFFPNTEPFYAAFGNRPADVYSYKQVGVSLNRIFTVNPKGELVQEHAKTNISSYVRLCEVVDHVFPLLKRSHSSDFPCSDTFSNFTFWREPLPPFENQDIHSASA

SEQ ID NO: 19929 - protein, 42 aa, Homo sapiens
MWSWKCLLFWAVLVTATLCTARPSPTLPEQEMRSHFVAQADL

SEQ ID NO: 19930 - protein, 57 aa, Homo sapiens
MCGIFAYLNYHVPRTRREILETLIKGLQRLEYRGYDSADLSPKLYSRPPTSFFLDRP

SEQ ID NO: 19931 - protein, 583 aa, Homo sapiens
MPLRKMKIPFLLLFFLWEAESHAASRPNIILVMADDLGIGDPGCYGNKTIRTPNIDRLASGGVKLTQHLAASPLCTPSRAAFMTGRYPVRSGMASWSRTGVFLFTASSGGLPTDEITFAKLLKDQGYSTALIGKWHLGMSCHSKTDFCHHPLHHGFNYFYGISLTNLRDCKPGEGSVFTTGFKRLVFLPLQIVGVTLLTLAALNCLGLLHVPLGVFFSLLFLAALILTLFLGFLHYFRPLNCFMMRNYEIIQQPMSYDNLTQRLTVEAAQFIQRNTETPFLLVLSYLHVHTALFSSKDFAGKSQHGVYGDAVEEMDWSVGQILNLLDELRLANDTLIYFTSDQGAHVEEVSSKGEIHGGSNGIYKGGKANNWEGGIRVPGILRWPRVIQAGQKIDEPTSNMDIFPTVAKLAGAPLPEDRIIDGRDLMPLLEGKSQRSDHEFLFHYCNAYLNAVRWHPQNSTSIWKAFFFTPNFNPVGSNGCFATHVCFCFGSYVTHHDPPLLFDISKDPRERNPLTPASEPRFYEILKVMQEAADRHTQTLPEVPDQFSWNNFLWKPWLQLCCPSTGLSCQCDREKQDKRLSR

SEQ ID NO: 19932 - protein, 1130 aa, Homo sapiens
MAERKGTAKVDFLKKIEKEIQQKWDTERVFEVNASNLEKQTSKGKYFVTFPYPYMNGRLHLGHTFSLSKCEFAVGYQRLKGKCCLFPFGLHCTGMPIKSKAAAKAGSSKYQWGIMKSLGLSDEEIVKFSEAEHWLDYFPPLAIQDLKRMGLKVDWRRSFITTDVNPYYDSFVRWQFLTLRERNKIKFGKRYTIYSPKDGQPCMDHDRQTGEGVGPQEYTLLKLKVLEPYPSKLSGLKGKNIFLVAATLRPETMFGQTNCWVRPDMKYIGFETVNGDIFICTQKAARNMSYQGFTKDNGVVPVVKELMGEEILGASLSAPLTSYKVIYVLPMLTIKEDKGTGVVTSVPSDSPDDIAALRDLKKKQALRAKYGIRDDMVLPFEPVPVIEIPGFGNLSAVTICDELKIQSQNDREKLAEAKEKIYLKGFYEGIMLVDGFKGQKVQDVKKTIQKKMIDAGDALIYMEPEKQVMSRSSDECVVALCDQWYLDYGEENWKKQTSQCLKNLETFCEETRRNFEATLGWLQEHACSRTYGLGTHLPWDEQWLIESLSDSTIYMAFYTVAHLLQGGNLHGQAESPLGIRPQQMTKEVWDYVFFKEAPFPKTQIAKEKLDQLKQEFEFWYPVDLRVSGKDLVPNHLSYYLYNHVAMWPEQSDKWPTAVRANGHLLLNSEKMSKSTGNFLTLTQAIDKFSADGMRLALADAGDTVEDANFVEAMADAGILRLYTWVEWVKEMVANWDSLRSGPASTFNDRVFASELNAGIIKTDQNYEKMMFKEALKTGFFEFQAAKDKYRELAVEGMHRELVFRFIEVQTLLLAPFCPHLCEHIWTLLGKPDSIMNASWPVAGPVNEVLIHSSQYLMEVTHDLRLRLKNYMMPAKGKKTDKQPLQKPSHCTIYVAKNYPPWQHTTLSVLRKHFEANNGKLPDNKVIASELGSMPELKKYMKKVMPFVAMIKENLEKMGPRILDLQLEFDEKAVLMENIVYLTNSLELEHIEVKFASEAEDKIREDCCPGKPLNVFRIEPGVSVSLVNPQPSNGHFSTKIEIRQGDNCDSIIRRLMKMNRGIKDLSKVKLMRFDDPLLGPRRVPVLGKEYTEKTPISEHAVFNVDLMSKKIHLTENGIRVDIGDTIIYLVH

SEQ ID NO: 19933 - protein, 443 aa, Homo sapiens
MRRQVMAALVVSGAAEQGGRDGPGRGRAPRGRVANQIPPEILKNPQLQAAIRVLPSNYNFEIPKTIWRIQQAQAKKVALQMPEGLLLFACTIVDILERFTEAEVMVMGDVTYGACCVDDFTARALGADFLVHYGHSCLIPMDTSAQDFRVLYVFVDIRIDTTHLLDSLRLTFPPATALALVSTIQFVSTLQAAAQELKAEYRVSVPQCKPLSPGEILGCTSPRLSKEVEAVVYLGDGRFHLESVMIANPNVPAYRYDPYSKVLSREHYDHQRMQAARQEAIATARSAKSWGLILGTLGRQGSPKILEHLESRLRALGLSFVRLLLSEIFPSKLSLLPEVDVWVQVACPRLSIDWGTAFPKPLLTPYEAAVALRDISWQQPYPMDFYAGSSLGPWTVNHGQDRRPHAPGRPARGKVQEGSARPPSAVACEDCSCRDEKVAPLAP

SEQ ID NO: 19934 - protein, 431 aa, Homo sapiens
MKKRKELNALIGLAGDSRRKKPKKGPSSHRLLRTEPPDSDSESSSEEEEEFGVVGNRSRFAKGDYLRCCKICYPLCGFVILAACVVACVGLVWMQVALKEDLDALKEKFRTMESNQKSSFQEIPKLNEELLSKQKQLEKIESGEMGLNKVWINITEMNKQISLLTSAVNHLKANVKSAADLISLPTTVEGLQKSVASIGNTLNSVHLAVEALQKTVDEHKKTMELLQSDMNQHFLKETPGSNQIIPSPSATSELDNKTHSENLKQMGDRSATLKRQSLDQVTNRTDTVKIQSIKKEDSSNSQVSKLREKLQLISALTNKPESNRPPETADEEQVESFTSKPSALPKFSQFLGDPVEKAAQLRPISLPGVSSTEDLQDLFRKTGQDVDGKLTYQEIWTSLGSAMPEPESLRAFDSDGDGRYSFLELRVALGI

SEQ ID NO: 19935 - protein, 138 aa, Homo sapiens
MVSSGCRMRSLWFIIVISFLPNTEGFSRAALPFGLVRRELSCEGYSIDLRCPGSDVIMIESANYGRTDDKICDADPFQMENTDCYLPDAFKIMTQRCNNRTQCIVVTGSDVFPDPCPGTYKYLEVQYECVPYNLVLQV

SEQ ID NO: 19936 - protein, 80 aa, Homo sapiens
MQGLLFSTLLLAGLAQVMAPKPPFAMFEQRHAFLYIFIAEPKAQPGTVRETVSLHASSRRRLNFPLLFAKCAKSPWKNEF

SEQ ID NO: 19937 - protein, 1470 aa, Homo sapiens
MVSSGCRMRSLWFIIVISFLPNTEGFSRAALPFGLVRRELSCEGYSIDLRCPGSDVIMIESANYGRTDDKICDADPFQMENTDCYLPDAFKIMTQRCNNRTQCIVVTGSDVFPDPCPGTYKYLEVQYECVPYIFVCPGTLKAIVDSPCIYEAEQKAGAWCKDPLQAADKIYFMPWTPYRTDTLIEYASLEDFQNSRQTTTYKLPNRVDGTGFVVYDGAVFFNKERTRNIVKFDLRTRIKSGEAIINYANYHDTSPYRWGGKTDIDLAVDENGLWVIYATEQNNGMIVISQLNPYTLRFEATWETVYDKRAASNAFMICGVLYVVRSVYQDNESETGKNSIDYIYNTRLNRGEYVDVPFPNQYQYIAAVDYNPRDNQLYVWNNNFILRYSLEFGPPDPAQVPTTAVTITSSAELFKTIISTTSTTSQKGPMSTTVAGSQEGSKGTKPPPAVSTTKIPPITNIFPLPERFCEALDSKGIKWPQTQRGMMVERPCPKGTRGTASYLCMISTGTWNPKGPDLSNCTSHWVNQLAQKIRSGENAASLANELAKHTKGPVFAGDVSSSVRLMEQLVDILDAQLQELKPSEKDSAGRSYNKAIVDTVDNLLRPEALESWKHMNSSEQAHTATMLLDTLEEGAFVLADNLLEPTRVSMPTENIVLEVAVLSTEGQIQDFKFPLGIKGAGSSIQLSANTVKQNSRNGLAKLVFIIYRSLGQFLSTENATIKLGADFIGRNSTIAVNSHVISVSINKESSRVYLTDPVLFTLPHIDPDNYFNANCSFWNYSERTMMGYWSTQGCKLVDTNKTRTTCACSHLTNFAILMAHREIAYKDGVHELLLTVITWVGIVISLVCLAICIFTFCFFRGLQSDRNTIHKNLCINLFIAEFIFLIGIDKTKYAIACPIFAGLLHFFFLAAFAWMCLEGVQLYLMLVEVFESEYSRKKYYYVAGYLFPATVVGVSAAIDYKSYGTEKACWLHVDNYFIWSFIGPVTFIILLNIIFLVITLCKMVKHSNTLKPDSSRLENINNYRVCDGYYNTDLPGYEDNKPFIKSWVLGAFALLCLLGLTWSFGLLFINEETIVMAYLFTIFNAFQGVFIFIFHCALQKKVRKEYGKCFRHSYCCGGLPTESPHSSVKASTTRTSARYSSGTQSRIRRMWNDTVRKQSESSFISGDINSTSTLNQGMTGNYLLTNPLLRPHGTNNPYNTLLAETVVCNAPSAPVFNSPGHSLNNARDTSAMDTLPLNGNFNNSYSLHKGDYNDSVQVVDCGLSLNDTAFEKMIISELVHNNLRGSSKTHNLELTLPVKPVIGGSSSEDDAIVADASSLMHSDNPGLELHHKELEAPLIPQRTHSLLYQPQKKVKSEGTDSYVSQLTAEAEDHLQSPNRDSLYTSMPNLRDSPYPESSPDMEEDLSPSRRSENEDIYYKSMPNLGAGHQLQMCYQISRGNSDGYIIPINKEGCIPEGDVREGQMQLVTSL

SEQ ID NO: 19938 - protein, 395 aa, Homo sapiens
MGHLPTGIHGARRLLPLLWLFVLFKNATAFHVTVQDDNNIVVSLEASDVISPASVYVVKITGESKNYFFEFEEFNSTLPPPVIFKASYHGLYYIITLVVVNGNVVTKPSRSITVLTKPLPVTSVSIYDYKPSPETGVLFEIHYPEKYNVFTRVNISYWEGKDFRTMLYKDFFKGKTVFNHWLPGMCYSNITFQLVSEATFNKSTLVEYSGVSHEPKQHRTAPYPPQNISVRIVNLNKNNWEEQSGNFPEESFMRSQDTIGKEKLFHFTEETPEIPSGNISSGWPDFNSSDYETTSQPYWWDSASAAPESEDEFVSVLPMEYENNSTLSETEKSTSGSFSFFPVQMILTWLPPKPPTAFDGFHIHIEREGCCSHQLMIMTSNEVISSRGWMDCEAM

SEQ ID NO: 19939 - protein, 1418 aa, Homo sapiens
MVSSGCRMRSLWFIIVISFLPNTEGFSRAALPFGLVRRELSCEGYSIDLRCPGSDVIMIESANYGRTDDKICDADPFQMENTDCYLPDAFKIMTQRCNNRTQCIVVTGSDVFPDPCPGTYKYLEVQYECVPYIFVCPGTLKAIVDSPCIYEAEQKAGAWCKDPLQAADKIYFMPWTPYRTDTLIEYASLEDFQNSRQTTTYKLPNRVDGTGFVVYDGAVFFNKERTRNIVKFDLRTRIKSGEAIINYANYHDTSPYRWGGKTDIDLAVDENGLWVIYATEQNNGMIVISQLNPYTLRFEATWETVYDKRAASNAFMICGVLYVVRSVYQDNESETGKNSIDYIYNTRLNRGEYVDVPFPNQYQYIAAVDYNPRDNQLYVWNNNFILRYSLEFGPPDPAQVPTTAVTITSSAELFKTIISTTSTTSQKGPMSTTVAGSQEGSKGTKPPPAVSTTKIPPITNIFPLPERFCEALDSKGIKWPQTQRGMMVERPCPKGTRGTASYLCMISTGTWNPKGPDLSNCTSHWVNQLAQKIRSGENAASLANELAKHTKGPVFAGDVSSSVRLMEQLVDILDAQLQELKPSEKDSAGRSYNKAIVDTVDNLLRPEALESWKHMNSSEQAHTATMLLDTLEEGAFVLADNLLEPTRVSMPTENIVLEVAVLSTEGQIQDFKFPLGIKGAGSSIQLSANTVKQNSRNGLAKLVFIIYRSLGQFLSTENATIKLGADFIGRNSTIAVNSHVISVSINKESSRVYLTDPVLFTLPHIDPDNYFNANCSFWNYSERTMMGYWSTQGCKLVDTNKTRTTCACSHLTNFAILMAHREIAYKDGVHELLLTVITWVGIVISLVCLAICIFTFCFFRGLQSDRNTIHKNLCINLFIAEFIFLIGIDKTKYAIACPIFAGLLHFFFLAAFAWMCLEGVQLYLMLVEVFESEYSRKKYYYVAGYLFPATVVGVSAAIDYKSYGTEKACWLHVDNYFIWSFIGPVTFIILLNIIFLVITLCKMVKHSNTLKPDSSRLENINNYRVCDGYYNTDLPGSWVLGAFALLCLLGLTWSFGLLFINEETIVMAYLFTIFNAFQGVFIFIFHCALQKKVRKEYGKCFRHSYCCGGLPTESPHSSVKASTTRTSARYSSGTQSRIRRMWNDTVRKQSESSFISGDINSTSTLNQGHSLNNARDTSAMDTLPLNGNFNNSYSLHKGDYNDSVQVVDCGLSLNDTAFEKMIISELVHNNLRGSSKTHNLELTLPVKPVIGGSSSEDDAIVADASSLMHSDNPGLELHHKELEAPLIPQRTHSLLYQPQKKVKSEGTDSYVSQLTAEAEDHLQSPNRDSLYTSMPNLRDSPYPESSPDMEEDLSPSRRSENEDIYYKSMPNLGAGHQLQMCYQISRGNSDGYIIPINKEGCIPEGDVREGQMQLVTSL

SEQ ID NO: 19940 - protein, 596 aa, Homo sapiens
MPPPFSSARGFGAPRPRPSPRERSGRRGRARGERPRGVDDLRPAATSSAAETRSHPPAGEPGPRAAPETAVAGCAGASLPGGAAAAAWKMAAPCGSELPANSPLKIPKMEVLSPASPGGLSDGNPSLSDPSTPRGASPLGPGSAAGSGAAASGGLGLGLGGRSAASSSVSFSPGGGGGGAAAAAAAACRGMSWTPAETNALIAVWGNERLVEARYQQLEGAGTVFGSKAPGPAMYERVSRALAELGYERTPSQCRERIKELESDGSTMEDYSQEDWGNHSQDLHGYPTDQELDEIPVTKRTLKIKQESSEEAQKRDIMQNIVQILESVQLKWELFQSWTDFSRLHLSNKLAIFGIGYNTRWKEDIRYHYAEISSQVPLGKRLREYFNSEKPEGRIIMTRVQKMNWKNVYYKFLEITISEARCLELHMEIDWIPIAHSKPTGGNVVQYLLPGGIPKSPGLYAIGYEECIERPLSPHMEQSSLDPGKEGRVDLETLSAQASLQVEIEPTRIIYCYLGIAEVRTLQQCLFLHFQANTKTFSKDWVGINGFLSQNCIVDPGVSPKSIYIKFVEVERDFLSAGSLVECLEKAIGYPLKFNN

SEQ ID NO: 19941 - protein, 318 aa, Homo sapiens
MGARGALLLALLLARAGLGKPGELGALQAGPGAARRPGGGGREEACGHREIHALVAGGVESARGRWPWQASLRLRRRHRCGGSLLSRRWVLSAAHCFQKHYYPSEWTVQLGELTSRPTPWNLRAYSSRYKVQDIIVNPDALGVLRNDIALLRLASSVTYNAYIQPICIESSTFNFVHRPDCWVTGWGLISPSGTPLPPPYNLREAQVTILNNTRCNYLFEQPSSRSMIWDSMFCAGAEDGSVDTCKGDSGGPLVCDKDGLWYQVGIVSWGMDCGQPNRPGVYTNISVYFHWIRRVMSHSTPRPNPSQLLLLLALLWAP

SEQ ID NO: 19942 - protein, 609 aa, Homo sapiens
MCEQQDMDLDIEFDVHLGIAHTRWATHGEPSPVNSHPQRSDKNNEFIVIHNGIITNYKDLKKFLESKGYDFESETDTETIAKLVKYMYDNRESQDTSFTTLVERVIQQLEGAFALVFKSVHFPGQAVGTRRGSPLLIGVRSEHKLSTDHIPILYRTGKDKKGSCNLSRVDSTTCLFPVEEKAVEYYFASDASAVIEHTNRVIFLEDDDVAAVVDGRLSIHRIKRTAGDHPGRAVQTLQMELQQIMKGNFSSFMQKEIFEQPESVVNTMRGRVNFDDYTVNLGGLKDHIKEIQRCRRLILIACGTSYHAGVATRQVLEELTELPVMVELASDFLDRNTPVFRDDVCFFLSQSGETADTLMGLRYCKERGALTVGITNTVGSSISRETDCGVHINAGPEIGVASTKAYTSQFVSLVMFALMMCDDRISMQERRKEIMLGLKRLPDLIKEVLSMDDEIQKLATELYHQKSVLIMGRGYHYATCLEGALKIKEITYMHSEGILAGELKHGPLALVDKLMPVIMIIMRDHTYAKCQNALQQVVARQGRPVVICDKEDTETIKNTKRTIKVPHSVDCLQGILSVIPLQLLAFHLAVLRGYDVDFPRNLAKSVTVE

SEQ ID NO: 19943 - protein, 237 aa, Homo sapiens
SLTWFTTIVPLVLVITMTAVKDATDDYFRHKSDNQVNNRQSEVLINSKLQNEKWMNVKVGDIIKLENNQFVAADLLLLSSSEPHGLCYVETAELDGETNLKVRHALSVTSELGADISRLAGFDGIVVCEVPNNKLDKFMGILSWKDSKHSLNNEKIILRGCILRNTSWCFGMVIFAGPDTKLMQNSGKTKFKRTSIDRLMNTLVLWEIQSGRVKLGTNSELSSFGMKERRALCSPDS

SEQ ID NO: 19944 - protein, 622 aa, Homo sapiens
MRRGRVRERVLKKTGHRLSKTKQKRNRKRNKKQNSQNRIMEENSLEFLSDLTPGDQDPSQSEEEDIEKTRRESEYPFIDGLQNEVGDFVTGYKEKRWKNKDPKDSFQNVMSIVELDNTPKNYLSKEGDNLFVSLLLRPNEISVTCPILTQNLSCVTTDDCSGMKVEKHIRNRHTIALDTQDLSAETSCLFMKKREIVDKNLSHEPILCHQHGIRMSDKVLREEQVYTTKINHWAFFTTNLSDEDLQLGSDRQPYFGSWPAGPHKFICEQRPKKDRACKLAGPDSRGQWIQMIFTSVAASEPGNNPEILTDKLLIGNEDFSPPPETMDSFIETNLFRSCLPQPDIPKNALESTKNKKRRKKRIFNLVPNFDLLGQSRIGVKEREKCDLLTKNHGLKITLGEEKDRISERNSEEENKQKLMTFDHHPLWFYLDIIKATPLNIDGQRYSHCLSFNRLRCSASLYKNYIPSFVLHNLSSIWKPSFTNKKLFLTFESQTRVGNKLNDAGFISPEILHSHPDTSCSLGVTSDFHFLNERFDRKLKRWEEPKELPAEDSQDLTSTDYRSLELPLSQGFAFQLVKLFGSPGVPMESLLPDDYVVPLDWKTLKMIYLQWKMSVEKRQKKIG

SEQ ID NO: 19945 - protein, 1163 aa, Homo sapiens
MVSSGCRMRSLWFIIVISFLPNTEGFSRAALPFGLVRRELSCEGYSIDLRCPGSDVIMIESANYGRTDDKICDADPFQMENTDCYLPDAFKIMTQRCNNRTQCIVVTGSDVFPDPCPGTYKYLEVQYECVPYIFVCPGTLKAIVDSPCIYEAEQKAGAWCKDPLQAADKIYFMPWTPYRTDTLIEYASLEDFQNSRQTTTYKLPNRVDGTGFVVYDGAVFFNKERTRNIVKFDLRTRIKSGEAIINYANYHDTSPYRWGGKTDIDLAVDENGLWVIYATEQNNGMIVISQLNPYTLRFEATWETVYDKRAASNAFMICGVLYVVRSVYQDNESETGKNSIDYIYNTRLNRGEYVDVPFPNQYQYIAAVDYNPRDNQLYVWNNNFILRYSLEFGPPDPAQVPTTAVTITSSAELFKTIISTTSTTSQKGPMSTTVAGSQEGSKGTKPPPAVSTTKIPPITNIFPLPERFCEALDSKGIKWPQTQRGMMVERPCPKGTRGTASYLCMISTGTWNPKGPDLSNCTSHWVNQLAQKIRSGENAASLANELAKHTKGPVFAGDVSSSVRLMEQLVDILDAQLQELKPSEKDSAGRSYNKAIVDTVDNLLRPEALESWKHMNSSEQAHTATMLLDTLEEGAFVLADNLLEPTRVSMPTENIVLEVAVLSTEGQIQDFKFPLGIKGAGSSIQLSANTVKQNSRNGLAKLVFIIYRSLGQFLSTENATIKLGADFIGRNSTIAVNSHVISVSINKESSRVYLTDPVLFTLPHIDPDNYFNANCSFWNYSERTMMGYWSTQGCKLVDTNKTRTTCACSHLTNFAILMAHREIAYKDGVHELLLTVITWVGIVISLVCLAICIFTFCFFRGLQSDRNTIHKNLCINLFIAEFIFLIGIDKTKYAIACPIFAGLLHFFFLAAFAWMCLEGVQLYLMLVEVFESEYSRKKYYYVAGYLFPATVVGVSAAIDYKSYGTEKACWLHVDNYFIWSFIGPVTFIILLNIIFLVITLCKMVKHSNTLKPDSSRLENIKSWVLGAFALLCLLGLTWSFGLLFINEETIVMAYLFTIFNAFQGVFIFIFHCALQKKVRKEYGKCFRHSYCCGGLPTESPHSSVKASTTRTSARYSSGTQSRIRRMWNDTVRKQSESSFISGDINSTSTLNQGGINLNILLQD

SEQ ID NO: 19946 - protein, 624 aa, Homo sapiens
MGSCARLLLLWGCTVVAAGLSGVAGVSSRCEKACNPRMGNLALGRKLWADTTCGQNATELYCFYSENTDLTCRQPKCDKCNAAYPHLAHLPSAMADSSFRFPRTWWQSAEDVHREKIQLDLEAEFYFTHLIVMFKSPRPAAMVLDRSQDFGKTWKPYKYFATNCSATFGLEDDVVKKGAICTSKYSSPFPCTGGEVIFKALSPPYDTENPYSAKVQEQLKITNLRVQLLKRQSCPCQRNDLNEEPQHFTHYAIYDFIVKGSCFCNGHADQCIPVHGFRPVKAPGTFHMVHGKCMCKHNTAGSHCQHCAPLYNDRPWEAADGKTGAPNECRTCKCNGHADTCHFDVNVWEASGNRSGGVCDDCQHNTEGQYCQRCKPGFYRDLRRPFSAPDACKPCSCHPVGSAVLPANSVTFCDPSNGDCPCKPGVAGRRCDRCMVGYWGFGDYGCRPCDCAGSCDPITGDCISSHTDIDWYHEVPDFRPVHNKSEPAWEWEDAQGFSALLHSGKCECKEQTLGNAKAFCGMKYSYVLKIKILSAHDKGTHVEVNVKIKKVLKSTKLKIFRGKRTLYPESWTDRGCTCPILNPVQQPRPKKADKKTETLHANLLPWLLWKRNNPIGYPCIFIHS

SEQ ID NO: 19947 - protein, 1207 aa, Homo sapiens
MVSSGCRMRSLWFIIVISFLPNTEGFSRAALPFGLVRRELSCEGYSIDLRCPGSDVIMIESANYGRTDDKICDADPFQMENTDCYLPDAFKIMTQRCNNRTQCIVVTGSDVFPDPCPGTYKYLEVQYECVPYIFVCPGTLKAIVDSPCIYEAEQKAGAWCKDPLQAADKIYFMPWTPYRTDTLIEYASLEDFQNSRQTTTYKLPNRVDGTGFVVYDGAVFFNKERTRNIVKFDLRTRIKSGEAIINYANYHDTSPYRWGGKTDIDLAVDENGLWVIYATEQNNGMIVISQLNPYTLRFEATWETVYDKRAASNAFMICGVLYVVRSVYQDNESETGKNSIDYIYNTRLNRGEYVDVPFPNQYQYIAAVDYNPRDNQLYVWNNNFILRYSLEFGPPDPAQVPTTAVTITSSAELFKTIISTTSTTSQKGPMSTTVAGSQEGSKGTKPPPAVSTTKIPPITNIFPLPERFCEALDSKGIKWPQTQRGMMVERPCPKGTRGTASYLCMISTGTWNPKGPDLSNCTSHWVNQLAQKIRSGENAASLANELAKHTKGPVFAGDVSSSVRLMEQLVDILDAQLQELKPSEKDSAGRSYNKAIVDTVDNLLRPEALESWKHMNSSEQAHTATMLLDTLEEGAFVLADNLLEPTRVSMPTENIVLEVAVLSTEGQIQDFKFPLGIKGAGSSIQLSANTVKQNSRNGLAKLVFIIYRSLGQFLSTENATIKLGADFIGRNSTIAVNSHVISVSINKESSRVYLTDPVLFTLPHIDPDNYFNANCSFWNYSERTMMGYWSTQGCKLVDTNKTRTTCACSHLTNFAILMAHREIAYKDGVHELLLTVITWVGIVISLVCLAICIFTFCFFRGLQSDRNTIHKNLCINLFIAEFIFLIGIDKTKYAIACPIFAGLLHFFFLAAFAWMCLEGVQLYLMLVEVFESEYSRKKYYYVAGYLFPATVVGVSAAIDYKSYGTEKACWLHVDNYFIWSFIGPVTFIILLNIIFLVITLCKMVKHSNTLKPDSSRLENIKSWVLGAFALLCLLGLTWSFGLLFINEETIVMAYLFTIFNAFQGVFIFIFHCALQKKVRKEYGKCFRHSYCCGGLPTESPHSSVKASTTRTSARYSSGTQSRIRRMWNDTVRKQSESSFISGDINSTSTLNQGMTGNYLLTNPLLRPHGTNNPYNTLLAETVVCNAPSAPVFNSPATLRPDSLSRQT

SEQ ID NO: 19948 - protein, 334 aa, Homo sapiens
MGARGALLLALLLARAGLGKPGELGALQAGPGAARRPGGGGREGHFLCPAESQEEELLSEACGHREIHALVAGGVESARGRWPWQASLRLRRRHRCGGSLLSRRWVLSAAHCFQKHYYPSEWTVQLGELTSRPTPWNLRAYSSRYKVQDIIVNPDALGVLRNDIALLRLASSVTYNAYIQPICIESSTFNFVHRPDCWVTGWGLISPSGTPLPPPYNLREAQVTILNNTRCNYLFEQPSSRSMIWDSMFCAGAEDGSVDTCKGDSGGPLVCDKDGLWYQVGIVSWGMDCGQPNRPGVYTNISVYFHWIRRVMSHSTPRPNPSQLLLLLALLWAP

SEQ ID NO: 19949 - protein, 337 aa, Homo sapiens
MSQPSGGRAPGTRIYSWSCPTVMSPGEKLDPIPDSFILQPPVFHPVVPYVTTIFGGLHAGKMVMLQGVVPLDAHSRFQVDFQCGCSLCPRPDIAFHFNPRFHTTKPHVICNTLHGGRWQREARWPHLALRRGSSFLILFLFGNEEVKVSVNGQHFLHFRYRLPLSHVDTLGIFGDILVEAVGFLNINPFVEGSREYPAGHPFLLMSPRLEVPCSHALPQGLSPGQVIIVRGLVLQEPKHFTVSLRDQAAHAPVTLRASFADRTLAWISRWGQKKLISAPFLFYPQRFFEVLLLFQEGGLKLALNGQGLGATSMNQQALEQLRELRISGSVQLYCVHS

SEQ ID NO: 19950 - protein, 1186 aa, Homo sapiens
MVSSGCRMRSLWFIIVISFLPNTEGFSRAALPFGLVRRELSCEGYSIDLRCPGSDVIMIESANYGRTDDKICDADPFQMENTDCYLPDAFKIMTQRCNNRTQCIVVTGSDVFPDPCPGTYKYLEVQYECVPYIFVCPGTLKAIVDSPCIYEAEQKAGAWCKDPLQAADKIYFMPWTPYRTDTLIEYASLEDFQNSRQTTTYKLPNRVDGTGFVVYDGAVFFNKERTRNIVKFDLRTRIKSGEAIINYANYHDTSPYRWGGKTDIDLAVDENGLWVIYATEQNNGMIVISQLNPYTLRFEATWETVYDKRAASNAFMICGVLYVVRSVYQDNESETGKNSIDYIYNTRLNRGEYVDVPFPNQYQYIAAVDYNPRDNQLYVWNNNFILRYSLEFGPPDPAQVPTTAVTITSSAELFKTIISTTSTTSQKGPMSTTVAGSQEGSKGTKPPPAVSTTKIPPITNIFPLPERFCEALDSKGIKWPQTQRGMMVERPCPKGTRGTASYLCMISTGTWNPKGPDLSNCTSHWVNQLAQKIRSGENAASLANELAKHTKGPVFAGDVSSSVRLMEQLVDILDAQLQELKPSEKDSAGRSYNKLQKREKTCRAYLKAIVDTVDNLLRPEALESWKHMNSSEQAHTATMLLDTLEEGAFVLADNLLEPTRVSMPTENIVLEVAVLSTEGQIQDFKFPLGIKGAGSSIQLSANTVKQNSRNGLAKLVFIIYRSLGQFLSTENATIKLGADFIGRNSTIAVNSHVISVSINKESSRVYLTDPVLFTLPHIDPDNYFNANCSFWNYSERTMMGYWSTQGCKLVDTNKTRTTCACSHLTNFAILMAHREIAYKDGVHELLLTVITWVGIVISLVCLAICIFTFCFFRGLQSDRNTIHKNLCINLFIAEFIFLIGIDKTKYAIACPIFAGLLHFFFLAAFAWMCLEGVQLYLMLVEVFESEYSRKKYYYVAGYLFPATVVGVSAAIDYKSYGTEKACWLHVDNYFIWSFIGPVTFIILLNIIFLVITLCKMVKHSNTLKPDSSRLENIKSWVLGAFALLCLLGLTWSFGLLFINEETIVMAYLFTIFNAFQGVFIFIFHCALQKKVRKEYGKCFRHSYCCGGLPTESPHSSVKASTTRTSARYSSGTQSRIRRMWNDTVRKQSESSFISGDINSTSTLNQGLTSHGLRAHLQDLYHLEDIH

SEQ ID NO: 19951 - protein, 64 aa, Homo sapiens
AILSTLLIGLLLVTLIILRKKHLQMARECGAGTFVNFASLERDGKLPYNWSKNGLKKRKLTKVF

SEQ ID NO: 19952 - protein, 1296 aa, Homo sapiens
MVSSGCRMRSLWFIIVISFLPNTEGFSRAALPFGLVRRELSCEGYSIDLRCPGSDVIMIESANYGRTDDKICDADPFQMENTDCYLPDAFKIMTQRCNNRTQCIVVTGSDVFPDPCPGTYKYLEVQYECVPYIFVCPGTLKAIVDSPCIYEAEQKAGAWCKDPLQAADKIYFMPWTPYRTDTLIEYASLEDFQNSRQTTTYKLPNRVDGTGFVVYDGAVFFNKERTRNIVKFDLRTRIKSGEAIINYANYHDTSPYRWGGKTDIDLAVDENGLWVIYATEQNNGMIVISQLNPYTLRFEATWETVYDKRAASNAFMICGVLYVVRSVYQDNESETGKNSIDYIYNTRLNRGEYVDVPFPNQYQYIAAVDYNPRDNQLYVWNNNFILRYSLEFGPPDPAQVPTTAVTITSSAELFKTIISTTSTTSQKGPMSTTVAGSQEGSKGTKPPPAVSTTKIPPITNIFPLPERFCEALDSKGIKWPQTQRGMMVERPCPKGTRGTASYLCMISTGTWNPKGPDLSNCTSHWVNQLAQKIRSGENAASLANELAKHTKGPVFAGDVSSSVRLMEQLVDILDAQLQELKPSEKDSAGRSYNKLQKREKTCRAYLKAIVDTVDNLLRPEALESWKHMNSSEQAHTATMLLDTLEEGAFVLADNLLEPTRVSMPTENIVLEVAVLSTEGQIQDFKFPLGIKGAGSSIQLSANTVKQNSRNGLAKLVFIIYRSLGQFLSTENATIKLGADFIGRNSTIAVNSHVISVSINKESSRVYLTDPVLFTLPHIDPDNYFNANCSFWNYSERTMMGYWSTQGCKLVDTNKTRTTCACSHLTNFAILMAHREIAYKDGVHELLLTVITWVGIVISLVCLAICIFTFCFFRGLQSDRNTIHKNLCINLFIAEFIFLIGIDKTKYAIACPIFAGLLHFFFLAAFAWMCLEGVQLYLMLVEVFESEYSRKKYYYVAGYLFPATVVGVSAAIDYKSYGTEKACWLHVDNYFIWSFIGPVTFIILLNIIFLVITLCKMVKHSNTLKPDSSRLENINNYRVCDGYYNTDLPGYEDNKPFIKSWVLGAFALLCLLGLTWSFGLLFINEETIVMAYLFTIFNAFQGVFIFIFHCALQKKVRKEYGKCFRHSYCCGGLPTESPHSSVKASTTRTSARYSSGTQSRIRRMWNDTVRKQSESSFISGDINSTSTLNQGMTGNYLLTNPLLRPHGTNNPYNTLLAETVVCNAPSAPVFNSPGVLYLQIKLPFFAAKQSYDLCPVSKIFKLSYIYCYILNFSVKKNYGIVYARLLKLHYIIVKAQS

SEQ ID NO: 19953 - protein, 147 aa, Homo sapiens
MDDGLAEGGPQRSNTYVIKLFDRSVDLAQFSENTPLYPICRAWMRNSPSGSEVTNSKSRDVYKLPPPTPPGPPGDACRSRIPSPLQPEMQGTPDDEPSEPEPSPSTLIYRNMQRWKRIRQRWKEASHRNQLRYSESMKILREMYERQ

SEQ ID NO: 19954 - protein, 246 aa, Homo sapiens
MLSLSLCSHLWGPLILSALQARSTDSLDGPGEGSVQPLPTAGGPSVKGKPGKRLSAPRGPFPRLADCAHFHYENVDFGHIQLLLSPDREGPSLSGENELVFGVQVTCQGRSWPVLRSYDDFRSLDAHLHRCIFDRRFSCLPELPPPPEGARAAQMLVPLLLQYLETLSGLVDSNLNCGPVLTWMEVGLGRGLGDSEWVRGCVCHHAQHREILDGNRVASAVEDEGAEVDGEAFRWGSLWVGESWDM

SEQ ID NO: 19955 - protein, 679 aa, Homo sapiens
VNLGGRMLRMRVPALLVLLFCFRGRAGPSPHFLQQPEDLVVLLGEEARLPCALGAYWGLVQWTKSGLALGGQRDLPGWSRYWISGNAANGQHDLHIRPVELEDEASYECQATQAGLRSRPAQLHVLVPPEAPQVLGGPSVSLVAGVPANLTCRSRGDARPTPELLWFRDGVLLDGATFHQTLLKEGTPGSVESTLTLTPFSHDDGATFVCRARSQALPTGRDTAITLSLQYPPEVTLSASPHTVQEGEKVIFLCQATAQPPVTGYRWAKGGSPVLGARGPRLEVVADASFLTEPVSCEVSNAVGSANRSTALDVLFGPILQAKPEPVSVDVGEDASFSCAWRGNPLPRVTWTRRGGAQVLGSGATLRLPSVGPEDAGDYVCRAEAGLSGLRGGAAEARLTVNAPPVVTALHSAPAFLRGPARLQCLVFASPAPDAVVWSWDEGFLEAGSQGRFLVETFPAPESRGGLGPGLISVLHISGTQESDFSRSFNCSARNRLGEGGAQASLGRRASASFSEQKNLMRIPGSSDGSSSRGPEEEETGSREDRGPIVHTDHSDLVLEEEGTLETKDPTNGYYKVRGVSVSLSLGEAPGGGLFLPPPSPLGPPGTPTFYDFNPHLGMVPPCRLYRARAGYLTTPHPRAFTSYIKPTSFGPPDLAPGTPPFPYAAFPTPSHPRLQTHV

SEQ ID NO: 19956 - protein, 714 aa, Homo sapiens
VNLGGRMLRMRVPALLVLLFCFRGRAGPSPHFLQQPEDLVVLLGEEARLPCALGAYWGLVQWTKSGLALGGQRDLPGWSRYWISGNAANGQHDLHIRPVELEDEASYECQATQAGLRSRPAQLHVLVPPEAPQVLGGPSVSLVAGVPANLTCRSRGDARPTPELLWFRDGVLLDGATFHQTLLKEGTPGSVESTLTLTPFSHDDGATFVCRARSQALPTGRDTAITLSLQYPPEVTLSASPHTVQEGEKVIFLCQATAQPPVTGYRWAKGGSPVLGARGPRLEVVADASFLTEPVSCEVSNAVGSANRSTALDVLFGPILQAKPEPVSVDVGEDASFSCAWRGNPLPRVTWTRRGGAQVLGSGATLRLPSVGPEDAGDYVCRAEAGLSGLRGGAAEARLTVNAPPVVTALHSAPAFLRGPARLQCLVFASPAPDAVVWSWDEGFLEAGSQGRFLVETFPAPESRGGLGPGLISVLHISGTQESDFSRSFNCSARNRLGEGGAQASLGRRDLLPTVRIVAGVAAATTTLLMVITGVALCCWRHSKASASFSEQKNLMRIPGSSDGSSSRGPEEEETGSREDRGPIVHTDHSDLVLEEEGTLETKDPTNGYYKVRGVSVSLSLGEAPGGGLFLPPPSPLGPPGTPTFYDFNPHLGMVPPCRLYRARAGYLTTPHPRAFTSYIKPTSFGPPDLAPGTPPFPYAAFPTPSHPRLQTHV

SEQ ID NO: 19957 - protein, 589 aa, Homo sapiens
VNLGGRMLRMRVPALLVLLFCFRGRAGWSRYWISGNAANGQHDLHIRPVELEDEASYECQATQAGLRSRPAQLHVLVPPEAPQVLGGPSVSLVAGVPANLTCRSRGDARPTPELLWFRDGVLLDGATFHQTLLKEGTPGSVESTLTLTPFSHDDGATFVCRARSQALPTGRDTAITLSLQYPPEVTLSASPHTVQEGEKVIFLCQATAQPPVTGYRWAKGGSPVLGARGPRLEVVADASFLTEPVSCEVSNAVGSANRSTALDVLFGPILQAKPEPVSVDVGEDASFSCAWRGNPLPRVTWTRRGGAQVLGSGATLRLPSVGPEDAGDYVCRAEAGLSGLRGGAAEARLTVNAPPVVTALHSAPAFLRGPARLQCLVFASPAPDAVVWSWDEGFLEAGSQGRFLVETFPAPESRGGLGPGLISVLHISGTQESDFSRSFNCSARNRLGEGGAQASLGRRDLLPTVRIVAGVAAATTTLLMVITGVALCCWRHSKASASFSEQKNLMRIPGSSDGSSSRGPEEEETGSREDRGPIVHTDHSDLVLEEEGTLETKDPTNGYYKVRGVSPPASPDSRVTSFQWKSPGISNLP

SEQ ID NO: 19958 - protein, 648 aa, Homo sapiens
LGAPVTAGAGPGGSAGDVRAQGPGHGARQPRCSRSKSPPGPAAAAAAAATIAAASARAARHREPGRWEPRRGRDPQRSRRCLRDPQRVLEYCRQMYPELQIARVEQATQAIPMERWCGGSRSGSCAHPHHQVVPFRCLPGEFVSEALLVPEGCRFLHQERMDQCESSTRRHQEAQEACSSQGLILHGSGMLLPCGSDRFRGVEYVCCPPPGTPDPSGTAVGDPSTRSWPPGSRVEGAEDEEEEESFPQPVDDYFVEPPQAEEEEETVPPPSSHTLAVVGKVTPTPRPTDGVDIYFGMPGEISEHEGFLRAKMDLEERRMRQINEVMREWAMADNQSKNLPKADRQALNEHFQSILQTLEEQVSGERQRLVETHATRVIALINDQRRAALEGFLAALQADPPQAERVLLALRRYLRAEQKEQRHTLRHYQHVAAVDPEKAQQMRFQVHTHLQVIEERVNQSLGLLDQNPHLAQELRPQIQELLHSEHLGPSELEAPAPGGSSEDKGGLQPPDSKDADTPMTLPKGSTEQDAASPEKEKMNPLEQYERKVNASVPRGFPFHSSEIQRDELAPAGTGVSREAVSGLLIMGAGGGSLIVLSMLLLRRKKPYGAISHGVVEVDPMLTLEEQQLRELQRHGYENPTYRFLEERP

SEQ ID NO: 19959 - protein, 631 aa, Homo sapiens
LPAMAILPLLLCLLPLAPASSPPQSATPSPCPRRCRCQTQSLPLSVLCPGAGLLFVPPSLDRRAAELRLADNFIASVRRRDLANMTGLLHLSLSRNTIRHVAAGAFADLRALRALHLDGNRLTSLGEGQLRGLVNLRHLILSNNQLAALAAGALDDCAETLEDLDLSYNNLEQLPWEALGRLGNVNTLGLDHNLLASVPAGAFSRLHKLARLDMTSNRLTTIPPDPLFSRLPLLARPRGSPASALVLAFGGNPLHCNCELVWLRRLAREDDLEACASPPALGGRYFWAVGEEEFVCEPPVVTHRSPPLAVPAGRPAALRCRAVGDPEPRVRWVSPQGRLLGNSSRARAFPNGTLELLVTEPGDGGIFTCIAANAAGEATAAVELTVGPPPPPQLANSTSCDPPRDGDPDALTPPSAASASAKVADTGPPTDRGVQVTEHGATAALVQWPDQRPIPGIRMYQIQYNSSADDILVYRMIPAESRSFLLTDLASGRTYDLCVLAVYEDSATGLTATRPVGCARFSTEPALRPCGAPHAPFLGGTMIIALGGVIVASVLVFIFVLLMRYKVHGGQPPGKAKIPAPVSSVCSQTNGALGPTPTPAPPAPEPAALRAHTVVQLDCEPWGPGHEPVGP

SEQ ID NO: 19960 - protein, 88 aa, Homo sapiens
LSELRVQRVKEAPPVIYYVPDFISKEEEEYLLRQVFNAPKPKWTQLSGRKLQNWAPRGRTTVLPDCQHHQPGLPHRAGLLRAAAARGR

SEQ ID NO: 19961 - protein, 83 aa, Homo sapiens
LHLCQQDHARSGRTDPDYRRRVPGPHVAADRGPPVPKVSVQLVLGRCGHKEAVFFQSHSARAEDAMRLYYVCTAPHCGHRWTE

SEQ ID NO: 19962 - protein, 91 aa, Homo sapiens
LPGMCRNCDYQQEADNSCIYVNKITHEVDELTQIIADVSQDPTLPRTEDHPCQKCGHKEAVFFQSHSARAEDAMRLYYVCTAPHCGHRWTE

SEQ ID NO: 19963 - protein, 28 aa, Homo sapiens
LLPIFGHRRLSLQNSMDLVPEPGKRCAS

SEQ ID NO: 19964 - protein, 484 aa, Homo sapiens
LLSFISTLEMLLLLVKENSMCLLSCFILDLETKYETKKLSLENDIYEINLSQWKIMERIENHGLKGLILKNDWESTGKIEGQERPQEGYFSSVKMPSEKVSSYQKRTSVTPHQRLHFVDKPYECKECGKAFRVRQQLTFHHRIHTGEKPYECKECGMAFRQTAHLTRHQRLHSGEKLYECKECGEAFICGADLRVHQKMHIGEKPYECKECGKAFRVRGQLTLHQRIHTGEKPYVCKECGKAFRQYAHLTRHQKLNSADRLYECKECGKAFLCGSGLRVHHKLHTGEKPYECKECGKAFRVRQQLTLHQRIHTGEKPYECKECGKTFSRGYHLILHHRIHTGEKPYECKECWKAFSRYSQLISHQSIHIGVKPYDCKECGKAFRLLSQLTQHQSIHIGEKPYKCKECGKAFRLRQKLTLHQSIHTGEKPFECKECRKAFRLNSSLIQHLRIHSGEKPYECKECKKAFRQHSHLTHHLKIHNVKI

SEQ ID NO: 19965 - protein, 219 aa, Homo sapiens
MVPDRQNSCPRLASAPPKGSPPLVKPLAPQRPHGVPPQARALAPKESHSDVFEMGLVPGPVLLPPGAGQPQKEDKSAWKDNRTTEPSGRCSSELGRRLDPPKVILIALTDKPVLGCRPEYCAPRVRRRKHPGLLFWPLCSGVNFVYCSLVQRGYGTRGCETQKWLGTQKGCRPGTCDLMGGGRRERNRQTWDRFGEAEREESEIAKGRCYSDFCVLCDK

SEQ ID NO: 19966 - protein, 25 aa, Homo sapiens
VAFFGGQGPSLRRDSMRPLGRERFD

SEQ ID NO: 19967 - protein, 13 aa, Homo sapiens
MQHITQVFVVTLL

SEQ ID NO: 19968 - protein, 573 aa, Homo sapiens
VRLGLFLFPKEELKRESSSRNLKAMSQGSVSFKDVTVDFTQEEWQQLDPAQKALYRDVMLENYCHFVSVGFHMAKPDMIRKLEQGEELWTQRIFPSYSYLEEDGKTEDVLVKFKEYQDRHSRPLIFINHKKLIKERSNIYGKTFTLGKNRISKTILCEYKPDGKVLKNISELVIRNISPIKEKFGDSTGWEKSLLNTKHEKIHPAVNLHKQTERVLSGKQELIQHQKVQAPEQPFDHNECEKSFLMKGMLFTHTRAHRGERTFEYNKDGIAFIEKSSLSVHPSNLMEKKPSAYNKYGKFLCRKPVFIMPQRPQTEEKPFHCPYCGNNFRRKSYLIEHQRIHTGEKPYVCNQCGKAFRQKTALTLHEKTHIEGKPFICIDCGKSFRQKATLTRHHKTHTGEKAYECPQCGSAFRKKSYLIDHQRTHTGEKPYQCNECGKAFIQKTTLTVHQRTHTGEKPYICNECGKSFCQKTTLTLHQRIHTGEKPYICNECGKSFRQKAILTVHHRIHTGEKSNGCPQCGKAFSRKSNLIRHQKTHTGEKPYECKQCGKFFSCKSNLIVHQKTHKVETTGIQ

SEQ ID NO: 19969 - protein, 86 aa, Homo sapiens [sequence omitted]

SEQ ID NO: 19970 - protein, 624 aa, Homo sapiens
VRGHVTAAQERNYGTIINIEKSSVINQLPLKIKKFILGKNPMSVLNLERASPGSHSSRHHRIHTGEKLYECSECGKGFPYNSDLSIHEKIHTGERHHECTDCGKAFTQKSTLKIHQKIHTGERSYICIECGQAFIQKTQLIAHRRIHSGEKPYECNNCGKSFISKSQLQVHQRVHTRVKPYICTEYGKVFSNNSNLITHEKIQSREKSSICTECGKAFTYRSELIIHQRIHTGEKPYECSDCGRAFTQKSALTVHQRIHTGEKSYICMKCGLAFIRKAHLITHQIIHTGEKPYKCGHCGKLFTSKSQLHVHKRIHTGEKPYVCNKCGKAFTNRSNLITHQKTHTGEKSYICSKCGKAFTQRSDLITHQRIHTGEKPYECNTCGKAFTQKSNLNIHQKIHTGERQYECHECGKAFNQKSILIVHQKIHTGEKPYVCTECGRAFIRKSNFITHQRIHTGEKPYECSDCGKSFTSKSQLLVHQPVHTGEKPYVCAECGKAFSGRSNLSKHQKTHTGEKPYICSECGKTFRQKSELITHHRIHTGEKPYECSDCGKSFTKKSQLQVHQRIHTGEKPYVCAECGKAFSNRSNLNKHQTTHTGDKPYKCGICGKGFVQKSVFSVHQSSHA

SEQ ID NO: 19971 - protein, 29 aa, Homo sapiens
MPRGSWVSLGSPWARPSSRLQPTSSEQLC

SEQ ID NO: 19972 - protein, 15 aa, Homo sapiens
LTFGFRIRSVHPRSA

SEQ ID NO: 19973 - protein, 136 aa, Homo sapiens
LTFGFRIRSVHPRSAFVAFRDVAVYFTQEEWRLLSPAQRTLHREVMLETYNHLVSLEIPSSKPKLIAQLERGEAPWREERKCPLDLCPDGALLCCQAGIQWCYIGSLQPLPPGFKQFPCLSLLSSWDYRIEARNST

SEQ ID NO: 19974 - protein, 9 aa, Homo sapiens
MVLTFLWAG

SEQ ID NO: 19975 - protein, 416 aa, Homo sapiens
VSDLFQEQQKMIEYQIPVSFKDVVVGFTQEEWHRLSPAQRALYRDVMLETYSNLVSVGYEGTKPDVILRLEQEEAPWIGEAACPGCHCWEDIWRVNIQRKRRQDMLLRPGAAISKKTLPKEKSCEYNKFGKISLLSTDLFSSIQSPSNWNPCGKNLNHNLDLIGFKRNCAKKQDECYAYGKLLQRINHGRRPNGEKPRGCSHCEKAFTQNPALMYKPAVSDSLLYKRKRVPPTEKPHVCSECGKAFCYKSEFIRHQRSHTGEKPYGCTDCGKAFSHKSTLIKHQRIHTGVRPFECFFCGKAFTQKSHRTEHQRTHTGERPFVCSECGKSFGEKSYLNVHRKMHTGERPYRCRECGKSFSQKSCLNKHWRTHTGEKPYGCNECGKAFYQKPNLSRHQKIHARKNAYRNENLIIVGNT

SEQ ID NO: 19976 - protein, 14 aa, Homo sapiens
LCHRICCLDMRPRS

SEQ ID NO: 19977 - protein, 629 aa, Homo sapiens
LVSNSWAQAVLLHWLPKVLKIQMESCSVAQAGVQWPDLSSLQPPPPRFKQFSCHSLQVAGITDLDLQCEIISYIEVPTYETDISSTQLQSIYKREKLYECKKCQKKFSSGYQLILHHRFHVIERPYECKECGKNFRSGYQLTLHQRFHTGEKPYECTECGKNFRSGYQLTVHQRFHTGEKTYECRQCGKAFIYASHIVQHERIHTGGKPYECQECGRAFSQGGHLRIHQRVHTGEKPYKCKECGKTFSRRSNLVEHGQFHTDEKPYICEKCGKAFRRGHQLTVHQRVHTGKKPYECKECGKGYTTASYFLLHQRIHKGGKPYECKECKKTFTLYRNLTRHQNIHTGEKLFECKQCGKTYTTGSKLFQHQKTHTGEKPYECKECGKAFSLYGYLKQHQKIHTGMKHFECKECKKTFTLYRNLTRHQNIHTGKKLFECQECGKAYSTGSNLIQHRKTHTGEKPYKCKECGKTFSLHGYLNQHQKIHTGMKPYECKVCRKTFTFYRNLTLHQSIHTDEKPFECKECGKTFRRSSHLTAHQSIHADKKPYECKECGKAFKMYGYLTQHQKIHTGGKPYECKECGKAFSRASNLVQHERIHTGEKPYVCKQCGKTFRYGSALKAHQRIHRSIKV

SEQ ID NO: 19978 - protein, 16 aa, Homo sapiens
MASLPFSRGSFASFRN

SEQ ID NO: 19979 - protein, 19 aa, Homo sapiens
MASLPFSRGSFASSGFSGV

SEQ ID NO: 19980 - protein, 164 aa, Homo sapiens [sequence omitted]

SEQ ID NO: 19981 - protein, 389 aa, Homo sapiens
VLPPPGNEWMGGLSARPTAGRTDPAGTCWGQDPGSKMATVIPGPLSLGEDFYREAIEHCRSYNARLCAERSLRLPFLDSQTGVAQNNCYIWMEKTHRGPGLAPGQIYTYPARCWRKKRRLNILEDPRLRPCEYKIDCEAPLKKEGGLPEGPVLEALLCAETGEKKIELKEEETIMDCQKQQLLEFPHDLEVEDLEDDIPRRKNRAKGKAYGIGGLRKRQDTASLEDRDKPYVCDKFYKELAWVPEAQRKHTAKKAPDGTVIPNGYCDFCLGGSKKTGCPEDLISCADCGRSGHPSCLQFTVNMTAAVRTYRWQCIECKSCSLCGTSENDGASWAGLTPQDQLLFCDDCDRGYHMYCLSPPMAEPPEGSWSCHLCLRHLKEKASAYITLT

SEQ ID NO: 19982 - protein, 433 aa, Homo sapiens
VLPPPGNEWMGGLSARPTAGRTDPAGTCWGQDPGSKMATVIPGPLSLGEDFYREAIEHCRSYNARLCAERSLRLPFLDSQTGVAQNNCYIWMEKTHRGPGLAPGQIYTYPARCWRKKRRLNILEDPRLRPCEYKIDCEAPLKKEGGLPEGPVLEALLCAETGEKKIELKEEETIMDCQKQQLLEFPHDLEVEDLEDDIPRRKNRAKGKAYGIGGLRKRQDTASLEDRDKPYVCDICGKRYKNRPGLSYHYTHTHLAEEEGEENAERHALPFHRKNNHKQFYKELAWVPEAQRKHTAKKAPDGTVIPNGYCDFCLGGSKKTGCPEDLISCADCGRSGHPSCLQFTVNMTAAVRTYRWQCIECKSCSLCGTSENDGASWAGLTPQDQLLFCDDCDRGYHMYCLSPPMAEPPEGSWSCHLCLRHLKEKASAYITLT

SEQ ID NO: 19983 - protein, 423 aa, Homo sapiens
VLPPPGNEWMGGLSARPTAGRTDPAGTCWGQDPGSKMATVIPGPLSLGEDFYREAIEHCRSYNARLCAERSLRLPFLDSQTGVAQNNCYIWMEKTHRGPGLAPGQIYTYPARCWRKKRRLNILEDPRLRPCEYKIDCEAPLKKEGGLPEGPVLEALLCAETGEKKIELKEEETIMDCQKQQLLEFPHDLEVEDLEDDIPRRKNRAKGKAYGIGGLRKRQDTASLEDRDKPYVCDICGKRYKNRPGLSYHYTHTHLAEEEGEENAERHALPFHRKNNHKQFYKELAWVPEAQRKHTAKKAPDGTVIPNGYCDFCLGGSKKTGCPEDLISCADCGRSGHPSCLQFTVNMTAAVRTYRWQCIECKSCSLCGTSENDDQLLFCDDCDRGYHMYCLSPPMAEPPEGSWSCHLCLRHLKEKASAYITLT

SEQ ID NO: 19984 - protein, 238 aa, Homo sapiens
VLPPPGNEWMGGLSARPTAGRTDPAGTCWGQDPGSKMATVIPGPLSLGEDFYREAIEHCRSYNARLCAERSLRLPFLDSQTGVAQNNCYIWMEKTHRGPGLAPGQIYTYPARCWRKKRRLNILEDPRLRPCEYKIDCEAPLKKEGGLPEGPVLEALLCAETGEKKIELKEEETIMDCQKQQLLEFPHDLEVEDLEDDIPRRKNRAKGKAYGIGGLRKRQDTASLEDRDKPYVCDSESF

SEQ ID NO: 19985 - protein, 130 aa, Homo sapiens
LRVSAELAMAQLCGLRRSRAFLALLGSLLLSGVLAADRERSIHDFCLVSKVVGRCRASMPRWWYNVTDGSCQLFVYGGCDGNSNNYLTKEECLKKCATVTENATGDLATSRNAADSSVPSGRFLKRPAME

SEQ ID NO: 19986 - protein, 260 aa, Homo sapiens
LRVSAELAMAQLCGLRRSRAFLALLGSLLLSGVLAADRERSIHDFCLVSKVVGRCRASMPRWWYNVTDGSCQLFVYGGCDGNSNNYLTKEECLKKCATVTENATGDLATSRNAADSSVPSAPRRQDSEDHSSDMFNYEEYCTANAVTGPCRASFPRWYFDVERNSCNNFIYGGCRGNKNSYRSEEACMLRCFRQQENPPLPLGSKVVVLAGLFVMVLILFLGASMVYLIRVARRNQERALRTVWSSGDDKEQLVKNTYVL

SEQ ID NO: 19987 - protein, 68 aa, Homo sapiens
LLLLLLGATVAAELISCLQAPRSTLSGHRHRLHPMSRPAPPPTQGAERSPAAQATAPGRGRCYRNNKP

SEQ ID NO: 19988 - protein, 352 aa, Homo sapiens
LPHRHSAISLYIPKPSTVSHSNTLPLLAPSLSPGGPGPPLPMSSPGLGKKRKVSLLFDHLETGELAQHLTYLEFRSFQAITPQDLRSYVLQGSVRGCPALEGSVGLSNSVSRWVQVMVLSRPGPLQRAQVLDKFIHVAQRLHQLQNFNTLMAVTGGLCHSAISRLKDSHAHLSPDSTKALLELTELLASHNNYARYRRTWAGCAGFRLPVLGVHLKDLVSLHEAQPDRLPDGRLHLPKLNNLYLRLQELVALQGQHPPCSANEDLLHLLTLSLDLFYTEDEIYELSYAREPRCPKSLPPSPFNAPLVVEWAPGVTPKPDRVTLGRHVEQLVEVRRGGWPGRQQPGGKTSVEP

SEQ ID NO: 19989 - protein, 199 aa, Homo sapiens
LWKATEVMAMFEQMRANVGKLLKGIDRYNPENLATLERYVETQAKENAYDLEANLAVLKLYQFNPAFFQTTVTAQILLKALTNLPHTDFTLCKCMIDQAHQEERPIRQILYLGDLLETCHFQAFWQALDENMDLLEGITGFEDSVRKYSQLKVWMSKYGWSADESGQIFICSQEESIKPKNIVEKIDFDSVSSIMASSQ

SEQ ID NO: 19990 - protein, 515 aa, Homo sapiens
MVDYHAANQSYQYGPSSAGNGAGGGGSMGDYMAQEDDWDRDLLLDPAWEKQQRKTFTAWCNSHLRKAGTQIENIDEDFRDGLKLMLLLEVISGERLPKPERGKMRVHKINNVNKALDFIASKGVKLVSIGAEEIVDGNAKMTLGMIWTIILRFAIQDISVEETSAKEGLLLWCQRKTAPYKNVNVQNFHISWKDGLAFNALIHRHRPELIEYDKLRKDDPVTNLNNAFEVAEKYLDIPKMLDAEDIVNTARPDEKAIMTYVSSFYHAFSGAQKAETAANRICKVLAVNQENEHLMEDYEKLASDLLEWIRRTIPWLEDRVPQKTIQEMQQKLEDFRDYRRVHKPPKVQEKCQLEINFNTLQTKLRLSNRPAFMPSEGKMVSDINNGWQHLEQAEKGYEEWLLNEIRRLERLDHLAEKFRQKASIHEAWTDGKEAMLKHRDYETATLSDIKALIRKHEAFESDLAAHQDRVEQIAAIAQELKYVRAQDTIITWLSPQPAQTGGGSTPRPSLPQGLE

SEQ ID NO: 19991 - protein, 111 aa, Homo sapiens
VATSSSAGGWRREPFPAHPVPDLFHCSRVFPDKEVMLDAALALAAEISSKSPVAVQSTKVNLLYSRDHSVAESLNYVASWNMSMLQTQDLVKSVQATTENKELKTVTFSKL

SEQ ID NO: 19992 - protein, 46 aa, Homo sapiens
LQKILYSFFFFFFFFLNARFVEAYLTLMETLEICRGRERGTVISQD

SEQ ID NO: 19993 - protein, 302 aa, Homo sapiens
LFSLSTGDPGSNPNKRQRQPPLLGDHPAEYGGPHGGYHSHYHDEGYGPPPPHYEGRRMGPPVGGHRRGPSRYGPQYGHPPPPPPPPEYGPHADSPVLMVYGLDQSKMNCDRVFNVFCLYGNVEKVKFMKSKPGAAMVEMADGYAVDRAITHLNNNFMFGQKLNVCVSKQPAIMPGQSYGLEDGSCSYKDFSESRNNRFSTPEQAAKNRIQHPSNVLHFFNAPLEVTEENFFEICDELGVKRPSSVKVFSGKSERSSSGLLEWESKSDALETLGFLNHYQMKNPNGPYPYTLKLCFSTAQHAS

SEQ ID NO: 19994 - protein, 339 aa, Homo sapiens
LFSLSTGDPGSNPNKRQRQPPLLGDHPAEYGEGRGFPSVDSRGSCAPARRPPCKFSPVLPLFPSHPPGGPHGGYHSHYHDEGYGPPPPHYEGRRMGPPVGGHRRGPSRYGPQYGHPPPPPPPPEYGPHADSPVLMVYGLDQSKMNCDRVFNVFCLYGNVEKVKFMKSKPGAAMVEMADGYAVDRAITHLNNNFMFGQKLNVCVSKQPAIMPGQSYGLEDGSCSYKDFSESRNNRFSTPEQAAKNRIQHPSNVLHFFNAPLEVTEENFFEICDELGVKRPSSVKVFSGKSERSSSGLLEWESKSDALETLGFLNHYQMKNPNGPYPYTLKLCFSTAQHAS

SEQ ID NO: 19995 - protein, 240 aa, Homo sapiens
VSALFDPGRPVRLAAELENYDDPHKTPASPVVHIRGLIDGVVEADLVEALQEFGPISYVVVMPKKRQALVEFEDVLGACNAVNYAADNQIYIAGHPAFVNYSTSQKISRPGDSDDSRSVNSVLLFTILNPIYSITTDVLYTICNPCGPVQRIVIFRKNGVQAMVEFDSVQSAQRAKASLNGADIYSGCCTLKIEYAKPTRLNVFKNDQDTWDYTNPNLSGQGSQCMFDGTPSFRTVLTHC

SEQ ID NO: 19996 - protein, 115 aa, Homo sapiens
VSATSPLGPVRDGPGGRMSWSGLLHGLNTSLTCGKWGTWASGTRLEGEGYSLLDLCASVGAPRETGVEKHGGVLAELGLLEQEVGSSCMEGYCVSSGVWVSFIIYLFKISLCRPG

SEQ ID NO: 19997 - protein, 78 aa, Homo sapiens
VTAGGTVGWAPLQNMNLPLLAATGSSDAGLCASRGSHSWIQVLAPPLPSGPLLSHRSPGGAKGAPLSTPLAPVFRGVA

SEQ ID NO: 19998 - protein, 45 aa, Homo sapiens
LDLTVSQNLILLSALCCFSLSMCCAKLKTGAHSRNSTSTMRPLQT

SEQ ID NO: 19999 - protein, 487 aa, Homo sapiens
LGIQHGGGSVRGGGGARELREARGRGVPGRAVRPRATAAPSRPHRVPGTMFGKRKKRVEISAPSNFEHRVHTGFDQHEQKFTGLPRQWQSLIEESARRPKPLVDPACITSIQPGAPKGEPHDVAPNGPSAGGLAIPQSSSSSSRPPTRARGAPSPGVLGPHASEPQLAPPACTPAAPAVPGPPGPRSPQREPQRVSHEQFRAALQLVVDPGDPRSYLDNFIKIGEGSTGIVCIATVRSSGKLVAVKKMDLRKQQRRELLFNEVVIMRDYQHENVVEMYNSYLVGDELWVVMEFLEGGALTDIVTHTRMNEEQIAAVCLAVLQALSVLHAQGVIHRDIKSDSILLTHDGRVKLSDFGFCAQVSKEVPRRKSLVGTPYWMAPELISRLPYGPEVDIWSLGIMVIEMVDGEPPYFNEPPLKAMKMIRDNLPPRLKNLHKVSPSLKGFLDRLLVRDPAQRATAAELLKHPFLAKAGPPASIVPLMRQNRTR

SEQ ID NO: 20000 - protein, 194 aa, Homo sapiens
VVLVTLVLGLAVAGPVPTSKPTTTGKGCHIGRFKSLSPQELASFKKARDALEESLKLKNWSCSSPVFPGNWDLRLLQVRERPVALEAELALTLKVLEAAAGPALEDVLDQPLHTLHHILSQLQACIQPQPTAGPRPRGRLHHWLHRLQEAPKKESAGCLEASVTFNLFRLLTRDLKYVADGNLCLRTSTHPEST

SEQ ID NO: 20001 - protein, 53 aa, Homo sapiens
LLFLPDVDEASKKEIKDILIQYDRTLLVADPRRCESKKFGGPGARARYQKSYR

SEQ ID NO: 20002 - protein, 72 aa, Homo sapiens [sequence omitted]

SEQ ID NO: 20003 - protein, 43 aa, Homo sapiens
MAEPTGLLEMSELPGDSSVPQNMYSIHKTQQKKVSAGRTGLRL

SEQ ID NO: 20004 - protein, 476 aa, Homo sapiens
VGVKLPMHWPLGTAGKKRRGPAVEQLNRVTVPSWTPWWPSSCRARMSVESLPTPRGPSGSAIASWTPRVPCATVSMTAACCQASLGHCVTHWPPMLLHARLLEPQCTPGGVKNFAPEGCESACREGCVCDAGFVLSGDTCVPVGQCGCLHDDRYYPLGQTFYPGPGCDSLCRCREGGEVSCEPSSCGPHETCRPSGGSLGCVAVGSTTCQASGDPHYTTFDGHRFDFMGTCVYVLAQTCGTRPGLHRFAVLQENVAWGNGRVSVTRVITVQVANFTLRLEQRQWKVTVNGVDMKLPVVLANGQIRASQHGSDVVIETDFGLRVAYDLVYYVRVTVPGNYYQLMCGLCGNYNGDPKDDFQKPNGSQAGNANEFGNSWEEVVSDSPCLPPPTCPPGSEGCIPSEECPPELEKKYQKEEFCGLLSSPTGPLSSCHKLVDPQGPLKDCIFDLCLGGGNLSILCSNIHAYVSACQGGALEE

SEQ ID NO: 20005 - protein, 1136 aa, Homo sapiens
MGALWSWWILWAGATLLWGLTQEASVDLKNTGREEFLTAFLQNYQLAYSKAYPRLLISSLSESPASVSILSQADNTSKKVTVRPGESVMVNISAKAEMIGSKIFQHAVVIHSDYAISVQALNAKPDTAELTLLRPIQALGTEYFVLTPPGTSARNVKEFAVVAGAAGASVSVTLKGSVTFNGKFYPAGDVLRVTLQPYNVAQLQSSVDLSGSKVTASSPVAVLSGHSCAQKHTTCNHVVEQLLPTSAWGTHYVVPTLASQSRYDLAFVVASQATKLTYNHGGITGSRGLQAGDVVEFEVRPSWPLYLSANVGIQVLLFGTGAIRNEVTYDPYLVLIPDVAAYCPAYVVKSVPGCEGVALVVAQTKAISGLTIDGHAVGAKLTWEAVPGSEFSYAEVELGTADMIHTAEATTNLGLLTFGLAKAIGYATAADCGRTVLSPVEPSCEGMQCAAGQRCQVVGGKAGCVAESTAVCRAQGDPHYTTFDGRRYDMMGTCSYTMVELCSEDDTLPAFSVEAKNEHRGSRRVSYVGLVTVRAYSHSVSLTRGEVGFVLVDNQRSRLPVSLSEGRLRVYQSGPRAVVELVFGLVVTYDWDCQLALSLPARFQDQVCGLCGNYNGDPADDFLTPDGALAPDAVEFASSWKLDDGDYLCEDGCQNNCPACTPGQAQHYEGDRLCGMLTKLDGPFAVCHDTLDPRPFLEQCVYDLCVVGGERLSLCRGLSAYAQACLELGISVGDWRSPANCPLSCPANSRYELCGPACPTSCNGAAAPSNCSGRPCVEGCVCLPGFVASGGACVPASSCGCTFQGLQLAPGQEVWADELCQRRCTCNGATHQVTCRDKQSCPAGERCSVQNGLLGCYPDRFGTCQGSGDPHYVSFDGRRFDFMGTCTYLLVGSCGQNAALPAFRVLVENEHRGSQTVSYTRAVRVEARGVKVAVRREYPGQVLVDDVLQYLPFQAADGQVQVFRQGRDAVVRTDFGLTVTYDWNARVTAKVPSSYAEALCGLCGNFNGDPADDLALRGGGQAANALAFGNSWQEETRPGCGATEPGDCPKLDSLVAQQLQSKNECGILADPKGPFRECHSKLDPQGAVRDCVYDRCLLPGQSGPLCDALATYAAACQAAGATVHPWRSEELCPRGL

SEQ ID NO: 20006 - protein, 285 aa, Homo sapiens
LVTMEEIGILVEKAQDEIPALSVSRPQTGLSFLGPEPEDLEDLYSRYKKLQQELEFLEVQEEYIKDEQKNLKKEFLHAQEEVKRIQSIPLVIGQFLEAVDQNTAIVGSTTGSNYYVRILSTIDRELLKPNASVALHKHSNALVDVLPPEADSSIMMLTSDQKPDVMYADIGGMDIQKQEVREAVELPLTHFELYKQIGIDPPRGVLMYGPPGCGKTMLAKAVAHHTTAAFIRVVGSEFVQKYLGEGPRMVRDVFRLAKENAPAIIFIDEIDAIATKRFDAQTGGK

SEQ ID NO: 20007 - protein, 321 aa, Homo sapiens
LVTMEEIGILVEKAQDEIPALSVSRPQTGLSFLGPEPEDLEDLYSRYKKLQQELEFLEVQEEYIKDEQKNLKKEFLHAQEEVKRIQSIPLVIGQFLEAVDQNTAIVGSTTGSNYYVRILSTIDRELLKPNASVALHKHSNALVDVLPPEADSSIMMLTSDQKPDVMYADIGGMDIQKQEVREAVELPLTHFELYKQIGIDPPRGVLMYGPPGCGKTMLAKAVAHHTTAAFIRVVGSEFVQKYLGEGPRMVRDVFRLAKENAPAIIFIDEIDAIATKRFDAQTGADREVQRILLELLNQMDGFDQNVNVKVWGLGWTRGGVV

SEQ ID NO: 20008 - protein, 427 aa, Homo sapiens
LVTMEEIGILVEKAQDEIPALSVSRPQTGLSFLGPEPEDLEDLYSRYKKLQQELEFLEVQEEYIKDEQKNLKKEFLHAQEEVKRIQSIPLVIGQFLEAVDQNTAIVGSTTGSNYYVRILSTIDRELLKPNASVALHKHSNALVDVLPPEADSSIMMLTSDQKPDVMYADIGGMDIQKQEVREAVELPLTHFELYKQIGIDPPRGVLMYGPPGCGKTMLAKAVAHHTTAAFIRVVGSEFVQKYLGEGPRMVRDVFRLAKENAPAIIFIDEIDAIATKRFDAQTGADREVQRILLELLNQMDGFDQNVNVKVIMATNRADTLDPALLRPGRLDRKIEFPLPDRRQKRLIFSTITSKMNLSEEVDLEDCILLQKSGRGPSWERGLDLQLNFCQHHSPDCAGGTKVQGGGEVTEMAKDDFQPQAFTPSHRE

SEQ ID NO: 20009 - protein, 421 aa, Homo sapiens
LVTMEEIGILVEKAQDEIPALSVSRPQTGLSFLGPEPEDLEDLYSRYKKLQQELEFLEVQEEYIKDEQKNLKKEFLHAQEEVKRIQSIPLVIGQFLEAVDQNTAIVGSTTGSNYYVRILSTIDRELLKPNASVALHKHSNALVDVLPPEADSSIMMLTSDQKPDVMYADIGGMDIQKQEVREAVELPLTHFELYKQIGIDPPRGVLMYGPPGCGKTMLAKAVAHHTTAAFIRVVGSEFVQKYLGEGPRMVRDVFRLAKENAPAIIFIDEIDAIATKRFDAQTGADREVQRILLELLNQMDGFDQNVNVKVIMATNRADTLDPALLRPGRLDRKIEFPLPDRRQKRLIFSTITSKMNLSEEVDLEDYVARPDKISGADINSICQESGMLAVRENRYIVLAKDFEKAYKTVIKKDEQEHEFYK

SEQ ID NO: 20010 - protein, 390 aa, Homo sapiens
LVTMEEIGILVEKAQDEIPALSVSRPQTGLSFLGPEPEDLEDLYSRYKEEVKRIQSIPLVIGQFLEAVDQNTAIVGSTTGSNYYVRILSTIDRELLKPNASVALHKHSNALVDVLPPEADSSIMMLTSDQKPDVMYADIGGMDIQKQEVREAVELPLTHFELYKQIGIDPPRGVLMYGPPGCGKTMLAKAVAHHTTAAFIRVVGSEFVQKYLGEGPRMVRDVFRLAKENAPAIIFIDEIDAIATKRFDAQTGADREVQRILLELLNQMDGFDQNVNVKVIMATNRADTLDPALLRPGRLDRKIEFPLPDRRQKRLIFSTITSKMNLSEEVDLEDYVARPDKISGADINSICQESGMLAVRENRYIVLAKDFEKAYKTVIKKDEQEHEFYK

SEQ ID NO: 20011 - protein, 296 aa, Homo sapiens
VTAYHAATMNEVSVIKEGWLHKRGEYIKTWRPRYFLLKSDGSFIGYKERPEAPDQTLPPLNNFSVAECQLMKTERPRPNTFVIRCLQWTTVIERTFHVDSPDEREEWMRAIQMVANSLKQRAPGEDPMDYKCGSPSDSSTTEEMEVAVSKARAKVTMNDFDYLKLLGKGTFGKVILVREKATGRYYAMKILRKEVIIAKDEVAHTVTESRVLQNTRHPFLTVSCPPLPRQCEASLWTELRERALIFWYKAQSWGRPGGQGKVLLRPAKSSEPRHVVGVSRLGEWEGDSFFIDGGFM

SEQ ID NO: 20012 - protein, 115 aa, Homo sapiens
LVFLFLLLKFPPTGHEPGADCPHSPCPWQTMNDFDYLKLLGKGTFGKVILVREKATGRYYAMKILRKEVIIAKVRAPGIALASLCGGCGLEPDPEAWTLTRAFCCCGLISPTNSP

SEQ ID NO: 20013 - protein, 37 aa, Homo sapiens
LYLFGAVEAVAVLYLQGLCPVHGASCMSCCPELSRAR

SEQ ID NO: 20014 - protein, 75 aa, Homo sapiens
LEEWLLSVSIYSAQPCALGFIWYLCPFLQSPKLKFRGRIAFHRILSDPMGARVCAGRRRQQESHAGGDTATRDLR

SEQ ID NO: 20015 - protein, 423 aa, Homo sapiens
VMVMAALSLVAACWGRAAADESVQLPAAPGSSVRARETMVSVTMATSEWIQFFKEAGIPPGPAVNYAVMFVDNRIQKSMLLDLNKEIMNELGVTVVGDIIAILKHAKVVHRQDMCKAATESVPCSPSPLAGEIRRGTSAASRMITNSLNHDSPPSTPPRRPDTSTSKISVTVSNKMAAKSAKATAALARREEESLAVPAKRRRVTAEMEGKYVINMPKGTTPRTRKILEQQQAAKGLHRTSVFDRLGAETKADTTTGSKPTGVFSRLGATPETDEDLAWDSDNDSSSSVLQYAGVLKKLGRGPAKASPQPALTVKAKATSSATTAAAPTLRRLALSSRSGLERKPESLSKVSIIKRLGAAALVPEAQDSQVTSTKSKSSAEVKVTIKRTLVGPRGSSSSEGLGAQMDHAGTVSVFKRLGRRTF

SEQ ID NO: 20016 - protein, 183 aa, Homo sapiens
LCGTSGWAPVRRKCLHPGSGSEAAAPCRTEAGSAAERGEDTGAWGAGASQQRHGGQEPECRGAEAGGVGGNYRGDGGADRGQRHQRSGRRQRGNLRSGAARGLTRRQEPQPAGRGPAAECPSVLRELQVRGRTTPAAMRRALQSLLLPEAHCAHRGPGSAARDRVWLRDQGPAGQGGQAGTRA

SEQ ID NO: 20017 - protein, 41 aa, Homo sapiens
VVVANLAAAIWGSLLPIQVSVLHTCLSCSMFEEINIVEEQF

SEQ ID NO: 20018 - protein, 713 aa, Homo sapiens
LPLPSQLRGEHPPARCRDAPPTPLPLQLDGWIHEKMLMARDGTREDNHKLHKRWLRHQAFMAELAQNKEWLEKIEREGQQLMQEKPELAASVRKKLGEIRQCWAELESTTQAKARQLFEASKADQLVQSFAELDKKLLHMESQLQDVDPGGDLATVNSQLKKLQSMESQVEEWYREVGELQAQTAALPLEPASKELVGERQNAVGERLVRLLEPLQERRRLLLASKELHQVAHDLDDELAWVQERLPLAMQTERGNGLQAVQQHIKKNQGLRREIQAHGPRLEEVLERAGALASLRSPEAEAVRRGLEQLQSAWAGLREAAERRQQVLDAAFQVEQYYFDVAEVEAWLGEQELLMMSEDKGKDEQSTLQLLKKHLQLEQGVENYEESIAQLSRQCRALLEMGHPDSEQISRRQSQVDRLYVALKELGEERRVALEQQYWLYQLSRQVSELEHWIAEKEVVAGSPELGQDFEHVSVLQEKFSEFASETGMAGRERLAAVNQMVDELIECGHTAAATMAEWKDGLNEAWAELLELMGTRAQLLAASRELHKFFSDARELQGQIEEKRRRLPRLTTPPEPRPSASSMQRTLRAFEHDLQLLVSQVRQLQEGAAQLRTVYAGEHAEAIASREQEVLQGWKELLSACEDARLHVSSTADALRFHSQVRDLLSWMDGIASQIGAADKPRCPSSLLGLPASPWWPTPATPSPLTAPFSME

SEQ ID NO: 20019 - protein, 591 aa, Homo sapiens
VTATITMTVTLPLILTVVFPVKRRNRHSLVGPQQLGGRPAPVRRSNTMPPNLGNAGLLGRMLDEKTPPSPSGQPEEPGMVRLVCGHHNWIAVAYTQFLVCYRLKEASGWQLVFSSPRLDWPIERLALTARVHGGALGEHDKMVAAATGSEILLWALQAEGGGSEIGVFHLGVPVEALFFVGNQLIATSHTGRIGVWNAVTKHWQVQEVQPITSYDAAGSFLLLGCNNGSIYYVDVQKFPLRMKDNDLLVSELYRDPAEDGVTALSVYLTPKTSDSGNWIEIAYGTSSGGVRVIVQHPETVGSGPQLFQTFTVHRSPVTKIMLSEKHLISVCADNNHVRTWSVTRFRGMISTQPGSTPLASFKILALESADGHGGCSAGNDIGPYGERDDQQVFIQKVVPSASQLFVRLSSTGQRVCSVRSVDGSPTTAFTVLECEGSRRLGSRPRRYLLTGQANGSLAMWDLTTAMDGLGQAPAGGLTEQELMEQLEHCELAPPAPSAPSWGCLPSPSPRISLTSLHSASSNTSLSGHRGSPSPPQAEARRRGGGSFVERCQELVRSGPDLRRPPTPAPWPSSGLGTPLTPPKMKLNETSF

SEQ ID NO: 20020 - protein, 111 aa, Homo sapiens
LPPCFPHPTTRPLSSDVDECRERGPALCGSQRCENSPGSYRCVRDCDPGYHAGPEGTCDDVDECQEYGPEICGAQRCENTPGSYRCTPACDPGYQPTPGGGCQGGCPSGIG

SEQ ID NO: 20021 - protein, 480 aa, Homo sapiens
LPPCFPHPTTRPLSSDVDECRERGPALCGSQRCENSPGSYRCVRDCDPGYHAGPEGTCDDVNECETLQGVCGAALCENVEGSFLCVCPNSPEEFDPMTGRCVPPRTSADVDECQLFRDQVCKSGVCVNTAPGYSCYCSNGYYYHTQRLECIDNDECADEEPACEGGRCVNTVGSYHCTCEPPLVLDGSQRRCVSNESQSLDDNLGVCWQEVGADLVCSHPRLDRQATYTECCCLYGEAWGMDCALCPAQDSDDFEALCNVLRPPAYSPPRPGGFGLPYEYGPDLGPPYQGLPYGPELYPPPALPYDPYPPPPGPFARREAPYGAPRFDMPDFEDDGGPYGESEAPAPPGPGTRWPYRSRDTRRSFPEPEEPPEGGSYAGSLAEPYEELEAEECGILDGCTNGRCVRVPEGFTCRCFDGYRLDMTRMACVDINECDEAEAASPLCVNARCLNTDGSFRCICRPGFAPTHQPHHCAPARPRA

SEQ ID NO: 20022 - protein, 637 aa, Homo sapiens
LPPPPPQQQQSGSQAQPGPREAGAPGPWMSRSAAASGGPRRPERHLPPAPCGAPGPPETCRTEPDGAGTMNKLRQSLRRRKPAYVPEASRPHQWQADEDAVRKGTCSFPVRYLGHVEVEESRGMHVCEDAVKKLKAMGRKSVKSVLWVSADGLRVVDDKTKDLLVDQTIEKVSFCAPDRNLDKAFSYICRDGTTRRWICHCFLALKDSGERLSHAVGCAFAACLERKQRREKECGVTAAFDASRTSFAREGSFRLSGGGRPAEREAPDKKKAEAAAAPTVAPGPAQPGHVSPTPATTSPGEKGEAGTPVAAGTTAAAIPRRHAPLEQLVRQGSFRGFPALSQKNSPFKRQLSLRLNELPSTLQRRTDFQVKGTVPEMEPPGAGDSDSINALCTQISSSFASAGAPAPGPPPATTGTSAWGEPSVPPAAAFQPGHKRTPSEAERWLEEVSQVAKAQQQQQQQQQQQQQQQQQQQQAASVAPVPTMPPALQPFPAPVGPFDAAPAQVAVFLPPPHMQPPFVPAYPGLGYPPMPRVPVVGITPSQMVANAFCSAAQLQPQPATLLGKAGAFPPPAIPSAPGSQARPRPNGAPWPPEPAPAPAPELDPFEAQWAALEGKATVEKPSNPFSGDLQKTFEIEL

SEQ ID NO: 20023 - protein, 166 aa, Homo sapiens
MWLKVGGLLRGTGGQLGQTVGWPCGALGPGPHRWGPCGGSWAQKFYQDGPGRGLGEEDIRRAREARPRKTPRPQLSDRSRERKVPASRISRLANFGGLAVGLGLGVLAEMAKKSMPGGRLQSEGGSGLDSSPFLSEANAERIVQTLCTVRGAALKVGQMLSIQGTA

SEQ ID NO: 20024 - protein, 56 aa, Homo sapiens
LVCLGVIILLSAFSGPGVRGGPMPKLADRKLCADQECSRSGRLLWRSGCSPGLFPQ

SEQ ID NO: 20025 - protein, 92 aa, Homo sapiens
LVCLGVIILLSAFSGPGVRGGPMPKLADRKLCADQECSHPISMAVALQDYMAPDCRFLTIHRGQVVFREITMEIWLLAWAISPVALSERTRP

SEQ ID NO: 20026 - protein, 14 aa, Homo sapiens
VAVPGPGSRKEPGL

SEQ ID NO: 20027 - protein, 238 aa, Homo sapiens
VERLPAEEQARPRRHIAALSGRDRVMAETYDFLFKFLVIGSAGTGKSCLLHQFIENKFKQDSNHTIGVEFGSRVVNVGGKTVKLQIWDTAGQERFRSVTRSYYRGAAGALLVYDITSRETYNSLAAWLTDARTLASPNIVVILCGNKKDLDPEREVTFLEASRFAQENELMFLETSALTGENVEEAFLKCARTILNKIDSGELDPERMGSGIQYGDASLRQLRQPRSAQAVAPQPCGC

SEQ ID NO: 20028 - protein, 122 aa, Homo sapiens
LAFSTGMRPSASFGSLGVPRPWPLSRVAAELCGASHPEGSLPKPLGTAEDLGTSKQPPGHEKSSCCLPCLTLPHARPGGPQLHQVEAEEEAEEGGTMGPGGALHARGMKTLLPWTARASRSP

SEQ ID NO: 20029 - protein, 107 aa, Homo sapiens
LCGAGRLAQTAAPGPEEKARHPEGSLPKPLGTAEDLGTSKQPPGHEKSSCCLPCLTLPHARPGGPQLHQVEAEEEAEEGGTMGPGGALHARGMKTLLPWTARASRSP

SEQ ID NO: 20030 - protein, 146 aa, Homo sapiens
LPLSPTALRRGLRACPGLGALGCPGWGHLYLSSCLRVRAPSSVLSSVAADPLPEGPSRRHPEGSLPKPLGTAEDLGTSKQPPGHEKSSCCLPCLTLPHARPGGPQLHQVEAEEEAEEGGTMGPGGALHARGMKTLLPWTARASRSP

SEQ ID NO: 20031 - protein, 117 aa, Homo sapiens
LRSEGASGPAPGWGRWGALDGGTFISRPVSGCVHPPPSFPLSPRTLSPRAPPVGQSRDLPSVWACVRPRPASSRRARVDPTVPLRPGSSLPASLRSIFLSLGPSFSLFLDSPVSSVF

SEQ ID NO: 20032 - protein, 118 aa, Homo sapiens
LRSEGASGPAPGWGRWGALDGGTFISRPVSGHPEGSLPKPLGTAEDLGTSKQPPGHEKSSCCLPCLTLPHARPGGPQLHQVEAEEEAEEGGTMGPGGALHARGMKTLLPWTARASRSP

SEQ ID NO: 20033 - protein, 115 aa, Homo sapiens
LSFDPPAPTLTLPGTPTFLVVFLERRGSHPEGSLPKPLGTAEDLGTSKQPPGHEKSSCCLPCLTLPHARPGGPQLHQVEAEEEAEEGGTMGPGGALHARGMKTLLPWTARASRSP

SEQ ID NO: 20034 - protein, 122 aa, Homo sapiens
LSWSSSPLLPIPSRLSPACLSLVSLTSLFFFPFSSHPEGSLPKPLGTAEDLGTSKQPPGHEKSSCCLPCLTLPHARPGGPQLHQVEAEEEAEEGGTMGPGGALHARGMKTLLPWTARASRSP

SEQ ID NO: 20035 - protein, 68 aa, Homo sapiens
VAALSFQGKVWWMRCTWLMQSSLTSTTEGEPWDNVLGGVLGRVRIEAAQSAVACVLGKHPVVAVATDV

SEQ ID NO: 20036 - protein, 26 aa, Homo sapiens
MADSLNDFRRALGLCWLLLPCHRCCF

SEQ ID NO: 20037 - protein, 942 aa, Homo sapiens
VARASPAAVPGRQCQIRGAWSWGEGRGQPGPAPSPAGSPTTSEESLAPMAWRCPRMGRVPLAWCLALCGWACMAPRGTQAEESPFVGNPGNITGARGLTGTLRCQLQVQGEPPEVHWLRDGQILELADSTQTQVPLGEDEQDDWIVVSQLRITSLQLSDTGQYQCLVFLGHQTFVSQPGYVGLEGLPYFLEEPEDRTVAANTPFNLSCQAQGPPEPVDLLWLQDAVPLATAPGHGPQRSLHVPGLNKTSSFSCEAHNAKGVTTSRTATITVLPQQPRNLHLVSRQPTELEVAWTPGLSGIYPLTHCTLQAVLSDDGMGIQAGEPDPPEEPLTSQASVPPHQLRLGSLHPHTPYHIRVACTSSQGPSSWTHWLPVETPEGVPLGPPENISATRNGSQAFVHWQEPRAPLQGTLLGYRLAYQGQDTPEVLMDIGLRQEVTLELQGDGSVSNLTVCVAAYTAAGDGPWSLPVPLEAWRPGQAQPVHQLVKEPSTPAFSWPWWYVLLGAVVAAACVLILALFLVHRRKKETRYGEVFEPTVERGELVVRYRVRKSYSRRTTEATLNSLGISEELKEKLRDVMVDRHKVALGKTLGEGEFGAVMEGQLNQDDSILKVAVKTMKIAICTRSELEDFLSEAVCMKEFDHPNVMRLIGVCFQGSERESFPAPVVILPFMKHGDLHSFLLYSRLGDQPVYLPTQMLVKFMADIASGMEYLSTKRFIHRDLAARNCMLNENMSVCVADFGLSKKIYNGDYYRQGRIAKMPVKWIAIESLADRVYTSKSDVWSFGVTMWEIATRGQTPYPGVENSEIYDYLRQGNRLKQPADCLDGLYALMSRCWELNPQDRPSFTELREDLENTLKALPPAQEPDEILYVNMDEGGGYPEPPGAAGGADPPTQPDPKDSCSCLTAAEVHPAGRYVLCPSTTPSPAQPADRGSPAAPGQEDGA

SEQ ID NO: 20038 - protein, 933 aa, Homo sapiens
VARASPAAVPGRQCQIRGAWSWGEGRGQPGPAPSPAGSPTTSEESLAPMAWRCPRMGRVPLAWCLALCGWACMAPRGTQAEESPFVGNPGNITGARGLTGTLRCQLQVQGEPPEVHWLRDGQILELADSTQTQVPLGEDEQDDWIVVSQLRITSLQLSDTGQYQCLVFLGHQTFVSQPGYVGLEGLPYFLEEPEDRTVAANTPFNLSCQAQGPPEPVDLLWLQDAVPLATAPGHGPQRSLHVPGLNKTSSFSCEAHNAKGVTTSRTATITVLPQQPRNLHLVSRQPTELEVAWTPGLSGIYPLTHCTLQAVLSDDGMGIQAGEPDPPEEPLTSQASVPPHQLRLGSLHPHTPYHIRVACTSSQGPSSWTHWLPVETPEGVPLGPPENISATRNGSQAFVHWQEPRAPLQGTLLGYRLAYQGQDTPEVLMDIGLRQEVTLELQGDGSVSNLTVCVAAYTAAGDGPWSLPVPLEAWRPVKEPSTPAFSWPWWYVLLGAVVAAACVLILALFLVHRRKKETRYGEVFEPTVERGELVVRYRVRKSYSRRTTEATLNSLGISEELKEKLRDVMVDRHKVALGKTLGEGEFGAVMEGQLNQDDSILKVAVKTMKIAICTRSELEDFLSEAVCMKEFDHPNVMRLIGVCFQGSERESFPAPVVILPFMKHGDLHSFLLYSRLGDQPVYLPTQMLVKFMADIASGMEYLSTKRFIHRDLAARNCMLNENMSVCVADFGLSKKIYNGDYYRQGRIAKMPVKWIAIESLADRVYTSKSDVWSFGVTMWEIATRGQTPYPGVENSEIYDYLRQGNRLKQPADCLDGLYALMSRCWELNPQDRPSFTELREDLENTLKALPPAQEPDEILYVNMDEGGGYPEPPGAAGGADPPTQPDPKDSCSCLTAAEVHPAGRYVLCPSTTPSPAQPADRGSPAAPGQEDGA

SEQ ID NO: 20039 - protein, 517 aa, Homo sapiens
LAPMAWRCPRMGRVPLAWCLALCGWACMAPRGTQAEESPFVGNPGNITGARGLTGTLRCQLQVQGEPPEVHWLRDGQILELADSTQTQVPLGEDEQDDWIVVSQLRITSLQLSDTGQYQCLVFLGHQTFVSQPGYVGLEGLPYFLEEPEDRTVAANTPFNLSCQAQGPPEPVDLLWLQDAVPLATAPGHGPQRSLHVPGLNKTSSFSCEAHNAKGVTTSRTATITVLPQQPRNLHLVSRQPTELEVAWTPGLSGIYPLTHCTLQAVLSDDGMGIQAGEPDPPEEPLTSQASVPPHQLRLGSLHPHTPYHIRVACTSSQGPSSWTHWLPVETPEGVPLGPPENISATRNGSQAFVHWQEPRAPLQGTLLGYRLAYQGQDTPEVLMDIGLRQEVTLELQGDGSVSNLTVCVAAYTAAGDGPWSLPVPLEAWRPGQAQPVHQLVKEPSTPAFSWPWWYVLLGAVVAAACVLILALFLVHRRKKETRYGEVFEPTVERGELVVRYRVRKSYSRRTTEATCK

SEQ ID NO: 20040 - protein, 909 aa, Homo sapiens
VRGEAVAAAILSRCRHWSGPPPFPPSPPDRKGLRGTEPWEAGPGSGATPGARAMDVRRLKVNELREELQRRGLDTRGLKAELAERLQAALEAEEPDDERELDADDEPGRPGHINEEVETEGGSELEGTAQPPPPGLQPHAEPGGYSGPDGHYAMDNITRQNQFYDTQVIKQENESGYERRPLEMEQQQAYRPEMKTEMKQGAPTSFLPPEASQLKPDRQQFQSRKRPYEENRGRGYFEHREDRRGRSPQPPAEEDEDDFDDTLVAIDTYNCDLHFKVARDRSSGYPLTIEGFAYLWSGARASYGVRRGRVCFEMKINEEISVKHLPSTEPDPHVVRIGWSLDSCSTQLGEEPFSYGYGGTGKKSTNSRFENYGDKFAENDVIGCFADFECGNDVELSFTKNGKWMGIAFRIQKEALGGQALYPHVLVKNCAVEFNFGQRAEPYCSVLPGFTFIQHLPLSERIRGTVGPKSKAECEILMMVGLPAAGKTTWAIKHAASNPSKKYNILGTNAIMDKMRVMGLRRQRNYAGRWDVLIQQATQCLNRLIQIAARKKRNYILDQTNVYGSAQRRKMRPFEGFQRKAIVICPTDEDLKDRTIKRTDEEGKDVPDHAVLEMKANFTLPDVGDFLDEVLFIELQREEADKLVRQYNEEGRKAGPPPEKRFDNRGGGGFRGRGGGGGFQRYENRGPPGGNRGGFQNRGGGSGGGGNYRGGFNRSGGGGYSQNRWGNNNRDNNNSNNRGSYNRAPQQQPPPQQPPPPQPPPQQPPPPPSYSPARNPPGASTYNKNSNIPGSSANTSTPTVSSYSPPQPSYSQPPYNQGGYSQGYTAPPPPPPPPPAYNYGSYGGYNPAPYTPPPPPTAQTYPQPSYNQYQQYAQQWNQYYQNQGQWPPYYGNYDYGSYSGNTQGGTSTQ

SEQ ID NO: 20041 - protein, 795 aa, Homo sapiens
LSRCRHWSGPPPFPPSPPDRKGLRGTEPWEAGPGSGATPGARAMDVRRLKVNELREELQRRGLDTRGLKAELAERLQPPPPGLQPHAEPGGYSGPDGHYAMDNITRQNQFYDTQVIKQENESGYERRPLEMEQQQAYRPEMKTEMKQGAPTSFLPPEASQLKPDRQQFQSRKRPYEENRGRGYFEHREDRRGRSPQPPAEEDEDDFDDTLVAIDTYNCDLHFKVARDRSSGYPLTIEGFAYLWSGARASYGVRRGRVCFEMKDFECGNDVELSFTKNGKWMGIAFRIQKEALGGQALYPHVLVKNCAVEFNFGQRAEPYCSVLPGFTFIQHLPLSERIRGTVGPKSKAECEILMMVGLPAAGKTTWAIKHAASNPSKKYNILGTNAIMDKMRVMGLRRQRNYAGRWDVLIQQATQCLNRLIQIAARKKRNYILDQTNVYGSAQRRKMRPFEGFQRKAIVICPTDEDLKDRTIKRTDEEGKDVPDHAVLEMKANFTLPDVGDFLDEVLFIELQREEADKLVRQYNEEGRKAGPPPEKRFDNRGGGGFRGRGGGGGFQRYENRGPPGGNRGGFQNRGGGSGGGGNYRGGFNRSGGGGYSQNRWGNNNRDNNNSNNRGSYNRAPQQQPPPQQPPPPQPPPQQPPPPPSYSPARNPPGASTYNKNSNIPGSSANTSTPTVSSYSPPQSFGFFPSTFQPSYSQPPYNQGGYSQGYTAPPPPPPPPPAYNYGSYGGYNPAPYTPPPPPTAQTYPQPSYNQYQQYAQQWNQYYQNQGQWPPYYGNYDYGSYSGNTQGGTSTQ

SEQ ID NO: 20042 - protein, 41 aa, Homo sapiens
LWDAGVQRLRSGRRPEDRGIPLPAAEKDLGTRAPARPEGGS

SEQ ID NO: 20043 - protein, 27 aa, Homo sapiens
MTFYFLFVPTSPAFHLLFFLPSSFLTK

SEQ ID NO: 20044 - protein, 274 aa, Homo sapiens
VRTPRRMAQPGACALVTQPVCGARCQAEVTTAAARGLGAMEEETHTDAKIRAENGTGSSPRGPGCSLRHFACEQNLLSRPDGSASFLQGDTSVLAGVYGPAEVKVSKEIFNKATLEVILRPKIGLPGVAEKSRERLIRNTCEAVVLGTLHPRTSITVVLQVVSDAGSLLACCLNAACMALVDAGVPMRALFCGVACALDSDGTLVLDPTSKQEKEARAVLTFALDSVERKLLMSSTKGLYSDTELQQCLAAAQAASQHVFRFYRESLQRRYSKS

SEQ ID NO: 20045 - protein, 100 aa, Homo sapiens
LAESLCREMDEQIRLMDQNLKCLSAAEEKYSQKEDKYEEEIKILTDKIKEAETHAEFAERSVAKLEKTIDDLEDKLKCTKGEHLCTQRMLDQTLLDLNEM

SEQ ID NO: 20046 - protein, 172 aa, Homo sapiens
VRASLLTFWNAPTTAWLFIASAPFEVAEGENVHLSVVYLPENLYSYGWYKGKTVEPNQLIAAYVIDTHVRTPGPAYSGRETISPSGDLHFQNVTLEDTGYYNLQVTYRNSQIEQASHHLRVYGECSKFDSEISEDAAWPQDTFCWSLYPQSQWLSPPSKPAAPQSQRRAPWS

SEQ ID NO: 20047 - protein, 294 aa, Homo sapiens
VRASLLTFWNAPTTAWLFIASAPFEVAEGENVHLSVVYLPENLYSYGWYKGKTVEPNQLIAAYVIDTHVRTPGPAYSGRETISPSGDLHFQNVTLEDTGYYNLQVTYRNSQIEQASHHLRVYESVAQPSIQASSTTVTEKGSVVLTCHTNNTGTSFQWIFNNQRLQVTKRMKLSWFNHVLTIDPIRQEDAGEYQCEVSNPVSSNRSDPLKLTVKYDNTLGILIGVLVGSLLVAALVCFLLLRKTGRASDQSDFREQQPPASTPGVKTSSLFLQELLHSDTNIYCWIDHKADVAS

SEQ ID NO: 20048 - protein, 66 aa, Homo sapiens
VTGVLVGVALVAALVCFLLLAKTGSEGDLQAPDPGHRHTMGSGPAWTGWVGSVPPMADVVTIGPEV

SEQ ID NO: 20049 - protein, 34 aa, Homo sapiens
LVGVALVAALVCFLLLAKTGRYHSFFPSFSHPLG

SEQ ID NO: 20050 - protein, 149 aa, Homo sapiens
LAARRPHVTVKDVNQQEFVRALAAFLKKSGKLKVPEWVDTVKLAKHKELAPYDENWFYTRAASTARHLYLRGGAGVGSMTKIYGGRQRNGVMPSHFSRGSKSVARRVLQALEGLKMVEKDQDGGRKLTPQGQRDLDRIAGQVAAANKKH

SEQ ID NO: 20051 - protein, 135 aa, Homo sapiens [sequence omitted]

SEQ ID NO: 20052 - protein, 207 aa, Homo sapiens
VSELALGPRTRDPGVRAPGPLLPPPSRAWSPSPEPQKCWPRTLLPKLIPSGAGREWLERRRATIRPWSTFVDQQRFSRPRNLGELCQRLVRNVEYYQSNYVFVFLGLILYCVVTSPMLLVALAVFFGACYILYLRTLESKLVLFGREVSPAHQYALAGGISFPFFWLAGAGSAVFWVLGATLVVIGSHAAFHQIEAVDGEELQMEPV

SEQ ID NO: 20053 - protein, 587 aa, Homo sapiens
LLYLPGPGSRIRNPATRHPASDPCFLLPTQENPYVMRRPNFQALSGNERFEGFCVDMLRELAELLRFRYRLRLVEDGLYGAPEPNGSWTGMVGELINRKADLAVAAFTITAEREKVIDFSKPFMTLGISILYRVHMGRKPGYFSFLDPFSPAVWLFMLLAYLAVSCVLFLAARLSPYEWYNPHPCLRARPHILENQYTLGNSLWFPVGGFMQQGSEIMPRALSTRCVSGVWWAFTLIIISSYTANLAAFLTVQRMEVPVESADDLADQTNIEYGTIHAGSTMTFFQNSRYQTYQRMWNYMQSKQPSVFVKSTEEGIARVLNSRYAFLLESTMNEYHRRLNCNLTQIGGLLDTKGYGIGMPLGSPFRDEITLAILQLQENNRLEILKRKWWEGGRCPKEEDHRAKGLGMENIGGIFIVLICGLIIAVFVAVMEFIWSTRRSAESEEVSVCQEMLQELRHAVSCRKTSRSRRRRRPGGPSRALLSLRAVREMRLSNGKLYSAGAGGDAGSAHGGPQRLLDDPGPPSGARPAAPTPCTHVRVCQECRRIQALRASGAGAPPRGLGVPAEATSPPRPRPGPAGPRELAEHE

SEQ ID NO: 20054 - protein, 990 aa, Homo sapiens
LRPHEEGRKMPAELLLLLIVAFASPSCQVLSSLRMAAILDDQTVCGRGERLALALAREQINGIIEVPAKARVEVDIFELQRDSQYETTDTMCQILPKGVVSVLGPSSSPASASTVSHICGEKEIPHIKVGPEETPRLQYLRFASVSLYPSNEDVSLAVSRILKSFNYPSASLICAKAECLLRLEELVRGFLISKETLSVRMLDDSRDPTPLLKEIRDDKVSTIIIDANASISHLILRKASELGMTSAFYKYILTTMDFPILHLDGIVEDSSNILGFSMFNTSHPFYPEFVRSLNMSWRENCEASTYLGPALSAALMFDAVHVVVSAVRELNRSQEIGVKPLACTSANIWPHGTSLMNYLRMVEYDGLTGRVEFNSKGQRTNYTLRILEKSRQGHREIGVWYSNRTLAMNATTLDINLSQTLANKTLVVTTILENPYVMRRPNFQALSGNERFEGFCVDMLRELAELLRFRYRLRLVEDGLYGAPEPNGSWTGMVGELINRKADLAVAAFTITAEREKVIDFSKPFMTLGISILYRVHMGRKPGYFSFLDPFSPAVWLFMLLAYLAVSCVLFLAARLSPYEWYNPHPCLRARPHILENQYTLGNSLWFPVGGFMQQGSEIMPRALSTRCVSGVWWAFTLIIISSYTANLAAFLTVQRMEVPVESADDLADQTNIEYGTIHAGSTMTFFQNSRYQTYQRMWNYMQSKQPSVFVKSTEEGIARVLNSRYAFLLESTMNEYHRRLNCNLTQIGGLLDTKGYGIGMPLGSPFRDEITLAILQLQENNRLEILKRKWWEGGRCPKEEDHRAKGLGMENIGGIFIVLICGLIIAVFVAVMEFIWSTRRSAESEETPALHPAACQCSALGPRTPLKEPSMLLVKVPSTRVQVAFSRTSLRQVCPFLLQHQLSSLYWIQATNVQICCHFSSLKPSPDLTFPPSHRPLSSLLFTALAAVGGLPDASSFFFPPISSCPPLQSGIGPCHSTEATLVTSNFHV

SEQ ID NO: 20055 - protein, 534 aa, Homo sapiens
VPRGGRWAGAGAQARAARPGRGQGPGEAAAAAAAGAARAARAPQPGPVLGAMSGGGPSGGGPGGSGRARTSSFAEPGGGGGGGGGGPGGSASGPGGTGGGKASVGAMGGGVGASSSGGGPGGSGGGGSGGPGAGTSFPPPGVKLGRDSGKVTTVVATLGQGPERSQEVAYTDIKVIGNGSFGVVYQARLAETRELVAIKKVLQDKRFKNRELQIMRKLDHCNIVRLRYFFYSSGEKKDELYLNLVLEYVPETVYRVARHFTKAKLTIPILYVKVYMYQLFRSLAYIHSQGVCHRDIKPQNLLVDPDTAVLKLCDFGSAKQLVRGEPNVSYICSRYYRAPELIFGATDYTSSIDVWSAGCVLAELLLGQPIFPGDSGVDQLVEIIKVLGTPTREQIREMNPNYTEFKFPQIKAHPWTKVFKSRTPPEAIALCSSLLEYTPSSRLSPLEACAHSFFDELRCLGTQLPNNRPLPPLFNFSAGELSIQPSLNAILIPPHLRSPAGTTTLTPSSQALTETPTSSDWQSTDATPTLTNSS

SEQ ID NO: 20056 - protein, 51 aa, Homo sapiens
MDPSTFKFQVTIDQERKNVPSLTATLQRFGKQSSRRFLRTLTSLRIQSSFS

SEQ ID NO: 20057 - protein, 2430 aa, Homo sapiens
VQEAAMALGKVLAMALVLALAVLGSLSPGARAGDCKGQRQVLREAPGFVTDGAGNYSVNGNCEWLIEAPSPQHRILLDFLFLDTECTYDYLFVYDGDSPRGPLLASLSGSTRPPPIEASSGKMLLHLFSDANYNLLGFNASFRFSLCPGGCQSHGQCQPPGVCACEPGWGGPDCGLQECSAYCGSHGTCASPLGPCRCEPGFLGRACDLHLWENQGAGWWHNVSARDPAFSARIGAAGAFLSPPGLLAVFGGQDLNNALGDLVLYNFSANTWESWDLSPAPAARHSHVAVAWAGSLVLMGGELADGSLTNDVWAFSPLGRGHWELLAPPASSSSGPPGLAGHAAALVDDVWLYVSGGRTPHDLFSSGLFRFRLDSTSGGYWEQVIPAGGRPPAATGHSMVFHAPSRALLVHGGHRPSTARFSVRVNSTELFHVDRHVWTTLKGRDGLQGPRERAFHTASVLGNYMVVYGGNVHTHYQEEKCYEDGIFFYHLGCHQWVSGAELAPPGTPEGRAAPPSGRYSHVAAVLGGSVLLVAGGYSGRPRGDLMAYKVPPFVFQAPAPDYHLDYCSMYTDHSVCSRDPECSWCQGACQAAPPPGTPLGACPAASCLGLGRLLGDCQACLAFSSPTAPPRGPGTLGWCVHNESCLPRPEQARCRGEQISGTVGWWGPAPVFVTSLEACVTQSFLPGLHLLTFQQPPNTSQPDKVSIVRSTTITLTPSAETDVSLVYRGFIYPMLPGGPGGPGAEDVAVWTRAQRLHVLARMARGPDTENMEEVGRWVAHQEKETRRLQRPGSARLFPLPGRDHKYAVEIQGQLNGSAGPGHSELTLLWDRTGVPGGSEISFFFLEPYRSSSCTSYSSCLGCLADQGCGWCLTSATCHLRQGGAHCGDDGAGGSLLVLVPTLCPLCEEHRDCHACTQDPFCEWHQSTSRKGDAACSRRGRGRGALKSPEECPPLCSQRLTCEDCLANSSQCAWCQSTHTCFLFAAYLARYPHGGCRGWDDSVHSEPRCRSCDGFLTCHECLQSHECGWCGNEDNPTLGRCLQGDFSGPLGGGNCSLWVGEGLGLPVALPARWAYARCPDVDECRLGLARCHPRATCLNTPLSYECHCQRGYQGDGISHCNRTCLEDCGHGVCSGPPDFTCVCDLGWTSDLPPPTPAPGPPAPRCSRDCGCSFHSHCRKRGPGFCDECQDWTWGEHCERCRPGSFGNATGSRGCRPCQCNGHGDPRRGHCDNLSGLCFCQDHTEGAHCQLCSPGYYGDPRAGGSCFRECGGRALLTNVSSVALGSRRVGGLLPPGGGAARAGPGLSYCVWVVSATEELQPCAPGTLCPPLTLTFSPDSSTPCTLSYVLAFDGFPRFLDTGVVQSDRSLIAAFCGQRRDRPLTVQALSGLLVLHWEANGSSSWGFNASVGSARCGSGGPGSCPVPQECVPQDGAAGAGLCRCPQGWAGPHCRMALCPENCNAHTGAGTCNQSLGVCICAEGFGGPDCATKLDGGQLVWETLMDSRLSADTASRFLHRLGHTMVDGPDATLWMFGGLGLPQGLLGNLYRYSVSERRWTQMLAGAEDGGPGPSPRSFHAAAYVPAGRGAMYLLGGLTAGGVTRDFWVLNLTTLQWRQEKAPQTVELPAVAGHTLTARRGLSLLLVGGYSPENGFNQQLLEYQLATGTWVSGAQSGTPPTGLYGHSAVYHEATDSLYVFGGFRFHVELAAPSPELYSLHCPDRTWSLLAPSQGAKRDRMRNVRGSSRGLGQVPGEQPGSWGFREVRKKMALWAALAGTGGFLEEISPHLKEPRPRLFHASALLGDTMVVLGGRSDPDEFSSDVLLYQVNCNAWLLPDLTRSASVGPPMEESVAHAVAAVGSRLYISGGFGGVALGRLLALTLPPDPCRLLSSPEACNQSGACTWCHGACLSGDQAHRLGCGGSPCSPMPRSPEECRRLRTCSECLARHPRTLQPGDGEASTPRCKWCTNCPEGACIGRNGSCTSENDCRINQREVFWAGNCSEAACGAADCEQCTREGKCMWTRQFKRTGETRRILSVQPTYDWTCFSHSLLNVSPMPVESSPPLPCPTPCHLLPNCTSCLDSKGADGGWQHCVWSSSLQQCLSPSYLPLRCMAGGCGRLLRGPESCSLGCAQATQCALCLRRPHCGWCAWGGQDGGGRCMEGGLSGPRDGLTCGRPGASWAFLSCPPEDECANGHHDCNETQNCHDQPHGYECSCKTGYTMDNMTGLCRPVCAQGCVNGSCVEPDHCRCHFGFVGRNCSTECRCNRHSECAGVGARDHCLLCRNHTKGSHCEQCLPLFVGSAVGGGTCRPCHAFCRGNSHICISRKELQMSKGEPKKYSLDPEEIENWVTEGPSEDEAVCVNCQNNSYGEKCESCLQGYFLLDGKCTNAPSAGNHFTGVRWAASSATASSRWSRSAAWTPRPRPTASMSPNAGR

SEQ ID NO: 20058 - protein, 2783 aa, Homo sapiens
VQEAAMALGKVLAMALVLALAVLGSLSPGARAGDCKGQRQVLREAPGFVTDGAGNYSVNGNCEWLIEAPSPQHRILLDFLFLDTECTYDYLFVYDGDSPRGPLLASLSGSTRPPPIEASSGKMLLHLFSDANYNLLGFNASFRFSLCPGGCQSHGQCQPPGVCACEPGWGGPDCGLQECSAYCGSHGTCASPLGPCRCEPGFLGRACDLHLWENQGAGWWHNVSARDPAFSARIGAAGAFLSPPGLLAVFGGQDLNNALGDLVLYNFSANTWESWDLSPAPAARHSHVAVAWAGSLVLMGGELADGSLTNDVWAFSPLGRGHWELLAPPASSSSGPPGLAGHAAALVDDVWLYVSGGRTPHDLFSSGLFRFRLDSTSGGYWEQVIPAGGRPPAATGHSMVFHAPSRALLVHGGHRPSTARFSVRVNSTELFHVDRHVWTTLKGRDGLQGPRERAFHTASVLGNYMVVYGGNVHTHYQEEKCYEDGIFFYHLGCHQWVSGAELAPPGTPEGRAAPPSGRYSHVAAVLGGSVLLVAGGYSGRPRGDLMAYKVPPFVFQAPAPDYHLDYCSMYTDHSVCSRDPECSWCQGACQAAPPPGTPLGACPAASCLGLGRLLGDCQACLAFSSPTAPPRGPGTLGWCVHNESCLPRPEQARCRGEQISGTVGWWGPAPVFVTSLEACVTQSFLPGLHLLTFQQPPNTSQPDKEEVGRWVAHQEKETRRLQRPGSARLFPLPGRDHKYAVEIQGQLNGSAGPGHSELTLLWDRTGVPGGSEISFFFLEPYRSSSCTSYSSCLGCLADQGCGWCLTSATCHLRQGGAHCGDDGAGGSLLVLVPTLCPLCEEHRDCHACTQDPFCEWHQSTSRKGDAACSRRGRGRGALKSPEECPPLCSQRLTCEDCLANSSQCAWCQSTHTCFLFAAYLARYPHGGCRGWDDSVHSEPRCRSCDGFLTCHECLQSHECGWCGNEDNPTLGRCLQGDFSGPLGGGNCSLWVGEGLGLPVALPARWAYARCPDVDECRLGLARCHPRATCLNTPLSYECHCQRGYQGDGISHCNRTCLEDCGHGVCSGPPDFTCVCDLGWTSDLPPPTPAPGPPAPRCSRDCGCSFHSHCRKRGPGFCDECQDWTWGEHCERCRPGSFGNATGSRGCRPCQCNGHGDPRRGHCDNLSGLCFCQDHTEGAHCQLCSPGYYGDPRAGGSCFRECGGRALLTNVSSVALGSRRVGGLLPPGGGAARAGPGLSYCVWVVSATEELQPCAPGTLCPPLTLTFSPDSSTPCTLSYVLAFDGFPRFLDTGVVQSDRSLIAAFCGQRRDRPLTVQALSGLLVLHWEANGSSSWGFNASVGSARCGSGGPGSCPVPQECVPQDGAAGAGLCRCPQGWAGPHCRMALCPENCNAHTGAGTCNQSLGVCICAEGFGGPDCATKLDGGQLVWETLMDSRLSADTASRFLHRLGHTMVDGPDATLWMFGGLGLPQGLLGNLYRYSVSERRWTQMLAGAEDGGPGPSPRSFHAAAYVPAGRGAMYLLGGLTAGGVTRDFWVLNLTTLQWRQEKAPQTVELPAVAGHTLTARRGLSLLLVGGYSPENGFNQQLLEYQLATGTWVSGAQSGTPPTGLYGHSAVYHEATDSLYVFGGFRFHVELAAPSPELYSLHCPDRTWSLLAPSQGAKRDRMRNVRGSSRGLGQVPGEQPGSWGFREVRKKMALWAALAGTGGFLEEISPHLKEPRPRLFHASALLGDTMVVLGGRSDPDEFSSDVLLYQVNCNAWLLPDLTRSASVGPPMEESVAHAVAAVGSRLYISGGFGGVALGRLLALTLPPDPCRLLSSPEACNQSGACTWCHGACLSGDQAHRLGCGGSPCSPMPRSPEECRRLRTCSECLARHPRTLQPGDGEASTPRCKWCTNCPEGACIGRNGSCTSENDCRINQREVFWAGNCSEAACGAADCEQCTREGKCMWTRQFKRTGETRRILSVQPTYDWTCFSHSLLNVSPMPVESSPPLPCPTPCHLLPNCTSCLDSKGADGGWQHCVWSSSLQQCLSPSYLPLRCMAGGCGRLLRGPESCSLGCAQATQCALCLRRPHCGWCAWGGQDGGGRCMEGGLSGPRDGLTCGRPGASWAFLSCPPEDECANGHHDCNETQNCHDQPHGYECSCKTGYTMDNMTGLCRPVCAQGCVNGSCVEPDHCRCHFGFVGRNCSTECRCNRHSECAGVGARDHCLLCRNHTKGSHCEQCLPLFVGSAVGGGTCRPCHAFCRGNSHICISRKELQMSKGEPKKYSLDPEEIENWVTEGPSEDEAVCVNCQNNSYGEKCESCLQGYFLLDGKCTKCQCNGHADTCNEQDGTGCPCQNNTETGTCQGSSPSDRRDCYKYQCAKCRESFHGSPLGGQQCYRLISVEQECCLDPTSQTNCFHEPKRRALGPGRTVLFGVQPKFTNVDIRLTLDVTFGAVDLYVSTSYDTFVVRVAPDTGVHTVHIQPPPAPPPPPPPADGGPRGAGDPGGAGASSGPGAPAEPRVREVWPRGLITYVTVTEPSAVLVVRGVRDRLVITYPHEHHALKSSRFYLLLLGVGDPSGPGANGSADSQGLLFFRQDQAHIDLFVFFSVFFSCFFLFLSLCVLLWKAKQALDQRQEQRRHLQEMTKMASRPFAKVTVCFPPDPTAPASAWKPAGLPPPAFRRSEPFLAPLLLTGAGGPWGPMGGGCCPPAIPATTAGLRAGPITLEPTEDGMAGVATLLLQLPGGPHAPNGACLGSALVTLRHRLHEYCGGGGGAGGSGHGTGAGRKGLLSQDNLTSMSL

SEQ ID NO: 20059 - protein, 112 aa, Homo sapiens
LGLREEGVGPGLSMITLSFLGQIENWVTEGPSEDEAVCVNCQNNSYGEKCESCLQGYFLLDGKCTNAPSAGNHFTGVRWAASSATASSRWSRSAAWTPRPRPTASMSPNAGR

SEQ ID NO: 20060 - protein, 119 aa, Homo sapiens [sequence omitted]

SEQ ID NO: 20061 - protein, 488 aa, Homo sapiens
VTEQPCSKRSWSPSSPPQVKTGPAGDTMGHLSAPLHRVRVPWQGLLLTASLLTFWNPPTTAQLTTESMPFNVAEGKEVLLLVHNLPQQLFGYSWYKGERVDGNRQIVGYAIGTQQATPGPANSGRETIYPNASLLIQNVTQNDTGFYTLQVIKSDLVNEEATGQFHVYPELPKPSISSNNSNPVEDKDAVAFTCEPETQDTTYLWWINNQSLPVSPRLQLSNGNRTLTLLSVTRNDTGPYECEIQNPVSANRSDPVTLNVTYGPDTPTISPSDTYYRPGANLSLSCYAASNPPAQYSWLINGTFQQSTQELFIPNITVNNSGSYTCHANNSVTGCNRTTVKTIIVTERQNLTMLPRLDSNSWAQAILPSVSQSAEITDNALPQENGLSPGAIAGIVIGVVALVALIAVALACFLHFGKTGRASDQRDLTEHKPSVSNHTQDHSNDPPNKMNEVTYSTLNFEAQQPTQPTSASPSLTATEIIYSEVKKQ

SEQ ID NO: 20062 - protein, 491 aa, Homo sapiens
VTEQPCSKRSWSPSSPPQVKTGPAGDTMGHLSAPLHRVRVPWQGLLLTASLLTFWNPPTTAQLTTESMPFNVAEGKEVLLLVHNLPQQLFGYSWYKGERVDGNRQIVGYAIGTQQATPGPANSGRETIYPNASLLIQNVTQNDTGFYTLQVIKSDLVNEEATGQFHVYPELPKPSISSNNSNPVEDKDAVAFTCEPETQDTTYLWWINNQSLPVSPRLQLSNGNRTLTLLSVTRNDTGPYECEIQNPVSANRSDPVTLNVTYGPDTPTISPSDTYYRPGANLSLSCYAASNPPAQYSWLINGTFQQSTQELFIPNITVNNSGSYTCHANNSVTGCNRTTVKTIIVTELSPVVAKPQIKASKTTVTGDKDSVNLTCSTNDTGISIRWFFKNQSLPSSERMKLSQGNTTLSINPVKREDAGTYWCEVFNPISKNQSDPIMLNVNYNALPQENGLSPGAIAGIVIGVVALVALIAVALACFLHFGKTGSSGPLQ

SEQ ID NO: 20063 - protein, 426 aa, Homo sapiens
VTEQPCSKRSWSPSSPPQVKTGPAGDTMGHLSAPLHRVRVPWQGLLLTASLLTFWNPPTTAQLTTESMPFNVAEGKEVLLLVHNLPQQLFGYSWYKGERVDGNRQIVGYAIGTQQATPGPANSGRETIYPNASLLIQNVTQNDTGFYTLQVIKSDLVNEEATGQFHVYPELPKPSISSNNSNPVEDKDAVAFTCEPETQDTTYLWWINNQSLPVSPRLQLSNGNRTLTLLSVTRNDTGPYECEIQNPVSANRSDPVTLNVTYGPDTPTISPSDTYYRPGANLSLSCYAASNPPAQYSWLINGTFQQSTQELFIPNITVNNSGSYTCHANNSVTGCNRTTVKTIIVTEMAFHHVAKAGLKLLSSSNPPASTSQSAKITDNALPQENGLSPGAIAGIVIGVVALVALIAVALACFLHFGKTGSSGPLQ

SEQ ID NO: 20064 - protein, 42 aa, Homo sapiens
LVALIAVALACFLHFGKTGRASDQRDLTEHKPSVSNHTTGVP

SEQ ID NO: 20065 - protein, 444 aa, Homo sapiens
VTEQPCSKRSWSPSSPPQVKTGPAGDTMGHLSAPLHRVRVPWQGLLLTASLLTFWNPPTTAQLTTESMPFNVAEGKEVLLLVHNLPQQLFGYSWYKGERVDGNRQIVGYAIGTQQATPGPANSGRETIYPNASLLIQNVTQNDTGFYTLQVIKSDLVNEEATGQFHVYPELPKPSISSNNSNPVEDKDAVAFTCEPETQDTTYLWWINNQSLPVSPRLQLSNGNRTLTLLSVTRNDTGPYECEIQNPVSANRSDPVTLNVTYGPDTPTISPSDTYYRPGANLSLSCYAASNPPAQYSWLINGTFQQSTQELFIPNITVNNSGSYTCHANNSVTGCNRTTVKTIIVTELSPVVAKPQIKASKTTVTGDKDSVNLTCSTNDTGISIRWFFKNQSLPSSERMKLSQGNTTLSINPVKREDAGTYWCEVFNPISKNQSDPIMLNVNCK

SEQ ID NO: 20066 - protein, 348 aa, Homo sapiens
VTEQPCSKRSWSPSSPPQVKTGPAGDTMGHLSAPLHRVRVPWQGLLLTASLLTFWNPPTTAQLTTESMPFNVAEGKEVLLLVHNLPQQLFGYSWYKGERVDGNRQIVGYAIGTQQATPGPANSGRETIYPNASLLIQNVTQNDTGFYTLQVIKSDLVNEEATGQFHVYPELPKPSISSNNSNPVEDKDAVAFTCEPETQDTTYLWWINNQSLPVSPRLQLSNGNRTLTLLSVTRNDTGPYECEIQNPVSANRSDPVTLNVTYGPDTPTISPSDTYYRPGANLSLSCYAASNPPAQYSWLINGTFQQSTQELFIPNITVNNSGSYTCHANNSVTGCNRTTVKTIIVTGK

SEQ ID NO: 20067 - protein, 199 aa, Homo sapiens
MDPARKAGAQAMIWTAGWLLLLLLRGGAQALECYSCVQKADDGCSPNKMKTVKCAPGVDVCTEAVGAVETIHGQFSLAVRGCGSGLPGKNDRGLDLHGLLAFIQLQQCAQDRCNAKLNLTSRALDPAGPWGPGRSCGGGATFGPAKIEVEPWQRREYSTWAGGGVTLWGGAKRQQEGLSGCRRREVARWGGATSRRGHR

SEQ ID NO: 20068 - protein, 92 aa, Homo sapiens
MDPARKAGAQAMIWTAGWLLLLLLRGGAQALECYSCVQKADDGCSPNKMKTVKCAPGVDVCTEAVGAVETSEWGPPGHAHHCRLLRPSPASL

SEQ ID NO: 20069 - protein, 131 aa, Homo sapiens
MLALETRASPGHTPGCVTFVLNDHSMAFTGDALLIRGCGRTDFQQGCAKTLYHSVHEKIFTLPGDCLIYPAHDYHGFTVSTVEEERTLNPRLTLSCEEFVKIMGNLNLPKPQQIDFAVPANMRCGVQTPTA

SEQ ID NO: 20070 - protein, 105 aa, Homo sapiens
MGHPPLLPLLLLLHTCVPASWGLRCMQCKTNGDCRVEECALGQDLCRTTIVRLWEEGEELELVEKSCTHSEKTNRTLSYRTGLKITSLTEVVCGLDLCNQGNSGE

SEQ ID NO: 20071 - protein, 176 aa, Homo sapiens
MGHPPLLPLLLLLHTCVPASWGLRCMQCKTNGDCRVEECALGQDLCRTTIVRLWEGELPPNPHTPPAQHGTRVIEKPSSPVTGTCKLKTNKQGEPISHPPDWQAFKNLTIPGLVRMWSCRPCLWWGSKLAHQPLRAIRQYLVQMKINICYSSTPRHAEMPKNLGHIYPGTHVYECS

SEQ ID NO: 20072 - protein, 255 aa, Homo sapiens
LGRKLAEPQDPGGHGRGSGAWPGGLETPKALAGAGEVSGRLGTGAGRNWHWTHGAACRDAVVRGVLDTLWLIPITFLTIGYGDVVPGTMWGKIVCLCTGVMGVCCTALLVAVVARKLEFNKAEKHVHNFMMDIQYTKEMKESAARVLQEAWMFYKHTRRKESHAARRHQRKLLAAINAFRQVRLKHRKLREQVNSMVDISKMHMILYDLQQNLSSSHRALEKQIDTLAGKLDALTELLSTALGPRQLPEPSQQSK

SEQ ID NO: 20073 - protein, 473 aa, Homo sapiens
LLCLRAKVPEPAEQADDLQATVAALCVLRGGGPWAGSWLSPKTPGAMGGDLVLGLGALRRRKRLLEQEKSLAGWALVLAGTGIGLMVLHAEMLWFGGCSWALYLFLVKCTISISTFLLLCLIVAFHAKEVQLFMTDNGLRDWRVALTGRQAAQIVLELVVCGLHPAPVRGPPCVQDLGAPLTSPQPWPGFLGQGEALLSLAMLLRLYLVPRAVLLRSGVLLNASYRSIGALNQVRFRHWFVAKLYMNTHPGRLLLGLTLGLWLTTAWVLSVAERQAVNATGHLSDTLWLIPITFLTIGYGDVVPGTMWGKIVCLCTGVMGVCCTALLVAVVARKLEFNKAEKHVHNFMMDIQYTKEMKESAARVLQEAWMFYKHTRRKESHAARRHQRKLLAAINAFRQVRLKHRKLREQVNSMVDISKMHMILYDLQQNLSSSHRALEKQIDTLAGKLDALTELLSTALGPRQLPEPSQQSK

SEQ ID NO: 20074 - protein, 86 aa, Homo sapiens
LQATVAALCVLRGGGPWAGSWLSPKTPGAMGGDLVLGLGALRRRKRLLEQEKSLAGWALVLAGTGIGLMVLHAEMLWFGGCSTHFG

SEQ ID NO: 20075 - protein, 175 aa, Homo sapiens
LLCLRAKVPEPAEQADDLQATVAALCVLRGGGPWAGSWLSPKTPGAMGGDLVLGLGALRRRKRLLEQEKSLAGWALVLAGTGIGLMVLHAEMLWFGGCSWALYLFLVKCTISISTFLLLCLIVAFHAKEVQLFMTDNGLRDWRVALTGRQATLPTAASALSIKSASATGSWPSFT

SEQ ID NO: 20076 - protein, 41 aa, Homo sapiens
MTARKKSMLSPIMNVSSKKDENFRSGSVRGTGSCQDLMGKF

SEQ ID NO: 20077 - protein, 38 aa, Homo sapiens
LVGMEPAVRMRGAEDQKTQGVNGACHPWSFSRISGLSA

SEQ ID NO: 20078 - protein, 33 aa, Homo sapiens
MAGQLIALLYPELLRSGRFGSPLVGSGPEWGGV

SEQ ID NO: 20079 - protein, 49 aa, Homo sapiens
LRLAGPSELVTFAWGRNDPMIDDPSKGKEALAESGGTIPPSFVLHYSRH

SEQ ID NO: 20080 - protein, 60 aa, Homo sapiens
LGEGLSTVQHYSNCGSQSSNIGITQVERLILEPYRRPSDLAFLQIGPRNLHFNKIPSSAS

SEQ ID NO: 20081 - protein, 74 aa, Homo sapiens
LGEGLSTVQHYSNCGSQSSNIGITQVERLILEPYRRPSDLAFLQIGPRNLHFNKIPSLLHPRSPHMHGVSCSAS

SEQ ID NO: 20082 - protein, 68 aa, Homo sapiens
MNMFKEAVTFKDVAVAFTEEELGLLGPAQRKLYRDVMVENFRNLLSVGEDSLPLEYLCALGVLRLCGP

SEQ ID NO: 20083 - protein, 831 aa, Homo sapiens
LLLLAENLAEETMETLTSRHEKRALHSQASAISQDREEKIMSQEPLSFKDVAVVFTEEELELLDSTQRQLYQDVMQENFRNLLSVGDKNGKDTEYIQDEELRFFSHKELSSCKIWEEVAGELPGSQDCRVNLQGKDFQFSEDAAPHQGWEGASTPCFPIENFLDSLQGDGLIGLENQQFPAWRAIRPIPIQGSWAKAFVNQLGDVQERCKNLDTEDTVYKCNWDDDSFCWISCHVDHRFPEIDKPCGCNKCRKDCIKNSVLHRINPGENGLKSNEYRNGFRDDADLPPHPRVPLKEKLCQYDEFSEGLRHSAHLNRHQRVPTGEKSVKSLERGRGVRQNTHIRNHPRAPVGDMPYRCDVCGKGFRYKSVLLIHQGVHTGRRPYKCEECGKAFGRSSNLLVHQRVHTGEKPYKCSECGKGFSYSSVLQVHQRLHTGEKPYTCSECGKGFCAKSALHKHQHIHPGEKPYSCGECGKGFSCSSHLSSHQKTHTGERPYQCDKCGKGFSHNSYLQAHQRVHMGQHLYKCNVCGKSFSYSSGLLMHQRLHTGEKPYKCECGKSFGRSSDLHIHQRVHTGEKPYKCSECGKGFRRNSDLHSHQRVHTGERPYVCDVCGKGFIYSSDLLIHQRVHTGEKPYKCAECGKGFSYSSGLLIHQRVHTGEKPYRCQECGKGFRCTSSLHKHQRVHTGKKPYTCDQCGKGFSYGSNLRTHQRLHTGEKPYTCCECGKGFRYGSGLLSHKRVHTGEKPYRCHVCGKGYSQSSHLQGHQRVHTGEKPYKCEECGKGFGRNSCLHVHQRVHTGEKPYTCGVCGKGFSYTSGLRNHQRVHLGENPYK

SEQ ID NO: 20084 - protein, 837 aa, Homo sapiens
LLLLAENLAEETMETLTSRHEKRALHSQASAISQDREEKIMSQEPLSFKDVAVVFTEEELELLDSTQRQLYQDVMQENFRNLLSVGERNPLGDKNGKDTEYIQDEELRFFSHKELSSCKIWEEVAGELPGSQDCRVNLQGKDFQFSEDAAPHQGWEGASTPCFPIENFLDSLQGDGLIGLENQQFPAWRAIRPIPIQGSWAKAFVNQLGDVQERCKNLDTEDTVYKCNWDDDSFCWISCHVDHRFPEIDKPCGCNKCRKDCIKNSVLHRINPGENGLKSNEYRNGFRDDADLPPHPRVPLKEKLCQYDEFSEGLRHSAHLNRHQRVPTGEKSVKSLERGRGVRQNTHIRNHPRAPVGDMPYRCDVCGKGFRYKSVLLIHQGVHTGRRPYKCEECGKAFGRSSNLLVHQRVHTGEKPYKCSECGKGFSYSSVLQVHQRLHTGEKPYTCSECGKGFCAKSALHKHQHIHPGEKPYSCGECGKGFSCSSHLSSHQKTHTGERPYQCDKCGKGFSHNSYLQAHQRVHMGQHLYKCNVCGKSFSYSSGLLMHQRLHTGEKPYKCECGKSFGRSSDLHIHQRVHTGEKPYKCSECGKGFRRNSDLHSHQRVHTGERPYVCDVCGKGFIYSSDLLIHQRVHTGEKPYKCAECGKGFSYSSGLLIHQRVHTGEKPYRCQECGKGFRCTSSLHKHQRVHTGKKPYTCDQCGKGFSYGSNLRTHQRLHTGEKPYTCCECGKGFRYGSGLLSHKRVHTGEKPYRCHVCGKGYSQSSHLQGHQRVHTGEKPYKCEECGKGFGRNSCLHVHQRVHTGEKPYTCGVCGKGFSYTSGLRNHQRVHLGENPYK

SEQ ID NO: 20085 - protein, 95 aa, Homo sapiens
LLLLAENLAEETMETLTSRHEKRALHSQASAISQDREEKIMSQEPLSFKDVAVVFTEEELELLDSTQRQLYQDVMQENFRNLLSVGERNPLGNWN

SEQ ID NO: 20086 - protein, 663 aa, Homo sapiens
LQWAGPEDPKRPHVQDSFLPQEIIIKVEGEDTGSLTIPSQEGVNFKIVTVDFTREEQGTCNPAQRTLDRDVILENHRDLVSWDLATAVGKKDSTSKQRIFDEEPANGVKIERFTRDDPWLSSCEEVDDCKDQLEKQQEKQEILLQEVAFTQRKAVIHERVCKSDETGEKSGLNSSLFSSPVIPIRNHFHKHVSHAKKWHLNAAVNSHQKINENETLYENNECGKPPQSIHLIQFTRTQTKDKSYGFSDRIQSFCHGTPLHIHEKIHGGGKTFDFKECGQVLNPKISHNEQQRIPFEESQYKCSETSHSSSLTQNMRNNSEEKPFECNQCGKSFSWSSHLVAHQRTHTGEKPYECSECGKSFSRSSHLVSHQRTHTGEKPYRCNQCGKSFSQSYVLVVHQRTHTGEKPYECNQCGKSFRQSYKLIAHQRTHTGEKPYECNQCGKSFIQSYKLIAHQRIHTGEKPYECNQCGKSFSQSYKLVAHQRTHTGEKPFECNQCGKSFSWSSQLVAHQRTHTGEKPYECSECGKSFNRSSHLVMHQRIHTGEKPYECNQCGKSFSQSYVLVVHQRTHTGEKPYECSQCGKSFRQSSCLTQHQRTHTGEKPFECNQCGKTFSLSARLIVHQRTHTGEKPFTCIQCGKAFINSYKLIRHQATHTEEKLYECN

SEQ ID NO: 20087 - protein, 496 aa, Homo sapiens
VAHPAPGGTGRQLPSAPVTCLELEEVGIPLPTPGTGGAAPRGFQDLSSGSWTRSDRGRASGRREARRRPREAQLLGATGMARAMAAAWPLLLVALLVLSWPPPGTGDVVVQAPTQVPGFLGDSVTLPCYLQVPNMEVTHVSQLTWARHGESGSMAVFHQTQGPSYSESKRLEFVAARLGAELRNASLRMFGLRVEDEGNYTCLFVTFPQGSRSVDIWLRVLAKPQNTAEVQKVQLTGEPVPMARCVSTGGRPPAQITWHSDLGGMPNTSQVPGFLSGTVTVTSLWILVPSSQVDGKNVTCKVEHESFEKPQLLTVNLTVYYPPEVSISGYDNNWYLGQNEATLTCDARSNPEPTGYNWSTTMGPLPPFAVAQGAQLLIRPVDKPINTTLICNVTNALGARQAELTVQVKEGPPSEHSGMSRNAIIFLVLGILVFLILLGIGIYFYWSKCSREVLWHCHLCPSSTEHASASANGHVSYSAVSRENSSSQDPQTEGTR

SEQ ID NO: 20088 - protein, 443 aa, Homo sapiens
VAHPAPGGTGRQLPSAPVTCLELEEVGIPLPTPGTGGAAPRGFQDLSSGSWTRSDRGRASGRREARRRPREAQLLGATGMARAMAAAWPLLLVALLVLSWPPPGTGDVVVQAPTQVPGFLGDSVTLPCYLQVPNMEVTHVSQLTWARHGESGSMAVFHQTQGPSYSESKRLEFVAARLGAELRNASLRMFGLRVEDEGNYTCLFVTFPQGSRSVDIWLRVLAKPQNTAEVQKVQLTGEPVPMARCVSTGGRPPAQITWHSDLGGMPNTSQVPGFLSGTVTVTSLWILVPSSQVDGKNVTCKVEHESFEKPQLLTVNLTVYYPPEVSISGYDNNWYLGQNEATLTCDARSNPEPTGYNWSTTMGPLPPFAVAQGAQLLIRPVDKPINTTLICNVTNALGARQAELTVQVKGTEHASASANGHVSYSAVSRENSSSQDPQTEGTR

SEQ ID NO: 20089 - protein, 431 aa, Homo sapiens
LELEEVGIPLPTPGTGGAAPRGFQDLSSGSWTRSDRGRASGRREARRRPREAQLLGATGMARAMAAAWPLLLVALLVLSWPPPGTGDVVVQAPTQVPGFLGDSVTLPCYLQVPNMEVTHVSQLTWARHGESGSMAVFHQTQGPSYSESKRLEFVAARLGAELRNASLRMFGLRVEDEGNYTCLFVTFPQGSRSVDIWLRVLAKPQNTAEVQKVQLTGEPVPMARCVSTGGRPPAQITWHSDLGGMPNTSQVPGFLSGTVTVTSLWILVPSSQVDGKNVTCKVEHESFEKPQLLTVNLTVYYPPEVSISGYDNNWYLGQNEATLTCDARSNPEPTGYNWSTTMGPLPPFAVAQGAQLLIRPVDKPINTTLICNVTNALGARQAELTVQVKEGPPSEHSGTEHASASANGHVSYSAVSRENSSSQDPQTEGTR

SEQ ID NO: 20090 - protein, 62 aa, Homo sapiens [sequence omitted]

SEQ ID NO: 20091 - protein, 44 aa, Homo sapiens
VEPPEPMDRACWGWASPSGVSKAPLGSPLSWPTSDSQGPPLWPP

SEQ ID NO: 20092 - protein, 590 aa, Homo sapiens
VNMEPPDAPAQARGAPRLLLLAVLLAAHPDAQAEVRLSVPPLVEVMRGKSVILDCTPTGTHDHYMLEWFLTDRSGARPRLASAEMQGSELQVTMHDTRGRSPPYQLDSQGRLVLAEAQVGDERDYVCVVRAGAAGTAEATARLNVFAKPEATEVSPNKGTLSVMEDSAQEIATCNSRNGNPAPKITWYRNGQRLEVPVEMNPEGYMTSRTVREASGLLSLTSTLYLRLRKDDRDASFHCAAHYSLPEGRHGRLDSPTFHLTLHYPTEHVQFWVGSPSTPAGWVREGDTVQLLCRGDGSPSPEYTLFRLQDEQEEVLNVNLEGNLTLEGVTRGQSGTYGCRVEDYDAADDVQLSKTLELRVAYLDPLELSEGKVLSLPLNSSAVVNCSVHGLPTPALRWTKDSTPLGDGPMLSLSSITFDSNGTYVCEASLPTVPVLSRTQNFTLLVQGSPELKTAEIEPKADGSWREGDEVTLICSARGHPDPKLSWSQLGGSPAEPIPGRQGWVSSSLTLKVTSALSRDGISCEASNPHGNKRHVFHFGTVSPQTSQAGVAVMAVAVSVGLLLLVVAVFYCVRRKGGPCCRQRREKGAP

SEQ ID NO: 20093 - protein, 630 aa, Homo sapiens
VNMEPPDAPAQARGAPRLLLLAVLLAAHPDAQAEVRLSVPPLVEVMRGKSVILDCTPTGTHDHYMLEWFLTDRSGARPRLASAEMQGSELQVTMHDTRGRSPPYQLDSQGRLVLAEAQVGDERDYVCVVRAGAAGTAEATARLNVFAKPEATEVSPNKGTLSVMEDSAQEIATCNSRNGNPAPKITWYRNGQRLEVPVEMNPEGYMTSRTVREASGLLSLTSTLYLRLRKDDRDASFHCAAHYSLPEGRHGRLDSPTFHLTLHYPTEHVQFWVGSPSTPAGWVREGDTVQLLCRGDGSPSPEYTLFRLQDEQEEVLNVNLEGNLTLEGVTRGQSGTYGCRVEDYDAADDVQLSKTLELRVAYLDPLELSEGKVLSLPLNSSAVVNCSVHGLPTPALRWTKDSTPLGDGPMLSLSSITFDSNGTYVCEASLPTVPVLSRTQNFTLLVQGSPELKTAEIEPKADGSWREGDEVTLICSARGHPDPKLSWSQLGGSPAEPIPGRQGWVSSSLTLKVTSALSRDGISCEASNPHGNKRHVFHFGTVSPQTSQAGVAVMAVAVSVGLLLLVVAVFYCVRRKGGPCCRQRREKGAPPPGEPGLSHSGSEQPEQTGLLMGGASGGARGGSGGFGDEC

SEQ ID NO: 20094 - protein, 186 aa, Homo sapiens
LLLLAVLLAAHPDAQAEVRLSVPPLVEVMRGKSVILDCTPTGTHDHYMLEWFLTDRSGARPRLASAEMQGSELQVTMHDTRGRSPPYQLDSQGRLVLAEAQVGDERDYVCVVRAGAAGTAEATARLNVFAKPEATEVSPNKGTLSVMEDSAQEVPLGWTLAPGSWRRRGQGPGLLGLREEGLGTPG

SEQ ID NO: 20095 - protein, 141 aa, Homo sapiens
LRQESCPFPERINPFLNSASEEFCLRLLLLHSEWGKGLRWSEDPTESGRLRECPSGLAMRLFLSLPVLVVVLSIVLEGPAPAQGTPDVSSALDKLKEFGNTLEDKARELISRIKQSELSAKMREWFSETFQKVKEKLKIDS

SEQ ID NO: 20096 - protein, 44 aa, Homo sapiens
VPLRPRHEALPVAPGPGGGSVDRLGREWFSETFQKVKEKLKIDS

SEQ ID NO: 20097 - protein, 67 aa, Homo sapiens
LKVGPAPAQGTPDVSSALDKLKEFGNTLEDKARELISRIKQSELSAKMREWFSETFQKVKEKLKIDS

SEQ ID NO: 20098 - protein, 20 aa, Homo sapiens
LGEWFSETFQKVKEKLKIDS

SEQ ID NO: 20099 - protein, 90 aa, Homo sapiens
LDTMGTRLLPALFLVLLVLGFEVQGTQQPQQDEMPSPTFLTQVKESLSSYWESAKTAAQNLDLYSKSTAAMSTYTGIFTDQVLSVLKGEE

SEQ ID NO: 20100 - protein, 690 aa, Homo sapiens
LRCEVGDGAGLAAGAGTRSGKMAAAQEADGARSAVVAAGGGSSGQVTSNGSIGRDPPAETQPQNPPAQPAPNAWQVIKGVLFRIFIIWAISSWFRRGPAPQDQAGPGGAPRVASRNLFPKDTLMNLHVYISEHEHFTDFNATSALFWEQHDLVYGDWTSGENSDGCYEHFAELDIPQSVQQNGSIYIHVYFTKSGFHPDPRQKALYRRLATVHMSRMINKYKRRRFQKTKNLLTGETEADPEMIKRAEDYGPVEVISHWHPNITINIVDDHTPWVKGSVPPPLDQYVKFDAVSGDYYPIIYFNDYWNLQKDYYPINESLASLPLRVSFCPLSLWRWQLYAAQSTKSPWNFLGDELYEQSDEEQDSVKVALLETNPYLLALTIIVSIVHSVFEFLAFKNDIQFWNSRQSLEGLSVRSVFFGVFQSFVVLLYILDNETNFVVQVSVFIGVLIDLWKITKVMDVRLDREHRVAGIFPRLSFKDKSTYIESSTKVYDDMAFRYLSWILFPLLGCYAVYSLLYLEHKGWYSWVLSMLYGFLLTFGFITMTPQLFINYKLKSVAHLPWRMLTYKALNTFIDDLFAFVIKMPVMYRIGCLRDDVVFFIYLYQRWIYRVDPTRVNEFGMSGEDPTAAAPVAEVPTAAGALTPTPAPTTTTATREEASTSLPTKPTQGASSASEPQEAPPKPAEDKKKD

SEQ ID NO: 20101 - protein, 138 aa, Homo sapiens
VTERAKTMQTPVNIPVPVLRLPRGPDGFSRGFAPDGRRAPLRPEVPEIQECPIAQESLESQEQRARAALRERYLRSLLAMVGHQVSFTLHEGVRVAAHFGATDLDVANFYVSQLQTPIGVQAEALLRCSDIISYTFKP

SEQ ID NO: 20102 - protein, 727 aa, Homo sapiens
LKRRRSPCPGTAGGPGETNPGPGACPRGPREEAAAAMEIAPQEAPPVPGADGDIEEAPAEAGSPSPASPPADGRLKAAAKRVTFPSDEDIVSGAVEPKDPWRHAQNVTVDEVIGAYKQACQKLNCRQIPKLLRQLQEFTDLGHRLDCLDLKGEKLDYKTCEALEEVFKRLQFKVVDLEQTNLDEDGASALFDMIEYYESATHLNISFNKHIGTRGWQAAAHMMRKTSCLQYLDARNTPLLDHSAPFVARALRIRSSLAVLHLENASLSGRPLMLLATALKMNMNLRELYLADNKLNGLQDSAQLGNLLKFNCSLQILDLRNNHVLDSGLAYICEGLKEQRKGLVTLVLWNNQLTHTGMAFLGMTLPHTQSLETLNLGHNPIGNEGVRHLKNGLISNRSVLRLGLASTKLTCEGAVAVAEFIAESPRLLRLDLRENEIKTGGLMALSLALKVNHSLLRLDLDREPKKEAVKSFIETQKALLAEIQNGCKRNLVLAREREEKEQPPQLSASMPETTATEPQPDDEPAAGVQNGAPSPAPSPDSDSDSDSDGEEEEEEEGERDETPCPALVPPTDSLGPGDRSPPGSPSTPTEQRISVSSPGRGHKVFVVTRVESPPERAEPPASPTPPSPPPPPSPPASPSLPPAGAIDTRDTGSSEPQPPPEPPRSGPPLPNGLKPEFALALPPEPPPGPEVKGGSCGLEHELSCSKNEKELEELLLEASQESGQETL

SEQ ID NO: 20103 - protein, 28 aa, Homo sapiens
LRPPTESSGRAPGPGGAPRKRAGPGSIC

SEQ ID NO: 20104 - protein, 755 aa, Homo sapiens
LHGATRTLGVPSPPPPCPLSRRADPGVLGAQLLSSRPQAGGGGGEERGPWDPRPPHPAAPAPRDPEKMSSRTVLAPGNDRNSDTHGTLGSGRSSDKGPSWSSRSLGARCRNSIASCPEEQPHVGNYRLLRTIGKGNFAKVKLARHILTGREVAIKIIDKTQLNPSSLQKLFREVRIMKGLNHPNIVKLFEVIETEKTLYLVMEYASAGEVFDYLVSHGRMKEKEARAKFRQIVSAVHYCHQKNIVHRDLKAENLLLDAEANIKIADFGFSNEFTLGSKLDTFCGSPPYAAPELFQGKKYDGPEVDIWSLGVILYTLVSGSLPFDGHNLKELRERVLRGKYRVPFYMSTDCESILRRFLVLNPAKRCTLEQIMKDKWINIGYEGEELKPYTEPEEDFGDTKRIEVMVGMGYTREEIKESLTSQKYNEVTATYLLLGRKTEEGGDRGAPGLALARVRAPSDTTNGTSSSKGTSHSKGQRSSSSTYHRQRRHSDFCGPSPAPLHPKRSPTSTGEAELKEERLPGRKASCSTAGSGSRGLPPSSPMVSSAHNPNKAEIPERRKDSTSTPNNLPPSMMTRRNTYVCTERPGAERPSLLPNGKENSSGTPRVPPASPSSHSLAPPSGERSRLARGSTIRSTFHGGQVRDRRAGGGGGGGVQNGPPASPTLAHEAAPLPAGRPRPTTNLFTKLTSKLTRRVTLDPSKRQNSNRCVSGASLPQGSKIRSQTNLRESGDLRSQVAIYLGIKRKPPPGCSDSPGV

SEQ ID NO: 20105 - protein, 819 aa, Homo sapiens
LHGATRTLGVPSPPPPCPLSRRADPGVLGAQLLSSRPQAGGGGGEERGPWDPRPPHPAAPAPRDPEKMSSRTVLAPGNDRNSDTHGTLGSGRSSDKGPSWSSRSLGARCRNSIASCPEEQPHVGNYRLLRTIGKGNFAKVKLARHILTGREVAIKIIDKTQLNPSSLQKLFREVRIMKGLNHPNIVKLFEVIETEKTLYLVMEYASAGEVFDYLVSHGRMKEKEARAKFRQIVSAVHYCHQKNIVHRDLKAENLLLDAEANIKIADFGFSNEFTLGSKLDTFCGSPPYAAPELFQGKKYDGPEVDIWSLGVILYTLVSGSLPFDGHNLKELRERVLRGKYRVPFYMSTDCESILRRFLVLNPAKRCTLEQIMKDKWINIGYEGEELKPYTEPEEDFGDTKRIEVMVGMGYTREEIKESLTSQKYNEVTATYLLLGRKTEEGGDRGAPGLALARVRAPSDTTNGTSSSKGTSHSKGQRSSSSTYHRQRRHSDFCGPSPAPLHPKRSPTSTGEAELKEERLPGRKASCSTAGSGSRGLPPSSPMVSSAHNPNKAEIPERRKDSTSTPNNLPPSMMTRRNTYVCTERPGAERPSLLPNGKENSSGTPRVPPASPSSHSLAPPSGERSRLARGSTIRSTFHGGQVRDRRAGGGGGGGVQNGPPASPTLAHEAAPLPAGRPRPTTNLFTKLTSKLTRRVADEPERIGGPEVTSCHLPWDQTETAPRLLRFPWSVKLTSSRPPEALMAALRQATAAARCRCRQPQPFLLACLHGGAGGPEPLSHFEVEVCQLPRPGLRGVLFRRVAGTALAFRTLVTRISNDLEL

SEQ ID NO: 20106 - protein, 107 aa, Homo sapiens
LWILLMSGLFADLINTHPAAPAAASPRSRETSFSLPRLIDSRILESELLRRRAWGGAGDAAQSPRPMQSPRPPQEPKHSPSSPVLRHQLCLCWGHLGGKMGDTEMGT

SEQ ID NO: 20107 - protein, 245 aa, Homo sapiens
LKSTISHLSKGRDHNSKRLQMDPGKDKEGVPQPSGPPARKKFVIPLDEDEVPPGVRGNPVLKFVRNVPWEFGDVIPDYVLGQSTCALFLSLRYHNLHPDYIHGRLQSLGKNFALRVLLVQVDVKDPQQALKELAKMCILADCTLILAWSPEEAGRYLETYKAYEQKPADLLMEKLEQDFVSRVTECLTTVKSVNKTDSQTLLTTFGSLEQLIAASREDLALCPGLGPQKARRLFDVLHEPFLKVP

SEQ ID NO: 20108 - protein, 12 aa, Homo sapiens
LLWFFLGVMKFH

SEQ ID NO: 20109 - protein, 133 aa, Homo sapiens
VGEPPARRAAMSETVICSSRATVMLYDDGNKRWLPAGTGPQAFSRVQIYHNPTANSFRVVGRKMQPDQQVVINCAIVRGVKYNQATPNFHQWRDARQVWGLNFGSKEDAAQFAAGMASALEALEGSSPARRST

SEQ ID NO: 20110 - protein, 215 aa, Homo sapiens
MMMATSDGSLLARVPRPSAASRSTTTPRPIPFASWAGRCSPTSRWSSTVPSSGVSTGAPGLAAAIAGAKLRKVSKQEEASGGPTAPKAESGRSGGGGLMEEMNAMLARRRKATQVGEKTPKDESANQEEPEARVPAQSESVRRPWEKNSTTLPRMKSSSSVTTSETQPCTPSSSDYSDLQRVKQELLEEVKKELQKVKEEIIEAFVQELRKRGSP

SEQ ID NO: 20111 - protein, 33 aa, Homo sapiens
LGGSLLSLIFLISCLSPESVRRPWEKNSTTLPR

SEQ ID NO: 20112 - protein, 94 aa, Homo sapiens
LGGSLLSLIFLISCLSPESVRRPWEKNSTTLPRMKSSSSVTTSETQPCTPSSSDYSDLQRVKQELLEEVKKELQKVKEEIIEAFVQELRKRGSP

SEQ ID NO: 20113 - protein, 53 aa, Homo sapiens
LKKHFFQINCHKHRSWGLVCGLVCWGHTIQAIQPTIPPHPKSTLASRCSGSHL

SEQ ID NO: 20114 - protein, 842 aa, Homo sapiens
LRSPEGQLRGLWTRDGRGELHALSPSKLPPLLPPGWEPGLPWLWSAMSLDDNLSGTSGMEVDDRVSALEQRLQLQEDELAVLKAALADALRRLRACEEQGAALRARGTPKGRAPPRLGTTASVCQLLKGLPTRTPLNGSGPPRRVGGYATSPSSPKKEATSGRSSVRRYLSPERLASVRREDPRSRTTSSSSNCSAKKEGKTKEVIFSVEDGSVKMFLRGRPVPMMIPDELAPTYSLDTRSELPSCRLKLEWVYGYRGRDCRANLYLLPTGEIVYFVASVAVLYSVEEQRQRHYLGHNDDIKCLAIHPDMVTIATGQVAGTTKEGKPLPPHVRIWDSVSLSTLHVLGLGVFDRAVCCVGFSKSNGGNLLCAVDESNDHMLSVWDWAKETKVVDVKCSNEAVLVATFHPTDPTVLITCGKSHIYFWTLEGGSLSKRQGLFEKHEKPKYVLCVTFLEGGDVVTGDSGGNLYVWGKGGNRITQAVLGAHDGGVFGLCALRDGTLVSGGGRDRRVVLWGSDYSKLQEVEVPEDFGPVRTVAEGHGDTLYVGTTRNSILQGSVHTGFSLLVQGHVEELWGLATHPSRAQFVTCGQDKLVHLWSSDSHQPLWSRIIEDPARSAGFHPSGSVLAVGTVTGRWLLLDTETHDLVAIHTDGNEQISVVSFSPDGAYLAVGSHDNLVYVYTVDQGGRKVSRLGKCSGHSSFITHLDWAQDSSCFVTNSGDYEILYWDPATCKQITSADAVRNMEWATATCVLGFGVFGIWSEGADGTDINAVARSHDGKLLASADDFGKVHLFSYPCCQPRALSHKYGGHSSHVTNVAFLWDDSMALTTGGKDTSVLQWRVV

SEQ ID NO: 20115 - protein, 153 aa, Homo sapiens
VAAGFVLRQCGSDGQWGLWRDHTQCENPEKNEAFLDQRLILERLQVMYTVGYSLSLATLLLALLILSLFRWDLNPEWWRQRCELGLSLSSKMGWSVSTRSSYPLVVLWGAVGVVKGALCGRERWLMPVIPALWDAKAGGSLEPRSLRSAWPIW

SEQ ID NO: 20116 - protein, 153 aa, Homo sapiens
MTILVGSVPPPPGRPQGFPILGSGLPPPPAPSEWDRGWLSPYLSPQINFLIFIRILGILLSKLRTRQMRCRDYRLRLARSTLTLVPLLGVHEVVFAPVTEEQARGALRFAKLGFEIFLSSFQVLRQGAGAPSFHPGPPPQRGTKATVVLWCSH

SEQ ID NO: 20117 - protein, 262 aa, Homo sapiens
MAAGGAEGGSGPGAAMGDCAEIKSQFRTREGFYKLLPGDGAARRSGPASAQTPVPPQPPQPPPGPASASGPGAAGPASSPPPAGPGPGPALPAVRLSLVRLGEPDSAGAGEPPATPAGLGSGGDRVCFNLGRELYFYPGCCRRGSQRSIDLNKPIDKRIYKGTQPTCHDFNQFTAATETISLLVGFSAGQVQYLDLIKKDTSKLFNEEATDHYCSMARRLRTPRYRTILWQAGLSPRQRWDIEAPWSTLWPPCSSLCFPMFP

SEQ ID NO: 20118 - protein, 292 aa, Homo sapiens
LLVAHPEESWMVGFGHGLGKVFLPVSRLGGMPVCLSRRLPPSLVQVWKYPKVWEGFIKCCQRTKPQSFQVILQLPPQQLGAVFDKCPELREPLLAHVRSFTPHQQAHIPNSIMTILEASGKQEPEAKEAPAGPLEEDDLEPLTLAPAPAPRPPQDLIGLRLAQEKALKRQLEEEQKLKPGGVGAPSSSSPSPSPSARPGPPPSEEAMDFREEGPECETPGIFISMDDDSGLTEAALLDSSLEGPLPKETAAGGLTLKEERSPQTLAPVGEDAMKTPSPAAEDAREPEAKGNS

SEQ ID NO: 20119 - protein, 13 aa, Homo sapiens
LAVLASLCILSLL

SEQ ID NO: 20120 - protein, 198 aa, Homo sapiens
LGREAAAAAARAAGSECGGADARRSWNCCSCCRRRRNLDPRAPDTPGLAMADQLTEEQIAEFKEAFSLFDKDGDGTITTKELGTVMRSLGQNPTEAELQDMINEVDADGNGTIDFPEFLTMMARKMKDTDSEEEIREAFRVFDKDGNGYISAAELRHVMTNLGEKLTDEEVDEMIREADIDGDGQVNYEEFVQMMTAK

SEQ ID NO: 20121 - protein, 132 aa, Homo sapiens
LGREAAAAAARAAGSECGGADARRSWNCCSCCRRRRNLDPRAPDTPGLAMADQLTEEQIAEFKEAFSLFDKDGDGTITTKELGTVMRSLGQNPTEAELQDMINEVDEMIREADIDGDGQVNYEEFVQMMTAK

SEQ ID NO: 20122 - protein, 143 aa, Homo sapiens
LRSRLQFKEAFSLFDKDGDGTITTKELGTVMRSLGQNPTEAELQDMINEVDADGNGTIDFPEFLTMMARKMKDTDSEEEIREAFRVFDKDGNGYISAAELRHVMTNLGEKLTDEEVDEMIREADIDGDGQVNYEEFVQMMTAK

SEQ ID NO: 20123 - protein, 141 aa, Homo sapiens
LRSRLQEAFSLFDKDGDGTITTKELGTVMRSLGQNPTEAELQDMINEVDADGNGTIDFPEFLTMMARKMKDTDSEEEIREAFRVFDKDGNGYISAAELRHVMTNLGEKLTDEEVDEMIREADIDGDGQVNYEEFVQMMTAK

SEQ ID NO: 20124 - protein, 31 aa, Homo sapiens
LAMPVLLISLFSRAHSLFNTPLRTPVLANTN

SEQ ID NO: 20125 - protein, 65 aa, Homo sapiens
LGICLGSPFMASAPPHSQPLTLPHLPSKDHRFLCFQRPPSLSPLLTVLVEKAPPPPPRGMGRSPV

SEQ ID NO: 20126 - protein, 965 aa, Homo sapiens
LPIPWPVGSLRTPLSLESTRSPTQRLLPSTPKDPAILRSPPPARSFLGSPLSHHLLTRSRGSRTQGPPGPPGRVPGGLQAAGPRPPPMATAPSYPAGLPGSPGPGSPPPPGGLELQSPPPLLPQIPAPGSGVSFHIQIGLTREFVLLPAASELAHVKQLACSIVDQKFPECGFYGLYDKILLFKHDPTSANLLQLVRSSGDIQEGDLVEVVLSASATFEDFQIRPHALTVHSYRAPAFCDHCGEMLFGLVRQGLKCDGCGLNYHKRCAFSIPNNCSGARKRRLSSTSLASGHSVRLGTSESLPCTAEELSRSTTELLPRRPPSSSSSSSASSYTGRPIELDKMLLSKVKVPHTFLIHSYTRPTVCQACKKLLKGLFRQGLQCKDCKFNCHKRCATRVPNDCLGEALINGDVPMEEATDFSEADKSALMDESEDSGVIPGSHSENALHASEEEEGEGGKAQSSLGYIPLMRVVQSVRHTTRKSSTTLREGWVVHYSNKDTLRKRHYWRLDCKCITLFQNNTTNRYYKEIPLSEILTVESAQNFSLVPPGTNPHCFEIVTANATYFVGEMPGGTPGGPSGQGAEAARGWETAIRQALMPVILQDAPSAPGHAPHRQASLSISVSNSQIQENVDIATVYQIFPDEVLGSGQFGVVYGGKHRKTGRDVAVKVIDKLRFPTKQESQLRNEVAILQSLRHPGIVNLECMFETPEKVFVVMEKLHGDMLEMILSSEKGRLPERLTKFLITQILVALRHLHFKNIVHCDLKPENVLLASADPFPQVKLCDFGFARIIGEKSFRRSVVGTPAYLAPEVLLNQGYNRSLDMWSVGVIMYVSLSGTFPFNEDEDINDQIQNAAFMYPASPWSHISAGAIDLINNLLQVKMRKRYSVDKSLSHPWLQEYQTWLDLRELEGKMGERYITHESDDARWEQFAAEHPLPGSGLPTDRDLGGACPPQDHDMQGLAERISVL

SEQ ID NO: 20127 - protein, 970 aa, Homo sapiens
LPPTQPRSGNAPFLTAPDRTFLQLLRLDPAILRSPPPARSFLGSPLSHHLLTRSRGSRTQGPPGPPGRVPGGLQAAGPRPPPMATAPSYPAGLPGSPGPGSPPPPGGLELQSPPPLLPQIPAPGSGVSFHIQIGLTREFVLLPAASELAHVKQLACSIVDQKFPECGFYGLYDKILLFKHDPTSANLLQLVRSSGDIQEGDLVEVVLSASATFEDFQIRPHALTVHSYRAPAFCDHCGEMLFGLVRQGLKCDGCGLNYHKRCAFSIPNNCSGARKRRLSSTSLASGHSVRLGTSESLPCTAEELSRSTTELLPRRPPSSSSSSSASSYTGRPIELDKMLLSKVKVPHTFLIHSYTRPTVCQACKKLLKGLFRQGLQCKDCKFNCHKRCATRVPNDCLGEALINGDVPMEEATDFSEADKSALMDESEDSGVIPGSHSENALHASEEEEGEGGKAQSSLGYIPLMRVVQSVRHTTRKSSTTLREGWVVHYSNKDTLRKRHYWRLDCKCITLFQNNTTNRYYKEIPLSEILTVESAQNFSLVPPGTNPHCFEIVTANATYFVGEMPGGTPGGPSGQGAEAARGWETAIRQALMPVILQDAPSAPGHAPHRQASLSISVSNSQIQENVDIATVYQIFPDEVLGSGQFGVVYGGKHRKTGRDVAVKVIDKLRFPTKQESQLRNEVAILQSLRHPGIVNLECMFETPEKVFVVMEKLHGDMLEMILSSEKGRLPERLTKFLITQILVALRHLHFKNIVHCDLKPENVLLASADPFPQVKLCDFGFARIIGEKSFRRSVVGTPAYLAPEVLLNQGYNRSLDMWSVGVIMYVSLSGTFPFNEDEDINDQIQNAAFMYPASPWSHISAGGAWGPPTPWAAIDLINNLLQVKMRKRYSVDKSLSHPWLQEYQTWLDLRELEGKMGERYITHESDDARWEQFAAEHPLPGSGLPTDRDLGGACPPQDHDMQGLAERISVL

SEQ ID NO: 20128 - protein, 876 aa, Homo sapiens
LGVEGVRLFLWGEVGGGGQKAAPSSVSLQRGGPSRGAWVSLALLGARSPTRRPPRGHATLRCRPGWARLALAAGPPSYCPPPGARAVVAAGEGGGCWRGRAGARGTAGAQAGPGASMMEERAAAAVAAAASSCRPLGSGAGPGPTGAAPVSAPAPGPGPAGKGGGGGGSPGPTAGPEPLSLPGILHFIQHEWARFEAEKARWEAERAELQAQVAFLQGERKGQENLKTDLVRRIKMLEYALKQERAKYHKLKFGTDLNQGEKKADVSEQVSNGPVESVTLENSPLVWKEGRQLLRQYLEEVGYTDTILDMRSKRVRSLLGRSLELNGAVEPSEGAPRAPPGPAGLSGGESLLVKQIEEQIKRNAAGKDGKERLGGSVLGQIPFLQNCEDEDSDEDDELDSVQHKKQRVKLPSKALVPEMEDEDEEDDSEDAINEFDFLGSGEDGEGAPDPRRCTVDGSPHELESRRVKLQGILADLRDVDGLPPKVTGPPPGTPQPRPHEGSFGFSSDVFIMDTIGGGEVSLGDLADLTVTNDNDLSCDLSDSKDAFKKTWNPKFTLRSHYDGIRSLAFHHSQSALLTASEDGTLKLWNLQKAVTAKKNAALDVEPIHAFRAHRGPVLAVAMGSNSEYCYSGGADACIHSWKIPDLSMDPYDGYDPSVLSHVLEGHGDAVWGLAFSPTSQRLASCSADGTVRIWDPSSSSPACLCTFPTASEHGVPTSVAFTSTEPAHIVASFRSGDTVLYDMEVGSALLTLESRGSSGPTQINQVVSHPNQPLTITAHDDRGIRFLDNRTGKPVHSMVAHLDAVTCLAVDPNGAFLMSGSHDCSLRLWSLDNKTCVQEITAHRKKHEEAIHAVACHPSKALIASAGADALAKVFV

SEQ ID NO: 20129 - protein, 545 aa, Homo sapiens
VLPIMVADPPRDSKGLAAAEPTANGGLALASIEDQGAAAGGYCGSRDQVRRCLRANLLVLLTVVAVVAGVALGLGVSGAGGALALGPERLSAFVFPGELLLRLLRMIILPLVVCSLIGGAASLDPGALGRLGAWALLFFLVTTLLASALGVGLALALQPGAASAAINASVGAAGSAENAPSKEVLDSFLDLARNIFPSNLVSAAFRSYSTTYEERNITGTRVKVPVGQEVEGMNILGLVVFAIVFGVALRKLGPEGELLIRFFNSFNEATMVLVSWIMWYAPVGIMFLVAGKIVEMEDVGLLFARLGKYILCCLLGHAIHGLLVLPLIYFLFTRKNPYRFLWGIVTPLATAFGTSSSSATLPLMMKCVEENNGVAKHISRFILPIGATVNMDGAALFQCVAAVFIAQLSQQSLDFVKIITILVTATASSVGAAGIPAGGVLTLAIILEAVNLPVDHISLILAVDWLVDRSCTVLNVEGDALGAGLLQNYVDRTESRSTEPELIQVKSELPLDPLPVPTEEGNPLLKHYRGPAGDATVASEKESVM

SEQ ID NO: 20130 - protein, 30 aa, Homo sapiens
LASQPSVSKTQAARVPASRIQASGICATRT

SEQ ID NO: 20131 - protein, 165 aa, Homo sapiens
LHPEPELPSRRGTGAAGVWTGVAMIRFILIQNRAGKTRLAKWYMQFDDDEKQKLIEEVHAVVTVRDAKHTNFVEFRNFKIIYRRYAGLYFCICVDVNDNNLAYLEAIHNFVEVLNEYFHNVCELDLVFNFYKVYTVVDEMFLAGEIRETSQTKVLKQLLMLQSLE

SEQ ID NO: 20132 - protein, 881 aa, Homo sapiens
MGRGRGRGGSRGGMNKGGMNDDEDFYDEDMGDGGGGSYRSRDHDKPHQQSDKKGKVICKYFVEGRCTWGDHCNFSHDIELPKKRELCKFYITGFCARAENCPYMHGDFPCKLYHTTGNCINGDDCMFSHDPLTEETRELLDKMLADDAEAGAEDEKEVEELKKQGINPLPKPPPGVGLLPTPPRPPGPQAPTSPNGRPMQGGPPPPPPPPPPPPGPPQMPMPVHEPLSPQQLQQQDMYNKKIPSLFEIVVRPTGQLAEKLGVRFPGPGGPPGPMGPGPNMGPPGPMGGPMHPDMHPDMHPDMHPDMHADMHADMPMGPGMNPGPPMGPGGPPMMPYGPGDSPHSGMMPPIPPAQNFYENFYQQQEGMEMEPGLLGDAGDTGNWYSSDEDEGGSSVTSILKTLRQQTSSRPPASVGELSSSGLGDPRLQKGHPTGSRLADPRLSRDPRLTRHVEASGGSGPGDSGPSDPRLARALPTSKPEGSLHSSPVGPSSSKGSGPPPTEEEEGERALREKAVNIPLDPLPGHPLRDPRSQLQQFSHIKKDVTLSKPSFARTVLWNPEDLIPLPIPKQDAVPPVPAALQSMPTLDPRLHRAATAGPPNARQRPGASTDSSTQGANLPDFELLSRILKTVNATGSSAAPGSSDKPSDPRVRKAPTDPRLQKPTDSTASSRAAKPGPAEAPSPTASPSGDASPPATAPYDPRVLAAGGLGQGGGGGQSSVLSGISLYDPRTPNAGGKATEPAADTGAQPKGAEGNGKSSASKAKEPPFVRKSALEQPETGKAGADGGTPTDRYNSYNRPRPKAAAAPAATTATPPPEGAPPQPGVHNLPVPTLFGTVKQTPKTGSGSPFAGNSPAREGEQDAASLKDVFKGFDPTASPFCQ

SEQ ID NO: 20133 - protein, 359 aa, Homo sapiens [sequence omitted]

SEQ ID NO: 20134 - protein, 18 aa, Homo sapiens
LGLCTESFRGRREAVDLP

SEQ ID NO: 20135 - protein, 21 aa, Homo sapiens
VGFGLSLSVGLGMFLNLTWWS

SEQ ID NO: 20136 - protein, 26 aa, Homo sapiens
MAVCAGARLALLGPEVKAFAACESRA

SEQ ID NO: 20137 - protein, 1152 aa, Homo sapiens
LRLLLWISNMPPPRTREGRDRRDHHRAPSEEEALEKWDWNCPETRRLLEDAFFREEDYIRQGSEECQKFWTFFERLQRFQNLKTSRKEEKDPGQPKHSIPALADLPRTYDPRYRINLSVLGPATRGSQGLGRHLPAERVAEFRRALLHYLDFGQKQAFGRLAKLQRERAALPIAQYGNRILQTLKEHQVVVVAGDTGCGKSTQVPQYLLAAGFSHVACTQPRRIACISLAKRVGFESLSQYGSQVGYQIRFESTRSAATKIVFLTVGLLLRQIQREPSLPQYEVLIVDEVHERHLHNDFLLGVLQRLLPTRPDLKVILMSATINISLFSSYFSNAPVVQVPGRLFPITVVYQPQEAEPTTSKSEKLDPRPFLRVLESIDHKYPPEERGDLLVFLSGMAEISAVLEAAQTYASHTQRWVVLPLHSALSVADQDKVFDVAPPGVRKCILSTNIAETSVTIDGIRFVVDSGKVKEMSYDPQAKLQRLQEFWISQASAEQRKGRAGRTGPGVCFRLYAESDYDAFAPYPVPEIRRVALDSLVLQMKSMSVGDPRTFPFIEPPPPASLETAILYLRDQGALDSSEALTPIGSLLAQLPVDVVIGKMLILGSMFSLVEPVLTIAAALSVQSPFTRSAQSSPECAAARRPLESDQGDPFTLFNVFNAWVQVKSERSRNSRKWCRRRGIEEHRLYEMANLRRQFKELLEDHGLLAGAQAAQVGDSYSRLQQRRERRALHQLKRQHEEGAGRRRKVLRLQEEQDGGSSDEDRAGPAPPGASDGVDIQDVKFKLRHDLAQLQAAASSAQDLSREQLALLKLVLGRGLYPQLAVPDAFNSSRKDSDQIFHTQAKQGAVLHPTCVFAGSPEVLHAQELEASNCDGSRDDKDKMSSKHQLLSFVSLLETNKPYLVNCVRIPALQSLLLFSRSLDTNGDCSRLVADGWLELQLADSESAIRLLAASLRLRARWESALDRQLAHQAQQQLEEEEEDTPVSPKEVATLSKELLQFTASKIPYSLRRLTGLEVQNMYVGPQTIPATPHLPGLFGSSTLSPHPTKGGYAVTDFLTYNCLTNDTDLYSDCLRTFWTCPHCGLHAPLTPLERIAHENTCPQAPQDGPPGAEEAALETLQKTSVLQRPYHCEACGKDFLFTPTEVLRHRKQHV

SEQ ID NO: 20138 - protein, 44 aa, Homo sapiens
LPALPSPKMAARSPARASQATLPHCARALFSFPFLDQGAAIRSL

SEQ ID NO: 20139 - protein, 264 aa, Homo sapiens
LLSPFVAAMDNSGKEAEAMALLAEAERKVKNSQSFFSGLFGGSSKIEEACEIYARAANMFKMAKNWSEAINCLMRAIEIYTDMGRFTIAAKHHISIAEIYETELVDIEKAIAHYEQSADYYKGEESNSSANKCLLKVAGYAALLEQYQKAIDIYEQVGTNAMDSPLLKYSAKDYFFKAALCHFCIDMLNAKLAVQKYEELFPAFSDSRECKLMKKLLEAHEEQNVDSYTESVKEYDSISRLDQWLTTMLLRIKKTIQGDEEDLR

SEQ ID NO: 20140 - protein, 221 aa, Homo sapiens
LRVCGSAGSSERLLISLLAARCACVRLLSSASAETTSLSHVSSHLPFSPEAINCLMRAIEIYTDMGRFTIAAKHHISIAEIYETELVDIEKVSGSRALHGLAARTSAALSSSHQGSPLVSECREGGMGRRQSLENGVWLCPRQAGRRVWKLHGGLLSLPCPPLEPIPRVSPGHCPLRAVCRLLQRRGVQQVAPFLPAPAPQGPPPLPLTTPPHTAQPTSVC

SEQ ID NO: 20141 - protein, 110 aa, Homo sapiens
LRVCGSAGSSERLLISLLAARCACVRLLSSASAETTSLSHVSSHLPFSPEAINCLMRAIEIYTDMGRFTIAAKHHISIAEIYETELVDIEKAIAHYEQSADYYKGEESNR

SEQ ID NO: 20142 - protein, 82 aa, Homo sapiens
LLSPFVAAMDNSGKEAEAMALLAEAERKVKNSQSFFSGLFGCWKRVLPGCTAAPAAPEQARRSHLLCGRWQRIQESRPPRGH

SEQ ID NO: 20143 - protein, 145 aa, Homo sapiens
LLSPFVAAMDNSGKEAEAMALLAEAERKVKNSQSFFSGLFGGSSKIEEACEIYARAANMFKMAKNWSAAGNAFCQAAQLHLQLQSKHDAATCFVDAGNAFKKADPQVPFRSPEVFLNWTKPTDPTPQRSAYGPHCLHVRRRGWTP

SEQ ID NO: 20144 - protein, 62 aa, Homo sapiens
MPTLRVPVLSVWLLRWWRVLGAGRVLPDSLSLSPPPPTGCQTKPERGWGSQPPSVLCPQAPV

SEQ ID NO: 20145 - protein, 615 aa, Homo sapiens
LSSLPSSPLRAPPGSDGSGRDREHRPLRGRFGSSRDPTLSQPAQPAAAASAPRRQLSICTSLREPRERCAATMFSWLKRGGARGQQPEAIRTVTSALKELYRTKLLPLEEHYRFGAFHSPALEDADFDGKPMVLVAGQYSTGKTSFIQYLLEQEVPGSRVGPEPTTDCFVAVMHGDTEGTVPGNALVVDPDKPFRKLNPFGNTFLNRFMCAQLPNQVLESISIIDTPGILSGAKQRVSRGYDFPAVLRWFAERVDLIILLFDAHKLEISDEFSEAIGALRGHEDKIRVVLNKADMVETQQLMRVYGALMWALGKVVGTPEVLRVYIGSFWSQPLLVPDNRRLFELEEQDLFRDIQGLPRHAALRKLNDLVKRARLVRVHAYIISYLKKEMPSVFGKENKKKQLILKLPVIFAKIQLEHHISPGDFPDCQKMQELLMAHDFTKFHSLKPKLLEALDEMLTHDIAKLMPLLRQEELESTEVGVQGGAFEGTHMGPFVERGPDEAMEDGEEGSDDEAEWVVTKDKSKYDEIFYNLAPADGKLSGSKAKTWMVGTKLPNSVLGRIWKLSDVDRDGMLDDEEFALASHLIEAKLEGHGLPANLPRRLVPPSKRRHKGSAE

SEQ ID NO: 20146 - protein, 62 aa, Homo sapiens
VNCSGAIVLSQFSSSVAPSMRSTIATSIALMRSQGHRSAVLRSWMNGQSRLPTASSLVSPAL

SEQ ID NO: 20147 - protein, 128 aa, Homo sapiens
LRTGAEEAAVAPGAFERAHPSPRANADPGPTGGTAPDSPRAFLAAMEDGVYEPPDLTPEERMELENIRRRKQELLVEIQRLREELSEAMSEVEGLEANEGRGSSSWWRMNCCRTHPRRSPASCTRARG

SEQ ID NO: 20148 - protein, 346 aa, Homo sapiens
LRTGAEEAAVAPGAFERAHPSPRANADPGPTGGTAPDSPRAFLAAMEDGVYEPPDLTPEERMELENIRRRKQELLVEIQRLREELSEAMSEVEGLEANEGSKTLQRNRKMAMGRKKFNMDPKKGIQFLVENELLQNTPEEIARFLYKGEGLNKTAIGDYLGEREELNLAVLHAFVDLHEFTDLNLVQALRQFLWSFRLPGEAQKIDRMMEAFAQRYCLCNPGVFQSTDTCYVLSFAVIMLNTSLHNPNVRDKPGLERFVAMNRGINEGGDLPEELLRNLYDSIRNEPFKIPEDDGNDLTHTFFNPDREGWLLKLGTCPPDPAGPSAGGHLWAWALDSASAHTCCLN

SEQ ID NO: 20149 - protein, 337 aa, Homo sapiens
LRTGAEEAAVAPGAFERAHPSPRANADPGPTGGTAPDSPRAFLAAMEDGVYEPPDLTPEERMELENIRRRKQELLVEIQRLREELSEAMSEVEGLEANEGSKTLQRNRKMAMGRKKFNMDPKKGIQFLVENELLQNTPEEIARFLYKGEGLNKTAIGDYLGEREELNLAVLHAFVDLHEFTDLNLVQALRQFLWSFRLPGEAQKIDRMMEAFAQRYCLCNPGVFQSTDTCYVLSFAVIMLNTSLHNPNVRDKPGLERFVAMNRGINEGGDLPEELLRNLYDSIRNEPFKIPEDDGNDLTHTFFNPDREGWLLKLGTGPGEDVEAALVYPHRQLPLLL

SEQ ID NO: 20150 - protein, 444 aa, Homo sapiens
LRTGAEEAAVAPGAFERAHPSPRANADPGPTGGTAPDSPRAFLAAMEDGVYEPPDLTPEERMELENIRRRKQELLVEIQRLREELSEAMSEVEGLEANEGSKTLQRNRKMAMGRKKFNMDPKKGIQFLVENELLQNTPEEIARFLYKGEGLNKTAIGDYLGEREELNLAVLHAFVDLHEFTDLNLVQALRQFLWSFRLPGEAQKIDRMMEAFAQRYCLCNPGVFQSTDTCYVLSFAVIMLNTSLHNPNVRDKPGLERFVAMNRGINEGGDLPEELLRNLYDSIRNEPFKIPEDDGNDLTHTFFNPDREGWLLKLGGRVKTWKRRWFILTDNCLYYFEYTTDKEPRGIIPLENLSIREVDDPRKPNCFELYIPNNKGQLIKACKTEADGRVVEGNHMVYRISAPTQEEKDEWIKSIQAAVSVDPFYEMLAARKKRISVKKKQEQP

SEQ ID NO: 20151 - protein, 982 aa, Homo sapiens
LGPPGPRSARPSGPPGPLRGPPAGVRDLGLPPLPCAPALPSPVLSVRQLPAERLGPRGPGRRGDPGGRPCRGLGGAGDRPVGGRRRGGGGGQLPRGRQQQPWRWPKPPGSPTLSPVQPRGGLLLPATGAGGRRSRLGRPPCSWLPPPPRGRLLAAGRAGLPGRLAHGPPRLGPPRVSGPPHGGGGAPVPRAGATSRSPPPAATSSGPRGPGRVPRPPFGRGQSRFRPLVAGPQAGGQRLRDRDPFFPRGSLPRWGGGRGGRGPSAAGSPRATRPRSAPATSRPGSAPTPGAPGEADLRGSSEHGTAADVPAGGCDKEPPGGEGGDSPGDRTQEGGERPREQRESPGPEQGPDSPGQRETSPKPEPPSERGDSAGERGPESPRHRGEGGGEWGPGVPRERRESAGEWGADTPKEGGESAGEWGAEVPRGRGEGAGEWGPDTPKERGQGVREWGPEIPQEHGEATRDWALESPRALGEDARELGSSPHDRGASPRDLSGESPCTQRSGLLPERRGDSPWPPWPSPQERDAGTRDREESPRDWGGAESPRGWEAGPREWGPSPSGHGDGPRRRPRKRRGRKGRMGRQHEAAATAATAATATGGTAEEAGASAPESQAGGGPRGRARGPRQQGRRRHGTQRRRGPPQAREEGPRDATTILGLGTPSGEQRADQSQALPALAGAAAAHAHAIPGAGPAAAPVGGRGRRGGWRGGRRGGSAGAGGGGRGGRGRGRGGGRGGGGAGRGGGAAGPREGASSPGARRGEQRRRGRGPPAAGAAQVSARGRRARGQRAGEEAQDGLLPRGRDRLPLRPGDANQRAERPGPPRGGHGPVNASSAPDTSPPRHPRRWVSQQRQRLWRQFRVGGGFPPPPPSRPPAVLLPLLRLACAGDPGATRPGPRRPARRPRGELIPRRPDPAAPSEEGLRMESSVDDGATATTADAASGEAPEAGPSPSHSPTMCQTGGPGPPPPSPPDGSPDPPDPLGAK

SEQ ID NO: 20152 - protein, 258 aa, Homo sapiens
LDVALVPALYALCRYRPASQSSNSPQRSPDRGRAPRRTHVTSRRRHSLEAFPAHPSPFSLSGPGRAGGAIMGVDIRHNKDRKVRRKEPKSQDIYLRLLVKLYRFLARRTNSTFNQVVLKRLFMSRTNRPPLSLSRMIRKMKLPGRENKTAVVVGTITDDVRVQEVPKLKVCALRVTSRARSRILRAGGKILTFDQLALDSPKGCGTVLLSGPRKGREVYRHFGKAPGTPHSHTKPYVRSKGRKFERARGRRASRGYKN

SEQ ID NO: 20153 - protein, 181 aa, Homo sapiens
MGVDIRHNKDRKVRRKEPKSQDIYLRLLVKLYRFLARRTNSTFNQVVLKRLFMSRTNRPPLSLSRMVSGWSREHGRPGSRWVLSVWKGGRTWSSGSNQGIKGLSQPVASVELGLLVGTECPWAVGKSPGPPLLLFVRWRCPGGFRRLPQVITEFYVKGSAEGGPIEQSAFFFLSGAFPSWT

SEQ ID NO: 20154 - protein, 270 aa, Homo sapiens
MDTLKQRSSRTRAKAMAPPPPPLAASTPLLHGEFGSYPARGPRFALTLTSQALHIQRLRPKPEARPRGGLVPLAEVSGCCTLRSRSPSDSAAYFCIYTYPRGRRGARRRATRTFRADGAATYEENRAEAQRWATALTCLLRGLPLPGDGEITPDLLPRPPRLLLLVNPFGGRGLAWQWCKNHVLPMISEAGLSFNLIQTERQNHARELVQGLSLSEWDGIVTVSGDGLLHEVLNGLLDRPDWEEAVKMPVGILPCGSGNALAGAVNQHGG

SEQ ID NO: 20155 - protein, 22 aa, Homo sapiens
VPVSRVILVGRVGEKGDVSGTV

SEQ ID NO: 20156 - protein, 210 aa, Homo sapiens
LMDSDETGFEHSGLWVSVLAGLLLGACQAHPIPDSSPLLQFGGQVRQRYLYTDDAQQTEAHLEIREDGTVGGAADQSPESLLQLKALKPGVIQILGVKTSRFLCQRPDGALYGSLHFDPEACSFRELLLEDGYNVYQSEAHGLPLHLPGNKSPHRDPAPRGPARFLPLPGLPPALPEPPGILAPQPPDVGSSDPLSMVGPSQGRSPSYAS

SEQ ID NO: 20157 - protein, 150 aa, Homo sapiens
LFASLSLFPALPIRIPVAVCISCLCPHVCPQVRFSEKVTVHFLAVWAGPAQAARQGPWEQLARDRSRFARRITQAQEELSPCLTPAARARAWARLRNPPLAPIPALTQTLPSSSVPSSPVQTTPLSQAVATPSRSSAAAAAALDLSGRRG

SEQ ID NO: 20158 - protein, 137 aa, Homo sapiens
LENALCGEGETVEMHPAYTEEELRRFEEELAAREAELNAKAQRLSQETEALGRSQGRLEAQKRELQQAVLHMEQRKQQQQQQQGHKAPAAHPEGQLKFHPDTDDVPVPAPAGDQKEVDTSEKKLLERLPEVEVPQHL

SEQ ID NO: 20159 - protein, 182 aa, Homo sapiens
LELLIQTATRDLAQYDAAHHEEFKRYEMLKEHERRRYLESLGEEQRKEAERKLEEQQRRHREHPKVNVPGSQAQLKEVWEELDGLDPNRFNPKTFFILHDINSDGVLDEQELEALFTKELEKVYDPKNEEDDMREMEEERLRMREHVMKNVRWGPGGGEDGPPALSLTLIWLPRWTPTRTAS

SEQ ID NO: 20160 - protein, 73 aa, Homo sapiens
MLSASRLLLQLEKVYDPKNEEDDMREMEEERLRMREHVMKNVRWGPGGGEDGPPALSLTLIWLPRWTPTRTAS

SEQ ID NO: 20161 - protein, 152 aa, Homo sapiens
LLPGTGSPLSCRMIAAVDTDSPREVFFRVAADMFSDGNFNWGRVVALFYFASKLVLKALCTKVPELIRTIMGWTLDFLRERLLGWIQDQGGWVRLLKPPHPHHRALTTAPAPPSLPPATPLGPWAFWSRSQWCPLPIFRSSDVVYNAFSLRV

SEQ ID NO: 20162 - protein, 796 aa, Homo sapiens
LPRSQRFGAGVRSCNRKPSVLQASRRAPATRPRTLPGAFPRHLRGPYLEIPGAPLPAPAMPLNRTLSMSSLPGLEDWEDEFDLENAVLFEVAWEVANKVGGIYTVLQTKAKVTGDEWGDNYFLVGPYTEQGVRTQVELLEAPTPALKRTLDSMNSKGCKVYFGRWLIEGGPLVVLLDVGASAWALERWKGELWDTCNIGVPWYDREANDAVLFGFLTTWFLGEFLAQSEEKPHVVAHFHEWLAGVGLCLCRARRLPVATIFTTHATLLGRYLCAGAVDFYNNLENFNVDKEAGERQIYHRYCMERAAAHCAHVFTTVSQITAIEAQHLLKRKPDIVTPNGLNVKKFSAMHEFQNLHAQSKARIQEFVRGHFYGHLDFNLDKTLYFFIAGRYEFSNKGADVFLEALARLNYLLRVNGSEQTVVAFFIMPARTNNFNVETLKGQAVRKQLWDTANTVKEKFGRKLYESLLVGSLPDMNKMLDKEDFTMMKRAIFATQRQSFPPVCTHNMLDDSSDPILTTIRRIGLFNSSADRVKVIFHPEFLSSTSPLLPVDYEEFVRGCHLGVFPSYYEPWGYTPAECTVMGIPSISTNLSGFGCFMEEHIADPSAYGIYILDRRFRSLDDSCSQLTSFLYSFCQQSRRQRIIQRNRTERLSDLLDWKYLGRYYMSARHMALSKAFPEHFTYEPNEADAAQGYRYPRPASVPPSPSLSRHSSPHQSEDEEDPRNGPLEEDGERYDEDEEAAKDRRNIRAPEWPRRASCTSSTSGSKRNSVDTATSSSLSTPSEPLSPTSSLGEERN

SEQ ID NO: 20163 - protein, 732 aa, Homo sapiens
LPRSQRFGAGVRSCNRKPSVLQASRRAPATRPRTLPGAFPRHLRGPYLEIPGAPLPAPAMPLNRTLSMSSLPGLEDWEDEFDLENAVLFEVAWEVANKVGGIYTVLQTKAKVTGDEWGDNYFLVGPYTEQGVRTQVELLEAPTPALKRTLDSMNSKGCKFLAQSEEKPHVVAHFHEWLAGVGLCLCRARRLPVATIFTTHATLLGRYLCAGAVDFYNNLENFNVDKEAGERQIYHRYCMERAAAHCAHVFTTVSQITAIEAQHLLKRKPDIVTPNGLNVKKFSAMHEFQNLHAQSKARIQEFVRGHFYGHLDFNLDKTLYFFIAGRYEFSNKGADVFLEALARLNYLLRVNGSEQTVVAFFIMPARTNNFNVETLKGQAVRKQLWDTANTVKEKFGRKLYESLLVGSLPDMNKMLDKEDFTMMKRAIFATQRQSFPPVCTHNMLDDSSDPILTTIRRIGLFNSSADRVKVIFHPEFLSSTSPLLPVDYEEFVRGCHLGVFPSYYEPWGYTPAECTVMGIPSISTNLSGFGCFMEEHIADPSAYGIYILDRRFRSLDDSCSQLTSFLYSFCQQSRRQRIIQRNRTERLSDLLDWKYLGRYYMSARHMALSKAFPEHFTYEPNEADAAQGYRYPRPASVPPSPSLSRHSSPHQSEDEEDPRNGPLEEDGERYDEDEEAAKDRRNIRAPEWPRRASCTSSTSGSKRNSVDTATSSSLSTPSEPLSPTSSLGEERN

SEQ ID NO: 20164 - protein, 341 aa, Homo sapiens
MEQALHRFGRGLVWLSVAWLSVGRVRVRDDGDTGRGFCRAGPVLTRGPSGDSSPLPLPTSVTAAYKHADGKKIDGRRVLVDVERGRTVKGWRPRRLGGGLGGTRRGGADVNIRHSGRDDTSRYDERPGPSPLPHRDRDRDRERERRERSRERDKERERRRSRSRDRRRRSRSRDKEERRRSRERSKDKDRDRKRRSSRSRERARRERERKEELRGGGGDMAEPSEAGDAPPDDGPPGELGPDGPDGPEEKGRDRDRERRRSHRSERERRRDRDRDRDRDREHKRGERGSERGRDEARGGGGGQDNGLEGLGNDSRDMYMESEGGDGYLAPENGYLMEAAPE

SEQ ID NO: 20165 - protein, 468 aa, Homo sapiens
LRVGFGGSLLSSVFLQAQMGEPRAGAALDDGSGWTGSEEGSEEGTGGSEGAGGDGGPDAEGVWSPDIEQSFQEALAIYPPCGRRKIILSDEGKMYGRNELIARYIKLRTGKTRTRKQVSSHIQVLARRKSREIQSKLKDQVSKDKAFQTMATMSSAQLISAPSLQAKLGPTGPQVVQASELFQFWSGGSGPPWNVPDVKPFSQTPFTLSLTPPSTDLPGYEPPQALSPLPPPTPSPPAWQARGLGTARLQLVEFSAFVEPPDAVDSYQRHLFVHISQHCPSPGAPPLESVDVRQIYDKFPEKKGGLRELYDRGPPHAFFLVKFWADLNWGPSGEEAGAGGSISSGGFYGVSSQYESLEHMTLTCSSKVCSFGKQVVEKVETERAQLEDGRFVYRLLRSPMCEYLVNFLHKLRQLPERYMMNSVLENFTILQVVTNRDTQELLLCTAYVFEVSTSERGAQHHIYRLVRD

SEQ ID NO: 20166 - protein, 22 aa, Homo sapiens
VAAPAMLGLVFFSSASGFGEMG

SEQ ID NO: 20167 - protein, 199 aa, Homo sapiens
MANPKLLGMGLSEAEAIGADSARFEELLLQASKELQQAQTTRPESTQIQPQPGFCIKTNSSEGKVFINICHSPSIPPPADVTEEELLQMLEEDQAGFRIPMSLGEPHAELDASQCPQRTQESGPLGPFFPRTQESWAQDPPPSAPGDLAPRSDSFPYGRSLVPWTSHTRAVLVLPPGQAGTFPCPTPGPGGLGRVLFVH

SEQ ID NO: 20168 - protein, 724 aa, Homo sapiens
LRRVQGPAPARSSPRWSTDRCRRATHAHWLAEVIQKHQRLLWTLESLVTGRAVREVRDGDVQLAQQLLHYHAIQASTQEEALAGWEPMGVIGLILPPTFSFLEMMWRICPALAVGCTVVALVPPASPAPLLLAQLAGELGPFPGILNVLSGPASLVPILASQPGIRKVAFCGAPEEGRALRRSLAGECAELGLALGTESLLLLTDTADVDSAVEGVVDAAWSDRGPGGLRLLIQESVWDEAMRRLQERMGRLRSGRGLDGAVDMGARGAAACDLVQRFVREAQSQGAQVFQAGDVPSERPFYPPTLVSNLPPASPCAQVEVPWPVVVASPFRTAKEALLVANGTPRGGSASVWSERLGQALELGYGLQVGTVWINAHGLRDPSVPTGGCKESGCSWHGGPDGLYEYLRPSGTPARLSCLSKNLNYDTFGLAVPSTLPAGPEIGPSPAPPYGLFVGGRFQAPGARSSRPIRDSSGNLHGYVAEGGAKDIRGAVEAAHQAFPGWAGQSPGARAALLWALAAALERRKSTLASRLERQGAELKAAEAEVELSARRLRAWGARVQAQGHTLQVAGLRGPVLRLREPLGVLAVVCPDEWPLLAFVSLLAPALAYGNTVVMVPSAACPLLALEVCQDMATVFPAGLANVVTGDRDHLTRCLALHQDVQAMWYFGSAQGSQFVEWASAGNLKPVWASRGCPRAWDQEAEGAGPELGLRVARTKALWLPMGD

SEQ ID NO: 20169 - protein, 149 aa, Homo sapiens
LSLPRPGDRRHEGPPAEMTVLAPAWSPTTYLLLLLLLSSGLSGTQDCSFQHSPISSDFAVKIRELSDYLLQDYPVTVASNLQDEELCGGLWRLVLAQRWMERLKTVAGSKMQGLLERVNTEIHFVTKCAFQVSPQLRGQVRGGRCLPTN

SEQ ID NO: 20170 - protein, 234 aa, Homo sapiens
LEPNTPAPLQTYLLLLLLLSSGLSGTQDCSFQHSPISSDFAVKIRELSDYLLQDYPVTVASNLQDEELCGGLWRLVLAQRWMERLKTVAGSKMQGLLERVNTEIHFVTKCAFQPPPSCLRFVQTNISRLLQETSEQLVALKPWITRQNFSRCLELQCQPDSSTLPPPWSPRPLEATAPTAPQPPLLLLLLLPVGLLLLAAAWCLHWQRTRRRTPRPGEQVPPVPSPQDLLLVEH

SEQ ID NO: 20171 - protein, 206 aa, Homo sapiens
LPKMAEVQVLVLDGRGHLLGRLAAIVAKQVLLGRKVVVVRCEGINISGNFYRNKLKYLAFLRKRMNTNPSRGPYHFRAPSRIFWRTVRGMLPHKTKRGQAALDRLKVFDGIPPPYDKKKRMVVPAALKVVRLKPTRKFAYLGRLAHEVGWKYQAVTATLEEKRKEKAKIHYRKKKQLMRLRKQAEKNVEKKIDKYTEVLKTHGLLV

SEQ ID NO: 20172 - protein, 56 aa, Homo sapiens
VVGPSGGSALLSLSLPLGRKVVVVRCEGINISGNFYRNKCKLGPGRSTGEGLPVGC

SEQ ID NO: 20173 - protein, 191 aa, Homo sapiens
VVGPSGGSALLSLSLPLGRKVVVVRCEGINISGNFYRNKLKYLAFLRKRMNTNPSRGPYHFRAPSRIFWRTVRGMLPHKTKRGQAALDRLKVFDGIPPPYDKKKRMVVPAALKVVRLKPTRKFAYLGRLAHEVGWKYQAVTATLEEKRKEKAKIHYRKKKQLMRLRKQAEKNVEKKIDKYTEVLKTHGLLV

SEQ ID NO: 20174 - protein, 160 aa, Homo sapiens
MGVPRPQPWALGLLLFLLPGSLGAESHLSLLYHLTAVSSPAPGTPAFWVSGWLGPQQYLSYNSLRGEAEPCGAWVWENQVSWYWEKETTDLRIKEKLFLEAFKALGGKGEIPVWRGKGPGPCSGAPLTCVWAPQVPTLCRACWAVNWALTTPRCPPPSSP

SEQ ID NO: 20175 - protein, 235 aa, Homo sapiens
MGVPRPQPWALGLLLFLLPGSLGAESHLSLLYHLTAVSSPAPGTPAFWVSGWLGPQQYLSYNSLRGEAEPCGAWVWENQVSWYWEKETTDLRIKEKLFLEAFKALGGKGPYTLQGLLGCELGPDNTSVPTAKFALNGEEFMNFDLKQGTWGGDWPEALAISQRWQQQDKAANKELTFLLFSCPHRLREHLERGRGNLEWKGCWTKIDTSWGCAQIFIPSATKEKLRLNQSPPPCA

SEQ ID NO: 20176 - protein, 185 aa, Homo sapiens
MGVPRPQPWALGLLLFLLPGSLGAEPPSMRLKARPSSPGFSVLTCSAFSFYPPELQLRFLRNGLAAGTGQGDFGPNSDGSFHASSSLTVKSGDEHHYCCIVQHAGLAQPLRVELGEVPPGGDAPGFPLPCLTAAPVLPESDLPPHCCHLLESDCLEPHACQCPQNLMACPSQGQLPSVSCCFWPH

SEQ ID NO: 20177 - protein, 202 aa, Homo sapiens
LGLLLFLLPGSLGAESHLSLLYHLTAVSSPAPGTPAFWVSGWLGPQQYLSYNSLRGEAEPCGAWVWENQVSWYWEKETTDLRIKEKLFLEAFKALGGKGPYTLQGLLGCELGPDNTSVPTAKFALNGEEFMNFDLKQGTWGGDWPEALAISQRWQQQDKAANKELTFLLFSCPHRLREHLERGRGNLEWKEPKARQIFCAWI

SEQ ID NO: 20178 - protein, 36 aa, Homo sapiens
LLLLLLRVFLESDHSLSAMPVLTKTDCLLLCYCPGP

SEQ ID NO: 20179 - protein, 113 aa, Homo sapiens
LAPSLSRPRRRQMQSQASSCPWALRDPLGRLLSLSHPQPQGGAVIVPEDKQYLFLTESPSPDPGTLGPKLSSKNRPNPSSSKSEPPPHRLKLPWPQPSPAWPGLGHLLSARRQ

SEQ ID NO: 20180 - protein, 163 aa, Homo sapiens
LSLVTVRRVEGSQPSAPPPSCHSVTRPVCLSPSRVDNSLWVQPVAPAHRQRLPTACFSLSPPPPPPRCLCASLWGFGDGHVSCCSAPPSLCPSLSPAASGYGTQNIRLSRDAVKDFDCCCLSLQPCHDPVVTPDGYLYEREAILEYILHQKKEIARQMKFHRL

SEQ ID NO: 20181 - protein, 124 aa, Homo sapiens
LSPWNPRMVSSLYLPASAGAPGPPDLITFTEGSGRSPRYALWFCVGESWPQDQPWTKRLVMVKVVPTCLRALVEMARVGGASSLENTVDLHISNSHPLSLTSDQYKAYLQDLVEGMDFQGPGES

SEQ ID NO: 20182 - protein, 43 aa, Homo sapiens
MPVARSWVCHKTYVTPRRPFEKSRLDQELKLIGEYGFRNKREV

SEQ ID NO: 20183 - protein, 1010 aa, Homo sapiens
VPRPASPPARPPASPPRGRLGSLALPGVLSARSPLASPRCSVPCPARPGADTTAIMPAVSKGDGMRGLAVFISDIRNCKSKEAEIKRINKELANIRSKFKGDKALDGYSKKKYVCKLLFIFLLGHDIDFGHMEAVNLLSSNKYTEKQIGYLFISVLVNSNSELIRLINNAIKNDLASRNPTFMCLALHCIANVGSREMGEAFAADIPRILVAGDSMDSVKQSAALCLLRLYKASPDLVPMGEWTARVVHLLNDQHMGVVTAAVSLITCLCKKNPDDFKTCVSLAVSRLSRIVSSASTDLQDYTYYFVPAPWLSVKLLRLLQCYPPPEDAAVKGRLVECLETVLNKAQEPPKSKKVQHSNAKNAILFETISLIIHYDSEPNLLVRACNQLGQFLQHRETNLRYLALESMCTLASSEFSHEAVKTHIDTVINALKTERDVSVRQRAADLLYAMCDRSNAKQIVSEMLRYLETADYAIREEIVLKVAILAEKYAVDYSWYVDTILNLIRIAGDYVSEEVWYRVLQIVTNRDDVQGYAAKTVFEALQAPACHENMVKVGGYILGEFGNLIAGDPRSSPPVQFSLLHSKFHLCSVATRALLLSTYIKFINLFPETKATIQGVLRAGSQLRNADVELQQRAVEYLTLSSVASTDVLATVLEEMPPFPERESSILAKLKRKKGPGAGSALDDGRRDPSSNDINGGMEPTPSTVSTPSPSADLLGLRAAPPPAAPPASAGAGNLLVDVFDGPAAQPSLGPTPEEAFLSPGPEDIGPPIPEADELLNKFVCKNNGVLFENQLLQIGVKSEFRQNLGRMYLFYGNKTSVQFQNFSPTVVHPGDLQTQLAVQTKRVAAQVDGGAQVQQVLNIECLRDFLTPPLLSVRFRYGGAPQALTLKLPVTINKFFQPTEMAAQDFFQRWKQLSLPQQEAQKIFKANHPMDAEVTKAKLLGFGSALLDNVDPNPENFVGAGIIQTKALQVGCLLRLEPNAQAQMYRLTLRTSKEPVSRHLCELLAQQF

SEQ ID NO: 20184 - protein, 329 aa, Homo sapiens
LALPGVLSARSPLASPRCSVPCPARPGADTTAIMPAVSKGDGMRGLAVFISDIRNCKSKEAEIKRINKELANIRSKFKGDKALDGYSKKKYVCKLLFIFLLGHDIDFGHMEAVNLLSSNKYTEKQIGYLFISVLVNSNSELIRLINNAIKNDLASRNPTFMCLALHCIANVGSREMGEAFAADIPRILVAGDSMDSVKQSAALCLLRLYKASPDLVPMGEWTARVVHLLNDQHMGVVTAAVSLITCLCKKNPDDFKTCVSLAVSRLSRIVSSASTDLQDYTYYFVPAPWLSVKLLRLLPCYLNYHSPVRGFHICWEPSPTAHSHNSQCV

SEQ ID NO: 20185 - protein, 89 aa, Homo sapiens
VVVAGTARGMVPGSEGPARAGSVVADVVFVIEGTANLGPYFEGLRKHYLLPAIEYFNGGPPAETDFGGDVSLGTPGPEGGGAGGLDSWV

SEQ ID NO: 20186 - protein, 111 aa, Homo sapiens
VVVAGTARGMVPGSEGPARAGSVVADVVFVIEGTANLGPYFEGLRKHYLLPAIEYFNGGPPAETDFGGDYGGTQYSLVVFNTVDCAPESYVQCHAPTSSAYEFVTWLDGIK

SEQ ID NO: 20187 - protein, 491 aa, Homo sapiens
VVVAGTARGMVPGSEGPARAGSVVADVVFVIEGTANLGPYFEGLRKHYLLPAIEYFNGGPPAPFSQAPAPQLPPGPPGAPKPPPASQPSLVSTVAPGSGLAPTAQPGAPSMAGTVAPGGVSGPSPAQLGAPALGGQQSVSNKLLAWSGVLEWQEKPKPASVDANTKLTRSLPCQVYVNHGENLKTEQWPQKLIMQLIPQQLLTTLGPLFRNSRMVQFHFTNKDLESLKGLYRIMGNGFAGCVHFPHTAPCEVRVLMLLYSSKKKIFMGLIPYDQSGFVNGIRQVITNHKQVQQQKLEQQQRGMGGQQAPPGLGPILEDQARPSQNLLQLRPPQPQPQGTVGASGATGQPQPQGTAQPPPGAPQGPPGAASGPPPPGPILRPQNPGANPQLRSLLLNPPPPQTGVPPPQASLHHLQPPGAPALLPPPHQGLGQPQLGPPLLHPPPAQSWPAQLPPRAPLPGQMLLSGGPRGPVPQPGLQPSVMEDDILMDLI

SEQ ID NO: 20188 - protein, 406 aa, Homo sapiens
VVVAGTARGMVPGSEGPARAGSVVADVVFVIEGTANLGPYFEGLRKHYLLPAIEYFNGGPPAETDFGGDYGGTQYSLVVFNTVDCAPESYVQCHAPTSSAYEFVTWLDGIKFMGGGGESCSLIAEGLSTALQLFDDFKKMREQIGQTHRVCLLICNSPPYLLPAVESTTYSGCTTENLVQQIGERGIHFSIVSPRKLPALRLLFEKAAPPALLEPLQPPTDVSQDPRHMVLVRGLVLPVGGGSAPGPLQSKQPVPLPPAAPSGATLSAAPQQPLPPVPPQYQVPGNLSAAQVAAQNAVEAAKNQKAGLGPRFSPITPLQQAAPGVGPPFSQAPAPALLPPPHQGLGQPQLGPPLLHPPPAQSWPAQLPPRAPLPGQMLLSGGPRGPVPQPGLQPSVMEDDILMDLI

SEQ ID NO: 20189 - protein, 189 aa, Homo sapiens
VVVAGTARGMVPGSEGPARAGSVVADVVFVIEGTANLGPYFEGLRKHYLLPAIEYFNGAPQGPPGAASGPPPPGPILRPQNPGANPQLRSLLLNPPPPQTGVPPPQASLHHLQPPGAPALLPPPHQGLGQPQLGPPLLHPPPAQSWPAQLPPRAPLPGQMLLSGGPRGPVPQPGLQPSVMEDDILMDLI

SEQ ID NO: 20190 - protein, 242 aa, Homo sapiens
VVVAGTARGMVPGSEGPARAGSVVADVVFVIEGTANLGPYFEGLRKHYLLPAIEYFNGGPPAETDFGGDYGGTQYSLVVFNTVDCAPESYVQCHAPTSSAYEFVTWLDGIKFMGGGGESCSLIAEGLSTALQLFDDFKKMREQIGQTHRVCLLICNSPPASLHHLQPPGAPALLPPPHQGLGQPQLGPPLLHPPPAQSWPAQLPPRAPLPGQMLLSGGPRGPVPQPGLQPSVMEDDILMDLI

SEQ ID NO: 20191 - protein, 114 aa, Homo sapiens
VAAIPRLREPGGDPEDRAVAKEAVHAAHPAAAADHPSAAVPELAPGPVPLHQGPGDTEEPVPDHGQWLQKKIFIGLIPHDQGNFVNGIRRVIANQQQVLQRNLEQEQQQRGMGG

SEQ ID NO: 20192 - protein, 51 aa, Homo sapiens
MGQLLCFPPSDKGFARTALAPSPSRWTALFLIGSNPVKGLTSLYIVTVRFS

SEQ ID NO: 20193 - protein, 44 aa, Homo sapiens
MLIRGCPISLRGATAGRAERIREEEGADGVGAPRGAVGGRGGGR

SEQ ID NO: 20194 - protein, 141 aa, Homo sapiens
VVAARPVLEKERVKPFFRRGLFHWNLEGGSESRGADAEGGSGYGECAGAVFALSPRSKQVGGSESCTTWGKHALKRPLPSPYCILELKPRRYHFARGHGLSRSAKAMLIRGCPISLRGATAGRAERIREEEVRGAVHHKRH

SEQ ID NO: 20195 - protein, 171 aa, Homo sapiens
LRLPGFPGLRLSLLLFPVAAHLVQEGIPLPGCPSAVGGAVDRAPWPQSAPAGGLRHPGHGEGHPHAVRLRLHKVLRHINELTMKLSVEDVLTRAEALHRQLTACPELPHNVQEILGLAPPAEPHSPSPTASPLPLSPTRAPPTPPPSTDTAPQPDSSLEILPEEEDEGADS

SEQ ID NO: 20196 - protein, 28 aa, Homo sapiens
LSHLLNERTMKPSVTSVHRNSHSFQWWP

SEQ ID NO: 20197 - protein, 58 aa, Homo sapiens
LAHSVFYQWGWPYPRQGSYVREQDRKAQATASSRQATATVSSLLPHRVSGLPLSISSF

SEQ ID NO: 20198 - protein, 22 aa, Homo sapiens
LSLLITSLAYFWISFPPFSSKS

SEQ ID NO: 20199 - protein, 24 aa, Homo sapiens
LQKPRIPPQSPSTEVAVKMEFPTQ

SEQ ID NO: 20200 - protein, 11 aa, Homo sapiens
MATYRLLFGKG

SEQ ID NO: 20201 - protein, 931 aa, Homo sapiens
LGLVLLLLDILGARQHGQRVSHGWKGGFLTAPLCFPQPCQPGTRRGRRRSLKEATEPQLAMAEEFVTLKDVGMDFTLGDWEQLGLEQGDTFWDTALDNCQDLFLLDPPRPNLTSHPDGSEDLEPLAGGSPEATSPDVTETKNSPLMEDFFEEGFSQEIIEMLSKDGFWNSNFGEACIEDTWLDSLLGDPESLLRSDIATNGESPTECKSHELKRGLSPVSTVSTGEDSMVHNVSEKTLTPAKSKEYRGEFFSYSDHSQQDSVQEGEKPYQCSECGKSFSGSYRLTQHWITHTREKPTVHQECEQGFDRNASLSVYPKTHTGYKFYVCNEYGTTFSQSTYLWHQKTHTGEKPCKSQDSDHPPSHDTQPGEHQKTHTDSKSYNCNECGKAFTRIFHLTRHQKIHTRKRYECSKCQATFNLRKHLIQHQKTHAAKTTSECQECGKIFRHSSLLIEHQALHAGEEPYKCNERGKSFRHNSTLKIHQRVHSGEKPYKCSECGKAFHRHTHLNEHRRIHTGYRPHKCQECVRSFSRPSHLMRHQAIHTAEKPYSCAECKETFSDNNRLVQHQKMHTVKTPYECQECGERFICGSTLKCHESVHAREKQGFFVSGKILDQNPEQKEKCFKCNKCEKTFSCSKYLTQHERIHTRGVKPFECDQCGKAFGQSTRLIHHQRIHSRVRLYKWGEQGKAISSASLIKLQSFHTKEHPFKCNECGKTFSHSAHLSKHQLIHAGENPFKCSKCDRVFTQRNYLVQHERTHARKKPLVCNECGKTFRQSSCLSKHQRIHSGEKPYVCDYCGKAFGLSAELVRHQRIHTGEKPYVCQECGKAFTQSSCLSIHRRVHTGEKPYRCGECGKAFAQKANLTQHQRIHTGEKPYSCNVCGKAFVLSAHLNQHLRVHTQETLYQCQRCQKAFRCHSSLSRHQRVHNKQQYCL

SEQ ID NO: 20202 - protein, 497 aa, Homo sapiens
VWVPSELHGFEAAALRDEGEEEAEVELAESGRRLRLPRDQIQRMNPPKFSKAEDMAELTCLNEASVLHNLRERYYSGLIYTYSGLFCVVINPYKQLPIYTEAIVEMYRGKKRHEVPPHVYAVTEGAYRSMLQDREDQSILCTGESGAGKTENTKKVIQYLAHVASSPKGRKEPGVPGELERQLLQANPILEAFGNAKTVKNDNSSRFGKFIRINFDVAGYIVGANIETYLLEKSRAIRQAKDECSFHIFYQLLGGAGEQLKADLLLEPCSHYRFLTNGPSSSPGQERELFQETLESLRVLGFSHEEIISMLRMVSAVLQFGNIALKRERNTDQATMPDNTAAQKLCRLLGLGVTDFSRALLTPRIKVGRDYVQKAQTKEQADFALEALAKATYERLFRWLVLRLNRALDRSPRQGASFLGILDIAGFEIFQLNSFEQLCINYTNEKLQQLFNHTMFVLEQEEYQREGRRRGWGPGPAAEIPAGGSSSPGRGPGGPGV

SEQ ID NO: 20203 - protein, 325 aa, Homo sapiens
MSPPLLLLPLLLLLPLLNVEPAGATLIRIPLRQVHPGRRTLNLLRGWGKPAELPKLGAPSPGDKPASVPLSKFLDAQYFGEIGLGTPPQNFTVAFDTGSSNLWVPSRRCHFFSVPCWFHHRFNPNASSSFKPSGTKFAIQYGTGRVDGILSEDKLTIGGIKGASVIFGEALWESSLVFTVSRPDGILGLGFPILSVEGVRPPLDVLVEQGLLDKPVFSFYFNRDPEVADGGELVLGGSDPAHYIPPLTFVPVTVPAYWQIHMERVKVGSRLTLCAQGCAAILDTGTPVIVGPTEEIRALHAAIGGIPLLAGEVRSQSLVGVSWGR

SEQ ID NO: 20204 - protein, 117 aa, Homo sapiens
MSPPLLLLPLLLLLPLLNVEPAGATLIRIPLRQVHPGRRTLNLLRGWGKPAELPKLGAPSPGDKPASVPLSKFLDAQYFGEIGLGTPPQNFTVAFDTGSSNLWVPSRRCHFFSVPCL

SEQ ID NO: 20205 - protein, 88 aa, Homo sapiens
MSPPPLLQPLLLLLPLLNVEPSGATLIRIPLHRVQPGRRILNLLRGWREPAELPKLGAPSPGDKPIFVPLSNYRDVSHSPTQPSPLRP

SEQ ID NO: 20206 - protein, 35 aa, Homo sapiens
LRSLPPQWHIILGGAVLLTALRPAAPGPAPPPQEA

SEQ ID NO: 20207 - protein, 75 aa, Homo sapiens
MRKPLARWSGEAGGQEPRTACPRPREHSRAHPPCTTNGSAWSCVLSTPSTTFCSSSSLARRLPMRSARGWPQTPG

SEQ ID NO: 20208 - protein, 48 aa, Homo sapiens
LMLSSELPDAGDKTIVSIISLPLFVSPRDSVSSLVQEDSSGSRQYSFP

SEQ ID NO: 20209 - protein, 268 aa, Homo sapiens
LDTSVTMWFLVLCLALSLGGTGAAPPIQSRIVGGWECEQHSQPWQAALYHFSTFQCGGILVHRQWVLTAAHCISDNYQLWLGRHNLFDDENTAQFVHVSESFPHPGFNMSLLENHTRQADEDYSHDLMLLRLTEPADTITDAVKVVELPTEEPEVGSTCLASGWGSIEPENFSFPDDLQCVDLKILPNDECKKAHVQKVTDFMLCVGHLEGGKDTCVGDSGGPLMCDGVLQGVTSWGYVPCGTPNKPSVAVRVLSYVKWIEDTIAENS

SEQ ID NO: 20210 - protein, 178 aa, Homo sapiens
LDTSVTMWFLVLCLALSLGGTGAAPPIQSRIVGGWECEQHSQPWQAALYHFSTFQCGGILVHRQWVLTAAHCISDNYQLWLGRHNLFDDENTAQFVHVSESFPHPGFNMSLLENHTRQADEDYSHDLMLLRLTEPADTITDAVKVVELPTEEPEVGSTCLASGWGSIEPENCMWGQTV

SEQ ID NO: 20211 - protein, 188 aa, Homo sapiens
LAVDTCVSMWDLVLSIALSVGCTGAVPLIQSRIVGGWECEKHSQPWQVAVYSHGWAHCGGVLVHPQWVLTAAHCLKKNSQVWLGRHNLFEPEDTGQRVPVSHSFPHPLYNMSLLKHQSLRPDEDSSHDLMLLRLSEPAKITDVVKVLGLPTQEPALGTTCYASGWGSIEPEECTPGPDGVAGSPDAWV

SEQ ID NO: 20212 - protein, 204 aa, Homo sapiens
MATARPPWMWVLCALITALLLGVTEHVLANNDVSCDHPSNTVPSGSNQDLGAGAGEDARSDDSSSRIINGSDCDMHTQPWQAALLLRPNQLYCGAVLVHPQWLLTAAHCRKKVFRVRLGHYSLSPVYESGQQMFQGVKSIPHPGYSHPGHSNDLMLIKLNRRIRPTKDVRPINVSSHCPSAGTKCLVSGWGTTKSPQGECPGSS

SEQ ID NO: 20213 - protein, 253 aa, Homo sapiens
MWLPLSGAAMKKLMVVLSLIAAAWAEEQNKLVHGGPCDKTSHPYQAALYTSGHLLCGGVLIHPLWVLTAAHCKKPNLQVFLGKHNLRQRESSQEQSSVVRAVIHPDYDAASHDQDIMLLRLARPAKLSELIQPLPLERDCSANTTSCHILGWGKTADGDFPDTIQCAYIHLVSREECEHAYPGQITQNMLCAGDEKYGKDSCQGDSGGPLVCGDHLRGLVSWGNIPCGSKEKPGVYTNVCRYTNWIQKTIQAK

SEQ ID NO: 20214 - protein, 270 aa, Homo sapiens
LPPRLKAVPSPDSRIPGARRPAAGAAMKKLMVVLSLIAAAWAEEQNKLVHGGPCDKTSHPYQAALYTSGHLLCGGVLIHPLWVLTAAHCKKPNLQVFLGKHNLRQRESSQEQSSVVRAVIHPDYDAASHDQDIMLLRLARPAKLSELIQPLPLERDCSANTTSCHILGWGKTADGDFPDTIQCAYIHLVSREECEHAYPGQITQNMLCAGDEKYGKDSCQGDSGGPLVCGDHLRGLVSWGNIPCGSKEKPGVYTNVCRYTNWIQKTIQAK

SEQ ID NO: 20215 - protein, 259 aa, Homo sapiens
LGVCVWQSLQPWALRPLRPPLGSATASECLLSSRLPAFLTLSASSSQSCSFPRLKNPRSPEACSRSGHEEADGGAESDCCRNLQVFLGKHNLRQRESSQEQSSVVRAVIHPDYDAASHDQDIMLLRLARPAKLSELIQPLPLERDCSANTTSCHILGWGKTADGDFPDTIQCAYIHLVSREECEHAYPGQITQNMLCAGDEKYGKDSCQGDSGGPLVCGDHLRGLVSWGNIPCGSKEKPGVYTNVCRYTNWIQKTIQAK

SEQ ID NO: 20216 - protein, 285 aa, Homo sapiens
LARSLLGTQRSAGSTQRDLRAAVPSPDSRIPGARRPAAGAAMKKLMVVLSLIAAAWAEEQNKLVHGGPCDKTSHPYQAALYTSGHLLCGGVLIHPLWVLTAAHCKKPNLQVFLGKHNLRQRESSQEQSSVVRAVIHPDYDAASHDQDIMLLRLARPAKLSELIQPLPLERDCSANTTSCHILGWGKTADGDFPDTIQCAYIHLVSREECEHAYPGQITQNMLCAGDEKYGKDSCQGDSGGPLVCGDHLRGLVSWGNIPCGSKEKPGVYTNVCRYTNWIQKTIQAK

SEQ ID NO: 20217 - protein, 238 aa, Homo sapiens
LSPRLAGSLSPGDTEVGRQHTEGPTGSCSFPRLKNPRSPEACSRSGHEEADGGAESDCCRNLQVFLGKHNLRQRESSQEQSSVVRAVIHPDYDAASHDQDIMLLRLARPAKLSELIQPLPLERDCSANTTSCHILGWGKTADGDFPDTIQCAYIHLVSREECEHAYPGQITQNMLCAGDEKYGKDSCQGDSGGPLVCGDHLRGLVSWGNIPCGSKEKPGVYTNVCRYTNWIQKTIQAK

SEQ ID NO: 20218 - protein, 66 aa, Homo sapiens [sequence omitted]

SEQ ID NO: 20219 - protein, 261 aa, Homo sapiens
VHVPGSRCPGVMKLGLLCALLSLLAGHGWADTRAIGAEECRPNSQPWQAGLFHLTRLFCGATLISDRWLLTAAHCRKPYLWVRLGEHHLWKWEGPEQLFRVTDFFPHPGFNKDLSANDHNDDIMLIRLPRQARLSPAVQPLNLSQTCVSPGMQCLISGWGAVSSPKALFPVTLQCANISILENKLCHWAYPGHISDSMLCAGLWEGGRGSCQGDSGGPLVCNGTLAGVVSGGAEPCSRPRRPAVYTSVCHYLDWIQEIMEN

SEQ ID NO: 20220 - protein, 479 aa, Homo sapiens
LRNRRSLAALAPLTPDMLLLLLPLLWGRERAEGQTSKLLTMQSSVTVQEGLCVHVPCSFSYPSHGWIYPGPVVHGYWFREGANTDQDAPVATNNPARAVWEETRDRFHLLGDPHTKNCTLSIRDARRSDAGRYFFRMEKGSIKWNYKHHRLSVNVTALTHRPNILIPGTLESGCPQNLTCSVPWACEQGTPPMISWIGTSVSPLDPSTTRSSVLTLIPQPQDHGTSLTCQVTFPGASVTTNKTVHLNVSYPPQNLTMTVFQGDGTVSTVLGNGSSLSLPEGQSLRLVCAVDAVDSNPPARLSLSWRGLTLCPSQPSNPGVLELPWVHLRDAAEFTCRAQNPLGSQQVYLNVSLQSKATSGVTQGVVGGAGATALVFLSFCVIFVVVRSCRKKSARPAAGVGDTGIEDANAVRGSASQGPLTEPWAEDSPPDQPPPASARSSVGEGELQYASLSFQMVKPWDSRGQEATDTEYSEIKIHR

SEQ ID NO: 20221 - protein, 495 aa, Homo sapiens
LRNRRSLAALAPLTPDMLLLLLPLLWGRERAEGQTSKLLTMQSSVTVQEGLCVHVPCSFSYPSHGWIYPGPVVHGYWFREGANTDQDAPVATNNPARAVWEETRDRFHLLGDPHTKNCTLSIRDARRSDAGRYFFRMEKGSIKWNYKHHRLSVNVTALTHRPNILIPGTLESGCPQNLTCSVPWACEQGTPPMISWIGTSVSPLDPSTTRSSVLTLIPQPQDHGTSLTCQVTFPGASVTTNKTVHLNVSYPPQNLTMTVFQGDGTVSTVLGNGSSLSLPEGQSLRLVCAVDAVDSNPPARLSLSWRGLTLCPSQPSNPGVLELPWVHLRDAAEFTCRAQNPLGSQQVYLNVSLQSKATSGVTQGVVGGAGATALVFLSFCVIFVVVRSCRKKSARPAAGVGDTGIEDANAVRGSASQILNHFIGFPTFLGLGFEFLLNLRDLCCHPDSEFYVYHFSHFRLIKNIAGEIVWSLEGKILWLLDVSDFFHWFFLICVG

SEQ ID NO: 20222 - protein, 483 aa, Homo sapiens
LRNRRSLAALAPPTPDMLLLLLLPLLWGRERVEGQKSNRKDYSLTMQSSVTVQEGMCVHVRCSFSYPVDSQTDSDPVHGYWFRAGNDISWKAPVATNNPAWAVQEETRDRFHLLGDPQTKNCTLSIRDARMSDAGRYFFRMEKGNIKWNYKYDQLSVNVTALTHRPNILIPGTLESGCFQNLTCSVPWACEQGTPPMISWMGTSVSPLHPSTTRSSVLTLIPQPQHHGTSLTCQVTLPGAGVTTNRTIQLNVSYPPQNLTVTVFQGEGTASTALGNSSSLSVLEGQSLRLVCAVDSNPPARLSWTWRSLTLYPSQPSNPLVLELQVHLGDEGEFTCRAQNSLGSQHVSLNLSLQQEYTGKMRPVSGVLLGAVGGAGATALVFLSFCVIFIVVRSCRKKSARPAADVGDIGMKDANTIRGSASQGNLTESWADDNPRHHGLAAHSSGEEREIQYAPLSFHKGEPQDLSGQEATNNEYSEIKIPK

SEQ ID NO: 20223 - protein, 390 aa, Homo sapiens
LRNRRSLAALAPPTPDMLLLLLLPLLWGRERVEGQKSNRKDYSLTMQSSVTVQEGMCVHVRCSFSYPVDSQTDSDPVHGYWFRAGNDISWKAPVATNNPAWAVQEETRDRFHLLGDPQTKNCTLSIRDARMSDAGRYFFRMEKGNIKWNYKYDQLSVNVTDPPQNLTVTVFQGEGTASTALGNSSSLSVLEGQSLRLVCAVDSNPPARLSWTWRSLTLYPSQPSNPLVLELQVHLGDEGEFTCRAQNSLGSQHVSLNLSLQQEYTGKMRPVSGVLLGAVGGAGATALVFLSFCVIFIVVRSCRKKSARPAADVGDIGMKDANTIRGSASQGNLTESWADDNPRHHGLAAHSSGEEREIQYAPLSFHKGEPQDLSGQEATNNEYSEIKIPK

SEQ ID NO: 20224 - protein, 88 aa, Homo sapiens
MPLLLLLPLLWAGALAMDPKIRLQVQESVTVQEGLCVLVPCTFSHPIPYYNRNFSVHGYWFREGAIVSRDSPVATNKLDQEVQEETQG

SEQ ID NO: 20225 - protein, 317 aa, Homo sapiens
LEAASSDMPLLLLLPLLWAGALAMDPNFWLQVQESVTVQEGLCVLVPCTFFHPIPYYDKNSPVHGYWFREGAIISRDSPVATNKLDQEVQEETQGRFRLLGDPSRNNCSLSIVDARRRDNGSYFFRMERGSTKYSYKSPQLSVHVTDLTHRPKILIPGTLEPGHSKNLTCSVSWACEQGTPPIFSWLSAAPTSLGPRTTHSSVLIITPRPQDHGTNLTCQVKFAGAGVTTERTIQLNVTYVPQNPTTGIFPGDGSGKQETRAGVVHGAIGGAGVTALLALCLCLIFFIVKTHRRKAARTAVGRNDTHPTTGSASPVR

SEQ ID NO: 20226 - protein, 371 aa, Homo sapiens
LEAASSDMPLLLLLPLLWAGALAMDPNFWLQVQESVTVQEGLCVLVPCTFFHPIPYYDKNSPVHGYWFREGAIISRDSPVATNKLDQEVQEETQGRFRLLGDPSRNNCSLSIVDARRRDNGSYFFRMERGSTKYSYKSPQLSVHVTDLTHRPKILIPGTLEPGHSKNLTCSVSWACEQGTPPIFSWLSAAPTSLGPRTTHSSVLIITPRPQDHGTNLTCQVKFAGAGVTTERTIQLNVTYVPQNPTTGIFPGDGSGKQETRAGVVHGAIGGAGVTALLALCLCLIFFIVKTHRRKAARTAVGRNDTHPTTGSASPKHQKKSKLHGPTETSSCSGAAPTVEMDEELHYASLNFHGMNPSKDTSTEYSEVRTQ

SEQ ID NO: 20227 - protein, 138 aa, Homo sapiens
MLLPLLLSSLLGALTQKPDVYIPETLEPGQPVTVICVFNWAFEECPPPSFSWTGAALSSQGTKPTTSHFSVLSFTPRPQDHNTDLTCHVDFSRKGVSAQRTVRLRVAYAPRDLVISISRDNTPGTEGRRAGAGPVVFR

SEQ ID NO: 20228 - protein, 185 aa, Homo sapiens
MLLPLLLSSLLGGSQAMDGRFWIRVQESVMVPEGLCISVPCSFSYPRQDWTGSTPAYGYWFKAVTETTKGAPVATNHQSREVEMSTRGRFQLTGDPAKGNCSLVIRDAQMQDESQYFFRVERGSYVRYNFMNDGFFLKVTGMEWGGNPCLSHWGGTLGTAYGLSREGSQGPLQHKNLPPRSLSQP

SEQ ID NO: 20229 - protein, 9 aa, Homo sapiens
LGILAVGVL

SEQ ID NO: 20230 - protein, 640 aa, Homo sapiens
LDKPHIVWGPQYLHLRRPVGVGAEWLPSPRLTPTARDAQVPLLCASTALTHPPASCRGFLSPTPRLDIWSISFPDSRTWDWAGALADGDMLPLLLLPLLWGGSLQEKPVYELQVQKSVTVQEGLCVLVPCSFSYPWRSWYSSPPLYVYWFRDGEIPYYAEVVATNNPDRRVKPETQGRFRLLGDVQKKNCSLSIGDARMEDTGSYFFRVERGRDVKYSYQQNKLNLEVTALIEKPDIHFLEPLESGRPTRLSCSLPGSCEAGPPLTFSWTGNALSPLDPETTRSSELTLTPRPEDHGTNLTCQMKRQGAQVTTERTVQLNVSYAPQTITIFRNGIALEILQNTSYLPVLEGQALRLLCDAPSNPPAHLSWFQGSPALNATPISNTGILELRRVRSAEEGGFTCRAQHPLGFLQIFLNLSVYSLPQLLGPSCSWEAEGLHCRCSFRARPAPSLCWRLEEKPLEGNSSQGSFKVNSSSAGPWANSSLILHGGLSSDLKVSCKAWNIYGSQSGSVLLLQGRSNLGTGVVPAALGGAGVMALLCICLCLIFFLIVKARRKQAAGRPEKMDDEDPIMGTITSGSRKKPWPDSPGDQASPPGDAPPLEEQKELHYASLSFSEMKSREPKDQEAPSTTEYSEIKTSK

SEQ ID NO: 20231 - protein, 401 aa, Homo sapiens
LADGDMLPLLLLPLLWGGSLQEKPVYELQVQKSVTVQEGLCVLVPCSFSYPWRSWYSSPPLYVYWFRDGEIPYYAEVVATNNPDRRVKPETQGRFRLLGDVQKKNCSLSIGDARMEDTGSYFFRVERGRDVKYSYQQNKLNLEVTALIEKPDIHFLEPLESGRPTRLSCSLPGSCEAGPPLTFSWTGNALSPLDPETTRSSELTLTPRPEDHGTNLTCQVKRQGAQVTTERTVQLNVSYAPQNLAISIFFRNGTGTALRILSNGMSVPIQEGQSLFLACTVDSNPPASLSWFREGKALNPSQTSMSGTLELPNIGAREGGEFTCRVQHPLGSQHLSFILSVQRSSSSCICVTEKQQGSWPLVLTLIRGALMGAGFLLTYGLTWIYYTRCGGPQQSRAERPG

SEQ ID NO: 20232 - protein, 270 aa, Homo sapiens
LTSDPRPLALPPPCGDFIKVTSFSPGLETHTMALLALASAVPSALLALAVFRVPAWACLLCFTTYSERLRICQMFVGMRSPKLEECEEAFTAAFQGLSDTEISEETIHTSSVSWGRCRGRAGEAQRVRLRDRQRETVRGERLKDHENNRDLGTERHRQGKTAGQRLREGRMESQRGEDGDSEREDGDSEREEDGDSEMETQEYGESERGGWTLGGWRVRRMETHRKGRMESQERLETGEGIETQRGEDGDSEGGRWRLKEDGNPERGGQR

SEQ ID NO: 20233 - protein, 18 aa, Homo sapiens
MFQGQGERAFFFLLFASA

SEQ ID NO: 20234 - protein, 9 aa, Homo sapiens
MLSSKNRRK

SEQ ID NO: 20235 - protein, 23 aa, Homo sapiens
MANAEETKTYSPCYPLFSEHRRK

SEQ ID NO: 20236 - protein, 26 aa, Homo sapiens
LGKGHVAMSVFQSTWIKRLLLFVYLD

SEQ ID NO: 20237 - protein, 27 aa, Homo sapiens
MGLLLFFAVTKNVTVAACMHAIFTTDV

SEQ ID NO: 20238 - protein, 10 aa, Homo sapiens
LAALVFRVLV

SEQ ID NO: 20239 - protein, 20 aa, Homo sapiens
LFIHCSSLATSYWRETLQMS

SEQ ID NO: 20240 - protein, 736 aa, Homo sapiens
LVREEETQKRKRKAKESGMALPQGLLTFRDVAIEFSQEEWKCLDPAQRTLYRDVMLENYRNLVSLDISSKCMMKTFFSTGQGNTEAFHTGTLQRQASHHIGDFCFQKIEKDIHGFQFQWKEDETNDHAAPMTEIKELTGSTGQHDQRHAGNKHIKDQLGLSFHSHLPELHIFQPEGKIGNQVEKSINNASSVSTSQRICCRPKTHISNKYGNNSLHSSLLTQKRNVHMREKSFQCIESGKSFNCSSLLKKHQITHLEEKQCKCDVYGKVFNQKRYLACHRRSHIDEKPYKCNECGKIFGHNTSLFLHKALHTADKPYECEECDKVFSRKSHLETHKIIYTGGKPYKCKVCDKAFTCNSYLAKHTIIHTGEKPYKCNECGKVFNRLSTLARHRRLHTGEKPYECEECEKVFSRKSHLERHKRIHTGEKPYKCKVCDKAFAYNSYLAKHSIIHTGEKPYKCNECGKVFNQQSTLARHHRLHTAEKPYKCEECDKVFRCKSHLERHRRIHTGEKPYKCKVCDKAFRSDSCLTEHQRVHTGEKPYMCNECGKVFSTKANLACHHKLHTAEKPYKCEECEKVFSRKSHMERHRRIHTGEKPYKCKVCDKAFRRDSHLAQHQRVHTGEKPYKCNECGKTFRQTSSLIIHRRLHTGEKPYKCNECGKTFSQMSSLVYHHRLHSGEKPYKCNECGKVFNQQAHLAQHQRVHTGEKPYKCNECGKTFSQMSNLVYHHRLHSGEKP

SEQ ID NO: 20241 - protein, 32 aa, Homo sapiens
MLLMYMSLFSAVMTLLSVMDSFLETLLWSGFT

SEQ ID NO: 20242 - protein, 36 aa, Homo sapiens
LGEGDGVEPLTSKDSWHMRKKPRRGEQRSQEWLLLS

SEQ ID NO: 20243 - protein, 527 aa, Homo sapiens
VEMPGPCSEGFVQGRDVGELQEPGLPGELPPKENNSTGKVFQAVMLERHEIHDIQDFYFREMQQNIHDFECQCHNDERNYREIPAIKIKNITGRRDQGDGRNAGNKPVENQLELSFWLHLAELQGFQIERKIYECNQIEKSVTRGSSVSLLQTNLPCVNTSISNIYRNDFMHPSLLTQDQKAYIREKPYKCSDCGKAFNQRSNLTTHQRIHTGQKPHKCDICGKGFRRIANLASHHRIHTGEKPYRCNECGKTFNQTFNLTTHQRIHTGQKPYKCDRCGKGFRQIGNLASHHRIHTGEKPYRCNECGKTFNRMFHLTRHQRIHTGQKPYKCDICGKGFRQIANLASHHRIHTGEKPYKCSDCGKTFNYRSHLTRHQRIHTGQKPYKCDTCGKDFSQNSYLENHQRIHTREKSYRCNECGKTFNKMTNLTTHQRIHTGQKTYKCDICGKGFRQIGNLASHHRIHTGEKPYRCNECGKTFNRMFHLTRHQRIHTGQKPYKCDICGKSFSQNSYLENHQRIHTGEKTYKL

SEQ ID NO: 20244 - protein, 64 aa, Homo sapiens
MHAKAFFFFFLRWSLALSPRLECIGPILAHHNLRLLDSSNSASASQVAGTTGACHHTRLIFCIF

SEQ ID NO: 20245 - protein, 20 aa, Homo sapiens
LRPFRIKIVLKWVLAPTFLL

SEQ ID NO: 20246 - protein, 58 aa, Homo sapiens
MCDDSGKAFTSHLMRHQRMHTGQKSYKCHQCAKVFSLSSLLAEYEKIHFGGSWSICNE

SEQ ID NO: 20247 - protein, 44 aa, Homo sapiens [sequence omitted]

SEQ ID NO: 20248 - protein, 53 aa, Homo sapiens
LDLIPTAPETLFHLLMCWVWLGLEPGAICLPGGSQGRVPRGMAVREPLGTRRP

SEQ ID NO: 20249 - protein, 287 aa, Homo sapiens
MSQAWWHTSVSPATQEAKAGGLLQPRRQRLWLKRCRISSSACEDLSAALIANKNLTRMDLSGNGVGFPGMMLLCEGLRHPQCRLQMIQLRKCQLESGACQEMASVLGTNPHLVELDLTGNALEDLGLRLLCQGLRHPVCRLRTLWLKICRLTAAACDELASTLSVNQSLRELDLSLNELGDLGVLLLCEGLRHPTCKLQTLRLDSCGLTAKACENLYFTLGINQTLTDLYLTNNALGDTGVRLLCKRLSHPGCKLRVLWLFGMDLNKMTHSRLAALRVTKPYLDIGC

SEQ ID NO: 20250 - protein, 274 aa, Homo sapiens
LWRAPLGTKRRRTPLSVDCTTQPTHLPTLQAPSGPPSLAALASLTARGPLPGQDPFLSIRGWDTSRRREGAWLSCMSVPHPHPPPPSPEKAASLEYDYETIRNIDCYSTDFCVRVRDGMRYWNMTVQWWLAQYIYKSAPARSYVLRSAWTMLLSAYWHGLHPGYYLSFLTIPLCLAAEGRLESALRGRLSPGGQKAWDWVHWFLKMRAYDYMCMGFVLLSLADTLRYWASIYFCIHFLALAALGLGLALGGGSPSRRKAASQPTSLAPEKLREE

SEQ ID NO: 20251 - protein, 632 aa, Homo sapiens
MTPTLAALLCLGLSLGPRTHVQAGPFPKPTLWAEPGSVISWGSPVTIWCQGSLEAQEYRLDKEGSPEPWDRNNPLEPKNKARFSIPSITEHHAGRYRCHYYSSAGWSEPSDPLELVMTGAYSKPTLSALPSPVVASGGNMTLQCGSQKGYHHFVLMKEGEHQLPRTLDSQQLHSGGFQALFPVGPVNPSHRWRFTCYYYYMNTPRVWSHPSDPLEILPSGVSRKPSLLTLQGPVLAPGQSLTLQCGSDVGYDRFVLYKEGERDFLQRPGQQPQAGLSQANFTLGPVSRSYGGQYRCYGAHNLSSEWSAPSDPLDILITGQIYDTVSLSAQPGPTVASGENMTLLCQSRGYFDTFLLTKEGAAHPPLRLRSMYGAHKYQAEFPMSPVTSAHAGTYRCYGSRSSNPHLLSFPSEPLELMVSGHSGGSSLPPTGPPSTPGLGRYLEVLIGVSVAFVLLLFLLLFLLLLRQRHSKHRTSDQRKTDFQRPAGAAETEPKDRGLLRRSSPAADVQEENLYAAVKDTQSEDRVELDSQQSPHDEDPQAVTYAPVKHSSPRREMASPPSSLSGEFLDTKDRQVEEDRQMDTEAAASEASQDVTYAQLHSLTLRRKATEPPPSQEGEPPAEPSIYATLAIH

SEQ ID NO: 20252 - protein, 632 aa, Homo sapiens
MTPTLAALLCLGLSLGPRTHVQAGPFPKPTLWAEPGSVISWGSPVTIWCQGSLEAQEYRLDKEGSPEPWDRNNPLEPKNKARFSIPSITEHHAGRYRCHYYSSAGWSEPSDPLELVMTGAYSKPTLSALPSPVVASGGNMTLQCGSQKGYHHFVLMKEGEHQLPRTLDSQQLHSGGFQALFPVGPVNPSHRWRFTCYYYYMNTPRVWSHPSDPLEILPSGVSRKPSLLTLQGPVLAPGQSLTLQCGSDVGYDRFVLYKEGERDFLQRPGQQPQAGLSQANFTLGPVSPSHGGQYRCYGAHNLSSEWSAPSDPLNILMAGQIYDTVSLSAQPGPTVASGENVTLLCQSWWQFDTFLLTKEGAAHPPLRLRSMYGAHKYQAEFPMSPVTSAHAGTYRCYGSYSSNPHLLSFPSEPLELMVSGHSGGSSLPPTGPPSTPGLGRYLEVLIGVSVAFVLLLFLLLFLLLLRQRHSKHRTSDQRKTDFQRPAGAAETEPKDRGLLRRSSPAADVQEENLYAAVKDTQSEDRVELDSQQSPHDEDPQAVTYAPVKHSSPRREMASPPSSLSGEFLDTKDRQVEEDRQMDTEAAASEASQDVTYAQLHSLTLRRKATEPPPSQEGEPPAEPSIYATLAIH

SEQ ID NO: 20253 - protein, 59 aa, Homo sapiens
LSPVGADAMTLTLSVLICLGLSVGPRTCVQAGGTPMGPEETEPTGAWSQGQVPHSIHGV

SEQ ID NO: 20254 - protein, 584 aa, Homo sapiens
LQHGPGSSLKHLQGWRDDCHAPRAHPSAEQGSGRRRHDPHRHSPDLSREKKSASWITRIRPELVKNGQFHIPSITWEHTGRYGCQYYSRARWSELSDPLVLVMTGAYPKPTLSAQPSPVVTSGGRVTLQCESQVAFGGFILCKEGEDEHPQCLNSQPHARGSSRAIFSVGPVSPNRRWSHRCYGYDLNSPYVWSSPSDLLELLVPGVSKKPSLSVQPGPVMAPGESLTLQCVSDVGYDRFVLYKEGERDLRQLPGRQPQAGLSQANFTLGPVSRSYGGQYRCYGAHNLSSECSAPSDPLDILITGQIRGTPFISVQPGPTVASGENVTLLCQSWRQFHTFLLTKAGAADAPLRLRSIHEYPKYQAEFPMSPVTSAHAGTYRCYGSLNSDPYLLSHPSEPLELVVSGPSMGSSPPPTGPISTPAGPEDQPLTPTGSDPQSGLGRHLGVVIGILVAVVLLLLLLLLLFLILRHRRQGKHWTSTQRKADFQHPAGAVGPEPTDRGLQWRSSPAADAQEENLYAAVKDTQPEDGVEMDTRAAASEAPQDVTYAQLHSLTLRRKATEPPPSQEREPPAEPSIYATLAIH

SEQ ID NO: 20255 - protein, 23 aa, Homo sapiens
MTLILTSLLFFGEILRGGGETLV

SEQ ID NO: 20256 - protein, 157 aa, Homo sapiens
LGIFLTGASLPVLCLAQTIHTQEEDLPRPSISAEPGTVIPLGSHVTFVCRGPVGVQTFRLERDSRSTYNDTEDVSQASPSESEARFRIDSKALEARTPRTQSPAPQLVSSRALSWRGLQGNLCCGCCSGSSPLPWAWSQGLGRPREGTDTHQALGGR

SEQ ID NO: 20257 - protein, 103 aa, Homo sapiens
LGIFLTGASLPVLCLAQTIHTQEEDLPRPSISAEPGTVIPLGSHVTFVCRGPVGVQTFRLERDSRSTYNDTEDVSQASPSESEARFRIDSVRKEMPGLSLHLL

SEQ ID NO: 20258 - protein, 44 aa, Homo sapiens
VAVLLIAWVVVGVSLQRRILTVKKQSGSRGPPLIPQGPDGGQRG

SEQ ID NO: 20259 - protein, 140 aa, Homo sapiens
LPNRSGTMAPKLITVLCLGFCLNQKICPHAGAQDKFSLSAWPSPVVPLGGRVTLSCHSHLRFVIWTIFQTTGTRSHELHTGLSNNITISPVTPEHAGTYRCVGIYKHASKWSAESNSLKIIVTGGPHDEAGREVDPLLQL

SEQ ID NO: 20260 - protein, 146 aa, Homo sapiens
LPNRSGTMAPKLITVLCLGFCLNQKICPHAGAQDKFSLSAWPSPVVPLGGRVTLSCHSHLRFVIWTIFQTTGTRSHELHTGLSNNITISPVTPEHAGTYRCVGIYKHASKWSAESNSLKIIVTAFSLHPGGPHDEAGREVDPLLQL

SEQ ID NO: 20261 - protein, 372 aa, Homo sapiens
LPNRSGTMAPKLITVLCLGFCLNQKICPHAGAQDKFSLSAWPSPVVPLGGRVTLSCHSHLRFVIWTIFQTTGTRSHELHTGLSNNITISPVTPEHAGTYRCVGIYKHASKWSAESNSLKIIVTGLFTKPSISAHPSSLVHAGARVSLRCHSELAFDEFILYKEGHIQHSQQLDQGMEAGIHYVEAVFSMGPVTPAHAGAYRCCGCFSHSRYEWSAPSDPLDIVITGKYKKPSLSTQVDPMMRLGEKLTLFCSSEISFDQYHLFRHGVAHGQWLSGGQRHREAFQANFSVGRATPVPGGTYRCYGSFNDSPYKPPVTRCNFTPQETLRVLLCHSQNPPLNLTPPWQTQSPRKANGRMKRSLQQKRHRRSYMPS

SEQ ID NO: 20262 - protein, 352 aa, Homo sapiens
MAPKLITVLCLGFCLNQKICPHAGAQDKFSLSAWPSPVVPLGGRVTLSCHSHLRFVIWTIFQTTGTRSHELHTGLSNNITISPVTPEHAGTYRCVGIYKHASKWSAESNSLKIIVTGLFTKPSISAHPSSLVHAGARVSLRCHSELAFDEFILYKEGHIQHSQQLDQGMEAGIHYVEAVFSMGPVTPAHAGAYRCCGCFSHSRYEWSAPSDPLDIVITGKYKKPSLSTQVDPMMRLGEKLTLFCSSEISFDQYHLFRHGVAHGQWLSGGQRHREAFQANFSVGRATPVPGGTYRCYGSFNDSPYKPPVTRCNFTPQETLRVLLCHSQNPPLNLTHLALKDSPATCICSLDSQ

SEQ ID NO: 20263 - protein, 488 aa, Homo sapiens
VGGDAMTPILTVLICLGLSLGPRTHVQAGHLPKPTLWAEPGSVIIQGSPVTLRCQGSLQAEEYHLYRENKSASWVRRIQEPGKNGQFPIPSITWEHAGRYHCQYYSHNHSSEYSDPLELVVTGAYSKPTLSALPSPVVTSGGNVTLQCVSQVAFDGFILCKEGEDEHPQRLNSHSHARGWSWAIFSVGPVSPSRRWSYRCYAYDSNSPYVWSLPSDLLELLVPGVSKKPSLSVQPGPMVAPGESLTLQCVSDVGYDRFVLYKEGERDFLQRPGWQPQAGLSQANFTLGPVSPSHGGQYRCYSAHNLSSEWSAPSDPLDILITGQFYDRPSLSVQPVPTVAPGKNVTLLCQSRGQFHTFLLTKEGAGHPPLHLRSEHQAQQNQAEFRMGPVTSAHVGTYRCYSSLSSNPYLLSLPSDPLELVVSEAAETLSPSQNKTDSTTTSLGQHPQDYTVENLIRMGVAGLVLVVLGILLFEAQHSQRSLQDAAGR

SEQ ID NO: 20264 - protein, 471 aa, Homo sapiens
VGGDAMTPILTVLICLGLSLGPRTHVQAGHLPKPTLWAEPGSVIIQGSPVTLRCQGSLQAEEYHLYRENKSASWVRRIQEPGKNGQFPIPSITWEHAGRYHCQYYSHNHSSEYSDPLELVVTGAYSKPTLSALPSPVVTSGGNVTLQCVSQVAFDGFILCKEGEDEHPQRLNSHSHARGWSWAIFSVGPVSPSRRWSYRCYAYDSNSPYVWSLPSDLLELLVPGVSKKPSLSVQPGPMVAPGESLTLQCVSDVGYDRFVLYKEGERDFLQRPGWQPQAGLSQANFTLGPVSPSHGGQYRCYSAHNLSSEWSAPSDPLDILITGQFYDRPSLSVQPVPTVAPGKNVTLLCQSRGQFHTFLLTKEGAGHPPLHLRSEHQAQQNQAEFRMGPVTSAHVGTYRCYSSLSSNPYLLSLPSDPLELVVSASLGQHPQDYTVENLIRMGVAGLVLVVLGILLFEAQHSQRSLQDAAGR

SEQ ID NO: 20265 - protein, 455 aa, Homo sapiens
LGPLGGDAMIPTFTALLCLGLSLGPRTHMQAGPLPKPTLWAEPGSVISWGNSVTIWCQGTLEAREYRLDKEESPAPWDRQNPLEPKNKARFSIPSMTEDYAGRYRCYYRSPVGWSQPSDPLELVMTGAYSKPTLSALPSPLVTSGKSVTLLCQSRSPMDTFLLIKERAAHPLLHLRSEHGAQQHQAEFPMSPVTSVHGGTYRCFSSHGFSHYLLSHPSDPLELIVSGSLEGPRPSPTRSVSTAAGPEDQPLMPTGSVPHSGLRRHWEVLIGVLVVSILLLSLLLFLLLQHWRQGKHRTLAQRQADFQRPPGAAEPEPKDGGLQRRSSPAADVQGENFCAAVKNTQPEDGVEMDTRSPHDEDPQAVTYAKVKHSRPRREMASPPSPLSGEFLDTKDRQAEEDRQMDTEAAASEAPQDVTYARLHSFTLRQKATEPPPSQEGASPAEPSVYATLAIH

SEQ ID NO: 20266 - protein, 403 aa, Homo sapiens
LGPLGGDAMIPTFTALLCLGLSLGPRTHMQAGPLPKPTLWAEPGSVISWGNSVTIWCQGTLEAREYRLDKEESPAPWDRQNPLEPKNKARFSIPSMTEDYAGRYRCYYRSPVGWSQPSDPLELVMTGAYSKPTLSALPSPLVTSGKSVTLLCQSRSPMDTFLLIKERAAHPLLHLRSEHGAQQHQAEFPMSPVTSVHGGTYRCFSSHGFSHYLLSHPSDPLELIVSGSLEGPRPSPTRSVSTAAGPEDQPLMPTGSVPHSGLRRHWEVLIGVLVVSILLLSLLLFLLLQHWRQGKHRTLAQRQADFQRPPGAAEPEPKDGGLQRRSSPAADVQGENFCAAVKNTQPEDGVEMDTRAAASEAPQDVTYARLHSFTLRQKATEPPPSQEGASPAEPSVYATLAIH

SEQ ID NO: 20267 - protein, 328 aa, Homo sapiens
MSLMVVSMACVGFFLLQGAWPHEGGQDKPFLSAWPSPVVSEGEHVALQCRSRLGFNEFSLSKEDGMPVPELYNRVFRNTVFIGPVTPAHAGTYRCRGSHPHFLTGWSAPSNPLVIMVTGVHRKPSLLAHPGPLVKSEETVILQCWSDVMFEHFLLHREGKFNDTLRLTGELHDGVSKANFSIGRMTQDLAGTYRCYGSVPHSPYQLSAPSDPLDIVITGLCGKPSLSAQPRPMVKAGESVTLSCSSRSSYDIYHLSREGEAHELRFPAVPKVNGTFQANFPLGPATHGGTYRCFGSFRDSPYEWSDLSDPLLVSVTDSMKEKGKDVIL

SEQ ID NO: 20268 - protein, 256 aa, Homo sapiens
MSMSPTVIILACLGFFLDQSVWAHVGGQDKPFCSAWPSAVVPQGGHVTLRCHYRRGFNIFTLYKKDGVPVPELYNRIFWNSFLISPVTPAHAGTYRCRGFHPHSPTEWSAPSNPLVIMVTGLYEKPSLTARPGPTVRAGENVTLSCSSQSSFDIYHLSREGEAHELRLPAVPSINGTFQADFPLGPATHGETYRCFGSFHGSPYEWSDPSDPLPVSVTGIARHLHAVIRYSVAIILFTILPFFLLHRWCSKKKMLL

SEQ ID NO: 20269 - protein, 239 aa, Homo sapiens
MSLMVIIMACVGFFLLQGAWPQEGVHRKPSFLALPGHLVKSEETVILQCWSDVMFEHFLLHREGKFNNTLHLIGEHHDGVSKANFSIGPMMPVLAGTYRCYGSVPHSPYQLSAPSDPLDMVIIGLYEKPSLSAQPGPTVQAGENVTLSCSSIYPGKGRPMNVGSLQCAASTEHSRPTFLWALPPTEGPTDASALSVTLPTSGQTRVIHCLFPSQETLQIVGLHPLNQAPKPVTPDTYMF

SEQ ID NO: 20270 - protein, 222 aa, Homo sapiens
MSLMVIIMACVGFFLLQGAWPQEGVHRKPSFLALPGHLVKSEETVILQCWSDVMFEHFLLHREGKFNNTLHLIGEHHDGVSKANFSIGPMMPVLAGTYRCYGSVPHSPYQLSAPSDPLDMVIIGLYEKPSLSAQPGPTVQAGENVTLSCSSIYPGKGRPMNVGSLQCAASTEHSRPTFLWALPPTEGPTDASALSVTLPTSGQTRVIHCLFPSQVTPDTYMF

SEQ ID NO: 20271 - protein, 118 aa, Homo sapiens
VLGAPTWDKMVSSAQMGFNLQALLEQLSQDELSKFKYLITTFSLAHELQKIPHKEVDKADGKQLVEILTTHCDSYWVEMASLQVFEKMHRMDLSERAKDEVREAALKSFNKRKPLSLG

SEQ ID NO: 20272 - protein, 855 aa, Homo sapiens
VLGAPTWDKMVSSAQMGFNLQALLEQLSQDELSKFKYLITTFSLAHELQKIPHKEVDKADGKQLVEILTTHCDSYWVEMASLQVFEKMHRMDLSERAKDEVREAALKSFNKRKPLSLGITRKERPPLDVDEMLERFKTEAQAFTETKGNVICLGKEVFKGKKPDKDNRCRYILKTKFREMWKSWPGDSKEVQVMAERYKMLIPFSNPRVLPGPFSYTVVLYGPAGLGKTTLAQKLMLDWAEDNLIHKFKYAFYLSCRELSRLGPCSFAELVFRDWPELQDDIPHILAQARKILFVIDGFDELGAAPGALIEDICGDWEKKKPVPVLLGSLLNRVMLPKAALLVTTRPRALRDLRILAEEPIYIRVEGFLEEDRRAYFLRHFGDEDQAMRAFELMRSNAALFQLGSAPAVCWIVCTTLKLQMEKGEDPVPTCLTRTGLFLRFLCSRFPQGAQLRGALRTLSLLAAQGLWAQTSVLHREDLERLGVQESDLRLFLDGDILRQDRVSKGCYSFIHLSFQQFLTALFYTLEKEEEEDRDGHTWDIGDVQKLLSGVERLRNPDLIQAGYYSFGLANEKRAKELEATFGCRMSPDIKQELLRCDISCKGGHSTVTDLQELLGCLYESQEEELVKEVMAQFKEISLHLNAVDVVPSSFCVKHCRNLQKMSLQVIKENLPENVTASESDAEVERSQDDQHMLPFWTDLCSIFGSNKDLMGLAINDSFLSASLVRILCEQIASDTCHLQRVVFKNISPADAHRNLCLALRGHKTVTYLTLQGNDQDDMFPALCEVLRHPECNLRYLGLVSCSATTQQWADLSLALEVNQSLTCVNLSDNELLDEGAKLLYTTLRHPKCFLQRLS

SEQ ID NO: 20273 - protein, 1071 aa, Homo sapiens
VLGAPTWDKMVSSAQMGFNLQALLEQLSQDELSKFKYLITTFSLAHELQKIPHKEVDKADGKQLVEILTTHCDSYWVEMASLQVFEKMHRMDLSERAKDEVREAALKSFNKRKPLSLGITRKERPPLDVDEMLERFKTEAQAFTETKGNVICLGKEVFKGKKPDKDNRCRYILKTKFREMWKSWPGDSKEVQVMAERYKMLIPFSNPRVLPGPFSYTVVLYGPAGLGKTTLAQKLMLDWAEDNLIHKFKYAFYLSCRELSRLGPCSFAELVFRDWPELQDDIPHILAQARKILFVIDGFDELGAAPGALIEDICGDWEKKKPVPVLLGSLLNRVMLPKAALLVTTRPRALRDLRILAEEPIYIRVEGFLEEDRRAYFLRHFGDEDQAMRAFELMRSNAALFQLGSAPAVCWIVCTTLKLQMEKGEDPVPTCLTRTGLFLRFLCSRFPQGAQLRGALRTLSLLAAQGLWAQTSVLHREDLERLGVQESDLRLFLDGDILRQDRVSKGCYSFIHLSFQQFLTALFYTLEKEEEEDRDGHTWDIGDVQKLLSGVERLRNPDLIQAGYYSFGLANEKRAKELEATFGCRMSPDIKQELLRCDISCKGGHSTVTDLQELLGCLYESQEEELVKEVMAQFKEISLHLNAVDVVPSSFCVKHCRNLQKMSLQVIKENLPENVTASESDAEVERSQDDQHMLPFWTDLCSIFGSNKDLMGLAINDSFLSASLVRILCEQIASDTCHLQRVVFKNISPADAHRNLCLALRGHKTVTYLTLQGNDQDDMFPALCEVLRHPECNLRYLGLVSCSATTQQWADLSLALEVNQSLTCVNLSDNELLDEGAKLLYTTLRHPKCFLQRLSLENCHLTEANCKDLAAVLVVSRELTHLCLAKNPIGNTGVKFLCEGLRYPECKLQTLVLWNCDITSDGCCDLTKLLQEKSSLLCLDLGLNHIGVKGMKFLCEALRKPLCNLRCLWLWGCSIPPFSCEDLCSALSCNQSLVTLDLGQNPLGSSGVKMLFETLTCSSGTLRTLRLKIDDFNDELNKLLEEIEEKNPQLIIDTEKHHPWAERPSSHDFMI

SEQ ID NO: 20274 - protein, 1047 aa, Homo sapiens
VLGAPTWDKMVSSAQMGFNLQALLEQLSQDELSKFKYLITTFSLAHELQKIPHKEVDKADGKQLVEILTTHCDSYWVEMASLQVFEKMHRMDLSERAKDEVREAALKSFNKRKPLSLAFTETKGNVICLGKEVFKGKKPDKDNRCRYILKTKFREMWKSWPGDSKEVQVMAERYKMLIPFSNPRVLPGPFSYTVVLYGPAGLGKTTLAQKLMLDWAEDNLIHKFKYAFYLSCRELSRLGPCSFAELVFRDWPELQDDIPHILAQARKILFVIDGFDELGAAPGALIEDICGDWEKKKPVPVLLGSLLNRVMLPKAALLVTTRPRALRDLRILAEEPIYIRVEGFLEEDRRAYFLRHFGDEDQAMRAFELMRSNAALFQLGSAPAVCWIVCTTLKLQMEKGEDPVPTCLTRTGLFLRFLCSRFPQGAQLRGALRTLSLLAAQGLWAQTSVLHREDLERLGVQESDLRLFLDGDILRQDRVSKGCYSFIHLSFQQFLTALFYTLEKEEEEDRDGHTWDIGDVQKLLSGVERLRNPDLIQAGYYSFGLANEKRAKELEATFGCRMSPDIKQELLRCDISCKGGHSTVTDLQELLGCLYESQEEELVKEVMAQFKEISLHLNAVDVVPSSFCVKHCRNLQKMSLQVIKENLPENVTASESDAEVERSQDDQHMLPFWTDLCSIFGSNKDLMGLAINDSFLSASLVRILCEQIASDTCHLQRVVFKNISPADAHRNLCLALRGHKTVTYLTLQGNDQDDMFPALCEVLRHPECNLRYLGLVSCSATTQQWADLSLALEVNQSLTCVNLSDNELLDEGAKLLYTTLRHPKCFLQRLSLENCHLTEANCKDLAAVLVVSRELTHLCLAKNPIGNTGVKFLCEGLRYPECKLQTLVLWNCDITSDGCCDLTKLLQEKSSLLCLDLGLNHIGVKGMKFLCEALRKPLCNLRCLWLWGCSIPPFSCEDLCSALSCNQSLVTLDLGQNPLGSSGVKMLFETLTCSSGTLRTLRLKIDDFNDELNKLLEEIEEKNPQLIIDTEKHHPWAERPSSHDFMI

SEQ ID NO: 20275 - protein, 1049 aa, Homo sapiens
VLGAPTWDKMVSSAQMGFNLQALLEQLSQDELSKFKYLITTFSLAHELQKIPHKEVDKADGKQLVEILTTHCDSYWVEMASLQVFEKMHRMDLSERAKDEVREAALKSFNKRKPLSLGITRKERPPLDVDEMLERFKTEAQDKDNRCRYILKTKFREMWKSWPGDSKEVQVMAERYKMLIPFSNPRVLPGPFSYTVVLYGPAGLGKTTLAQKLMLDWAEDNLIHKFKYAFYLSCRELSRLGPCSFAELVFRDWPELQDDIPHILAQARKILFVIDGFDELGAAPGALIEDICGDWEKKKPVPVLLGSLLNRVMLPKAALLVTTRPRALRDLRILAEEPIYIRVEGFLEEDRRAYFLRHFGDEDQAMRAFELMRSNAALFQLGSAPAVCWIVCTTLKLQMEKGEDPVPTCLTRTGLFLRFLCSRFPQGAQLRGALRTLSLLAAQGLWAQTSVLHREDLERLGVQESDLRLFLDGDILRQDRVSKGCYSFIHLSFQQFLTALFYTLEKEEEEDRDGHTWDIGDVQKLLSGVERLRNPDLIQAGYYSFGLANEKRAKELEATFGCRMSPDIKQELLRCDISCKGGHSTVTDLQELLGCLYESQEEELVKEVMAQFKEISLHLNAVDVVPSSFCVKHCRNLQKMSLQVIKENLPENVTASESDAEVERSQDDQHMLPFWTDLCSIFGSNKDLMGLAINDSFLSASLVRILCEQIASDTCHLQRVVFKNISPADAHRNLCLALRGHKTVTYLTLQGNDQDDMFPALCEVLRHPECNLRYLGLVSCSATTQQWADLSLALEVNQSLTCVNLSDNELLDEGAKLLYTTLRHPKCFLQRLSLENCHLTEANCKDLAAVLVVSRELTHLCLAKNPIGNTGVKFLCEGLRYPECKLQTLVLWNCDITSDGCCDLTKLLQEKSSLLCLDLGLNHIGVKGMKFLCEALRKPLCNLRCLWLWGCSIPPFSCEDLCSALSCNQSLVTLDLGQNPLGSSGVKMLFETLTCSSGTLRTLRLKIDDFNDELNKLLEEIEEKNPQLIIDTEKHHPWAERPSSHDFMI

SEQ ID NO: 20276 - protein, 1048 aa, Homo sapiens
VLGAPTWDKMVSSAQMGFNLQALLEQLSQDELSKFKYLITTFSLAHELQKIPHKEMASLQVFEKMHRMDLSERAKDEVREAALKSFNKRKPLSLGITRKERPPLDVDEMLERFKTEAQAFTETKGNVICLGKEVFKGKKPDKDNRCRYILKTKFREMWKSWPGDSKEVQVMAERYKMLIPFSNPRVLPGPFSYTVVLYGPAGLGKTTLAQKLMLDWAEDNLIHKFKYAFYLSCRELSRLGPCSFAELVFRDWPELQDDIPHILAQARKILFVIDGFDELGAAPGALIEDICGDWEKKKPVPVLLGSLLNRVMLPKAALLVTTRPRALRDLRILAEEPIYIRVEGFLEEDRRAYFLRHFGDEDQAMRAFELMRSNAALFQLGSAPAVCWIVCTTLKLQMEKGEDPVPTCLTRTGLFLRFLCSRFPQGAQLRGALRTLSLLAAQGLWAQTSVLHREDLERLGVQESDLRLFLDGDILRQDRVSKGCYSFIHLSFQQFLTALFYTLEKEEEEDRDGHTWDIGDVQKLLSGVERLRNPDLIQAGYYSFGLANEKRAKELEATFGCRMSPDIKQELLRCDISCKGGHSTVTDLQELLGCLYESQEEELVKEVMAQFKEISLHLNAVDVVPSSFCVKHCRNLQKMSLQVIKENLPENVTASESDAEVERSQDDQHMLPFWTDLCSIFGSNKDLMGLAINDSFLSASLVRILCEQIASDTCHLQRVVFKNISPADAHRNLCLALRGHKTVTYLTLQGNDQDDMFPALCEVLRHPECNLRYLGLVSCSATTQQWADLSLALEVNQSLTCVNLSDNELLDEGAKLLYTTLRHPKCFLQRLSLENCHLTEANCKDLAAVLVVSRELTHLCLAKNPIGNTGVKFLCEGLRYPECKLQTLVLWNCDITSDGCCDLTKLLQEKSSLLCLDLGLNHIGVKGMKFLCEALRKPLCNLRCLWLWGCSIPPFSCEDLCSALSCNQSLVTLDLGQNPLGSSGVKMLFETLTCSSGTLRTLRLKIDDFNDELNKLLEEIEEKNPQLIIDTEKHHPWAERPSSHDFMI

SEQ ID NO: 20277 - protein, 1068 aa, Homo sapiens
VLGAPTWDKMVSSAQMGFNLQALLEQLSQDELSKFKYLITTFSLAHELQKIPHKEVDKADGKQLVEILTTHCDSYWVEMASLQVFEKMHRMDLSERAKDEVREAALKSFNKRKPLSLGITRKERPPLDVDEMLERFKTEAQETKGNVICLGKEVFKGKKPDKDNRCRYILKTKFREMWKSWPGDSKEVQVMAERYKMLIPFSNPRVLPGPFSYTVVLYGPAGLGKTTLAQKLMLDWAEDNLIHKFKYAFYLSCRELSRLGPCSFAELVFRDWPELQDDIPHILAQARKILFVIDGFDELGAAPGALIEDICGDWEKKKPVPVLLGSLLNRVMLPKAALLVTTRPRALRDLRILAEEPIYIRVEGFLEEDRRAYFLRHFGDEDQAMRAFELMRSNAALFQLGSAPAVCWIVCTTLKLQMEKGEDPVPTCLTRTGLFLRFLCSRFPQGAQLRGALRTLSLLAAQGLWAQTSVLHREDLERLGVQESDLRLFLDGDILRQDRVSKGCYSFIHLSFQQFLTALFYTLEKEEEEDRDGHTWDIGDVQKLLSGVERLRNPDLIQAGYYSFGLANEKRAKELEATFGCRMSPDIKQELLRCDISCKGGHSTVTDLQELLGCLYESQEEELVKEVMAQFKEISLHLNAVDVVPSSFCVKHCRNLQKMSLQVIKENLPENVTASESDAEVERSQDDQHMLPFWTDLCSIFGSNKDLMGLAINDSFLSASLVRILCEQIASDTCHLQRVVFKNISPADAHRNLCLALRGHKTVTYLTLQGNDQDDMFPALCEVLRHPECNLRYLGLVSCSATTQQWADLSLALEVNQSLTCVNLSDNELLDEGAKLLYTTLRHPKCFLQRLSLENCHLTEANCKDLAAVLVVSRELTHLCLAKNPIGNTGVKFLCEGLRYPECKLQTLVLWNCDITSDGCCDLTKLLQEKSSLLCLDLGLNHIGVKGMKFLCEALRKPLCNLRCLWLWGCSIPPFSCEDLCSALSCNQSLVTLDLGQNPLGSSGVKMLFETLTCSSGTLRTLRLKIDDFNDELNKLLEEIEEKNPQLIIDTEKHHPWAERPSSHDFMI

SEQ ID NO: 20278 - protein, 126 aa, Homo sapiens
LTPDACPRPGMSRYLLPLSALGTVAGAAVLLKDYVTGGACPSKATIPGKTVIVTGANTGIGKQTALELARRGGNIILACRDMEKCEAAAKDIRGETLNHHVNARHLDLASLKSIREFAAKIIEGVN

SEQ ID NO: 20279 - protein, 160 aa, Homo sapiens
LNHVFDDVESFVSRLQKSAEAARVLEHRERGRRSRRRAAGEGLLTLRAKPPSEAEYTDVLQKIKYAFSLLVRTRPPLGRGAGTTNLSRPRTHANHLPPHAPGPAARQHRRPLLSGAVALPFRASADDCEHVGGAGVREQCAAAASDIGCRGAAAGQRHST

SEQ ID NO: 20280 - protein, 736 aa, Homo sapiens
VSTRPGASPSSDPLDFGFCPPKFWTPKGRMRNGGPCQPLAAGPRAEGASVNWSVTAWGPGTQACIDENLEVVRFLVEQGATVNQADNEGWTPLHVAASCGYLDIARYLLSHGANIAAVNSDGDLPLDLAESDAMEGLLKAEIARRGVDVEAAKRAEEELLLHDTRCWLNGGAMPEARHPRTGASALHVAAAKGYIEVMRLLLQAGYDPELRDGDGWTPLHAAAHWGVEDACRLLAEHGGGMDSLTHAGQRPCDLADEEVLSLLEELARKQEDLRNQKEASQSRGQEPQAPSSSKHRRSSVCRLSSREKISLQDLSKERRPGGAGGPPIQDEDEGEEGPTEPPPAEPRTLNGVSSPPHPSPKSPVQLEEAPFSRRFGLLKTGSSGALGPPERRTAEGAPGAGLQRSASSSWLEGTSTQAKELRLARITPTPSPKLPEPSVLSEVTKPPPCLENSSPPSRIPEPESPAKPNVPTASTAPPADSRDRRRSYQMPVRDEESESQRKARSRLMRQSRRSTQGVTLTDLKEAEKAAGKAPESEKPAQSLDPSRRPRVPGVENSDSPAQREAPDGQGPGPQAAREHRKVGKEWRGPAEGEEAEPADRSQESSTLEGGPSARRQRWQRDLNPEPEPESEEPDGGFRTLYAELRRENERLREALTETTLRLAQLKVELERATQRQERFAERPALLELERFERRALERKAAELEEELKALSDLRADNQRLKDENAALIRVISKLSK

SEQ ID NO: 20281 - protein, 429 aa, Homo sapiens
LLSEPQFFHPRNGGIVPLFWDGREGQLESALPASLSAFLCPTACLAPQFRERDALEAVFRFWAGGEKGPQAFPMSRLWDSRLRHYLGSRYDARRGVSDWDLRMKLHDRGAQVIHPQEFRRWRDTGVAFELRDSSAYHVPNRTLASGRLLSYRGERVAARGYWGDIATGPFVAFGIEADDESLLRTSNGQPVKTAGEITQHNVTELLRDVAAWGRARATGGDLEEQQHAEGSPEPGTPAAPTPESFTVHFLPLNSAQTLHHKSCYNGRFQLLYVACGMVHLLIPELGACVAPGGNLIVELARYLVDVRQEQLQGFNTRVRELAQAAGFAPQTGARPSETFARFCKSQESALGNTVPAVEPGTPPLDILAQPLEASNPALEGLTQPLQGGTPHCEPCQLPSESPGSLSEVLAQPQGALAPPNCESDSKTGV

SEQ ID NO: 20282 - protein, 1119 aa, Homo sapiens
VSGGMAGAGGGLGVWGNLVLLGLCSWTGARAPAPNPGRNLTVETQTTSSISLSWEVPDGLDSQNSNYWVQCTGDGGTTETRNTTATNVTVDGLGPGSLYTCSVWVEKDGVNSSVGTVTTATAPNPVRNLRVEAQTNSSIALTWEVPDGPDPQNSTYGVEYTGDGGRAGTRSTAHTNITVDGLEPGCLYAFSMWVGKNGINSSRETRNATTAHNPVRNLRVEAQTTSSISLSWEVPDGTDPQNSTYCVQCTGDGGRTETRNTTDTRVTVDGLGPGSLYTCSVWVEKDGVNSSVEIVTSATAPNPVRNLTVEAQTNSSIALTWEVPDGPDPQNSTYGVEYTGDGGRAGTRSTAHTNITVDRLEPGCLYVFSVWVGKNGINSSRETRNATTAPNPVRNLHMETQTNSSIALCWEVPDGPYPQDYTYWVEYTGDGGGTETRNTTNTSVTAERLEPGTLYTFSVWAEKNGARGSRQNVSISTVPNAVTSLSKQDWTNSTIALRWTAPQGPGQSSYSYWVSWVREGMTDPRTQSTSGTDITLKELEAGSLYHLTVWAERNEVRGYNSTLTAATAPNEVTDLQNETQTKNSVMLWWKAPGDPHSQLYVYWVQWASKGHPRRGQDPQANWVNQTSRTNETWYKVEALEPGTLYNFTVWAERNDVASSTQSLCASTYPDTVTITSCVSTSAGYGVNLIWSCPQGGYEAFELEVGGQRGSQDRSSCGEAVSVLGLGPARSYPATITTIWDGMKVVSHSVVCHTESAGVIAGAFVGILLFLILVGLLIFFLKRRNKKKQQKPELRDLVFSSPGDIPAEDFADHVRKNERDSNCGFADEYQQLSLVGHSQSQMVASASENNAKNRYRNVLPYDWSRVPLKPIHEEPGSDYINASFMPGLWSPQEFIATQGPLPQTVGDFWRLVWEQQSHTLVMLTNCMEAGRVKCEHYWPLDSQPCTHGHLRVTLVGEEVMENWTVRELLLLQVEEQKTLSVRQFHYQAWPDHGVPSSPDTLLAFWRMLRQWLDQTMEGGPPIVHCSAGVGRTGTLIALDVLLRQLQSEGLLGPFSFVRKMRESRPLMVQTEAQYVFLHQCILRFLQQSAQAPAEKEVPYEDVENLIYENVAAIQAHKLEV

SEQ ID NO: 20283 - protein, 941 aa, Homo sapiens
VSGGMAGAGGGLGVWGNLVLLGLCSWTGARAPAPNPGRNLTVETQTTSSISLSWEVPDGLDSQNSNYWVQCTGDGGTTETRNTTATNVTVDGLGPGSLYTCSVWVEKDGVNSSVGTVTTATAPNPVRNLTVEAQTNSSIALTWEVPDGPDPQNSTYGVEYTGDGGRAGTRSTAHTNITVDRLEPGCLYVFSVWVGKNGINSSRETRNATTAPNPVRNLHMETQTNSSIALCWEVPDGPYPQDYTYWVEYTGDGGGTETRNTTNTSVTAERLEPGTLYTFSVWAEKNGARGSRQNVSISTVPNAVTSLSKQDWTNSTIALRWTAPQGPGQSSYSYWVSWVREGMTDPRTQSTSGTDITLKELEAGSLYHLTVWAERNEVRGYNSTLTAATAPNEVTDLQNETQTKNSVMLWWKAPGDPHSQLYVYWVQWASKGHPRRGQDPQANWVNQTSRTNETWYKVEALEPGTLYNFTVWAERNDVASSTQSLCASTYPDTVTITSCVSTSAGYGVNLIWSCPQGGYEAFELEVGGQRGSQDRSSCGEAVSVLGLGPARSYPATITTIWDGMKVVSHSVVCHTESAGVIAGAFVGILLFLILVGLLIFFLKRRNKKKQQKPELRDLVFSSPGDIPAEDFADHVRKNERDSNCGFADEYQQLSLVGHSQSQMVASASENNAKNRYRNVLPYDWSRVPLKPIHEEPGSDYINASFMPGLWSPQEFIATQGPLPQTVGDFWRLVWEQQSHTLVMLTNCMEAGRVKCEHYWPLDSQPCTHGHLRVTLVGEEVMENWTVRELLLLQVEEQKTLSVRQFHYQAWPDHGVPSSPDTLLAFWRMLRQWLDQTMEGGPPIVHCSAGVGRTGTLIALDVLLRQLQSEGLLGPFSFVRKMRESRPLMVQTEAQYVFLHQCILRFLQQSAQAPAEKEVPYEDVENLIYENVAAIQAHKLEV

SEQ ID NO: 20284 - protein, 57 aa, Homo sapiens
LSTLEMVAEQGLEAQHTLTSPWMDLNPGVCMRFPCGWERMESTAPGRLEMPPQLTTQ

SEQ ID NO: 20285 - protein, 79 aa, Homo sapiens
LPGAAAAAKSSVLPWISRGGGRAGPTMAPIALITLTPPHSLLWTPRRLVPGRQAQPTPICTEKRSFGALPPRIKIQRVK

SEQ ID NO: 20286 - protein, 88 aa, Homo sapiens
VSKPRIMQPPAFEFLVSLALVSTCMMGFSGPGFDQRTLCHHRFFLSLSYLGELMTPGPCSTRMSPRSCQLGSASMNASNFVEARVPCS

SEQ ID NO: 20287 - protein, 87 aa, Homo sapiens
VSKPRIMPPAFEFLVSLALVSTCMMGFSGPGFDQRTLCHHRFFLSLSYLGELMTPGPCSTRMSPRSCQLGSASMNASNFVEARVPCS

SEQ ID NO: 20288 - protein, 246 aa, Homo sapiens
LLLRAHASPPQAAAQLTLGAPPAADREGLKAPGSLPPALGNPWPCGDMNCVCRLVLVVLSLWPDTAVAPGPPPGPPRVSPDPRAELDSTVLLTRSLLADTRQLAAQLRDKFPADGDHNLDSLPTLAMSAGALGALQLPGVLTRLRADLLSYLRHVQWLRRAGGSSLKTLEPELGTLQARLDRLLRRLQLLMSRLALPQPPPDPPAPPLAPPSSAWGGIRAAHAILGGLHLTLDWAVRGLLLLKTRL

SEQ ID NO: 20289 - protein, 225 aa, Homo sapiens
VPPPHLQRGRSGLEPGTFRKMAAARPSLGRVLPGSSVLFLCDMQEKFRHNIAYFPQIVSVAARMLKVARLLEVPVMLTEQYPQGLGPTVPELGTEGLRPLAKTCFSMVPALQQELDSRPQLRSVLLCGIEAQACILNTTLDLLDRGLQVHVVVDACSSRSQVDRLVALARMRQSGAFLSTSEGLILQLVGDAVHPQFKEIQKLIKEPAPDSGLLGLFQGQNSLLH

SEQ ID NO: 20290 - protein, 157 aa, Homo sapiens
VRVPPPHLQRGRSGLEPGTFRKMAAARPSLGRVLPGSSVLFLCDMQEKFRHNIAYFPQIVSVAARMLKNTTLDLLDRGLQVHVVVDACSSRSQVDRLVALARMRQSGAFLSTSEGLILQLVGDAVHPQFKEIQKLIKEPAPDSGLLGLFQGQNSLLH

SEQ ID NO: 20291 - protein, 141 aa, Homo sapiens
VRVPPPHLQRGRSGLEPGTFRKMAAARPSLGRVLPGSSVLFLCDMQEKFRHNIAYFPQIVSVAARMLKVARLLEVPVMLTEQYPQGLGPTVPELGTEGLRPLAKTCFSMVPALQQELDSRPQLRSVLLCGIEAQACILVRC

SEQ ID NO: 20292 - protein, 69 aa, Homo sapiens
VRVPPPHLQRGRSGLEPGTFRKMAAARPSLGRVLPGSSVLFLCDMQEKFRHNIAYFPQIVSVAARMLKV

SEQ ID NO: 20293 - protein, 955 aa, Homo sapiens
LAATMRVLACLLAALVGIQAVERLRLADGPHGCAGRLEVWHGGRWGTVCDDGWDLRDAAVACRQLGCGGALAAPGGAFFGEGAGPVWLSELACRGNEGQLGLCHHRGWKAHICSHEEDAGVVCAGQRVANSRDDSTSPLDGAPWPGLLLELSPSTEEPLVTHAPRPAGNPQNASRKKSPRPKQAKSTRAPLLTTGAPRQERLRLVSGPHRCAGRLEVWHGGRWGTVCDDGWDLRDAAVACRELGCGGALAAPGGARFGPGAGPVWMDDVGCGGGEQALRDCPRSPWGRSNCDHSEDAGLVCTGPAPRLRLADGPHGCAGRLEVWHGGRWGSVCDDAWDLRDAAVACRELGCGGALAAPGGAFFGEGSGPIILDDLRCRGNETALRFCPARPWGQHDCHHREDAGAVCDGMPLGYVPPTAPTDSNNSTPREAASRPPSTMTSQAPGTAGVSPPPASPTVLWEPGPEAGSPQLRLVAGPSKCSGRLEVWHDQRWGTVCDDSWDMRDSAVVCRELGCGGPQQPDPAAGRFGWGAGPIWLDDVGCVGTEASLSDCPAAPWGKHNCAHNEDVGVTCTGPPGLDSISDPFSWSWIPGLGRDRDAWLPGELATKPSASVTASVLEKTTTKAPGKMPKSTKKWVTKNAKRPTTQPPVMPTTKHSRAQSPPDLTSQTTAALTTEASRRPTSEFTRRPTTEAPQRWTSHTTATLTPQAPRERTTKTMAMLTTQGPQEMTSESTIKSIPQASLEPSAEIPEGSPESPKDPAPSPSVSTTGESGLFRVRLADGPNRCAGRLEVWHAGRWGTVCDDNWDLRDATVACWELGCGKVRPRVGKTHYGPGTGPIWLDDMGCKGSEASLSDCPSGAWGKHNCDHEEDVGLTCTGYTDYDDYPPWTWDPTSREDLAKGTTTAGVPGHTLPWRTTRRPGSSSPAIRRLPDTEPEAGAPRGDAPRSRTARVAAPP

SEQ ID NO: 20294 - protein, 1577 aa, Homo sapiens
LAATMRVLACLLAALVGIQAVERLRLADGPHGCAGRLEVWHGGRWGTVCDDGWDLRDAAVACRQLGCGGALAAPGGAFFGEGAGPVWLSELACRGNEGQLGLCHHRGWKAHICSHEEDAGVVCAGQRVANSRDDSTSPLDGAPWPGLLLELSPSTEEPLVTHAPRPAGNPQNASRKKSPRPKQAKSTRAPLLTTGAPRQERLRLVSGPHRCAGRLEVWHGGRWGTVCDDGWDLRDAAVACRELGCGGALAAPGGARFGPGAGPVWMDDVGCGGGEQALRDCPRSPWGRSNCDHSEDAGLVCTGPAPRLRLADGPHGCAGRLEVWHGGRWGSVCDDAWDLRDAAVACRELGCGGALAAPGGAFFGEGSGPIILDDLRCRGNETALRFCPARPWGQHDCHHREDAGAVCDGMPLGYVPPTAPTDSNNSTPREAASRPPSTMTSQAPGTAGVSPPPASPTVLWEPGPEAGSPQLRLVAGPSKCSGRLEVWHDQRWGTVCDDSWDMRDSAVVCRELGCGGPQQPDPAAGRFGWGAGPIWLDDVGCVGTEASLSDCPAAPWGKHNCAHNEDVGVTCTGPPGLDSISDPFSWSWIPGLGRDRDAWLPGELATKPSASVTASVLEKTTTKAPGKMPKSTKKWVTKNAKRPTTQPPVMPTTKHSRAQSPPDLTSQTTAALTTEASRRPTSEFTRRPTTEAPQRWTSHTTATLTPQAPRERTTKTMAMLTTQGPQEMTSESTIKSIPQASLEPSAEIPEGSPESPKDPAPSPSVSTTGESGLFRVRLADGPNRCAGRLEVWHAGRWGTVCDDNWDLRDATVACWELGCGKVRPRVGKTHYGPGTGPIWLDDMGCKGSEASLSDCPSGAWGKHNCDHEEDVGLTCTGYTDYDDYPPWTWDPTSREDLAKGTTTAGVPGHTLPWRTTRRPGSSSPAIRRLPDTGSKDGYKLPWTWDTPSGRGLAEGTPTAGKLGPTLGAGTTRSPGSPPTLRVHGDTGSPRKPWPERRPPRPAATRTAPPTPSPGPSASPGPPGPALTSDSSRELTPHSALTSEATSDAPDTSPPTPDPASRTNPDLILTSPDFALSTPDSSVVPALTPEPSPTPLPTLPKELTSDPSTPSEVTSLSPTSEQVPESDTTPDLDTTPYSSTVSEYSRSPDPSPSPHPTTTPDPTMAPDPITTLNPTVTPHFPTTPHPTTTPHPTTITHSTMIPDPTTTPQPFTTITHSTMIPDPTTTPQPFTTMQPTTTPHSTTPHPTTTPHPTTITHSTMIPDPTTTPQPFTTMQPTTMPHPTTTPHPTTTPHPTTTPHPTTTPHPTMTPDPTTTPYPTTTPDPTTTPHPTTPDPSSTPVITTVSLPTSLGTELSSPTLAPTVKPSLHPQLTFTAPAPHTSTSQIPTLEPSPALESSPSRSSTATSMDPLSTEDFKPPRSQSPNLTPPPTHTPHSASDLTVSPDPLLSPTAHPLDHPPLDPLTLGPTPGQSPGPHGPCVAPTPPVRVMACEPPALVELVAAVRDVGGQLQRLTQVVEQERQERQALLLGLTQLVEAARGLGQLGEAVKRLAEMAWTTSMPAPTTTTPEEEERPLRGDV

SEQ ID NO: 20295 - protein, 386 aa, Homo sapiens
LAYRQYLQDSHLPLQLPWPWGPQDAPPQSQPFLQPSERLRLADGPHGCAGRLEVWHGGRWGTVCDDGWDLRDAAVACRQLGCGGALAAPGGAFFGEGAGPVWLSELACRGNEGQLGLCHHRGWKAHICSHEEDAGVVCAGQRVANSRDDSTSPLDGAPWPGLLLELSPSTEEPLVTHAPRPAGNPQNASRKKSPRPKQAKSTRAPLLTTGAPRQERLRLVSGPHRCAGRLEVWHGGRWGTVCDDGWDLRDAAVACRELGCGGALAAPGGARFGPGAGPVWMDDVGCGGGEQALRDCPRSPWGRSNCDHSEDAGLVCTGTSGWGLAPSCLPQTPAPSCPSRKLQRACSQLCLLPACSLHAQRPLTTLSSPSFHSSCRSPCQEWEEQA

SEQ ID NO: 20296 - protein, 81 aa, Homo sapiens
MRLGGLTQAPGNPVLAVQINQDKNFAFLEFRSVDETTQAMAFDGIIFQGQSLKIRRPHDYQPLPGMSENPSVYVPGEWGIH

SEQ ID NO: 20297 - protein, 40 aa, Homo sapiens
MLQKDLHNVVREEIQTSQKELCLKLKCAWDFNDLEDKWWW

SEQ ID NO: 20298 - protein, 11 aa, Homo sapiens
LLGILMWALNG

SEQ ID NO: 20299 - protein, 43 aa, Homo sapiens
LGVLPLLLLVLNLVYSLLIKCTTLDTVQDDATSSWMLICHVDF

SEQ ID NO: 20300 - protein, 18 aa, Homo sapiens
LKFLLFLATGTCIIHLLP

SEQ ID NO: 20301 - protein, 83 aa, Homo sapiens
LSSPPYFIWEREMFQKQKGLIPFIFPVYTFTAVQCCRQTVCLKTFCESLLCSTALSPLLRSRSIYLYEKDGGLSYEILLHLRR

SEQ ID NO: 20302 - protein, 38 aa, Homo sapiens
MFPSLVLNSWAQVILLPQPSKVLDYRREPLCLARAHHC

SEQ ID NO: 20303 - protein, 681 aa, Homo sapiens
LTPRFFPNGVFHRRLPRPRPPQPPSVSSAPTLRPLCAHFSLGKLRLRVRKSAEVAPPRTEKGWGSAEPRHSRAPLGLQGLRMAASAQVSVTFEDVAVTFTQEEWGQLDAAQRTLYQEVMLETCGLLMSLGCPLFKPELIYQLDHRQELWMATKDLSQSSYPGDNTKPKTTEPTFSHLALPEEVLLQEQLTQGASKNSQLGQSKDQDGPSEMQEVHLKIGIGPQRGKLLEKMSSERDGLGSDDGVCTKITQKQVSTEGDLYECDSHGPVTDALIREEKNSYKCEECGKVFKKNALLVQHERIHTQVKPYECTECGKTFSKSTHLLQHLIIHTGEKPYKCMECGKAFNRRSHLTRHQRIHSGEKPYKCSECGKAFTHRSTFVLHHRSHTGEKPFVCKECGKAFRDRPGFIRHYIIHTGEKPYECIECGKAFNRRSYLTWHQQIHTGVKPFECNECGKAFCESADLIQHYIIHTGEKPYKCMECGKAFNRRSHLKQHQRIHTGEKPYECSECGKAFTHCSTFVLHKRTHTGEKPYECKECGKAFSDRADLIRHFSIHTGEKPYECVECGKAFNRSSHLTRHQQIHTGEKPYECIQCGKAFCRSANLIRHSIIHTGEKPYECSECGKAFNRGSSLTHHQRIHTGRNPTIVTDVGRPFMTAQTSVNIQELLLGKEFLNITTEENLW

SEQ ID NO: 20304 - protein, 55 aa, Homo sapiens
LNRLQALVPLSASRSLPLPPRSSLAVLAEAAPMNLTEVVGMEPRMRRHLPSNVFL

SEQ ID NO: 20305 - protein, 21 aa, Homo sapiens
LPPHARRIPGFTARLSRPRPA

SEQ ID NO: 20306 - protein, 115 aa, Homo sapiens [sequence omitted]

SEQ ID NO: 20307 - protein, 15 aa, Homo sapiens
MVILVVLYLGPRRLS

SEQ ID NO: 20308 - protein, 570 aa, Homo sapiens
LTHIFDVTSHTIVNLCFLSISLLSGCWCGAVDEGTPSAESVSVEELSQGRTPKADTSTDKSHPCEICTPVLRDILQMIELHASPCGQKLYLGGASRDFWMSSNLHQLQKLDNGEKLFKVDGDQASFMMNCRFHVSGKPFTFGEVGRDFSATSGLLQHQVTPTIERPHSRIRHLRVPTGRKPLKYTESRKSFREKSVFIQHQRADSGERPYKCSECGKSFSQSSGFLRHRKAHGRTRTHECSECGKSFSRKTHLTQHQRVHTGERPYDCSECGKSFRQVSVLIQHQRVHTGERPYECSECGKSFSHSTNLYRHRSAHTSTRPYECSECGKSFSHSTNLFRHWRVHTGVRPYECSECGKAFSCNIYLIHHQRFHTGERPYVCSECGKSFGQKSVLIQHQRVHTGERPYECSECGKVFSQSSGLFRHRRAHTKTKPYECSECEKSFSCKTDLIRHQTVHTGERPYECSVCGKSFIRKTHLIRHQTVHTNERPYECDECGKSYSQSSALLQHRRVHTGERPYECRECGKSFTRKNHLIQHKTVHTGERPYECSECGKSFSQSSGLLRHRRVHVQ

SEQ ID NO: 20309 - protein, 691 aa, Homo sapiens
VTEPRRRRTVVLCCTEATLELCDGAKRDPPLGQDRDRHAHISWLVTLSSQPCFKPRGSMAVVATLRLSAQGTVTFEDVAVKFTQEEWNLLSEAQRCLYRDVTLENLALMSSLGCWCGVEDEAAPSKQSIYIQRETQVRTPVTGVSPKKAHPCEMCGPILGDILHVADHQGTHHKQKLHRCEAWGNKLYDSGNFHQHQNEHIGEKPYRGSVEEALFVKRCKLHVSGESSVFSESGKDFLPRSGLLQQEASHTGEKSNSKTECVSPFQCGGAHYSHGDSMKHFSTKHILSQHQRLLPREECYVCCECGKSFSKYVSFSNHQRVHSGKRPYECGECEKSFSQKSSLIQHQQFHTGGKPYGCEECGKYFSLEGYLRRHQKVHAGKGPYECGECGKSFSSNVNLKSHQRIHTGERPYKCGECEKSFSRKPSLSYHQRIHTEVRPYKCGECGKSYISKGHLRIHQRMHTGERPYKCGDCGKSFNEKGHLRSHQRVHTTERPYKCGECGKCFSHKGNLILHQHGHTRKRPYMCWECGKLFKKKSHLLVHQRIHSGEKPYACEACQKFFRHKCHLTAHQRVHTGERPYECSDCGKSFTHSCAFIVHKRVHTGQKPYECSECGKSFAASSYLTSHRRVHTGQKPYECSECGKSFAGISSLTNHRRVHTGEKPYGCSECEKKFRKSSSLRYHQRVHERKAL

SEQ ID NO: 20310 - protein, 460 aa, Homo sapiens
VTEPRRRRTVVLCCTEATLELCDGAKRDPPLGQDRDRHAHISWLVTLSSQPCFKPRGSMAVVATLRLSAQGTVTFEDVAVKFTQEEWNLLSEAQRCLYRDVTLENLALMSSLGCWCGVEDEAAPSKQSIYIQRETQVRTPVTGVSPKKAHPCEMCGPILGDILHVADHQGTHHKQKLHRCEAWGNKLYDSGNFHQHQNEHIGEKPYRGSVEEALFVKRCKLHVSGESSVFSESGKDFLPRSGLLQQEASHTGEKSNSKTECVSPFQCGGAHYSHGDSMKHFSTKHILSQHQRLLPREECYVCCECGKSFSKYVSFSNHQRVHSGKRPYECGECEKSFSQKSSLIQHQQFHTGGKPYGCEECGKYFSLEGYLRRHQKVHAGKGPYECGECGKSFSSNVNLKSHQRIHTGERPYKCGECEKSFSRKPSLSYHQRFGRPRWVDHKDRKEFKTSLGNIVKSCLF

SEQ ID NO: 20311 - protein, 67 aa, Homo sapiens
VKSPSCCTEADLRPRNGARRSRQCFPRVLGMAAAALRLPAQASSGCKEENTLCLREEEGGSEFKLLP

SEQ ID NO: 20312 - protein, 218 aa, Homo sapiens
LRVMDKVQSGFLILFLFLMECQLHLCLPYADGLHPTGNITGLPGSKRSQPPRNITKEPKVFFHKTQLPGIQGAASRSTAASPTNPMKFLRNKAIIRHRPALVKVILISSVAFSIALICGMAISYMIYRLAQAEERQQLESLYKNLRIPLLGDEEEGSEDEGESTHLLPENENELEKFIHSVIISKRSKNIKKKLKEEQNSVTENKTKNASHNGKMEDL

SEQ ID NO: 20313 - protein, 266 aa, Homo sapiens
LGVVSLFSGSWGGCALALCKAIALSVSSAGLWVLAPPEPTGHLVIPGTSPLEPPCPWLDSHIFQCRFGKMLPLEKAFASPRSSPAPPDLPTPGSAAGVQQEEPETIPERTPADLEFSRLRFREFVYQEAAGPHQTLARLHELCRQWLMPEARSKEQMLELLVLEQFLGILPDKVRPWVVAQYPESCKKAASLVEGLADVLEEPGMLLGSPAGSSSILSDGVYERHMDPLLLPGELASPSQALGAGEIPAPSETRECPASLAASAGP

SEQ ID NO: 20314 - protein, 120 aa, Homo sapiens
LMFSRGSTMLKRGKRQIITRRCSKDILRFLIVMMKHGYIGKFDITDDHRAGEIVVNLTGMLNKCGMISPRFDVLKVLEKRQNNLLPSCQFGFIVLTSAGIMDHEAARQKYTKGKILGFFF

SEQ ID NO: 20315 - protein, 16 aa, Homo sapiens
VQVSLAASRLARRFHC

SEQ ID NO: 20316 - protein, 73 aa, Homo sapiens
VPLPLLGAPHLRIGAQRPCGAPGGRKLMQPRAQGAVGVLRSAGDSGLAPSPPVAAQGRGLWGAGEASLIPPRN

SEQ ID NO: 20317 - protein, 309 aa, Homo sapiens
LEVPEAQEDVEATFPVHQPGNYSCSYRTDGEGALSEPSATVTIEELAAPPPPVLMHHGESSQVLHPGNKVTLTCVAPLSGVDFQLRRGEKELLVPRSSTSPDRIFFHLNAVALGDGGHYTCRYRLHDNQNGWSGDSAPVELILSDETLPAPEFSPEPESGRALRLRCLAPLEGARFALVREDRGGRRVHRFQSPAGTEALFELHNISVADSANYSCVYVDLKPPFGGSAPSERLELHVDGELAGHQRGRARVQCPSGPPVFPLFPWASDGGALGLGSAPIAYPGGEQAIGGRGSGDAWNFGLFPTDASP

SEQ ID NO: 20318 - protein, 105 aa, Homo sapiens
LKRGGEVQHWPLQRGSPGQALSCQILQPELCAPGWRLQPRRLGREDSPRPMPRVPPGPGRRGPRSRGPSKRTELGAAPLKRGTCVERRAVGRLPQAGAPGAAASG

SEQ ID NO: 20319 - protein, 38 aa, Homo sapiens
VIGLPGWGRTLFQEGTHQTCCCAIKSRIEIITGKEGIP

SEQ ID NO: 20320 - protein, 41 aa, Homo sapiens
LRLLIALLCICAELSTVGDSVRVLKCAHILKQVFELQPILN

SEQ ID NO: 20321 - protein, 216 aa, Homo sapiens
MAKQGQMDAVRIMAKDLVRTRRYVRKFVLMRANIQAVSLKIQTLKSNNSMAQAMKGVTKAMGTMNRQLKLPQIQKIMMEFERQAEIMDMKEEMMNDAIDDAMGDEEDEEESDAVVSQVLDELGLSLTDELSSECSKSWTPFPTQGPATAPSPPFPCITPLRCLTPPAQTPTFSADLPSTGGSLSVAAGGKKAEAAASALADADADLEERLKNLRRD

SEQ ID NO: 20322 - protein, 298 aa, Homo sapiens
LQRGLRPELARARKERPRAVGAGPGGPENSRIWPSAAERVRGAGPGRSRTTGAEAGRAVGAERSGAARQAGRVAAAAEEAAAAGPRSGGDAGGGGGPGGRGPGPRGGGSGGGGGRMIKLFSLKQQKKEEESAGGTKGSSKKASAAQLRIQKDINELNLPKTCDISFSDPDDLLNFKLVICPDEGFYKSGKFVFSFKVGQGYPHDPPKVKCETMVYHPNIDLEGNVCLNILREDWKPVLTINSIIYGLQYLFLEPNPEDPLNKEAAEVLQNNRRLFEQNVQRSMRGGYIGSTYFERCLK

SEQ ID NO: 20323 - protein, 11 aa, Homo sapiens
MMTMVVLFLTS

SEQ ID NO: 20324 - protein, 715 aa, Homo sapiens
LLALVLFCAWGTLAVVAQKPGAGCPSRCLCFRTTVRCMHLLLEAVPAVAPQTSILDLRFNRIREIQPGAFRRLRNLNTLLLNNNQIKRIPSGAFEDLENLKYLYLYKNEIQSIDRQAFKGLASLEQLYLHFNQIETLDPDSFQHLPKLERLFLHNNRITHLVPGTFNHLESMKRLRLDSNTLHCDCEILWLADLLKTYAESGNAQAAAICEYPRRIQGRSVATITPEELNCERPRITSEPQDADVTSGNTVYFTCRAEGNPKPEIIWLRNNNELSMKTDSRLNLLDDGTLMIQNTQETDQGIYQCMAKNVAGEVKTQEVTLRYFGSPARPTFVIQPQNTEVLVGESVTLECSATGHPPPRISWTRGDRTPLPVDPRVNITPSGGLYIQNVVQGDSGEYACSATNNIDSVHATAFIIVQALPQFTVTPQDRVVIEGQTVDFQCEAKGNPPPVIAWTKGGSQLSVDRRHLVLSSGTLRISGVALHDQGQYECQAVNIIGSQKVVAHLTVQPRVTPVFASIPSDTTVEVGANVQLPCSSQGEPEPAITWNKDGVQVTESGKFHISPEGFLTINDVGPADAGRYECVARNTIGSASVSMVLSVNVPDVSRNGDPFVATSIVEAIATVDRAINSTRTHLFDSRPRSPNDLLALFRYPRDPYTVEQARAGEIFERTLQLIQEHVQHGLMVDLNGTSQCQSLFFLLHGLSNGVEHASVKSHS

SEQ ID NO: 20325 - protein, 120 aa, Homo sapiens
MRILHAELQQYLGNPQESLDRLHKVKTVCSKILANLEQGLAEDGGMSSVTQEGRQASIRLWRSRLGRVMYSMANCLLLMKDYVLAVEAYHSVIKYYPEQEPQLLSGIGRISLQVPVHGQT

SEQ ID NO: 20326 - protein, 9 aa, Homo sapiens
MLPGAGSER

SEQ ID NO: 20327 - protein, 13 aa, Homo sapiens
VRHLPAPVTEVRC

SEQ ID NO: 20328 - protein, 81 aa, Homo sapiens
LPALRMRGNLALVGVLISLAFLSLLPSGHPQPAGDDACSVQILVPGLKGDAGEKGDKGAPGRPGRVGPTGEKAVTASRDSF

SEQ ID NO: 20329 - protein, 121 aa, Homo sapiens
LPALRMRGNLALVGVLISLAFLSLLPSGHPQPAGDDACSVQILVPGLKGDAGEKGDKGAPGRPGRVGPTGEKGDMGDKGQKGSVGRHGKIGPIGSKGEKGDSGDIGPPGPNGEPAPSAPQR

SEQ ID NO: 20330 - protein, 252 aa, Homo sapiens
LPALRMRGNLALVGVLISLAFLSLLPSGHPQPAGDDACSVQILVPGLKGDAGEKGDKGAPGRPGRVGPTGEKGEKGDSGDIGPPGPNGEPGLPCECSQLRKAIGEMDNQVSQLTSELKFIKNAVAGVRETESKIYLLVKEEKRYADAQLSCQGRGGTLSMPKDEAANGLMAAYLAQAGLARVFIGINDLEKEGAFVYSDHSPMRTFNKWRSGEPNNAYDEEDCVEMVASGGWNDVACHTTMYFMCEFDKENM

SEQ ID NO: 20331 - protein, 252 aa, Homo sapiens
LPALRMRGNLALVGVLISLAFLSLLPSGHPQPAGDDACSVQILVPGLKGDMGDKGQKGSVGRHGKIGPIGSKGEKGDSGDIGPPGPNGEPGLPCECSQLRKAIGEMDNQVSQLTSELKFIKNAVAGVRETESKIYLLVKEEKRYADAQLSCQGRGGTLSMPKDEAANGLMAAYLAQAGLARVFIGINDLEKEGAFVYSDHSPMRTFNKWRSGEPNNAYDEEDCVEMVASGGWNDVACHTTMYFMCEFDKENM

SEQ ID NO: 20332 - protein, 228 aa, Homo sapiens
LPALRMRGNLALVGVLISLAFLSLLPSGHPQPAGDDACSVQILVPGLKGEKGDSGDIGPPGPNGEPGLPCECSQLRKAIGEMDNQVSQLTSELKFIKNAVAGVRETESKIYLLVKEEKRYADAQLSCQGRGGTLSMPKDEAANGLMAAYLAQAGLARVFIGINDLEKEGAFVYSDHSPMRTFNKWRSGEPNNAYDEEDCVEMVASGGWNDVACHTTMYFMCEFDKENM

SEQ ID NO: 20333 - protein, 29 aa, Homo sapiens
MNAGYLCVWYLLCPFLFKDPEQNKDTLSI

SEQ ID NO: 20334 - protein, 72 aa, Homo sapiens
LPTKTIRVKKSPLHPRTRKPPGWHKRPNSWEPSTVQGAWGRRPEAGDTEESGGYYGSGNVECNVSSSAHLCY

SEQ ID NO: 20335 - protein, 26 aa, Homo sapiens
LPTKTIRWPPEDTPLIPTPREHTAAS

SEQ ID NO: 20336 - protein, 13 aa, Homo sapiens
LLCISFLLMCGAS

SEQ ID NO: 20337 - protein, 401 aa, Homo sapiens
MATTSTTGSTLLQPLSNAVQLPIDQVNFVVCQLFALLAAIWFRTYLHSSKTSSFIRHVVATLLGLYLALFCFGWYALHFLVQSGISYCIMIIIGVENMHNYCFVFALGYLTVCQVTRVYIFDYGQYSADFSGPMMIITQKITSLACEIHDGMFRKDEELTSSQRDLAVRRMPSLLEYLSYNCNFMGILAGPLCSYKDYITFIEGRSYHITQSGENGKEETQYERTEPSPNTAVVQKLLVCGLSLLFHLTICTTLPVEYNIDEHFQATASWPTKIIYLYISLLAARPKYYFAWTLADAINNAAGFGFRGYDENGAARWDLISNLRIQQIEMSTSFKMFLDNWNIQTALWLKRVCYERTSFSPTIQTFILSAIWHGVYPGYYLTFLTGVLMTLAARANFLKER

SEQ ID NO: 20338 - protein, 222 aa, Homo sapiens
LLHGAVRGRGLRECPALASLVALRGLHHPGYNTRWAKIILPRLIRKGNSLDIPVAVTIFFGANDSALKDENPKQHIPLEEYAANLKSMVQYLKSVDIPENRVILITPTPLCETAWEEQCIIQGCKLNRLNSVVGEYANACLQVAQDCGTDVLDLWTLMQDSQDFSSYLSDGLHLSPKGNEFLFSHLWPLIEKKVSSLPLLLPYWRDVAEAKPELSLLGDGDH

SEQ ID NO: 20339 - protein, 285 aa, Homo sapiens
MRQSLLFLTSVVPFVLAPRPPDDPGFGPHQRLEKLDSLLSDYDILSLSNIQQHSVRKRDLQTSTHVETLLTFSALKRHFKLYLTSSTERFSQNFKVVVVDGKNESEYTVKWQDFFTGHVVGEPDSRVLAHIRDDDVIIRINTDGAEYNIEPLWRFVNDTKDKRMLVYKSEDIKNVSRLQSPKVCGYLKVDNEELLPKGLVDREPPEELVHRVKRRADPDPMKNTCKLLVVADHRFYRYMGRGEESTTTNYLIELIDRVDDIYRNTSWDNAGFKGYGIQIEQLLFE

SEQ ID NO: 20340 - protein, 209 aa, Homo sapiens
MRQSLLFLTSVVPFVLAPRPPDDPGFGPHQRLEKLDSLLSDYDILSLSNIQQHSVRKRDLQTSTHVETLLTFSALKRHFKLYLTSSTERFSQNFKVVVVDGKNESEYTVKWQDFFTGHVVGEPDSRVLAHIRDDDVIIRINTDGAEYNIEPLWRFVNDTKDKRMLVYKSEDIKNVSRLQSPKVCGYLKVDNEELLPKGLVDREPPEGKT

SEQ ID NO: 20341 - protein, 13 aa, Homo sapiens
LCLSWPSWCAVLL

SEQ ID NO: 20342 - protein, 518 aa, Homo sapiens
LVPRDLWGPGRRRPRPSQRTGRGGNREVPGGVHGGVPGGLRKAPAEAPALRLKIARGPAASLGRGKAQPMGRVGGMAQPMGRAGAPKPMGRAGSARRGRFKGCWSEGSPVHPVPAVLSWLLALLRCASTMLSLRVPLAPITDPQQLQLSPLKGLSLVDKENTPPALSGTRVLASKTARRIFQEPTEPKTKAAAPGVEDEPLLRENPRRFVIFPIEYHDIWQMYKKAEASFWTAEEVDLSKDIQHWESLKPEERYFISHVLAFFAASDGIVNENLVERFSQEVQITEARCFYGFQIAMENIHSEMYSLLIDTYIKDPKEREFLFNAIETMPCVKKKADWALRWIGDKEATYGERVVAFAAVEGIFFSGSFASIFWLKKRGLMPGLTFSNELISRDEGLHCDFACLMFKHLVHKPSEERVREIIINAVRIEQEFLTEALPVKLIGMNCTLMKQYIEFVADRLMLELGFSKVFRVENPFDFMENISLEGKTNFFEKRVGEYQRMGVMSSPTENSFTLDADF

SEQ ID NO: 20343 - protein, 108 aa, Homo sapiens
VHPVPAVLSWLLALLRCASTMLSLRVPLAPITDPQQLQLSPLKGLSLVDKENTVSPRGGRCGQGREAGKAKPLLTHTRLPAAAGPERDPRPGQQDREEDLPGAHGAEN

SEQ ID NO: 20344 - protein, 144 aa, Homo sapiens
VHPVPAVLSWLLALLRCASTMLSLRVPLAPITDPQQLQLSPLKGLSLVDKENTPPALSGTRVLASKTARRIFQEPTEPKTKAAAPGVEDEPLLRENPRRFVIFPIEYHDIWQMYKKAEASFWTAEEVIGGPQKTPAGVTVTPQT

SEQ ID NO: 20345 - protein, 183 aa, Homo sapiens
VHPVPAVLSWLLALLRCASTMLSLRVPLAPITDPQQLQLSPLKGLSLVDKENTPPALSGTRVLASKTARRIFQEPTEPKTKAAAPGVEDEPLLRENPRRFVIFPIEYHDIWQMYKKAEASFWTAEEVDLSKDIQHWESLKPEERYFISHVLAFFAASDGIVNENLVSFQNIFHSFDVDDLRSN

SEQ ID NO: 20346 - protein, 203 aa, Homo sapiens
LSWLLALLRCASTMLSLRVPLAPITDPQQLQLSPLKGLSLVDKENTPPALSGTRVLASKTARRIFQEPTEPKTKAAAPGVEDEPLLRENPRRFVIFPIEYHDIWQMYKKAEASFWTAEEVDLSKDIQHWESLKPEERYFISHVLAFFAASDGIVNENLVERFSQEVQITEARCFYGFQIAMENIHSEMYSLLIDTYIKDPKER

SEQ ID NO: 20347 - protein, 24 aa, Homo sapiens
VIWAFICVRSRFILFLTVFSSTSG

SEQ ID NO: 20348 - protein, 68 aa, Homo sapiens
LPRVGAHAEAIRSFLPGPWGDEESPGLPATRTATWARRATFPGRGLLLFKMRTAPPLGAVVTGEMRTH

SEQ ID NO: 20349 - protein, 51 aa, Homo sapiens
LPESASWLGPAHLFRGHLLGKLSLEEFIRGAKSDPSIVRLLQCDPSSASQF

SEQ ID NO: 20350 - protein, 44 aa, Homo sapiens
MALISHVLLSLLGKLSLEEFIRGAKSDPSIVRLLQCDPSSASQF

SEQ ID NO: 20351 - protein, 443 aa, Homo sapiens
LGLSNYMILGLVSCTFFLAVNGLYSSSDDVIELTPSNFNREVIQSDSLWLVEFYAPWCGHCQRLTPEWKKAATALKDVVKVGAVDADKHHSLGGQYGVQGFPTIKIFGSNKNRPEDYQGGRTGEAIVDAALSALRQLVKDRLGGRSGGYSSGKQGRSDSSSKKDVIELTDDSFDKNVLDSEDVWMVEFYAPWCGHCKNLEPEWAAAASEVKEQTKGKVKLAAVDATVNQVLASRYGIRGFPTIKIFQKGESPVDYDGGRTRSDIVSRALDLFSDNAPPPELLEIINEDIAKRTCEEHQLCVVAVLPHILDTGAAGRNSYLEVLLKLADKYKKKMWGWLWTEAGAQSELETALGIGGFGYPAMAAINARKMKFALLKGSFSEQGINEFLRELSFGRGSTAPVGGGAFPTIVEREPWDGRDGELPVEDDIDLSDVELDDLGKDEL

SEQ ID NO: 20352 - protein, 26 aa, Homo sapiens
VKVPNSATVYLMMLCGLYPCILQPFG

SEQ ID NO: 20353 - protein, 40 aa, Homo sapiens
MNTGIFLLDFLLLFCGDNETEVKGKLVPVLLLKLMYSECF

SEQ ID NO: 20354 - protein, 1425 aa, Homo sapiens
VGPGGVPAGAGGSGAVLGPEAAGPEREEPECGSSGGGMSRPPPTGKMPGAPETAPGDGAGASRQRKLEALIRDPRSPINVESLLDGLNSLVLDLDFPALRKNKNIDNFLNRYEKIVKKIRGLQMKAEDYDVVKVIGRGAFGEVQLVRHKASQKVYAMKLLSKFEMIKRSDSAFFWEERDIMAFANSPWVVQLFYAFQDDRYLYMVMEYMPGGDLVNLMSNYDVPEKWAKFYTAEVVLALDAIHSMGLIHRDVKPDNMLLDKHGHLKLADFGTCMKMDETGMVHCDTAVGTPDYISPEVLKSQGGDGFYGRECDWWSVGVFLYEMLVGDTPFYADSLVGTYSKIMDHKNSLCFPEDAEISKHAKNLICAFLTDREVRLGRNGVEEIRQHPFFKNDQWHWDNIRETAAPVVPELSSDIDSSNFDDIEDDKGDVETFPIPKAFVGNQLPFIGFTYYRENLLLSDSPSCRETDSIQSRKNEESQEIQKKLYTLEEHLSNEMQAKEELEQKCKSVNTRLEKTAKELEEEITLRKSVESALRQLEREKALLQHKNAEYQRKADHEADKKRNLENDVNSLKDQLEDLKKRNQNSQISTEKVNQLQRQLDETNALLRTESDTAARLRKTQAESSKQIQQLESNNRDLQDKNCLLETAKLKLEKEFINLQSALESERRDRTHGSEIINDLQGRICGLEEDLKNGKILLAKVELEKRQLQERFTDLEKEKSNMEIDMTYQLKVIQQSLEQEEAEHKATKARLADKNKIYESIEEAKSEAMKEMEKKLLEERTLKQKVENLLLEAEKRCSLLDCDLKQSQQKINELLKQKDVLNEDVRNLTLKIEQETQKRCLTQNDLKMQTQQVNTLKMSEKQLKQENNHLMEMKMNLEKQNAELRKERQDADGQMKELQDQLEAEQYFSTLYKTQVRELKEECEEKTKLGKELQQKKQELQDERDSLAAQLEITLTKADSEQLARSIAEEQYSDLEKEKIMKELEIKEMMARHKQELTEKDATIASLEETNRTLTSDVANLANEKEELNNKLKDVQEQLSRLKDEEISAAAIKAQFEKQLLTERTLKTQAVNKLAEIMNRKEPVKRGNDTDVRRKEKENRKLHMELKSEREKLTQQMIKYQKELNEMQAQIAEESQIRIELQMTLDSKDSDIEQLRSQLQALHIGLDSSSIGSGPGDAEADDGFPESRLEGWLSLPVRNNTKKFGWVKKYVIVSSKKILFYDSEQDKEQSNPYMVLDIDKLFHVRPVTQTDVYRADAKEIPRIFQILYANEGESKKEQEFPVEPVGEKSNYICHKGHEFIPTLYHFPTNCEACMKPLWHMFKPPPALECRRCHIKCHKDHMDKKEEIIAPCKVYYDISTAKNLLLLANSTEEQQKWVSRLVKKIPKKPPAPDPFARSSPRTSMKIQQNQSIRRPSRQLAPNKPS

SEQ ID NO: 20355 - protein, 1425 aa, Homo sapiens
VGPGGVPAGAGGSGAVLGPEAAGPEREEPECGSSGGGMSRPPPTGKMPGAPETAPGDGAGASRQRKLEALIRDPRSPINVESLLDGLNSLVLDLDFPALRKNKNIDNFLNRYEKIVKKIRGLQMKAEDYDVVKVIGRGAFGEVQLVRHKASQKVYAMKLLSKFEMIKRSDSAFFWEERDIMAFANSPWVVQLFYAFQDDRYLYMVMEYMPGGDLVNLMSNYDVPEKWAKFYTAEVVLALDAIHSMGLIHRDVKPDNMLLDKHGHLKLADFGTCMKMDETGMVHCDTAVGTPDYISPEVLKSQGGDGFYGRECDWWSVGVFLYEMLVGDTPFYADSLVGTYSKIMDHKNSLCFPEDAEISKHAKNLICAFLTDREVRLGRNGVEEIRQHPFFKNDQWHWDNIRETAAPVVPELSSDIDSSNFDDIEDDKGDVETFPIPKAFVGNQLPFIGFTYYRENLLLSDSPSCRETDSIQSRKNEVRIQIQKKLYTLEEHLSNEMQAKEELEQKCKSVNTRLEKTAKELEEEITLRKSVESALRQLEREKALLQHKNAEYQRKADHEADKKRNLENDVNSLKDQLEDLKKRNQNSQISTEKVNQLQRQLDETNALLRTESDTAARLRKTQAESSKQIQQLESNNRDLQDKNCLLETAKLKLEKEFINLQSALESERRDRTHGSEIINDLQGRICGLEEDLKNGKILLAKVELEKRQLQERFTDLEKEKSNMEIDMTYQLKVIQQSLEQEEAEHKATKARLADKNKIYESIEEAKSEAMKEMEKKLLEERTLKQKVENLLLEAEKRCSLLDCDLKQSQQKINELLKQKDVLNEDVRNLTLKIEQETQKRCLTQNDLKMQTQQVNTLKMSEKQLKQENNHLMEMKMNLEKQNAELRKERQDADGQMKELQDQLEAEQYFSTLYKTQVRELKEECEEKTKLGKELQQKKQELQDERDSLAAQLEITLTKADSEQLARSIAEEQYSDLEKEKIMKELEIKEMMARHKQELTEKDATIASLEETNRTLTSDVANLANEKEELNNKLKDVQEQLSRLKDEEISAAAIKAQFEKQLLTERTLKTQAVNKLAEIMNRKEPVKRGNDTDVRRKEKENRKLHMELKSEREKLTQQMIKYQKELNEMQAQIAEESQIRIELQMTLDSKDSDIEQLRSQLQALHIGLDSSSIGSGPGDAEADDGFPESRLEGWLSLPVRNNTKKFGWVKKYVIVSSKKILFYDSEQDKEQSNPYMVLDIDKLFHVRPVTQTDVYRADAKEIPRIFQILYANEGESKKEQEFPVEPVGEKSNYICHKGHEFIPTLYHFPTNCEACMKPLWHMFKPPPALECRRCHIKCHKDHMDKKEEIIAPCKVYYDISTAKNLLLLANSTEEQQKWVSRLVKKIPKKPPAPDPFARSSPRTSMKIQQNQSIRRPSRQLAPNKPS

SEQ ID NO: 20356 - protein, 27 aa, Homo sapiens
MLFLVSLGIVLAVERKASVTSRNSPII

SEQ ID NO: 20357 - protein, 13 aa, Homo sapiens
MLPCNFSFFCLFV

SEQ ID NO: 20358 - protein, 14 aa, Homo sapiens
LDASGLLQVRVIFQ

SEQ ID NO: 20359 - protein, 382 aa, Homo sapiens
MDGVLDYSKTIQGTRDPICAITASDKILIVGRESGTIQRYSLPNVGLIQKYSLNCRAYQLSLNCNSSRLAIIDISGVLTFFDLDARVTDSTGQQVVGELLKLERRDVWDMKWAKDNPDLFAMMEKTRMYVFRNLDPEEPIQTSGYICNFEDLEIKSVLLDEILKDPEHPNKDYLINFEIRSLRDSRALIEKVGIKDASQFIEDNPHPRLWRLLAEAALQKLDLYTAEQAFVRCKDYQGIKFVKRLGKLLSESMKQAEVVGYFGRFEEAERTYLEMDRRDLAIGLRLKLGDWFRVLQLLKTGSGDADDSLLEQANNAIGDYFADRQKWLNAVQYYVQGRNQERLAECYYMLEDYEGLENLAISLPENHKLLPVGIANFSFWNC

SEQ ID NO: 20360 - protein, 252 aa, Homo sapiens
LRVENVCQGPGQEGGPPVTMVSMSFKRNRSDRFYSTRCCGCCHVRTGTIILGTWYMVVNLLMAILLTVEVTHPNSMPAVNIQYEVIGNYYSSERMADNACVLFAVSVLMFIISSMLVYGAISYQVGWLIPFFCYRLFDFVLSCLVAISSLTYLPRIKEYLDQLPDFPYKDDLLALDSSCLLFIVLVFFALFIIFKAYLINCVWNCYKYINNRNVPEIAVYPAFEAPPQYVLPTYEMAVKMPEKEPPPPYLPA

SEQ ID NO: 20361 - protein, 70 aa, Homo sapiens
MSISVLPSSKPHLLNGKGRWMAPAQLDLRLWSQRRCGAEAYPADTLDILLPPGCRGQRPPAQGSCTYLLI

SEQ ID NO: 20362 - protein, 116 aa, Homo sapiens
LLNSDFPNSRTGSSREGGRLCCVSLGKPGLSCAQSLYPCSPSPYPPGNDMRCGLCDRRIQTPRSQGQSLLPGSSHGVGRSGRLTLGTEESTDNPVDGTGGSVIQSLHIVYAVGNFI

SEQ ID NO: 20363 - protein, 1071 aa, Homo sapiens
LSAAPARSPSREPGASPSPAAAAAAGRGRGRCCRSRRRRRRLDESRAAPLIAAQADRQEDRLPSPGHPPWAAGRRRRRRRRRNEGRRRRAGTRGGGPGSVSSGQDPSGPSHRYPPALSALHQPSCAHPRPRALCASGRGRSRAPETIWLPGDAHALLSVGGHRGFRILGTNPELARDGRRKVRALFPCEKPPRPTEMSRHHSRFERDYRVGWDRREWSVNGTHGTTSICSVTSGAGGGTASSLSVRPGLLPLPVVPSRLPTPATAPAPCTTGSSEAITSLVASSASAVTTKAPGISKGDSQSQGLATSIRWGQTPINQSTPWDTDEPPSKQMRESDNPGTGPWVTTVAAGNQPTLIAHSYGVAQPPTFSPAVNVQAPVIGVTPSLPPHVGPQLPLMPGHYSLPQPPSQPLSSVVVNMPAQALYASPQPLAVSTLPGVGQVARPGPTAVGNGHMAGPLLPPPPPAQPSATLPSGAPATNGPPTTDSAHGLQMLRTIGVGKYEFTDPGHPREMLKELNQQRRAKAFTDLKIVVEGREFEVHQNVLASCSLYFKDLIQRSVQDSGQGGREKLELVLSNLQADVLELLLEFVYTGSLVIDSANAKTLLEAASKFQFHTFCKVCVSFLEKQLTASNCLGVLAMAEAMQCSELYHMAKAFALQIFPEVAAQEEILSISKDDFIAYVSNDSLNTKAEELVYETVIKWIKKDPATRTQYAAELLAVVRLPFIHPSYLLNVVDNEELIKSSEACRDLVNEAKRYHMLPHARQEMQTPRTRPRLSAGVAEVIVLVGGRQMVGMTQRSLVAVTCWNPQNNKWYPLASLPFYDREFFSVVSAGDNIYLSGGMESGVTLADVWCYMSLLDNWNLVSRMTVPRCRHNSLVYDGKIYTLGGLGVAGNVDHVERYDTITNQWEAVAPLPKAVHSAAATVCGGKIYVFGGVNEAGRAAGVLQSYVPQTNTWSFIESPMIDNKYAPAVTLNGFVFILGGAYARATTIYDPEKGNIKAGPNMNHSRQFCSAVVLDGKIYATGGIVSSEGPALGNMEAYEPTTNTWTLLPHMPCPVFRHGCVVIKKYIQSG

SEQ ID NO: 20364 - protein, 62 aa, Homo sapiens
LRRAKPAECLCCRSAAPPPLPARRLLTPTSLPLPGSLLCSSALRTLRAGSSLIARLGSAGPD

SEQ ID NO: 20365 - protein, 53 aa, Homo sapiens
LHGFLFNDFLLLTYMVKQFAVSSGSEKLFSSKSNAQFKMYKTDRLGAEDQGGV

SEQ ID NO: 20366 - protein, 1453 aa, Homo sapiens
LALNEVRVKRLEPSLENIIIPFPGKLPSGTQDLTISVLRIHYEQRSLPGVKFFNMSGLGDSSSDPANPDSHKRKGSPCDTLASSTEKRRREQENKYLEELAELLSANISDIDSLSVKPDKCKILKKTVDQIQLMKRMEQEKSTTDDDVQKSDISSSSQGVIEKESLGPLLLEALDGFFFVVNCEGRIVFVSENVTSYLGYNQEELMNTSVYSILHVGDHAEFVKNLLPKSLVNGVPWPQEATRRNSHTFNCRMLIHPPDEPGTENQEACQRYEVMQCFTVSQPKSIQEDGEDFQSCLICIARRLPRPPAITGVESFMTKQDTTGKIISIDTSSLRAAGRTGWEDLVRKCIYAFFQPQGREPSYARQLFQEVMTRGTASSPSYRFILNDGTMLSAHTKCKLCYPQSPDMQPFIMGIHIIDREHSGLSPQDDTNSGMSIPRVNPSVNPSISPAHGVARSSTLPPSNSNMVSTRINRQQSSDLHSSSHSNSSNSQGSFGCSPGSQIVANVALNQGQASSQSSNPSLNLNNSPMEGTGISLAQFMSPRRQVTSGLATRPRMPNNSFPPNISTLSSPVGMTSSACNNNNRSYSNIPVTSLQGMNEGPNNSVGFSASSPVLRQMSSQNSPSRLNIQPAKAESKDNKEIASILNEMIQSDNSSSDGKPLDSGLLHNNDRLSDGDSKYSQTSHKLVQLLTTTAEQQLRHADIDTSCKDVLSCTGTSNSASANSSGGSCPSSHSSLTERHKILHRLLQEGSPSDITTLSVEPDKKDSASTSVSVTGQVQGNSSIKLELDASKKKESKDHQLLRYLLDKDEKDLRSTPNLSLDDVKVKVEKKEQMDPCNTNPTPMTKPTPEEIKLEAQSQFTADLDQFDQLLPTLEKAAQLPGLCETDRMDGAVTSVTIKSEILPASLQSATARPTSRLNRLPELELEAIDNQFGQPGTGDQIPWTNNTVTAINQSKSEDQCISSQLDELLCPPTTVEGRNDEKALLEQLVSFLSGKDETELAELDRALGIDKLVQGGGLDVLSERFPPQQATPPLIMEERPNLYSQPYSSPSPTANLPSPFQGMVRQKPSLGTMPVQVTPPRGAFSPGMGMQPRQTLNRPPAAPNQLRLQLQQRLQGQQQLIHQNRQAILNQFAATAPVGINMRSGMQQQITPQPPLNAQMLAQRQRELYSQQHRQRQLIQQQRAMLMRQQSFGNNLPPSSGLPVQMGNPRLPQGAPQQFPYPPNYGTNPGTPPASTSPFSQLAANPEASLANRNSMVSRGMTGNIGGQFGTGINPQMQQNVFQYPGAGMVPQGEANFAPSLSPGSSMVPMPIPPPQSSLLQQTPPASGYQSPDMKAWQQGAIGNNNVFSQAVQNQPTPAQPGVYNNMSITVSMAGGNTNVQNMNPMMAQMQMSSLQMPGMNTVCPEQINDPALRHTGLYCNQLSSTDLLKTEADGTQDKKTEEFFSVVTTD

SEQ ID NO: 20367 - protein, 1495 aa, Homo sapiens
LALNEVRVKRLEPSLENIIIPFPGKLPSGTQDLTISVLRIHYEQRSLPGVKFFNMSGLGDSSSDPANPDSHKRKGSPCDTLASSTEKRRREQENKYLEELAELLSANISDIDSLSVKPDKCKILKKTVDQIQLMKRMEQEKSTTDDDVQKSDISSSSQGVIEKESLGPLLLEALDGFFFVVNCEGRIVFVSENVTSYLGYNQEELMNTSVYSILHVGDHAEFVKNLLPKSLVNGVPWPQEATRRNSHTFNCRMLIHPPDEPGTENQEACQRYEVMQCFTVSQPKSIQEDGEDFQSCLICIARRLPRPPAITGVESFMTKQDTTGKIISIDTSSLRAAGRTGWEDLVRKCIYAFFQPQGREPSYARQLFQEVMTRGTASSPSYRFILNDGTMLSAHTKCKLCYPQSPDMQPFIMGIHIIDREHSGLSPQDDTNSGMSIPRVNPSVNPSISPAHGVARSSTLPPSNSNMVSTRINRQQSSDLHSSSHSNSSNSQGSFGCSPGSQIVANVALNQGQASSQSSNPSLNLNNSPMEGTGISLAQFMSPRRQVTSGLATRPRMPNNSFPPNISTLSSPVGMTSSACNNNNRSYSNIPVTSLQGMNEGPNNSVGFSASSPVLRQMSSQNSPSRLNIQPAKAESKDNKEIASILNEMIQSDNSSSDGKPLDSGLLHNNDRLSDGDSKYSQTSHKLVQLLTTTAEQQLRHADIDTSCKDVLSCTGTSNSASANSSGGSCPSSHSSLTERHKILHRLLQEGSPSDITTLSVEPDKKDSASTSVSVTGQVQGNSSIKLELDASKKKESKDHQLLRYLLDKDEKDLRSTPNLSLDDVKVKVEKKEQMDPCNTNPTPMTKPTPEEIKLEAQSQFTADLDQFDQLLPTLEKAAQLPGLCETDRMDGAVTSVTIKSEILPASLQSATARPTSRLNRLPELELEAIDNQFGQPGTGDQIPWTNNTVTAINQSKSEDQCISSQLDELLCPPTTVEGRNDEKALLEQLVSFLSGKDETELAELDRALGIDKLVQGGGLDVLSERFPPQQATPPLIMEERPNLYSQPYSSPSPTANLPSPFQGMVRQKPSLGTMPVQVTPPRGAFSPGMGMQPRQTLNRPPAAPNQLRLQLQQRLQGQQQLIHQNRQAILNQFAATAPVGINMRSGMQQQITPQPPLNAQMLAQRQRELYSQQHRQRQLIQQQRAMLMRQQSFGNNLPPSSGLPVQMGNPRLPQGAPQQFPYPPNYGTNPGTPPASTSPFSQLAANPEASLANRNSMVSRGMTGNIGGQFGTGINPQMQQNVFQYPGAGMVPQGEANFAPSLSPGSSMVPMPIPPPQSSLLQQTPPASGYQSPDMKAWQQGAIGNNNVFSQAVQNQPTPAQPGVYNNMSITVSMAGGNTNVQNMNPMMAQMQMSSLQMPGMNTVCPEQINDPALRHTGLYCNQLSSTDLLKTEADGTQQVQQVQVFADVQCTVNLVGGDPYLNQPGPLGTQKPTSGPQTPQAQQKSLLQQLLTE

SEQ ID NO: 20368 - protein, 1494 aa, Homo sapiens
LALNEVRVKRLEPSLENIIIPFPGKLPSGTQDLTISVLRIHYEQRSLPGVKFFNMSGLGDSSSDPANPDSHKRKGSPCDTLASSTEKRRREQENKYLEELAELLSANISDIDSLSVKPDKCKILKKTVDQIQLMKRMEQEKSTTDDDVQKSDISSSSQGVIEKESLGPLLLEALDGFFFVVNCEGRIVFVSENVTSYLGYNQEELMNTSVYSILHVGDHAEFVKNLLPKSLVNGVPWPQEATRRNSHTFNCRMLIHPPDEPGTENQEACQRYEVMQCFTVSQPKSIQEDGEDFQSCLICIARRLPRPPAITGVESFMTKQDTTGKIISIDTSSLRAAGRTGWEDLVRKCIYAFFQPQGREPSYARQLFQEVMTRGTASSPSYRFILNDGTMLSAHTKCKLCYPQSPDMQPFIMGIHIIDREHSGLSPQDDTNSGMSIPRVNPSVNPSISPAHGVARSSTLPPSNSNMVSTRINRQQSSDLHSSSHSNSSNSQGSFGCSPGSQIVANVALNQGQASSQSSNPSLNLNNSPMEGTGISLAQFMSPRRQVTSGLATRPRMPNNSFPPNISTLSSPVGMTSSACNNNNRSYSNIPVTSLQGMNEGPNNSVGFSASSPVLRQMSSQNSPSRLNIQPAKAESKDNKEIASILNEMIQSDNSSSDGKPLDSGLLHNNDRLSDGDSKYSQTSHKLVQLLTTTAEQQLRHADIDTSCKDVLSCTGTSNSASANSSGGSCPSSHSSLTERHKILHRLLQEGSPSDITTLSVEPDKKDSASTSVSVTGQVQGNSSIKLELDASKKKESKDHQLLRYLLDKDEKDLRSTPNLSLDDVKVKVEKKEQMDPCNTNPTPMTKPTPEEIKLEAQSQFTADLDQFDQLLPTLEKAAQLPGLCETDRMDGAVTSVTIKSEILPASLQSATARPTSRLNRLPELELEAIDNQFGQPGTGDQIPWTNNTVTAINQSKSEDQCISSQLDELLCPPTTVEGRNDEKALLEQLVSFLSGKDETELAELDRALGIDKLVQGGGLDVLSERFPPQQATPPLIMEERPNLYSQPYSSPSPTANLPSPFQGMVRQKPSLGTMPVQVTPPRGAFSPGMGMQPRQTLNRPPAAPNQLRLQLQQRLQGQQQLIHQNRQAILNQFAATAPVGINMRSGMQQQITPQPPLNAQMLAQRQRELYSQQHRQRQLIQQQRAMLMRQQSFGNNLPPSSGLPVQMGNPRLPQGAPQQFPYPPNYGTNPGTPPASTSPFSQLAANPEASLANRNSMVSRGMTGNIGGQFGTGINPQMQQNVFQYPGAGMVPQGEANFAPSLSPGSSMVPMPIPPPQSSLLQQTPPASGYQSPDMKAWQQGAIGNNNVFSQAVQNQPTPAQPGVYNNMSITVSMAGGNTNVQNMNPMMAQMQMSSLQMPGMNTVCPEQINDPALRHTGLYCNQLSSTDLLKTEADGTQVQQVQVFADVQCTVNLVGGDPYLNQPGPLGTQKPTSGPQTPQAQQKSLLQQLLTE

SEQ ID NO: 20369 - protein, 300 aa, Homo sapiens
LVLKTWMAGILASGLGVLAHLERLETQVSRSRKQSEELQSVQAQEGALGTKIHKLRRLRDELRAVVRHRRASVKACIANVEPNQTVEINEQEALEEKLENVKAILQAYHFTGLSGKLTSRGVCVCISTAFEGNLLDSYFVDLVIQKPLRIHHHSVPVFIPLEEIAAKYLQTNIQHFLFSLCEYLNAYSGRKYQADRLQSDFAALLTGPLQRNPLCNLLSFTYKLDPGGQSFPFCARLLYKDLTATLPTDVTVTCQGVEVLSTSWEEQRASHETLFCTKPLHQVFASFTRKGEKLDMSLVS

SEQ ID NO: 20370 - protein, 98 aa, Homo sapiens
LEMDHKLTSQPGRPSFYCNSRHSIVGSSHQLGFWFSHLESSGLKVFQVSLPCECVNLPTRIASVVLSLMSLLVVGQAPAWEGSLLRGRPAGGAHLCAA

SEQ ID NO: 20371 - protein, 44 aa, Homo sapiens
LLLYLLTIIMYISQSGSRTFREGRVGARGVPAPPAWCPVVSLCK

SEQ ID NO: 20372 - protein, 170 aa, Homo sapiens
LIFPYSLTLFGFVLIDVFSQMSDSNGLMIFSKFDQFLKEVLKLPTAVFEGPSFGYTEHSVRTCFPQQRKIMLNMFLDTMMADPPPQCLVWLPLMHRLAHVENVFHPVECSYCRCESMMGFRYRCQQCHNYQLCQNCFWRGHAGGPHSNQHQMKEHSSWVTALCFICVPEC

SEQ ID NO: 20373 - protein, 489 aa, Homo sapiens
LLREGVLADVSQDSRMTILTYPFKNLPTASKWALRFSIRPLSCSSQLRAAPAVQTKTKKTLAKPNIRNVVVVDGVRTPFLLSGTSYKDLMPHDLARAALTGLLHRTSVPKEVVDYIIFGTVIQEVKTSNVAREAALGAGFSDKTPAHTVTMACISANQAMTTGVGLIASGQCDVIVAGGVELMSDVPIRHSRKMRKLMLDLNKAKSMGQRLSLISKFRFNFLAPELPAVSEFSTSETMGHSADRLAAAFAVSRLEQDEYALRSHSLAKKAQDEGLLSDVVPFKVPGKDTVTKDNGIRPSSLEQMAKLKPAFIKPYGTVTAANSSFLTDGASAMLIMAEEKALAMGYKPKAYLRDFMYVSQDPKDQLLLGPTYATPKVLEKAGLTMNDIDAFEFHEAFSGQILANFKAMDSDWFAENYMGRKTKVGLPPLEKFNNWGGSLSLGHPFGATGCRLVMAAANRLRKEGGQYGLVAACAAGGQGHAMIVEAYPK

SEQ ID NO: 20374 - protein, 454 aa, Homo sapiens
LADHLRSGVQDQPGKQAVQTKTKKTLAKPNIRNVVVVDGVRTPFLLSGTSYKDLMPHDLARAALTGLLHRTSVPKEVVDYIIFGTVIQEVKTSNVAREAALGAGFSDKTPAHTVTMACISANQAMTTGVGLIASGQCDVIVAGGVELMSDVPIRHSRKMRKLMLDLNKAKSMGQRLSLISKFRFNFLAPELPAVSEFSTSETMGHSADRLAAAFAVSRLEQDEYALRSHSLAKKAQDEGLLSDVVPFKVPGKDTVTKDNGIRPSSLEQMAKLKPAFIKPYGTVTAANSSFLTDGASAMLIMAEEKALAMGYKPKAYLRDFMYVSQDPKDQLLLGPTYATPKVLEKAGLTMNDIDAFEFHEAFSGQILANFKAMDSDWFAENYMGRKTKVGLPPLEKFNNWGGSLSLGHPFGATGCRLVMAAANRLRKEGGQYGLVAACAAGGQGHAMIVEAYPK

SEQ ID NO: 20375 - protein, 386 aa, Homo sapiens
MAGYEYVSPEQLAGFDKYKYSAVDTNPLSLYVMHPFWNTIVKVFPTWLAPNLITFSGFLLVVFNFLLMAYFDPDFYASAPGHKHVPDWVWIVVGILNFVAYTLDGVDGKQARRTNSSTPLGELFDHGLDSWSCVYFVVTVYSIFGRGSTGVSVFVLYLLLWVVLFSFILSHWEKYNTGILFLPWGYDISQVTISFVYIVTAVVGVEAWYEPFLFNFLYRDLFTAMIIGCALCVTLPMSLLNFFRSYKNNTLKLNSVYEAMVPLFSPCLLFILSTAWILWSPSDILELHPRVFYFMVGTAFANSTCQLIVCQMSSTRCPTLNWLLVPLFLVVLVVNLGVASYVESILLYTLTTAFTLAHIHYGVRVVKQLSSHFQIYPFSLRKPNSD

SEQ ID NO: 20376 - protein, 88 aa, Homo sapiens
LERTPASADMAWTKYQLFLAGLMLVTGSINTLSANSEHDQCLQLPDAAGCSDHIHWPVLGGLPGPEAGAEPVAGHPSHHRGAGGRGPG

SEQ ID NO: 20377 - protein, 610 aa, Homo sapiens
LGALRRPPSERACSRRRPEHPQLRRRGETETDRATGPRGRSISEENMLANSASVRILIKGGKVVNDDCTHEADVYIENGIIQQVGRELMIPGGAKVIDATGKLVIPGGIDTSTHFHQTFMNATCVDDFYHGTKAALVGGTTMIIGHVLPDKETSLVDAYEKCRGLADPKVCCDYALHVGITWWAPKVKAEMETLVREKGVNSFQMFMTYKDLYMLRDSELYQVLHACKDIGAIARVHAENGELVAEGAKEALDLGITGPEGIEISRPEELEAEATHRVITIANRTHCPIYLVNVSSISAGDVIAAAKMQGKVVLAETTTAHATLTGLHYYHQDWSHAAAYVTVPPLRLDTNTSTYLMSLLANDTLNIVASDHRPFTTKQKAMGKEDFTKIPHGVSGVQDRMSVIWERGVVGGKMDENRFVAVTSSNAAKLLNLYPRKGRIIPGADADVVVWDPEATKTISASTQVQGGDFNLYENMRCHGVPLVTISRGRVVYENGVFMCAEGTGKFCPLRSFPDTVYKKLVQREKTLKVRGVDRTPYLGDVAVVVHPGKKEMGTPLADTPTRPVTRHGGMRDLHESSFSLSGSQIDDHVPKRASARILAPPGGRSSGIW

SEQ ID NO: 20378 - protein, 477 aa, Homo sapiens [sequence omitted]

SEQ ID NO: 20379 - protein, 38 aa, Homo sapiens
MEGMRGLHTSLHPFYPSQHTKQLHLDFSKQLLFPQSLP

SEQ ID NO: 20380 - protein, 363 aa, Homo sapiens
VSRGRALLLSFPAPLAAAGGSLEEELPRGGGARAAGSGDTILLDKRQRPGGTPSAGRAGSSGSSLMEEKQILCVGLVVLDVISLVDKYPKEDSEIRCLSQRWQRGGNASNSCTVLSLLGAPCAFMGSMAPGHVADFVLDDLRRYSVDLRYTVFQTTGSVPIATVIINEASGSRTILYYDRSLPDVSATDFEKVDLTQFKWIHIEGRNASEQVKMLQRIDAHNTRQPPEQKIRVSVEVEKPREELFQLFGYGDVVFVSKDVAKHLGFQSAEEALRGLYGRVRKGAVLVCAWAEEGADALGPDGKLLHSDAFPPPRVVDTLGAGDTFNASVIFSLSQGRSVQEALRFGCQVAGKKCGLQGFDGIV

SEQ ID NO: 20381 - protein, 363 aa, Homo sapiens
VSRGRALLLSFPAPLAAAGGSLEEELPRGGGARAAGSGDTILLDKRQRPGGTPSAGRAGSSGSSLMEEKQILCVGLVVLDVISLVDKYPKEDSEIRCLSQRWQRGGNASNSCTVLSLLGAPCAFMGSMAPGHVADFLVADFRRRGVDVSQVAWQSKGDTPSSCCIINNSNGNRTIVLHDTSLPDVSATDFEKVDLTQFKWIHIEGRNASEQVKMLQRIDAHNTRQPPEQKIRVSVEVEKPREELFQLFGYGDVVFVSKDVAKHLGFQSAEEALRGLYGRVRKGAVLVCAWAEEGADALGPDGKLLHSDAFPPPRVVDTLGAGDTFNASVIFSLSQGRSVQEALRFGCQVAGKKCGLQGFDGIV

SEQ ID NO: 20382 - protein, 78 aa, Homo sapiens
LEEELPRGGGARAAGSGDTILLDKRQRPGGTPSAGRAGSSGSSLMEEKQILCVGLVVLDVISLVDKYPKEDSEIRAGS

SEQ ID NO: 20383 - protein, 46 aa, Homo sapiens
LTMTVLILLLLPTGQAAPKDGVTRPDSEVQHQLLPNPFQPGQEQLG

SEQ ID NO: 20384 - protein, 194 aa, Homo sapiens
LPAAGTGPAQAAYGGRRVGPRVTAGQLGPARSLRVGSPQHKMLSSFLSPQNGTWADTFSLLLALAVALYLGYYWACVLQRPRLVAGPQFLAFLEPHCSITTETFYPTLWCFEGRLQSIFQVLLQSQPLVLYQSDILQTPDGGQLLLDWAKQPDSSQDPDPTTQPIVLLLPGITGSSQETYVLHLVNQALRDGYQ

SEQ ID NO: 20385 - protein, 346 aa, Homo sapiens
LPAAGTGPAQAAYGGRRVGPRVTAGQLGPARSLRVGSPQHKMLSSFLSPQNGTWADTFSLLLALAVALYLGYYWACVLQRPRLVAGPQFLAFLEPHCSITTETFYPTLWCFEGRLQSIFQVLLQSQPLVLYQSDILQTPDGGQLLLDWAKQPDSSQDPDPTTQPIVLLLPGITGSSQETYVLHLVNQALRDGYQAVVFNNRGCRGEELRTHRAFCASNTEDLETVVNHIKHRYPQAPLLAVGISFGGILVLNHLAQARQAAGLVAALTLSACWDSFETTRSLETPLNSLLFNQPLTAGLCQLVERLSYGKTCRPVQSASLMSATHLWPLDIKTVLPTTKQQALEPR

SEQ ID NO: 20386 - protein, 138 aa, Homo sapiens
LPSELLGVRSCQAFLLGCRRWVGAGVSGGQGRTWGPLLWMVPPRDSEAHFHSGRMRGRSLNPATIYPVLPKLLSLLPLSCQKRLHCRSYGQDHLDTGLFPEKPRNGVLGDSRDKEAMALDGTAYQGSSSTCILQETSL

SEQ ID NO: 20387 - protein, 27 aa, Homo sapiens
LVPWAAALLLALGVERALALPEVQKQV

SEQ ID NO: 20388 - protein, 12 aa, Homo sapiens
VTLFSFFAVLHH

SEQ ID NO: 20389 - protein, 500 aa, Homo sapiens
MRSSPELGWRGAPGLWRGEMGLWQWGRGLRVGRGRGAWRRSLGSSPHAGRGSGGSGICSSDSARHSRCSSLHSGGPAALRGSRGSAGCSDLARGRPGLSLPRWGLDGRGTGNMEPSPAAGGLETTRLVSPRDRGGAGGSLRLKSLFTEPSEPLPEESKPVEMPFHHCHRDPLPPPGLTPERLHARRQLYAACAVCFVFMAGEVVGGYLAHSLAIMTDAAHLLADVGSMMGSLFSLWLSTRPATRTMTFGWHRSETLGALASVVSLWMVTGILLYLAFVRLLHSDYHIEGGAMLLTASIAVCANLLMAFVLHQAGPPHSHGSRGAEYAPLEEGPEEPLPLGNTSVRAAFVHVLGDLLQSFGVLAASILIYFKPQYKAADPISTFLFSICALGSTAPTLRDVLRILMEGTPRNVGFEPVRDTLLSVPGVRATHELHLWALTLTYHVASAHLAIDSTADPEAVLAEASSRLYSRFGFSSCTLQVEQYQPEMAQCLRCQEPPQA

SEQ ID NO: 20390 - protein, 46 aa, Homo sapiens
LPLISTRCLFVCLFVLRQGLALSPRLEDSGAITAHCSLNLPPQPPE

SEQ ID NO: 20391 - protein, 525 aa, Homo sapiens
LRAMAAVAVAVREDSGSGMKAELPPGPGAVGREMTKEEKLQLRKEKKQQKKKRKEEKGAEPETGSAVSAAQCQGPTRELPESGIQLGTPREKVPAGRSKAELRAERRAKQEAERALKQARKGEQGGPPPKASPSTAGETPSGVKRLPEYPQVDDLLLRRLVKKPERQQVPTRKDYGSKVSLFSHLPQYSRQNSLTQFMSIPSSVIHPAMVRLGLQYSQGLVSGSNARCIALLRALQQVIQDYTTPPNEELSRDLVNKLKPYMSFLTQCRPLSASMHNAIKFLNKEITSVGSSKREEEAKSELRAAIDRYVQEKIVLAAQAISRFAYQKISNGDVILVYGCSSLVSRILQEAWTEGRRFRVVVVDSRPWLEGRHTLRSLVHAGVPASYLLIPAASYVLPEVSKVLLGAHALLANGSVMSRVGTAQLALVARAHNVPVLVCCETYKFCERVQTDAFVSNELDDPDDLQCKRGEHVALANWQNHASLRLLNLVYDVTPPELVDLVITELGMIPCSSVPVVLRVKSSDQ

SEQ ID NO: 20392 - protein, 580 aa, Homo sapiens
VRGGASGPVGNCSPIGAARFASAAQPPAQVALWTLQPRSEAAGRLRDHGGRSLGLRAMAAVAVAVREDSGSGMKAELPPGPGAVGREMTKEEKLQLRKEKKQQKKKRKEEKGAEPETGSAVSAAQCQVGPTRELPESGIQLGTPREKVPAGRSKAELRAERRAKQEAERALKQARKGEQGGPPPKASPSTAGETPSGVKRLPEYPQVDDLLLRRLVKKPERQQVPTRKDYGSKVSLFSHLPQYSRQNSLTQFMSIPSSVIHPAMVRLGLQYSQGLVSGSNARCIALLRALQQVIQDYTTPPNEELSRDLVNKLKPYMSFLTQCRPLSASMHNAIKFLNKEITSVGSSKREEEAKSELRAAIDRYVQEKIVLAAQAISRFAYQKISNGDVILVYGCSSLVSRILQEAWTEGRRFRVVVVDSRPWLEGRHTLRSLVHAGVPASYLLIPAASYVLPEVSKVLLGAHALLANGSVMSRVGTAQLALVARAHNVPVLVCCETYKFCERVQTDAFVSNELDDPDDLQCKRGEHVALANWQNHASLRLLNLVYDVTPPELVDLVITELGMIPCSSVPVVLRVKSSDQ

SEQ ID NO: 20393 - protein, 37 aa, Homo sapiens
VPGLERLWAPPLRSSATLGSGLHSLERSPAPRTGWLL

SEQ ID NO: 20394 - protein, 15 aa, Homo sapiens
LRAMAAVAVAVREGE

SEQ ID NO: 20395 - protein, 198 aa, Homo sapiens
LSSGGGACRAAAALTVRSPAVPCRREHALFHSRNRVPQRGQRRLRLRVRQDPLLGSSETFNSFLRRAQQETQQVPTEEVSLEVLLSNGQKVLVNVLTSDQTEDVLEAVAAKLDLPDDLIGYFSLFLVREKEDGAFSFVRKLQEFELPYVSVTSLRSQEYKIVLRKRRYQILSVGGSWSPRNSTGNSNLCKRKSPRRSS

SEQ ID NO: 20396 - protein, 36 aa, Homo sapiens
MNGSGGGGGSGLSWAPGPGPGAAQGPRRCMGAARGP

SEQ ID NO: 20397 - protein, 563 aa, Homo sapiens
LELKRRLRGAESGGLSVPSSMSEGESQTVLSSGSDPKVESSSSAPGLTSVSPPVTSTTSAASPEEEEESEDESEILEESPCGRWQKRREEVNQRNVPGIDSAYLAMDTEEGVEVVWNEVQFSERKNYKLQEEKVRAVFDNLIQLEHLNIVKFHKYWADIKENKARVIFITEYMSSGSLKQFLKKTKKNHKTMNEKAWKRWCTQILSALSYLHSCDPPIIHGNLTCDTIFIQHNGLIKIGSVFHRIFANVAPDTINNHVKTCREEQKNLHFFAPEYGEVTNVTTAVDIYSFGMCALEMAVLEIQGNGESSYVPQEAISSAIQLLEDPLQREFIQKCLQSEPARRPTARELLFHPALFEVPSLKLLAAHCIVGHQHMIPENALEEITKNMDTSAVLAEIPAGPGREPVQTLYSQSPALELDKFLEDVRNGIYPLTAFGLPRPQQPQQEEVTSPVVPPSVKTPTPEPAEVETRKVVLMQCNIESVEEGVKHHLTLLLKLEDKLNRHLSCDLMPNENIPELAAELVQLGFISEADQSRLTSLLEETLNKFNFARNSTLNSAAVTVSS

SEQ ID NO: 20398 - protein, 40 aa, Homo sapiens
MSLISVVFSFGLPFRAWDRALRMGEDEGSGIVTRLCTAGR

SEQ ID NO: 20399 - protein, 58 aa, Homo sapiens
LPGFKHITFRLLSTFILRPLLFLFQNVEILGRDTNIIKPDQQKFLRFAPTGVPSGGSP

SEQ ID NO: 20400 - protein, 813 aa, Homo sapiens
LHSIPITVLFFSYYDLLMLAPLRNAPGREGATSPSPPTDATGSLGEWDVDRNVKTEGWVSKERISKLHRLRMADILSQSETLASQDLSGDFKKPALPVSPAARSKAPASSSSNPEEVQKEGPTALQDSNSGEPDIPPPQPDCGDFRSLQEEQSRPPTAVSSPGGPARAPPYQEPPWGGPATAPYSLETLKGGTILGTRSLKGTSYCLFGRLSGCDVCLEHPSVSRYHAVLQHRASGPDGECDSNGPGFYLYDLGSTHGTFLNKTRIPPRTYCRVHVGHVVRFGGSTRLFILQGPEEDREAESELTVTQLKELRKQQQILLEKKMLGEDSDEEEEMDTSERKINAGSQDDEMGCTWGMGEDAVEDDAEENPIVLEFQQEREAFYIKDPKKALQGFFDREGEELEYEFDEQGHSTWLCRVRLPVDDSTGKQLVAEAIHSGKKKEAMIQCSLEACRILDTLGLLRQEAVSRKRKAKNWEDEDFYDSDDDTFLDRTGLIEKKRLNRMKKAGKIDEKPETFESLVAKLNDAERELSEISERLKASSQVLSESPSQDSLDAFMSEMKSGSTLDGVSRKKLHLRTFELRKEQQRLKGLIKIVKPAEIPELKKTETQTTGAENKAKKLTLPLFGAMKGGSKFKLKTGTVGKLPPKRPELPPTLMRMKDEPEVEEEEEEEEEEEKEKEEHEKKKLEDGSLSRPQPEIEPEAAVQEMRPPTDLTHFKETQTHENMSQLSEEEQNKDYQDCSKTTSLCAGPSASKNEYEKSRGELKKKKTPGPGKLPPTLSSKYPEDDPDYCVWVPPEGQSGDGRTHLNDKYGY

SEQ ID NO: 20401 - protein, 163 aa, Homo sapiens
MRGSKSLVCKRAGPPDGHIRRNDPQRGSPTGWEIRPAGRSATQPRQGQTDDKTETQKMNQLGSVHRASVWKSQNPDPDPNCSVPALTPNQPVPLSLVLFHPAFLSKKATWRGMKSLDPLARSPEHKLSVAYQVEAQEGRASGTVISHHPTCSGRQLWSDRRFG

SEQ ID NO: 20402 - protein, 212 aa, Homo sapiens
MRGSKSLVCKRAGPPDGHIRRNDPQRGSPTGWEIRPAGRSATQPRQGQTDDKTETQKMNQLGSVHRASVWKSQNPDPDPNCSVPALTPNQPVPLSLVLFHPAFLSKNLIGRCGDGATTEEKVVKRASCLSTLFFFPPFSPSHDGAFCAKSQLSLCRATWRGMKSLDPLARSPEHKLSVAYQVEAQEGRASGTVISHHPTCSGRQLWSDRRFG

SEQ ID NO: 20403 - protein, 71 aa, Homo sapiens [sequence omitted]

SEQ ID NO: 20404 - protein, 82 aa, Homo sapiens
LWLHSRGSSEVWTPIGLQAALGRHRAGALISSCKTHRLLGLLASLSANSPLPGQLNGGSCWHRKERRSRLRLRKLLEPAPSR

SEQ ID NO: 20405 - protein, 1463 aa, Homo sapiens
LEHSGMGLRPGIFLLELLLLLGQGTPQIHTSPRKSTLEGQLWPETLKNSPFPCNPNKLGVNMPSKSVHSLKPSDIKFVAAIGNLEIPPDPGTGDLEKQDWTERPQQVCMGVMTVLSDIIRYFSPSVPMPVCHTGKRVIPHDGAEDLWIQAQELVRNMKENLQLDFQFDWKLINVFFSNASQCYLCPSAQQNGLAAGGVDELMGVLDYLQQEVPRAFVNLVDLSEVAEVSRQYHGTWLSPAPEPCNCSEETTRLAKVVMQWSYQEAWNSLLASSRYSEQESFTVVFQPFFYETTPSLHSEDPRLQDSTTLAWHLWNRMMEPAGEKDEPLSVKHGRPMKCPSQESPYLFSYRNSNYLTRLQKPQDKLEVREGAEIRCPDKDPSDTVPTSVHRLKPADINVIGALGDSLTAGNGAGSTPGNVLDVLTQYRGLSWSVGGDENIGTVTTLANILREFNPSLKGFSVGTGKETSPNAFLNQAVAGGRAEDLPVQARRLVDLMKNDTRIHFQEDWKIITLFIGGNDLCDFCNDLVHYSPQNFTDNIGKALDILHAEVPRAFVNLVTVLEIVNLRELYQEKKVYCPRMILRSLCPCVLKFDDNSTELATLIEFNKKFQEKTHQLIESGRYDTREDFTVVVQPFFENVDMPKTSEGLPDNSFFAPDCFHFSSKSHSRAASALWNNMLEPVGQKTTRHKFENKINITCPNQVQPFLRTYKNSMQGHGTWLPCRDRAPSALHPTSVHALRPADIQVVAALGDSLTAGNGIGSKPDDLPDVTTQYRGLSYSAGGDGSLENVTTLPNILREFNRNLTGYAVGTGDANDTNAFLNQAVPGAKAEDLMSQVQTLMQKMKDDHRVNFHEDWKVITVLIGGSDLCDYCTDSNLYSAANFVHHLRNALDVLHREVPRVLVNLVDFLNPTIMRQVFLGNPDKCPVQQASVLCNCVLTLRENSQELARLEAFSRAYRSSMRELVGSGRYDTQEDFSVVLQPFFQNIQLPVLADGLPDTSFFAPDCIHPNQKFHSQLARALWTNMLEPLGSKTETLDLRAEMPITCPTQNEPFLRTPRNSNYTYPIKPAIENWGSDFLCTEWKASNSVPTSVHQLRPADIKVVAALGDSLTTAVGARPNNSSDLPTSWRGLSWSIGGDGNLETHTTLPNILKKFNPYLLGFSTSTWEGTAGLNVAAEGARARDMPAQAWDLVERMKNSPDINLEKDWKLVTLFIGVNDLCHYCENPEAHLATEYVQHIQQALDILSEELPRAFVNVVEVMELASLYQGQGGKCAMLAAQNNCTCLRHSQSSLEKQELKKVNWNLQHGISSFSYWHQYTQREDFAVVVQPFFQNTLTPLNERGDTDLTFFSEDCFHFSDRGHAEMAIALWNNMLEPVGRKTTSNNFTHSRAKLKCPSPESPYLYTLRNSRLLPDQAEEAPEVLYWAVPVAAGVGLVVGIIGTVVWRCRRGGRREDPPMSLRTVAL

SEQ ID NO: 20406 - protein, 1452 aa, Homo sapiens
LEHSGMGLRPGIFLLELLLLLGQGTPQIHTSPRKSTLEGQLWPETLKNSPFPCNPNKLGVNMPSKSVHSLKPSDIKFVAAIGNLEIPPDPGTGDLEKQDWTERPQQVCMGVMTVLSDIIRYFSPSVPMPVCHTGKRVIPHDGAEDLWIQAQELVRNMKENLQLDFQFDWKLINVFFSNASQCYLCPSAQQAPSLSTVLLSQNGLAAGGVDELMGVLDYLQQEVPRAFVNLVDLSEVAEVSRQYHGTWLSPAPEPCNCSEETTRLAKVVMQWSYQEAWNSLLASSRYSEQESFTVVFQPFFYETTPSLHSEDPRLQDSTTLAWHLWNRMMEPAGEKDEPLSVKHGRPMKCPSQESPYLFSYRNSNYLTRLQKPQDKLEVREGAEIRCPDKDPSDTVPTSVHRLKPADINVIGALGDSLTAGNGAGSTPGNVLDVLTQYRGLSWSVGGDENIGTVTTLANILREFNPSLKGFSVGTGKETSPNAFLNQAVAGGRAEDLPVQARRLVDLMKNDTRIHFQEDWKIITLFIGGNDLCDFCNDLVPRAFVNLVTVLEIVNLRELYQEKKVYCPRMILRSLCPCVLKFDDNSTELATLIEFNKKFQEKTHQLIESGRYDTREDFTVVVQPFFENVDMPKTSEGLPDNSFFAPDCFHFSSKSHSRAASALWNNMLEPVGQKTTRHKFENKINITCPNQVQPFLRTYKNSMQGHGTWLPCRDRAPSALHPTSVHALRPADIQVVAALGDSLTAGNGIGSKPDDLPDVTTQYRGLSYSAGGDGSLENVTTLPNILREFNRNLTGYAVGTGDANDTNAFLNQAVPGAKAEDLMSQVQTLMQKMKDDHRVNFHEDWKVITVLIGGSDLCDYCTDSNLYSAANFVHHLRNALDVLHREVPRVLVNLVDFLNPTIMRQVFLGNPDKCPVQQASVLCNCVLTLRENSQELARLEAFSRAYRSSMRELVGSGRYDTQEDFSVVLQPFFQNIQLPVLADGLPDTSFFAPDCIHPNQKFHSQLARALWTNMLEPLGSKTETLDLRAEMPITCPTQNEPFLRTPRNSNYTYPIKPAIENWGSDFLCTEWKASNSVPTSVHQLRPADIKVVAALGDSLTTAVGARPNNSSDLPTSWRGLSWSIGGDGNLETHTTLPNILKKFNPYLLGFSTSTWEGTAGLNVAAEGARARDMPAQAWDLVERMKNSPDINLEKDWKLVTLFIGVNDLCHYCENPEAHLATEYVQHIQQALDILSEELPRAFVNVVEVMELASLYQGQGGKCAMLAAQNNCTCLRHSQSSLEKQELKKVNWNLQHGISSFSYWHQYTQREDFAVVVQPFFQNTLTPLNERGDTDLTFFSEDCFHFSDRGHAEMAIALWNNMLEPVGRKTTSNNFTHSRAKLKCPSPESPYLYTLRNSRLLPDQAEEAPEVLYWAVPVAAGVGLVVGIIGTVVWRCRRGGRREDPPMSLRTVAL

SEQ ID NO: 20407 - protein, 367 aa, Homo sapiens [sequence omitted]

SEQ ID NO: 20408 - protein, 375 aa, Homo sapiens
LGLTRPCSRGPLLFIYLFSVRERRAVAAASAAEKPLFPLLGRRVCADKMADGELNVDSLITRLLEVRGCRPGKIVQMTEAEVRGLCIKSREIFLSQPILLELEAPLKICGDIHGQYTDLLRLFEYGGFPPEANYLFLGDYVDRGKQSLETICLLLAYKIKYPENFFLLRGNHECASINRIYGFYDECKRRFNIKLWKTFTDCFNCLPIAAIVDEKIFCCHGGLSPDLQSMEQIRRIMRPTDVPDTGLLCDLLWSDPDKDVQGWGENDRGVSFTFGADVVSKFLNRHDLDLICRAHQVVEDGYEFFAKRQLVTLFSAPNYCGEFDNAGGMMSVDETLMCSFQILKPSEKKAKYQYGGLNSGRPVTPPRTANPPKKR

SEQ ID NO: 20409 - protein, 92 aa, Homo sapiens
VRERRAVAAASAAEKPLFPLLGRRVCADKMADGELNVDSLITRLLEVRGCRPGKIVQMTEAEVRGLCIKSREIFLSQPILLELEAPLKICGM

SEQ ID NO: 20410 - protein, 177 aa, Homo sapiens
MSLLLVYGSWFQPTIERVALNSREPHMCLVRDISNCWAPKVETAITKVRTPVMNSEAKVLVPGIPGHHAAIKPAPPQTEQVESKRKSGGNEVSIEERLGAMDIDTHKKGKEDLQTNSFPVLLTQGLESNDFEMLNKVLQTRNVNLIKKTVLRMPLHTIIPLLQEVTDCFFHFSILMP

SEQ ID NO: 20411 - protein, 153 aa, Homo sapiens
VLVSMAFSTRLSWCFLSWFVCLNSSATSTANNSRCEGELRLGERVLVVGQRLGTIRFFGTTNFAPGYWYGIELEKPHGKNDGSVGGVQYFSCSPRYGIFAPPSRVQRVTDSLDTLSEISSNKQNHSYPGFRRSFSTTSASSQKEINRRNAFSK

SEQ ID NO: 20412 - protein, 17 aa, Homo sapiens
LYLLCSLMPAWTILEAV

SEQ ID NO: 20413 - protein, 570 aa, Homo sapiens
LVLVFQGGWDEPLGASGACITHSSLPKRASSYRRTPCCMSFPMSLARSSVPFADSGLSSSQPSDADWDDLWDQFDERRYLNAKKWRVGDDPYKLYAFNQRESERISSNRAIPDTRHLRCTLLVYCTDLPPTSIIITFHNEARSTLLRTIRSVLNRTPTHLIREIILVDDFSNDPDDCKQLIKLPKVKCLRNNERQGLVRSRIRGADIAQGTTLTFLDSHCEVNRDWLQPLLHRVKEDYTRVVCPVIDIINLDTFTYIESASELRGGFDWSLHFQWEQLSPEQKARRLDPTEPIRTPIIAGGLFVIDKAWFDYLGKYDMDMDIWGGENFEISFRVWMCGGSLEIVPCSRVGHVFRKKHPYVFPDGNANTYIKNTKRTAEVWMDEYKQYYYAARPFALERPFGNVESRLDLRKNLRCQSFKWYLENIYPELSIPKESSIQKGNIRQRQKCLESQRQNNQETPNLKLSPCAKVKGEDAKSQVWAFTYTQQILQEELCLSVITLFPGAPVVLVLCKNGDDRQQWTKTGSHIEHIASHLCLDTDMFGDGTENGKEIVVNPCESSLMSQHWDMVSS

SEQ ID NO: 20414 - protein, 66 aa, Homo sapiens
VLWITVLLFFWVTKRKLEVPTGPEVQTPKVWSLFFKVAGMSPWAPQVPVSPTPPYQRGHLPTAFGR

SEQ ID NO: 20415 - protein, 34 aa, Homo sapiens
VLWITVLLFFWVTKRKLEVPTGPEVQTPKGSSQS

SEQ ID NO: 20416 - protein, 356 aa, Homo sapiens
LGRRLLLFLLLLGRADPLPAAASSWAGPAVSRPLAEPLLPPPPPPPHSSSCTIGGTGTKMSNRVVCREASHAGSWYTASGPQLNAQLEGWLSQVQSTKRPARAIIAPHAGYTYCGSCAAHAYKQVDPSITRRIFILGPSHHVPLSRCALSSVDIYRTPLYDLRIDQKIYGELWKTGMFERMSLQTDEDEHSIEMHLPYTAKAMESHKDEFTIIPVLVGALSESKEQEFGKLFSKYLADPSNLFVVSSDFCHWGQRFRYSYYDESQGEIYRSIEHLDKMGMSIIEQLDPVSFSNYLKKYHNTICGRHPIGVLLNAITELQKNGMNMSFSFLNYAQSSQCRNWQDSSVSYAAGALTVH

SEQ ID NO: 20417 - protein, 159 aa, Homo sapiens
LGRRLLLFLLLLGRADPLPAAASSWAGPAVSRPLAEPLLPPPPPPPHSSSCTIGGTGTKMSNRVVCREASHAGSWYTASGPQLNAQLEGWLSQVQSTKRPARAIIAPHAGYTYCGSCAAHAYKQVDPSITFSRSALMLNILSLCLFIFSSIRKMPFLII

SEQ ID NO: 20418 - protein, 451 aa, Homo sapiens
LGKLEHPERLPAGAVQLLIMSWKILLFGVINLICTGFLLMWCSSTNSIALTAYTYLTIFDLFSLMTCLISYWVTLRKPSPVYSFGFERLEVLAVFASTVLAQLGALFILKESAERFLEQPEIHTGRLLVGTFVALCFNLFTMLSIRNKPFAYVSEAASTSWLQEHVADLSRSLCGIIPGLSSIFLPRMNPFVLIDLAGAFALCITYMLIEINNYFAVDTASAIAIALMTFGTMYPMSVYSGKVLLQTTPPHVIGQLDKLIREVSTLDGVLEVRNEHFWTLGFGSLAGSVHVRIRRDANEQMVLAHVTNRLYTLVSTLTVQIFKDDWIRPALLSGPVAANVLNFSDHHVIPMPLLKGTDDLNPVTSTPAKPSSPPPEFSFNTPGKNVNPVILLNTQTRPYGFGLNHGHTPYSSMLNQGLGVPGIGATQGLRTGFTNIPSRYGTNNRIGQPRP

SEQ ID NO: 20419 - protein, 34 aa, Homo sapiens
LGFLGQNFKFCLILHIPVNKIQKHCVFKIVSIFT

SEQ ID NO: 20420 - protein, 1828 aa, Homo sapiens
LRRALQPPAGRADPHLARPAPLAPPRSPGSALPTPTPSSCSQPQSAGVWGRSAARRASSLATDLVSSRLSRALGSSRGSPNARGKASRTAGGGGRTARDRSRPLGPAMAGAWLRWGLLLWAGLLASSAHGRLRRITYVVHPGPGLAAGALPLSGPPRSRTFNVALNARYSRSSAAAGAPSRASPGVPSERTRRTSKPGGAALQGLRPPPPPPPEPARPAVPGGQLHPNPGGHPAAAPFTKQGRQVVRSKVPQETQSGGGSRLQVHQKQQLQGVNVCGGRCCHGWSKAPGSQRCTKPSCVPPCQNGGMCLRPQLCVCKPGTKGKACETIAAQDTSSPVFGGQSPGAASSWGPPEQAAKHTSSKKADTLPRVSPVAQMTLTLKPKPSVGLPQQIHSQVTPLSSQSVVIHHGQTQEYVLKPKYFPAQKGISGEQSTEGSFPLRYVQDQVAAPFQLSNHTGRIKVVFTPSICKVTCTKGSCQNSCEKGNTTTLISENGHAADTLTATNFRVVICHLPCMNGGQCSSRDKCQCPPNFTGKLCQIPVHGASVPKLYQHSQQPGKALGTHVIHSTHTLPLTVTSQQGVKVKFPPNIVNIHVKHPPEASVQIHQVSRIDGPTGQKTKEAQPGQSQVSYQGLPVQKTQTIHSTYSHQQVIPHVYPVAAKTQLGRCFQETIGSQCGKALPGLSKQEDCCGTVGTSWGFNKCQKCPKKPSYHGYNQMMECLPGYKRVNNTFCQDINECQLQGVCPNGECLNTMGSYRCTCKIGFGPDPTFSSCVPDPPVISEEKGPCYRLVSSGRQCMHPLSVHLTKQLCCCSVGKAWGPHCEKCPLPGTAAFKEICPGGMGYTVSGVHRRRPIHHHVGKGPVFVKPKNTQPVAKSTHPPPLPAKEEPVEALTFSREHGPGVAEPEVATAPPEKEIPSLDQEKTKLEPGQPQLSPGISTIHLHPQFPVVIEKTSPPVPVEVAPEASTSSASQVIAPTQVTEINECTVNPDICGAGHCINLPVRYTCICYEGYRFSEQQRKCVDIDECTQVQHLCSQGRCENTEGSFLCICPAGFMASEEGTNCIDVDECLRPDVCGEGHCVNTVGAFRCEYCDSGYRMTQRGRCEDIDECLNPSTCPDEQCVNSPGSYQCVPCTEGFRGWNGQCLDVDECLEPNVCANGDCSNLEGSYMCSCHKGYTRTPDHKHCRDIDECQQGNLCVNGQCKNTEGSFRCTCGQGYQLSAAKDQCEDIDECQHRHLCAHGQCRNTEGSFQCVCDQGYRASGLGDHCEDINECLEDKSVCQRGDCINTAGSYDCTCPDGFQLDDNKTCQDINECEHPGLCGPQGECLNTEGSFHCVCQQGFSISADGRTCEDIDECVNNTVCDSHGFCDNTAGSFRCLCYQGFQAPQDGQGCVDVNECELLSGVCGEAFCENVEGSFLCVCADENQEYSPMTGQCRSRTSTDLDVDVDQPKEEKKECYYNLNDASLCDNVLAPNVTKQECCCTSGVGWGDNCEIFPCPVLGTAEFTEMCPKGKGFVPAGESSSEAGGENYKDADECLLFGQEICKNGFCLNTRPGYECYCKQGTYYDPVKLQCFDMDECQDPSSCIDGQCVNTEGSYNCFCTHPMVLDASEKRCIRPAESNEQIEETDVYQDLCWEHLSDEYVCSRPLVGKQTTYTECCCLYGEAWGMQCALCPLKDSDDYAQLCNIPVTGRRQPYGRDALVDFSEQYTPEADPYFIQDRFLNSFEELQAEECGILNGCENGRCVRVQEGYTCDCFDGYHLDTAKMTCVDVNECDELNNRMSLCKNAKCINTDGSYKCLCLPGYVPSDKPNYCTPLNTALNLEKDSDLE

SEQ ID NO: 20421 - protein, 19 aa, Homo sapiens
LTCMIMEMVYLMLKMSLVF

SEQ ID NO: 20422 - protein, 10 aa, Homo sapiens
MMLLAGFLYM

SEQ ID NO: 20423 - protein, 371 aa, Homo sapiens
LFTSAYLISELEAARMLCVNAPPKKAQEGGGSEVFQELKGICIALGMSKPPANITMFQFFSGIEKKLKETLAKVPPNHVGKPLLKKPMGPAHWSQTEKLAKVYQPKRSVLSPKTTISVAHLLAARQDLSKILRTSSGSIREKTACAINKVLMGRVPDRGGRPNEIEPPPPEMPPWQKRQDGPQQQTGGRGGGRGGYEHSSYGGRGGHEQGGGRGGRGGYDHGGRGGGRGNKHQGGWTDGGSGGGGGYQDGGYRDSGFQPGGYHGGHSSGGYQGGGYGGFQTSSSYTGSGYQGGGYQQDNRYQDGGHHGDRGGGRGGRGGRGGRGGRAGQGGGWGGRGSQNYHQGGQFEQHFQHGGYQYNHSGFGQGRHYTS

SEQ ID NO: 20424 - protein, 26 aa, Homo sapiens
VTCSVCCCLFWLIAILANSTLSSDCS

SEQ ID NO: 20425 - protein, 36 aa, Homo sapiens
MWWHVTCHLRCITPKVRLGQLYRLQRIILKMFSKAN

SEQ ID NO: 20426 - protein, 47 aa, Homo sapiens
LIVAFFFLRIWNALTDNYGNVMPVDWKSSHTRTLHLLTLNLSEKGVS

SEQ ID NO: 20427 - protein, 679 aa, Homo sapiens
LCGENFLKKKLPSSNKGVILIFMRTVVLTMKASVIEMFLVLLVTGVHSNKETAKKIKRPKFTVPQINCDVKAGKIIDPEFIVKCPAGCQDPKYHVYGTDVYASYSSVCGAAVHSGVLDNSGGKILVRKVAGQSGYKGSYSNGVQSLSLPRWRESFIVLESKPKKGVTYPSALTYSSSKSPAAQAGETTKAYQRPPIPGTTAQPVTLMQLLAVTVAVATPTTLPRPSPSAASTTSIPRPQSVGHRSQEMDLWSTATYTSSQNRPRADPGIQRQDPSGAAFQKPVGADVSLDCKIDLSFLIDGSTSIGKRRFRIQKQLLADVAQALDIGPAGPLMGVVQYGDNPATHFNLKTHTNSRDLKTAIEKITQRGGLSNVGRAISFVTKNFFSKANGNRSGAPNVVVVMVDGWPTDKVEEASRLARESGINIFFITIEGAAENEKQYVVEPNFANKAVCRTNGFYSLHVQSWFGLHKTLQPLVKRVCDTDRLACSKTCLNSADIGFVIDGSSSVGTGNFRTVLQFVTNLTKEFEISDTDTRIGAVQYTYEQRLEFGFDKYSSKPDILNAIKRVGYWSGGTSTGAAINFALEQLFKKSKPNKRKLMILITDGRSYDDVRIPAMAAHLKGVITYAIGVAWAAQEELEVIATHPARDHSFFVDEFDNLHQYVPRIIQNICTEFNSQPRN

SEQ ID NO: 20428 - protein, 214 aa, Homo sapiens
MSVLLRSGLGPLCAVARAAIPFIWRGKYFSSGNEPAENPVTPMLRHLMYKIKSTGPITVAEYMKEVLTNPAKGYYVYRDMLGEKGDFITSPEISQIFGELLGIWFISEWMATGKSTAFQLVELGPGRGTLVGDILRVFTQLGSVLKNCDISVHLVEVSQKLSEIQALTLTKEKVPLERNAGSPVYMKGVTKSGIPISWYRDLHDVPKGNYLYVD

SEQ ID NO: 20429 - protein, 377 aa, Homo sapiens
VTASGPGNPLPDRLGEMAGGRHRRVVGTLHLLLLVAALPWASRGVSPSASAWPEEKNYHQPAILNSSALRQIAEGTSISEMWQNDLQPLLIERYPGSPGSYAARQHIMQRIQRLQADWVLEIDTFLSQTPYGYRSFSNIISTLNPTAKRHLVLACHYDSKYFSHWNNRVFVGATDSAVPCAMMLELARALDKKLLSLKTVSDSKPDLSLQLIFFDGEEAFLHWSPQDSLYGSRHLAAKMASTPHPPGARGTSQLHGMDLLVLLDLIGAPNPTFPNFFPNSARWFERLQAIEHELHELGLLKDHSLEGRYFQNYSYGGVIQDDHIPFLRRGVPVLHLIPSPFPEVWHTMDDNEENLDESTIDNLNKILQVFVLEYLHL

SEQ ID NO: 20430 - protein, 89 aa, Homo sapiens
MAGGRHRRVVGTLHLLLLVAALPWASRGVSPSASAWPEEKNYHQPAILNSSALRQIAEGTSISEMWQNDLQPLLIERYPGSPGSYAARQ

SEQ ID NO: 20431 - protein, 33 aa, Homo sapiens
VMSPFVFLAIFFQVVKDKEAQKEMQKIMTSLKR

SEQ ID NO: 20432 - protein, 580 aa, Homo sapiens
VSRPGCGFLLTSCPRQRSQFLLGAGCPAPLETAPPRSMGTSLSPNDPWPLNPLSIQQTTLLLLLSVLATVHVGQRLLRQRRRQLRSAPPGPFAWPLIGNAAAVGQAAHLSFARLARRYGDVFQIRLGSCPIVVLNGERAIHQALVQQGSAFADRPAFASFRVVSGGRSMAFGHYSEHWKVQRRAAHSMMRNFFTRQPRSRQVLEGHVLSEARELVALLVRGSADGAFLDPRPLTVVAVANVMSAVCFGCRYSHDDPEFRELLSHNEEFGRTVGAGSLVDVMPWLQYFPNPVRTVFREFEQLNRNFSNFILDKFLRHCESLRPGAAPRDMMDAFILSAEKKAAGDSHGGGARLDLENVPATITDIFGASQDTLSTALQWLLLLFTRYPDVQTRVQAELDQVVGRDRLPCMGDQPNLPYVLAFLYEAMRFSSFVPVTIPHATTANTSVLGYHIPKDTVVFVNQWSVNHDPLKWPNPENFDPARFLDKDGLINKDLTSRVMIFSVGKRRCIGEELSKMQLFLFISILAHQCDFRANPNEPAKMNFSYGLTIKPKSFKVNVTLRESMELLDSAVQNLQAKETCQ

SEQ ID NO: 20433 - protein, 317 aa, Homo sapiens
MPREDRATWKSNYFLKIIQLLDDYPKCFIVGADNVGSKQMQQIRMSLRGKVVVLMGKNTMMRKAIRGHLENNPALEKLLPHIWGNVGFVFTKEDLTEIRDMLLANKVPAAARAGAIAPCEVTVPAQNTGLGPEKTSFFQALGITTKISRGTIEILSDVQLIKTGDKVGASEATLLNMLNISPFSFGLVIQQVFDNGSIYNPEVLDKTEETLHSRFLEGVRNVASVCLQTGYPTVASVPHSIINGYKRVLALSVETDYTFPLAENVKAFLADPSAFVAAAPVAADTTAAPAAAAAPAKVEAKEESEESDEDMGFGLFD

SEQ ID NO: 20434 - protein, 138 aa, Homo sapiens
LYFLWRRGFAMLPSIVLVNFLEDGSMSVTGIMGHAVQTVETMNEGDHRVREKLMHLFTSGDCKAYSPEDLEERKNSLKKWLEKNHIPITEQGDAPRTLCVAGVLTIDPPYGPENCSSSNEIILSRVQDLIEGHLTASQ

SEQ ID NO: 20435 - protein, 124 aa, Homo sapiens
VEIAQWEGAKYVSHSAMGKGNDQVWFELACYSLAPQIKVIAPGRIPEFYNQSKGRSDLMEYAEKHGIPIPVTLKHPWNMDENLMHISHEAGILENPKNQPPSGLYMKIQDLAKAPNTPNIFKTE

SEQ ID NO: 20436 - protein, 45 aa, Homo sapiens
MLTSCEMTKDLAAEGKRKNNGIFSVYNWLNLWMWKLQIQMESRLY

SEQ ID NO: 20437 - protein, 7 aa, Homo sapiens
MYWIILL

SEQ ID NO: 20438 - protein, 99 aa, Homo sapiens
LRKLFIGELSFETADESLRSHFEQWGMLMDCVVMRDPNTKCSRGFGFVTYATVEEVDAAMNARPHKVDGRVVEPKSDLKRRFSKNRCPFNYEKDICWWH

SEQ ID NO: 20439 - protein, 56 aa, Homo sapiens
LSSWMRFLISIICTWRFIQERITGADLNHGAHKWGGCSSGHGKNFLLQLETAFCVG

SEQ ID NO: 20440 - protein, 173 aa, Homo sapiens
LPHSAPPSLRPLLDSIVNATGSGGRGGSSWLLTSGRSGSPRHPVLATLHSAGELAWGVDETLAQLEKVLHLYRSGQYLQNSTASSSTEYQCIPDSTIPQEDYRCWPSYHHGSCLLSVFNLAEAVDVCESHAQCRAFVVTNQTTWTGRQLVFFKTGWSQVVPDPNKTTYVKASG

SEQ ID NO: 20441 - protein, 670 aa, Homo sapiens [sequence omitted]

SEQ ID NO: 20442 - protein, 33 aa, Homo sapiens
LSELIRQLKPLFKEMVLCSVFVLLISLEVLDEG

SEQ ID NO: 20443 - protein, 455 aa, Homo sapiens
LGWGAAAGPSGRKSPGRPAMTFGRSGAASVVLNVGGARYSLSRELLKDFPLRRVSRLHGCRSERDVLEVCDDYDRERNEYFFDRHSEAFGFILLYVRGHGKLRFAPRMCELSFYNEMIYWGLEGAHLEYCCQRRLDDRMSDTYTFYSADEPGVLGRDEARPGGAEAAPSRRWLERMRRTFEEPTSSLAAQILASVSVVFVIVSMVVLCASTLPDWRNAAADNRSLDDRSRYSAGPGREPSGIIEAICIGWFTAECIVRFIVSKNKCEFVKRPLNIIDLLAITPYYISVLMTVFTGENSQLQRAGVTLRVLRMMRIFWVIKLARHFIGLQTLGLTLKRCYREMVMLLVFICVAMAIFSALSQLLEHGLDLETSNKDFTSIPAACWWVIISMTTVGYGDMYPITVPGRILGGVCVVSGIVLLALPITFIYHSFVQCYHELKFRSARYSRSLSTEFLN

SEQ ID NO: 20444 - protein, 444 aa, Homo sapiens
LGWGAAAGPSGRKSPGRPAMTFGRSGAASVVLNVGGARYSLSRELLKDFPLRRVSRLHGCRSERDVLEVCDDYDRERNEYFFDRHSEAFGFILLYVRGHGKLRFAPRMCELSFYNEMIYWGLEGAHLEYCCQRRLDDRMSDTYTFYSADEPGVLGRDEARPGGAEAAPSRRWLERMRRTFEEPTSSLAAQILASVSVVFVIVSMVVLCASTLPDWRNAAADNRSLDDRSRIIEAICIGWFTAECIVRFIVSKNKCEFVKRPLNIIDLLAITPYYISVLMTVFTGENSQLQRAGVTLRVLRMMRIFWVIKLARHFIGLQTLGLTLKRCYREMVMLLVFICVAMAIFSALSQLLEHGLDLETSNKDFTSIPAACWWVIISMTTVGYGDMYPITVPGRILGGVCVVSGIVLLALPITFIYHSFVQCYHELKFRSARYSRSLSTEFLN

SEQ ID NO: 20445 - protein, 86 aa, Homo sapiens
LYPALDLLSYLDPEGEMIPSPFHFLSEPLLSGDCRFWKQLAARDSAASFIFSAFWERPSHPGPRDLETGVRPGLKQEKGGPSYLPS

SEQ ID NO: 20446 - protein, 55 aa, Homo sapiens
MVLVCCWRSMKEVALLLGMLCQLLPMQPVPESSDGLLTVEQVNFRKQQDSKMTCY

SEQ ID NO: 20447 - protein, 63 aa, Homo sapiens
LSRKMPLVSTLLPLSAELVLNLILILAGRPEIILCRFNSVDSPKFRTTIKILSMPSSSLVYTT

SEQ ID NO: 20448 - protein, 20 aa, Homo sapiens
LWAAERRLRLDLPAVTPAPL

SEQ ID NO: 20449 - protein, 234 aa, Homo sapiens
LPSPLRAAMALSDVDVKKQIKHMMAFIEQEANEKAEEIDAKAEEEFNIEKGRLVQTQRLKIMEYYEKKEKQIEQQKKILMSTMRNQARLKVLRARNDLISDLLSEAKLRLSRIVEDPEVYQGLLDKLVLQGLLRLLEPVMIVRCRPQDLLLVEAAVQKAIPEYMTISQKHVEVQIDKEAYLAVNAAGGVEVYSGNQRIKVSNTLESRLDLSAKQKMPEIRMALFGANTNRKFFI

SEQ ID NO: 20450 - protein, 135 aa, Homo sapiens
VAGAAGGRGDRGRGGDPGGDRGGGSAPGPPPPPLLRGEPLHGAGGAALRRGAAATAADPPGGLGLSPGPGRGLRGDHARRPAGSSMAHGPGALMLKCVVVGDGAVGKTCLLMSYANDAFPEEYVPTVFDHYAGRL

SEQ ID NO: 20451 - protein, 290 aa, Homo sapiens
VAGAAGGRGDRGRGGDPGGDRGGGSAPGPPPPPLLRGEPLHGAGGAALRRGAAATAADPPGGLGLSPGPGRGLRGDHARRPAGSSMAHGPGALMLKCVVVGDGAVGKTCLLMSYANDAFPEEYVPTVFDHYAVSVTVGGKQYLLGLYDTAGQEDYDRLRPLSYPMTDVFLICFSVVNPASFQNVKEEWVPELKEYAPNVPFLLIGTQIDLRDDPKTLARLNDMKEKPICVEQGQKLAKEIGACCYVECSALTQKGLKTVFDEAIIAILTPKKHTVKKRIGSRCINCCLIT

SEQ ID NO: 20452 - protein, 129 aa, Homo sapiens
LHLVRRDAEGVQRGLPNSPSRGREAGNYCLLPSGEKKLGTVITPDTWKDGARNTTESGGRKLNENKALTSKKARFDPYGKNKFSTCRICKSSVHQPGSHYCQGCAYKKGICAMCGKKVLDTKNYKQTSV

SEQ ID NO: 20453 - protein, 117 aa, Homo sapiens
LLLLLLLRLGEPSWGRMVCEKCEKKLGTVITPDTWKDGARNTTESGGRKLNENKALTSKKARFDPYGKNKFSTCRICKSSVHQPGSHYCQGCAYKKGICAMCGKKVLDTKNYKQTSV

SEQ ID NO: 20454 - protein, 175 aa, Homo sapiens
LQLPDQLRHAVPVALGAAALQLALHLQILMTMRSLLRTPFLCGLLWAFCAPGARAEEPAASFSQPGSMGLDKNTVHDQEHIMEHLEGVINKPEAEMSPQELQLHYFKMHDYDGNNLLDGLELSTAITHVHKEEGSEQAPLMSEDELINIIDGVLRDDDKNNDGYIDYAEFAKSLQ

SEQ ID NO: 20455 - protein, 105 aa, Homo sapiens
LPASQPLPLLTGVRKGERCARAASPVTSAAGHAQRLQLPDQLRHAVPVALGAAALQLALHLQEGSEQAPLMSEDELINIIDGVLRDDDKNNDGYIDYAEFAKSLQ

SEQ ID NO: 20456 - protein, 121 aa, Homo sapiens
LQLPDQLRHAVPVALGAAALQLALHLQILMTMRSLLRTPFLCGLLWAFCAPGARAEEPAASFSQPGSMGLDKNTVHDQEYVFSPGCGPVASPSSAAEPAARACSVLLSFFLFLWLLDILQG

SEQ ID NO: 20457 - protein, 52 aa, Homo sapiens
LRSDERAIGLGWKNPEVTFEPVLEGSWRWTDGTSRSGGCGTGRGWQSRRGAL

SEQ ID NO: 20458 - protein, 117 aa, Homo sapiens
LWQQLQRRRRRQRQELLQQRRRLLLYAYGPLGRSRSPEAPGGALGAAGAAAAAAAHPPPPGPPLPPGPRLPSAPPSTPPASAPQPGRRPRPGLHFLAAPSMTAPARRWLRRARTAPT

SEQ ID NO: 20459 - protein, 219 aa, Homo sapiens
MAAKGAHGSYLKVESELERCRAEGHWDRMPELVRQLQTLSMPGGGGNRRGSPSAAFTFPDTDDFGKLLLAEALLEQCLKENHAKIKDSMPLLEKNEPKMSEAKNYLSSILNHGRLSPQYMCEAMLILGKLHYVEGSYRDAISMYARAGIDDMSMENKPLYQMRLLSEAFVIKACLRLLGGTQSRWSEVLQGRPLSGTPTQLHRLPLPPDREGGGSDHLF

SEQ ID NO: 20460 - protein, 739 aa, Homo sapiens
MPSACTHGPGLMTCPWRTSPCIRCGCCRRLLSSKHASGFLGEHSPGGQRSCRGGLSLERLPNSIASRFRLTEREEEVITCFERASWIAQVFLQELEKTTNNSTSRHLKGCHPLDYELTYFLEAALQSAYVKNLKKGNIVKGMRELREVLRTVETKATQNFKVMAAKHLAGVLLHSLSEECYWSPLSHPLPEFMGKEESSFATQALRKPHLYEGDNLYCPKDNIEEALLLLLISESMATRDVVLSRVPEQEEDRTVSLQNAAAIYDLLSITLGRRGQYVMLSECLERAMKFAFGEFHLWYQVALSMVACGKSAYAVSLLRECVKLRPSDPTVPLMAAKVCIGSLRWLEEAEHFAMMVISLGEEAGEFLPKGYLALGLTYSLQATDATLKSKQDELHRKALQTLERAQQLAPSDPQVILYVSLQLALVRQISSAMEQLQEALKVRKDDAHALHLLALLFSAQKHHQHALDVVNMAITEHPENFNLMFTKVKLEQVLKGPEEALVTCRQVLRLWQTLYSFSQLGGLEKDGSFGEGLTMKKQSGMHLTLPDAHDADSGSRRASSIAASRLEEAMSELTMPSSVLKQGPMQLWTTLEQIWLQAAELFMEQQHLKEAGFCIQEAAGLFPTSHSVLYMRGRLAEVKGNLEEAKQLYKEALTVNPDGVRIMHSLGLMLSRLGHKSLAQKVLRDAVERQSTCHEAWQGLGEVLQAQGQNEAAVDCFLTALELEASSPVLPFSIIPREL

SEQ ID NO: 20461 - protein, 57 aa, Homo sapiens
MLMDGNGYISAAELRHVMTNLGEKLTDEEVDEMIREADIDGDGQVNYEEFVQMMTAK

SEQ ID NO: 20462 - protein, 145 aa, Homo sapiens
LWSFFQTEFKEAFSLFDKDGDGTITTKELGTVMRSLGQNPTEAELQDMINEVDADGNGTIDFPEFLTMMARKMKDTDSEEEIREAFRVFDKDGNGYISAAELRHVMTNLGEKLTDEEVDEMIREADIDGDGQVNYEEFVQMMTAK

SEQ ID NO: 20463 - protein, 162 aa, Homo sapiens
LCGRVSETGSACSMADQLTEEQIAEFKEAFSLFDKDGDGTITTKELGTVMRSLGQNPTEAELQDMINEVDADGNGTIDFPEFLTMMARKMKDTDSEEEIREAFRVFDKDGNGYISAAELRHVMTNLGEKLTDEEVDEMIREADIDGDGQVNYEEFVQMMTAK

SEQ ID NO: 20464 - protein, 96 aa, Homo sapiens
LCGRVSETGSACSMADQLTEEQIAEFKEAFSLFDKDGDGTITTKELGTVMRSLGQNPTEAELQDMINEVDEMIREADIDGDGQVNYEEFVQMMTAK

SEQ ID NO: 20465 - protein, 180 aa, Homo sapiens
LSGCVVASRKPVALAAWLALYIASHFAQQPCKADQLTEEQIAEFKEAFSLFDKDGDGTITTKELGTVMRSLGQNPTEAELQDMINEVDADGNGTIDFPEFLTMMARKMKDTDSEEEIREAFRVFDKDGNGYISAAELRHVMTNLGEKLTDEEVDEMIREADIDGDGQVNYEEFVQMMTAK

SEQ ID NO: 20466 - protein, 78 aa, Homo sapiens
LCGRVSETGSACSMADQLTEEQIAEFKEAFSLFDKDGDGTITTKELGTVMRSLGQNPTEAELQDMINEVDADGWQWLY

SEQ ID NO: 20467 - protein, 63 aa, Homo sapiens
MAPPQVLAFGLLLAAATATFAAAQEECVCENYKLAVNCFVNNNRQCQCTSVGAQNTVICSKRE

SEQ ID NO: 20468 - protein, 126 aa, Homo sapiens
LPAVGMSRQSTLYSFFPKSPALSDANKASARASREGGRAAAAPGASPSPGGDAAWSEAGPGPRPLARSASPPKAKNLNGGLRRSVAPAAPTREFRSSPGWSAMARSQLTAISASRLQAIPQLQPPE

SEQ ID NO: 20469 - protein, 109 aa, Homo sapiens
LPAVGMSRQSTLYSFFPKSPALSDANKASARASREGGRAAAAPGASPSPGGDAAWSEAGPGPRPLARSASPPKAKNLNGGLRRSVAPAAPTRFKIKGSPEGRSFLQCKA

SEQ ID NO: 20470 - protein, 1072 aa, Homo sapiens
LPAVGMSRQSTLYSFFPKSPALSDANKASARASREGGRARCPRGLSFPRRGCGLERGWAWARPLARSASPPKAKNLNGGLRRSVAPAAPTSCDFSPGDLVWAKMEGYPWWPCLVYNHPFDGTFIREKGKSVRVHVQFFDDSPTRGWVSKRLLKPYTGSKSKEAQKGGHFYSAKPEILRAMQRADEALNKDKIKRLELAVCDEPSEPEEEEEMEVGTTYVTDKSEEDNEIESEEEVQPKTQGSRRSSRQIKKRRVISDSESDIGGSDVEFKPDTKEEGSSDEISSGVGDSESEGLNSPVKVARKRKRMVTGNGSLKRKSSRKETPSATKQATSISSETKNTLRAFSAPQNSESQAHVSGGGDDSSRPTVWYHETLEWLKEEKRRDEHRRRPDHPDFDASTLYVPEDFLNSCTPGMRKWWQIKSQNFDLVICYKVGKFYELYHMDALIGVSELGLVFMKGNWAHSGFPEIAFGRYSDSLVQKGYKVARVEQTETPEMMEARCRKMAHISKYDRVVRREICRIITKGTQTYSVLEGDPSENYSKYLLSLKEKEEDSSGHTRAYGVCFVDTSLGKFFIGQFSDDRHCSRFRTLVAHYPPVQVLFEKGNLSKETKTILKSSLSCSLQEGLIPGSQFWDASKTLRTLLEEEYFREKLSDGIGVMLPQVLKGMTSESDSIGLTPGEKSELALSALGGCVFYLKKCLIDQELLSMANFEEYIPLDSDTVSTTRSGAIFTKAYQRMVLDAVTLNNLEIFLNGTNGSTEGTLLERVDTCHTPFGKRLLKQWLCAPLCNHYAINDRLDAIEDLMVVPDKISEVVELLKKLPDLERLLSKIHNVGSPLKSQNHPDSRAIMYEETTYSKKKIIDFLSALEGFKVMCKIIGIMEEVADGFKSKILKQVISLQTKNPEGRFPDLTVELNRWDTAFDHEKARKTGLITPKAGFDSDYDQALADIRENEQSLLEYLEKQRNRIGCRTIVYWGIGRNRYQLEIPENFTTRNLPEEYELKSTKKGCKRYWTKTIEKKLANLINAEERRDVSLKDCMRRLFYNFDKNYKDWQSAVECIAVLGKTLNKLVLRL

SEQ ID NO: 20471 - protein, 28 aa, Homo sapiens
LAPVYFVLLKFCITNVLPGFCPLDNYSL

SEQ ID NO: 20472 - protein, 479 aa, Homo sapiens
VFDLGNGANLIKGSSNKPLNDNQWHNVMISRDTSNLHTVKIDTKITTQITAGARNLDLKSDLYIGGVAKETYKSLPKLVHAKEGFQGCLASVDLNGRLPDLISDALFCNGQIERGCEGPSTTCQEDSCSNQGVCLQQWDGFSCDCSMTSFSGPLCNDPGTTYIFSKGGGQITYKWPPNDRPSTRADRLAIGFSTVQKEAVLVRVDSSSGLGDYLELHIHQGKIGVKFNVGTDDIAIEESNAIINDGKYHVVRFTRSGGNATLQVDSWPVIERYPAGNNDNERLAIARQRIPYRLGRVVDEWLLDKGRQLTIFNSQATIIIGGKEQGQPFQGQLSGLYYNGLKVLNMAAENDANIAIVGNVRLVGEVPSSMTTESTATAMQSEMSTSIMETTTTLATSTARRGKPPTKEPISQVSVRKVGHTIPWKNRRMNNYLISGRTGNVSRQTSNFICKIGIKTPNAWGAMKIVQNNKYKVFSTDGR

SEQ ID NO: 20473 - protein, 13 aa, Homo sapiens
LLWTVAISLLNSF

SEQ ID NO: 20474 - protein, 320 aa, Homo sapiens
LTWLIPYMASQVRQLQEDAARLQAAYAGDKADDIQKRENEVLEAWKSLLDACESRRVRLVDTGDKFRFFSMVRDLMLWMEDVIRQIEAQEKPRDVSSVELLMNNHQGIKAEIDARNDSFTTCIELGKSLLARKHYASEEIKEKLLQLTEKRKEMIDKWEDRWEWLRLILEVHQFSRDASVAEAWLLGQEPYLSSREIGQSVDEVEKLIKRHEAFEKSAATWDERFSALERLTTLELLEVRRQQEEEERKRRPPSPEPSTKVSEEAESQQQWDTSKGEQVSQNGLPAEQGSPRVSYRSQTYQNYKNFNSRRTASDQPWSGL

SEQ ID NO: 20475 - protein, 1201 aa, Homo sapiens
LQHHLHPPAMEDLDQSPLVSSSDSPPRPQPAFKYQFVREPEDEEEEEEEEEEDEDEDLEELEVLERKPAAGLSAAPVPTAPAAGAPLMDFGNDFVPPAPRGPLPAAPPVAPERQPSWDPSPVSSTVPAPSPLSAAAVSPSKLPEDDEPPARPPPPPPASVSPQAEPVWTPPAPAPAAPPSTPAAPKRRGSSGSVDETLFALPAASEPVIRSSAENMDLKEQPGNTISAGQEDFPSVLLETAASLPSLSPLSAASFKEHEYLGNLSTVLPTEGTLQENVSEASKEVSEKAKTLLIDRDLTEFSELEYSEMGSSFSVSPKAESAVIVANPREEIIVKNKDEEEKLVSNNILHNQQELPTALTKLVKEDEVVSSEKAKDSFNEKRVAVEAPMREEYADFKPFERVWEVKDSKEDSDMLAAGGKIESNLESKVDKKCFADSLEQTNHEKDSESSNDDTSFPSTPEGIKDRSGAYITCAPFNPAATESIATNIFPLLGDPTSENKTDEKKIEEKKAQIVTEKNTSTKTSNPFLVAAQDSETDYVTTDNLTKVTEEVVANMPEGLTPDLVQEACESELNEVTGTKIAYETKMDLVQTSEVMQESLYPAAQLCPSFEESEATPSPVLPDIVMEAPLNSAVPSAGASVIQPSSSPLEASSVNYESIKHEPENPPPYEEAMSVSLKKVSGIKEEIKEPENINAALQETEAPYISIACDLIKETKLSAEPAPDFSDYSEMAKVEQPVPDHSELVEDSSPDSEPVDLFSDDSIPDVPQKQDETVMLVKESLTETSFESMIEYENKEKLSALPPEGGKPYLESFKLSLDNTKDTLLPDEVSTLSKKEKIPLQMEELSTAVYSNDDLFISKEAQIRETETFSDSSPIEIIDEFPTLISSKTDSFSKLAREYTDLEVSHKSEIANAPDGAGSLPCTELPHDLSLKNIQPKVEEKISFSDDFSKNGSATSKVLLLPPDVSALATQAEIESIVKPKVLVKEAEKKLPSDTEKEDRSPSAIFSAELSKTSVVDLLYWRDIKKTGVVFGASLFLLLSLTVFSIVSVTAYIALALLSVTISFRIYKGVIQAIQKSDEGHPFRAYLESEVAISEELVQKYSNSALGHVNCTIKELRRLFLVDDLVDSLKFAVLMWVFTYVGALFNGLTLLILALISLFSVPVIYERHQAQIDHYLGLANKNVKDAMAKIQAKIPGLKRKAE

SEQ ID NO: 20476 - protein, 382 aa, Homo sapiens
LQHHLHPPAMEDLDQSPLVSSSDSPPRPQPAFKYQFVREPEDEEEEEEEEEEDEDEDLEELEVLERKPAAGLSAAPVPTAPAAGAPLMDFGNDFVPPAPRGPLPAAPPVAPERQPSWDPSPVSSTVPAPSPLSAAAVSPSKLPEDDEPPARPPPPPPASVSPQAEPVWTPPAPAPAAPPSTPAAPKRRGSSGSVVVDLLYWRDIKKTGVVFGASLFLLLSLTVFSIVSVTAYIALALLSVTISFRIYKGVIQAIQKSDEGHPFRAYLESEVAISEELVQKYSNSALGHVNCTIKELRRLFLVDDLVDSLKFAVLMWVFTYVGALFNGLTLLILALISLFSVPVIYERHQAQIDHYLGLANKNVKDAMAKIQAKIPGLKRKAE

SEQ ID NO: 20477 - protein, 12 aa, Homo sapiens
LVLLYFICSLQT

SEQ ID NO: 20478 - protein, 169 aa, Homo sapiens
LPITASGSGAATKMQIFVKTLTGKTITLEVEPSDTIENVKAKIQDKEGIPPDQQRLIFAGKQLEDGRTLSDYNIQKESTLHLVLRLRGGAKKRKKKSYTTPKKNKHKRKKVKLAVLKYYKVDENGKISRLRRECPSDECGAGVFMASHFDRHYCGKCCLTYCFNKPEDK

SEQ ID NO: 20479 - protein, 187 aa, Homo sapiens
VGPSAGAPGNPVGLRGVLPFRSAICGGAATKMQIFVKTLTGKTITLEVEPSDTIENVKAKIQDKEGIPPDQQRLIFAGKQLEDGRTLSDYNIQKESTLHLVLRLRGGAKKRKKKSYTTPKKNKHKRKKVKLAVLKYYKVDENGKISRLRRECPSDECGAGVFMASHFDRHYCGKCCLTYCFNKPEDK

SEQ ID NO: 20480 - protein, 36 aa, Homo sapiens
MQIFVKTLTGKTITLEVEPSDTIENVKAKIQDKEGK

SEQ ID NO: 20481 - protein, 88 aa, Homo sapiens
LGAALEQRLGALAIHTEVVEHPEVRPLEATAETGPAGWAVLHVRRARPLRSGVPGSMYRENVAPGIFPRSQNTKVTLQGQQRTSILGP

SEQ ID NO: 20482 - protein, 20 aa, Homo sapiens
LCFSFQLHLVLRCIFSLSLE

SEQ ID NO: 20483 - protein, 108 aa, Homo sapiens
LGLIHWEQFRWSGSSRSWTTLTGFLSWVPAPFPFLLLQMPFLCPSSPGTDISSAGCCSWCPSSKPLLGISARFTLGCFLRRESAPLLHDGIFLPCRNGLSLISTYFHV

SEQ ID NO: 20484 - protein, 25 aa, Homo sapiens
LFIFNLKDFICDQGSINLTKVGKLS

SEQ ID NO: 20485 - protein, 22 aa, Homo sapiens
MVNSGLSEAAAAATATTAFTVS

SEQ ID NO: 20486 - protein, 373 aa, Homo sapiens
LTTDIDECDIVPDACKGGMKCVNHYGGYLCLPKTAQIIVNNEQPQQETQPAEGTSGATTGVVAASSMATSGVLPGGGFVASAAAVAGPEMQTGRNNFVIRRNPADPQRIPSNPSHRIQCAAGYEQSEHNVCQDIDECTAGTHNCRADQVCINLRGSFACQCPPGYQKRGEQCVDIDECRTSSYLCQYQCVNEPGKFSCMCPQGYQVVRSRTCQDINECETTNECREDEMCWNYHGGFRCYPRNPCQDPYILTPENRCVCPVSNAMCRELPQSIVYKYMSIRSDRSVPSDIFQIQATTIYANTINTFRIKSGNENGEFYLRQTSPVSAMLVLVKSLSGPREHIVDLEMLTVSSIGTFRTSSVLRLTIIVGPFSF

SEQ ID NO: 20487 - protein, 623 aa, Homo sapiens
VGASPRLKRIQDITCQRVLSGVGSPRVWETRSWQGRASGGGKEGPWSRGRGPRCAARSTAGLATLGSALAPPSALSSAPLRPPPFPPFLLLLLPPRPLPDFARSDPRGCPPLRTPLAARARSAARPHRFTMLKALFLTMLTLALVKSQDTEETITYTQCTDGYEWDPVRQQCKDIDECDIVPDACKGGMKCVNHYGGYLCLPKTAQIIVNNEQPQQETQPAEGTSGATTGVVAASSMATSGVLPGGGFVASAAAVAGPEMQTGRNNFVIRRNPADPQRIPSNPSHRIQCAAGYEQSEHNVCQDIDECTAGTHNCRADQVCINLRGSFACQCPPGYQKRGEQCVDIDECTIPPYCHQRCVNTPGSFYCQCSPGFQLAANNYTCVDINECDASNQCAQQCYNILGSFICQCNQGYELSSDRLNCEDIDECRTSSYLCQYQCVNEPGKFSCMCPQGYQVVRSRTCQDINECETTNECREDEMCWNYHGGFRCYPRNPCQDPYILTPENRCVCPVSNAMCRELPQSIVYKYMSIRSDRSVPSDIFQIQATTIYANTINTFRIKSGNENGEFYLRQTSPVSAMLVLVKSLSGPREHIVDLEMLTVSSIGTFRTSSVLRLTIIVGPFSF

SEQ ID NO: 20488 - protein, 65 aa, Homo sapiens
LRTPLAARARSAARPHRFTMLKALFLTMLTLALVKSQDTEETITYTQCTDGYEWDPVRQQCKEDS

SEQ ID NO: 20489 - protein, 52 aa, Homo sapiens
LRTPLAARARSAARPHRFTMLKALFLTMLTLALVKSQDTEETITYTVRGDGI

SEQ ID NO: 20490 - protein, 383 aa, Homo sapiens
LCFSGLRAMAVTEASLLRQCPLLLPQNRSKTVYEGFISAQGRDFHLRIVLPEDLQLKNARLLCSWQLRTILSGYHRIVQQRMQHSPDLMSFMMELKMLLEVALKNRQELYALPPPPQFYSSLIEEIGTLGWDKLVYADTCFSTIKLKAEDASGREHLITLKLKAKYPAESPDYFVDFPVPFCASWTPQSSLISIYSQFLAAIESLKAFWDVMDEIDEKTWVLEPEKPPRSATARRIALGNNVSINIEVDPRHPTMLPECFFLGADHVVKPLGIKLSRNIHLWDPENSVLQNLKDVLEIDFPARAILEKSDFTMDCGICYAYQLDGTIPDQVCDNSQCGQPFHQICLYEWLRGLLTSRQSFNIIFGECPYCSKPITLKMSGRKH

SEQ ID NO: 20491 - protein, 388 aa, Homo sapiens
LCFSGLRAMAVTEASLLRQCPLLLPQNRSKTVYEGFISAQGRDFHLRIVLPEDLQLKNARLLCSWQLRTILSGYHRIVQQRMQHSPDLMSFMMELKMLLEVALKNRQELYALPPPPQFYSSLIEEIGTLGWDKLVYADTCFSTIKLKAEDASGREHLITLKLKAKYPAESPDYFVDFPVPFCASWTPQVNSPQSSLISIYSQFLAAIESLKAFWDVMDEIDEKTWVLEPEKPPRSATARRIALGNNVSINIEVDPRHPTMLPECFFLGADHVVKPLGIKLSRNIHLWDPENSVLQNLKDVLEIDFPARAILEKSDFTMDCGICYAYQLDGTIPDQVCDNSQCGQPFHQICLYEWLRGLLTSRQSFNIIFGECPYCSKPITLKMSGRKH

SEQ ID NO: 20492 - protein, 60 aa, Homo sapiens
LCFSGLRAMAVTEASLLRQCPLLLPQNRSKTVYEGFISAQTCVCGYLLQYHQVKSRRCFW

SEQ ID NO: 20493 - protein, 81 aa, Homo sapiens
LALLTSPNDPCCRKMSRGTIPAMKRECQYNSHKGSSCGPQTKNHCITSAGCIGEKGAGTEKPEINHLSFLEKRMLRLSRFG

SEQ ID NO: 20494 - protein, 81 aa, Homo sapiens
LALLTSPNDPCCRKMSRGTIPAMKRECQYNSHKGSSCGPQTKNHCITSADCIGEKGAGTEKPEINHLSFLEKRMLRLSRFG

SEQ ID NO: 20495 - protein, 88 aa, Homo sapiens
LALLTSPNDPCCRKMSRGTIPAMKRECQYNSHKGSSCGPQTKNHCITSAGRTRWFMPVIPALWEAETGGSRGQQIETILANTVKPHLS

SEQ ID NO: 20496 - protein, 84 aa, Homo sapiens
LALLTSPNDPCCRKMSRGTIPAMKRECQYNSHKGSSCGPQTKNHCITSAESDSRPVPQAAVQWRDLGSLHLRLPDSSNSPASAS

SEQ ID NO: 20497 - protein, 29 aa, Homo sapiens
MLTSSESLKILLWPDSRLVGERLFPRQER

SEQ ID NO: 20498 - protein, 32 aa, Homo sapiens
LTSSESLKILLWPDSRLVGERLDFNRSHGSRP

SEQ ID NO: 20499 - protein, 34 aa, Homo sapiens
LLHISLHISLLWFCTSVWRGLRSLWGHISSVDCW

SEQ ID NO: 20500 - protein, 394 aa, Homo sapiens
MIEAFLLYLFLQLSTSFVLETFIHSKEKPTMLQWIELLTKQFNNSQAACEWFLDRMADDDWWPMQILIKCPNQIVRQMFQRLCIHVIQRLRPVHAHLYLQPGMEDGSDDMDTSVEDIGGRSCVTRFVRTLLLIMEHGVKPHSKHLTEYFAFLYEFAKMGEEESQFLLSLQAISTMVHFYMGTKGPENPQVEVLSEEEGEEEEEEEDILSLAEEKYRPAALEKMIALVALLVEQSRSERHLTLSQTDMAALTGGKGFPFLFQHIRDGINIRQTCNLIFSLCRYNNRLAEHIVSMLFTSIAKLTPEAANPFFKLLTMLMEFAGGPPGMPPFASYILQRIWEVIEYNPSQCLDWLAVQTPRNKLAHSWVLQNMENWVERFLLAHNYPRVRTCSRRTV

SEQ ID NO: 20501 - protein, 167 aa, Homo sapiens
LLDAVLIDYQRNVPAAREPEVLSTMAIIVNKLGGHITAEIPQIFDAVFECTLNMINKDFEEYPEHRTNFFLLLQAVNSHCFPAFLAIPPTQFKLVLDSIIWAFKHTMRNVADTGLQILFTLLQNVAQEEAAAQSFYQTYFCDILQHIFSVVTDTSHTAGKNLIRFKC

SEQ ID NO: 20502 - protein, 23 aa, Homo sapiens
VWTLHPLLLPLLLLPVAGGSPWG

SEQ ID NO: 20503 - protein, 109 aa, Homo sapiens
LIIMASVWKRLQRVGKHASKFQFVASYQELMVECTKKWQPDKLVVVWTRRSRRKSSKAHSWQPGIKNPYRGVVVWPVPENIEITVTLFKDPHAEEFEDKEWTFVIENVS

SEQ ID NO: 20504 - protein, 168 aa, Homo sapiens
LIIMASVWKRLQRVGKHASKFQFVASYQELMVECTKKWQPDKLVVVWTRRSRRKSSKAHSWQPGIKNPYRGVVVWPVPENIEITVTLFKDPHAEEFEDKEWTFVIENESPSGRRKALATSSINMKQYASPMPTQTDVKLKFKPLSKKVVSAALQFSLSCIFLREGKAT

SEQ ID NO: 20505 - protein, 1163 aa, Homo sapiens
LIIMASVWKRLQRVGKHASKFQFVASYQELMVECTKKWQPDKLVVVWTRRSRRKSSKAHSWQPGIKNPYRGVVVWPVPENIEITVTLFKDPHAEEFEDKEWTFVIENESPSGRRKALATSSINMKQYASPMPTQTDVKLKFKPLSKKVVSAALQFSLSCIFLREGKATDEDMQSLASLMSMKQADIGNLDDFEEDNEDDDENRVNQEEKAAKITELINKLNFLDEAEKDLATVNSNPFDDPDAAELNPFGDPDSEEPITETASPRKTEDSFYNNSYNPFKEVQTPQYLNPFDEPEAFVTIKDSPPQSTKRKNIRPVDMSKYLYADSSKTEEEELDESNPFYEPKSTPPPNNLVNPVQELETERRVKRKAPAPPVLSPKTGVLNENTVSAGKDLSTSPKPSPIPSPVLGRKPNASQSLLVWCKEVTKNYRGVKITNFTTSWRNGLSFCAILHHFRPDLIDYKSLNPQDIKENNKKAYDGFASIGISRLLEPSDMVLLAIPDKLTVMTYLYQIRAHFSGQELNVVQIEENSSKSTYKVGNYETDTNSSVDQEKFYAELSDLKREPELQQPISGAVDFLSQDDSVFVNDSGVGESESEHQTPDDHLSPSTASPYCRRTKSDTEPQKSQQSSGRTSGSDDPGICSNTDSTQAQVLLGKKRLLKAETLELSDLYVSDKKKDMSPPFICEETDEQKLQTLDIGSNLEKEKLENSRSLECRSDPESPIKKTSLSPTSKLGYSYSRDLDLAKKKHASLRQTESDPDADRTTLNHADHSSKIVQHRLLSRQEELKERARVLLEQARRDAALKAGNKHNTNTATPFCNRQLSDQQDEERRRQLRERARQLIAEARSGVKMSELPSYGEMAAEKLKERSKASGEQNSKLVDLKLKKLLEVQPQVANSPSSAAQKAVTESSEQDMKSGTEDLRTERLQKTTERFRNPVVFSKDSTVRKTQLQSFSQYIENRPEMKRQRSIQEDTKKGNEEKAAITETQRKPSEDEVLNKGFKDTSQYVVGELAALENEQKQIDTRAALVEKRLRYLMDTGRNTEEEEAMMQEWFMLVNKKNALIRRMNQLSLLEKEHDLERRYELLNRELRAMLAIEDWQKTEAQKRREQLLLDELVALVNKRDALVRDLDAQEKQAEEEDEHLERTLEQNKGKMAKKEEKCVLQ

SEQ ID NO: 20506 - protein, 1234 aa, Homo sapiens
LIIMASVWKRLQRVGKHASKFQFVASYQELMVECTKKWQPDKLVVVWTRRSRRKSSKAHSWQPGIKNPYRGVVVWPVPENIEITVTLFKDPHAEEFEDKEWTFVIENESPSGRRKALATSSINMKQYASPMPTQTDVKLKFKPLSKKVVSAALQFSLSCIFLREGKATDEDMQSLASLMSMKQADIGNLDDFEEDNEDDDENRVNQEEKAAKITEIVNQLNALSSLDEDQDDCIKQANMRSAKSASSSEELINKLNFLDEAEKDLATVNSNPFDDPDAAELNPFGDPDSEEPITETASPRKTEDSFYNNSYNPFKEVQTPQYLNPFDEPEAFVTIKDSPPQSTKRKNIRPVDMSKYLYADSSKTEEEELDESNPFYEPKSTPPPNNLVNPVQELETERRVKRKAPAPPVLSPKTGVLNENTVSAGKDLSTSPKPSPIPSPVLGRKPNASQSLLVWCKEVTKNYRGVKITNFTTSWRNGLSFCAILHHFRPDLIDYKSLNPQDIKENNKKAYDGFASIGISRLLEPSDMVLLAIPDKLTVMTYLYQIRAHFSGQELNVVQIEENSSKSTYKVGNYETDTNSSVDQEKFYAELSDLKREPELQQPISGAVDFLSQDDSVFVNDSGVGESESEHQTPDDHLSPSTASPYCRRTKSDTEPQKSQQSSGRTSGSDDPGICSNTDSTQAQVLLGKKRLLKAETLELSDLYVSDKKKDMSPPFICEETDEQKLQTLDIGSNLEKEKLENSRSLECRSDPESPIKKTSLSPTSKLGYSYSRDLDLAKKKHASLRQTESDPDADRTTLNHADHSSKIVQHRLLSRQEELKERARVLLEQARRDAALKAGNKHNTNTATPFCNRQLSDQQDEERRRQLRERARQLIAEARSGVKMSELPSYGEMAAEKLKERSKASGDENDNIEIDTNEEIPEGFVVGGGDELTNLENDLDTPEQNSKLVDLKLKKLLEVQPQVANSPSSAAQKAVTESSEQDMKSGTEDLRTERLQKTTERFRNPVVFSKDSTVRKTQLQSFSQYIENRPEMKRQRSIQEDTKKGNEEKAAITETQRKPSEDEVLNKGFKDTSQYVVGELAALENEQKQIDTRAALVEKRLRYLMDTGRNTEEEEAMMQEWFMLVNKKNALIRRMNQLSLLEKEHDLERRYELLNRELRAMLAIEDWQKTEAQKRREQLLLDELVALVNKRDALVRDLDAQEKQAEEEDEHLERTLEQNKGKMAKKEEKCVLQ

SEQ ID NO: 20507 - protein, 58 aa, Homo sapiens
LRLILQLLKLSPQFSIMSEPIRVLVTGAAGQIAYSLLYSIGNGSVFGKDQVGTGVYKS

SEQ ID NO: 20508 - protein, 153 aa, Homo sapiens
LRLILQLLKLSPQFSIMSEPIRVLVTGAAGQIAYSLLYSIGNGSVFGKDQPIILVLLDITPMMGVLDGVLMELQDCALPLLKDVIATDKEDVAFKDLDVAILVGSMPRREGMERKDLLKANVKIFKSQGAALDKYAKKSVKVTNAVFYGIFHY

SEQ ID NO: 20509 - protein, 350 aa, Homo sapiens
LRLILQLLKLSPQFSIMSEPIRVLVTGAAGQIAYSLLYSIGNGSVFGKDQPIILVLLDITPMMGVLDGVLMELQDCALPLLKDVIATDKEDVAFKDLDVAILVGSMPRREGMERKDLLKANVKIFKSQGAALDKYAKKSVKVIVVGNPANTNCLTASKSAPSIPKENFSCLTRLDHNRAKAQIALKLGVTANDVKNVIIWGNHSSTQYPDVNHAKVKLQGKEVGVYEALKDDSWLKGEFVTTVQQRGAAVIKARKLSSAMSAAKAICDHVRDIWFGTPEGEFVSMGVISDGNSYGVPDDLLYSFPVVIKNKTWKFVEGLPINDFSREKMDLTAKELTEEKESAFEFLSSA

SEQ ID NO: 20510 - protein, 185 aa, Homo sapiens
LRLILQLLKLSPQFSIMIALKLGVTANDVKNVIIWGNHSSTQYPDVNHAKVKLQGKEVGVYEALKDDSWLKGEFVTTVQQRGAAVIKARKLSSAMSAAKAICDHVRDIWFGTPEGEFVSMGVISDGNSYGVPDDLLYSFPVVIKNKTWKFVEGLPINDFSREKMDLTAKELTEEKESAFEFLSSA

SEQ ID NO: 20511 - protein, 226 aa, Homo sapiens
LRLILQLLKLSPQFSIMVIVVGNPANTNCLTASKSAPSIPKENFSCLTRLDHNRAKAQIALKLGVTANDVKNVIIWGNHSSTQYPDVNHAKVKLQGKEVGVYEALKDDSWLKGEFVTTVQQRGAAVIKARKLSSAMSAAKAICDHVRDIWFGTPEGEFVSMGVISDGNSYGVPDDLLYSFPVVIKNKTWKFVEGLPINDFSREKMDLTAKELTEEKESAFEFLSSA

SEQ ID NO: 20512 - protein, 82 aa, Homo sapiens
LRQIFMFLLFCKVQDYLRRFESIPDMLELDHLTVSGDVTFGKNVSLKGTVIIIANHGDRIDIPPGAVLENKIVSGNLRILDH

SEQ ID NO: 20513 - protein, 12 aa, Homo sapiens
LPKLGSLTLMYL

SEQ ID NO: 20514 - protein, 139 aa, Homo sapiens [sequence omitted]

SEQ ID NO: 20515 - protein, 64 aa, Homo sapiens
MAVCLYLLRCNILLLLLLLLLGSRCNFPSASLLLCLGTAKAWDRPRAASLCLPSSPRSIFPPLN

SEQ ID NO: 20516 - protein, 124 aa, Homo sapiens
LGLPASSDVPPCSPSRQSWTQGTALANFYPPKQCFGPVAGLRLTSRHWHWAPQPELVTKDKDTLTFGLIHVQVQLCVHQGSVWKQPLELPGSRNHGLTGSCVVTSWKKCRCISLSPVSSASGVF

SEQ ID NO: 20517 - protein, 191 aa, Homo sapiens
LCSRGRSRGRRLLSRNSLSHSFLSITRGAESQGGGCGSKGGGGGGGSCSDMSSMNPEYDYLFKLLLIGDSGVGKSCLLLRFAESFNNVKQWLQEIDRYASENVNKLLVGNKCDLTTKKVVDYTTAKEFADSLGIPFLETSAKNATNVEQSFMTMAAEIKKRMGPGATAGGAEKSNVKIQSTPVKQSGGGCC

SEQ ID NO: 20518 - protein, 255 aa, Homo sapiens
LCSRGRSRGRRLLSRNSLSHSFLSITRGAESQGGGCGSKGGGGGGGSCSDMSSMNPEYDYLFKLLLIGDSGVGKSCLLLRFADDTYTESYISTIGVDFKIRTIELDGKTIKLQIWDTAGQERFRTITSSYYRGAHGIIVVYDVTDQESFNNVKQWLQEIDRYASENVNKLLVGNKCDLTTKKVVDYTTAKEFADSLGIPFLETSAKNATNVEQSFMTMAAEIKKRMGPGATAGGAEKSNVKIQSTPVKQSGGGCC

SEQ ID NO: 20519 - protein, 223 aa, Homo sapiens
LCSRGRSRGRRLLSRNSLSHSFLSITRGAESQGGGCGSKGGGGGGGSCSDMSSMNPEYDYLFKLLLIGDSGVGKSCLLLRFAWDTAGQERFRTITSSYYRGAHGIIVVYDVTDQESFNNVKQWLQEIDRYASENVNKLLVGNKCDLTTKKVVDYTTAKEFADSLGIPFLETSAKNATNVEQSFMTMAAEIKKRMGPGATAGGAEKSNVKIQSTPVKQSGGGCC

SEQ ID NO: 20520 - protein, 116 aa, Homo sapiens
LQLETEIEALKEELLFMKKNEEGEIKGLQAQIASSGLTVEVDIPKSQDLAKLMADIWAQYDELARKSQEELGKYWSQQIEESITVVTMQSTEVGAAEMMLMELLGDQPGLHEKSEG

SEQ ID NO: 20521 - protein, 484 aa, Homo sapiens
VPCRSPICPPGLLNLLSLLFVMQYDDLPHYGGMDGVGIPSTMYGDPHAARSMQPVHHLNHGPPLHSHQYPHTAHTNAMAPSMGSSVNDALKRDKDAIYGHPLFPLLALIFEKCELATCTPREPGVAGGDVCSSESFNEDIAVFAKQIRAEKPLFSSNPELDNLMIQAIQVLRFHLLELEKVHELCDNFCHRYISCLKGKMPIDLVIDDREGGSKSDSEDITRSANLTDQPSWNRDHDDTASTRSGGTPGPSSGGHTSHSGDNSSEQGDGLDNSVASPSTGDDDDPDKDKKRHKKRGIFPKVATNIMRAWLFQHLTHPYPSEEQKKQLAQDTGLTILQVNNWFINARRRIVQPMIDQSNRAVSQGTPYNPDGQPMGGFVMDGQQHMGIRAPGLQSMPGEYVARGGPMGVSMGQPSYTQPQMPPHPAQLRHGPPMHTYIPGHPHHPTVMMHGGPPHPGMPMSASSPTVLNTGDPTMSGQVMDIHAQ

SEQ ID NO: 20522 - protein, 17 aa, Homo sapiens
LLTLLIFWPLLGFLSPF

SEQ ID NO: 20523 - protein, 120 aa, Homo sapiens
LVSRLPFLGALGVAVAVAEIGCTMSAFEKPQIIAHIQKGFNYTVFDCKWVPCSAKFVTMGNFARGTGVIQLYEIQHGDLKLLREVGAGSRIRTAVGGECGSWGLHSSLPEPSPSVPQSMA

SEQ ID NO: 20524 - protein, 178 aa, Homo sapiens
LSEDLNWLTGNEASYPLEMCSHFDADEIKRLGKRFKKLDLDNSGSLSVEEFMSLPELQQNPLVQRVIDIFDTDGNGEVDFKEFIEGVSQFSVKGDKEQKLRFAFRIYDMDKDGYISNGELFQVLKMMVGNNLKDTQLQQIVDKTIINADKDGDGRISFEEFCAVVGGLDIHKKMVVDV

SEQ ID NO: 20525 - protein, 164 aa, Homo sapiens
LKGIVPLGRSRRCPPPPGAAAPDPRPDMGDLPGLVRLSIALRIQPNDGPVFYKVDGQRFGQNRTIKLLTGSSYKVEVKIKPSTLQVENISIGGVLVPLELKSKEPDGDRVVYTGTYDTEGVTPTKSGERQPIQITMPVRLACGYRSMVPWKMETTEKKTITISL

SEQ ID NO: 20526 - protein, 26 aa, Homo sapiens
MWCARFPCIVLLTAAPLPLSMTPKQI

SEQ ID NO: 20527 - protein, 300 aa, Homo sapiens
LRAMATAERRALGIGFQWLSLATLVLICAGQGGRREDGGPACYGGFDLYFILDKSGSVLHHWNEIYYFVEQLAHKFISPQLRMSFIVFSTRGTTLMKLTEDREQIRQGLEELQKVLPGGDTYMHEGFERASEQIYYENRQGYRTASVIIALTDGELHEDLFFYSEREANRSRDLGAIVYCVGVKDFNETQLARIADSKDHVFPVNDGFQALQGIIHSILKKSCIEILAAEPSTICAGESFQVVVRGNGFRHARNVDRVLCSFKINDSVTLSKSLQSPWVSSTSGFKEGNSHPCLPARPHT

SEQ ID NO: 20528 - protein, 336 aa, Homo sapiens
LRAMATAERRALGIGFQWLSLATLVLICAGQGGRREDGGPACYGGFDLYFILDKSGSVLHHWNEIYYFVEQLAHKFISPQLRMSFIVFSTRGTTLMKLTEDREQIRQGLEELQKVLPGGDTYMHEGFERASEQIYYENRQGYRTASVIIALTDGELHEDLFFYSEREANRSRDLGAIVYCVGVKDFNETQLARIADSKDHVFPVNDGFQALQGIIHSILKKSCIEILAAEPSTICAGESFQVVVRGNGFRHARNVDRVLCSFKINDSVTLNEKPFSVEDTYLLCPAPILKEVGMKAALQVSMNDGLSFISSSVIITTTHCSLHKIASGPTTAACME

SEQ ID NO: 20529 - protein, 371 aa, Homo sapiens
LRAMATAERRALGIGFQWLSLATLVLICAGQGGRREDGGPACYGGFDLYFILDKSGSVLHHWNEIYYFVEQLAHKFISPQLRMSFIVFSTRGTTLMKLTEDREQIRQGLEELQKVLPGGDTYMHEGFERASEQIYYENRQGYRTASVIIALTDGELHEDLFFYSEREANRSRDLGAIVYCVGVKDFNETQLARIADSKDHVFPVNDGFQALQGIIHSILKKSCIEILAAEPSTICAGESFQVVVRGNGFRHARNVDRVLCSFKINDSVTLNEKPFSVEDTYLLCPAPILKEVGMKAALQVSMNDGLSFISSSVIITTTHCSDGSILAIALLILFLLLALALLWWFWPLCCTVIIKEVPPPPAEESEENKIK

SEQ ID NO: 20530 - protein, 567 aa, Homo sapiens
LRAMATAERRALGIGFQWLSLATLVLICAGQGGRREDGGPACYGGFDLYFILDKSGSVLHHWNEIYYFVEQLAHKFISPQLRMSFIVFSTRGTTLMKLTEDREQIRQGLEELQKVLPGGDTYMHEGFERASEQIYYENRQGYRTASVIIALTDGELHEDLFFYSEREANRSRDLGAIVYCVGVKDFNETQLARIADSKDHVFPVNDGFQALQGIIHSILKKSCIEILAAEPSTICAGESFQVVVRGNGFRHARNVDRVLCSFKINDSVTLNEKPFSVEDTYLLCPAPILKEVGMKAALQVSMNDGLSFISSSVIITTTHCSDGSILAIALLILFLLLALALLWWFWPLCCTVIIKEVPPPPAEESEEEDDDGLPKKKWPTVDASYYGGRGVGGIKRMEVRWGEKGSTEEGAKLEKAKNARVKMPEQEYEFPEPRNLNNNMRRPSSPRKWYSPIKGKLDALWVLLRKGYDRVSVMRPQPGDTGRCINFTRVKNNQPAKYPLNNAYHTSSPPPAPIYTPPPPAPHCPPPPPSAPTPPIPSPPSTLPPPPQAPPPNRAPPPSRPPPRPSV

SEQ ID NO: 20531 - protein, 21 aa, Homo sapiens
MLILGQLGKGLPSFKRRCDLF

SEQ ID NO: 20532 - protein, 40 aa, Homo sapiens
LFVCLFILISGLGGIFISFTEVIHFHQELCFPPAPPTETV

SEQ ID NO: 20533 - protein, 270 aa, Homo sapiens
LLQAAAAEASLNKSKSATTTPSGSPRTSQQNVYNPSEGSTWNPFDDDNFSKLTAEELLNKDFAKLGEGKHPEKLGGSAESLIPGFQSTQGDAFATTSFSAGTAEKRKGGQTVDSGLPLLSVSDPFIPLQVPDAPEKLIEGLKSPDTSLLLPDLLPMTDPFGSTSDAVIEKADVAVESLIPGLEPPVPQRLPSQTESVTSNRTDSLTGEDSLLDCSLLSNPTTDLLEEFAPTAISAPVHKGKCFLLLRPTCVLRGERTKQLLKVFLIKSLY

SEQ ID NO: 20534 - protein, 219 aa, Homo sapiens
LVLRGQIALECDRALGKTLNSEVANFTLLLEYGRSLEDDIRSDTSFMFQRVLVSLSAGGRDEGNYLDDALVRQDAQDLYEAGEKKWGTDEVKFLTVLCSRNRNHLLHVFDEYKRISQKDIEQSIKSETSGSFEDALLAIVKCMRNKSAYFAEKLYKSMKGLGTDDNTLIRVMVSRAEIDMLDIRAHFKRLYGKSLYSFIKGDTSGDYRKVLLVLCGGDD

SEQ ID NO: 20535 - protein, 38 aa, Homo sapiens
LLAQGRASHPHSASRGPVFQRDCADTALWVSLLGVGCC

SEQ ID NO: 20536 - protein, 28 aa, Homo sapiens
VQVSLGPICLWILAVNWKVLERRPSEIA

SEQ ID NO: 20537 - protein, 11 aa, Homo sapiens
MFPEHKMATRG

SEQ ID NO: 20538 - protein, 9 aa, Homo sapiens
MLINFSLVL

SEQ ID NO: 20539 - protein, 153 aa, Homo sapiens
LLRASAGIQKQSYIWLSNVHRGENKDQVHSIGIVPSVREKEDPEPSTDGTYVWKIFSQETLTKAQILKLFLSYDYAVKKPWLAYPHYKPPEKCPSIILHDRLYYLNGIECAASAMEMSAIAAHNAALLAYHRWNGHTDMIDQDGLYEKLKTEL

SEQ ID NO: 20540 - protein, 106 aa, Homo sapiens
MVPSAGQLALFALGIVLAACQALENSTSPLSADPPVAAAVVSHFNDCPDSHTQFCFHGTCRFLVQEDKPACVFPTPLVCCLQKPSNKGKPLKEDTQLPFWVRWCTL

SEQ ID NO: 20541 - protein, 89 aa, Homo sapiens
LPKRKTEGDVKGDKAKVDTPQRRSTRLSAKPAPPKPEPKPKKAPAKKGEKVPKGKKGKADAGKEGNYPAEKGDAITDQAREAEGDGEAK

SEQ ID NO: 20542 - protein, 186 aa, Homo sapiens
LLPAAYWIAHQAVKIVFDSIDNLEAAPHDIGYVKQAMFHYFQVPDRLGILTHLYRDFDKCRFAGFCRKIAEGTGGGGWVLSGFVLQRSPVGRLSGVQTGLTTIFLSPSDLSSLPPLALVVVGLGVEAEGHVGRVDSFVLPVFFSLIAIMACLGCMPVSEEFMKQLSFGQIYNFLFLANYTQRTRGL

SEQ ID NO: 20543 - protein, 1024 aa, Homo sapiens
MPRDGVPAGNTTPAAAQAAAQSPDSATAGAPQVLDSLKRFVLFLENFAPLVNSLNLGIANPLLLGPSPLHFAQIKTQLALQQLNAVASHGSTPPYTLLNQAFLKIAMSRPRFNPRGDFPLQRPRAPNPSGMRPPGPFMRPGSMGLPRFYPAGRARGIPHRFAGHESYQNMGPQRMNVQVTQHRTDPRLTKEKLDFHEAQQKKGKPHGSRWDDEPHISASVAVKQSSVTQVTEQSPKVQSRYTKESASSILASFGLSNEDLEELSRYPDEQLTPENMPLILRDIRMRKMGRRLPNLPSQSRNKETLGSEAVSSNVIDYGHASKYGYTEDPLEVRIYDPEIPTDEVENEFQSQQNISASVPNPNVICNSMFPVEDVFRQMDFPGESSNNRSFFSVESGTKMSGLHISGGQSVLEPIKSVNQSINQTVSQTMSQSLIPPSMNQQPFSSELISSVSQQERIPHEPVINSSNVHVGSRGSKKNYQSQADIPIRSPFGIVKASWLPKFSHADAQKMKRLPTPSMMNDYYAASPRIFPHLCSLCNVECSHLKDWIQHQNTSTHIESCRQLRQQYPDWNPEILPSRRNEGNRKENETPRRRSHSPSPRRSRRSSSSHRFRRSRSPMHYMYRPRSRSPRICHRFISRYRSRSRSRSPYRIRNPFRGSPKCFRSVSPERMSRRSVRSSDRKKALEDVVQRSGHGTEFNKQKHLEAADKGHSPAQKPKTSSGTKPSVKPTSATKSDSNLGGHSIRCKSKNLEDDTLSECKQVSDKAVSLQRKLRKEQSLHYGSVLLITELPEDGCTEEDVRKLFQPFGKVNDVLIVPYRKEAYLEMEFKEAITAIMKYIETTPLTIKGKSVKICVPGKKKAQNKEVKKKTLESKKVSASTLKRDADASKAVEIVTSTSAESVDQTQQLVPLVRNTARDHDGTPENEGEETVQSALFGFQYDASDHTMAWLGPNTVPEVKEMILQDPQLQTTQLPQTTQAPDITWGMLKKTTYKAEQILLQTQKPFTPDNLFLALLSGDAKPEYEQ

SEQ ID NO: 20544 - protein, 14 aa, Homo sapiens
MPLPHMVQHHLILY

SEQ ID NO: 20545 - protein, 918 aa, Homo sapiens
MDSPPLKALNSNSIYFLLLFHCMLISEVQIEHDPELEKESPGLKNSPIDESEVQTATDSPSVKPNELEEESTPSIQTETLVQQEEPCEEEAEKATCDSDFAVETLELETQGEEVKEEIPLVASASVSIEQFTENAEECALNQQMFNSDLEKKGAEIINPKTALLPSDSVFAEERNLKGILEESPSEAEDFISGITQTMVEAVAEVEKNETVSEILPSTCIVTLVPGIPTGDEKTVDKKNISEKKGNMDEKEEKEFNTKETRMDLQIGTEKAEKNEGRMDAEKVEKMAAMKEKPAENTLFKAYPNKGVGQANKPDETSKTSILAVSDVSSSKPSIKAVIVSSPKAKATVSKTENQKSFPKSVPRDQINAEKKLSAKEFGLLKPTSARSGLAESSSKFKPTQSSLTRGGSGRISALQGKLSKLDYRDITKQSQETEARPSIMKRDDSNNKTLAEQNTKNPKSTTGRSSKSKEEPLFPFNLDEFVTVDEVIEEVNPSQAKQNPLKGKRKETLKNVPFSELNLKKKKGKTSTPRGVEGELSFVTLDEIGEEEDAAAHLAQALVTVDEVIDEEELNMEEMVKNSNSLFTLDELIDQDDCISHSEPKDVTVLSVAEEQDLLKQERLVTVDEIGEVEELPLNESADITFATLNTKGNEGDTVRDSIGFISSQVPEDPSTLVTVDEIQDDSSDLHLVTLDEVTEEDEDSLADFNNLKEELNFVTVDEVGEEEDGDNDLKVELAQSKNDHPTDKKGNRKKRAVDTKKTKLESLSQVGPVNENVMEEDLKTMIERHLTAKTPTKRVRIGKTLPSEKAVVTEPAKGEEAFQMSEVDEESGLKDSEPERKRKKTEDSSSGKSVASDVPEELDFLVPKAGFFCPICSLFYSGEKAMTNHCKSTRHKQNTEKFMAKQRKEKEQNEAEERSSR

SEQ ID NO: 20546 - protein, 113 aa, Homo sapiens
VPAPPAENRSMEGGLGRAVCLLTGASRGFGRTLAPLLASLLSPGSVLVLSARNDEALRQLEAELGAERSGLRVVRVPADLGAEAGLQQLLGALRELPRPKGLQRLLLINNAAS

SEQ ID NO: 20547 - protein, 271 aa, Homo sapiens
VPAPPAENRSMEGGLGRAVCLLTGASRGFGRTLAPLLASLLSPGSVLVLSARNDEALRQLEAELGAERSGLRVVRVPADLGAEAGLQQLLGALRELPRPKGLQRLLLINNAGSLGDVSKGFVDLSDSTQVNNYWALNLTSMLCLTSSVLKAFPDSPGLNRTVVNISSLCALQPFKGWALYCAGKAARDMLFQVLALEEPNVRVLNYAPGPLDTDMQQLARETSVDPDMRKGLQELKAKGKLVDCKVSAQKLLSLLEKDEFKSGAHVDFYDK

SEQ ID NO: 20548 - protein, 135 aa, Homo sapiens
LAYPSANICNVVLMRYGELEEGIDVLDSDGNLVGSSKIAARHALLETALTRVVLPMPILVLPPIVMSMLEKTALLQARPRLLLPVQSLVCLAAFGLALPLAISLFPQMSEIETSQLEPEIAQATSSRTVVYNKGL

SEQ ID NO: 20549 - protein, 76 aa, Homo sapiens
LAYPSANICNVVLMRYGELEEGIDVLDSDGNLVGSSKIAARHALLETALTRVVLPMPILVLPPIVMSMLEKLKHPN

SEQ ID NO: 20550 - protein, 78 aa, Homo sapiens
LWLLGAGLGGFAAVSLERWAGMCRAERTEGKGLFATQLIRKGETIFVERPLVAAQFLWNALYRYREWCLAHSSCSVGL

SEQ ID NO: 20551 - protein, 190 aa, Homo sapiens
LEMVPGAAGWCCLVLWLPACVAAHGFRIHDYLYFQVLSPGDIRYIFTATPAKDFGGIFHTRYEQIHLVPAEPPEACGELSNGFFIQDQIALVERGGCSFLSKTRVVQEHGGRAVIISDNAVDNDSFYVEMIQDSTQRTADIPALFLLGRDGYMIRRSLEQHGLPWAIISIPVNVTSIPTFELLQPPWTFW

SEQ ID NO: 20552 - protein, 134 aa, Homo sapiens
LEMVPGAAGWCCLVLWLPACVAAHGFRIHDYLYFQVLSPGDIRYIFTATPAKDFGGIFHTRYEQIHLVPAEPPEACGELSNGFFIQDQIALVERGYMIRRSLEQHGLPWAIISIPVNVTSIPTFELLQPPWTFW

SEQ ID NO: 20553 - protein, 118 aa, Homo sapiens
VVLKGQMLVVVSLTHSFISATVLSTTCTRGRGVNKIPFCLGGRPLPMGLAISRKAPQSSTLFWLCVKDVCEQAQSFAARMRGQSIPLHTHPGADRLVPPSLHACPSTGSFAAPAPPAP

SEQ ID NO: 20554 - protein, 187 aa, Homo sapiens
LGAGCRILLICEMQLTHQLDLFPECRVTLLLFKDVKNAGDLRRKAMEGTIDGSLINPTVIVDPFQILVAANKAVHLYKLGKMKTRTLSTEIIFNLSPNNNISEALKKFGISANDTSILIVYIEEGEKQINQEYLISQVEGHQVSLKNLPEIMNITEVKKIYKLSSQEESIGTLLDAIICRMSTKDVL

SEQ ID NO: 20555 - protein, 33 aa, Homo sapiens
LQEKQSVIPVLNFSKRRQYFRTEALRTSLANYF

SEQ ID NO: 20556 - protein, 449 aa, Homo sapiens
VGGAGAGCDVSGTSGCHPRGKNLVLMSDHGDVSLPPEDRVRALSQLGSAVEVNEDIPPRRYFRSGVEIIRMASIYSEEGNIEHAFILYNKYITLFIEKLPKHRDYKSAVIPEKKDTVKKLKEIAFPKAEELKAELLKRYTKEYTEYNEEKKKEAEELARNMAIQQELEKEKQRVAQQKQQQLEQEQFHAFEEMIRNQELEKERLKIVQEFGKVDPGLGGPLVPDLEKPSLDVFPTLTVSSIQPSDCHTTVRPAKPPVVDRSLKPGALSNSESIPTIDGLRHVVVPGRLCPQFLQLASANTARGVETCGILCGKLMRNEFTITHVLIPKQSAGSDYCNTENEEELFLIQDQQGLITLGWIHTHPTQTAFLSSVDLHTHCSYQMMLPESVAIVCSPKFQETGFFKLTDHGLEEISSCRQKGFHPHSKDPPLFCSCSHVTVVDRAVTITDLR

SEQ ID NO: 20557 - protein, 77 aa, Homo sapiens [sequence omitted]

SEQ ID NO: 20558 - protein, 131 aa, Homo sapiens
LLWYSCQRHTSPQSLGEEPLIPSVLQSPAHSATHTMCEEETTALVCDNGSGLCKAGFAGDDAPRAVFPSIVGRPRHQGVMVGMGQKDSYVGDEAQSKRGILTLKYPIEHGIITNWDDMEKVSVDFPLMSLL

SEQ ID NO: 20559 - protein, 62 aa, Homo sapiens
MTLVFIGHCALSTLPLKCFSLLSFLSFQPHDHFSNLGCQHLSLDYCNGFLADFLVSCPHSPN

SEQ ID NO: 20560 - protein, 45 aa, Homo sapiens
MRRLSPSPNSLGSSVSAVGDRLLRGESRGSLHWMSPLPAEWRFQS

SEQ ID NO: 20561 - protein, 366 aa, Homo sapiens
VARARASLPAQSPARSMAATSLMSALAARLLQPAHSCSLRLRPFHLAAVRNEAVVISGRKLAQQIKQEVRQEVEEWVASGNKRPHLSVILVGENPASHSYVLNKTRAAAVVGINSETIMKPASISEEELLNLINKLNNDDNVDGLLVQLPLPEHIDERRICNAVSPDKDVDGFHVINVGRMCLDQYSMLPATPWGVWEIIKRTGIPTLGKNVVVAGRSKNVGMPIAMLLHTDGAHERPGGDATVTISHRYTPKEQLKKHTILADIVISAAGIPNLITADMIKEGAAVIDVGINRVHDPVTAKPKLVGDVDFEGVRQKAGYITPVPGGVGPMTVAMLMKNTIIAAKKVLRLEEREVLKSKELGVATN

SEQ ID NO: 20562 - protein, 102 aa, Homo sapiens
MAATSLMSALAARLLQPAHSCSLRLRPFHLAAVRNEAVVISGRKLAQQIKQEVRQEVEEWVASGNKRPHLSVILVGENPASHSYVLNKTRAAAVVGNPSRGG

SEQ ID NO: 20563 - protein, 1275 aa, Homo sapiens
VGSELGAEPLTVQTPSGSRMSAEASARPLRVGSRVEVIGKGHRGTVAYVGATLFATGKWVGVILDEAKGKNDGTVQGRKYFTCDEGHGIFVRQSQIQVFEDGADTTSPETPDSSASKVLKREGTDTTAKTSKLRGLKPKKAPTARKTTTRRPKPTRPASTGVAGASSSLGPSGSASAGELSSSEPSTPAQTPLAAPIIPTPVLTSPGAVPPLPSPSKEEEGLRAQVRDLEEKLETLRLKRAEDKAKLKELEKHKIQLEQVQEWKSKMQEQQADLQRRLKEARKEAKEALEAKERYMEEMADTADAIEMATLDKEMAEERAESLQQEVEALKERVDELTTDLEILKAEIEEKGSDGAASSYQLKQLEEQNARLKDALVRMRDLSSSEKQEHVKLQKLMEKKNQELEVVRQQRERLQEELSQAESTIDELKEQVDAALGAEEMVEMLTDRNLNLEEKVRELRETVGDLEAMNEMNDELQENARETELELREQLDMAGARVREAQKRVEAAQETVADYQQTIKKYRQLTAHLQDVNRELTNQQEASVERQQQPPPETFDFKIKFAETKAHAKAIEMELRQMEVAQANRHMSLLTAFMPDSFLRPGGDHDCVLVLLLMPRLICKAELIRKQAQEKFELSENCSERPGLRGAAGEQLSFAAGLVYSLSLLQATLHRYEHALSQCSVDVYKKVGSLYPEMSAHERSLDFLIELLHKDQLDETVNVEPLTKAIKYYQHLYSIHLAEQPEDCTMQLADHIKFTQSALDCMSVEVGRLRAFLQGGQEATDIALLLRDLETSCSDIRQFCKKIRRRMPGTDAPGIPAALAFGPQVSDTLLDCRKHLTWVVAVLQEVAAAAAQLIAPLAENEGLLVAALEELAFKASEQIYGTPSSSPYECLRQSCNILISTMNKLATAMQEGEYDAERPPSKPPPVELRAAALRAEITDAEGLGLKLEDRETVIKELKKSLKIKGEELSEANVRLSLLEKKLDSAAKDADERIEKVQTRLEETQALLRKKEKEFEETMDALQADIDQLEAEKAELKQRLNSQSKRTIEGLRGPPPSGIATLVSGIAGGAIPGQAPGSVPGPGLVKDSPLLLQQISAMRLHISQLQHENSILKGAQMKASLASLPPLHVAKLSHEGPGSELPAGALYRKTSQLLETLNQLSTHTHVVDITRTSPAAKSPSAQLMEQVAQLKSLSDTVEKLKDEVLKETVSQRPGATVPTDFATFPSSAFLRAKEEQQDDTVYMGKVTFSCAAGFGQRHRLVLTQEQLHQLHSRLIS

SEQ ID NO: 20564 - protein, 1339 aa, Homo sapiens
VRVRLSCPRCPALCLIDVIPAAVGAQFSVRAGLREKRVHSTQNASGPLGRRVLGGPGRVWRRVGQPTRAGRAGPAPQGLGRRSSVGSELGAEPLTVQTPSGSRMSAEASARPLRVGSRVEVIGKGHRGTVAYVGATLFATGKWVGVILDEAKGKNDGTVQGRKYFTCDEGHGIFVRQSQIQVFEDGADTTSPETPDSSASKVLKREGTDTTAKTSKLPTRPASTGVAGASSSLGPSGSASAGELSSSEPSTPAQTPLAAPIIPTPVLTSPGAVPPLPSPSKEEEGLRAQVRDLEEKLETLRLKRAEDKAKLKELEKHKIQLEQVQEWKSKMQEQQADLQRRLKEARKEAKEALEAKERYMEEMADTADAIEMATLDKEMAEERAESLQQEVEALKERVDELTTDLEILKAEIEEKGSDGAASSYQLKQLEEQNARLKDALVRMRDLSSSEKQEHVKLQKLMEKKNQELEVVRQQRERLQEELSQAESTIDELKEQVDAALGAEEMVEMLTDRNLNLEEKVRELRETVGDLEAMNEMNDELQENARETELELREQLDMAGARVREAQKRVEAAQETVADYQQTIKKYRQLTAHLQDVNRELTNQQEASVERQQQPPPETFDFKIKFAETKAHAKAIEMELRQMEVAQANRHMSLLTAFMPDSFLRPGGDHDCVLVLLLMPRLICKAELIRKQAQEKFELSENCSERPGLRGAAGEQLSFAAGLVYSLSLLQATLHRYEHALSQCSVDVYKKVGSLYPEMSAHERSLDFLIELLHKDQLDETVNVEPLTKAIKYYQHLYSIHLAEQPEDCTMQLADHIKFTQSALDCMSVEVGRLRAFLQGGQEATDIALLLRDLETSCSDIRQFCKKIRRRMPGTDAPGIPAALAFGPQVSDTLLDCRKHLTWVVAVLQEVAAAAAQLIAPLAENEGLLVAALEELAFKASEQIYGTPSSSPYECLRQSCNILISTMNKLATAMQEGEYDAERPPSKPPPVELRAAALRAEITDAEGLGLKLEDRETVIKELKKSLKIKGEELSEANVRLSLLEKKLDSAAKDADERIEKVQTRLEETQALLRKKEKEFEETMDALQADIDQLEAEKAELKQRLNSQSKRTIEGLRGPPPSGIATLVSGIAGGAIPGQAPGSVPGPGLVKDSPLLLQQISAMRLHISQLQHENSILKGAQMKASLASLPPLHVAKLSHEGPGSELPAGALYRKTSQLLETLNQLSTHTHVVDITRTSPAAKSPSAQLMEQVAQLKSLSDTVEKLKDEVLKETVSQRPGATVPTDFATFPSSAFLRAKEEQQDDTVYMGKVTFSCAAGFGQRHRLVLTQEQLHQLHSRLIS

SEQ ID NO: 20565 - protein, 909 aa, Homo sapiens
VGSELGAEPLTVQTPSGSRMSAEASARPLRVGSRVEVIGKGHRGTVAYVGATLFATGKWVGVILDEAKGKNDGTVQGRKYFTCDEGHGIFVRQSQIQVFEDGADTTSPETPDSSASKVLKREGTDTTAKTSKLPTRPASTGVAGASSSLGPSGSASAGELSSSEPSTPAQTPLAAPIIPTPVLTSPGAVPPLPSPSKEEEGLRAQVRDLEEKLETLRLKRAEDKAKLKELEKHKIQLEQVQEWKSKMQEQQADLQRRLKEARKEAKEALEAKERYMEEMADTADAIEMATLDKEMAEERAESLQQEVEALKERVDELTTDLEILKAEIEEKGSDGAASSYQLKQLEEQNARLKDALVRMRDLSSSEKQEHVKLQKLMEKKNQELEVVRQQRERLQEELSQAESTIDELKEQVDAALGAEEMVEMLTDRNLNLEEKVRELRETVGDLEAMNEMNDELQENARETELELREQLDMAGARVREAQKRVEAAQETVADYQQTIKKYRQLTAHLQDVNRELTNQQEASVERQQQPPPETFDFKIKFAETKAHAKAIEMELRQMEVAQANRHMSLLTAFMPDSFLRPGGDHDCVLVLLLMPRLICKAELIRKQAQEKFELSENCSERPGLRGAAGEQLSFAAGLVYSLSLLQATLHRYEHALSQCSVDVYKKVGSLYPEMSAHERSLDFLIELLHKDQLDETVNVEPLTKAIKYYQHLYSIHLAEQPEDCTMQLADHIKFTQSALDCMSVEVGRLRAFLQGGQEATDIALLLRDLETSCSDIRQFCKKIRRRMPGTDAPGIPAALAFGPQVSDTLLDCRKHLTWVVAVLQEVAAAAAQLIAPLAENEGLLVAALEELAFKASEQVGLDGWVEGVGRVSDQCGAFTSALGSCRSMGPPPAAPMSVCASHATSSSVP

SEQ ID NO: 20566 - protein, 50 aa, Homo sapiens [sequence omitted]

SEQ ID NO: 20567 - protein, 248 aa, Homo sapiens
VSLTGRWSPGREAGAGEVRQDPGSTAASPSSCDADLSARMARGERRRRAVPAEGVRTAERAARGGPGRRDGRGGGPRSTAGGVALAVVVLSLALGMSGRWVLAWYRARRAVTLHSAPPVLPADSSSPAVAPDLFWGTYRPHVYFGMKTRSPKPLLTGLMWAQQGTTPGTPKLRHTCEQGDGVGPYGWEFHDGLSFGRQHIQDGALRLTTEFVKRPGGQHGGDWSWRVTVEPQDSATMSSGPPTQDCPC

SEQ ID NO: 20568 - protein, 165 aa, Homo sapiens
LPSSAWARKPRAAVRRPAKQPAAGSLSRRSAAIHGLTQCDTSACTSSSGAEVTMAAALARLGLRPVKQVRVQFCPFEKNVESTRTFLQTVSSEKVRSTNLNCSVIADVRHDGSEPCVDVLFGDGHRLIMRGAHLTALEMLTAFASHIRARDAAGSGDKPGADTGR

SEQ ID NO: 20569 - protein, 160 aa, Homo sapiens
LLLKPRAAVRRPAKQPAAGSLSRRSAAIHGLTQCDTSACTSSSGAEVTMAAALARLGLRPVKQVRVQFCPFEKNVESTRTFLQTVSSEKVRSTNLNCSVIADVRHDGSEPCVDVLFGDGHRLIMRGAHLTALEMLTAFASHIRARDAAGSGDKPGADTGR

SEQ ID NO: 20570 - protein, 42 aa, Homo sapiens
LWSQYWTLLWAACAQSLDLNLGPWRDPRATAQQLSQALGQGE

SEQ ID NO: 20571 - protein, 64 aa, Homo sapiens
LIPAKGRGGTEWAAMFVRGRSLPLRSTRESMKVPATPGLEKTALAMGRSPSCGGRWSVQGSGNR

SEQ ID NO: 20572 - protein, 183 aa, Homo sapiens
LGEEAPAEEAGEAEAAQRRRPPKGGGQQGWRRAALSPFSGTRRIGHPYQNRTPPKRKKPRTSFSRSQVLELERRFLRQKYLASAERAALAKALRMTDAQVKTWFQNRRTKWRRQTAEEREAERHRAGRLLLHLQQDALPRPLRPPLPPDPLCLHNSSLFALQNLQPWAEDNKVASVSGLASVV

SEQ ID NO: 20573 - protein, 201 aa, Homo sapiens
VGQGGVGLPESWSRRALLKDFRHPFLGREVPISNGSGFVVAADGLIVTNAHVVADRRRVRVRLLSGDTYEAVVTAVDPVADIATLRIQTKEPLPTLPLGRSADVRQGEFVVAMGSPFALQNTITSGIVSSAQRPARDLGLPQTNVEYIQTDAAIDFGNSGGPLVNLVSETSFLPRIPAPGWGGDWSEHHEGHSWNLLCHPF

SEQ ID NO: 20574 - protein, 317 aa, Homo sapiens
LSVGVTEPRACLTSGTPGPRAQLTAVTPDTRTREASENSGTRSRAWLAVALGAGGAVLLLLWGGGRGPPAVLAAVPSPPPASPRSQYNFIADVVEKTAPAVVYIEILDRHPFLGREVPISNGSGFVVAADGLIVTNAHVVADRRRVRVRLLSGDTYEAVVTAVDPVADIATLRIQTKEPLPTLPLGRSADVRQGEFVVAMGSPFALQNTITSGIVSSAQRPARDLGLPQTNVEYIQTDAAIDFGNSGGPLVNLVSETSFLPRIPAPGQCGKGRFPLIQGCLVKFLSSSLLAISQYPTRSPQHLLVLLFGCPHPLLFV

SEQ ID NO: 20575 - protein, 962 aa, Homo sapiens
LCAVRTPSSRPGSRAPAQSSRTAPPASPLASPPRFPNSAPSGRGRMIASHLLAYFFTELNHDQVQKVDQYLYHMRLSDETLLEISKRFRKEMEKGLGATTHPTAAVKMLPTFVRSTPDGTEHGEFLALDLGGTNFRVLWVKVTDNGLQKVEMENQIYAIPEDIMRGSGTQLFDHIAECLANFMDKLQIKDKKLPLGFTFSFPCHQTKLDESFLVSWTKGFKSSGVEGRDVVALIRKAIQRRGDFDIDIVAVVNDTVGTMMTCGYDDHNCEIGLIVGTGSNACYMEEMRHIDMVEGDEGRMCINMEWGAFGDDGSLNDIRTEFDQEIDMGSLNPGKQLFEKMISGMYMGELVRLILVKMAKEELLFGGKLSPELLNTGRFETKDISDIEGEKDGIRKAREVLMRLGLDPTQEDCVATHRICQIVSTRSASLCAATLAAVLQRIKENKGEERLRSTIGVDGSVYKKHPHFAKRLHKTVRRLVPGCDVRFLRSEDGSGKGAAMVTAVAYRLADQHRARQKTLEHLQLSHDQLLEVKRRMKVEMERGLSKETHASAPVKMLPTYVCATPDGTEKGDFLALDLGGTNFRVLLVRVRNGKWGGVEMHNKIYAIPQEVMHGTGDELFDHIVQCIADFLEYMGMKGVSLPLGFTFSFPCQQNSLDESILLKWTKGFKASGCEGEDVVTLLKEAIHRREEFDLDVVAVVNDTVGTMMTCGFEDPHCEVGLIVGTGSNACYMEEMRNVELVEGEEGRMCVNMEWGAFGDNGCLDDFRTEFDVAVDELSLNPGKQRFEKMISGMYLGEIVRNILIDFTKRGLLFRGRISERLKTRGIFETKFLSQIESDCLALLQVRAILQHLGLESTCDDSIIVKEVCTVVARRAAQLCGAGMAAVVDRIRENRGLDALKVTVGVDGTLYKLHPHFAKVMHETVKDLAPKCDVSFLQSEDGSGKGAALITAVACRIREAGQR

SEQ ID NO: 20576 - protein, 58 aa, Homo sapiens
LTVWVVLWASVLLASSAAPVLFSHKTPGPSESSLLPEIWVLGWVPGPNSDTLSVCRLF

SEQ ID NO: 20577 - protein, 236 aa, Homo sapiens
LLISGLFIQRKHYESIIGHRESEKPTGAKQVLEPLLADANIIRDELFLPETSLLLTPHLSPEEKKESGHVDSAKHLQEVPSGCPMRLPLSHSPEHVEMALLSNILAAYSFVSENPERAALYFVSGVCIGLVLTLAALVIRISCHTDCRRRPGKKFLQDRESSSDSSDSEDGSEDTVSDLSVRRHRRFERTLNKNVFTSAEELERAQRLEERERIIREIWMNGQPEVPGTRSLNRYY

SEQ ID NO: 20578 - protein, 104 aa, Homo sapiens
VAYHLLYKRMWLKQSAPGTTNKKVTTLVNTSNKGPSGKKKGRSKKAHVLAASVEQATQNFLEKGEQIAKESQDLKEELVAAVEDVRKQGWPTRVCETCLGSSCG

SEQ ID NO: 20579 - protein, 166 aa, Homo sapiens [sequence omitted]

SEQ ID NO: 20580 - protein, 366 aa, Homo sapiens
LPPPASAPGRSPGAWECHWRMTATLAAAADIATMVSGSSGLAAARLLSRSFLLPQNGIRHCSYTASRQHLYVDKNTKIICQGFTGKQGTFHSQQALEYGTKLVGGTTPGKGGQTHLGLPVFNTVKEAKEQTGATASVIYVPPPFAAAAINEAIEAEIPLVVCITEGIPQQDMVRVKHKLLRQEKTRLIGPNCPGVINPGECKIGIMPGHIHKKGRIGIVSRSGTLTYEAVHQTTQVGLGQSLCVGIGGDPFNGTDFIDCLEIFLNDSATEGIILIGEIGGNAEENAAEFLKQHNSGPNSKPVVSFIAGLTAPPGRRMGHAGAIIAGGKGGAKEKISALQSAGVVVSMSPAQLGTTIYKEFEKRKML

SEQ ID NO: 20581 - protein, 336 aa, Homo sapiens
LRRMSPWSWFLLQTLCLLPTGAASRRGAPGTANCELKPQQSELNSFLWTIKRDPPSYFFGTIHVPYTRVWDFIPDNSKEAFLQSSIVYFELDLTDPYTISALTSCQMLPQGENLQDVLPRDIYCRLKRHLEYVKLMMPLWMTPDQRGKGLYADYLFNAIAGNWERKRPVWVMLMVNSLTEVDIKSRGVPVLDLFLAQEAERLRKQTGAVEKVEEQCHPLNGLNFSQVIFALNQTLLQQESLRAGSLQIPYTTEDLIKHYNCGDLSSVILSHDSSQVPNFINATLPPQERITAQEIDSYLRRELIYKRNERIGKRVKALLEEFPDKGFFFAFGAASQ

SEQ ID NO: 20582 - protein, 631 aa, Homo sapiens
LSNFVAAASAAGPQAGGRGAGPGRAGRGRLGAPRAAAPARGPTMPQLGGGGGGGGGGSGGGGGSSAGAAGGGDDLGANDELIPFQDEGGEEQEPSSDSASAQRDLDEVKSSLVNESENQSSSSDSEAERRPQPVRDTFQKPRDYFAEVRRPQDSAFFKGPPYPGYPFLMIPDLSSPYLSNGPLSPGGARTYLQMKWPLLDVPSSATVKDTRSPSPAHLSNKVPVVQHPHHMHPLTPLITYSNDHFSPGSPPTHLSPEIDPKTGIPRPPHPSELSPYYPLSPGAVGQIPHPLGWLVPQQGQPMYSLPPGGFRHPYPALAMNASMSSLVSSRFSPHMVAPAHPGLPTSGIPHPAIVSPIVKQEPAPPSLSPAVSVKSPVTVKKEEEKKPHVKKPLNAFMLYMKEMRAKVVAECTLKESAAINQILGRKWHNLSREEQAKYYELARKERQLHSQLYPTWSARDNYGKKKKRKREKQLSQTQSQQQVQEAEGALASKSKKPCVQYLPPEKPCDSPASSHGSMLDSPATPSAALASPAAPAATHSEQAQPLSLTTKPETRAQLALHSAAFLSAKAAASSSGQMGSQPPLLSRPLPLGSMPTALLASPPSFPATLHAHQALPVLQAQPLSLVTKSAH

SEQ ID NO: 20583 - protein, 397 aa, Homo sapiens
LVLLLAVLLLAVLCKVYLGLFSGSSPNPFSEDVKRPPAPLVTDKEARKKVLKQGVTPNHSAFSMHALLVNHYMKGGFYPRGGSSEIAFHTIPVIQRAGGAVLTKATVQSVLLDSAGKACGVSVKKGHELVNIYCPIVVSNAGLFNTYEHLLPGNARCLPGVKQQLGTVRPGLGMTSVFICLRGTKEDLHLPSTNYYVYYDTDMDQAMERYVSMPREEAAEHIPLLFFAFPSAKDPTWEDRFPGRSTMIMLIPTAYEWFEEWQAELKGKRGSDYETFKNSFVEASMSVVLKLFPQLEGKVESVTAGSPLTNQFYLAAPRGACYGADHDLGRLHPCVMASLRAQSPIPNLYLTGQDIFTCGLVGALQGALLCSSAILKRNLYSDLKNLDSRIRAQKKKN

SEQ ID NO: 20584 - protein, 10 aa, Homo sapiens
LSHLPDPTPA

SEQ ID NO: 20585 - protein, 37 aa, Homo sapiens
LVTILCYLVHFLHSNRRALLRLLLPYPPVTLPRLANS

SEQ ID NO: 20586 - protein, 399 aa, Homo sapiens
LVTILCYLVHFLHSNRRALLRLLLPYPPVTLPRLANGERLSAGYSPSYDKDKSVLAFRGIPISELKNHGILQALTTEAYEWEPRVVSTEVVRAQEEWEAVDTIQPETGSQASSEQPGQLISFSEALQHFQTVDLSPFKKRIQPTIRRTGLAALRHYLFGPPKLHQRLREERDLVLTIAQCGLDSQDPVHGRVLQTIYKKLTGSKFDCALHGNHWEDLGFQGANPATDLRGAGFLALLHLLYLVMDSKTLPMAQEIFRLSRHHIQQFPFCLMSVNITHIAIQALREECLSRECNRQQKVIPVVNSFYAATFLHLAHVWRTQRKTISDSGFVLKELEVLAKKSPRRLLKTLELYLARVSKGQASLLGAQKCYGPEAPPFKDLTFTGESDLQSHSSEGVWLI

SEQ ID NO: 20587 - protein, 58 aa, Homo sapiens
MVKPVFFFNFFFFFCAELRLRRPQRTSLSTHRNLLHPRMAQRDCFLTLSLSDCQGRQR

SEQ ID NO: 20588 - protein, 20 aa, Homo sapiens
LISDLTKMLSGPKDKAHMNK

SEQ ID NO: 20589 - protein, 234 aa, Homo sapiens
VLAVHLNTLLGERPVQHREVQGNESDLFMSYFPRGLKYQEGGVESAFHKTSTGAPAAIKKLYQVKGKKNIRATERALNWDSFNTGDCFILDLGQNIFAWCGGKSNILERNKARDLALAIRDSERQGKAQVEIVTDGEEPAEMIQVLGPKPALKEGNPEEDLTADKANAQAAALYKVSDATGQMNLTKVADSSPFALELLISDDCFVLDNGLCGKIYIWKVFQKRLDEFKRAKSE

SEQ ID NO: 20590 - protein, 22 aa, Homo sapiens
LAPYFTSAVINFMLLTCVSLKL

SEQ ID NO: 20591 - protein, 132 aa, Homo sapiens
MAVSAGSARTSPSSDKVQKDKAELISGPRQDSRIGKLLGFEWTDLSSWRRLVTLLNRPTDPASLAVFRFLFGFLMVLDIPQERGLSSLDRKYLDGLDVCRFPLLDALRPLPLDWMYLVYTIMFLGEGNCGKY

SEQ ID NO: 20592 - protein, 94 aa, Homo sapiens
LRASWWLATFSLVLGGVFFVHESSQLQHGAALCEWVCVIDILIFYGTFSYEFGAVSSDTLVAALQPTPGRACKSSGSSSTSTHLNCAPESIAMI

SEQ ID NO: 20593 - protein, 111 aa, Homo sapiens
LGFPREPAPRPGRRWSGGCLRAADSPPLHWAGTQPLLGVASSVVQPFSQPWSLRRRVTPFQMLRSACVSQHAGGIWVDRGGPQCQRVFTFCRGLSPNFGRSETQRERWIRC

SEQ ID NO: 20594 - protein, 372 aa, Homo sapiens
LLQWLLLLLPTLCGPGTAAWTTSSLACAQGPEFWCQSLEQALQCRALGHCLQEVWGHVGADDLCQECEDIVHILNKMAKEAIFQDTMRKFLEQECNVLPLKLLMPQCNQVLDDYFPLVIDYFQNQTDSNGICMHLGLCKSRQPEPEQEPGMSDPLPKPLRDPLPDPLLDKLVLPVLPGALQARPGPHTQDLSEQQFPIPLPYCWLCRALIKRIQAMIPKGALAVAVAQVCRVVPLVAGGICQCLAERYSVILLDTLLGRMLPQLVCRLVLRCSMDDSAGPREWLPRDSECHLCMSVTTQAGNSSEQAIPQAMLQACVGSWLDREKCKQFVEQHTPQLLTLVPRGWDAHTTCQALGVCGTMSSPLQCIHSPDL

SEQ ID NO: 20595 - protein, 393 aa, Homo sapiens
MHQAGYPGCRGAMAESHLLQWLLLLLPTLCGPGTAAWTTSSLACAQGPEFWCQSLEQALQCRALGHCLQEVWGHVGADDLCQECEDIVHILNKMAKEAIFQDTMRKFLEQECNVLPLKLLMPQCNQVLDDYFPLVIDYFQNQTDSNGICMHLGLCKSRQPEPEQEPGMSDPLPKPLRDPLPDPLLDKLVLPVLPGALQARPGPHTQDLSEQQFPIPLPYCWLCRALIKRIQAMIPKGALAVAVAQVCRVVPLVAGGICQCLAERYSVILLDTLLGRMLPQLVCRLVLRCSMDDSAGPRSPTGEWLPRDSECHLCMSVTTQAGNSSEQAIPQAMLQACVGSWLDREKCKQFVEQHTPQLLTLVPRGWDAHTTCQALGVCGTMSSPLQCIHSPDL

SEQ ID NO: 20596 - protein, 25 aa, Homo sapiens
MATWALLLLAAMLLGNPAPASASAW

SEQ ID NO: 20597 - protein, 104 aa, Homo sapiens
MATWALLLLAAMLLGNPGLVFSRLSPEYYDLARAHLRDEEKSCPCLAQEGPQGDLLTKTQELGRDYRTCLTIVQKLKKMVDKPTQVRPRGYRASCLLLNGGASL

SEQ ID NO: 20598 - protein, 670 aa, Homo sapiens
MHHQQRMAALGTDKELSDLLDFSAMFSPPVSSGKNGPTSLASGHFTGSNVEDRSSSGSWGNGGHPSPSRNYGDGTPYDHMTSRDLGSHDNLSPPFVNSRIQSKTERGSYSSYGRESNLQGCHQQSLLGGDMDMGNPGTLSPTKPGSQYYQYSSNNPRRRPLHSSAMEVQTKKVRKVPPGLPSSVYAPSASTADYNRDSPGYPSSKPATSTFPSSFFMQDGHHSSDPWSSSSGMNQPGYAGMLGNSSHIPQSSSYCSLHPHERLSYPSHSSADINSSLPPMSTFHRSGTNHYSTSSCTPPANGTDSIMANRGSGAAGSSQTGDALGKALASIYSPDHTNNSFSSNPSTPVGSPPSLSGTAVWSRNGGQASSSPNYEGPLHSLQSRIEDRLERLDDAIHVLRNHAVGPSTAMPGGHGDMHGIIGPSHNGAMGGLGSGYGTGLLSANRHSLMVGTHREDGVALRGSHSLLPNQVPVPQLPVQSATSPDLNPPQDPYRGMPPGLQGQSVSSGSSEIKSDDEGDENLQDTKSSEDKKLDDDKKDIKSITRSRSSNNDDEDLTPEQKAEREKERRMANNARERLRVRDINEAFKELGRMVQLHLKSDKPQTKLLILHQAVAVILSLEQQVRERNLNPKAACLKRREEEKVSSEPPPLSLAGPHPGMGDASNHMGQM

SEQ ID NO: 20599 - protein, 193 aa, Homo sapiens
MAVVSAVRWLGLRSRLGQPLTGRRAGLCEQARSCRFYSGSATLSKVEGTDVTGIEEVVIPKKKTWDKVAVLQALASTVNRDTTAVPYVFQDDPYLMPASSLESRSFLLAKKSGENVAKFIINSYPKYFQKDIAEPHIPCLMPEYFEPQIKDISEAALKERIELRKVKASVDMFDQLLQAEAGFHHVARMVSIS

SEQ ID NO: 20600 - protein, 18 aa, Homo sapiens
MFWIAVFLPHCLFFLSTW

SEQ ID NO: 20601 - protein, 761 aa, Homo sapiens
LTEMLRACQLSGVTAAAQSCLCGKFVLRPLRPCRRYSTSGSSGLTTGKIAGAGLLFVGGGIGGTILYAKWDSHFRESVEKTIPYSDKLFEMVLGPAAYNVPLPKKSIQSGPLKISSVSEVMKESKQPASQLQKQKGDTPASATAPTEAAQIISAAGDTLSVPAPAVQPEESLKTDHPEIGEGKPTPALSEEASSSSIRERPPEEVAARLAQQEKQEQVKIESLAKSLEDALRQTASVTLQAIAAQNAAVQAVNAHSNILKAAMDNSEIAGEKKSAQWRTVEGALKERRKAVDEAADALLKAKEELEKMKSVIENAKKKEVAGAKPHITAAEGKLHNMIVDLDNVVKKVQAAQSEAKVVSQYHELVVQARDDFKRELDSITPEVLPGWKGMSVSDLADKLSTDDLNSLIAHAHRRIDQLNRELAEQKATEKQHITLALEKQKLEEKRAFDSAVAKALEHHRSEIQAEQDRKIEEVRDAMENEMRTQLRRQAAAHTDHLRDVLRVQEQELKSEFEQNLSEKLSEQELQFRRLSQEQVDNFTLDINTAYARLRGIEQAVQSHAVAEEEARKAHQLWLSVEALKYSMKTSSAETPTIPLGSAVEAIKANCSDNEFTQALTAAIPPESLTRGVYSEETLRARFYAVQKLARRVAMIDETRNSLYQYFLSYLQSLLLFPPQQLKPPPELCPEDINTFKLLSYASYCIEHGDLELAAKFVNQLKGESRRVAQDWLKEARMTLETKQIVEILTAYASAVGIGTTQVQPE

SEQ ID NO: 20602 - protein, 26 aa, Homo sapiens
LPTPLGVHTLLSRAAILCVSCTTPLL

SEQ ID NO: 20603 - protein, 245 aa, Homo sapiens
VPPLPTLGVGTTSFSAGPAQAAARDLPGRGELKAGRGKTGSVRHGAVWKDPGEAAQRTDIQREEEKVKRSVKDAAKKGQKDVCIVLAKEMIRSRKAVSKLYASKAHMNSVLMGMKNQLAVLRVAGSLQKSTEVMKAMQSLVKIPEIQATMRELSKEMMKAGIIEEMLEDTFESMDDQEEMEEEAEMEIDRILFEITAGALGKAPSKVTDALPEPEPPGAMAASEDEEEEEEALEAMQSRLATLRS

SEQ ID NO: 20604 - protein, 261 aa, Homo sapiens
LPLLEFTGDLMEGELYSALKEEEASESVSSTNFSGEMHFYELVEDTKDGIWLVQVNEWSLKIRKEMRVVDRQIRDIQREEEKVKRSVKDAAKKGQKDVCIVLAKEMIRSRKAVSKLYASKAHMNSVLMGMKNQLAVLRVAGSLQKSTEVMKAMQSLVKIPEIQATMRELSKEMMKAGIIEEMLEDTFESMDDQEEMEEEAEMEIDRILFEITAGALGKAPSKVTDALPEPEPPGAMAASEDEEEEEEALEAMQSRLATLRS

SEQ ID NO: 20605 - protein, 133 aa, Homo sapiens
LLLLSFIGMAHNLAVSLYSILLNNPDCTHSLSAVLRVAGSLQKSTEVMKAMQSLVKIPEIQATMRELSKEMMKAGIIEEMLEDTFESMDDQEEMEEEAEMEIDRILFEITAGMTVRSILSPLFLWPFFLHSLN

SEQ ID NO: 20606 - protein, 555 aa, Homo sapiens
VWAPVAFLRPFSPGRTPHPEGVLGTARAASFPRPGGHPPPPSRRRLVPPGRTRSSVGSRENKNNRPRRRRHPNVASGAWGRGAECSERTGAAATRRGARAPWGRRAPAARGSPGAAASAPAASAASASRAARLGNEEQDAASVGPGPNGCGHLGAEEPSAAASGMDQCVTVERELEKVLHKFSGYGQLCERGLEELIDYTGGLKHEILQSHGQDAELSGTLSLVLTQCCKRIKDTVQKLASDHKDIHSSVSRVGKAIDKNFDSDISSVGIDGCWQADSQRLLNEVMVEHFFRQGMLDVAEELCQESGLSVDPSQKEPFVELNRILEALKVRVLRPALEWAVSNREMLIAQNSSLEFKLHRLYFISLLMGGTTNQREALQYAKNFQPFALNHQKDIQVLMGSLVYLRQGIENSPYVHLLDANQWADICDIFTRDACALLGLSVESPLSVSFSAGCVALPALINIKAVIEQRQCTGVWNQKDELPIEVDLGKKCWYHSIFACPILRQQTTDNNPPMKLVCGHIISRDALNKMFNGSKLKCPYCPMEQSPGDAKQIFF

SEQ ID NO: 20607 - protein, 35 aa, Homo sapiens
LSPCLSSDLHSTVPGKVEPPASPWAKRQRNGAQSF

SEQ ID NO: 20608 - protein, 52 aa, Homo sapiens
MTDTENHDSAPSSTSTCCPPITAGMQLKDSLGPGSNRPLWTLRPLHLRVVCL

SEQ ID NO: 20609 - protein, 29 aa, Homo sapiens
MVKLIFPCSAPLNTTKYLGNYSADNDKGL

SEQ ID NO: 20610 - protein, 31 aa, Homo sapiens
MYIPQSRYRTFPSLQEILCVPLWSIPPTRGP

SEQ ID NO: 20611 - protein, 112 aa, Homo sapiens
MRLPAQLLGLLMLWIPGSSADIVMTQTPLSLSVTPGQPASISCKSSQSLLHSDGKTYLYWYLQKPGQSPQLLIYEVSSRFSGVPDRFSGSGSGTDFTLKISRVEAEDVGVYY

SEQ ID NO: 20612 - protein, 36 aa, Homo sapiens
LPSMAASSTKSWWETGEVQAQSAAKTPSCKMDSVTT

SEQ ID NO: 20613 - protein, 77 aa, Homo sapiens
LPSMAASSTKSWWETGEVQAQSAAKTPSCKEGVIGCWSCPVRGGGRNPPTKLWRGGPHKSPRKPRLRASRGKKLKRL

SEQ ID NO: 20614 - protein, 126 aa, Homo sapiens
LGSGQLGGAATGAACREQSQDGDRAGHPFWKCLHFQTAGQTPKLARQASIELPSMAASSTKSWWETGEVQAQSAAKTPSCKDIVAGDMSKKSLWEQKGGSKTSSTIKHSGPWRKHQTNTDGGTFKD

SEQ ID NO: 20615 - protein, 67 aa, Homo sapiens
LPSMAASSTKSWWETGEVQAQSAAKTPSCKDIVAGDMSKKSLWEQKGGSKTSSTIKSQLNHFSRKTY

SEQ ID NO: 20616 - protein, 569 aa, Homo sapiens
VVSAQRQVTVQEGPLYRMEGSHITIWCNVSGSQGPPEQNFQWSIYLPSSPEREVQIVSTMDPSFPYAIYTQRVRGGKIFIERVQGNPTLLHITDLQARDAGEYECHTPSTDKQYFGSYSAKMNLVVIPDSLQTTAMPQTLHRVEQDPLELTCEVASETVQHSHLSVAWLWQKVGEKPVEVISLSRDFMLHSGSEYAQRQSLGEVRLDKLGRTTFCLTIFHLQPSDQGEFYCEAAEWIQDPDGSWYAMTRKRSEGAVVNVQPTEKEFTVRLETEKRLHMVGEPVEFRCIPEAQNVPDRYFAVSWAFNSSLIATMGPNAVPVLNSEFAHREARGQLNVAKESDSVFVLKIYHLRQEDSGKYNCRVTEREKTVTGEFIDKESKHPKNIPIIVLPLESSISVEVASNASVILEGEDLRFSCSVRMAGRLQGRFSVIWQLVDRQNRRSDIMWLDRDGTVQPGSSYWERSSFGSVQMEQVQPNSFSLGIFNSRKEDEGQYECHVTEWVRVVDGEWQIVGERRASTPISIIALEMGFAVTAISRTPGVTYSNSFDLQCIIKPHYPAQVPVSVTWHF

SEQ ID NO: 20617 - protein, 128 aa, Homo sapiens
LGHGLESGTKRSEILSPRKVCDGACVENAFMLIVYTHFICIPVSFLPTETYEDFDTRILEVRNVFTMTAKEGRKKSIRVLVAVGNGKGAAGEWGVMASQWRWCAGKGVARAMLWSPWAHAAGRTFSID

SEQ ID NO: 20618 - protein, 217 aa, Homo sapiens
MKHTLALLAPLLGLGLGLALSQLAAGATDCKFLGPAEHLTFTPAARARWLAPRVRAPGLLDSLYGTVRRFLSVVQLNPFPSELVKALLNELASVKVNEVVRYEAGYVVCAVIAGLYLLLVPTAGLCFCCCRCHRRCGGRVKTEHKALACERAALMVFLLLTTLLLLIGVVCAFVTNQRTHEQMGPSIEAMPETLLSLWGLVSDVPQSCRSPCTTCKP

SEQ ID NO: 20619 - protein, 201 aa, Homo sapiens
MKHTLALLAPLLGLGLGLALSQLAAGATDCKFLGPAEHLTFTPAARARWLAPRVRAPGLLDSLYGTVRRFLSVVQLNPFPSELVKALLNELASVKELQAVAQQFSLPQEQVSEELDGVGVSIGSAIHTQLRSSVYPLLAAVGSLGQVLQVSVHHLQTLNATVVELQAGQQDLEPAIREHRDRLLELLQEARCPLWTMSCTS

SEQ ID NO: 20620 - protein, 70 aa, Homo sapiens
LGFVLAKAVMLLWLSMGPGECQMGSALMACCSVYLMGSPMARGPTVSTPPTVAQNTAGVIIAQVFIEREC

SEQ ID NO: 20621 - protein, 330 aa, Homo sapiens
LVPVLRRPLPLTSRPASPNSAQEDRLPPPALMVVSGRRLLTALLQAQKWPFQPSRDMRLVQFWAPHLVGPHLGLETGNGRGIINLNAFDPTLPKTMTQFLEQGEATLSVARRALAAQLPVLPRSEVTFLAPVTWPDKVVCVGMNYVDHCKEQNVPVPKEPIIFSKFASSIVGPYDEVVLPPQSQEVDWEVELAVVIGKKGKHIKATDAMAHVAGFTVAHDVSARDWLTRCNGKQWLLGKTFDTFCPLGPALVTKDSVADPHNLKICCRVNGEVVQSSNTNQMVFKTEDLIAWVSQFVTFYPGDVILTGTPPPPPRCRCIQETSCLSQEGG

SEQ ID NO: 20622 - protein, 815 aa, Homo sapiens
LWRLCGAAALAGVGSWCEALMATMLEGRCQTQPRSSPSGREASLWSSGFGMKLEAVTPFLGKYRPFVGRCCQTCTPKSWESLFHRSITDLGFCNVILVKEENTRFRGWLVRRLCYFLWSLEQHIPPCQDVPQKIMESTGVQNLLSGRVPGGTGEGQVPDLVKKEVQRILGHIQAPPRPFLVRLFSWALLRFLNCLFLNVQLHKGQMKMVQKAAQAGLPLVLLSTHKTLLDGILLPFMLLSQGLGVLRVAWDSRACSPALRALLRKLGGLFLPPEASLSLDSSEGLLARAVVQAVIEQLLVSGQPLLIFLEEPPGALGPRLSALGQAWVGFVVQAVQVGIVPDALLVPVAVTYDLVPDAPCDIDHASAPLGLWTGALAVLRSLWSRWGCSHRICSRVHLAQPFSLQEYIVSARSCWGGRQTLEQLLQPIVLGQCTAVPDTEKEQEWTPITGPLLALKEEDQLLVRRLSCHVLSASVGSSAVMSTAIMATLLLFKHQKLLGEFSWLTEEILLRGFDVGFSGQLRSLLQHSLSLLRAHVALLRIRQGDLLVVPQPGPGLTHLAQLSAELLPVFLSEAVGACAVRGLLAGRVPPQGPWELQGILLLSQNELYRQILLLMHLLPQDLLLLKPCQSSYCYCQEVLDRLIQCGLLVAEETPGSRPACDTGRQRLSRKLLWKPSGDFTDSDSDDFGEADGRYFRLSQQSHCPDFFLFLCRLLSPLLKAFAQAAAFLRQGQLPDTELGYTEQLFQFLQATAQEEGIFECADPKLAISAVWTFRDLGVLQQTPSPAGPRLHLSPTFASLDNQEKLEQFIRQFICS

SEQ ID NO: 20623 - protein, 744 aa, Homo sapiens
LWRLCGAAALAGVGSWCEALMATMLEGRCQTQPRSSPSGREASLWSSGFGMKLEAVTPFLGKYRPFVGRCCQTCTPKSWESLFHRSITDLGFCNVILVKEENTRFRGWLVRRLCYFLWSLEQHIPPCQDVPQKIMESTGVQNLLSGRVPGGTGEGQVPDLVKKEVQRILGHIQAPPRPFLVRLFSWALLRFLNCLFLNVQLHKGQMKMVQKAAQAGLPLVLLSTHKTLLDGILLPFMLLSQGLGVLRVAWDSRACSPALRALLRKLGGLFLPPEASLSLDSSEGLLARAVVQAASAPLGLWTGALAVLRSLWSRWGCSHRICSRVHLAQPFSLQEYIVSARSCWGGRQTLEQLLQPIVLGQCTAVPDTEKEQEWTPITGPLLALKEEDQLLVRRLSCHVLSASVGSSAVMSTAIMATLLLFKHQKLLGEFSWLTEEILLRGFDVGFSGQLRSLLQHSLSLLRAHVALLRIRQGDLLVVPQPGPGLTHLAQLSAELLPVFLSEAVGACAVRGLLAGRVPPQGPWELQGILLLSQNELYRQILLLMHLLPQDLLLLKPCQSSYCYCQEVLDRLIQCGLLVAEETPGSRPACDTGRQRLSRKLLWKPSGDFTDSDSDDFGEADGRYFRLSQQSHCPDFFLFLCRLLSPLLKAFAQAAAFLRQGQLPDTELGYTEQLFQFLQATAQEEGIFECADPKLAISAVWTFRDLGVLQQTPSPAGPRLHLSPTFASLDNQEKLEQFIRQFICS

SEQ ID NO: 20624 - protein, 750 aa, Homo sapiens
MATMLEGRCQTQPRSSPSGREASLWSSGFGMKLEAVTPFLGKYRPFVGRCCQTCTPKSWESLFHRSITDLGFCNVILVKEENTRFRGWLVRRLCYFLWSLEQHIPPCQDVPQKIMESTGVQNLLSGRVPGGTGEGQVPDLVKKEVQRILGHIQAPPRPFLVRLFSWALLRFLNCLFLNVQLHKGQMKMVQKAAQAGLPLVLLSTHKTLLDGILLPFMLLSQGLGVLRVAWDSRACSPALRALLRKLGGLFLPPEASLSLDSSEGLLARAVVQAVIEQLLVSGQPLLIFLEEPPGALGPRLSALGQAWVGFVVQAVQVGIVPDALLVPVAVTYDLVPDAPCDIDHASAPLGLWTGALAVLRSLWSRWGCSHRICSRVHLAQPFSLQEYIVSARSCWGGRQTLEQLLQPIVLGQCTAVPDTEKEQEWTPITGPLLALKEEDQLLVRRLSCHVLSASVGSSAVMSTAIMATLLLFKHQKGVFLSQLLGEFSWLTEEILLRGFDVGFSGQLRSLLQHSLSLLRAHVALLRIRQGDLLVVPQPGPGLTHLAQLSAELLPVFLSEAVGACAVRGLLAGRVPPQGPWELQGILLLSQNELYRQILLLMHLLPQDLLLLKPCQSSYCYCQEVLDRLIQCGLLVAEETPGSRPACDTGRQRLSRKLLWKPSGDFTDSDSDDFGEADGRYFRVCFKKLPLEGGGREAVGSCTHPGLSPPAQPAVTLPRFLSFPLPPAQPAAQGLCTGCRLPPPGPAARYW

SEQ ID NO: 20625 - protein, 97 aa, Homo sapiens
LSRKLLWKPSGDFTDSDSDDFGEADGRYFRVCFKKLPLEGGGREAVGSCTHPGLSPPAQPAVTLPRFLSFPLPPAQPAAQGLCTGCRLPPPGPAARY

SEQ ID NO: 20626 - protein, 237 aa, Homo sapiens
LWRLCGAAALAGVGSWCEALMATMLEGRCQTQPRSSPSGREASLWSSGFGMKLEAVTPFLGKYRPFVGRCCQTCTPKSWESLFHRSITDLGFCNVILVKEENTRFRGWLVRRLCYFLWSLEQHIPPCQDVPQKIMESTGVQNLLSGRVPGGTGEGQVPDLVKKEVQRILGHIQAPPRPFLVRLFSWALLRFLNCLFLNVQLHKGQMKMVQKAAQAVRPALHWVGDGGSRRAEAGPSP

SEQ ID NO: 20627 - protein, 689 aa, Homo sapiens
LCRVCHPANAAAELGGALCVHHPHGGPGRAGETSTDLKLLGKGNIIISTPEKWDILSRRWKQRKNVQNINLFVVDEVHLIGGENGPVLEVICSRMRYISSQIERPIRIVALSSSLSNAKDVAHWLGCSATSTFNFHPNVRPVPLELHIQGFNISHTQTRLLSMAKPVYHAITKHSPKKPVIVFVPSRKQTRLTAIDILTTCAADIQRQRFLHCTEKDLIPYLEKLSDSTLKETLLNGVGYLHEGLSPMERRLVEQLFSSGAIQVVVASRSLCWGMNVAAHLVIIMDTQYYNGKIHAYVDYPIYDVLQMVGHANRPLQDDEGRCVIMCQGSKKDFFKKFLYEPLPVESHLDHCMHDHFNAEIVTKTIENKQDAVDYLTWTFLYRRMTQNPNYYNLQGISHRHLSDHLSELVEQTLSDLEQSKCISIEDEMDVAPLNLGMIAAYYYINYTTIELFSMSLNAKTKVRGLIEIISNAAEYENIPIRHHEDNLLRQLAQKVPHKLNNPKFNDPHVKTNLLLQAHLSRMQLSAELQSDTEEILSKAIRLIQACVDVLSSNGWLSPALAAMELAQMVTQAMWSKDSYLKQLPHFTSEHIKRCTDKGVESVFDIMEMEDEERNALLQLTDSQIADVARFCNRYPNIELSYEVVDKDSIRSGGPVVVLVQLEREEEVTGPVIAPLFPQFRAGRSGSRL

SEQ ID NO: 20628 - protein, 206 aa, Homo sapiens
MRFVGSTVPLSAAGCADGPGSPASRPLPLPSLPFSLFLSCLSAHPPQPHRRGVASLVALLSCPLCVPLSSLGLQKGRGGGWGASGEEGKSVGYELAGDARLRARRELRANPGPRSVPPRCLGVARAGVASPSAQRRRGGACAVQDPRGPRGSQGAAGPVSLCLQSLGPVRSAPRAPGEDNRCLLPHPGSSGGSPHARWRHCAYRQR

SEQ ID NO: 20629 - protein, 148 aa, Homo sapiens
VWWKGMIPCGMRFIGLATVLLKPLLKQPSEVLFVKDLTLLNHSMKPTDCTVTLQVAHMSNQDIEKTGAEDHLGITAREAASQKLMVPGSTAHRALSSKPQHFQVRVKVFEARQLMGNNIKPVVKVSIAGQQHQTRIKMGNNPFFNEVG

SEQ ID NO: 20630 - protein, 39 aa, Homo sapiens
LPWSASMLLGRELRPDHPGRAPVWSLWKRGSRFGVAKSV

SEQ ID NO: 20631 - protein, 138 aa, Homo sapiens
MKMMVVLLMLSSLSRLLGLMRPSSLRQYLDSVPLPPCQEQQPKASAELDHKACYLCHSLLMLAGVVVSCQDITPDQWGELQLLCMQLDRHISTQIRESPQAMHRTMLKDLATQTYIRWQELLTHCQPQAQYFSPWKDI

SEQ ID NO: 20632 - protein, 160 aa, Homo sapiens
MKMMVVLLMLSSLSRLLGLMRPSSLRQYLDSVPLPPCQEQQPKASAELDHKACYLCHSLLMLAGVVVSCQDITPDQWGELQLLCMQLDRHISTQIRESPQAMHRTMLKDLATQTYIRWQELLTHCQPQVVPPLAPRPGRGGKWSGRAGQSHQHIHPRCSC

SEQ ID NO: 20633 - protein, 88 aa, Homo sapiens
MALFFVLCWIQGYSQQKSLNNAAFASGSNEREEHLAKIFDHLSEEKNFKESCLFDRDLREQLTTIDKETLQGAAKPDLLWQTRHIIFL

SEQ ID NO: 20634 - protein, 475 aa, Homo sapiens
MWRLWGDLWLLGMLMVCFHSSTEQKMAEYTMVSQEPVKWQENATPVTEQSIATAISWVEKLTVELTVSEAGRLDALLEAGRDKTIESIYYFVVGDVPEESKELLLQRALEIPCPVYTVSFNARGEGTIAFLKDLSAKTHSRFHAFAERTECVEFPAFSTKDGDNVMTWNSRKLKGKLPPGAGVREDVFLVWQEMEEACSTLAQIQRLVAEPPKPDVATVDCESETTSVEIASNPEDTWDSKTWLQKYGLKAQKLSLYDVLADCSFRHADGVVDIKAKPENESVQTSAETNKKTVHAKYCSRFVHAPWKDGSLVHVNITKEKCKWYSERIHTALARIRRRIKWLQDGSQSLFGRLHNDCIYILIDTSHSMKSKLDLVKDKIIQFIQEQLKYKSKFNFVKFDGQAVAWREQLAEVNEDNLEQAQSWIRDIKIGSSTNTLSALKTAFADKETQAIYLLTDGRPDQQPFKEGVSVLSHR

SEQ ID NO: 20635 - protein, 15 aa, Homo sapiens
MWVPSSVIYEFFKKT

SEQ ID NO: 20636 - protein, 18 aa, Homo sapiens
LMAEVRHQRRNITITKLR

SEQ ID NO: 20637 - protein, 127 aa, Homo sapiens
MLIKRPCKVKTIHLLTSLDEGIEQVQQSRGLQEIEESLRSHGVLLEVQYSSSIHDREIRFNNGWMIKIGRGLDYFKKPQTGFHHVAQAGLKLLGSSSPPTLASQSAGITGMSHCTQPHYLYLKAKLC

SEQ ID NO: 20638 - protein, 31 aa, Homo sapiens
VPPLKRAITTLMAGILRLVVQWPPGRLQACF

SEQ ID NO: 20639 - protein, 112 aa, Homo sapiens
VPPLKRAITTLMAGILRLVVQWPPGRLQTVTKGVESLICTDWIRHKFTRSRIPEKVFQASPEDHEKYGGDPQNPHKLHIVTRIKSTRRRPYWEKDIIKMLGLEKVCNYFNHL

SEQ ID NO: 20640 - protein, 15 aa, Homo sapiens
LSLLNSALSLLVACI

SEQ ID NO: 20641 - protein, 73 aa, Homo sapiens
MEKEAVSVTVLLSAAPCLLSCFLGSSVSGLAFWVSQQKTKGPERCKNTHHLAGDLKILKLEIGTRKSKEFKAS

SEQ ID NO: 20642 - protein, 227 aa, Homo sapiens
MSVRRGRRPARPGTRLSWLLCCSALLSPAAGYVIVSSVSWAVTNEVDEELDSASTEEAMPALLEDSGSIWQQSFPASAHKEDAHLRPRAGAARARPPPAPPGMFSYRREGGQTASAPPGPRLRAATARSLAHASVWGCLATVSTHKKIQGLPFGNCLPVSDGPFNNSTGIPFFYMTAKDPVVADLMKNPMASLMLPESEGEFCRDMCNKEPAFFNSLFQKLSERKHF

SEQ ID NO: 20643 - protein, 1176 aa, Homo sapiens
LLFVFWWQKGKMANDSPAKSLVDIDLSSLRDPAGIFELVEVVGNGTYGQVYKGRHVKTGQLAAIKVMDVTEDEEEEIKLEINMLKKYSHHRNIATYYGAFIKKSPPGHDDQLWLVMEFCGAGSITDLVKNTKGNTLKEDWIAYISREILRGLAHLHIHHVIHRDIKGQNVLLTENAEVKLVDFGVSAQLDRTVGRRNTFIGTPYWMAPEVIACDENPDATYDYRSDLWSCGITAIEMAEGAPPLCDMHPMRALFLIPRNPPPRLKSKKWSKKFFSFIEGCLVKNYMQRPSTEQLLKHPFIRDQPNERQVRIQLKDHIDRTRKKRGEKDETEYEYSGSEEEEEEVPEQEGEPSSIVNVPGESTLRRDFLRLQQENKERSEALRRQQLLQEQQLREQEEYKRQLLAERQKRIEQQKEQRRRLEEQQRREREARRQQEREQRRREQEEKRRLEELERRRKEEEERRRAEEEKRRVEREQEYIRRQLEEEQRHLEVLQQQLLQEQAMLLHDHRRPHPQHSQQPPPPQQERSKPSFHAPEPKAHYEPADRAREVPVRTTSRSPVLSRRDSPLQGSGQQNSQAGQRNSTSIEPRLLWERVEKLVPRPGSGSSSGSSNSGSQPGSHPGSQSGSGERFRVRSSSKSEGSPSQRLENAVKKPEDKKEVFRPLKPAGEVDLTALAKELRAVEDVRPPHKVTDYSSSSEESGTTDEEDDDVEQEGADESTSGPEDTRAASSLNLSNGETESVKTMIVHDDVESEPAMTPSKEGTLIVRQTQSASSTLQKHKSSSSFTPFIDPRLLQISPSSGTTVTSVVGFSCDGMRPEAIRQDPTRKGSVVNVNPTNTRPQSDTPEIRKYKKRFNSEILCAALWGVNLLVGTESGLMLLDRSGQGKVYPLINRRRFQQMDVLEGLNVLVTISGKKDKLRVYYLSWLRNKILHNDPEVEKKQGWTTVGDLEGCVHYKVVKYERIKFLVIALKSSVEVYAWAPKPYHKFMAFKSFGELVHKPLLVDLTVEEGQRLKVIYGSCAGFHAVDVDSGSVYDIYLPTHVRKNPHSMIQCSIKPHAIIILPNTDGMELLVCYEDEGVYVNTYGRITKDVVLQWGEMPTSVAYIRSNQTMGWGEKAIEIRSVETGHLDGVFMHKRAQRLKFLCERNDKVFFASVRSGGSSQVYFMTLGRTSLLSW

SEQ ID NO: 20644 - protein, 300 aa, Homo sapiens
LSGAMLRLYVLVMGVSAFTLQPAAHTGAARSCRFRGRHYKREFRLEGEPVALRCPQVPYWLWASVSPRINLTWHKNDSARTVPGEEETRMWAQDGALWLLPALQEDSGTYVCTTRNASYCDKMSIELRVFENTDAFLPFISYPQILTLSTSGVLVCPDLSEFTRDKTDVKIQWYKDSLLLDKDNEKFLSVRGTTHLLVHDVALEDAGYYRCVLTFAHEGQQYNITRSIELRIKKKKEETIPVIISPLKTISASLGSRLTIPCKVFLGTGTPLTTMLWWTANDTHIESAYPGGRVTEGPRQ

SEQ ID NO: 20645 - protein, 27 aa, Homo sapiens
LRDFKTRNTFFPFCFIDPSIKLVDITF

SEQ ID NO: 20646 - protein, 41 aa, Homo sapiens
LIPSKREQSGTHKYGMKTFGEEAFTERRFLGWRKTMIYSSC

SEQ ID NO: 20647 - protein, 39 aa, Homo sapiens
MTSFNILFRILMNCCKTVIYFSPDLVLRVFFRRAQIKMK

SEQ ID NO: 20648 - protein, 194 aa, Homo sapiens [sequence omitted]

SEQ ID NO: 20649 - protein, 84 aa, Homo sapiens
VARAQSLMGVSLALLQKHVLHPRRSLMGPFPRVTSWALPLPSETADPGEVPLFLLSSSPALSSQKILPCVPKHSLLGELMLLAA

SEQ ID NO: 20650 - protein, 389 aa, Homo sapiens
MTRRGFSRAGAAQRSTRPAAEPQPPAARALQPRPGVPGPLRCREYLQPPAPRREAEGLSHQGSEVGAESGARPKERGAEPELGRLWLRTVSSWRLGWHFDFGVAEKPGVKMTERFDCHHCNESLFGKKYILREESPYCVVCFETLFANTCEECGKPIGCDCKDLSYKDRHWHEACFHCSQCRNSLVDKPFAAKEDQLLCTDCYSNEYSSKCQECKKTIMPGTRKMEYKGSSWHETCFICHRCQQPIGTKSFIPKDNQNFCVPCYEKQHAMQCVQCKKPITTGGVTYREQPWHKECFVCTACRKQLSGQRFTARDDFAYCLNCFCDLYAKKCAGCTNPISGLGGTKYISFEERQWHNDCFNCKKCSLSLVGRGFLTERDDILCPDCGKDI

SEQ ID NO: 20651 - protein, 17 aa, Homo sapiens
LRCLAENCVFLETRLAF

SEQ ID NO: 20652 - protein, 41 aa, Homo sapiens [sequence omitted]

SEQ ID NO: 20653 - protein, 1715 aa, Homo sapiens
LTCSRAYVRGWRKQKCSGGGGWLRAGGGLAEMEDLVQDGVASPATPGTGKSKLETLPKEDLIKFAKKQMMLIQKAKSRCTELEKEIEELRSKPVTEGTGDIIKALTERLDALLLEKAETEQQCLSLKKENIKMKQEVEDSVTKMGDAHKELEQSHINYVKEIENLKNELMAVRSKYSEDKANLQKQLEEAMNTQLELSEQLKFQNNSEDNVKKLQEEIEKIRPGFEEQILYLQKQLDATTDEKKETVTQLQNIIEANSQHYQKNINSLQEELLQLKAIHQEEVKELMCQIEASAKEHEAEINKLNELKENLVKQCEASEKNIQKKYECELENLRKATSNANQDNQICSILLQENTFVEQVVNEKVKHLEDTLKELESQHSILKDEVTYMNNLKLKLEMDAQHIKDEFFHEREDLEFKINELLLAKEEQGCVIEKLKSELAGLNKQFCYTVEQHNREVQSLKEQHQKEISELNETFLSDSEKEKLTLMFEIQGLKEQCENLQQEKQEAILNYESLREIMEILQTELGESAGKISQEFESMKQQQASDVHELQQKLRTAFTEKDALLETVNRLQGENEKLLSQQELVPELENTIKNLQEKNGVYLLSLSQRDTMLKELEGKINSLTEEKDDFINKLKNSHEEMDNFHKKCEREERLILELGKKVEQTIQYNSELEQKVNELTGGLEETLKEKDQNDQKLEKLMVQMKVLSEDKEVLSAEVKSLYEENNKLSSEKKQLSRDLEVFLSQKEDVILKEHITQLEKKLQLMVEEQDNLNKLLENEQVQKLFVKTQLYGFLKEMGSEVSEDSEEKDVVNVLQAVGESLAKINEEKCNLAFQRDEKVLELEKEIKCLQEESVVQCEELKSLLRDYEQEKVLLRKELEEIQSEKEALQSDLLEMKNANEKTRLENQNLLIQVEEVSQTCSKSEIHNEKEKCFIKEHENLKPLLEQKELRDRRAELILLKDSLAKSPSVKNDPLSSVKELEEKIENLEKECKEKEEKINKIKLVAVKAKKELDSSRKETQTVKEELESLRSEKDQLSASMRDLIQGAESYKNLLLEYEKQSEQLDVEKERANNFEHRIEDLTRQLRNSTLQCETINSDNEDLLARIETLQSNAKLLEVQILEVQRAKAMVDKELEAEKLQKEQKIKEHATTVNELEELQVQLQKQKKQLQKTMQELELVKKDAQQTTLMNMEIADYERLMKELNQKLTNKNNKIEDLEQEIKIQKQKQETLQEEITSLQSSVQQYEEKNTKIKQLLVKTKKELADSKQAETDHLILQASLKGELEASQQQVEVYKIQLAEITSEKHKIHEHLKTSAEQHQRTLSAYQQRVTALQEECRAAKAEQATVTSEFESYKVRVHNVLKQQKNKSMSQAETEGAKQEREHLEMLIDQLKIKLQDSQNNLQINVSELQTLQSEHDTLLERHNKMLQETVSKEAELREKLCSIQSENMMMKSEHTQTVSQLTSQNEVLRNSFRDQVRHLQEEHRKTVETLQQQLSKMEAQLFQLKNEPTTRSPVSSQQSLKNLRERRNTDLPLLDMHTVTREEGEGMETTDTESVSSASTYTQSLEQLLNSPETKLEPPLWHAEFTKEELVQKLSSTTKSADHLNGLLRETEATNAILMEQIKLLKSEIRRLERNQEREKSAANLEYLKNVLLQFIFLKPGSERERLLPVINTMLQLSPEEKGKLAAVAQGEEENASRSSGWASYLHSWSGLR

SEQ ID NO: 20654 - protein, 3257 aa, Homo sapiens
LRHWFAGAFLLEVATAAGLSAGLTRLGSQVGGAMRRSKADVERYIASVQGSTPSPRQKSMKGFYFAKLYYEAKEYDLAKKYICTYINVQERDPKAHRFLGLLYELEENTDKAVECYRRSVELNPTQKDLVLKIAELLCKNDVTDGRAKYWLERAAKLFPGSPAIYKLKEQLLDCEGEDGWNKLFDLIQSELYVRPDDVHVNIRLVEVYRSTKRLKDAVAHCHEAERNIALRSSLEWNSCVVQTLKEYLESLQCLESDKSDWRATNTDLLLAYANLMLLTLSTRDVQESRELLQSFDSALQSVKSLGGNDELSATFLEMKGHFYMHAGSLLLKMGQHSSNVQWRALSELAALCYLIAFQVPRPKIKLIKGEAGQNLLEMMACDRLSQSGHMLLNLSRGKQDFLKEIVETFANKSGQSALYDALFSSQSPKDTSFLGSDDIGNIDVREPELEDLTRYDVGAIRAHNGSLQHLTWLGLQWNSLPALPGIRKWLKQLFHHLPHETSRLETNAPESICILDLEVFLLGVVYTSHLQLKEKCNSHHSSYQPLCLPLPVCKQLCTERQKSWWDAVCTLIHRKAVPGNVAKLRLLVQHEINTLRAQEKHGLQPALLVHWAECLQKTGSGLNSFYDQREYIGRSVHYWKKVLPLLKIIKKKNSIPEPIDPLFKHFHSVDIQASEIVEYEEDAHITFAILDAVNGNIEDAVTAFESIKSVVSYWNLALIFHRKAEDIENDALSPEEQEECKNYLRKTRDYLIKIIDDSDSNLSVVKKLPVPLESVKEMLNSVMQELEDYSEGGPLYKNGSLRNADSEIKHSTPSPTRYSLSPSKSYKYSPKTPPRWAEDQNSLLKMICQQVEAIKKEMQELKLNSSNSASPHRWPTENYGPDSVPDGYQGSQTFHGAPLTVATTGPSVYYSQSPAYNSQYLLRPAANVTPTKGPVYGMNRLPPQQHIYAYPQQMHTPPVQSSSACMFSQEMYGPPALRFESPATGILSPRGDDYFNYNVQQTSTNPPLPEPGYFTKPPIAAHASRSAESKTIEFGKTNFVQPMPGEGLRPSLPTQAHTTQPTPFKFNSNFKSNDGDFTFSSPQVVTQPPPAAYSNSESLLGLLTSDKPLQGDGYSGAKPIPGGQTIGPRNTFNFGSKNVSGISFTENMGSSQQKNSGFRRSDDMFTFHGPGKSVFGTPTLETANKNHETDGGSAHGDDDDDGPHFEPVVPLPDKIEVKTGEEDEEEFFCNRAKLFRFDVESKEWKERGIGNVKILRHKTSGKIRLLMRREQVLKICANHYISPDMKLTPNAGSDRSFVWHALDYADELPKPEQLAIRFKTPEEAALFKCKFEEAQSILKAPGTNVAMASNQAVRIVKEPTSHDNKDICKSDAGNLNFEFQVAKKEGSWWHCNSCSLKNASTAKKCVSCQNLNPSNKELVGPPLAETVFTPKTSPENVQDRFALVTPKKEGHWDCSICLVRNEPTVSRCIACQNTKSANKSGSSFVHQASFKFGQGDLPKPINSDFRSVFSTKEGQWDCSACLVQNEGSSTKCAACQNPRKQSLPATSIPTPASFKFGTSETSKTLKSGFEDMFAKKEGQWDCSSCLVRNEANATRCVACQNPDKPSPSTSVPAPASFKFGTSETSKAPKSGFEGMFTKKEGQWDCSVCLVRNEASATKCIACQNPGKQNQTTSAVSTPASSETSKAPKSGFEGMFTKKEGQWDCSVCLVRNEASATKCIACQNPGKQNQTTSAVSTPASSETSKAPKSGFEGMFTKKEGQWDCSVCLVRNEASATKCIACQCPSKQNQTTAISTPASSEISKAPKSGFEGMFIRKGQWDCSVCCVQNESSSLKCVACDASKPTHKPIAEAPSAFTLGSEMKLHDSSGSQVGTGFKSNFSEKASKFGNTEQGFKFGHVDQENSPSFMFQGSSNTEFKSTKEGFSIPVSADGFKFGISEPGNQEKKSEKPLENGTGFQAQDISGQKNGRGVIFGQTSSTFTFADLAKSTSGEGFQFGKKDPNFKGFSGAGEKLFSSQYGKMANKANTSGDFEKDDDAYKTEDSDDIHFEPVVQMPEKVELVTGEEDEKVLYSQRVKLFRFDAEVSQWKERGLGNLKILKNEVNGKLRMLMRREQVLKVCANHWITTTMNLKPLSGSDRAWMWLASDFSDGDAKLEQLAAKFKTPELAEEFKQKFEECQRLLLDIPLQTPHKLVDTGRAAKLIQRAEEMKSGLKDFKTFLTNDQTKVTEEENKGSGTGAAGASDTTIKPNPENTGPTLEWDNYDLREDALDDSVSSSSVHASPLASSPVRKNLFRFGESTTGFNFSFKSALSPSKSPAKLNQSGTSVGTDEESDVTQEEERDGQYFEPVVPLPDLVEVSSGEENEQVVFSHRAKLYRYDKDVGQWKERGIGDIKILQNYDNKQVRIVMRRDQVLKLCANHRITPDMTLQNMKGTERVWLWTACDFADGERKVEHLAVRFKLQDVADSFKKIFDEAKTAQEKDSLITPHVSRSSTPRESPCGKIAVAVLEETTRERTDVIQGDDVADATSEVEVSSTSETTPKAVVSPPKFVFGSESVKSIFSSEKSKPFAFGNSSATGSLFGFSFNAPLKSNNSETSSVAQSGSESKVEPKKCELSKNSDIEQSSDSKVKNLFASFPTEESSINYTFKTPEKAKEKKKPEDSPSDDDVLIVYELTPTAEQKALATKLKLPPTFFCYKNRPDYVSEEEEDDEDFETAVKKLNGKLYLDGSEKCRPLEENTADNEKECIIVWEKKPTVEEKAKADTLKLPPTFFCGVCSDTDEDNGNGEDFQSELQKVQEAQKSQTEEITSTTDSVYTGGTEVMVPSFCKSEEPDSITKSISSPSVSSETMDKPVDLSTRKEIDTDSTSQGESKIVSFGFGSSTGLSFADLASSNSGDFAFGSKDKNFQWANTGAAVFGTQSVGTQSAGKVGEDEDGSDEEVVHNEDIHFEPIVSLPEVEVKSGEEDEEILFKERAKLYRWDRDVSQWKERGVGDIKILWHTMKNYYRILMRRDQVFKVCANHVITKTMELKPLNVSNNALVWTASDYADGEAKVEQLAVRFKTKEVADCFKKTFEECQQNLMKLQKGHVSLAAELSKETNPVVFFDVCADGEPLGRITMELFSNIVPRTAENFRALCTGEKGFGFKNSIFHRVIPDFVCQGGDITKHDGTGGQSIYGDKFEDENFDVKHTGPGLLSMANQGQNTNNSQFVITLKKAEHLDFKHVVFGFVKDGMDTVKKIESFGSPKGSVCRRITITECGQI

SEQ ID NO: 20655 - protein, 19 aa, Homo sapiens
MLYYALLWLTYYCGETKYL

SEQ ID NO: 20656 - protein, 65 aa, Homo sapiens
LYLYIHIYSLLLEMFKLLFCDESKSFLLLPSYCHCSALYQRAKSVPLKIQNPLISWLSDYIYIPR

SEQ ID NO: 20657 - protein, 937 aa, Homo sapiens
LLQWLAGTFLLEVATAAGLSGARTRLGSQVGGAMRRSKADVERYVASVLGLTPSPRQKSMKGFYFAKLYYEAKEYDLAKKYICTYINVQERDPKAHRFLGLLYELEENTEKAVECYRRSVELNPTQKDLVLKIAELLCKNDVTDGRAKYWVERAAKLFPGSPAIYKLKEQLLDCEGEDGWNKLFDLIQSELYVRPDDVHVNIRLVELYRSTKRLKDAVAHCHEAERNIALRSSLEWNSCVVQTLKEYLESLQCLESDKSDWQATNTDLLLAYANLMLLTLSTRDVQENRELLESFDSALQSAKSSLGGNDELSATFLEMKGHFYMYAGSLLLKMGQHGNNVQWRALSELAALCYLIAFQVPRPKIKLREGKAGQNLLEMMACDRLSQSGHMLLSLSRGKQDFLKEVVETFANKIGQSALYDALFSSQSPKDTSFLGSDDIGKIDVQEPELEDLARYDVGAIRAHNGSLQHLTWLGLQWNSLPALPGIRKWLKQLFHRLPHETSRLETNAPESICILDLEVFLLGVVYTSHLQLKEKCNSHHSSYQPLCLPFPVCKQLCTERQKSWWDAVCTLIHRKAVPGNLAKLRLLVQHEINTLRAQEKHGLQPALLVHWAKYLQKTGSGLNSFYGQLEYIGRSVHYWKKVLPLLKIIKKNSIPEPIDPLFKHFHSVDIQASEIVEYEEDAHITFAMLDAVNGNIEDAVTAFESIKSVVSYWNLALIFHRKAEDIENDALSPEEQEECRNYLTKTRDYLIKIIDDGDSNLSVVKKLPVPLESVKQMLNSVMQELEDYSEGGPLYKNGSLRNADSEIKHSTPSPTKYSLSPSKSYKYSPETPPRWTEDRNSLLNMICQQVEAIKKEMQELKLNSSKSASRHRWPTENYGPDSVPDGYQGSQTFHGAPLTEAAHRHFTIEKHGDSKWIIYRFTKQLCGTERARAKIS

SEQ ID NO: 20658 - protein, 1798 aa, Homo sapiens
LLQWLAGTFLLEVATAAGLSGARTRLGSQVGGAMRRSKADVERYVASVLGLTPSPRQKSMKGFYFAKLYYEAKEYDLAKKYICTYINVQERDPKAHRFLGLLYELEENTEKAVECYRRSVELNPTQKDLVLKIAELLCKNDVTDGRAKYWVERAAKLFPGSPAIYKLKEQLLDCEGEDGWNKLFDLIQSELYVRPDDVHVNIRLVELYRSTKRLKDAVAHCHEAERNIALRSSLEWNSCVVQTLKEYLESLQCLESDKSDWQATNTDLLLAYANLMLLTLSTRDVQENRELLESFDSALQSAKSSLGGNDELSATFLEMKGHFYMYAGSLLLKMGQHGNNVQWRALSELAALCYLIAFQVPRPKIKLREGKAGQNLLEMMACDRLSQSGHMLLSLSRGKQDFLKEVVETFANKIGQSALYDALFSSQSPKDTSFLGSDDIGKIDVQEPELEDLARYDVGAIRAHNGSLQHLTWLGLQWNSLPALPGIRKWLKQLFHRLPHETSRLETNAPESICILDLEVFLLGVVYTSHLQLKEKCNSHHSSYQPLCLPFPVCKQLCTERQKSWWDAVCTLIHRKAVPGNLAKLRLLVQHEINTLRAQEKHGLQPALLVHWAKYLQKTGSGLNSFYGQLEYIGRSVHYWKKVLPLLKIIKKNSIPEPIDPLFKHFHSVDIQASEIVEYEEDAHITFAMLDAVNGNIEDAVTAFESIKSVVSYWNLALIFHRKAEDIENDALSPEEQEECRNYLTKTRDYLIKIIDDGDSNLSVVKKLPVPLESVKQMLNSVMQELEDYSEGGPLYKNGSLRNADSEIKHSTPSPTKYSLSPSKSYKYSPETPPRWTEDRNSLLNMICQQVEAIKKEMQELKLNSSKSASRHRWPTENYGPDSVPDGYQGSQTFHGAPLTVATTGPSVYYSQSPAYNSQYLLRPAANVTPTKGSSNTEFKSTKEGFSIPVSADGFKFGISEPGNQEKKREKPLENDTGFQAQDISGRKKGRGVIFGQTSSTFTFADVAKSTSGEGFQFGKKDLNFKGFSGAGEKLFSSRYGKMANKANTSGDFEKDDDAYKTEDSDDIHFEPVVQMPEKVELVTGEEGEKVLYSQGVKLFRFDAEVRQWKERGLGNLKILKNEVNGKLRMLMRREQVLKVCANHWITTTMNLKPLSGSDRAWMWSASDFSDGDAKLERLAAKFKTPELAEEFKQKFEECQRLLLDIPLQTPHKLVDTGRAAKLIQRAEEMKSGLKDFKTFLTNDQTKVTEEENKGSGTGAAGASDTTIKPNAENTGPTLEWDNYDLREDALDDSVSSSSVHASPLASSPVRKNLFRFDESTTGSNFSFKSALSLSKSPAKLNQSGTSVGTDEESVVTQEEERDGQYFEPVVPLPDLVEVSSGEENEQVVFSHRAEIYRYDKDVGQWKERGIGDIKILQNYDNKQVRIVMRRDQVLKLCANHRITPDMSLQNMKGTERVWVWTACDFADGERKVEHLAVRFKLQDVADSFKKIFDEAKTAQEKDSLITPHVSRSSTPRESPCGKIAVAILEETTRERTDVIQGDDVADAASEVEVSSTSETTTKAVVSPPKFVFVSESVKRIFSSEKSKPFVFGNSSATGSLFGFSFNAPLKSNNSETSSVAQSGSESKVEPKKCELSKNSDIEQSSDSKVKNLSASFPTEESSINYTFKTPEKEPPLWHAEFTKEELVQKLRSTTKSADHLNGLLREIEATNAVLMEQIKLLKSEIRRLERNQEREKSAANLEYLKNVLLQFIFLKPGSERERLLPVINTMLQLSPEEKGKLAAVAQDEEENASRSSG

SEQ ID NO: 20659 - protein, 49 aa, Homo sapiens
MSAPEPRSAGAQNQACHTVPACHGRLFLECCLLKMHIDYRKEMTSSCTL

SEQ ID NO: 20660 - protein, 50 aa, Homo sapiens
VRSSADVCGAQPLQPPTPTPLQAPGLAVAAFSPTPRQHFRALLFIFIQFY

SEQ ID NO: 20661 - protein, 46 aa, Homo sapiens
LHVSFCLALLALPKGNFALPGCFFSAVVEYMEVGDAEFSGSSVADF

SEQ ID NO: 20662 - protein, 95 aa, Homo sapiens
LVCSLLELCVQRRCRCRRRRRRRRRRRRRHYHHLILAATLRTLPHCDRIIAVFGSLRSRRHRLGALSWPLFPQMSDSDSRTEKRKKKRPNGKATF

SEQ ID NO: 20663 - protein, 22 aa, Homo sapiens
LLLIKPRELQQLTFPGQGTARI

SEQ ID NO: 20664 - protein, 152 aa, Homo sapiens
LKMENNPSHNPVSPSPFPTRISAPLNMSQSHFRENWLMLKKSLEGKLCPSSCGSLKCRASRSPSVGTGPSLPIECFLYMKTWSSLQMTVASEEDKRREKTQNAGLPLFFASTVGTVTLPSFHHLQLHTHTHTLVPQSLFGTCLTAHLETRWS

SEQ ID NO: 20665 - protein, 70 aa, Homo sapiens
LLHVSSFFFILLFSCVKFQESNDKTQLIFGSVTNIPAKDAAPVEKIDTMLVLEGSGNLVLYTGVVRVSNK

SEQ ID NO: 20666 - protein, 97 aa, Homo sapiens
LIGLILYISLAIRKRVQETKFGNAFTEEDSELVVNYIAKKSFCRRAIELTLHSLGVSEELQNKLEDVVIDRNLLILGKILGEGKQFKVILLKCGIRR

SEQ ID NO: 20667 - protein, 1798 aa, Homo sapiens
LLQWLAGTFLLEVATAAGLSGARTRLGSQVGGAMRRSKADVERYVASVLGLTPSPRQKSMKGFYFAKLYYEAKEYDLAKKYICTYINVQERDPKAHRFLGLLYELEENTEKAVECYRRSVELNPTQKDLVLKIAELLCKNDVTDGRAKYWVERAAKLFPGSPAIYKLKEQLLDCEGEDGWNKLFDLIQSELYVRPDDVHVNIRLVELYRSTKRLKDAVAHCHEAERNIALRSSLEWNSCVVQTLKEYLESLQCLESDKSDWRATNTDLLLAYANLMLLTLSTRDVQENRELLESFDSALQSAKSSLGGNDELSATFLEMKGHFYMYAGSLLLKMGQHGNNVQWRALSELAALCYLIAFQVPRPKIKLREGKAGQNLLEMMACDRLSQSGHMLLSLSRGKQDFLKEVVETFANKIGQSALYDALFSSQSPKDTSFLGSDDIGKIDVQEPELEDLARYDVGAIRAHNGSLQHLTWLGLQWNSLPALPGIRKWLKQLFHRLPHETSRLETNAPESICILDLEVFLLGVVYTSHLQLKEKCNSHHSSYQPLCLPFPVCKQLCTERQKSWWDAVCTLIHRKAVPGNLAKLRLLVQHEINTLRAQEKHGLQPALLVHWAKYLQKTGSGLNSFYGQLEYIGRSVHYWKKVLPLLKIIKKNSIPEPIDPLFKHFHSVDIQASEIVEYEEDAHITFAILDAVNGNIEDAVTAFESIKSVVSYWNLALIFHRKAEDIENDALSPEEQEECRNYLTKTRDYLIKIIDDGDSNLSVVKKLPVPLESVKQMLNSVMQELEDYSEGGPLYKNGSLRNADSEIKHSTPSPTKYSLSPSKSYKYSPETPPRWTEDRNSLLNMICQQVEAIKKEMQELKLNSSKSASRHRWPTENYGPDSVPDGYQGSQTFHGAPLTVATTGPSVYYSQSPAYNSQYLLRPAANVTPTKGSSNTEFKSTKEGFSIPVSADGFKFGISEPGNQEKKREKPLENDTGLQAQDIRGRKKGRGVIFGQTSSTFTFADVAKSTSGEGFQFGKKDLNFKGFSGAGEKLFSSRYGKMANKANTSGDFEKDDDAYKTEDSDDIHFEPVVQMPEKVELVTGEEGEKVLYSQGVKLFRFDAEVRQWKERGLGNLKILKNEVNGKLRMLMRREQVLKVCANHWITTTMNLKPLSGSDRAWMWSASDFSDGDAKLERLAAKFKTPELAEEFKQKFEECQRLLLDIPLQTPHKLVDTGRAAKLIQRAEEMKSGLKDFKTFLTNDQTKVTEEENKGSGTGVAGASDTTIKPNAENTGPTLEWDNYDLREDALDDSVSSSSVHASPLASSPVRKNLFRFDESTTGSNFSFKSALSLSKSPAKLNQSGTSVGTDEESVVTQEEERDGQYFEPVVPLPDLVEVSSGEENEQVVFSHRAEIYRYDKDVGQWKERGIGDIKILQNYDNKQVRIVMRRDQVLKLCANHRITPDMSLQNMKGTERVWVWTACDFADGERKVEHLAVRFKLQDVADSFKKIFDEAKTAQEKDSLITPHVSRSSTPRESPCGKIAVAVLEEITRERTDVIQGDDVADAASEVEVSSTSETTTKAVVSPPKFVFVSESVKRIFSSEKSKPFAFGNSSATGSLFGFSFNAPLKSNNSETSSVAQSGSESKVEPKKCELSKNSDIEQSSDSKVKNLSASFPTEESSINYTFKTPEKEPPLWHAEFTKEELVQKLRSTTKSADHLNGLLREIEATNAVLMEQIKLLKSEIRRLERNQEREKSAANLEYLKNVLLQFIFLKPGSERERLLPVINTMLQLSPEEKGKLAAVAQDEEENPSRSSG

SEQ ID NO: 20668 - protein, 352 aa, Homo sapiens
LQPAGQGSGRRGPDLREEAPSPRRAASDSPAMPHNSIRSGHGGLNQLGGAFVNGRPLPEVVRQRIVDLAHQGVRPCDISRQLRVSHGCVSKILGRYYETGSIRPGVIGGSKPKVATPKVVEKIGDYKRQNPTMFAWEIRDRLLAEGVCDNDTVPSVSSINRIIRTKVQQPFNLPMDSCVATKSLSPGHTLIPSSAVTPPESPQSDSLGSTYSINGLLGIAQPGSDKRKMDDSDQDSCRLSIDSQSSSSGPRKHLRTDAFSQHHLEPLECPFERQHYPEAYASPSHTKGEQGERWWGPRCPDTHPTSPPADRAAMPPLPSQAWWQEVNTLAMPMATPPTPPTARPGASPTPAC

SEQ ID NO: 20669 - protein, 12 aa, Homo sapiens
LKTLLIWLTWQG

SEQ ID NO: 20670 - protein, 30 aa, Homo sapiens
LSRLTAGAWNLHTLLGLCISAGAGFSSEPP

SEQ ID NO: 20671 - protein, 63 aa, Homo sapiens
VALMPLFRVLFSCTCALLQDFRMQPCPPTPTSQGRPVLLGRQTSQEYILHNYTNRPLFKAFGL

SEQ ID NO: 20672 - protein, 444 aa, Homo sapiens [sequence omitted]

SEQ ID NO: 20673 - protein, 136 aa, Homo sapiens
MLEIQNHSLSSLPTEPPLNTPENREYTAEIMFESFNVPGLYIAVQAVLALAASWTSRQVGERTLTGTVIDSGDGVTHVIPVAEGYVIGSCIKHIPIAGRDITYFIQQLLRDREVGIPPEQSLETAKAVKVKSVIGV

SEQ ID NO: 20674 - protein, 17 aa, Homo sapiens
LITCFVWMAGFEVLNLT

SEQ ID NO: 20675 - protein, 33 aa, Homo sapiens
LAYTLVGFQLLWSASIPLHPFPPKGFLCKCFWN

SEQ ID NO: 20676 - protein, 103 aa, Homo sapiens
LEGQSYPDATVVSRQPWEGQSYPDATVVSRQPWEGQSYPDATAELPFPPCCPQGRLLVSSDAGRRNPPAPESLARTRPGGAGAKTQRMWPPSLVTDGYQGGFG

SEQ ID NO: 20677 - protein, 644 aa, Homo sapiens
LAGFALALRQPGRIMGLPRGPEGQGLPEVETREDEEQNVKLTEILELLVAAGYFRARIKGLSPFDKVVGGMTWCITTCNFDVDVDLLFQENSTIGQKIALSEKIVSVLPRMKCPHQLEPHQIQGMDFIHIFPVVQWLVKRAIETKEEMGDYIRSYSVSQFQKTYSLPEDDDFIKRKEKAIKTVVDLSEVYKPRRKYKRHQGAEELLDEESRIHATLLEYGRYGFSRQSKMEKAEDKKTALPAGLSATEKADAHEEDELRAAEEQRIQSLMTKMTAMANEESRLTASSVGQIVGLCSAEIKQIVSEYAEKQSELSAEESPEKLGTSQLHRRKVISLNKQIAQKTKHLEELRASHTSLQARYNEAKKTLTELKTYSEKLDKEQAALEKIESKADPSILQNLRALVAMNENLKSQEQEFKAHCREEMTRLQQEIENLKAERAPRGDEKTLSSGEPPGTLTSAMTHDEDLDRRYNMEKEKLYKIRLLQARRNREIAILHRKIDEVPSRAELIQYQKRFIELYRQISAVHKETKQFFTLYNTLDDKKVYLEKEISLLNSIHENFSQAMASPAARDQFLRQMEQIVEGIKQSRMKMEKKKQENKMRRDQLNDQYLELLEKQRLYFKTVKEFKEEGRKNEMLLSKVKAKAS

SEQ ID NO: 20678 - protein, 579 aa, Homo sapiens
VHSPTKHQSPLPVQPLWPRAGVQAAGGSWLCKTLAGPSPPEKPRVRTKARLSWLETEPERVAHLTVRLSSDLRASDPHVSRMSHQPAVATKMPEEMDKPLISLHLVDSDSSLAKVPDEAPKVGILGSGDFARSLATRLVGSGFKVVVGSRNPKRTARLFPSAAQVTFQEEAVSSPEVIFVAVFREHYSSLCSLSDQLAGKILVDVSNPTEQEHLQHRESNAEYLASLFPTCTVVKAFNVISAWTLQAGPRDGNRQVPICGDQPEAKRAVSEMALAMGFMPVDMGSLASAWEVEAMPLRLLPAWKVPTLLALGLFVCFYAYNFVRDVLQPYVQESQNKFFKLPVSVVNTTLPCVAYVLLSLVYLPGVLAAALQLRRGTKYQRFPDWLDHWLQHRKQIGLLSFFCAALHALYSFCLPLRRAHRYDLVNLAVKQVLANKSHLWVEEEVWRMEIYLSLGVLALGTLSLLAVTSLPSIANSLNWREFSFVQSSLGFVALVLSTLHTLTYGWTRAFEESRYKFYLPPTFTLTLLVPCVVILAKALFLLPCISRRLARIRRGWERESTIKFTLPTDHALAEKTSHV

SEQ ID NO: 20679 - protein, 134 aa, Homo sapiens
LSPWSSCKSARMSQAEFEKAAEEVRHLKTKPSDEEMLFIYGHYKQATVGDINTGMQSGGWKGICSSKQAQQLRLEVPGNFTLKLPEALLFRWGMVMVPEVEKTMFRILSVSSSNRIQILVLEGLYWLSPAATLY

SEQ ID NO: 20680 - protein, 98 aa, Homo sapiens
LSPWSSCKSARMSQAEFEKAAEEVRHLKTKPSDEEMLFIYGHYKQATVGDINTERPGMLDFTGKAKWDAWNELKGTSKEDAMKAYINKVEELKKKYGI

SEQ ID NO: 20681 - protein, 33 aa, Homo sapiens
MPCFFLIPWMVGIRENNQLNQLLKAAHHTALTD

SEQ ID NO: 20682 - protein, 114 aa, Homo sapiens
MVWGIKIKLLTYYLIYFCRSPSKPLARKLMDWEVVSRNSISDDRLETQSLPSRSPPGTPNHRNSTFTQEGTRLRPSSVGHLVDHMVHTSPSEVFVNQRSPSSTQANSIVLESSP

SEQ ID NO: 20683 - protein, 71 aa, Homo sapiens
LYINLNRFLEIILAFIHHVVLDSVHISVTLCDKMPNVLYLSYAPTLPATPTSHLDTLKKAMLTFILTSGNQ

SEQ ID NO: 20684 - protein, 75 aa, Homo sapiens [sequence omitted]

SEQ ID NO: 20685 - protein, 1263 aa, Homo sapiens
MIQSANDKNFDDEDSVDGNRPSSASSTSSKAPPSSRRNVGMGTTRRLGSSTLGSKSSAAKEGAGAVDEEDFIKAFDDVPVVQIYSSRDLEESINKIREILSDDKHDWEQRVNALKKIRSLLLAGAAEYDNFFQHLRLLDGAFKLSAKDLRSQVVREACITLGHLSSVLGNKFDHGAEAIMPTIFNLIPNSAKIMATSGVVAVRLIIRHTHIPRLIPVITSNCTSKSVAVRRRCFEFLDLLLQEWQTHSLERHISVLAETIKKGIHDADSEARIEARKCYWGFHSHFSREAEHLYHTLESSYQKALQSHLKNSDSIVSLPQSDRSSSSSQESLNRPLSAKRSPTGSTTSRASTVSTKSVSTTGSLQRSRSDIDVNAAASAKSKVSSSSGTTPFSSAAALPPGSYASLGRIRTRRQSSGSATNVASTPDNRGRSRAKVVSQSQRSRSANPAGAGSRSSSPGKLLGSGYGGLTGGSSRGPPVTPSSEKRSKIPRSQGCSRETSPNRIGLDRFGLGQPGRIPGSVNAMRVLSTSTDLEAAVADALLLGDSRSKKKPVRRRYEPYGMYSDDDANSDASSVCSERSYGSRNGGIPHYLRQTEDVAEVLNHCASSNWSERKEGLLGLQNLLKSQRTLSRVELKRLCEIFTRMFADPHSKIADSEAECEDKEGNLFPSEVSCTRVFSMFLETLVDFIIIHKDDLQDWLFVLLTQLLKKMGADLLGSVQAKVQKALDVTRDSFPFDQQFNILMRFIVDQTQTPNLKVKVAILKYIESLARQMDPTDFVNSSETRLAVSRIITWTTEPKSSDVRKAAQIVLISLFELNTPEFTMLLGALPKTFQDGATKLLHNHLKNSSNTSVGSPSNTIGRTPSRHTSSRTSPLTSPTNCSHGGLSPSMLDYDTENLNSEEIYSSLRGVTEAIEKFSFRSQEDLNEPIKRDGKKECDIVSRDGGAASPATEGRGGSEVEGGRTALDNKTSLLNTQPPRAFPGPRARDYNPYPYSDAINTYDKTALKEAVFDDDMEQLRDVPIDHSDLVADLLKELSNHNERVEERKGALLELLKITREDSLGVWEEHFKTILLLLLETLGDKDHSIRALALRVLREILRNQPARFKNYAELTIMKTLEAHKDSHKEVVRAAEEAASTLASSIHPEQCIKVLCPIIQTADYPINLAAIKMQTKVVERIAKESLLQLLVDIIPGLLQGYDNTESSVRKASVFCLVAIYSVIGEDLKPHLAQLTGSKMKLLNLYIKRAQTTNSNSSSSSDVSTHS

SEQ ID NO: 20686 - protein, 61 aa, Homo sapiens
LRWLPAASTSLAALATLADCCAAGAMSVSEIFVELQGFLAAEQDIREASPLPSPFPLPFHA

SEQ ID NO: 20687 - protein, 116 aa, Homo sapiens
LRWLPAASTSLAALATLADCCAAGAMSVSEIFVELQGFLAAEQDIREEIRKVVQSLEQTAREILTLLQGVHQGAGFQDSKFFVLYPIISLLFRGRVSIQKTFYNEKWLSCFMVSKN

SEQ ID NO: 20688 - protein, 117 aa, Homo sapiens
LRWLPAASTSLAALATLADCCAAGAMSVSEIFVELQGFLAAEQDIREEIRKVVQSLEQTAREILTLLQGVHQGAGFQDSKFFVLYPIISLLFRGRVSIQKTFYNEKWLSCFMFQRGV

SEQ ID NO: 20689 - protein, 52 aa, Homo sapiens
LRWLPAASTSLAALATLADCCAAGAMSVSEIFVELQGFLAAEQDIREFQRGV

SEQ ID NO: 20690 - protein, 173 aa, Homo sapiens
LRWLPAASTSLAALATLADCCAAGAMSVSEIFVELQGFLAAEQDIREEIRKVVQSLEQTAREILTLLQGVHQGAGFQDIPKRCLKAREHFGTVKTHLTSLKTKFPAEQYYRFHEHWRFVLQRLVFLAAFVVYLETETLVTREAVTEILGIEAVCQQRDCWRLLPTPPHLHLHQ

SEQ ID NO: 20691 - protein, 253 aa, Homo sapiens [sequence omitted]

SEQ ID NO: 20692 - protein, 25 aa, Homo sapiens
MFITIQLCLLLACCKAIKFFWSFCK

SEQ ID NO: 20693 - protein, 173 aa, Homo sapiens
LVQKAKLAEQAEQYDDMAACMKSVTKQGAELSNEERNLLSVAYKNVVGARKSSWRVVSSIEQKTEGAEKKQQMAREHREKIETELRDICNDVLSLLEKFLIPNASQAESKVFYLKMKGDYYRYLTEVTAGDDKIGIVDQSQQAYQEAFEISKKEMQPTHPVRLGLALNFCVLL

SEQ ID NO: 20694 - protein, 16 aa, Homo sapiens
MPRRACGSGVIFSLLL

SEQ ID NO: 20695 - protein, 623 aa, Homo sapiens
LFAIMDDQQALNSIMQDLAVLHKASRPALSLQETRKAKSSSPKKQNDVRVKFEHRGEKRILQFPRPVKLEDLRSKAKIAFGQSMDLHYTNNELVIPLTTQDDLDKAVELLDRSIHMKSLKILLVINGSTQATNLEPLPSLEDLDNTVFGAERKKRLSIIGPTSRDRSSPPPGYIPDELHQVARNGSFTSINSEGEFIPESMDQMLDPLSLSSPENSGSGSCPSLDSPLDGESYPKSRMPRAQSYPDNHQEFSDYDNPIFEKFGKGGTYPRRYHVSYHHQEYNDGRKTFPRARRTQGTSLRSPVSFSPTDHSLSTSSGSSIFTPEYDDSRIRRRGSDIDNPTLTVMDISPPSRSPRAPTNWRLGKLLGQGAFGRVYLCYDVDTGRELAVKQVQFDPDSPETSKEVNALECEIQLLKNLLHERIVQYYGCLRDPQEKTLSIFMEYMPGGSIKDQLKAYGALTENVTRKYTRQILEGVHYLHSNMIVHRDIKGANILRDSTGNVKLGDFGASKRLQTICLSGTGMKSVTGTPYWMSPEVISGEGYGRKADIWSVACTVVEMLTEKPPWAEFEAMAAIFKIATQPTNPKLPPHVSDYTRDFLKRIFVEAKLRPSADELLRHMFVHYH

SEQ ID NO: 20696 - protein, 485 aa, Homo sapiens
LSWRQDGELAVSPRPAPTGASASRMWQLTSLLLFVATWGISGTPAPLDSVFSSSERAHQVLRIRKRANSFLEELRHSSLERECIEEICDFEEAKEIFQNVDDTLAFWSKHVDGDQCLVLPLEHPCASLCCGHGTCIDGIGSFSCDCRSGWEGRFCQREVSFLNCSLDNGGCTHYCLEEVGWRRCSCAPGYKLGDDLLQCHPAVKFPCGRPWKRMEKKRSHLKRDTEDQEDQVDPRLIDGKMTRRGDSPWQVVLLDSKKKLACGAVLIHPSWVLTAAHCMDESKKLLVRLGEYDLRRWEKWELDLDIKEVFVHPNYSKSTTDNDIALLHLAQPATLSQTIVPICLPDSGLAERELNQAGQETLVTGWGYHSSREKEAKRNRTFVLNFIKIPVVPHNECSEVMSNMVSENMLCAGILGDRQDACEGDSGGPMVASFHGTWFLVGLVSWGEGCGLLHNYGVYTKVSRYLDWIHGHIRDKEAPQKSWAP

SEQ ID NO: 20697 - protein, 769 aa, Homo sapiens
LARGWILLSLCLGCFPPSERFMKYLLNFIGQGPATYGPFCAERLRRTYANGVRAEPPTWLELQAVKSKKHIPIQVILATGESLTVPVDSASTSREMCMHIAHKQGLSDHLGFSLQVAVYDKFWSLGSGRDHMMDAIARCEQMAQERGESQRQSPWRIYFRKEFFTPWHDSREDPVSTELIYRQVLRGVWSGEYSFEKEEELVELLARHCYVQLGASAESKAVQELLPSCIPHKLYRTKPPDRWASLVTAACAKAPYTQKQVTPLAVREQVVDAARLQWPLLFSRLFEVITLSGPRLPKTQLILAVNWKGLCFLDQQEKMLLELSFPEVMGLATNREAQGGQRLLLSTMHEEYEFVSPSSVAIAELVALFLEGLKERSIFAMALQDRKATDDTTLLAFKKGDLLVLTKKQGLLASENWTLGQNDRTGKTGLVPMACLYTIPTVTKPSAQLLSLLAMSPEKRKLAAQEGQFTEPRPEEPPKEKLHTLEEFSYEFFRAPEKDMVSMAVLPLARARGHLWAYSCEPLRQPLLKRVHANVDLWDIACQIFVAILRYMGDYPSRQAWPTLELTDQIFTLALQHPALQDEVYCQILKQLTHNSNRHSEERGWQLLWLCTGLFPPSKGLLPHAQKFIDTRRGKLLAPDCSRRIQKVLRTGPRKQPPHQVEVEAAEQNVSRICHKIYFPNDTSEMLEVVANTRVRDVCDSIATRLQLASWEGCSLFIKISDKVGRAGAGQTVGGRAVSEALGAACGGLSLPGAPMLDQAARPGLLGQR

SEQ ID NO: 20698 - protein, 247 aa, Homo sapiens
LASLLLEVARLCGSGGSAPNAPASRRHLCRPCHNREKAKGLGKYICQRCHLVIDEQPLMFRSDAYHPDHFNCTHCGKELTAEARELKGELYCLPCHDKMGVPICGACRRPIEGRVVNALGKQWHVEHFVCAKCEKPFLGHRHYEKKGLAYCETHYNQLFGDVCYNCSHVIEGDVVSALNKAWCVSCFSCSTCNSKLTLKNKFVEFDMKPVCKRCYEKFPLELKKRLKKLSELTSRKAQPKATDLNSA

SEQ ID NO: 20699 - protein, 287 aa, Homo sapiens
VDRAWEGPKRGQARAPQPAGTCLLPGEFIIGRVIKAMNNNWHPGCFRCELCDVELADLGFVKNAGRHLCRPCHNREKAKGLGKYICQRCHLVIDEQPLMFRSDAYHPDHFNCTHCGKELTAEARELKGELYCLPCHDKMGVPICGACRRPIEGRVVNALGKQWHVEHFVCAKCEKPFLGHRHYEKKGLAYCETHYNQLFGDVCYNCSHVIEGDVVSALNKAWCVSCFSCSTCNSKLTLKNKFVEFDMKPVCKRCYEKFPLELKKRLKKLSELTSRKAQPKATDLNSA

SEQ ID NO: 20700 - protein, 397 aa, Homo sapiens
LAPGGRASPPRWSHSPCTRRPAPATSRRLPRAMAARLGALAASGLYRRRQHRQSPPPATGNMSDALANAVCQRCQARFSPAERIVNSNGELYHEHCFVCAQCFRPFPEGLFYEFEGRKYCEHDFQMLFAPCCGSCGEFIIGRVIKAMNNNWHPGCFRCELCDVELADLGFVKNAGRHLCRPCHNREKAKGLGKYICQRCHLVIDEQPLMFRSDAYHPDHFNCTHCGKELTAEARELKGELYCLPCHDKMGVPICGACRRPIEGRVVNALGKQWHVEHFVCAKCEKPFLGHRHYEKKGLAYCETHYNQLFGDVCYNCSHVIEGDVVSALNKAWCVSCFSCSTCNSKLTLKNKFVEFDMKPVCKRCYEKFPLELKKRLKKLSELTSRKAQPKATDLNSA

SEQ ID NO: 20701 - protein, 128 aa, Homo sapiens
VAPGGCTLSSRKELTAEARELKGELYCLPCHDKMGVPICGACRRPIEGRVVNALGKQWHVEHFVCAKCEKPFLGHRHYEKKGLAYCETHYNQVSPVQNLQGCGSGGVARRAAVSKGGCGHPLRSSARC

SEQ ID NO: 20702 - protein, 315 aa, Homo sapiens
LPRAMAARLGALAASGLYRRRQHRQSPPPATGNMSDALANAVCQRCQARFSPAERIVNSNGELYHEHCFVCAQCFRPFPEGLFYEFEGRKYCEHDFQMLFAPCCGSCGEFIIGRVIKAMNNNWHPGCFRCELCDVELADLGFVKNAGRHLCRPCHNREKAKGLGKYICQRCHLVIDEQPLMFRSDAYHPDHFNCTHCGKELTAEARELKGELYCLPCHDKMGVPICGACRRPIEGRVVNALGKQWHVEHFVCAKCEKPFLGHRHYEKKGLAYCETHYNQVSPVQNLQGCGSGGVARRAAVSKGGCGHPLRSSARC

SEQ ID NO: 20703 - protein, 379 aa, Homo sapiens
LKHSEAGGNLFRMSKRSWWAGSRKPPREMLKLSGSDSSQSMNGLEVAPPGLITNFSLATAEQCGQETPLENMLFASFYLLDFILALVGNTLALWLFIRDHKSGTPANVFLMHLAVADLSCVLVLPTRLVYHFSGNHWPFGEIACRLTGFLFYLNMYASIYFLTCISADRFLAIVHPVKSLKLRRPLYAHLACAFLWVVVAVAMAPLLVSPQTVQTNHTVVCLQLYREKASHHALVSLAVAFTFPFITTVTCYLLIIRSLRQGLRVEKRLKTKAVRMIAIVLAIFLVCFVPYHVNRSVYVLHYRSHGASCATQRILALANRITSCLTSLNGALDPIMYFFVAEKFRHALCNLLCGKRLKGPPPSFEGKTNESSLSAKSEL

SEQ ID NO: 20704 - protein, 161 aa, Homo sapiens
LLRASASGGAGGGARRGAAMAAGGSDPRAGDVEEDASQLIFPKEFETAETLLNSEVHMLLEHRKQQNESAEDEQELSEVFMKTLNYTARFSRFKNRETIASVRSLLLQKKLHKFELACLANLCPETAEESKALIPSLEGRFEDEELQQILDDIQTKRSFQY

SEQ ID NO: 20705 - protein, 910 aa, Homo sapiens
MVFHSIVVRSQIAADEPPPEGCNSFFSVHGKKTCESDTLEALLLTASERPKPLLFKGDHRYPSSNPESPVVIFYSEIGSEEFSNFHRQLISKSNAGKINYVFRHYIFNPRKEPVYLSGYGVELAIKSTEYKAKDDTQVKGTEVNTTVIGENDPIDEVQGFLFGKLRDLHPDLEGQLKELRKHLVESTNEMAPLKVWQLQDLSFQTAARILASPVELALVVMKDLSQNFPTKARAITKTAVSSELRTEVEENQKYFKGTLGLQPGDSALFINGLHMDLDTQDIFSLFDVLRNEARVMEGLHRLGIEGLSLHNVLKLNIQPSEADYAVDIRSPAISWVNNLEVDSRYNSWPSSLQELLRPTFPGVIRQIRKNLHNMVFIVDPAHETTAELMNTAEMFLSNHIPLRIGFIFVVNDSEDVDGMQDAGVAVLRAYNYVAQEVDDYHAFQTLTHIYNKVRTGEKVKVEHVVSVLEKKYPYVEVNSILGIDSAYDRNRKEARGYYEQTGVGPLPVVLFNGMPFEREQLDPDELETITMHKILETTTFFQRAVYLGELPHDQDVVEYIMNQPNVVPRINSRILTAERDYLDLTASNNFFVDDYARFTILDSQGKTAAVANSMNYLTKKGMSSKEIYDDSFIRPVTFWIVGDFDSPSGRQLLYDAIKHQKSSNNVRISMINNPAKEISYENTQISRAIWAALQTQTSNAAKNFITKMAKEGAAEALAAGADIAEFSVGGMDFSLFKEVFESSKMDFILSHAVYCRDVLKLKKGQRAVISNGRIIGPLEDSELFNQDDFHLLENIILKTSGQKIKSHIQQLRVEEDVASDLVMKVDALLSAQPKGDPRIEYQFFEDRHSAIKLRPKEGETYFDVVAVVDPVTREAQRLAPLLLVLAQLINMNLRVFMNCQSKLSDMPLKR

SEQ ID NO: 20706 - protein, 8 aa, Homo sapiens
LVASVLLL

SEQ ID NO: 20707 - protein, 276 aa, Homo sapiens
LPAVFLAHWVLLLVLRVFLPCDENRLIPTELRREALALQGSLEFDDAGGEGVTSHVDDEYRWAGVEDPKVMITTSRDPSSRLKMFAKELKLVFPGAQRMNRGRHEVGALVRACKANGVTDLLVVHEHRGTPVGLIVSHLPFGPTAYFTLCNVVMRHDIPDLGTMSEAKPHLITHGFSSRLGKRVSDILRYLFPVPKDDSHRVITFANQDDYISFRHHVYKKTDHRNVELTEVGPRFELKLYMIRLGTLEQEATADVEWRWHPYTNTARKRVFLSTE

SEQ ID NO: 20708 - protein, 212 aa, Homo sapiens
VRWSLRPRSPPRRVFEIMNPVYSPGSSGVPYANAKGIGYPAGFPMGYAAAAPAYSPNMYPGANPTFQTGYTPGTPYKVSCSPTSGAVPPYSSSPNPYQTAVYPVRSAYPQQSPYAQQGTYYTQPLYAAPPHVIHHTTVVQPNGMPATVYPAPIPPPRGNGVTMGMVAGTTMAMSAGTLLTAHSPTPVAPHPVTVPTYRAPGTPTYSYVPPQW

SEQ ID NO: 20709 - protein, 301 aa, Homo sapiens
LGDPRPLPPSVPFLRKPPRHPAPPAGARRACAPRRDVRTAARTPDVRQLQASRRGIAVASWCSPRWFAGEEMAFVKSGWLLRQSTILKRWKKNWFDLWSDGHLIYYDDQTRQNIEDKVHMPMDCINIRTGQECRDTQPPDGKSKDCMLQIVCRDGKTISLCAESTDDCLAWKFTLQDSRTNTAYVGSAVMTDETSVVSSPPPYTAYAAPAPEVGRTLSLQQAYGYGPYGGAYPPGTQVVYAANGQAYAVPYQYPYAGLYGQQPANQVIIRERYRDNDSDLALGMLAGAATGMALGSLFWVF

SEQ ID NO: 20710 - protein, 307 aa, Homo sapiens
LGDPRPLPPSVPFLRKPPRHPAPPAGARRACAPRRDVRTAARTPDVRQLQASRRGIAVASWCSPRWFAGEEMAFVKSGWLLRQSTILKRWKKNWFDLWSDGHLIYYDDQTRQNIEDKVHMPMDCINIRTGQECRDTQPPDGKSKDCMLQIVCRDGKTISLCAESTDDCLAWKFTLQDSRTNTAYVGSAVMTDETSVVSSPPPYTAYAAPAPEQAYGYGPYGGAYPPGTQVVYAANGQAYAVPYQYPYAETILMTRHCTAVSRGLYGQQPANQVIIRERYRDNDSDLALGMLAGAATGMALGSLFWVF

SEQ ID NO: 20711 - protein, 292 aa, Homo sapiens
LGDPRPLPPSVPFLRKPPRHPAPPAGARRACAPRRDVRTAARTPDVRQLQASRRGIAVASWCSPRWFAGEEMAFVKSGWLLRQSTILKRWKKNWFDLWSDGHLIYYDDQTRQNIEDKVHMPMDCINIRTGQECRDTQPPDGKSKDCMLQIVCRDGKTISLCAESTDDCLAWKFTLQDSRTNTAYVGSAVMTDETSVVSSPPPYTAYAAPAPEAYGYGPYGGAYPPGTQVVYAANGQAYAVPYQYPYAGLYGQQPANQVIIRERYRDNDSDLALGMLAGAATGMALGSLFWVF

SEQ ID NO: 20712 - protein, 124 aa, Homo sapiens
VRQLQASRRGIAVASWCSPRWFAGEEMAFVKSGWLLRQSTILKRWKKNWFDLWSDGHLIYYDDQTRQNIEDKVHMPMDCINIRTGQECRDTQPPDGKSKDCMLQIVCRDGKTISLCAESTDDCL

SEQ ID NO: 20713 - protein, 201 aa, Homo sapiens
LQASRRGIAVASWCSPRWFAGEEMAFVKSGWLLRQSTILKRWKKNWFDLWSDGHLIYYDDQTRQNIEDKVHMPMDCINIRTGQECRDTQPPDGKSKDCMLQIVCRDGKTISLCAESTDDCLAWKFTLQDSRTNTAYVGSAVMTDETSVVSSPPPYTAYAAPAPEDFMDSSLLTKSSFESAIETTTATWHWACWQEQPRAWP

SEQ ID NO: 20714 - protein, 323 aa, Homo sapiens
VASWCSPRWFAGEEMAFVKSGWLLRQSTILKRWKKNWFDLWSDGHLIYYDDQTRQNIEDKVHMPMDCINIRTGQECRDTQPPDGKSKDCMLQIVCRDGKTISLCAESTDDCLAWKFTLQDSRTNTAYVGSAVMTDETSVVSSPPPYTAYAAPAPEELHSKGPKIHTTTSAKTQAVLPTRCFFPSESPIRRSVQISVLLPAVNIRRRIKLTFPQPARPRAPRSLCLWQTWFAGKRAPSLPTAATAPALPSCPSPPAPSQALPPSLAGWRSPSSAPLPPEQALAPRSFQLSKHQARPRPHRPGTPPVPAWPGVPPPPPARPPALR

SEQ ID NO: 20715 - protein, 179 aa, Homo sapiens
LTLATQQDVLRVRVPTTGIVEYPFDLQSVIFRMFDVGGQRSERRKWIHCFENVTSIMFLVALSEYDRVLVESDNENRMEESKALFSTIITYPWFQNSSVILLLNKKDLPEEKIMYSHLVDYFPEYDGPQRDAQAAREFILKMFVDLNPVTKLSTPTSHAPQTPRISALCLLPSRTPSSS

SEQ ID NO: 20716 - protein, 58 aa, Homo sapiens [sequence omitted]

SEQ ID NO: 20717 - protein, 12 aa, Homo sapiens
VFGMYRLAQKLD

SEQ ID NO: 20718 - protein, 141 aa, Homo sapiens
LIYLIFLFKWYMISIVHIYNRWRNSEIQCYVNGQLVSYGDMAWHVNTNDSTFKFKSESDIHLAEHHKQVLYDGKLASSITFTYTAKATDAQLCLESSPKENASIFVHSQHALMLQIQVLFPLFPQLDNRQLNDSQVETTVW

SEQ ID NO: 20719 - protein, 77 aa, Homo sapiens
LNLHIPQAGPFAGPYRLGWPLLSSGIRLPDWLVLHVSIKLKVIPWPPPGENQPHPASWGQWGRDFGLSEQLLEAAHD

SEQ ID NO: 20720 - protein, 72 aa, Homo sapiens
LLSFSALGLALAHGTTMLRAACHWEAPKVERSARKEKQSQEYIKHEQKEAFGEIWTSILILRMRDHGPWRFP

SEQ ID NO: 20721 - protein, 49 aa, Homo sapiens
LLSFSALGLALAHGTTMLRAACHWEAPKVERSARKEKITHSWGHPAAML

SEQ ID NO: 20722 - protein, 11 aa, Homo sapiens
LAWYLELLLTL

SEQ ID NO: 20723 - protein, 13 aa, Homo sapiens
MSVYCKSTLPHKA

SEQ ID NO: 20724 - protein, 77 aa, Homo sapiens
LFPTIHGNDEVKRGVLLMLFGGVPKTTGEGTSLRGDINVCIVGDPSTAKSQFLKFPKSQRTSLWSNINISAREMVLE

SEQ ID NO: 20725 - protein, 30 aa, Homo sapiens
LELLLKVFFLGTICQAVRKLQSHMTRPDGG

SEQ ID NO: 20726 - protein, 18 aa, Homo sapiens
LGLQGLYLKTMCLLQFFA

SEQ ID NO: 20727 - protein, 44 aa, Homo sapiens
LIKIDEPLEGSEDRIITITGTQDQIQNAQYLPQNSVKQYSGKFF

SEQ ID NO: 20728 - protein, 31 aa, Homo sapiens
LPPRLGSRHRRRCCMALGSRRGRFRSRHRSG

SEQ ID NO: 20729 - protein, 61 aa, Homo sapiens [sequence omitted]

SEQ ID NO: 20730 - protein, 96 aa, Homo sapiens
LTPLKHNRMSWWLCLPLGLFGSCLAPAAAAALSEFTQEQHDGAQPSPKCLAEELGDAWTIQIEASWKYRAVNTNQRGKLLASETWKGRRNTFFFLP

SEQ ID NO: 20731 - protein, 4636 aa, Homo sapiens
MTPLDSRLQAAPAAAAAAGPKVPPSSLQRRLPYRATTMSEFLLALLTLSGLLPIARVLTVGADRDQQLCDPGEFLCHDHVTCVSQSWLCDGDPDCPDDSDESLDTCPEEVEIKCPLNHIACLGTNKCVHLSQLCNGVLDCPDGYDEGVHCQELLSNCQQLNCQYKCTMVRNSTRCYCEDGFEITEDGRSCKDQDECAVYGTCSQTCRNTHGSYTCSCVEGYLMQPDNRSCKAKIEPTDRPPILLIANFETIEVFYLNGSKMATLSSVNGNEIHTLDFIYNEDMICWIESRESSNQLKCIQITKAGGLTDEWTINILQSFHNVQQMAIDWLTRNLYFVDHVGDRIFVCNSNGSVCVTLIDLELHNPKAIAVDPIAGKLFFTDYGNVAKVERCDMDGMNRTRIIDSKTEQPAALALDLVNKLVYWVDLYLDYVGVVDYQGKNRHTVIQGRQVRHLYGITVFEDYLYATNSDNYNIVRINRFNGTDIHSLIKIENAWGIRIYQKRTQPTVRSHACEVDPYGMPGGCSHICLLSSSYKTRTCRCRTGFNLGSDGRSCKRPKNELFLFYGKGRPGIVRGMDLNTKIADEYMIPIENLVNPRALDFHAETNYIYFADTTSFLIGRQKIDGTERETILKDDLDNVEGIAVDWIGNNLYWTNDGHRKTINVARLEKASQSRKTLLEGEMSHPRGIVVDPVNGWMYWTDWEEDEIDDSVGRIEKAWMDGFNRQIFVTSKMLWPNGLTLDFHTNTLYWCDAYYDHIEKVFLNGTHRKIVYSGRELNHPFGLSHHGNYVFWTDYMNGSIFQLDLITSEVTLLRHERPPLFGLQIYDPRKQQGDNMCRVNNGGCSTLCLAIPGGRVCACADNQLLDENGTTCTFNPGEALPHICKAGEFRCKNRHCIQARWKCDGDDDCLDGSDEDSVNCFNHSCPDDQFKCQNNRCIPKRWLCDGANDCGSNEDESNQTCTARTCQVDQFSCGNGRCIPRAWLCDREDDCGDQTDEMASCEFPTCEPLTQFVCKSGRCISSKWHCDSDDDCGDGSDEVGCVHSCFDNQFRCSSGRCIPGHWACDGDNDCGDFSDEAQINCTKEEIHSPAGCNGNEFQCHPDGNCVPDLWRCDGEKDCEDGSDEKGCNGTIRLCDHKTKFSCWSTGRCINKAWVCDGDIDCEDQSDEDDCDSFLCGPPKHPCANDTSVCLQPEKLCNGKKDCPDGSDEGYLCDECSLNNGGCSNHCSVVPGRGIVCSCPEGLQLNKDNKTCEIVDYCSNHLKCSQVCEQHKHTVKCSCYEGWKLDVDGESCTSVDPFEAFIIFSIRHEIRRIDLHKRDYSLLVPGLRNTIALDFHFNQSLLYWTDVVEDRIYRGKLSESGGVSAIEVVVEHGLATPEGLTVDWIAGNIYWIDSNLDQIEVAKLDGSLRTTLIAGAMEHPRAIALDPRYGILFWTDWDANFPRIESASMSGAGRKTIYKDMKTGAWPNGLTVDHFEKRIVWTDARSDAIYSALYDGTNMIEIIRGHEYLSHPFAVSLYGSEVYWTDWRTNTLSKANKWTGQNVSVIQKTSAQPFDLQIYHPSRQPQAPNPCAANDGKGPCSHMCLINHNRSAACACPHLMKLSSDKKTCYEMKKFLLYARRSEIRGVDIDNPYFNFITAFTVPDIDDVTVIDFDASEERLYWTDIKTQTIKRAFINGTGLETVISRDIQSIRGLAVDWVSRNLYWISSEFDETQINVARLDGSLKTSIIHGIDKPQCLAAHPVRGKLYWTDGNTINMANMDGSNSKILFQNQKEPVGLSIDYVENKLYWISSGNGTINRCNLDGGNLEVIESMKEELTKATALTIMDKKLWWADQNLAQLGTCSKRDGRNPTILRNKTSGVVHMKVYDKEAQQGSNSCQLNNGGCSQLCLPTSETTRTCMCTVGYYLQKNRMSCQGIESFLMYSVHEGIRGIPLEPSDKMDALMPISGTSFAVGIDFHAENDTIYWTDMGFNKISRAKRDQTWKEDIITNGLGRVEGIAVDWIAGNIYWTDHGFNLIEVARLNGSFRYVIISQGLDQPRSIAVHPEKGLLFWTEWGQMPCIGKARLDGSEKVVLVSMGIAWPNGISIDYEENKLYWCDARTDKIERIDLETGGNREMVLSGSNVDMFSVAVFGAYIYWSDRAHANGSVRRGHKNDATETITMRTGLGVNLKEVKIFNRVREKGTNVCARDNGGCKQLCLYRGNSRRTCACAHGYLAEDGVTCLRHEGYLLYSGRTILKSIHLSDETNLNSPIRPYENPRYFKNVIALAFDYNQRRKGTNRIFYSDAHFGNIQLIKDNWEDRQVIVENVGSVEGLAYHRAWDTLYWTSSTTSSITRHTVDQTRPGAFDREAVITMSEDDHPHVLALDECQNLMFWTNWNEQHPSIMRSTLTGKNAQVVVSTDILTPNGLTIDYRAEKLYFSDGSLGKIERCEYDGSQRHVIVKSGPGTFLSLAVYDNYIFWSDWGRRAILRSNKYTGGDTKILRSDIPHQPMGIIAVANDTNSCELSPCALLNGGCHDLCLLTPNGRVNCSCRGDRILLEDNRCVTKNSSCNAYSEFECGNGECIDYQLTCDGIPHCKDKSDEKLLYCENRSCRRGFKPCYNRRCIPHGKLCDGENDCGDNSDELDCKVSTCATVEFRCADGTCIPRSARCNQNIDCADASDEKNCNNTDCTHFYKLGVKTTGFIRCNSTSLCVLPTWICDGSNDCGDYSDELKCPVQNKHKCEENYFSCPSGRCILNTWICDGQKDCEDGRDEFHCDSSCSWNQFACSAQKCISKHWICDGEDDCGDGLDESDSICGAITCAADMFSCQGSRACVPRHWLCDGERDCPDGSDELSTAGCAPNNTCDENAFMCHNKVCIPKQFVCDHDDDCGDGSDESPQCGYRQCGTEEFSCADGRCLLNTQWQCDGDFDCPDHSDEAPLNPKCKSAEQSCNSSFFMCKNGRCIPSGGLCDNKDDCGDGSDERNCHINECLSKKVSGCSQDCQDLPVSYKCKCWPGFQLKDDGKTCVDIDECSSGFPCSQQCINTYGTYKCLCTDGYEIQPDNPNGCKSLSDEEPFLILADHHEIRKISTDGSNYTLLKQGLNNVIAIDFDYREEFIYWIDSSRPNGSRINRMCLNGSDIKVVHNTAVPNALAVDWIGKNLYWSDTEKRIIEVSKLNGLYPTILVSKRLKFPRDLSLDPQAGYLYWIDCCEYPHIGRVGMDGTNQSVVIETKISRPMALTIDYVNRRLYWADENHIEFSNMDGSHRHKVPNQDIPGVIALTLFEDYIYWTDGKTKSLSRAHKTSGADRLSLIYSWHAITDIQVYHSYRQPDVSKHLCMINNGGCSHLCLLAPGKTHTCACPTNFYLAADNRTCLSNCTASQFRCKTDKCIPFWWKCDTVDDCGDGSDEPDDCPEFRCQPGRFQCGTGLCALPAFICDGENDCGDNSDELNCDTHVCLSGQFKCTKNQKCIPVNLRCNGQDDCGDEEDERDCPENSCSPDYFQCKTTKHCISKLWVCDEDPDCADASDEANCDKKTCGPHEFQCKNNNCIPDHWRCDSQNDCSDNSDEENCKPQTCTLKDFLCANGDCVSSRFWCDGDFDCADGSDERNCETSCSKDQFRCSNGQCIPAKWKCDGHEDCKYGEDEKSCEPASPTCSSREYICASDGCISASLKCNGEYDCADGSDEMDCVTECKEDQFRCKNKAHCIPIRWLCDGIHDCVDGSDEENCERGGNICRADEFLCNNSLCKLHFWVCDGEDDCGDNSDEAPDMCVKFLCPSTRPHRCRNNRICLQSEQMCNGIDECGDNSDEDHCGGKLTYKARPCKKDEFACSNKKCIPMDLQCDRLDDCGDGSDEQGCRIAPTEYTCEDNVNPCGDDAYCNQIKTSVFCRCKPGFQRNMKNRQCEDLNECLVFGTCSHQCINVEGSYKCVCDQNFQERNNTCIAEGSEDQVLYIANDTDILGFIYPFNYSGDHQQISHIEHNSRITGMDVYYQRDMIIWSTQFNPGGIFYKRIHGREKRQANSGLICPEFKRPRDIAVDWVAGNIYWTDHSRMHWFSYYTTHWTSLRYSINVGQLNGPNCTRLLTNMAGEPYAIAVNPKRGMMYWTVVGDHSHIEEAAMDGTLRRILVQKNLQRPTGLAVDYFSERIYWADFELSIIGSVLYDGSNSVVSVSSKQGLLHPHRIDIFEDYIYGAGPKNGVFRVQKFGHGSVEYLALNIDKTKGVLISHRYKQLDLPNPCLDLACEFLCLLNPSGATCVCPEGKYLINGTCNDDSLLDDSCKLTCENGGRCILNEKGDLRCHCWPSYSGERCEVNHCSNYCQNGGTCVPSVLGRPTCSCALGFTGPNCGKTVCEDFCQNGGTCIVTAGNQPYCHCQPEYTGDRCQYYVCHHYCVNSESCTIGDDGSVECVCPTRYEGPKCEVDKCVRCHGGHCIINKDSEDIFCNCTNGKIASSCQLCDGYCYNGGTCQLDPETNVPVCLCSTNWSGTQCERPAPKSSKSDHISTRSIAIIVPLVLLVTLITTLVIGLVLCKRKRRTKTIRRQPIINGGINVEIGNPSYNMYEVDHDHNDGGLLDPGFMIDPTKARYIGGGPSAFKLPHTAPPIYLNSDLKGPLTAGPTNYSNPVYAKLYMDGQNCRNSLGSVDERKELLPKKIEIGIRETVA

SEQ ID NO: 20732 - protein, 512 aa, Homo sapiens
VESEQFFEFLTLRSGLYIFKEFLRGSWRDSGSQTLHWDPSCFREQLVMEPSSLELPADTVQRIAAELKCHPTDERVALHLDEEDKLRHFRECFYIPKIQDLPPVDLSLVNKDENAIYFLGNSLGLQPKMVKTYLEEELDKWAKIAAYGHEVGKRPWITGDESIVGLMKDIVGANEKEIALMNALTVNLHLLMLSFFKPTPKRYKILLEAKAFPSDHYAIESQLQLHGLNIEESMRMIKPREGEETLRIEDILEVIEKEGDSIAVILFSGVHFYTGQHFNIPAITKAGQAKGCYVGFDLAHAVGNVELYLHDWGVDFACWCSYKYLNAGAGGIAGAFIHEKHAHTIKPALVGWFGHELSTRFKMDNKLQLIPGVCGFRISNPPILLVCSLHASLEIFKQATMKALRKKSVLLTGYLEYLIKHNYGKDKAATKKPVVNIITPSHVEERGCQLTITFSVPNKDVFQELEKRGVVCDKRNPNGIRVAPVPLYNSFHDVYKFTNLLTSILDSAETKN

SEQ ID NO: 20733 - protein, 118 aa, Homo sapiens
MWQALLTLGLVLAAHESQSITPQGYSDSEERESMPRDGESEKEHEKEGEDGYGKLGRQDGDEEFEEEEEESENKSMDTDPETIRDEEETGDHSMDDSSEDGKMETKSDHEEDNMEDGM

SEQ ID NO: 20734 - protein, 23 aa, Homo sapiens
LNVLRALDPRGETIRRAEMVIPV

SEQ ID NO: 20735 - protein, 82 aa, Homo sapiens
MPCCCLPPVRPVCNLQSLLLLPLIRAAGPGMLLLPSCLPRSPGRGSASPSRHLPASASEKSHRDMHVVAKIKSGNCLFQRKK

SEQ ID NO: 20736 - protein, 60 aa, Homo sapiens
MAKVNLRFSSCLLLSICLDDKPSADELCFWTDHGRSQLTCPSLGVSQGCTDEETETENPE

SEQ ID NO: 20737 - protein, 57 aa, Homo sapiens
MVSHRKDWRRVNLRFSSCLLLSICLDDKPSADELCFWTDHGRSQLTCPSLGVSQGHL

SEQ ID NO: 20738 - protein, 60 aa, Homo sapiens
MVSHRKDWRRVNLRFSSCLLLSICLDDKPSADELCFWTDHGRSQLTCPSLGVSQGHARSS

SEQ ID NO: 20739 - protein, 108 aa, Homo sapiens
MVSHRKDWRRVNLRFSSCLLLSICLDDKPSADELCFWTDHGRSQLTCPSLGVSQGRSLTLSSRLECSGTISAHCKLCLPGSRHSPASVSQTCKVLMIVSKLYRIEKLH

SEQ ID NO: 20740 - protein, 91 aa, Homo sapiens
MVSHRKDWRRVNLRFSSCLLLSICLDDKPSADELCFWTDHGRSQLTCPSLGVSQGSLTLSSRLECSGTISAHCKLCLPGSRHSPASVSQLH

SEQ ID NO: 20741 - protein, 56 aa, Homo sapiens
MVSHRKDWRRVNLRFSSCLLLSICLDDKPSADELCFWTDHGRSQLTCPSLGVSQGS

SEQ ID NO: 20742 - protein, 57 aa, Homo sapiens
LKLFSSKVLKVNLRFSSCLLLSICLDDKPSADELCFWTDHGRSQLTCPSLGVSQGHL

SEQ ID NO: 20743 - protein, 67 aa, Homo sapiens
LKLFSSKVLKVNLRFSSCLLLSICLDDKPSADELCFWTDHGRSQLTCPSLGVSQGCTDEETETENPE

SEQ ID NO: 20744 - protein, 64 aa, Homo sapiens
VILTCTKVNLRFSSCLLLSICLDDKPSADELCFWTDHGRSQLTCPSLGVSQGCTDEETETENPE

SEQ ID NO: 20745 - protein, 82 aa, Homo sapiens
VVNLRFSSCLLLSICLDDKPSADELCFWTDHGRSQLTCPSLGVSQGSLTLSSRLECSGTISAHCKLCLPGSRHSPASVSQLH

SEQ ID NO: 20746 - protein, 88 aa, Homo sapiens
MGAAAKLAFAVFLISCSSGAILGRSETQECLFFNANWEKDRTNQTGVEPCYGDKDKRRHCFATWKNISGSIEIVKQGCWLDDINCYDR

SEQ ID NO: 20747 - protein, 112 aa, Homo sapiens
MSSRKSKSNSLIHTECLSQVQRILRERFCRQSPHSNLFGVQVQYKHLSELLKRTALHGESNSVLIIGPRGSGKTMLINHALKELMEIEEVSENVLQVHLNGKYAIILPLEIM

SEQ ID NO: 20748 - protein, 76 aa, Homo sapiens
LALAGDISLHPGAATSPALLLLLRLLLLHSPPLLPFVSSSTAPGKALKSGGQESPHMTVDIEDNADIEHFFYHNVH

SEQ ID NO: 20749 - protein, 66 aa, Homo sapiens
LALAGDISLHPGAATSPALLLLLRLLLLHSPPLLPFVSSSTAPGKALKSGGQERCTLKMSVSTCGK

SEQ ID NO: 20750 - protein, 77 aa, Homo sapiens
MQIFLKTLTGKTITLEVEPSDILQNVKAKIHVKEGIPPDQHSLIFVGKQLEDGCTVCDYNIQKESALHLVLHLRGGY

SEQ ID NO: 20751 - protein, 339 aa, Homo sapiens
LSRAGWVGTGSLPPPQRWPLPHCRPPGPPFNLVVEPCGFPAEPGPGLLPRGRGSPVPARPPPAPQVVQGREEPRPAPRGSSQRRPQAGALGAWAGSRVRAPRGSVGAGGEICHTSACCWQPSWTRLLLLITWMLLITLSANLFTVPERSLTTTFSFSRYKSSDRPAHKVSMLLLCHALAIAVVQIVIFSESWAFAKNINFYNVRPPLDPTPFPNSFKCFTCENAGDNYNCNRWAEDKWCPQNTQYCLTVHHFTSHGRSTSITKKCASRSECHFVGCHHSRDSEHTECRSCCEGMICNVELPTNHTNAVFAVMHAQRTSGSSAPTLYLPVLAWVFVLPLL

SEQ ID NO: 20752 - protein, 177 aa, Homo sapiens
VTLQSAMEPGPALAWLLLLSLLADCLKAAQSRDFTVKDIIYLHPSTTPYPGGFKCFTCEKAADNYECNRWAPDIYCPRETRYCYTQHTMEVTGNSISVTKRCVPLEECLSTGCRDSEHEGHKVCTSCCEGNICNLPLPRNETDATFATTSPINQTNGHPRCMSVIVSCLWLWLGLML

SEQ ID NO: 20753 - protein, 83 aa, Homo sapiens
MAGDNDRDPVKIRAIPRAVTLTRANLEGLTWAETIRTSHHHCLQLSQNRTLPAIKMAAATAAVVAPTLAVSRQRKLLPSASKR

SEQ ID NO: 20754 - protein, 417 aa, Homo sapiens
LLVTNHWRQPCLVFEHWLNAKEKSPLKQFSFSLSFSFRGEPSCSCEGHLLRKTPQLSRGASAGGSDSFENPGLPLPVPPGVPAFQALLFSGKGRRAGPWGAALGGRTRGIMEADKDDTQQILKEHSPDEFIKDEQNKGLIDEITKKNIQLKKEIQKLETELQEATKEFQIKEDIPETKMKFLSVETPENDSQLSNISCSFQVSSKVPYEIQKGQALITFEKEEVAQNVVSMSKHHVQIKDVNLEVTAKPVPLNSGVRFQVYVEVSKMKINVTEIPDTLREDQMRDKLELSFSKSRNGGGEVDRVDYDRQSGSAVITFVEIGVADKILKKKEYPLYINQTCHRVTVSPYTEIHLKKYQIFSGTSKRTVLLTGMEGIQMDEEIVEDLINIHFQRAKNGGGEVDVVKCSLGQPHIAYFEE

SEQ ID NO: 20755 - protein, 295 aa, Homo sapiens
LRICEQPLTGCYFTTTDDMIILIYLFLLLWEDTQGWGFKDGIFHNSIWLERAAGVYHREARSGKYKLTYAEAKAVCEFEGGHLATYKQLEAARKIGFHVCAAGWMAKGRVGYPIVKPGPNCGFGKTGIIDYGIRLNRSERWDAYCYNPHAKECGGVFTDPKQIFKSPGFPNEYEDNQICYWHIRLKYGQRIHLSFLDFDLEDDPGCLADYVEIYDSYDDVHGFVGRYCGDELPDDIISTGNVMTLKFLSDASVTAGGFQIKYVAMDPVSKSSQGKNTSTTSTGNKNFLAGRFSHL

SEQ ID NO: 20756 - protein, 34 aa, Homo sapiens
LVLIMGKGYNEGRLYRGYSGEVDRGFIFLCDILP

SEQ ID NO: 20757 - protein, 487 aa, Homo sapiens
LTFYVITLLAALLKSLGSADSYTSRPSDSDVSLEEDREAIRQEREQQAAIQLERAKSKPVAFAVKTNVSYCGALDEDVPVPSTAISFDAKDFLHIKEKYNNDWWIGRLVKEGCEIGFIPSPLRLENIRIQQEQKRGRFHGGKSSGNSSSSLGEMVSGTFRATPTSTAKQKQKVTEHIPPYDVVPSMRPVVLVGPSLKGYEVTDMMQKALFDFLKHRFDGRISITRVTADISLAKRSVLNNPSKRAIIERSNTRSSLAEVQSEIERIFELARSLQLVVLDADTINHPAQLIKTSLAPIIVHVKVSSPKVLQRLIKSRGKSQSKHLNVQLVAADKLAQCPPEMFDVILDENQLEDACEHLGEYLEAYWRATHTTSSTPMTPLLGRNLGSTALSPYPTAISGLQSQRMRHSNHSTENSPIERRSLMTSDENYHNERARKSRNRLSSSSQHSRDHYPLVEEDYPDSYQDTYKPHRNRGSPGGYSHDSRHRL

SEQ ID NO: 20758 - protein, 553 aa, Homo sapiens
LVNPQELIRQAQFSQTGLFSLSCSCGFCSNFVFALKEVLWIITPPCMTICTCMELKTRRLLQNSWELGESPKQRLDCSLTQMGSADSYTSRPSDSDVSLEEDREAIRQEREQQAAIQLERAKSKPVAFAVKTNVSYCGALDEDVPVPSTAISFDAKDFLHIKEKYNNDWWIGRLVKEGCEIGFIPSPLRLENIRIQQEQKRGRFHGGKSSGNSSSSLGEMVSGTFRATPTSTAKQKQKVTEHIPPYDVVPSMRPVVLVGPSLKGYEVTDMMQKALFDFLKHRFDGRISITRVTADISLAKRSVLNNPSKRAIIERSNTRSSLAEVQSEIERIFELARSLQLVVLDADTINHPAQLIKTSLAPIIVHVKVSSPKVLQRLIKSRGKSQSKHLNVQLVAADKLAQCPPEMFDVILDENQLEDACEHLGEYLEAYWRATHTTSSTPMTPLLGRNLGSTALSPYPTAISGLQSQRMRHSNHSTENSPIERRSLMTSDENYHNERARKSRNRLSSSSQHSRDHYPLVEEDYPDSYQDTYKPHRNRGSPGGYSHDSRHRL

SEQ ID NO: 20759 - protein, 233 aa, Homo sapiens
LTFYVITLLAALLKSLGSADSYTSRPSDSDVSLEEDREAIRQEREQQAAIQLERAKSKPVAFAVKTNVSYCGALDEDVPVPSTAISFDAKDFLHIKEKYNNDWWIGRLVKEGCEIGFIPSPLRLENIRIQQEQKRGRFHGGKSSGNSSSSLGEMVSGTFRATPTSTAKQKQKVTEHIPPYDVVPSMRPVVLVGPSLKGYERKYKVKLKESLSWQDLCNWLFLMQTPSITQHNL

SEQ ID NO: 20760 - protein, 62 aa, Homo sapiens
LVNPQELIRQAQFSQTGLFSLSCSCGFCSNFVFALKEVLWIITPPCMTICTCMELKTRRLIM

SEQ ID NO: 20761 - protein, 994 aa, Homo sapiens
MQATPSEAEAGGESPQSCVSAAHSDWTAGKPVSLLAPLIPPRSAGQPLTFSPSGRQPLRSLLVGMCSGSGRRRSSLSPTMRPGTGAERGGLMMGHPGMHYAPMGMHPMGQRANMPPVPHGMMPQMMPPMGGPPMGQMPGMMSSVMPGMMMSHMSQASMQPALPPGVNSMDVAAGTASGAKSMWTEHKSPDGRTYYYNTETKQSTWEKPDDLKTPAEQLLSKCPWKEYKSDSGKPYYYNSQTKESRWAKPKELEDLEGYQNTIVAGSLITKSNLHAMIKAEESSKQEECTTTSTAPVPTTEIPTTMSTMAAAEAAAAVVAAAAAAAAAAAAANANASTSASNTVSGTVPVVPEPEVTSIVATVVDNENTVTISTEEQAQLTSTPAIQDQSVEVSSNTGEETSKQETVADFTPKKEEEESQPAKKTYTWNTKEEAKQAFKELLKEKRVPSNASWEQAMKMIINDPRYSALAKLSEKKQAFNAYKVQTEKEEKEEARSKYKEAKESFQRFLENHEKMTSTTRYKKAEQMFGEMEVWNAISERDRLEIYEDVLFFLSKKEKEQAKQLRKRNWEALKNILDNMANVTYSTTWSEAQQYLMDNPTFAEDEELQNMDKEDALICFEEHIRALEKEEEEEKQKSLLRERRRQRKNRESFQIFLDELHEHGQLHSMSSWMELYPTISSDIRFTNMLGQPGSTALDLFKFYVEDLKARYHDEKKIIKDILKDKGFVVEVNTTFEDFVAIISSTKRSTTLDAGNIKLAFNSLLEKAEAREREREKEEARKMKRKESAFKSMLKQAAPPIELDAVWEDIRERFVKEPAFEDITLESERKRIFKDFMHVLEHECQHHHSKNKKHSKKSKKHHRKRSRSRSGSDSDDDDSHSKKKRQRSESRSASEHSSSAESERSYKKSKKHKKKSKKRRHKSDSPESDAEREKDKKEKDRESEKDRTRQRSESKHKSPKKKTGKDSGNWDTSGSELSEGELEKRRRTLLEQLDDDQ

SEQ ID NO: 20762 - protein, 50 aa, Homo sapiens
LLFAILLAFLLAIAYLIVKELHAENLKNEDDVDTGLLGIICISRKFSLML

SEQ ID NO: 20763 - protein, 46 aa, Homo sapiens
MVLHGPKILPYSANKDFKHKEGNHSRSFNCQLLLRISLIKPSCRDL

SEQ ID NO: 20764 - protein, 496 aa, Homo sapiens
LVAMTRALCSALRQALLLLAAAAELSPGLKCVCLLCDSSNFTCQTEGACWASVMLTNGKEQVIKSCVSLPELNAQVFCHSSNNVTKTECCFTDFCNNITLHLPTASPNAPKLGPMELAIIITVPVCLLSIAAMLTVWACQGRQCSYRKKKRPNVEEPLSECNLVNAGKTLKDLIYDVTASGSGSGLPLLVQRTIARTIVLQEIVGKGRFGEVWHGRWCGEDVAVKIFSSRDERSWFREAEIYQTVMLRHENILGFIAADNKDNGTWTQLWLVSEYHEQGSLYDYLNRNIVTVAGMIKLALSIASGLAHLHMEIVGTQGKPAIAHRDIKSKNILVKKCETCAIADLGLAVKHDSILNTIDIPQNPKVGTKRYMAPEMLDDTMNVNIFESFKRADIYSVGLVYWEIARRCSVGGIVEEYQLPYYDMVPSDPSIEEMRKVVCDQKFRPSIPNQWQSCEALRVMGRIMRECWYANGAARLTALRIKKTISQLCVKEDCKA

SEQ ID NO: 20765 - protein, 339 aa, Homo sapiens
LVAMTRALCSALRQALLLLAAAAELSPGLKCVCLLCDSSNFTCQTEGACWASVMLTNGKEQVIKSCVSLPELNAQVFCHSSNNVTKTECCFTDFCNNITLHLPTDNGTWTQLWLVSEYHEQGSLYDYLNRNIVTVAGMIKLALSIASGLAHLHMEIVGTQGKPAIAHRDIKSKNILVKKCETCAIADLGLAVKHDSILNTIDIPQNPKVGTKRYMAPEMLDDTMNVNIFESFKRADIYSVGLVYWEIARRCSVGGIVEEYQLPYYDMVPSDPSIEEMRKVVCDQKFRPSIPNQWQSCEALRVMGRIMRECWYANGAARLTALRIKKTISQLCVKEDCKA

SEQ ID NO: 20766 - protein, 416 aa, Homo sapiens
LVAMTRALCSALRQALLLLAAAAELSPGLKCVCLLCDSSNFTCQTEGACWASVMLTNGKEQVIKSCVSLPELNAQVFCHSSNNVTKTECCFTDFCNNITLHLPTGLPLLVQRTIARTIVLQEIVGKGRFGEVWHGRWCGEDVAVKIFSSRDERSWFREAEIYQTVMLRHENILGFIAADNKDNGTWTQLWLVSEYHEQGSLYDYLNRNIVTVAGMIKLALSIASGLAHLHMEIVGTQGKPAIAHRDIKSKNILVKKCETCAIADLGLAVKHDSILNTIDIPQNPKVGTKRYMAPEMLDDTMNVNIFESFKRADIYSVGLVYWEIARRCSVGGIVEEYQLPYYDMVPSDPSIEEMRKVVCDQKFRPSIPNQWQSCEALRVMGRIMRECWYANGAARLTALRIKKTISQLCVKEDCKA

SEQ ID NO: 20767 - protein, 55 aa, Homo sapiens [sequence omitted]

SEQ ID NO: 20768 - protein, 20 aa, Homo sapiens
VGTLKADPARPRSCRLFFFK

SEQ ID NO: 20769 - protein, 49 aa, Homo sapiens
LEALSLLKMSGGGGGAGGIGKRSGYLGRSMSARRRFEEHCFSYSKVSQQ

SEQ ID NO: 20770 - protein, 77 aa, Homo sapiens
LPNLAEYEFISSGLYLVVLLHLCEQSFSDMMGNTNEPSTRVRFINLARTLQAHMEDLETSEDDSEEDGDHNRTFDIA

SEQ ID NO: 20771 - protein, 1878 aa, Homo sapiens
LRQLRMRTGWATPRRPAGLLMLLFWFFDLAEPSGRAANDPFTIVHGNTGKCIKPVYGWIVADDCDETEDKLWKWVSQHRLFHLHSQKCLGLDITKSVNELRMFSCDSSAMLWWKCEHHSLYGAARYRLALKDGHGTAISNASDVWKKGGSEESLCDQPYHEIYTRDGNSYGRPCEFPFLIDGTWHHDCILDEDHSGPWCATTLNYEYDRKWGICLKPENGCEDNWEKNEQFGSCYQFNTQTALSWKEAYVSCQNQGADLLSINSAAELTYLKEKEGIAKIFWIGLNQLYSARGWEWSDHKPLNFLNWDPDRPSAPTIGGSSCARMDAESGLWQSFSCEAQLPYVCRKPLNNTVELTDVWTYSDTRCDAGWLPNNGFCYLLVNESNSWDKAHAKCKAFSSDLISIHSLADVEVVVTKLHNEDIKEEVWIGLKNINIPTLFQWSDGTEVTLTYWDENEPNVPYNKTPNCVSYLGELGQWKVQSCEEKLKYVCKRKGEKLNDASSDKMCPPDEGWKRHGETCYKIYEDEVPFGTNCNLTITSRFEQEYLNDLMKKYDKSLRKYFWTGLRDVDSCGEYNWATVGGRRRAVTFSNWNFLEPASPGGCVAMSTGKSVGKWEVKDCRSFKALSICKKMSGPLGPEEASPKPDDPCPEGWQSFPASLSCYKVFHAERIVRKRNWEEAERFCQALGAHLSSFSHVDEIKEFLHFLTDQFSGQHWLWIGLNKRSPDLQGSWQWSDRTPVSTIIMPNEFQQDYDIRDCAAVKVFHRPWRRGWHFYDDREFIYLRPFACDTKLEWVCQIPKGRTPKTPDWYNPDRAGIHGPPLIIEGSEYWFVADLHLNYEEAVLYCASNHSFLATITSFVGLKAIKNKIANISGDGQKWWIRISEWPIDDHFTYSRYPWHRFPVTFGEECLYMSAKTWLIDLGKPTDCSTKLPFICEKYNVSSLEKYSPDSAAKVQCSEQWIPFQNKCFLKIKPVSLTFSQASDTCHSYGGTLPSVLSQIEQDFITSLLPDMEATLWIGLRWTAYEKINKWTDNRELTYSNFHPLLVSGRLRIPENFFEEESRYHCALILNLQKSPFTGTWNFTSCSERHFVSLCQKYSEVKSRQTLQNASETVKYLNNLYKIIPKTLTWHSAKRECLKSNMQLVSITDPYQQAFLSVQALLHNSSLWIGLFSQDDELNFGWSDGKRLHFSRWAETNGQLEDCVVLDTDGFWKTVDCNDNQPGAICYYSGNETEKEVKPVDSVKCPSPVLNTPWIPFQNCCYNFIITKNRHMATTQDEVHTKCQKLNPKSHILSIRDEKENNFVLEQLLYFNYMASWVMLGITYRNKSLMWFDKTPLSYTHWRAGRPTIKNEKFLAGLSTDGFWDIQTFKVIEEAVYFHQHSILACKIEMVDYKEEYNTTLPQFMPYEDGIYSVIQKKVTWYEALNMCSQSGGHLASVHNQNGQLFLEDIVKRDGFPLWVGLSSHDGSESSFEWSDGSTFDYIPWKGQTSPGNCVLLDPKGTWKHEKCNSVKDGAICYKPTKSKKLSRLTYSSRCPAAKENGSRWIQYKGHCYKSDQALHSFSEAKKLCSKHDHSATIVSIKDEDENKFVSRLMRENNNITMRVWLGLSQHSVDQSWSWLDGSEVTFVKWENKSKSGVGRCSMLIASNETWKKVECEHGFGRVVCKVPLDCPSSTWIQFQDSCYIFLQEAIKVESIEDVRNQCTDHGADMISIHNEEENAFILDTLKKQWKGPDDILLGMFYDTDDASFKWFDNSNMTFDKWTDQDDDEDLVDTCAFLHIKTGEWKKGNCEVSSVEGTLCKTAIPYKRKYLSDNHILISALVIASTVILTVLGAIIWFLYKKHSDSRFTTVFSTAPQSPYNEDCVLVVGEENEYPVQFD

SEQ ID NO: 20772 - protein, 1822 aa, Homo sapiens
LRQLRMRTGWATPRRPAGLLMLLFWFFDLAEPSGRAANDPFTIVHGNTGKCIKPVYGWIVADDCDETEDKLWKWVSQHRLFHLHSQKCLGLDITKSVNELRMFSCDSSAMLWWKCEHHSLYGAARYRLALKDGHGTAISNASDVWKKGGSEESLCDQPYHEIYTRDGNSYGRPCEFPFLIDGTWHHDCILDEDHSGPWCATTLNYEYDRKWGICLKPENGCEDNWEKNEQFGSCYQFNTQTALSWKEAYVSCQNQGADLLSINSAAELTYLKEKEGIAKIFWIGLNQLYSARGWEWSDHKPLNFLNWDPDRPSAPTIGGSSCARMDAESGLWQSFSCEAQLPYVCRKPLNNTVELTDVWTYSDTRCDAGWLPNNGFCYLLVNESNSWDKAHAKCKAFSSDLISIHSLADVEVVVTKLHNEDIKEEVWIGLKNINIPTLFQWSDGTEVTLTYWDENEPNVPYNKTPNCVSYLGELGQWKVQSCEEKLKYVCKRKGEKLNDASSDKMCPPDEGWKRHGETCYKIYEDEVPFGTNCNLTITSRFEQEYLNDLMKKYDKSLRKYFWTGLRDVDSCGEYNWATVGGRRRAVTFSNWNFLEPASPGGCVAMSTGKSVGKWEVKDCRSFKALSICKKMSGPLGPEEASPKPDDPCPEGWQSFPASLSCYKVFHAERIVRKRNWEEAERFCQALGAHLSSFSHVDEIKEFLHFLTDQFSGQHWLWIGLNKRSPDLQGSWQWSDRTPVSTIIMPNEFQQDYDIRDCAAVKVFHRPWRRGWHFYDDREFIYLRPFACDTKLEWVCQIPKGRTPKTPDWYNPDRAGIHGPPLIIEGSEYWFVADLHLNYEEAVLYCASNHSFLATITSFVGLKAIKNKIANISGDGQKWWIRISEWPIDDHFTYSRYPWHRFPVTFGEECLYMSAKTWLIDLGKPTDCSTKLPFICEKYNVSSLEKYSPDSAAKVQCSEQWIPFQNKCFLKIKPVSLTFSQASDTCHSYGGTLPSVLSQIEQDFITSLLPDMEATLWIGLRWTAYEKINKWTDNRELTYSNFHPLLVSGRLRIPENFFEEESRYHCALILNLQKSPFTGTWNFTSCSERHFVSLCQKYSEVKSRQTLQNASETVKYLNNLYKIIPKTLTWHSAKRECLKSNMQLVSITDPYQQAFLSVQALLHNSSLWIGLFSQDDELNFGWSDGKRLHFSRWAETNGQLEDCVVLDTDGFWKTVDCNDNQPGAICYYSGNETEKEVKPVDSVKCPSPVLNTPWIPFQNCCYNFIITKNRHMATTQDEVHTKCQKLNPKSHILSIRDEKENNFVLEQLLYFNYMASWVMLGITYRNKSLMWFDKTPLSYTHWRAGRPTIKNEKFLAGLSTDGFWDIQTFKVIEEAVYFHQHSILACKIEMVDYKEEYNTTLPQFMPYEDGIYSVIQKKVTWYEALNMCSQSGGHLASVHNQNGQLFLEDIVKRDGFPLWVGLSSHDGSESSFEWSDGSTFDYIPWKGQTSPGNCVLLDPKGTWKHEKCNSVKDGAICYKPTKSKKLSRLTYSSRCPAAKENGSRWIQYKGHCYKSDQALHSFSEAKKLCSKHDHSATIVSIKDEDENKFVSRLMRENNNITMRVWLGLSQHSVDCPSSTWIQFQDSCYIFLQEAIKVESIEDVRNQCTDHGADMISIHNEEENAFILDTLKKQWKGPDDILLGMFYDTDDASFKWFDNSNMTFDKWTDQDDDEDLVDTCAFLHIKTGEWKKGNCEVSSVEGTLCKTAIPYKRKYLSDNHILISALVIASTVILTVLGAIIWFLYKKHSDSRFTTVFSTAPQSPYNEDCVLVVGEENEYPVQFD

SEQ ID NO: 20773 - protein, 65 aa, Homo sapiens
MLRAALPALLLPLLGLAAAAVADCPSSTWIQFQDSCYIFLQEAIKVESIEDVRNQCTDHGWSAVV

SEQ ID NO: 20774 - protein, 1727 aa, Homo sapiens
LRQLRMRTGWATPRRPAGLLMLLFWFFDLAEPSGRAANDPFTIVHGNTGKCIKPVYGWIVADDCDETEDKLWKWVSQHRLFHLHSQKCLGLDITKSVNELRMFSCDSSAMLWWKCEHHSLYGAARYRLALKDGHGTAISNASDVWKKGGSEESLCDQPYHEIYTRDGNSYGRPCEFPFLIDGTWHHDCILDEDHSGPWCATTLNYEYDRKWGICLKPENGCEDNWEKNEQFGSCYQFNTQTALSWKEAYVSCQNQGADLLSINSAAELTYLKEKEGIAKIFWIGLNQLYSARGWEWSDHKPLNFLNWDPDRPSAPTIGGSSCARMDAESGLWQSFSCEAQLPYVCRKPLNNTVELTDVWTYSDTRCDAGWLPNNGFCYLLVNESNSWDKAHAKCKAFSSDLISIHSLADVEVVVTKLHNEDIKEEVWIGLKNINIPTLFQWSDGTEVTLTYWDENEPNVPYNKTPNCVSYLGELGQWKVQSCEEKLKYVCKRKGEKLNDASSDKMCPPDEGWKRHGETCYKIYEDEVPFGTNCNLTITSRFEQEYLNDLMKKYDKSLRKYFWTGLRDVDSCGEYNWATVGGRRRAVTFSNWNFLEPASPGGCVAMSTGKSVGKWEVKDCRSFKALSICKKMSGPLGPEEASPKPDDPCPEGWQSFPASLSCYKVFHAERIVRKRNWEEAERFCQALGAHLSSFSHVDEIKEFLHFLTDQFSGQHWLWIGLNKRSPDLQGSWQWSDRTPVSTIIMPNEFQQDYDIRDCAAVKVFHRPWRRGWHFYDDREFIYLRPFACDTKLEWVCQIPKGRTPKTPDWYNPDRAGIHGPPLIIEGSEYWFVADLHLNYEEAVLYCASNHSFLATITSFVGLKAIKNKIANISGDGQKWWIRISEWPIDDHFTYSRYPWHRFPVTFGEECLYMSAKTWLIDLGKPTDCSTKLPFICEKYNVSSLEKYSPDSAAKVQCSEQWIPFQNKCFLKIKPVSLTFSQASDTCHSYGGTLPSVLSQIEQDFITSLLPDMEATLWIGLRWTAYEKINKWTDNRELTYSNFHPLLVSGRLRIPENFFEEESRYHCALILNLQKSPFTGTWNFTSCSERHFVSLCQKYSEVKSRQTLQNASETVKYLNNLYKIIPKTLTWHSAKRECLKSNMQLVSITDPYQQAFLSVQALLHNSSLWIGLFSQDDELNFGWSDGKRLHFSRWAETNGQLEDCVVLDTDGFWKTVDCNDNQPGAICYYSGNETEKEVKPVDSVKCPSPVLNTPWIPFQNCCYNFIITKNRHMATTQDEVHTKCQKLNPKSHILSIRDEKENNFVLEQLLYFNYMASWVMLGITYRNKSLMWFDKTPLSYTHWRAGRPTIKNEKFLAGLSTDGFWDIQTFKVIEEAVYFHQHSILACKIEMVDYKEEYNTTLPQFMPYEDGIYSVIQKKVTWYEALNMCSQSGGHLASVHNQNGQLFLEDIVKRDGFPLWVGLSSHDGSESSFEWSDGSTFDYIPWKGQTSPGNCVLLDPKGTWKHEKCNSVKDGAICYKPTKSKKLSRLTYSSRCPAAKENGSRWIQYKGHCYKSDQALHSFSEAKKLCSKHDHSATIVSIKDEDENKFVSRLMRENNNITMRVWLGLSQHSVDQSWSWLDGSEVTFVKWENKSKSGVGRCSMLIASNETWKKVECEHGFGRVVCKVPLGPDYTAIAIIVATLSILVLMGGLIWFLFQRHRLHLAGFSSVRYAQGVNEDEIMLPSFHD

SEQ ID NO: 20775 - protein, 43 aa, Homo sapiens
VAEWVSRALGWQGPRRGWGAEEATDPLPRGGAGCLGRGSGLPG

SEQ ID NO: 20776 - protein, 791 aa, Homo sapiens
LKRMGIELLCLFFLFLGRNDHVQGGCALGGAETCEDCLLIGPQCAWCAQENFTHPSGVGERCDTPANLLAKGCQLNFIENPVSQVEILKNKPLSVGRQKNSSDIVQIAPQSLILKLRPGGAQTLQVHVRQTEDYPVDLYYLMDLSASMDDDLNTIKELGSRLSKEMSKLTSNFRLGFGSFVEKPVSPFVKTTPEEIANPCSSIPYFCLPTFGFKHILPLTNDAERFNEIVKNQKISANIDTPEGGFDAIMQAAVCKEKIGWRNDSLHLLVFVSDADSHFGMDSKLAGIVIPNDGLCHLDSKNEYSMSTVLEYPTIGQLIDKLVQNNVLLIFAVTQEQVHLYENYAKLIPGATVGLLQKDSGNILQLIISAYEELRSEVELEVLGDTEGLNLSFTAICNNGTLFQHQKKCSHMKVGDTASFSVTVNIPHCERRSRHIIIKPVGLGDALELLVSPECNCDCQKEVEVNSSKCHHGNGSFQCGVCACHPGHMGPRCECGEDMLSTDSCKEAPDHPSCSGRGDCYCGQCICHLSPYGNIYGPYCQCDNFSCVRHKGLLCGGNGDCDCGECVCRSGWTGEYCNCTTSTDSCVSEDGVLCSGRGDCVCGKCVCTNPGASGPTCERCPTCGDPCNSKRSCIECHLSAAGQAREECVDKCKLAGATISEEEDFSKDGSVSCSLQGENECLITFLITTDNEGKTIIHSINEKDCPKPPNIPMIMLGVSLAILLIGVVLLCIWKLLVSFHDRKEVAKFEAERSKAKWQTGTNPLYRGSTSTFKNVTYKHREKQKVDLSTDC

SEQ ID NO: 20777 - protein, 696 aa, Homo sapiens
LKRMGIELLCLFFLFLGRNDHVQGGAQTLQVHVRQTEDYPVDLYYLMDLSASMDDDLNTIKELGSRLSKEMSKLTSNFRLGFGSFVEKPVSPFVKTTPEEIANPCSSIPYFCLPTFGFKHILPLTNDAERFNEIVKNQKISANIDTPEGGFDAIMQAAVCKEKIGWRNDSLHLLVFVSDADSHFGMDSKLAGIVIPNDGLCHLDSKNEYSMSTVLEYPTIGQLIDKLVQNNVLLIFAVTQEQVHLYENYAKLIPGATVGLLQKDSGNILQLIISAYEELRSEVELEVLGDTEGLNLSFTAICNNGTLFQHQKKCSHMKVGDTASFSVTVNIPHCERRSRHIIIKPVGLGDALELLVSPECNCDCQKEVEVNSSKCHHGNGSFQCGVCACHPGHMGPRCECGEDMLSTDSCKEAPDHPSCSGRGDCYCGQCICHLSPYGNIYGPYCQCDNFSCVRHKGLLCGGNGDCDCGECVCRSGWTGEYCNCTTSTDSCVSEDGVLCSGRGDCVCGKCVCTNPGASGPTCERCPTCGDPCNSKRSCIECHLSAAGQAREECVDKCKLAGATISEEEDFSKDGSVSCSLQGENECLITFLITTDNEGKTIIHSINEKDCPKPPNIPMIMLGVSLAILLIGVVLLCIWKLLVSFHDRKEVAKFEAERSKAKWQTGTNPLYRGSTSTFKNVTYKHREKQKVDLSTDC

SEQ ID NO: 20778 - protein, 684 aa, Homo sapiens
LKRMGIELLCLFFLFLGRNDHVQGGCALGGAETCEDCLLIGPQCAWCAQENFTHPSGVGERCDTPANLLAKGCQLNFIENPVSQVEILKNKPLSVGRQKNSSDIVQIAPQSLILKLRPGGAQTLQVHVRQTEDYPVDLYYLMDLSASMDDDLNTIKELGSRLSKEMSKLTSNFRLGFGSFVEKPVSPFVKTTPEEIANPCSSIPYFCLPTFGFKHILPLTNDAERFNEIVKNQKISANIDTPEGGFDAIMQAAVCKEKIGWRNDSLHLLVFVSDADSHFGMDSKLAGIVIPNDGLCHLDSKNEYSMSTVLEYPTIGQLIDKLVQNNVLLIFAVTQEQVHLYENYAKLIPGATVGLLQKDSGNILQLIISAYEELRSEVELEVLGDTEGLNLSFTAICNNGTLFQHQKKCSHMKVGDTASFSVTVNIPHCERRSRHIIIKPVGLGDALELLVSPECNCDCQKEVEVNSSKCHHGNGSFQCGVCACHPGHMGPRCECGEDMLSTDSCKEAPDHPSCSGRGDCYCGQCICHLSPYGNIYGPYCQCDNFSCVRHKGLLCGDFSKDGSVSCSLQGENECLITFLITTDNEGKTIIHSINEKDCPKPPNIPMIMLGVSLAILLIGVVLLCIWKLLVSFHDRKEVAKFEAERSKAKWQTGTNPLYRGSTSTFKNVTYKHREKQKVDLSTDC

SEQ ID NO: 20779 - protein, 42 aa, Homo sapiens
LWGVIIAWSMRSWVTSQRVTEGVGGQGRKNRSQPRPQWEPRR

SEQ ID NO: 20780 - protein, 78 aa, Homo sapiens
VPRRLSSLRLQAGEEVTPENSSLSPLTLPESETEMRALGPGKRGEGERRKPENGEIKSFPWIIPSVNRDHKARASASS

SEQ ID NO: 20781 - protein, 314 aa, Homo sapiens
LTRNMDRLLRLGGGMPGLGQGPPTDAPAVDTAEQVYISSLALLKMLKHGRAGVPMEVMGLMLGEFVDDYTVRVIDVFAMPQSGTGVSVEAVDPVFQAKMLDMLKQTGRPEMVVGWYHSHPGFGCWLSGVDINTQQSFEALSERAVAVVVDPIQSVKGKVVIDAFRLINANMMVLGHEPRQTTSNLGHLNKPSIQALIHGLNRHYYSITINYRKNELEQKMLLNLHKKSWMEGLTLQDYSEHCKHNESVVKEMLELAKNYNKAVEEEDKMTPEQLAIKNVGKQDPKRHLEEHVDVLMTSNIVQCLAAMLDTVVFK

SEQ ID NO: 20782 - protein, 121 aa, Homo sapiens
LLGLQTPWKVLLGLLGAAALVTIITVPVVLLNKGTDDATADSRKTYTLTDYLKNTYRLKLYSLRWISDHEYLYKQENNILVFNAEYGNSSVFLENSTFHMAKWIFLSFLKCSLPWLLFSLL

SEQ ID NO: 20783 - protein, 90 aa, Homo sapiens
LLGAAALVTIITVPVVLLNKGTDDATADSRKTYTLTDYLKNTYRLKLYSLRWISDHEYLYKQENNILVFNAEYGNSSVFLENSTFVCLIT

SEQ ID NO: 20784 - protein, 319 aa, Homo sapiens
LSCSSFDYVDMNKHFNPNSPLKIAQRCPGIPISTLHDGRTDQEIKILEENKELENALKNIQLPKEEIKKLEVDEITLWYKMILPPQFDRSKKYPLLIQVYGGPCSQSVRSVFAVNWISYLASKEGMVIALVDGRGTAFQGDKLLYAVYRKLGVYEVEDQITAVRKFIEMGFIDEKRIAIWGWSYGGYVSSLALASGTGLFKCGIAVAPVSSWEYYASVYTERFMGLPTKDDNLEHYKNSTVMARAEYFRNVDYLLIHGTADDNVHFQNSAQIAKALVNAQVDFQAMWYSDQNHGLSGLSTNHLYTHMTHFLKQCFSLSD

SEQ ID NO: 20785 - protein, 225 aa, Homo sapiens
LVVEDPRGASWWSRGSNFGNFSIQVPGMQMGQPVPETGPAILLDGYSGPAYSDTYSSAGDSVYTYFSAVAGQDGEVDAEELQRCLTQSGINGTYSPFSLETCRIMIAMLDRDHTGKMGFNAFKELWAALNAWKENFMTVDQDGSGTVEHHELRQAIGLMGYRLSPQTLTTIVKRYSKNGRIFFDDYVACCVKLRALTDFFRKRDHLQQGSANFIYDDFLQGTMAI

SEQ ID NO: 20786 - protein, 1166 aa, Homo sapiens
MCGRAAEAAASSRTPGREMGQAVTRRLGAGARAAPRRAMDGRTPRPQDAPARRKPKAKAPLPPAETKYTDVSSAADSVESTAFIMEQKENMIDKDVELSVVLPGDIIKSTTVHGSKPMMDLLIFLCAQYHLNPSSYTIDLLSAEQNHIKFKPNTPIGMLEVEKVILKPKMLDKKKPTPIIPEKTVRVVINFKKTQKTIVRVSPHASLQELAPIICSKCEFDPLHTLLLKDYQSQEPLDLTKSLNDLGLRELYAMDVNRESCQISQNLDIMKEKENKGFFSFFQRSKKKRDQTASAPATPLVNKHRPTFTRSNTISKPYISNTLPSDAPKKRRAPLPPMPASQSVPQDLAHIQERPASCIVKSMSVDETDKSPCEAGRVRAGSLQLSSMSAGNSSLRRTKRKAPSPPSKIPPHQSDENSRVTALQPVDGVPPDSASEANSPEELSSPAGISSDYSLEEIDEKEELSEVPKVEAENISPKSQDIPFVSTDIINTLKNDPDSALGNGSGEFSQNSMEEKQETKSTDGQEPHSVVYDTSNGKKVVDSIRNLKSLGPNQENVVQNEIIVYPENTEDNMKNGVKKTEINVEGVAKNNNIDMEVERPSNSEAHETDTAISYKENHLAASSVPDQKLNQPSAEKTKDAAIQTTPSCNSFDGKHQDHNLSDSKVEECVQTSNNNISTQHSCLSSQDSVNTSREFRSQGTLIIHSEDPLTVKDPICAHGNDDLLPPVDRIDKNSTASYLKNYPLYRQDYNPKPKPSNEITREYIPKIGMTTYKIVPPKSLEISKDWQSETIEYKDDQDMHALGKKHTHENVKETAIQTEDSAISESPEEPLPNLKPKPNLRTEHQVPSSVSSPDDAMVSPLKPAPKMTRDTGTAPFAPNLEEINNILESKFKSRASNAQAKPSSFFLQMQKRVSGHYVTSAAAKSVHAAPNPAPKELTNKEAERDMLPSPEQTLSPLSKMPHSVPQPLVEKTDDDVIGQAPAEASPPPIAPKPVTIPASQVSTQNLKTLKTFGAPRPYSSSGPSPFALAVVKRSQSFSKERTESPSASALVQPPANTEEGKTHSVNKFVDIPQLGVSDKENNSAHNEQNSQIPTPTDGPSFTVMRQSSLTFQSSDPEQMRQSLLTAIRSGEAAAKLKRVTIPSNTISVNGRSRLSHSMSPDAQDGH

SEQ ID NO: 20787 - protein, 1212 aa, Homo sapiens
MPPSWSPLMCGRAAEAAASSRTPGREMGQAVTRRLGAGARAAPRRAMDGRTPRPQDAPARRKPKAKAPLPPAETKYTDVSSAADSVESTAFIMEQKENMIDKDVELSVVLPGDIIKSTTVHGSKPMMDLLIFLCAQYHLNPSSYTIDLLSAEQNHIKFKPNTPIGMLEVEKVILKPKMLDKKKPTPIIPEKTVRVVINFKKTQKTIVRVSPHASLQELAPIICSKCEFDPLHTLLLKDYQSQEPLDLTKSLNDLGLRELYAMDVNRESCQISQNLDIMKEKENKGFFSFFQRSKKKRDQTASAPATPLVNKHRPTFTRSNTISKPYISNTLPSDAPKKRRAPLPPMPASQSVPQDLAHIQERPASCIVKSMSVDETDKSPCEAGRVRAGSLQLSSMSAGNSSLRRTKRKAPSPPSKIPPHQSDENSRVTALQPVDGVPPDSASEANSPEELSSPETFHPGLSSQEQCTAPKLMEETSVFECPGTPEAAITSLTSGISSDYSLEEIDEKEELSEVPKVEAENISPKSQDIPFVSTDIINTLKNDPDSALGNGSGEFSQNSMEEKQETKSTDGQEPHSVVYDTSNGKKVVDSIRNLKSLGPNQENVQNEIIVYPENTEDNMKNGVKKTEINVEGVAKNNNIDMEVERPSNSEAHETDTAISYKENHLAASSVPDQKLNQPSAEKTKDAAIQTTPSCNSFDGKHQDHNLSDSKVEECVQTSNNNISTQHSCLSSQDSVNTSREFRSQGTLIIHSEDPLTVKDPICAHGNDDLLPPVDRIDKNSTASYLKNYPLYRQDYNPKPKPSNEITREYIPKIGMTTYKIVPPKSLEISKDWQSETIEYKDDQDMHALGKKHTHENVKETAIQTEDSAISESPEEPLPNLKPKPNLRTEHQVPSSVSSPDDAMVSPLKPAPKMTRDTGTAPFAPNLEEINNILESKFKSRASNAQAKPSSFFLQMQKRVSGHYVTSAAAKSVHAAPNPAPKELTNKEAERDMLPSPEQTLSPLSKMPHSVPQPLVEKTDDDVIGQAPAEASPPPIAPKPVTIPASQVSTQNLKTLKTFGAPRPYSSSGPSPFALAVVKRSQSFSKERTESPSASALVQPPANTEEGKTHSVNKFVDIPQLGVSDKENNSAHNEQNSQIPTPTDGPSFTVMRQSSLTFQSSDPEQMRQSLLTAIRSGEAAAKLKRVTIPSNTISVNGRSRLSHSMSPDAQDGH

SEQ ID NO: 20788 - protein, 19 aa, Homo sapiens
VEAHPGGGPAGAGAARAGS

SEQ ID NO: 20789 - protein, 16 aa, Homo sapiens
LLSSRLWVMLFLTADG

SEQ ID NO: 20790 - protein, 30 aa, Homo sapiens
LQRSLVHVCMCAFVCVCVSVCSAPVRLQPL

SEQ ID NO: 20791 - protein, 42 aa, Homo sapiens
LESLHEIGTLATSDKEVRETAVSRKHFQETGIQAKLDIPKMA

SEQ ID NO: 20792 - protein, 3565 aa, Homo sapiens
LVGTGTCRKKDNLDPSMFPMQKGSLNLLRQKWESCDYQRSECHPRDSHCTIFQPQESKLLAPEGEVVSAPQSLDPTSLPYSTGEEMWSSKPEEKDSVDKSNNTREYGRPEVLKEDSLSSRRRIERFSIALDELRSVFEAPKSGNKPAEYGGKEVEIERSLCSPAFKSHPGSQLEDSVKDSDKKGKETSFDKMSPESGHSRIFEATAGPNKPESGFAEDSAARGEGVSDLHEVVSLKERMARYQAAVSRGDCRSFSANMMEESEMCAVPGGLAKVKKQFEDEITSSRNTFAQYQYQHQNRSEQEAIHSSQVGTSRSSQEMARNEQEGSKVQKIDVHGTEMVSHLEKHTEEVNQASQFHQYVQETVIDTPEDEEIPKVSTKLLKEQFEKSAQEKILYSDKEMTTPAKQIKTESEYEETFKPSSVVSTSSTSCVSTSQRKETSTTRYSDHSVTSSTLAQINATSSGMTEEFPPPPPDVLQTSVDVTAFSQSPELPSPPRRLPVPKDVYSKQRNLYELNRLYKHIHPELRKNLEKDYISEVSEIVSSQMNSGSSVSADVQQARYVFENTNDSSQKDLNSEREYLEWDEILKGEVQSIRWIFENQPLDSINNGSPDEGDISRGIADQEIIAGGDVKYTTWMFETQPIDTLGAYSSDTVENAEKIPELARGDVCTARWMFETRPLDSMNKMHQSQEESAVTISKDITGGDVKTVRYMFETQHLDQLGQLHSVDEVHLLQLRSELKEIKGNVKRSIKCFETQPLYVIRDGSGQMLEIKTVHREDVEKGDVRTARWMFETQPLDTINKDITEIKVVRGISMEENVKGGVSKAKWLFETQPLEKIKESEEVIIEKEKIIGTDVSRKCWMFETQPLDILKEVPDADSLQREEIIGGDVQTTKHLFETLPIEALKDSPDIGKLQKITASEEEKGDVRHQKWIFETQPLEDIRKDKKEYTRTVKLEEVDRGDVKNYTHIFESNNLIKFDASHKIEVEGVTRGAVELNKSLFETTPLYAIQDPLGKYHQVKTVQQEEIVRGDVRSCRWLFETRPIDQFDESIHKFQIIRGISAQEIQTGNVKSAKWLFETQPLDSIKYFSDVEETESKTEQTRDIVKGDVKTCKWLFETQPMESLYEKVSLMTSSEEIHKGDVKTCTWLFETQPLDTIKDDSETAVKLQTVKQEEIQGGDVRTACFLFETENLDSIQGEEVKEIKPVEMDIQAGDVSSMRYKFENQSLDSISSSSEEVLKKIKTLKTEDIQKGNVLNCRWLFENQPIDKIKESQEGDECVKTVTDIQGGDVRKGCFIFETFSLDEIKEESDYISTKKTITEEVIQGDVKSYRMLFETQPLYAIQDREGSYHEVTTVKKEEVIHGDVRGTRWLFETKPLDSINKSETVYVIKSVTQEDIQKGDVSSVRYRFETQPLDQISEESHNIMPSIDHIQGGNVKTSRQFFESENFDKNNYIRTVSVNEIQKGNVKTSTWLFETHTMDELRGEGLEYENIKTVTQEDVQKGDVKQAVWLFENRTFDSIMEAHKGITKMTKEEIPPSDVKTTTWLFETTPLHEFNETRVEKIEIIGKSIKETLEDLYSQKVIQAPGIIIEADEIGDVRMAKYKLMNQASPEIQKEEIIRADLRNIMVNLLSKRDCTEREILISEEEKGNVNLTKTQLLNRSTEFHAEKEEIVKGDVQQAIKNLFSEERSVKKGILIQEDEKGDINMTIYCLLHENDGDTIEREEVIGGDVKRTIHNLLSSTSNNKISERAKIDASERGNVQFFTTCIEAGALDYLKQLHTESNETLTAKKQEGEKEIIGGDVEGTKLLLKKRQSLVERTVSETDIIPGDVHNTVKVFMTEPQSTFGKIPKEEIIKGDLTSTLNSLSQAVNQKTVTKTEEIIKGNMLATLKSLKESSHRWKESKQPDAIPGDIEKAIECLEKATNTKTEILKKELLKDDLETSLRSLKEAQRSFKEVHKEGVIKKDAKAVMAGSSGEQKTDIHQVAVQRNKNSLLQPKPGPFEPAAKWQGGADTLSQTMGKSCHGNLVEERTEVNLPKAPKGTVKIVIDREQNNDALEKSLRRLSNSHHKSNVLESGDKTGVWTDTTGEQHLRDEYMSRQLTSTVSVKNNLTTKESDRAVRELKKDDVFNSIQSAGKTVGKQQTYELRNDHQKMEGFHIKSPKKTKNIKILTDTQSSKPSPTQHPVSMPVGGTYDLSGDFQKQTLLKQETKYSNKDIKKKNINLQPMWQLLPVEQDTSNVTEMKVSEKSHNTFKATNKKRETDVHLKSQDFLMKTNTSTGLKMAMERSLNPINFNPENNVKESECPLPPPSPPPPPPSNASSEIEFPLPPPPPLMMFPEKNGFLPSLSTEKIKAEFESFPGLPLPPPPVDEKSERESSSMFLPPPPPPTPSQKPAHLLSSSAPEKHSGDFMQQYSQKEASNSQNSQAKIITGKTGVLPPPTLPKPKLPKHIKDNKNDFSPKVELATSLSDMECKITTSKDQKKVMVMTSSEHTETKQNVISKSLDERKQLSIDSANCLSHTVPGTSAPRKKQIAPLIKSHSFPESSGQQNPKPYMRKFKTPLMIAEEKYRQQKEEIEKQKQESSYYNIVKTQSQNQHITEVEKEMPLQKTNEEVSLSGIDSECTVVQPSPGSQSNARILGVCSDNQLSTTSPETVAAKRLHHVLAASEDKDKMKKEVLQSSRDIMQSKSACEIKQSHQECSTQQTQQKKYLEQLHLPQSKPISPNFKVKTIKLPTLDHTLNETDHSYESHKQQSEIDVQTFTKKQYLKTKKTEASTECSHKQSLAERHYQLPKKEKRVTVQLPTESIQKNQEDKLKMVPRKQREFSGSDRGKLPGSEEKNQGPSMIGRKEERLITERKHEHLKNKSAPKVVKQKVIDAHLDSQTQNFQQTQIQTAESKAEHKKLPQPYNSLQEEKCLEVKGIQEKQVFSNTKDSKQEITQNKSFFSSVKESQRDDGKGALNIVEFLRKREELQQILSRVKQFEAEPNKSGLKTFQTLLNTIPGWLISEDKREYAVHIAMENNLEKVKEEITHIKTQAEDMLVSYENIIQTAMMSSKTGKPGNKPTSLDETSSKVSNVHVSNNKNSEQKENKIAKEKTVQHQVAAHHEATVRSHVKTHQEIKLDDSNIPPPSLKTRPPSPTFITIESTARRTENPTKNELSQSPKKDSYVEPPPRRPMSQKSEIHRANTSPSPPRSRSEQLVRLKDTTAKLSKGAIPCPAATPVPIVEKRSEIIMSPATLRRQIKIETRGRDSPPTITIPVNINHAASGSFRESVDAQEEIRKVEKRATYVHKDGLNSTDHMVPDTESYDAVEIIRKVAVPPRLSEHTQRYEAANRTVQMAENFVNDPENEINRWFREFEHGPVSEAKSNRRVYAKGETNHNIQQESRTFCKEEFGLTSLGNTSFTDFSCKHPRELREKIPVKQPRICSETRSLSEHFSGMDAFESQIVESKMKTSSSHSSEAGKSGCDFKHAPPTYEDVIAGHILDISDSPKEVRKNFQKTWQESGRVFKGLGYATADASATEMRTTFQEESAFISEAAAPRQGNMYTLSKDSLSNGVPSGRQAEFS

SEQ ID NO: 20793 - protein, 1357 aa, Homo sapiens
LEKVVKPFNSPQWSPLFPLASSNSYSQGRWLWVAITMSDSVILRSIKKFGEENDGFESDKSYNNDKKSRLQDEKKGDGVRVGFFQLFRFSSSTDIWLMFVGSLCAFLHGIAQPGVLLIFGTMTDVFIDYDVELQELQIPGKACVNNTIVWTNSSLNQNMTNGTRCGLLNIESEMIKFASYYAGIAVAVLITGYIQICFWVIAAARQIQKMRKFYFRRIMRMEIGWFDCNSVGELNTRFSDDINKINDAIADQMALFIQRMTSTICGFLLGFFRGWKLTLVIISVSPLIGIGAATIGLSVSKFTDYELKAYAKAGVVADEVISSMRTVAAFGGEKREVERYEKNLVFAQRWGIRKGIVMGFFTGFVWCLIFLCYALAFWYGSTLVLDEGEYTPGTLVQIFLSVIVGALNLGNASPCLEAFATGRAAATSIFETIDRKPIIDCMSEDGYKLDRIKGEIEFHNVTFHYPSRPEVKILNDLNMVIKPGEMTALVGPSGAGKSTALQLIQRFYDPCEGMVTVDGHDIRSLNIQWLRDQIGIVEQEPVLFSTTIAENIRYGREDATMEDIVQAAKEANAYNFIMDLPQQFDTLVGEGGGQMSGGQKQRVAIARALIRNPKILLLDMATSALDNESEAMVQEVLSKIQHGHTIISVAHRLSTVRAADTIIGFEHGTAVERGTHEELLERKGVYFTLVTLQSQGNQALNEEDIKDATEDDMLARTFSRGSYQDSLRASIRQRSKSQLSYLVHEPPLAVVDHKSTYEEDRKDKDIPVQEEVEPAPVRRILKFSAPEWPYMLVGSVGAAVNGTVTPLYAFLFSQILGTFSIPDKEEQRSQINGVCLLFVAMGCVSLFTQFLQGYAFAKSGELLTKRLRKFGFRAMLGQDIAWFDDLRNSPGALTTRLATDASQVQGAAGSQIGMIVNSFTNVTVAMIIAFSFSWKLSLVILCFFPFLALSGATQTRMLTGFASRDKQALEMVGQITNEALSNIRTVAGIGKERRFIEALETELEKPFKTAIQKANIYGFCFAFAQCIMFIANSASYRYGGYLISNEGLHFSYVFRVISAVVLSATALGRAFSYTPSYAKAKISAARFFQLLDRQPPISVYNTAGEKWDNFQGKIDFVDCKFTYPSRPDSQVLNGLSVSISPGQTLAFVGSSGCGKSTSIQLLERFYDPDQGKVMIDGHDSKKVNVQFLRSNIGIVSQEPVLFACSIMDNIKYGDNTKEIPMERVIAAAKQAQLHDFVMSLPEKYETNVGSQGSQLSRGEKQRIAIARAIVRDPKILLLDEATSALDTESEKTVQVALDKAREGRTCIVIAHRLSTIQNADIIAVMAQGVVIEKGTHEELMAQKGAYYKLVTTGSPIS

SEQ ID NO: 20794 - protein, 4698 aa, Homo sapiens
LATRSWRRCRPKGAFASRGAAGAVCYARPPPGEGTARPGTVAEMDRGPAAVACTLLLALVACLAPASGQECDSAHFRCGSGHCIPADWRCDGTKDCSDDADEIGCAVVTCQQGYFKCQSEGQCIPNSWVCDQDQDCDDGSDERQDCSQSTCSSHQITCSNGQCIPSEYRCDHVRDCPDGADENDCQYPTCEQLTCDNGACYNTSQKCDWKVDCRDSSDEINCTEICLHNEFSCGNGECIPRAYVCDHDNDCQDGSDEHACNYPTCGGYQFTCPSGRCIYQNWVCDGEDDCKDNGDEDGCESGPHDVHKCSPREWSCPESGRCISIYKVCDGILDCPGREDENNTSTGKYCSMTLCSALNCQYQCHETPYGGACFCPPGYIINHNDSRTCVEFDDCQIWGICDQKCESRPGRHLCHCEEGYILERGQYCKANDSFGEASIIFSNGRDLLIGDIHGRSFRILVESQNRGVAVGVAFHYHLQRVFWTDTVQNKVFSVDINGLNIQEVLNVSVETPENLAVDWVNNKIYLVETKVNRIDMVNLDGSYRVTLITENLGHPRGIAVDPTVGYLFFSDWESLSGEPKLERAFMDGSNRKDLVKTKLGWPAGVTLDMISKRVYWVDSRFDYIETVTYDGIQRKTVVHGGSLIPHPFGVSLFEGQVFFTDWTKMAVLKANKFTETNPQVYYQASLRPYGVTVYHSLRQPYATNPCKDNNGGCEQVCVLSHRTDNDGLGFRCKCTFGFQLDTDERHCIAVQNFLIFSSQVAIRGIPFTLSTQEDVMVPVSGNPSFFVGIDFDAQDSTIFFSDMSKHMIFKQKIDGTGREILAANRVENVESLAFDWISKNLYWTDSHYKSISVMRLADKTRRTVVQYLNNPRSVVVHPFAGYLFFTDWFRPAKIMRAWSDGSHLLPVINTTLGWPNGLAIDWAASRLYWVDAYFDKIEHSTFDGLDRRRLGHIEQMTHPFGLAIFGEHLFFTDWRLGAIIRVRKADGGEMTVIRSGIAYILHLKSYDVNIQTGSNACNQPTHPNGDCSHFCFPVPNFQRVCGCPYGMRLASNHLTCEGDPTNEPPTEQCGLFSFPCKNGRCVPNYYLCDGVDDCHDNSDEQLCGTLNNTCSSSAFTCGHGECIPAHWRCDKRNDCVDGSDEHNCPTHAPASCLDTQYTCDNHQCISKNWVCDTDNDCGDGSDEKNCNSTETCQPSQFNCPNHRCIDLSFVCDGDKDCVDGSDEVGCVLNCTASQFKCASGDKCIGVTNRCDGVFDCSDNSDEAGCPTRPPGMCHSDEFQCQEDGICIPNFWECDGHPDCLYGSDEHNACVPKTCPSSYFHCDNGNCIHRAWLCDRDNDCGDMSDEKDCPTQPFRCPSWQWQCLGHNICVNLSVVCDGIFDCPNGTDESPLCNGNSCSDFNGGCTHECVQEPFGAKCLCPLGFLLANDSKTCEDIDECDILGSCSQHCYNMRGSFRCSCDTGYMLESDGRTCKVTASESLLLLVASQNKIIADSVTSQVHNIYSLVENGSYIVAVDFDSISGRIFWSDATQGKTWSAFQNGTDRRVVFDSSIILTETIAIDWVGRNLYWTDYALETIEVSKIDGSHRTVLISKNLTNPRGLALDPRMNEHLLFWSDWGHHPRIERASMDGSMRTVIVQDKIFWPCGLTIDYPNRLLYFMDSYLDYMDFCDYNGHHRRQVIASDLIIRHPYALTLFEDSVYWTDRATRRVMRANKWHGGNQSVVMYNIQWPLGIVAVHPSKQPNSVNPCAFSRCSHLCLLSSQGPHFYSCVCPSGWSLSPDLLNCLRDDQPFLITVRQHIIFGISLNPEVKSNDAMVPIAGIQNGLDVEFDDAEQYIYWVENPGEIHRVKTDGTNRTVFASISMVGPSMNLALDWISRNLYSTNPRTQSIEVLTLHGDIRYRKTLIANDGTALGVGFPIGITVDPARGKLYWSDQGTDSGVPAKIASANMDGTSVKTLFTGNLEHLECVTLDIEEQKLYWAVTGRGVIERGNVDGTDRMILVHQLSHPWGIAVHDSFLYYTDEQYEVIERVDKATGANKIVLRDNVPNLRGLQVYHRRNAAESSNGCSNNMNACQQICLPVPGGLFSCACATGFKLNPDNRSCSPYNSFIVVSMLSAIRGFSLELSDHSETMVPVAGQGRNALHVDVDVSSGFIYWCDFSSSVASDNAIRRIKPDGSSLMNIVTHGIGENGVRGIAVDWVAGNLYFTNAFVSETLIEVLRINTTYRRVLLKVTVDMPRHIVVDPKNRYLFWADYGQRPKIERSFLDCTNRTVLVSEGIVTPRGLAVDRSDGYVYWVDDSLDIIARIRINGENSEVIRYGSRYPTPYGITVFENSIIWVDRNLKKIFQASKEPENTEPPTVIRDNINWLRDVTIFDKQVQPRSPAEVNNNPCLENNGGCSHLCFALPGLHTPKCDCAFGTLQSDGKNCAISTENFLIFALSNSLRSLHLDPENHSPPFQTINVERTVMSLDYDSVSDRIYFTQNLASGVGQISYATLSSGIHTPTVIASGIGTADGIAFDWITRRIYYSDYLNQMINSMAEDGSNRTVIARVPKPRAIVLDPCQGYLYWADWDTHAKIERATLGGNFRVPIVNSSLVMPSGLTLDYEEDLLYWVDASLQRIERSTLTGVDREVIVNAAVHAFGLTLYGQYIYWTDLYTQRIYRANKYDGSGQIAMTTNLLSQPRGINTVVKNQKQQCNNPCEQFNGGCSHICAPGPNGAECQCPHEGNWYLANNRKHCIVDNGERCGASSFTCSNGRCISEEWKCDNDNDCGDGSDEMESVCALHTCSPTAFTCANGRCVQYSYRCDYYNDCGDGSDEAGCLFRDCNATTEFMCNNRRCIPREFICNGVDNCHDNNTSDEKNCPDRTCQSGYTKCHNSNICIPRVYLCDGDNDCGDNSDENPTYCTTHTCSSSEFQCASGRCIPQHWYCDQETDCFDASDEPASCGHSERTCLADEFKCDGGRCIPSEWICDGDNDCGDMSDEDKRHQCQNQNCSDSEFLCVNDRPPDRRCIPQSWVCDGDVDCTDGYDENQNCTRRTCSENEFTCGYGLCIPKIFRCDRHNDCGDYSDERGCLYQTCQQNQFTCQNGRCISKTFVCDEDNDCGDGSDELMHLCHTPEPTCPPHEFKCDNGRCIEMMKLCNHLDDCLDNSDEKGCGINECHDPSISGCDHNCTDTLTSFYCSCRPGYKLMSDKRTCVDIDECTEMPFVCSQKCENVIGSYICKCAPGYLREPDGKTCRQNSNIEPYLIFSNRYYLRNLTIDGYFYSLILEGLDNVVALDFDRVEKRLYWIDTQRQVIERMFLNKTNKETIINHRLPAAESLAVDWVSRKLYWLDARLDGLFVSDLNGGHRRMLAQHCVDANNTFCFDNPRGLALHPQYGYLYWADWGHRAYIGRVGMDGTNKSVIISTKLEWPNGITIDYTNDLLYWADAHLGYIEYSDLEGHHRHTVYDGALPHPFAITIFEDTIYWTDWNTRTVEKGNKYDGSNRQTLVNTTHRPFDIHVYHPYRQPIVSNPCGTNNGGCSHLCLIKPGGKGFTCECPDDFRTLQLSGSTYCMPMCSSTQFLCANNEKCIPIWWKCDGQKDCSDGSDELALCPQRFCRLGQFQCSDGNCTSPQTLCNAHQNCPDGSDEDRLLCENHHCDSNEWQCANKRCIPESWQCDTFNDCEDNSDEDSSHCASRTCRPGQFRCANGRCIPQAWKCDVDNDCGDHSDEPIEECMSSAHLCDNFTEFSCKTNYRCIPKWAVCNGVDDCRDNSDEQGCEERTCHPVGDFRCKNHHCIPLRWQCDGQNDCGDNSDEENCAPRECTESEFRCVNQQCIPSRWICDHYNDCGDNSDERDCEMRTCHPEYFQCTSGHCVHSELKCDGSADCLDASDEADCPTRFPDGAYCQATMFECKNHVCIPPYWKCDGDDDCGDGSDEELHLCLDVPCNSPNRFRCDNNRCIYSHEVCNGVDDCGDGTDETEEHCRKPTPKPCTEYEYKCGNGHCIPHDNVCDDADDCGDWSDELGCNKGKERTCAENICEQNCTQLNEGGFICSCTAGFETNVFDRTSCLDINECEQFGTCPQHCRNTKGSYECVCADGFTSMSDRPGKRCAAEGSSPLLLLPDNVRIRKYNLSSERFSEYLQDEEYIQAVDYDWDPKDIGLSVVYYTVRGEGSRFGAIKRAYIPNFESGRNNLVQEVDLKLKYVMQPDGIAVDWVGRHIYWSDVKNKRIEVAKLDGRYRKWLISTDLDQPAAIAVNPKLGLMFWTDWGKEPKIESAWMNGEDRNILVFEDLGWPTGLSIDYLNNDRIYWSDFKEDVIETIKYDGTDRRVIAKEAMNPYSLDIFEDQLYWISKEKGEVWKQNKFGQGKKEKTLVVNPWLTQVRIFHQLRYNKSVPNLCKQICSHLCLLRPGGYSCACPQGSSFIEGSTTECDAAIELPINLPPPCRCMHGGNCYFDETDLPKCKCPSGYTGKYCEMAFSKGISPGTTAVAVLLTILLIVVIGALAIAGFFHYRRTGSLLPALPKLPSLSSLVKPSENGNGVTFRSGADLNMDIGVSGFGPETAIDRSMAMSEDFVMEMGKQPIIFENPMYSARDSAVKVVQPIQVTVSENVDNKNYGSPINPSEIVPETNPTSPAADGTQVTKWNLFKRKSKQTTNFENPIYAQMENEQKESVAATPPPSPSLPAKPKPPSRRDPTPTYSATEDTFKDTANLVKEDSEV

SEQ ID NO: 20795 - protein, 452 aa, Homo sapiens
LPGRSPSSWSALGWPAALGGGVVAVAVCEPVARLLWAGTLKIAAMAENGDNEKMAALEAKICHQIEYYFGDFNLPRDKFLKEQIKLDEGWVPLEIMIKFNRLNRLTTDFNVIVEALSKSKAELMEISEDKTKIRRSPSKPLPEVTDEYKNDVKNRSVYIKGFPTDATLDDIKEWLEDKGQVLNIQMRRTLHKAFKGSIFVVFDSIESAKKFVETPGQKYKETDLLILFKDDYFAKKNEERKQNKVEAKLRAKQEQEAKQKLEEDAEMKSLEEKIGCLLKFSGDLDDQTCREDLHILFSNHGEIKWIDFVRGAKEGIILFKEKAKEALGKAKDANNGNLQLRNKEVTWEVLEGEVEKEALKKIIEDQQESLNKWKSKGRRFKGKGKGNKAAQPGSGKGKVQFQGKKTKFASDDEHDEHDENGATGPVKRAREETDKEEPASKQQKTENGAGDQ

SEQ ID NO: 20796 - protein, 158 aa, Homo sapiens
LGGGVVAVAVCEPVARLLWAGTLKIAAMAENGDNEKMAALEAKICHQIEYYFGDFNLPRDKFLKEQIKLDEGWVPLEIMIKFNRLNRLTTDFNVIVEALSKSKAELMEISEDKTKIRRSPSKPLPEVTDEYKNDVKNRSVYIVSGPVMHLNILHLFRK

SEQ ID NO: 20797 - protein, 161 aa, Homo sapiens
LGGGVVAVAVCEPVARLLWAGTLKIAAMAENGDNEKMAALEAKICHQIEYYFGDFNLPRDKFLKEQIKLDEGWVPLEIMIKFNRLNRLTTDFNVIVEALSKSKAELMEISEDKTKIRRSPSKPLPEVTDEYKNDVKNRSVYISHPVAHVGVQWCDHGPLQS

SEQ ID NO: 20798 - protein, 20 aa, Homo sapiens
VESLLLLFVSLWRGFCGPEP

SEQ ID NO: 20799 - protein, 112 aa, Homo sapiens
MVQCDVCLLSNRMSKSFDTVIMNPPFGTKNNKGTDMAFLKTALEMARTAVYSLHKSSTREHVQKKAAEWKIKIDIIAGGFCFTELRYDLPASYKFHKKKSVDIEVDLIRFSF

SEQ ID NO: 20800 - protein, 943 aa, Homo sapiens
MVLYLIELGLENSAEEESDEEASVGGPERCHDSWFPGSNLVSNMRHFINYVRVRVPETAPEVKRDSPASTSSDNLGSLQNSGTAQVFSLVAERRKKFQEIINRSSSEANQVVRPKTSSKWSAPGSAPQLTTAILEIKESILSLLIKLHHKLSGKQNSYYPPWLDDIEILIQPEIPKYSHGDGITAVERILLKAASQSRMNKRIIEEICRKVTPPVPPKKVTAAEKKTLDKEERRQKARERQQKLLAEFASRQKSFMETAMDVDSPENDIPMEITTAEPQVSEAVYDCVICGQSGPSSEDRPTGLVVLLQASSVLGQCRDNVEPKKLPISEEEQIYPWDTCAAVHDVRLSLLQRYFKDSSCLLAVSIGWEGGVYVQTCGHTLHIDCHKSYMESLRNDQVLQGFSVDKGEFTCPLCRQFANSVLPCYPGSNVENNPWQRPSNKSIQDLIKEVEELQGRPGAFPVSISSETNLSKEMESVMKDIKNTTQKKYRDYSKTPGSPDNDFLFMYSVARTNLELELIHRGGNLCSGGASTAGKRSCLNQLFHVLALHMRLYSIDSEYNPWRKLTQLEEMNPQLGYEEQQPEVPILYHDVTSLLLIQILMMPQPLRKDHFTCIVKVLFTLLYTQALAALSVKCSEEDRSAWKHAGALKKSTCDAEKSYEVLLSFVISELFKGKLYHEEGTQECAMVNPIAWSPESMEKCLQDFCLPFLRITSLLQHHLFGEDLPSCQEEEEFSVLASCLGLLPTFYQTEHPFISASCLDWPVPAFDIITQWCFEIKSFTERHAEQGKALLIQESKWKLPHLLQLPENYNTIFQYYHRKTCSVCTKVPKDPAVCLVCGTFVCLKGLCCKQQSYCECVLHSQNCGAGTGIFLLINASVIIIIRGHRFCLWGSVYLDAHGEEDRDLRRGKPLYICKERYKVLEQQWISHTFDHINKRWGPHYNGL

SEQ ID NO: 20801 - protein, 327 aa, Homo sapiens
MSGDEMIFDPTMSKKKKKKKKPFMLDEEGDTQTEETRPSETKEVEPEPTEDKDLEADEEDTRKKDASDDLDDLNFFNQKKKKKKTKKIFDIDEAEEGVKDLKIESDVQEPTEPEDDLDIMLGNKKKKKKNVKFPDEDEALEDEDNKKDDGISFSNQTGPAWAGSERDYTYEELLNRVFNIMREKNPDMVAGEKRKFVMKPPQVVRVGTKKTSFVNFTDICKLLHRQPKHLLAFLLAELGTSGSIDGNNQLVIKGRFQQKQIENVLRRYIKEYVTCHTCRSPDTILQKDMRLYFLQCETCHSRCSVAIIKIGFQAVMGKRAQLRAKAN

SEQ ID NO: 20802 - protein, 69 aa, Homo sapiens
LHLLEVSCASFRANSVTWNPHKMMGVLLQCSAILVKEKVCTPSKATLGPVRSLESTKRHTWGLFAVLVG

SEQ ID NO: 20803 - protein, 551 aa, Homo sapiens
LFSREHDAVPPSPPPALPLRPPGPRALGPLPVARGRWRCLRRRSGPGCSRDDLPAGCAARLSGGSECHVPSATRRIRAGGALGAGAARSPARPHRSPAAMGSSQSVEIPGGGTEGYHVLRVQENSPGHRAGLEPFFDFIVSINGSRLNKDNDTLKDLLKANVEKPVKMLIYSSKTLELRETSVTPSNLWGGQGLLGVSIRFCSFDGANENVWHVLEVESNSPAALAGLRPHSDYIIGADTVMNESEDLFSLIETHEAKPLKLYVYNTDTDNCREVIITPNSAWGGEGSLGCGIGYGYLHRIPTRPFEEGKKISLPGQMAGTPITPLKDGFTEVQLSSVNPPSLSPPGTTGIEQSLTGLSISSTPPAVSSVLSTGVPTVPLLPPQVNQSLTSVPPMNPATTLPGLMPLPAGLPNLPNLNLNLPAPHIMPGVGLPELVNPGLPPLPSMPPRNLPGIAPLPLPSEFLPSFPLVPESSSAASSGELLSSLPPTSNAPSDPATTTAKADAASSLTVDVTPPTAKAPTTVEDRVGDSTPVSEKPVSAAVDANASESP

SEQ ID NO: 20804 - protein, 102 aa, Homo sapiens
LGIFLILCFQRMQGVVNRLSKLLKPGGMLLFRDYGRYDKTQLRFKKGHCLSENFYVRGDGTRAYFFTKGEVHSMFCKASLDEKQNLVDRRLQVNRKKQVKMH

SEQ ID NO: 20805 - protein, 10 aa, Homo sapiens
MSGQLIPGHL

SEQ ID NO: 20806 - protein, 148 aa, Homo sapiens
MAEVEQKKKRTFRKFTYRGVDLDQLLDMSYEQLEQPMQLYSARQRRRLNRGLRRKQHSLLKRLRKAKKEAPPMEKQEVVKTHLRDMIILPEMVGSMVGVYNGKTFNQVEIKPEMIGHYLGEFSITYKPVKHGRPGIGATHSSRFIPLK

SEQ ID NO: 20807 - protein, 45 aa, Homo sapiens
LGFLRIRFSLLCIPYWPAPRMLAEASPQPQPFRIFPLHRGFAMKD

SEQ ID NO: 20808 - protein, 74 aa, Homo sapiens
LSVSCLLLLCLCAGKVQVLIRPLSSFCGLSKKPQGLSGPGPAGLTISGSWDTLPDHLCSWCGNLGALEGGGFIY

SEQ ID NO: 20809 - protein, 174 aa, Homo sapiens
LAVASLAGLGMRLARLLRGAALAGPGPGLRAAGFSRSFSSDSGSSPASERGVPGQVDFYARFSPSPLSMKQFLDFGSVNACEKTSFMFLRQELPVRLANIMKEISLLPDNLLRTPSVQLVQSWYIQSLQELLDFKDKSAEDAKAIYDFIVWWKRQRKSISSKTHWKHKSKLQCT

SEQ ID NO: 20810 - protein, 446 aa, Homo sapiens
LAVASLAGLGMRLARLLRGAALAGPGPGLRAAGFSRSFSSDSGSSPASERGVPGQVDFYARFSPSPLSMKQFLDFGSVNACEKTSFMFLRQELPVRLANIMKEISLLPDNLLRTPSVQLVQSWYIQSLQELLDFKDKSAEDAKAIYDFTDTVIRIRNRHNDVIPTMAQGVIEYKESFGVDPVTSQNVQYFLDRFYMSRISIRMLLNQHSLLFGGKGKGSPSHRKHIGSINPNCNVLEVIKDGYENARRLCDLYYINSPELELEELNAKSPGQPIQVVYVPSHLYHMVFELFKNAMRATMEHHANRGVYPPIQVHVTLGNEDLTVKMSDRGGGVPLRKIDRLFNYMYSTAPRPRVETSRAVPLAGFGYGLPISRLYAQYFQGDLKLYSLEGYGTDAVIYIKALSTDSIERLPVYNKAAWKHYNTNHEADDWCVPSREPKDMTTFRSA

SEQ ID NO: 20811 - protein, 466 aa, Homo sapiens
LAVASLAGLGMRLARLLRGAALAGPGPGLRAAGFSRSFSSDSGSSPASERGVPGQVDFYARFSPSPLSMKQFLDFGSVNACEKTSFMFLRQELPVRLANIMKEISLLPDNLLRTPSVQLVQSWYIQSLQELLDFKDKSAEDAKAIYERPRRTWLQVSSLCCMACKMIFTDTVIRIRNRHNDVIPTMAQGVIEYKESFGVDPVTSQNVQYFLDRFYMSRISIRMLLNQHSLLFGGKGKGSPSHRKHIGSINPNCNVLEVIKDGYENARRLCDLYYINSPELELEELNAKSPGQPIQVVYVPSHLYHMVFELFKNAMRATMEHHANRGVYPPIQVHVTLGNEDLTVKMSDRGGGVPLRKIDRLFNYMYSTAPRPRVETSRAVPLAGFGYGLPISRLYAQYFQGDLKLYSLEGYGTDAVIYIKALSTDSIERLPVYNKAAWKHYNTNHEADDWCVPSREPKDMTTFRSA

SEQ ID NO: 20812 - protein, 99 aa, Homo sapiens
LILRTKVLRMLKLFMTLLFGGKGKGSPSHRKHIGSINPNCNVLEVIKDGYENARRLCDLYYINSPELELEELNECNESHYGTPCQQRCLPPYSSSCHAG

SEQ ID NO: 20813 - protein, 854 aa, Homo sapiens
VVDLGEVSGKYRQYMAGLLAPPYGVMETGSNNDRIPDKENVPSEKILRAGKILRNAILSRAPHMIRDRKYHLKTYRQCCVGTELVDWMMQQTPCVHSRTQAVGMWQVLLEDGVLNHVDQEHHFQDKYLFYRFLDDEHEDAPLPTEEEKKECDEELQDTMLLLSQMGPDAHMRMILRKPPGQRTVDDLEIIYEELLHIKALSHLSTTVKRELAGVLIFESHAKGGTVLFNQGEEGTSWYIILKGSVNVVIYGKGVVCTLHEGDDFGKLALVNDAPRAASIVLREDNCHFLRVDKEDFNRILRDVEANTVRLKEHDQDVLVLEKVPAGNRASNQGNSQPQQKYTVMSGTPEKILEHFLETIRLEATLNEATDSVLNDFIMMHCVFMPNTQLCPALVAHYHAQPSQGTEQEKMDYALNNKRRVIRLVLQWAAMYGDLLQEDDVSMAFLEEFYVSVSDDARMIAALKEQLPELEKIVKQISEDAKAPQKKHKVLLQQFNTGDERAQKRQPIRGSDEVLFKVYCMDHTYTTIRVPVATSVKEVISAVADKLGSGEGLIIVKMSSGGEKVVLKPNDVSVFTTLTINGRLFACPREQFDSLTPLPEQEGPTVGTVGTFELMSSKDLAYQMTIYDWELFNCVHELELIYHTFGRHNFKKTTANLDLFLRRFNEIQFWVVTEICLCSQLSKRVQLLKKFIKIAAHCKEYKNLNSFFAIVMGLSNVAVSRLALTWEKLPSKFKKFYAEFESLMDPSRNHRAYRLTVAKLEPPLIPFMPLLIKDMTFTHEGNKTFIDNLVNFEKMRMIANTARTVRYYRSQPFNPDAAQANKNHQDVRSYVRQLNVIDNQRTLSQMSHRLEPRRP

SEQ ID NO: 20814 - protein, 872 aa, Homo sapiens
VVDLGEVSGKYRQYMAGLLAPPYGVMETGSNNDRIPDKENTPLIEPHVPLRPANTITKVPSEKILRAGKILRNAILSRAPHMIRDRKYHLKTYRQCCVGTELVDWMMQQTPCVHSRTQAVGMWQVLLEDGVLNHVDQEHHFQDKYLFYRFLDDEHEDAPLPTEEEKKECDEELQDTMLLLSQMGPDAHMRMILRKPPGQRTVDDLEIIYEELLHIKALSHLSTTVKRELAGVLIFESHAKGGTVLFNQGEEGTSWYIILKGSVNVVIYGKGVVCTLHEGDDFGKLALVNDAPRAASIVLREDNCHFLRVDKEDFNRILRDVEANTVRLKEHDQDVLVLEKVPAGNRASNQGNSQPQQKYTVMSGTPEKILEHFLETIRLEATLNEATDSVLNDFIMMHCVFMPNTQLCPALVAHYHAQPSQGTEQEKMDYALNNKRRVIRLVLQWAAMYGDLLQEDDVSMAFLEEFYVSVSDDARMIAALKEQLPELEKIVKQISEDAKAPQKKHKVLLQQFNTGDERAQKRQPIRGSDEVLFKVYCMDHTYTTIRVPVATSVKEVISAVADKLGSGEGLIIVKMSSGGEKVVLKPNDVSVFTTLTINGRLFACPREQFDSLTPLPEQEGPTVGTVGTFELMSSKDLAYQMTIYDWELFNCVHELELIYHTFGRHNFKKTTANLDLFLRRFNEIQFWVVTEICLCSQLSKRVQLLKKFIKIAAHCKEYKNLNSFFAIVMGLSNVAVSRLALTWEKLPSKFKKFYAEFESLMDPSRNHRAYRLTVAKLEPPLIPFMPLLIKDMTFTHEGNKTFIDNLVNFEKMRMIANTARTVRYYRSQPFNPDAAQANKNHQDVRSYVRQLNVIDNQRTLSQMSHRLEPRRP

SEQ ID NO: 20815 - protein, 846 aa, Homo sapiens
LSLLNFFLLFIPSVPQLLQKLAIPSLSLASEVVPSEKILRAGKILRNAILSRAPHMIRDRKYHLKTYRQCCVGTELVDWMMQQTPCVHSRTQAVGMWQVLLEDGVLNHVDQEHHFQDKYLFYRFLDDEHEDAPLPTEEEKKECDEELQDTMLLLSQMGPDAHMRMILRKPPGQRTVDDLEIIYEELLHIKALSHLSTTVKRELAGVLIFESHAKGGTVLFNQGEEGTSWYIILKGSVNVVIYGKGVVCTLHEGDDFGKLALVNDAPRAASIVLREDNCHFLRVDKEDFNRILRDVEANTVRLKEHDQDVLVLEKVPAGNRASNQGNSQPQQKYTVMSGTPEKILEHFLETIRLEATLNEATDSVLNDFIMMHCVFMPNTQLCPALVAHYHAQPSQGTEQEKMDYALNNKRRVIRLVLQWAAMYGDLLQEDDVSMAFLEEFYVSVSDDARMIAALKEQLPELEKIVKQISEDAKAPQKKHKVLLQQFNTGDERAQKRQPIRGSDEVLFKVYCMDHTYTTIRVPVATSVKEVISAVADKLGSGEGLIIVKMSSGGEKVVLKPNDVSVFTTLTINGRLFACPREQFDSLTPLPEQEGPTVGTVGTFELMSSKDLAYQMTIYDWELFNCVHELELIYHTFGRHNFKKTTANLDLFLRRFNEIQFWVVTEICLCSQLSKRVQLLKKFIKIAAHCKEYKNLNSFFAIVMGLSNVAVSRLALTWEKLPSKFKKFYAEFESLMDPSRNHRAYRLTVAKLEPPLIPFMPLLIKDMTFTHEGNKTFIDNLVNFEKMRMIANTARTVRYYRSQPFNPDAAQANKNHQDVRSYVRQLNVIDNQRTLSQMSHRLEPRRP

SEQ ID NO: 20816 - protein, 10 aa, Homo sapiens
LLLLLLLWDR

SEQ ID NO: 20817 - protein, 457 aa, Homo sapiens
LRAGAARRPARPFRRCRRRRACRSAEGTGLRSLLLPPRLQLPAGPFSRCRWDPVSSPRPSTMPPKKGGDGIKPPPIIGRFGTSLKIGIVGLPNVGKSTFFNVLTNSQASAENFPFCTIDPNESRVPVPDERFDFLCQYHKPASKIPAFLNVVDIAGLVKGAHNGQGLGNAFLSHISACDGIFHLTRAFEDDDITHVEGSVDPIRDIEIIHEELQLKDEEMIGPIIDKLEKVAVRGGDKKLKPEYDIMCKVKSWVIDQKKPVRFYHDWNDKEIEVLNKHLFLTSKPMVYLVNLSEKDYIRKKNKWLIKIKEWVDKYDPGALVIPFSGALELKLQELSAEERQKYLEANMTQSALPKIIKAGFAALQLEYFFTAGPDEVRAWTIRKGTKAPQAAGKIHTDFEKGFIMAEVMKYEDFKEEGSENAVKAAGKYRQQGRNYIVEDGDIIFFKFNTPQQPKKK

SEQ ID NO: 20818 - protein, 113 aa, Homo sapiens
VNHLYQFCVISFLLGIRLAILEIMDPDEQLETLHEALKLLPPAHCETLRYLMAHLKRVTLHEKENLMNAENLGIVFGPTLMRSPELDAMAALNDIRYQRLVVELLIKNEDILF

SEQ ID NO: 20819 - protein, 15 aa, Homo sapiens
MAHQLESILAMRKRM

SEQ ID NO: 20820 - protein, 213 aa, Homo sapiens
VSSLVHPKPRLLHPGAAARIRAGPRLRIESHSFDLCRSPCRRRLLGREEAGEEPTSPVTQYLQPRSPEECKMFACAKLACTPSLIRAGSRVAYRPISASVLSRPEASRTGEGSTVFNGAQNGVSQLIQREFQTSAISRDIDTAAKFIGAGAATVGVAGSGAGIGTVFGSLIIGYARNPSLKQQLFSYAILGFALSEAMGLFCLMVAFLILFAM

SEQ ID NO: 20821 - protein, 84 aa, Homo sapiens
LLSAGPLSLGLMTSLLCGTSRFLPTVNSGPPSDHCSLRTRPGLGRADPNKGKMVNANVPLQFYRQCAVVPPPPLRVLVGTRRGL

SEQ ID NO: 20822 - protein, 102 aa, Homo sapiens
LLSAGPLSLGLMTSLLCGTSRFLPTVNSGPPSDHCSLRTRPGLGRADPNKGKMGPGDPHEGALTFQKPRLTKRPRYLVCPTLDSNRRPQPLRNRRQLRGNQV

SEQ ID NO: 20823 - protein, 85 aa, Homo sapiens
LLSAGPLSLGLMTSLLCGTSRFLPTVNSGPPSDHCSLRTRPGLGRADPNKGKMRKSSLIHQPAIGSLQRVAERRGALTLSTKRWN

SEQ ID NO: 20824 - protein, 123 aa, Homo sapiens
LRSPPRPRLPPGARPGPTAAHSVRIAATSGAGGEPGEGGPGRGPGRRVPRRRRHRLPGAAGLLEVTAAARFWRGFFTNMSGSLRPRVSAAGQRLVDYSRRPDRPPPVARQPSDQGADSMSGPW

SEQ ID NO: 20825 - protein, 13 aa, Homo sapiens
LECFLHTGKRAAL

SEQ ID NO: 20826 - protein, 114 aa, Homo sapiens [sequence omitted]

SEQ ID NO: 20827 - protein, 91 aa, Homo sapiens
LLLRMGLTLPSPRLECGGTIMAHCSLELLSSSHPPTSAFRVAGTAGVSHHAWLICLFKFFIETESQLYCPGWKRTSFPPSDNLFQTSQLKN

SEQ ID NO: 20828 - protein, 109 aa, Homo sapiens
LFCLVLFFRSMLMTACDLGAVTKPWEISRQAIFDRNRKDELPRLQLEWIDSICMPLYQALVKVNVKLKPMLDSVATNRSKWEELHQKRLLASTASSSPASVMVAKEDRN

SEQ ID NO: 20829 - protein, 16 aa, Homo sapiens
LFYIPTSNVRDGVSPR

SEQ ID NO: 20830 - protein, 64 aa, Homo sapiens
LLLLTLLKWVTRMELRCCLQEKLTTGFYFSNLIGGYAGTVSRLSIFNPVSKNFFTTITFRFLPL

SEQ ID NO: 20831 - protein, 74 aa, Homo sapiens
LDFVFPSMSLTLDILHDKWVTRMELRCCLQEKLTTGFYFSNLIGGYAGTVSRLSIFNPVSKNFFTTITFRFLPL

SEQ ID NO: 20832 - protein, 71 aa, Homo sapiens
LSFAKVSDHGTKSWQWVTRMELRCCLQEKLTTGFYFSNLIGGYAGTVSRLSIFNPVSKNFFTTITFRFLPL

SEQ ID NO: 20833 - protein, 93 aa, Homo sapiens
LQKFLTMEPSHGRYWTTNVHNMKPKCGTHSSIIFLFQWVTRMELRCCLQEKLTTGFYFSNLIGGYAGTVSRLSIFNPVSKNFFTTITFRFLPL

SEQ ID NO: 20834 - protein, 91 aa, Homo sapiens
LIVVVPLLQEMKLMHQMPLWIQNIKMSSLFMQERLLFLKPTSVANLYLMLFGQKMEKNLKKQLLEWKLNLLFRKQLLLSKTVYGLMEDNIF

SEQ ID NO: 20835 - protein, 109 aa, Homo sapiens
MSSGLWLKMLLELVHQVLPVHFTRLVTLCLNLDHQVTHVFWIQADHPFQSLGINLSMMVVQKSLGIWLRLPCQRKMNGRLSLHQQDSRQLRILSLASQRIRNIRSASMP

SEQ ID NO: 20836 - protein, 12 aa, Homo sapiens
MKLMCWKMIALI

SEQ ID NO: 20837 - protein, 38 aa, Homo sapiens
LMERNIFLLLMILNLMMKGSILLRWRARRPQLGCLSQV

SEQ ID NO: 20838 - protein, 25 aa, Homo sapiens
VLAKVTALYPSMFLIGLCLLPSSAS

SEQ ID NO: 20839 - protein, 24 aa, Homo sapiens
MTLLSTLLPLPAVLLHTAFTCISL

SEQ ID NO: 20840 - protein, 214 aa, Homo sapiens
VNFWMLCLRLTSDWAMMLKKRKFCWKSIENLLMLHRCKTGYLPFPQAQCLNSFLHDYNVTLPSKYKKSTYDYGRQLLQATVVLCQSLRCTSRSSGDTLPRLNRVWKQFTIASEERVHRLEMAIAFHSNAEKILQDCPEEPEAINDEEQFDEIEAVGKSLLDRLTVPVVYPDGTEQYFGSPSDMASTAENIRDRMKLVNLKRQQLRHPEMVTTES

SEQ ID NO: 20841 - protein, 422 aa, Homo sapiens
LCIILVTYWKFCLSNLVALEAGESPARMWSGLPSRGSTCHTTTLPALVRTPTLMMQPSLDIKPFMSFPVDSSSAVGLFPNFNTMDPVQKAVINHTFGVSIPPKKKQVISCNVCQLRFNSDSQAEAHYKGSKHAKKVKALDATKNKPKMVPSKDSAKANPSCSITPITGNNSDKSEDKGKLKASSSSQPSSSESGSFLLKSGTTPLPPGAATSPSKSTNGAPGTVVESEEEKAKKLLYCSLCKVAVNSLSQLEAHNTGSKHKTMVEARNGAGPIKSYPRPGSRLKMQNGSKGSGLQNKTFHCEICDVHVNSEIQLKQHISSRRHKDRVAGKPLKPKYSPYNKLQRSPSILAAKLAFQKDMMKPLAPAFLSSPLAAAAAVSSALSLPPRPSASLFQAPAIPPALLRPGHGPIRATPASILFAPY

SEQ ID NO: 20842 - protein, 59 aa, Homo sapiens
LARNHFPFKCVLDEFNLPNYTKWALILFLFGELLKLANFVLIVYFLNMELSDGTGILRE

SEQ ID NO: 20843 - protein, 24 aa, Homo sapiens
LLSSYLTVTLYFELLGTPFGLRTQ

SEQ ID NO: 20844 - protein, 156 aa, Homo sapiens
LDKCWSQQIEKSTTVVTTQSTKVGDAEMTLTELRRTVQSLKMDLDSMRNLKASLENSLREVEARYTLQMEQLNRILLHLESEMAQSRAEGQHQIGEYEALLNIKVKLEAESATYHRLLDDDDFNLGDALDNSNSMQTIQRPPPAAKWCLRPMTPKF

SEQ ID NO: 20845 - protein, 230 aa, Homo sapiens
MSFTTRSIFSTNYLFLGSVQVSNYGARPASCMASVYAGAGGSGSRISVSRSTSFRGGMGSGDLAAGMAGGLAGMGGIQNKKETMQSLNDRLASYLDRVRSLETKNRKLESKIREHLEKKGLQVRDWSHYLKTIEDLRVQIFANTVDNAGIVLQIDNACLAADDFRVKYETELAMHPSVGSDIHGLHKVTDDQCHLAATGDRDGGSQGGAALHEEEPRRGSKRPTSPDCQL

SEQ ID NO: 20846 - protein, 317 aa, Homo sapiens
MRDSVTWRVKRDHSYNYPCRFLNVSMPMVLMANGAAINKDQYNIQAYPTTVVFNQSNIHEYEGHHSAEQILEFIEDLMNPSVVSLTPTTFNELVTQRKHNEVWMVDFYSPWCHPCQVLMPEWKRMARTLTGLINVGSIDCQQYHSFCAQENVQRYPEIRFFPPKSNKAYHYHSYNGWNRDAYSLRIWGLGFLPQVSTDLTPQTFSEKVLQGKNHWVIDFYAPWCGPCQNFAPEFELLARMIKGKVKAGKVDCQAYAQTCQKAGIRAYPTVKFYFYERAKRNFQEEQINTRDAKAIAALISEKLETLRNQGKRNKDEL

SEQ ID NO: 20847 - protein, 367 aa, Homo sapiens
VIAGGGEAPRSLCPLAAGEAETAERAFWRPLRGCTLPHPAGIMVCGSPGGMLLLRAGLLALAALCLLRVPGARAAACEPVRIPLCKSLPWNMTKMPNHLHHSTQANAILAIEQFEGLLGTHCSPDLLFFLCAMYAPICTIDFQHEPIKPCKSVCERARQGCEPILIKYRHSWPENLACEELPVYDRGVCISPEAIVTADGADFPMDSSNGNCRGASSERCKCKPIRATQKTYFRNNYNYVIRAKVKEIKTKCHDVTAVVEVKEILKSSLVNIPRDTVNLYTSSGCLCPPLNVNEEYIIMGYEDEERSRLLLVEGSIAEKWKDRLGKKVKRWDMKLRHLGLSKSDSSNSDSTQSQKSGRNSNPRQARN

SEQ ID NO: 20848 - protein, 186 aa, Homo sapiens
VEPPAAAEDGSEQHGHIFQSYINNLRQQLETLGQEKLKLEAELGNMQGLVEDFKNKYEDEINKRTEMENEFVLIKKDVDEAYLNKVELESRLEGLTDEINFLRQLYEEDIPELQSQISDTSVVLPMDNSHSLDMDSIINEVKRSTRSPTAARLRPRACIRSSMSSCRRWLGSTEMTCSIQRLRSPR

SEQ ID NO: 20849 - protein, 432 aa, Homo sapiens
VPSVSAMPPKKQAQAGGSKKAEQKKKEKIIEDKTFGLKNKKGAKQQKFIKAVTHQVKFGQQNPRQVAQSEAEKKLKKDDKKKELQELNELFKPVVAAQKISKGADPKSVVCAFFKQGQCTKGDKCKFSHDLTLERKCEKRSVYIDARDEELEKDTMDNWDEKKLEEVVNKKHGEAEKKKPKTQIVCKHFLEAIENNKYGWFWVCPGGGDICMYRHALPPGFVLKKDKKKEEKEDEISLEDLIERERSALGPNVTKITLESFLAWKKRKRQEKIDKLEQDMERRKADFKAGKALVISGREVFEFRPELVNDDDEEADDTRYTQGTGGDEVDDSVSVNDIDLSLYIPRDVDETGITVASLERFSTYTSDKDENKLSEASGGRAENGERSDLEEDNEREGTENGAIDAVPVDENLFTGEDLDELEEELNTLDLEE

SEQ ID NO: 20850 - protein, 1135 aa, Homo sapiens
VERRSRREAKDRLRCCPRPARSAPLVPGGRSEAQPSCLPRSCPGLAEKRAAGKFGRAQAAGRGHWAPRWGGGRWLPLPAWRPARTSAMAFPPRRRLRLGPRGLPLLLSGLLLPLCRAFNLDVDSPAEYSGPEGSYFGFAVDFFVPSASSRMFLLVGAPKANTTQPGIVEGGQVLKCDWSSTRRCQPIEFDATGNRDYAKDDPLEFKSHQWFGASVRSKQDKILACAPLYHWRTEMKQEREPVGTCFLQDGTKTVEYAPCRSQDIDADGQGFCQGGFSIDFTKADRVLLGGPGSFYWQGQLISDQVAEIVSKYDPNVYSIKYNNQLATRTAQAIFDDSYLGYSVAVGDFNGDGIDDFVSGVPRAARTLGMVYIYDGKNMSSLYNFTGEQMAAYFGFSVAATDINGDDYADVFIGAPLFMDRGSDGKLQEVGQVSVSLQRASGDFQTTKLNGFEVFARFGSAIAPLGDLDQDGFNDIAIAAPYGGEDKKGIVYIFNGRSTGLNAVPSQILEGQWAARSMPPSFGYSMKGATDIDKNGYPDLIVGAFGVDRAILYRARPVITVNAGLEVYPSILNQDNKTCSLPGTALKVSCFNVRFCLKADGKGVLPRKLNFQVELLLDKLKQKGAIRRALFLYSRSPSHSKNMTISRGGLMQCEELIAYLRDESEFRDKLTPITIFMEYRLDYRTAADTTGLQPILNQFTPANISRQAHILLDCGEDNVCKPKLEVSVDSDQKKIYIGDDNPLTLIVKAQNQGEGAYEAELIVSIPLQADFIGVVRNNEALARLSCAFKTENQTRQVVCDLGNPMKAGTQLLAGLRFSVHQQSEMDTSVKFDLQIQSSNLFDKVSPVVSHKVDLAVLAAVEIRGVSSPDHVFLPIPNWEHKENPETEEDVGPVVQHIYELRNNGPSSFSKAMLHLQWPYKYNNNTLLYILHYDIDGPMNCTSDMEINPLRIKISSLQTTEKNDTVAGQGERDHLITKRDLALSEGDIHTLGCGVAQCLKIVCQVGRLDRGKSAILYVKSLLWTETFMNKENQNHSYSLKSSASFNVIEFPYKNLPIEDITNSTLVTTNVTWGIQPAPMPVPVWVIILAVLAGLLLLAVLVFVMYRMGFFKRVRPPQEEQEREQLQPHENGEGNSET

SEQ ID NO: 20851 - protein, 1087 aa, Homo sapiens
LRCCPRPARSAPLVPGGRSEAQPSCLPRSCPGLAEKRAAGKFGRAQAAGRGHWAPRWGGGRWLPLPAWRPARTSAMAFPPRRRLRLGPRGLPLLLSGLLLPLCRAFNLDVDSPAEYSGPEGSYFGFAVDFFVPSASSRMFLLVGAPKANTTQPGIVEGGQVLKCDWSSTRRCQPIEFDATGNRDYAKDDPLEFKSHQWFGASVRSKQDKILACAPLYHWRTEMKQEREPVGTCFLQDGTKTVEYAPCRSRQLISDQVAEIVSKYDPNVYSIKYNNQLATRTAQAIFDDSYLGYSVAVGDFNGDGIDDFVSGVPRAARTLGMVYIYDGKNMSSLYNFTGEQMAAYFGFSVAATDINGDDYADVFIGAPLFMDRGSDGKLQEVGQVSVSLQRASGDFQTTKLNGFEVFARFGSAIAPLGDLDQDGFNDIAIAAPYGGEDKKGIVYIFNGRSTGLNAVPSQILEGQWAARSMPPSFGYSMKGATDIDKNGYPDLIVGAFGVDRAILYRARPVITVNAGLEVYPSILNQDNKTCSLPGTALKVSCFNVRFCLKADGKGVLPRKLNFQVELLLDKLKQKGAIRRALFLYSRSPSHSKNMTISRGGLMQCEELIAYLRDESEFRDKLTPITIFMEYRLDYRTAADTTGLQPILNQFTPANISRQAHILLDCGEDNVCKPKLEVSVDSDQKKIYIGDDNPLTLIVKAQNQGEGAYEAELIVSIPLQADFIGVVRNNEALARLSCAFKTENQTRQVVCDLGNPMKAGTQLLAGLRFSVHQQSEMDTSVKFDLQIQSSNLFDKVSPVVSHKVDLAVLAAVEIRGVSSPDHVFLPIPNWEHKENPETEEDVGPVVQHIYELRNNGPSSFSKAMLHLQWPYKYNNNTLLYILHYDIDGPMNCTSDMEINPLRIKISSLQTTEKNDTVAGQGERDHLITKRDLALSEGDIHTLGCGVAQCLKIVCQVGRLDRGKSAILYVKSLLWTETFMNKENQNHSYSLKSSASFNVIEFPYKNLPIEDITNSTLVTTNVTWGIQPAPMPVPVWVIILAVLAGLLLLAVLVFVMYRMGFFKRVRPPQEEQEREQLQPHENGEGNSET

SEQ ID NO: 20852 - protein, 45 aa, Homo sapiens
LADLPKLQNVMMSLVEKNESFLEYLCAATTHLNVTLFAFLDSLYM

SEQ ID NO: 20853 - protein, 18 aa, Homo sapiens
LSHCFVLLLTQGLGPMTL

SEQ ID NO: 20854 - protein, 190 aa, Homo sapiens
MIYTMKKVHALWASVCLLLNLAPAPLNADSEEDEEHTIITDTELPPLKLMHSFCAFKADDGPCKAIMKRFFFNIFTRQCEEFIYGGCEGNQNRFESLEECKKMCTRDNANRIIKTTLQQEKPDFCFLEEDPGICRGYITRYFYNNQTKQCERFKYGGCLGNMNNFETLEECKNICEDGRKFISYFILVHL

SEQ ID NO: 20855 - protein, 67 aa, Homo sapiens [sequence omitted]

SEQ ID NO: 20856 - protein, 36 aa, Homo sapiens
LILIMNRAFSRKKDKTWMHTPEALSKHFIPYNAKRT

SEQ ID NO: 20857 - protein, 171 aa, Homo sapiens
LILIMNRAFSRKKDKTWMHTPEALSKHFIPYNAKFLGSTEVEQPKGTEVVRDAVRKLKFARHIKKSEGQKIPKVELQISIYGVKILEPKTKEVQHNCQLHRISFCADDKTDKRIFTFICKDSESNKHLCYVFDSEKCVSIPDVVGWFVLFYKPGIVLLLALAKYLKMNNFL

SEQ ID NO: 20858 - protein, 295 aa, Homo sapiens
LILIMNRAFSRKKDKTWMHTPEALSKHFIPYNAKFLGSTEVEQPKGTEVVRDAVRKLKFARHIKKSEGQKIPKVELQISIYGVKILEPKTKEVQHNCQLHRISFCADDKTDKRIFTFICKDSESNKHLCYVFDSEKCAEEITLTIGQAFDLAYRKFLESGGKDVETRKQIAGLQKRIQDLETENMELKNKVQDLENQLRITQVSAPPAGSMTPKSPSTDIFDMIPFSPISHQSSMPTRNGTQPPPVPSRSTEIKRDLFGAEPFDPFNCGAADFPPDIQSKLDEMQRQRWRGSKWD

SEQ ID NO: 20859 - protein, 308 aa, Homo sapiens
LILIMNRAFSRKKDKTWMHTPEALSKHFIPYNAKFLGSTEVEQPKGTEVVRDAVRKLKFARHIKKSEGQKIPKVELQISIYGVKILEPKTKEVQHNCQLHRISFCADDKTDKRIFTFICKDSESNKHLCYVFDSEKCAEEITLTIGQAFDLAYRKFLESGGKDVETRKQIAGLQKRIQDLETENMELKNKVQDLENQLRITQVSAPPAGSMTPKSPSTDIFDMIPFSPISHQSSMPTRNGTQPPPVPSRSTEIKRDLFGAEPFDPFNCGAADFPPDIQSKLDEMQEGFKMGLTLEGTVFCLDPLDSRC

SEQ ID NO: 20860 - protein, 205 aa, Homo sapiens
LILIMNRAFSRKKDKTWMHTPEALSKHFIPYNAKAEEITLTIGQAFDLAYRKFLESGGKDVETRKQIAGLQKRIQDLETENMELKNKVQDLENQLRITQVSAPPAGSMTPKSPSTDIFDMIPFSPISHQSSMPTRNGTQPPPVPSRSTEIKRDLFGAEPFDPFNCGAADFPPDIQSKLDEMQEGFKMGLTLEGTVFCLDPLDSRC

SEQ ID NO: 20861 - protein, 119 aa, Homo sapiens
MMSFVQKGSWLLLALLHPTIILAQQEAVEGGCSHLGQSYADRDVWKPEPCQICVCDSGSVLCDDIICDDQELDCPNPEIPFGECCAVCPQPPTAVSLKINCTSSIFIFRHMNSSYIIGA

SEQ ID NO: 20862 - protein, 146 aa, Homo sapiens
VQLQLKCLICFICSLLQFSYGNPELPEDVLDVHLAFLRLLSSRASQNITYHCKNSIAYMDQASGNVKKALKLMGSNEGEFKAEGNSKFTYTVLEDGCTKHTGEWSKTVFEYRTRKAVRLPIVDIAPYDIGGPDQEFGVDVGPVCFL

SEQ ID NO: 20863 - protein, 1322 aa, Homo sapiens
MMANWAEARPLLILIVLLGQFVSIKAQEEDEDEGYGEEIACTQNGQMYLNRDIWKPAPCQICVCDNGAILCDKIECQDVLDCADPVTPPGECCPVCSQTPGGGNTNFGRGRKGQKGEPGLVPVVTGIRGRPGPAGPPGSQGPRGERGPKGRPGPRGPQGIDGEPGVPGQPGAPGPPGHPSHPGPDGLSRPFSAQMAGLDEKSGLGSQVGLMPGSVGPVGPRGPQGLQGQQGGAGPTGPPGEPGDPGPMGPIGSRGPEGPPGKPGEDGEPGRNGNPGEVGFAGSPGARGFPGAPGLPGLKGHRGHKGLEGPKGEVGAPGSKGEAGPTGPMGDPGTVGPPGPVGERGAPGNRGFPGSDGLPGPKGAQGERGPVGSSGPKGSQGDPGRPGEPGLPGARGLTGNPGVQGPEGKLGPLGAPGEDGRPGPPGSIGIRGQPGSMGLPGPKGSSGDPGKPGEAGNAGVPGQRGAPGKDGEVGPSGPVGPPGLAGERGEQGPPGPTGFQGLPGPPGPPGEGGKPGDQGVPGDPGAVGPLGPRGERGNPGERGEPGITGLPGEKGMAGGHGPDGPKGSPGPSGTPGDTGPPGLQGMPGERGIAGTPGPKGDRGGIGEKGAEGTAGNDGARGLPGPLGPPGPAGPTGEKGEPGPRGLVGPPGSRGNPGSRGENGPTGAVGFAGPQGPDGQPGVKGEPGEPGQKGDAGSPGPQGLAGSPGPHGPNGVPGLKGGRGTQGPPGATGFPGSAGRVGPPGPAGAPGPAGPLGEPGKEGPPGLRGDPGSHGRVGDRGPAGPPGGPGDKGDPGEDGQPGPDGPPGPAGTTGQRGIVGMPGQRGERGMPGLPGPAGTPGKVGPTGATGDKGPPGPVGPPGSNGPVGEPGPEGPAGNDGTPGRDGAVGERGDRGDPGPAGLPGSQGAPGTPGPVGAPGDAGQRGDPGSRGPIGPPGRAGKRGLPGPQGPRGDKGDHGDRGDRGQKGHRGFTGLQGLPGPPGPNGEQGSAGIPGPFGPRGPPGPVGPSGKEGNPGPLGPIGPPGVRGSVGEAGPEGPPGEPGPPGPPGPPGHLTAALGDIMGHYDESMPDPLPEFTEDQAAPDDKNKTDPGVHATLKSLSSQIETMRSPDGSKKHPARTCDDLKLCHSAKQSGEYWIDPNQGSVEDAIKVYCNMETGETCISANPSSVPRKTWWASKSPDNKPVWYGLDMNRGSQFAYGDHQSPNTAITQMTFLRLLSKEASQNITYICKNSVGYMDDQAKNLKKAVVLKGANDLDIKAEGNIRFRYIVLQDTCSKRNGNVGKTVFEYRTQNVARLPIIDLAPVDVGGTDQEFGVEIGPVCFV

SEQ ID NO: 20864 - protein, 16 aa, Homo sapiens
MKMSLYLKQAIGLLML

SEQ ID NO: 20865 - protein, 268 aa, Homo sapiens
MASNVTNKTDPRSMNSRVFIGNLNTLVVKKSDVEAIFSKYGKIVGCSVHKGFAFFQYVNERNARAAVAGEDGRMIAGQVLDINLAAEPKVNRGKAGVKRSAAEMYGSSFDLDCDFQRDYYDRMYSYPARVPPPPPIARAVVPSKRQRVSGNTSQRGISGFNSKSGQRGSSKSGKLKGDDLQAIKRELTQIKQKVDSFLENLEKIEKEQSKQAVEMNNVKSEEEQSSSSVKKDETNVKMESEGGADDSAEEGDLLDDDDNEDGGMTSWS

SEQ ID NO: 20866 - protein, 27 aa, Homo sapiens
LELIKDDEKEAEEGEDDRDSANGEDDS

SEQ ID NO: 20867 - protein, 131 aa, Homo sapiens
LTSAMPRWLLLSLTFAGLFPLRRRQLLGSCGGREGGGPDQPAGSPAPLRPPLPRTLRLRKYRGNPLPPEVRGSLPEGAPWSRAPLGGHLEARCGPRTREERAAGAAATAGGGAGSPGAAEGRPVLHMLPLG

SEQ ID NO: 20868 - protein, 113 aa, Homo sapiens
VPIPPAAATEKQGSEMSDILRELLCVSEKAANIARACRQQEALFQLLIEEKKEGEKNKKFAVDFKTLADVLVQEVIKQNMENKFPGLEKNIFGEESNEFTNDWGKYKNLNVSL

SEQ ID NO: 20869 - protein, 112 aa, Homo sapiens
VPIPPAAATEKQGSEMSDILRELLCVSEKAANIARACRQQEALFQLLIEEKKEGEKNKKFAVDFKTLADVLVQEVIKQNMENKFPGLEKNIFGEESNEFTNDWASSLTSVKG

SEQ ID NO: 20870 - protein, 88 aa, Homo sapiens
VPIPPAAATEKQGSEMSDILRELLCVSEKAANIARACRQQEALFQLLIEEKKEGEKNKKFAVDFKTLADVLVQEVIKQNMENKGKRLP

SEQ ID NO: 20871 - protein, 414 aa, Homo sapiens
VPIPPAAATEKQGSEMSDILRELLCVSEKAANIARACRQQEALFQLLIEEKKEGEKNKKFAVDFKTLADVLVQEVIKQNMENKFPGLEKNIFGEESNEFTNDWGEKITLRLCSTEEETAELLSKVLNGNKVASEALARVVHQDVAFTDPTLDSTEINVPQDILGIWVDPIDSTYQYIKGSADIKSNQGIFPCGLQCVTILIGVYDIQTGVPLMGVINQPFVSRDPNTLRWKGQCYWGLSYMGTNMHSLQLTISRRNGSETHTGNTGSEAAFSPSFSAVISTSEKETIKAALSRVCGDRIFGAAGAGYKSLCVVQGLVDIYIFSEDTTFKWDSCAAHAILRAMGGGIVDLKECLERNPETGLDLPQLVYHVENEGAAGVDRWANKGGLIAYRSRKRLETFLSLLVQNLAPAETHT

SEQ ID NO: 20872 - protein, 422 aa, Homo sapiens
LTPNEMGPRQGRWWLLLWLPPLATLPVRGEAAAAALSVRRCKALKEKDLIRTSESDCYCYNQNSQVEWKYIWSTMQVKITSPGLFRIVYIAERHNCQYPENILSFIKCVIHNFWIPKESNEITIIINPYRETVCFSVEPVKKIFNYMIHVNRNIMDFKLFLVFVAGVFLFFYARTLSQSPTFYYSSGTVLGVLMTLVFVLLLVKRFIPKYSTFWALMVGCWFASVYIVCQLMEDLKWLWYENRIYVLGYVLIVGFFSFVVCYKHGPLADDRSRSLLMWMLRLLSLVLVYAGVAVPQFAYAAIILLMSSWSLHYPLRACSYMRWKMEQWFTSKELVVKYLTEDEYREQADAETNSALEELRRACRKPDFPSWLVVSRLHTPSKFADFVLGGSHLSPEEISLHEEQYGLGGAFLEEQLFNPSTA

SEQ ID NO: 20873 - protein, 90 aa, Homo sapiens
LTPNEMGPRQGRWWLLLWLPPLATLPVRGEAAAAALSVRRCKALKEKDLIRTSESDCYCYNQNSQVEWKYIWSTMQGDCVLLCGACQEDI

SEQ ID NO: 20874 - protein, 156 aa, Homo sapiens
MVNAGAIVVTSLIKQGVNNAEKFDYVMQFLNKMAGNEYVGFSNATFQSERESGDRNFAIGYYLKEKKCFPEGTDMVGILDFYFQLCSIEVTCESASVMAATLANGGFCPITGERVLSPEAVRNTLSLMHSCGMYDFSGQFAFHVSNCLILFSLARN

SEQ ID NO: 20875 - protein, 126 aa, Homo sapiens
VYKVGLPAKSGVAGGILLVVPNVMGMMCWSPPLDKMGNSVKGIHFCHDLVSLCNFHNYDNLRHFAKKLDPRREGGDQRHSFGPLDYESLQQELALKETVWKKVSPESNEDISTTVVYRMESLGEKS

SEQ ID NO: 20876 - protein, 33 aa, Homo sapiens
LLDVGTVNFCGRILTCFLCFKCNWQFSIGLPVK

SEQ ID NO: 20877 - protein, 18 aa, Homo sapiens
MSIPVKKIYINLTILAKN

SEQ ID NO: 20878 - protein, 38 aa, Homo sapiens
MCNHFLLCTESPQKINSTRSFEDNEQSLKTEFPQKTFS

SEQ ID NO: 20879 - protein, 25 aa, Homo sapiens
LELCRQPIPEKQTGWLVQPGSTCFL

SEQ ID NO: 20880 - protein, 94 aa, Homo sapiens
LLLCVALVLLGHVNGATVRNEDKWKPLNNPRNRDLFFRRLQAYFKGRGLDLGTFPNPFPTNENPRPLSFQSELTASASADYEEQKNSFHNYLKG

SEQ ID NO: 20881 - protein, 127 aa, Homo sapiens
LPYGLGYLSNHIFKVKTLGWAQWLTPVIPALGEAEVGRSVEVRSSRPAWSTWRNPISTKNTKISWAWWHTPVIPVTWEAEAQESLEPGRRRLQLAKIALLHSSLGNRGRLCLQKQKQKLLVKVPWDF

SEQ ID NO: 20882 - protein, 655 aa, Homo sapiens
LSALAHPARVGRGGARAQGVQIAGPGLTGSGWELPAHAVPRGGSRGGGRGHGLIAVCALHSVPHSPPTTCLAERTPCRRPAEMLRLPTVFRQMRPVSRVLAPHLTRAYAKDVKFGADARALMLQGVDLLADAVAVTMGPKGRTVIIEQSWGSPKVTKDGVTVAKSIDLKDKYKNIGAKLVQDVANNTNEEAGDGTTTATVLARSIAKEGFEKISKGANPVEIRRGVMLAVDAVIAELKKQSKPVTTPEEIAQVATISANGDKEIGNIISDAMKKVGRKGVITVKDGKTLNDELEIIEGMKFDRGYISPYFINTSKGQKCEFQDAYVLLSEKKISSIQSIVPALEIANAHRKPLVIIAEDVDGEALSTLVLNRLKVGLQVVAVKAPGFGDNRKNQLKDMAIATGGAVFGEEGLTLNLEDVQPHDLGKVGEVIVTKDDAMLLKGKGDKAQIEKRIQEIIEQLDVTTSEYEKEKLNERLAKLSDGVAVLKVGGTSDVEVNEKKDRVTDALNATRAAVEEGIVLGGGCALLRCIPALDSLTPANEDQKIGIEIIKRTLKIPAMTIAKNAGVEGSLIVEKIMQSSSEVGYDAMAGDFVNMVEKGIIDPTKVVRTALLDAAGVASLLTTAEVVVTEIPKEEKDPGMGAMGGMGGGMGGGMF

SEQ ID NO: 20883 - protein, 200 aa, Homo sapiens
VCALHSVPHSPPTTCLAERTPCRRPAEMLRLPTVFRQMRPVSRVLAPHLTRAYAKDVKFGADARALMLQGVDLLADAVAVTMGPKGRTVIIEQSWGSPKVTKDGVTVAKSIDLKDKYKNIGAKLVQDVANNTNEEAGDGTTTATVLARSIAKEGFEKISKGANPVEIRRGVMLAVDAVIAELKKQSKPVTTPEEIAQVRT

SEQ ID NO: 20884 - protein, 115 aa, Homo sapiens
LRRALGANRGARRGDRPPSLGGARGLAATAGASAPARWVIFSRVARAGLRVSLRRYTRAEYESEAEGVMGGEIQPVSVKVGDKVLLPEYGGTKVVLDDKDYFLFRDGDILGKYVD

SEQ ID NO: 20885 - protein, 76 aa, Homo sapiens
LTLKLVWLLTGGATTTPNRRKESGIKLGILGGEIQPVSVKVGDKVLLPEYGGTKVVLDDKDYFLFRDGDILGKYVD

SEQ ID NO: 20886 - protein, 13 aa, Homo sapiens
LRCIARWRCLLIM

SEQ ID NO: 20887 - protein, 151 aa, Homo sapiens
LLHTLAEFGWLLTSVLPTPVLRHDSEGNLATKQIVFLQRPVMWNSAAQTPDMWVRQCEKNKKKASRHIKGEDKNKATSRSIGLDTTSSQPAESRHLPEECRLSPSRECWTKEGRLAQHNSFSGFSSSDNVLRELDDGQFDQEDGVTQVTCM

SEQ ID NO: 20888 - protein, 209 aa, Homo sapiens
MSHLVFTTLLNCTLFLTGEHLPKSLEGFFIYEEEGSGVPGSSRKGNDAIVVEQWTVIEGCEIKTDYGPLLHTLAEFGWLLTSVLPTPVLRHDSEGNLATKQIVFLQRPVMWNSAAQTPDKKASRHIKGEDKNKATSRSIGLDTTSSQPAESRHLPEECRLSPSRECWTKEGRLAQHNSFSGFSSSDNVLRELDDGQFDQEDGVTQVTCM

SEQ ID NO: 20889 - protein, 52 aa, Homo sapiens
LRDGGLWGPDEGPSQRGRTARRRGDPSGQRGGPPGGSTGDPPAQQHHQDGTV

SEQ ID NO: 20890 - protein, 73 aa, Homo sapiens
LRDGGLWGPDEGPSQRGRTARRRGDPSGQRGGPPGGSTGDPPAQQHHQGSFKPKMWWKKENRVFQQHAIGKEN

SEQ ID NO: 20891 - protein, 40 aa, Homo sapiens
VSLWRSPFPLLLLPLLPPPIIIITTISAPEEDTLTQDLKH

SEQ ID NO: 20892 - protein, 126 aa, Homo sapiens
MWGFRLLRSPPLLLLLPQLGIGNASSCSQARTMNPGGSGGARCSLSAEVRRRQCLQLSTVPGADPQRSNELLLLAAAGEGLERQDLPGDPAKEEPQPPPQHHVLYFPGDVQVLPRARASPVGRGAA

SEQ ID NO: 20893 - protein, 54 aa, Homo sapiens
MGWTLGSSKPRPTRRVGAAGSQVPATSQNLRLPLRALEPARTPQWTGRPSCSST

SEQ ID NO: 20894 - protein, 94 aa, Homo sapiens
VSFMNNQKQQKPTLSGQRFKTRKRDEKERFDPTQFQDCIIQGLTETGTDLEAVAKFLDASGAKLDYRRYAETLFDILVAGGMLGKCLWFVGLII

SEQ ID NO: 20895 - protein, 222 aa, Homo sapiens
LVWCFLITATFSLFSVLHSNKLTHTDLKPENILFVQSDYTEAYNPKIKRDERTLINPDIKVVDFGSATYDDEHHSTLVSTRHYRAPEVILALGWSQPCDVWSIGCILIEYYLGFTVFPTHDSKEHLAMMERILGPLPKHMIQKTRKRKYFHHDRLDWDEHSSAGRYVSRRCKPLKEFMLSQDVEHERLFDLIQKMLEYDPAKRITLREALKHPFFDLLKKSI

SEQ ID NO: 20896 - protein, 348 aa, Homo sapiens
LIAFIVISTLFPLLDMTEIYFSLLDEIVDTLGEGAFGKVVECIDHKAGGRHVAVKIVKNVDRYCEAARSEIQVLEHLNTTDPNSTFRCVQMLEWFEHHGHICIVFELLGLSTYDFIKENGFLPFRLDHIRKMAYQICKSVNFLHSNKLTHTDLKPENILFVQSDYTEAYNPKIKRDERTLINPDIKVVDFGSATYDDEHHSTLVSTRHYRAPEVILALGWSQPCDVWSIGCILIEYYLGFTVFPTHDSKEHLAMMERILGPLPKHMIQKTRKRKYFHHDRLDWDEHSSAGRYVSRRCKPLKEFMLSQDVEHERLFDLIQKMLEYDPAKRITLREALKHPFFDLLKKSI

SEQ ID NO: 20897 - protein, 506 aa, Homo sapiens
LRDSRDCVTSFVSFDLESLSRTMRHSKRTYCPDWDDKDWDYGKWRSSSSHKRRKRSHSSAQENKRCKYNHSKMCDSHYLESRSINEKDYHSRRYIDEYRNDYTQGCEPGHRQRDHESRYQNHSSKSSGRSGRSSYKSKHRIHHSTSHRRSHGKSHRRKRTRSVEDDEEGHLICQSGDVLSARYEIVDTLGEGAFGKVVECIDHKAGGRHVAVKIVKNVDRYCEAARSEIQVLEHLNTTDPNSTFRCVQMLEWFEHHGHICIVFELLGLSTYDFIKENGFLPFRLDHIRKMAYQICKSVNFLHSNKLTHTDLKPENILFVQSDYTEAYNPKIKRDERTLINPDIKVVDFGSATYDDEHHSTLVSTRHYRAPEVILALGWSQPCDVWSIGCILIEYYLGFTVFPTHDSKEHLAMMERILGPLPKHMIQKTRKRKYFHHDRLDWDEHSSAGRYVSRRCKPLKEFMLSQDVEHERLFDLIQKMLEYDPAKRITLREALKHPFFDLLKKSI

SEQ ID NO: 20898 - protein, 149 aa, Homo sapiens
LIAFIVISTLFPLLDMTEIYFSLLDEIVDTLGEGAFGKVVECIDHKAGGRHVAVKIVKNVDRYCEAARSEIQVLEHLNTTDPNSTFRCVQMLEWFEHHGHICIVFELLGLSTYDFIKENGFLPFRLDHIRKMAYQICKSVNCKFLVYLR

SEQ ID NO: 20899 - protein, 11 aa, Homo sapiens
LLASAIAFFLF

SEQ ID NO: 20900 - protein, 15 aa, Homo sapiens
LSNFRLGINCIVVLV

SEQ ID NO: 20901 - protein, 119 aa, Homo sapiens
LYSEGFDAGGRFSFPEQTTLSEDGNSVTGEESQVKVVALCAGSGSSVLQGVEADLYLTGEMSHHDTLDAASQGINVILCEHSNTERGFLSDLRDMLDSHLENKINIILSETDRDPLQVV

SEQ ID NO: 20902 - protein, 74 aa, Homo sapiens
LASGAPYLPGGRARITGNWLFPLGPKVPSLRRRLSGVSFGRRDAAGSAPDGNLAVTVSEFCSCRMCSTLKGWQQ

SEQ ID NO: 20903 - protein, 19 aa, Homo sapiens
MNSPLELCRIPVPPPPLEN

SEQ ID NO: 20904 - protein, 37 aa, Homo sapiens
MHKPFDHAWRILPPRDTRVALCKFQLRGGRGIPQTGF

SEQ ID NO: 20905 - protein, 127 aa, Homo sapiens
LTTHGEFYHPETREWPCASFNCAGGGEFRRQDSRIYVLCGNISAGGWRGLGVKRFSRQRFSDALRRSHLLMLLTFCPCSSSHLEHFQFWFCGAAGLSLSGEGGSWSRRRSSGKSRRLPGQLPHWKGF

SEQ ID NO: 20906 - protein, 30 aa, Homo sapiens
LNMLYILMNSEKECGVSLQMSSSVVSFPLQ

SEQ ID NO: 20907 - protein, 134 aa, Homo sapiens [sequence omitted]

SEQ ID NO: 20908 - protein, 486 aa, Homo sapiens
LNLGNIEMDFSRNLYDIGEQLDSEDLASLKFLSLDYIPQRKQEPIKDALMLFQRLQEKRMLEESNLSFLKELLFRINRLDLLITYLNTRKEEMERELQTPGRAQISAYRVMLYQISEEVSRSELRSFKFLLQEEISKCKLDDDMNLLDIFIEMEKRVILGEGKLDILKRVCAQINKSLLKIINDYEEFSKERSSSLEGSPDEFSNGEELCGVMTISDSPREQDSESQTLDKVYQMKSKPRGYCLIINNHNFAKAREKVPKLHSIRDRNGTHLDAGALTTTFEELHFEIKPHDDCTVEQIYEILKIYQLMDHSNMDCFICCILSHGDKGIIYGTDGQEAPIYELTSQFTGLKCPSLAGKPKVFFIQACQGDNYQKGIPVETDSEEQPYLEMDLSSPQTRYIPDEADFLLGMATVNNCVSYRNPAEGTWYIQSLCQSLRERCPRGDDILTILTEVNYEVSNKDDKKNMGKQMPQPTFTLRKKLVFPSD

SEQ ID NO: 20909 - protein, 46 aa, Homo sapiens
MMPPVRDGTRHSMQMTTQREQEWLYLYQTKSTLSQKLSQETLKYII

SEQ ID NO: 20910 - protein, 447 aa, Homo sapiens
LAMYPNPLIYCTCWDPWNLGPRKLIKTPQLPRKNSTGSSKLTPLVPAPKNHNYLQPTKPVVSPKMKIHSARQEETNKSFYEVINVSPGYQLVRNREQISVTLGDEMFDRKKRWESEIPDKGRFSRTNIISDLEEQISELTAIIEQMNRDHQSAQKLLSSEMDLRCAEMKQNFENKNRELKEAHEAELSELENNYKAALKAEKLAAQEKLEEMGKEYKYLKNMFRTYQDSIYDEMEEKWSKQKAKWKKDEKFERENILLQQKKKMTKKFEMESGEEDKKINESCSAVFENFIQEKEELLKQHQSDTLQLEELRKTKEVPWRRDQINRHWHDVLQQLLLMQVMQEELHAQALILESLNTNLYYTQLELQKEKAIVGNLEKMLQTKFAETEEKYKHTIQILTEENIHLKQKIISKNEEICEGCSGRLASITVSKDDSDTVQDGSKKGQES

SEQ ID NO: 20911 - protein, 198 aa, Homo sapiens
LAMYPNPLIYCTCWDPWNLGPRKLIKTPQLPRKNSTGSSKLTPLVPAPKNHNYLQPTKPVVSPKMKIHSARQEETNKSFYEVINVSPGYQLVRNREQISVTLGDEMFDRKKRWESEIPDKGRFSRTNIISDLEEQISELTAIIEQMNRDHQSAQKLLSSEMDLRCAEMKQNFENKNRGDGKRIQVFEEYVSYVSGQYL

SEQ ID NO: 20912 - protein, 90 aa, Homo sapiens
LAMYPNPLIYCTCWDPWNLGPRKLIKTPQLPRKNSTGSSKLTPLVPAPKNHNYLQPTKPVVSPKMKIHSARQEETNKSFYVSKGRRGRWD

SEQ ID NO: 20913 - protein, 130 aa, Homo sapiens
VRGLNYLHQNGCIHRSIKASHILISGDGLVTLSGLSHLHSLVKHGQRHRAVYDFPQFSTSVQPWLSPELLRQDLHGYNVKSDIYSVGITACELASGQVPFQDMHRTQVSAAKIPELLAFHKTAYILDNFC

SEQ ID NO: 20914 - protein, 345 aa, Homo sapiens
MGQELCAKTVQPGCSCYHCSEGGEAHSCRRSQPETTEAAFKLTDLKEASCSMTSFHPRGLQAARAQKFKSKRPRSNSDCFQEEDLRQGFQWRKSLPFGAASSYLNLEKLGEGSYATVYKGISRINGQLVALKVISMNAEEGVPFTAIREASLLKGLKHANIVLLHDIIHTKETLTFVFEYMLFMFQLLRGLAYIHHQHVLHRDLKPQNLLISHLGELKLADFGLARAKSIPSQTYSSEVVTLWYRPPDALLGATEYSSELDIWGAGCIFIEMFQGQPLFPGVSNILEQLEKIWEVLGVPTEDTWPGVSKLPNYNPGGSKKQHGWHTDIGQHRTAAMQPCSRNVSF

SEQ ID NO: 20915 - protein, 12 aa, Homo sapiens
MNSKGQYPTQPT

SEQ ID NO: 20916 - protein, 47 aa, Homo sapiens
MLQFLLGFTLGNVVGMYLAQNYDIPNLAKKLEEIKKDLDAKKKPPTS

SEQ ID NO: 20917 - protein, 145 aa, Homo sapiens
MLVLFETSVGYAIFKVLNEKKLQEVDSLWKEFETPEKANKIVKLKHFEKFQDTAEALAAFTALMEGKINKQLKKVLKKIVKEAHEPLAVADAKLGGVIKEKLNLSCIHSPVVNELMRGIRSQMDGLIPGVEPREMAAMCLGLAHR

SEQ ID NO: 20918 - protein, 535 aa, Homo sapiens
LAGPGMTSSLQRPWRVPWLPWTILLVSTAAASQNQERLCAFKDPYQQDLGIGESRISHENGTILCSKGSTCYGLWEKSKGDINLVKQGCWSHIGDPQECHYEECVVTTTPPSIQNGTYRFCCCSTDLCNVNFTENFPPPDTTPLSPPHSFNRDETIIIALASVSVLAVLIVALCFGYRMLTGDRKQGLHSMNMMEAAASEPSLDLDNLKLLELIGRGRYGAVYKGSLDERPVAVKVFSFANRQNFINEKNIYRVPLMEHDNIARFIVGDERVTADGRMEYLLVMEYYPNGSLCKYLSLHTSDWVSSCRLAHSVTRGLAYLHTELPRGDHYKPAISHRDLNSRNVLVKNDGTCVISDFGLSMRLTGNRLVRPGEEDNAAISEVGTIRYMAPEVLEGAVNLRDCESALKQVDMYALGLIYWEIFMRCTDLFPGESVPEYQMAFQTEVGNHPTFEDMQVLVSREKQRPKFPEAWKENSLAVRSLKETIEDCWDQDAEARLTAQCAEERMAELMMIWERNKSVSPTVNPMSTAMQNERR

SEQ ID NO: 20919 - protein, 1043 aa, Homo sapiens
LAGPGMTSSLQRPWRVPWLPWTILLVSTAAASQNQERLCAFKDPYQQDLGIGESRISHENGTILCSKGSTCYGLWEKSKGDINLVKQGCWSHIGDPQECHYEECVVTTTPPSIQNGTYRFCCCSTDLCNVNFTENFPPPDTTPLSPPHSFNRDETIIIALASVSVLAVLIVALCFGYRMLTGDRKQGLHSMNMMEAAASEPSLDLDNLKLLELIGRGRYGAVYKGSLDERPVAVKVFSFANRQNFINEKNIYRVPLMEHDNIARFIVGDERVTADGRMEYLLVMEYYPNGSLCKYLSLHTSDWVSSCRLAHSVTRGLAYLHTELPRGDHYKPAISHRDLNSRNVLVKNDGTCVISDFGLSMRLTGNRLVRPGEEDNAAISEVGTIRYMAPEVLEGAVNLRDCESALKQVDMYALGLIYWEIFMRCTDLFPGESVPEYQMAFQTEVGNHPTFEDMQVLVSREKQRPKFPEAWKENSLAVRSLKETIEDCWDQDAEARLTAQCAEERMAELMMIWERNKSVSPTVNPMSTAMQNERNLSHNRRVPKIGPYPDYSSSSYIEDSIHHTDSIVKNISSEHSMSSTPLTIGEKNRNSINYERQQAQARIPSPETSVTSLSTNTTTTNTTGLTPSTGMTTISEMPYPDETNLHTTNVAQSIGPTPVCLQLTEEDLETNKLDPKEVDKNLKESSDENLMEHSLKQFSGPDPLSSTSSSLLYPLIKLAVEATGQQDFTQTANGQACLIPDVLPTQIYPLPKQQNLPKRPTSLPLNTKNSTKEPRLKFGSKHKSNLKQVETGVAKMNTINAAEPHVVTVTMNGVAGRNHSVNSHAATTQYANGTVLSGQTTNIVTHRAQEMLQNQFIGEDTRLNINSSPDEHEPLLRREQQAGHDEGVLDRLVDRRERPLEGGRTNSNNNNSNPCSEQDVLAQGVPSTAADPGPSKPRRAQRPNSLDLSATNVLDGSSIQIGESTQDGKSGSGEKIKKRVKTPYSLKRWRPSTWVISTESLDCEVNNNGSNRAVHSKSSTAVYLAEGGTATTMVSKDIGMNCL

SEQ ID NO: 20920 - protein, 96 aa, Homo sapiens
MVFSLPWLMFFPFLFQTGNKVFNCISYSPLCKRLASGSTDRHIRLWDPRTKDGSLVSLSLTSHTGWVTSVKWSPTHEQQLISGSLDNIVKLWDTRR

SEQ ID NO: 20921 - protein, 134 aa, Homo sapiens
LAWVWREAMPGLVVWRSITAATVTQSLPSPLKLDVHTNTQAVCTPEKLQIKTLNKFAPFTEKVPFLEQQNKILETKWILLQQQKVAWSNMDSMFESYINNLKQQLDTLSQEQLKLEAELGNMERPVEDYQKCEV

SEQ ID NO: 20922 - protein, 409 aa, Homo sapiens
LRRCCWSGRSETWLPGRQNHVGLRDLRRYLLAGVGGSRALPLSADPFETMLKSLLRYQSGGGSVSENHMRKKLYENGVTDSLKSNFALLLKLSEELLDKWLSYPETQHVPLSQHMLGFAMKSVTQMVMGSTFEDDQEVIRFQKNHGTVWSEIGKGFLDGSLDKNMTRKKQYEDALMQLESVLRNIIKERKGRNFSQHIFIDSLVQGNLNDQQILEDSMIFSLASCIITAKLCTWAICFLTTSEEVQKKLYEEINQVFGNGPVTPEKIEQLRYCQHVLCETVRTAKLTPVSAQLQDIEGKIDRFIIPRETLVLYALGVVLQDPNTWPSPHKFDPDRFDDELVMKTFSSLGFSGTQECPELRFAYMVTTVLLSVLVKRLHLLSVEGQVIETKYELVTSSREEAWITVSKRY

SEQ ID NO: 20923 - protein, 18 aa, Homo sapiens
MHIYRDVWTVPVLLGSLC

SEQ ID NO: 20924 - protein, 1279 aa, Homo sapiens
LGRRRRQRLEERERRFPCPGPREGRPTAAMEQLSDEEIDHGAEEDSDKEDQDLDKMFGAWLGELDKLTQSLDSDKPMEPVKRSPLRQETNMANFSYRFSIYNLNEALNQGETVDLDALMADLCSIEQELSSIGSGNSKRQITETKATQKLPVSRHTLKHGTLKGLSSSSNRIAKPSHASYSLDDVTAQLEQASLSMDEAAQQSVLEDTKPLVTNQHRRTASAGTVSDAEVHSISNSSHSSITSAASSMDSLDIDKVTRPQELDLTHQGQPITEEEQAAKLKAEKIRVALEKIKEAQVKKLVIRVHMSDDSSKTMMVDERQTVRQVLDNLMDKSHCGYSLDWSLVETVSELQMERIFEDHENLVENLLNWTRDSQNKLIFMERIEKYALFKNPQNYLLGKKETAEMADRNKEVLLEECFCGSSVTVPEIEGVLWLKDDGKKSWKKRYFLLRASGIYYVPKGKAKVSRDLVCFLQLDHVNVYYGQDYRNKYKAPTDYCLVLKHPQIQKKSQYIKYLCCDDVRTLHQWVNGIRIAKYGKQLYMNYQEALKRTESAYDWTSLSSSSIKSGSSSSSIPESQSNHSNQSDSGVSDTQPAGHVRSQSIVSSVFSEAWKRGTQLEESSKARMESMNRPYTSLVPPLSPQPKIVTPYTASQPSPPLPPPPPPPPPPPPPPPPPPPPLPSQSAPSAGSAAPMFVKYSTITRLQNASQHSGALFKPPTPPVMQSQSVKPQILVPPNGVVPPPPPPPPPPTPGSAMAQLKPAPCAPSLPQFSAPPPPLKIHQVQHITQVAPPTPPPPPPIPAPLPPQAPPKPLVTIPAPTSTKTVAPVVTQAAPPTPTPPVPPAKKQPAFPASYIPPSPPTPPVPVPPPTLPKQQSFCAKPPPSPLSPVPSVVKQIASQFPPPPTPPAMESQPLKPVPANVAPQSPPAVKAKPKWQPSSIPVPSPDFPPPPPESSLVFPPPPPSPVPAPPPPPPPTASPTPDKSGSPGKKTSKTSSPGGKKPPPTPQRNSSIKSSSGAEHPEPKRPSVDSLVSKFTPPAESGSPSKETLPPPAAPPKPGKLNLSGVNLPGVLQQGCVSAKAPVLSGRGKDSVVEFPSPPSDSDFPPPPPETELPLPPIEIPAVFSGNTSPKVAVVNPQPQQWSKMSVKKAPPPTRPKRNDSTRLTQAEISEQPTMATVVPQVPTSPKSSLSVQPGFLADLNRTLQRKSITRHGSLSSRMSRAEPTATMDDMALPPPPPELLSDQQKAGYGGSHISGYATLRRGPPPAPPKRDQNTKLSRDW

SEQ ID NO: 20925 - protein, 173 aa, Homo sapiens
LFLANMKSGLWYFFLFCLRIKVLTGEINGSANYEMFIFHNGGVQILCKYPDIVQQFKMQLLKGGQILCDLTKTKGSGNTVSIKSLKFCHSQLSNNSVSFFLYNLDHSHANYYFCNLSIFDPPPFKVTLTGGYLHIYESQLCCQLKFWLPIGCAAFVVVCILGCILICWLTKKM

SEQ ID NO: 20926 - protein, 204 aa, Homo sapiens
LFLANMKSGLWYFFLFCLRIKVLTGEINGSANYEMFIFHNGGVQILCKYPDIVQQFKMQLLKGGQILCDLTKTKGSGNTVSIKSLKFCHSQLSNNSVSFFLYNLDHSHANYYFCNLSIFDPPPFKVTLTGGYLHIYESQLCCQLKFWLPIGCAAFVVVCILGCILICWLTKKKYSSSVHDPNGEYMFMRAVNTAKKSRLTDVTL

SEQ ID NO: 20927 - protein, 92 aa, Homo sapiens
LERATFSKMDMFPLTWVFLALYFSRHQVRGQPDPPCGGRLNSKDAGYITSPGYPQDYPSHQNCEWIVYAPEPNQKIVLNFNPHFEIEKHDCK

SEQ ID NO: 20928 - protein, 107 aa, Homo sapiens
LERATFSKMDMFPLTWVFLALYFSRHQVRGQPDPPCGGRLNSKDAGYITSPGYPQDYPSHQNCEWIVYAPEPNQKIVLNFNPHFEIEKHDCNLLSAWKISLTSRSFA

SEQ ID NO: 20929 - protein, 563 aa, Homo sapiens
LERATFSKMDMFPLTWVFLALYFSRHQVRGQPDPPCGGRLNSKDAGYITSPGYPQDYPSHQNCEWIVYAPEPNQKIVLNFNPHFEIEKHDCKYDFIEIRDGDSESADLLGKHCGNIAPPTIISSGSMLYIKFTSDYARQGAGFSLRYEIFKTGSEDCSKNFTSPNGTIESPGFPEKYPHNLDCTFTILAKPKMEIILQFLIFDLEHDPLQVGEGDCKYDWLDIWDGIPHVGPLIGKYCGTKTPSELRSSTGILSLTFHTDMAVAKDGFSARYYLVHQEPLENFQCNVPLGMESGRIANEQISASSTYSDGRWTPQQSRLHGDDNGWTPNLDSNKEYLQVDLRFLTMLTAIATQGAISRETQNGYYVKSYKLEVSTNGEDWMVYRHGKNHKVFQANNDATEVVLNKLHAPLLTRFVRIRPQTWHSGIALRLELFGCRVTDAPCSNMLGMLSGLIADSQISASSTQEYLWSPSAARLVSSRSGWFPRIPQAQPGEEWLQVDLGTPKTVKGVIIQGARGGDSITAVEARAFVRKFKVSYSLNGKDWEYIQDPRTQQPKVGCSWRPL

SEQ ID NO: 20930 - protein, 909 aa, Homo sapiens
LERATFSKMDMFPLTWVFLALYFSRHQVRGQPDPPCGGRLNSKDAGYITSPGYPQDYPSHQNCEWIVYAPEPNQKIVLNFNPHFEIEKHDCKYDFIEIRDGDSESADLLGKHCGNIAPPTIISSGSMLYIKFTSDYARQGAGFSLRYEIFKTGSEDCSKNFTSPNGTIESPGFPEKYPHNLDCTFTILAKPKMEIILQFLIFDLEHDPLQVGEGDCKYDWLDIWDGIPHVGPLIGKYCGTKTPSELRSSTGILSLTFHTDMAVAKDGFSARYYLVHQEPLENFQCNVPLGMESGRIANEQISASSTYSDGRWTPQQSRLHGDDNGWTPNLDSNKEYLQVDLRFLTMLTAIATQGAISRETQNGYYVKSYKLEVSTNGEDWMVYRHGKNHKVFQANNDATEVVLNKLHAPLLTRFVRIRPQTWHSGIALRLELFGCRVTDAPCSNMLGMLSGLIADSQISASSTQEYLWSPSAARLVSSRSGWFPRIPQAQPGEEWLQVDLGTPKTVKGVIIQGARGGDSITAVEARAFVRKFKVSYSLNGKDWEYIQDPRTQQPKLFEGNMHYDTPDIRRFDPIPAQYVRVYPERWSPAGIGMRLEVLGCDWTDSKPTVETLGPTVKSEETTTPYPTEEEATECGENCSFEDDKDLQLPSGFNCNFDFLEEPCGWMYDHAKWLRTTWASSSSPNDRTFPDDRNFLRLQSDSQREGQYARLISPPVHLPRSPVCMEFQYQATGGRGVALQVVREASQESKLLWVIREDQGGEWKHGRIILPSYDMEYQIVFEGVIGKGRSGEIAIDDIRISTDVPLENCMEPISAFAGGTLLPGTEPTVDTVPMQPIPAYWYYVMAAGGAVLVLVSVALALVLHYHRFRYAAKKTDHSITYKTSHYTNGAPLAVEPTLTIKLEQDRGSHC

SEQ ID NO: 20931 - protein, 934 aa, Homo sapiens
LERATFSKMDMFPLTWVFLALYFSRHQVRGQPDPPCGGRLNSKDAGYITSPGYPQDYPSHQNCEWIVYAPEPNQKIVLNFNPHFEIEKHDCKYDFIEIRDGDSESADLLGKHCGNIAPPTIISSGSMLYIKFTSDYARQGAGFSLRYEIFKTGSEDCSKNFTSPNGTIESPGFPEKYPHNLDCTFTILAKPKMEIILQFLIFDLEHDPLQVGEGDCKYDWLDIWDGIPHVGPLIGKYCGTKTPSELRSSTGILSLTFHTDMAVAKDGFSARYYLVHQEPLENFQCNVPLGMESGRIANEQISASSTYSDGRWTPQQSRLHGDDNGWTPNLDSNKEYLQVDLRFLTMLTAIATQGAISRETQNGYYVKSYKLEVSTNGEDWMVYRHGKNHKVFQANNDATEVVLNKLHAPLLTRFVRIRPQTWHSGIALRLELFGCRVTDAPCSNMLGMLSGLIADSQISASSTQEYLWSPSAARLVSSRSGWFPRIPQAQPGEEWLQVDLGTPKTVKGVIIQGARGGDSITAVEARAFVRKFKVSYSLNGKDWEYIQDPRTQQPKLFEGNMHYDTPDIRRFDPIPAQYVRVYPERWSPAGIGMRLEVLGCDWTDSKPTVETLGPTVKSEETTTPYPTEEEATECGENCSFEDDKDLQLPSGFNCNFDFLEEPCGWMYDHAKWLRTTWASSSSPNDRTFPDDRNFLRLQSDSQREGQYARLISPPVHLPRSPVCMEFQYQATGGRGVALQVVREASQESKLLWVIREDQGGEWKHGRIILPSYDMEYQIVFEGVIGKGRSGEIAIDDIRISTDVPLENCMEPISAFAVDIPEIHEREGYEDEIDDEYEVDWSNSSSATSGSGAPSTDKEKSWLYTLDPILITIIAMSSLGVLLGATCAGLLLYCTCSYSGLSSRSCTTLENYNFELYDGLKHKVKMNHQKCCSEA

SEQ ID NO: 20932 - protein, 110 aa, Homo sapiens
LPRSPVCMEFQYQATGGRGVALQVVREASQESKLLWVIREDQGGEWKHGRIILPSYDMEYQIVFEGVIGKGRSGEIAIDDIRISTDVPLENCMEPISAFAVPGYQGSGFS

SEQ ID NO: 20933 - protein, 29 aa, Homo sapiens
LVLFQRLVRLFFPLALSHTSSQWAVCQET

SEQ ID NO: 20934 - protein, 68 aa, Homo sapiens
MIFFFFLAAWERLSAFFHDIQICPFSTHTQLSHLVRFILPKERCSPTLTLFQRATLSQPQQPCQEKAR

SEQ ID NO: 20935 - protein, 96 aa, Homo sapiens
LGTAPETLPDPAPLTDSLLAAPYIFLSAGAVQKGDFGPKGIGMKGDQSERRWQWTRKLGCRCYCSPLGSGESLSLSSKRGEDHIFILETKKCSQGR

SEQ ID NO: 20936 - protein, 61 aa, Homo sapiens
LAWAGESPASHQSERRWQWTRKLGCRCYCSPLGSGESLSLSSKRGEDHIFILETKKCSQGR

SEQ ID NO: 20937 - protein, 77 aa, Homo sapiens
VELSDTADTMGFGDLKSPAGLQVLNDYLADKSYIEGYVPSQADVAVFEAVSSPPPADLCHALRWYNHIKSYEKEKAR

SEQ ID NO: 20938 - protein, 234 aa, Homo sapiens
VELSDTADTMGFGDLKSPAGLQVLNDYLADKSYIEGYVPSQADVAVFEAVSSPPPADLCHALRWYNHIKSYEKEKASLPGVKKALGKYGPADVEDTTGSGATDSKDDDDIDLFGSDDEEESEEAKRLREERLAQYESKKAKKPALVAKSSILLDVKPWDDETDMAKLEECVRSIQADGLVWGSSKLVPVGYGIKKLQIQCVVEDDKVGTDMLEEQITAFEDYVQSMDVAAFNKI

SEQ ID NO: 20939 - protein, 41 aa, Homo sapiens
MPILLIYFQTQRKVHGQFVGHLIQGPQFVRGEVGMQKYFDL

SEQ ID NO: 20940 - protein, 90 aa, Homo sapiens
VGRPQFARSLSAAPQLSDTADTMGFGDLKSPAGLQVLNDYLADKSYIEGYVPSQADVAVFEAVSSPPPADLCHALRWYNHIKSYEKEKAR

SEQ ID NO: 20941 - protein, 10 aa, Homo sapiens
MTIASLLTEI

SEQ ID NO: 20942 - protein, 12 aa, Homo sapiens
LWFSCGMLWIML

SEQ ID NO: 20943 - protein, 51 aa, Homo sapiens
LFIFVFRVAVLCVSRSAYCLGSSHPRGFLAMKMRHLNAMGFHVILVRKKCK

SEQ ID NO: 20944 - protein, 111 aa, Homo sapiens
MSVNLNSERQFEDAASGDVQTYQIRTAPTSTIAPGVVMASSPALPTQPAEEAARKREVRLMKNREAARECRRKKKEYVKCLENRVAVLENQNKTLIEELKALKDLYCHKSD

SEQ ID NO: 20945 - protein, 116 aa, Homo sapiens
MPEDLALESNPSDHPRASTIFLSKSQTDVREKRKSNHLNHVSPGQLTKKYSSCSTIFLDDSTVSQPNLRTTVKCVTLAIYYHIKNSEKKFQRNTLSMILSTNLFTDLFVLFLVLHS

SEQ ID NO: 20946 - protein, 422 aa, Homo sapiens
LSRFIEVKMSKKISGGSVVEMQGDEMTRIIWELIKEKLIFPYVELDLHSYDLGIENRDATNDQVTKDAAEAIKKHNVGVKCATITPDEKRVEEFKLKQMWKSPNGTIRNILGGTVFREAIICKNIPRLVSGWVKPIIIGRHAYGDQYRATDFVVPGPGKVEITYTPSDGTQKVTYLVHNFEEGGGVAMGMYNQDKSIEDFAHSSFQMALSKGWPLYLSTKNTILKKYDGRFKDIFQEIYDKQYKSQFEAQKIWYEHRLIDDMVAQAMKSEGGFIWACKNYDGDVQSDSVAQGYGSLGMMTSVLVCPDGKTVEAEAAHGTVTRHYRMYQKGQETSTNPIASIFAWTRGLAHRAKLDNNKELAFFANALEEVSIETIEAGFMTKDLAACIKGLPNVQRSDYLNTFEFMDKLGENLKIKLAQAKL

SEQ ID NO: 20947 - protein, 185 aa, Homo sapiens
LSRFIEVKMSKKISGGSVVEMQGDEMTRIIWELIKEKLIFPYVELDLHSYDLGIENRDATNDQVTKDAAEAIKKHNVGVKCATITPDEKRVEEFKLKQMWKSPNGTIRNILGGTVFREAIICKNIPRLVSGWVKPIIIGRHAYGDQVSHVGNNVILHVFFFMAQKFPTCMCFILIFWYLHPLSKV

SEQ ID NO: 20948 - protein, 376 aa, Homo sapiens
LSLGFQYLSTGIAMTPALREATAKGISFSSLPSTMESDKMLYMESPRTVDEKLKGDTFSQMLGFPTPEPTLNTNFVNLKHFGSPQSSKHYQTVFLMRSNSTLNKHNENYKQKKLGEPSCNKLKNILYNGSNIQLSKICLSHSEEFIKKEPLSDTTSQCMKDVQIILDSNITKDTNVDKVQLQNCKWYQENALLDKVTDAEIKKGLLHCTQKKIVPGHSNVPVSSSAAEKEEEVHARLLHCVSKQKILLSQARRTQKHLQMLLAKHVVKHYGQQMKLSMKHQLPKMKTFHEPTTILGNSLPKCTEIKPEVNTLTAENKLWDDAKNGFARCTAAEIQRFAFSATGLLSHVEEGLDSDATDSSSDDDLDEYTLRKNVAV

SEQ ID NO: 20949 - protein, 419 aa, Homo sapiens
LGGKIALLLLSGAAGLASGVMAQRAFPNPYADYNKSLAEGYFDAAGRLTPEFSQRLTNKIRELLQQMERGLKSADPRDGTGYTGWAGIAVLYLHLYDVFGDPAYLQLAHGYVKQSLNCLTKRSITFLCGDAGPLAVAAVLYHKMNNEKQAEDCITRLIHLNKIDPHAPNEMLYGRIGYIYALLFVNKNFGVEKIPQSHIQQICETILTSGENLARKRNFTAKSPLMYEWYQEYYVGAAHGLAGIYYYLMQPSLQVSQGKLHSLVKPSVDYVCQLKFPSGNYPPCIGDNRDLLVHWCHGAPGVIYMLIQAYKVFREEKYLCDAYQCADVIWQYGLLKKGYGLCHGSAGNAYAFLTLYNLTQDMKYLYRACKFAEWCLEYGEHGCRTPDTPFSLFEGMAGTIYFLADLLVPTKARFPAFEL

SEQ ID NO: 20950 - protein, 12 aa, Homo sapiens
MAFRNDGETDTL

SEQ ID NO: 20951 - protein, 841 aa, Homo sapiens
MKPATGLWVWVSLLVAAGTVQPSDSQSVCAGTENKLSSLSDLEQQYRALRKYYENCEVVMGNLEITSIEHNRDLSFLRSVREVTGYVLVALNQFRYLPLENLRIIRGTKLYEDRYALAIFLNYRKDGNFGLQELGLKNLTEILNGGVYVDQNKFLCYADTIHWQDIVRNPWPSNLTLVSTNGSSGCGRCHKSCTGRCWGPTENHCQTLTRTVCAEQCDGRCYGPYVSDCCHRECAGGCSGPKDTDCFACMNFNDSGACVTQCPQTFVYNPTTFQLEHNFNAKYTYGAFCVKKCPHNFVVDSSSCVRACPSSKMEVEENGIKMCKPCTDICPKACDGIGTGSLMSAQTVDSSNIDKFINCTKINGNLIFLVTGIHGDPYNAIEAIDPEKLNVFRTVREITGFLNIQSWPPNMTDFSVFSNLVTIGGRVLYSGLSLLILKQQGITSLQFQSLKEISAGNIYITDNSNLCYYHTINWTTLFSTINQRIVIRDNRKAENCTAEGMVCNHLCSSDGCWGPGPDQCLSCRRFSRGRICIESCNLYDGEFREFENGSICVECDPQCEKMEDGLLTCHGPGPDNCTKCSHFKDGPNCVEKCPDGLQGANSFIFKYADPDRECHPCHPNCTQGCNGPTSHDCIYYPWTGHSTLPQHARTPLIAAGVIGGLFILVIVGLTFAVYVRRKSIKKKRALRRFLETELVEPLTPSGTAPNQAQLRILKETELKRVKVLGSGAFGTVYKGIWVPEGETVKIPVAIKILNETTGPKANVEFMDEALIMASMDHPHLVRLLGVCLSPTIQLVTQLMPHGCLLEYVHEHKDNIGSQLLLNWCVQIAKVSACQFLWKLHF

SEQ ID NO: 20952 - protein, 117 aa, Homo sapiens
LRTWCRRCCLPLALNPVPAAMAPGQLALFSVSDKTGLVEFARNLTALGLNLVASGGTAKALRDAGLAVRDVSELTGFPEMLGGRVKTLHPAVHAGILARNIPEDNADMARLDFNLIR

SEQ ID NO: 20953 - protein, 104 aa, Homo sapiens
LRTWCRRCCLPLALNPVPAAMAPGQLALFSVSDKTGLVEFARNLTALGLNLVASGGTAKALRDAGLAVRDVSELTGFPEMLGGRVKTLHPAVHAELLPAISIPL

SEQ ID NO: 20954 - protein, 612 aa, Homo sapiens
LRTWCRRCCLPLALNPVPAAMAPGQLALFSVSDKTGLVEFARNLTALGLNLVASGGTAKALRDAGLAVRDVSELTGFPEMLGGRVKTLHPAVHAGILARNIPEDNADMARLDFNLIRVVACNLYPFVKTVASPGVTVEEAVEQIDIGGVTLLRAAAKNHARVTVVCEPEDYVVVSTEMQSSESKDTSLETRRQLALKAFTHTAQYDEAISDYFRKQYSKGVSQMPLRYGMNPHQTPAQLYTLQPKLPITVLNGAPGFINLCDALNAWQLVKELKEALGIPAAASFKHVSPAGAAVGIPLSEDEAKVCMVYDLYKTLTPISAAYARARGADRMSSFGDFVALSDVCDVPTAKIISREVSDGIIAPGYEEEALTILSKKKNGNYCVLQMDQSYKPDENEVRTLFGLHLSQKRNNGVVDKSLFSNVVTKNKDLPESALRDLIVATIAVKYTQSNSVCYAKNGQVIGIGAGQQSRIHCTRLAGDKANYWWLRHHPQVLSMKFKTGVKRAEISNAIDQYVTGTIGEDEDLIKWKALFEEVPELLTEAEKKEWVEKLTEVSISSDAFFPFRDNVDRAKRSGVAYIAAPSGSAADKVVIEACDELGIILAHTNLRLFHH

SEQ ID NO: 20955 - protein, 212 aa, Homo sapiens
LAAAGGTRHCRGGAAGLKASVPAPRPGRSLRGARLRAARGSLFSVSDKTGLVEFARNLTALGLNLVASGGTAKALRDAGLAVRDVSELTGFPEMLGGRVKTLHPAVHAGILARNIPEDNADMARLDFNLIRVVACNLYPFVKTVASPGVTVEEAVEQIDIGGVTLLRAAAKNHARVTVVCEPEDYVVVSTEMQSSESKDTSLETRRQLALKF

SEQ ID NO: 20956 - protein, 66 aa, Homo sapiens
MPLLSQGWRCDNCRRPGGEPSPEGTTGQSYNQYSQRYHQRTNTNVNCPIECFMPLDVQADREDSRE

SEQ ID NO: 20957 - protein, 147 aa, Homo sapiens
LVLTFPTPTGWCHDNGVNYKIGEKWDRQGENGQMMSCTCLGNGKGEFKCDPHEATCYDDGKTYHVGEQWQKEYLGAICSCTCFGGQRGWRCDNCRRPGGEPSPEGTTGQSYNQYSQRYHQRTNTNVNCPIECFMPLDVQADREDSRE

SEQ ID NO: 20958 - protein, 640 aa, Homo sapiens
MTISTAIPAPTDLKFTQVTPTSLSAQWTPPNVQLTGYRVRVTPKEKTGPMKEINLAPDSSSVVVSGLMVATKYEVSVYALKDTLTSRPAQGVVTTLENVSPPRRARVTDATETTITISWRTKTETITGFQVDAVPANGQTPIQRTIKPDVRSYTITGLQPGTDYKIYLYTLNDNARSSPVVIDASTAIDAPSNLRFLATTPNSLLVSWQPPRARITGYIIKYEKPGSPPREVVPRPRPGVTEATITGLEPGTEYTIYVIALKNNQKSEPLIGRKKTDELPQLVTLPHPNLHGPEILDVPSTVQKTPFVTHPGYDTGNGIQLPGTSGQQPSVGQQMIFEEHGFRRTTPPTTATPIRHRPRPYPPNVGQEALSQTTISWAPFQDTSEYIISCHPVGTDEEPLQFRVPGTSTSATLTGLTRGATYNVIVEALKDQQRHKVREEVVTVGNSVNEGLNQPTDDSCFDPYTVSHYAVGDEWERMSESGFKLLCQCLGFGSGHFRCDSSRWCHDNGVNYKIGEKWDRQGENGQMMSCTCLGNGKGEFKCDPHEATCYDDGKTYHVGEQWQKEYLGAICSCTCFGGQRGWRCDNCRRPGGEPSPEGTTGQSYNQYSQRYHQRTNTNVNCPIECFMPLDVQADREDSRE

SEQ ID NO: 20959 - protein, 110 aa, Homo sapiens
LSCESEYTNNFLVLTFPTPTGWCHDNGVNYKIGEKWDRQGENGQMMSCTCLGNGKGEFKCDPHEATCYDDGKTYHVGEQWQKEYLGAICSCTCFGGQRVRLDVPGSLQVR

SEQ ID NO: 20960 - protein, 239 aa, Homo sapiens
LSLPSCSKPAVPPPTDLRFTNIGPDTMRVTWAPPPSIDLTNFLVRYSPVKNEEDVAELSISPSDNAVVLTNLLPGTEYVVSVSSVYEQHESTPLRGRQKTGLDSPTGIDFSDITANSFTVHWIAPRATITGYRIRHHPEHFSGRPREDRVPHSRNSITLTNLTPGTEYVVSIVALNGREESPLLIGQQSTVSDVPRDLEVVAATPTSLLISWDAPAVTVRYYRITYGETGTAVKCYFTL

SEQ ID NO: 20961 - protein, 122 aa, Homo sapiens
LIYTALFFPLFFPLFSFCLPLPLLCNSIEVPQLTDLSFVDITDSSIGLRWTPLNSSTIIGYRITVVAAGEGIPIFEDFVDSSVGYYTVTGLEPGIDYDISVITLINGGESAPTTLTQQTGEF

SEQ ID NO: 20962 - protein, 33 aa, Homo sapiens
MMAFICLYIILIPVRGKCNTLTTALEIASHLDC

SEQ ID NO: 20963 - protein, 862 aa, Homo sapiens
LDRTRRETRTTDKICVSGGSNTTRSRLRRNGENVRMLGGNLRMLGGNLRMLGENLRMLGRNLRELGGNLRKLGGNLRMLRVPGHGFPAPFRPSRKRSGSFRYLPLVHRKRVATRQVPARKKRPKRLRTGNMVRSGNKAAVVLCMDVGFTMSNSIPGIESPFEQAKKVITMFVQRQVFAENKDEIALVLFGTDGTDNPLSGGDQYQNITVHRHLMLPDFDLLEDIESKIQPGSQQADFLDALIVSMDVIQHETIGKKFEKRHIEIFTDLSSRFSKSQLDIIIHSLKKCDISLQFFLPFSLGKEDGSGDRGDGPFRLGGHGPSFPLKGITEQQKEGLEIVKMVMISLEGEDGLDEIYSFSESLRKLCVFKKIERHSIHWPCRLTIGSNLSIRIAAYKSILQERVKKTWTVVDAKTLKKEDIQKETVYCLNDDDETEVLKEDIIQGFRYGSDIVPFSKVDEEQMKYKSEGKCFSVLGFCKSSQVQRRFFMGNQVLKVFAARDDEAAAVALSSLIHALDDLDMVAIVRYAYDKRANPQVGVAFPHIKHNYECLVYVQLPFMEDLRQYMFSSLKNSKKYAPTEAQLNAVDALIDSMSLAKKDEKTDTLEDLFPTTKIPNPRFQRLFQCLLHRALHPREPLPPIQQHIWNMLNPPAEVTTKSQIPLSKIKTLFPLIEAKKKDQVTAQEIFQDNHEDGPTAKKLKTEQGGAHFSVSSLAEGSVTSVGSVNPAENFRVLVKQKKASFEEASNQLINHIEQFLDTNETPYFMKSIDCIRAFREEAIKFSEEQRFNNFLKALQEKVEIKQLNHFWEIVVQDGITLITKEEASGSSVTAEEAKKFLAPKDKPSGDTAAVFEEGGDVDDLLDMI

SEQ ID NO: 20964 - protein, 156 aa, Homo sapiens
LPLVHRKRVATRQVPARKKRPKRLRTGNMVRSGNKAAVVLCMDVGFTMSNSIPGIESPFEQAKKVITMFVQRQVFAENKDEIALVLFGTDGTDNPLSGGDQYQNITVHRHLMLPDFDLLEDIESKIQPGSQQADCILFLPEKTLRNFLYSGNRTAV

SEQ ID NO: 20965 - protein, 140 aa, Homo sapiens
LPLVHRKRVATRQVPARKKRPKRLRTGNMVRSGNKAAVVLCMDVGFTMSNSIPGIESPFEQAKKVITMFVQRQVFAENKDEIALVLFGTDGTDNPLSGGDQYQNITVHRHLMLPDFDLLEDIESKIQPGSQQADSESWMH

SEQ ID NO: 20966 - protein, 145 aa, Homo sapiens
LPENRIIPLVLFHFLLLPLLTPQPPPPPRRPRLWLHGSAARARGLRAGPQGRGRRRRIMKAGVATAPDGGQQPEDEPEQPPPRRHPDAEQQSPPPPQQQLRARADPEPEEEGDRDPEEEEEEKARPLARPDLPFSRLLPLDRRDL

SEQ ID NO: 20967 - protein, 15 aa, Homo sapiens
MLLLWLFVAIVCESG

SEQ ID NO: 20968 - protein, 16 aa, Homo sapiens
LPWLVNFIRHSDVCIV

SEQ ID NO: 20969 - protein, 279 aa, Homo sapiens
VPPARPPARSLARRAALPTASMLPRVGCPALPLPPPPLLPLLLLLLGASGGGGGARAEVLFRCPPCTPERLAACGPPPVAPPAAVAAVAGGARMPCAELVREPGCGCCSVCARLEGEACGVYTPRCGQGLRCYPHPGSELPLQALVMGEGTCEKRRDAEYGASPEQVADNGDDHSEGGLVENHVDSTMNMLGGGGSAGRKPLKSGMKELAVFREKVTEQHRQMGKGGKHHLGLEEPKKLRPPPARVSEGQVWWKGWEDKESGVSAGGGHPNKTLIWCDL

SEQ ID NO: 20970 - protein, 346 aa, Homo sapiens
VPPARPPARSLARRAALPTASMLPRVGCPALPLPPPPLLPLLLLLLGASGGGGGARAEVLFRCPPCTPERLAACGPPPVAPPAAVAAVAGGARMPCAELVREPGCGCCSVCARLEGEACGVYTPRCGQGLRCYPHPGSELPLQALVMGEGTCEKRRDAEYGASPEQVADNGDDHSEGGLVENHVDSTMNMLGGGGSAGRKPLKSGMKELAVFREKVTEQHRQMGKGGKHHLGLEEPKKLRPPPARTPCQQELDQVLERISTMRLPDERGPLEHLYSLHIPNCDKHGLYNLKQCKMSLNGQRGECWCVNPNTGKLIQGAPTIRGDPECHLFYNEQQEARGVHTQRMQ

SEQ ID NO: 20971 - protein, 229 aa, Homo sapiens
LPRRLRQENRLNLGGGCCGYNVSLLYDLENLPASKDSIVHQAGMLKRNCFASVFEKYFQFQEEGKEGENRAVIHYRDDETMYVESKKDRVTVVFSTVFKDDDDVVIGKVFMQEFKEGRRASHTAPQVLFSHREPPLELKDTDAAVGDNIGYITFVLFPRHTNASARDNTINLIHTFRDYLHYHIKCSKAYIHTRMRAKTSDFLKVLNRARPDAEKKEMKTITGKTFSSR

SEQ ID NO: 20972 - protein, 125 aa, Homo sapiens
LPGPGGLATLRGQERSVWNGAGPGHGYDGEERAVSDSFGPGEWDDRKVRHTFIRKVYSIISVQLLITVAIIAIFTFVEPVSAFVRRNVAVYYVSYAVFVVTYLILACCQGPRSVSLAHVVPAYHT

SEQ ID NO: 20973 - protein, 71 aa, Homo sapiens
LPGPGGLATLRGQERSVWNGAGRCQPQTSSLVEALLMWKWPGPSWRLGRSPRAGSKAAKPGSPGPRRLLPV

SEQ ID NO: 20974 - protein, 51 aa, Homo sapiens
VEQELSWLWGFLVCQMTRQMPAPNLIPSGGLADVEVARALMEAGQKPKSRL

SEQ ID NO: 20975 - protein, 29 aa, Homo sapiens
LPGPGGLATLRGQERSVWNGADASPKPHP

SEQ ID NO: 20976 - protein, 64 aa, Homo sapiens
VLLWATVLGLLCQRLAARLGVVTGKDLGEVCHLYYPKSESRSVAQSGVQWCDVSSLQPLPPRYK

SEQ ID NO: 20977 - protein, 11 aa, Homo sapiens
LSGLALLIFKW

SEQ ID NO: 20978 - protein, 275 aa, Homo sapiens
MDSSAVITQISKEEARGPLRGKGDQKSAASQKPRSRGILHSLFCCVCRDDGEALPAHSGAPLLVEENGAIPKTPVQYLLPEAKAQDSDKICVVIDLDETLVHSSFKPVNNADFIIPVEIDGVVHQVYVLKRPHVDEFLQRMGELFECVLFTASLAKYADPVADLLDKWGAFRARLFRESCVFHRGNYVKDLSRLGRDLRRVLILDNSPASYVFHPDNAVSAGWTGTGTGAETQEGVSPFRPPWPLGSPVGGWVPSQSFLHSLPVPAAHSPHPPAL

SEQ ID NO: 20979 - protein, 48 aa, Homo sapiens
LGLEIGKLRPREAKRLCLSKTTRPPARKISVFLLWCPPVSYLTLPSRR

SEQ ID NO: 20980 - protein, 147 aa, Homo sapiens
LQHPILCLHLLKVLYSCCLVSEGLCRLLGQEPLALESLFMLIQGKVKVVDWEESTEVTLYFLSLLVFRLQNLPCGMEKLGSDVATLFTHSHVVSLVSAAACLLGQLGQQGVTFDLQPMEWMAAATHALSAPAELLTEVQMDLGMDGK

SEQ ID NO: 20981 - protein, 89 aa, Homo sapiens
LLLIVPPITCTWDRPGWRVTLAVCVPAKELWPASRCALKGDEGRCLARGFGLLHCMLGLLLLSVPPLTQLWSGFGRVVNCAARTRSGAG

SEQ ID NO: 20982 - protein, 36 aa, Homo sapiens
LESPGSLFLSSCRASRAGEEHILSMELVVKVDRGRW

SEQ ID NO: 20983 - protein, 80 aa, Homo sapiens
MAPKKLSCLRSLLLPLSLTLLLPQADTRSFVVDRGHDRFLLDGAPFRYVSGSLHYFRVPRVLWADRLLKMRWSGLNAIQL

SEQ ID NO: 20984 - protein, 580 aa, Homo sapiens
LGLRLCSSGSSAAHRRRRKAAAPAGDQEASGSWQGLPGDAPQPHSRPESPGRQGWKGRGEGQLWPLGKDRLACSRPKSEHLDDRCLQDAGAGETRPATAPCISAEALGSPACLLKTRKEWLKPESRLLIPAGQRECISVHVGQAGVQMGNACWELYCLEHGIQPDGQMPSDKTIGGGDDSFTTFFCETGAGKHVPRAVFVDLEPTVIDEIRNGPYRQLFHPEQLITGKEDAANNYARGHYTIGKEIIDPVLDRIRKLSDQCTGLQGFLVFHSFGGGTGSGFTSLLMERLSVDYGKKSKLEFSIYPAPQVSTAVVEPYNSILTTHTTLEHSDCAFMVDNEAIYDICRRNLDIERPTYTNLNRLISQIVSSITASLRFDGALNVDLTEFQTNLVPYPRIHFPLATYAPVISAEKAYHEQLSVAEITNACFEPANQMVKCDPRHGKYMACCLLYRGDVVPKDVNAAIAAIKTKRSIQFVDWCPTGFKVGINYQPPTVVPGGDLAKVQRAVCMLSNTTAIAEAWARLDHKFDLMYAKRAFVHWYVGEGMEEGEFSEAREDMAALEKDYEEVGIDSYEDEDEGEE

SEQ ID NO: 20985 - protein, 293 aa, Homo sapiens
VSPGSPAVPAFPRQVSECQSLDNPLNVLAWEGSPSQREGEMIWSLFAEHKREIYDRYGREGLTGTGTGPSRAEAGSGGPGFTFTFRSPEEVFREFFGSGDPFAELFDDLGPFSELQNRGSRHSGPFFTFSSSFPGHSGKFCPFPRLQAPIPGTPGLSLLLFQACLLCWEPCLQQPCEAAWSLGDHNRQRSLLLTTSPPPPLSRCQISPPHLSPSVLGLVLFALFLHLPPLSKDAASPHAGESSFWGHRGVRGLLGSCVQIESWLLEGRAQSALSTAVARTGTSACRILSLLVA

SEQ ID NO: 20986 - protein, 982 aa, Homo sapiens
VGSGKPRLSPSGRLPPASLRLRPGSERPELGKMRRPRRPGGLGGSGGLRLLLCLLLLSSRPGGCSAVSAHGCLFDRRLCSHLEVCIQDGLFGQCQVGVGQARPLLQVTSPVLQRLQGVLRQLMSQGLSWHDDLTQYVISQEMERIPRLRPPEPRPRDRSGLAPKRPGPAGELLLQDIPTGSAPAAQHRLPQPPVGKGGAGASSSLSPLQAELLPPLLEHLLLPPQPPHPSLSYEPALLQPYLFHQFGSRDGSRVSEGSPGMVSVGPLPKAEAPALFSRTASKGIFGDHPGHSYGDLPGPSPAQLFQDSGLLYLAQELPAPSRARVPRLPEQGSSSRAEDSPEGYEKEGLGDRGEKPASPAVQPDAALQRLAAVLAGYGVELRQLTPEQLSTLLTLLQLLPKGAGRNPGGVVNVGADIKKTMEGPVEGRDTAELPARTSPMPGHPTASPTSSEVQQVPSPVSSEPPKAARPPVTPVLLEKKSPLGQSQPTVAGQPSARPAAEEYGYIVTDQNVVGPALTFRIRHNEQNLSLADVTQQAGLVKSELEAQTGLQILQTGVGQREEAAAVLPQTAHSTSPMRSVLLTLVALAGVAGLLVALAVALCVRQHARQQDKERLAALGPEGAHGDTTFEYQDLCRQHMATKSLFNRAEGPPEPSRVSSVSSQFSDAAQASPSSHSSTPSWCEEPAQANMDISTGHMILAYMEDHLRNRDRLAKEWQALCAYQAEPNTCATAQGEGNIKKNRHPDFLPYDHARIKLKVESSPSRSDYINASPIIEHDPRMPAYIATQGPLSHTIADFWQMVWESGCTVIVMLTPLVEDGVKQCDRYWPDEGASLYHVYEVNLVSEHIWCEDFLVRSFYLKNVQTQETRTLTQFHFLSWPAEGTPASTRPLLDFRRKVNKCYRGRSCPIIVHCSDGAGRTGTYILIDMVLNRMAKGVKEIDIAATLEHVRDQRPGLVRSKDQFEFALTAVAEEVNAILKALPQ

SEQ ID NO: 20987 - protein, 1011 aa, Homo sapiens
VGSGKPRLSPSGRLPPASLRLRPGSERPELGKMRRPRRPGGLGGSGGLRLLLCLLLLSSRPGGCSAVSAHGCLFDRRLCSHLEVCIQDGLFGQCQVGVGQARPLLQVTSPVLQRLQGVLRQLMSQGLSWHDDLTQYVISQEMERIPRLRPPEPRPRDRSGLAPKRPGPAGELLLQDIPTGSAPAAQHRLPQPPVGKGGAGASSSLSPLQAELLPPLLEHLLLPPQPPHPSLSYEPALLQPYLFHQFGSRDGSRVSEGSPGMVSVGPLPKAEAPALFSRTASKGIFGDHPGHSYGDLPGPSPAQLFQDSGLLYLAQELPAPSRARVPRLPEQGSSSRAEDSPEGYEKEGLGDRGEKPASPAVQPDAALQRLAAVLAGYGVELRQLTPEQLSTLLTLLQLLPKGAGRNPGGVVNVGADIKKTMEGPVEGRDTAELPARTSPMPGHPTASPTSSEVQQVPSPVSSEPPKAARPPVTPVLLEKKSPLGQSQPTVAGQPSARPAAEEYGYIVTDQKPLSLAAGVKLLEILAEHVHMSSGSFINISVVGPALTFRIRHNEQNLSLADVTQQAGLVKSELEAQTGLQILQTGVGQREEAAAVLPQTAHSTSPMRSVLLTLVALAGVAGLLVALAVALCVRQHARQQDKERLAALGPEGAHGDTTFEYQDLCRQHMATKSLFNRAEGPPEPSRVSSVSSQFSDAAQASPSSHSSTPSWCEEPAQANMDISTGHMILAYMEDHLRNRDRLAKEWQALCAYQAEPNTCATAQGEGNIKKNRHPDFLPYDHARIKLKVESSPSRSDYINASPIIEHDPRMPAYIATQGPLSHTIADFWQMVWESGCTVIVMLTPLVEDGVKQCDRYWPDEGASLYHVYEVNLVSEHIWCEDFLVRSFYLKNVQTQETRTLTQFHFLSWPAEGTPASTRPLLDFRRKVNKCYRGRSCPIIVHCSDGAGRTGTYILIDMVLNRMAKGVKEIDIAATLEHVRDQRPGLVRSKDQFEFALTAVAEEVNAILKALPQ

SEQ ID NO: 20988 - protein, 432 aa, Homo sapiens
MAGFSELKETEKWNIKPESKYFMTRNSSTIIAFAVGGQYVPGNGFSLIGAHTDSPCLRVKRRSRRSQVGFQQVGVETYGGGIWSTWFDRDLTLAGRVIVKCPTSGRLEQQLVHVERPILRIPHLAIHLQRNINENFGPNTEMHLVPILATAIQEELEKGTPEPGPLNAVDERHHSVLMSLLCAHLGLSPKDIVEMELCLADTQPAVLGGAYDEFIFAPRLDNLHSCFCALQALIDSCAGPGSLATEPHVRMVTLYDNEEVGSESAQGAQSLLTELVLRRISASCQHPTAFEEAIPKSFMISADMAHAVHPNYLDKHEENHRPLFHKGPVIKVNSKQRYASNAVSEALIREVANKVKVPLQDLMVRNDTPCGTTIGPILASRLGLRVLDLGSPQLAMHSIREMACTTGVLQTLTLFKGFFELFPSLSHNLLVD

SEQ ID NO: 20989 - protein, 506 aa, Homo sapiens
LSTPALGGGEQVTMARSLSIMFVPNSWLNGYHKVAMNGKARKEAVQTAAKELLKFVNRSPSPFHAVAECRNRLLQAGFSELKETEKWNIKPESKYFMTRNSSTIIAFAVGGQYVPGNGFSLIGAHTDSPCLRVKRRSRRSQVGFQQVGVETYGGGIWSTWFDRDLTLAGRVIVKCPTSGRLEQQLVHVERPILRIPHLAIHLQRNINENFGPNTEMHLVPILATAIQEELEKGTPEPGPLNAVDERHHSVLMSLLCAHLGLSPKDIVEMELCLADTQPAVLGGAYDEFIFAPRLDNLHSCFCALQALIDSCAGPGSLATEPHVRMVTLYDNEEVGSESAQGAQSLLTELVLRRISASCQHPTAFEEAIPKSFMISADMAHAVHPNYLDKHEENHRPLFHKGPVIKVNSKQRYASNAVSEALIREVANKVKVPLQDLMVRNDTPCGTTIGPILASRLGLRVLDLGSPQLAMHSIREMACTTGVLQTLTLFKGFFELFPSLSHNLLVD

SEQ ID NO: 20990 - protein, 3285 aa, Homo sapiens
VPPWPPSSGVPPAQLSVAMQKARGTRGEDAGTRAPPSPGVPPKRAKVGAGGGAPVAVAGAPVFLRPLKNAAVCAGSDVRLRVVVSGTPQPSLRWFRDGQLLPAPAPEPSCLWLRRCGAQDAGVYSCMAQNERGRASCEAVLTVLEVGDSETAEDDISDVQGTQRLELRDDGAFSTPTGGSDTLVGTSLDTPPTSVTGTSEEQVSWWGSGQTVLEQEAGSGGGTRRLPGSPRQAQATGAGPRHLGVEPLVRASRANLVGASWGSEDSLSVASDLYGSAFSLYRGRALSIHVSVPQSGLRREEPDLQPQLASEAPRRPAQPPPSKSALLPPPSPRVGKRSPPGPPAQPAATPTSPHRRTQEPVLPEDTTTEEKRGKKSKSSGPSLAGTAESRPQTPLSEASGRLSALGRSPRLVRAGSRILDKLQFFEERRRSLERSDSPPAPLRPWVPLRKARSLEQPKSERGAPWGTPGASQEELRAPGSVAERRRLFQQKAASLDERTRQRSPASDLELRFAQELGRIRRSTSREELVRSHESLRATLQRAPSPREPGEPPLFSRPSTPKTSRAVSPAAAQPPSPSSAEKPGDEPGRPRSRGPAGRTEPGEGPQQEVRRRDQFPLTRSRAIQECRSPVPPPAADPPEARTKAPPGRKREPPAQAVRFLPWATPGLEGAAVPQTLEKNRAGPEAEKRLRRGPEEDGPWGPWDRRGARSQGKGRRARPTSPELESSDDSYVSAGEEPLEAPVFEIPLQNVVVAPGADVLLKCIITANPPPQVSWHKDGSALRSEGRLLLRAEGERHTLLLREARAADAGSYMATATNELGQATCAASLTVRPGGSTSPFSSPITSDEEYLSPPEEFPEPGETWPRTPTMKPSPSQNRRSSDTGSKAPPTFKVSLMDQSVREGQDVIMSIRVQGEPKPVVSWLRNRQPVRPDQRRFAEEAEGGLCRLRILAAERGDAGFYTCKAVNEYGARQCEARLEVRAHPESRSLAVLAPLQDVDVGAGEMALFECLVAGPTDVEVDWLCRGRLLQPALLKCKMHFDGRKCKLLLTSVHEDDSGVYTCKLSTAKDELTCSARLTVRPSLAPLFTRLLEDVEVLEGRAARFDCKISGTPPPVVTWTHFGCPMEESENLRLRQDGGLHSLHIAHVGSEDEGLYAVSAVNTHGQAHCSAQLYVEEPRTAASGPSSKLEKMPSIPEEPEQGELERLSIPDFLRPLQDLEVGLAKEAMLECQVTGLPYPTISWFHNGHRIQSSDDRRMTQYRDVHRLVFPAVGPQHAGVYKSVIANKLGKAACYAHLYVTDVVPGPPDGAPQVVAVTGRMVTLTWNPPRSLDMAIDPDSLTYTVQHQVLGSDQWTALVTGLREPGWAATGLRKGVQHIFRVLSTTVKSSSKPSPPSEPVQLLEHGPTLEEAPAMLDKPDIVYVVEGQPASVTVTFNHVEAQVVWRSCRGALLEARAGVYELSQPDDDQYCLRICRVSRRDMGALTCTARNRHGTQTCSVTLELAEAPRFESIMEDVEVGAGETARFAVVVEGKPLPDIMWYKDEVLLTESSHVSFVYEENECSLVVLSTGAQDGGVYTCTAQNLAGEVSCKAELAVHSAQTAMEVEGVGEDEDHRGRRLSDFYDIHQEIGRGAFSYLRRIVERSSGLEFAAKFIPSQAKPKASARREARLLARLQHDCVLYFHEAFERRRGLVIVTELCTEELLERIARKPTVCESEIRAYMRQVLEGIHYLHQSHVLHLDVKPENLLVWDGAAGEQQVRICDFGNAQELTPGEPQYCQYGTPEFVAPEIVNQSPVSGVTDIWPVGVVAFLCLTGISPFVGENDRTTLMNIRNYNVAFEETTFLSLSREARGFLIKVLVQDRLRPTAEETLEHPWFKTQAKGAEVSTDHLKLFLSRRRWQRSQISYKCHLVLRPIPELLRAPPERVWVTMPRRPPPSGGLSSSSDSEEEELEELPSVPRPLQPEFSGSRVSLTDIPTEDEALGTPETGAATPMDWQEQGRAPSQDQEAPSPEALPSPGQEPAAGASPRRGELRRGSSAESALPRAGPRELGRGLHKAASVELPQRRSPSPGATRLARGGLGEGEYAQRLQALRQRLLRGGPEDGKVSGLRGPLLESLGGRARDPRMARAASSEAAPHHQPPLENRGLQKSSSFSQGEAEPRGRHRRAGAPLEIPVARLGARRLQESPSLSALSEAQPSSPARPSAPKPSTPKSAEPSATTPSDAPQPPAPQPAQDKAPEPRPEPVRASKPAPPPQALQTLALPLTPYAQIIQSLQLSGHAQGPSQGPAAPPSEPKPHAAVFARVASPPPGAPEKRVPSAGGPPVLAEKARVPTVPPRPGSSLSSSIENLESEAVFEAKFKRSRESPLSLGLRLLSRSRSEERGPFRGAEEEDGIYRPSPAGTPLELVRRPERSRSVQDLRAVGEPGLVRRLSLSLSQRLRRTPPAQRHPAWEARGGDGESSEGGSSARGSPVLAMRRRLSFTLERLSSRLQRSGSSEDSGGASGRSTPLFGRLRRATSEGESLRRLGLPHNQLAAQAGATTPSAESLGSEASATSGSSAPGESRSRLRWGFSRPRKDKGLSPPNLSASVQEELGHQYVRSESDFPPVFHIKLKDQVLLEGEAATLLCLPAACPAPHISWMKDKKSLRSEPSVIIVSCKDGRQLLSIPRAGKRHAGLYECSATNVLGSITSSCTVAVARVPGKLAPPEVPQTYQDTALVLWKPGDSRAPCTYTLERRVDGESVWHPVSSGIPDCYYNVTHLPVGVTVRFRVACANRAGQGPFSNSSEKVFVRGTQDSSAVPSAAHQEAPVTSRPARARPPDSPTSLAPPLAPAAPTPPSVTVSPSSPPTPPSQALSSLKAVGPPPQTPPRRHRGLQAARPAEPTLPSTHVTPSEPKPFVLDTGTPIPASTPQGVKPVSSSTPVYVVTSFVSAPPAPEPPAPEPPPEPTKVTVQSLSPAKEVVSSPGSSPRSSPRPEGTTLRQGPPQKPYTFLEEKARGRFGVVRACRENATGRTFVAKIVPYAAEGKRRVLQEYEVLRTLHHERIMSLHEAYITPRYLVLIAESCGNRELLCGLSDRFRYSEDDVATYMVQLLQGLDYLHGHHVLHLDIKPDNLLLAPDNALKIVDFGSAQPYNPQALRPLGHRTGTLEFMAPEMVKGEPIGSATDIWGAGVLTYIMLSGRSPFYEPDPQETEARIVGGRFDAFQLYPNTSQSATLFLRKVLSVHPWSRPSLQDCLAHPWLQDAYLMKLRRQTLTFTTNRLKEFLGEQRRRRAEAATRHKVLLRSYPGGP

SEQ ID NO: 20991 - protein, 426 aa, Homo sapiens
VVAVTIMLKAVILIGGPQKGTRFRPLSFEVPKPLFPVAGVPMIQHHIEACAQVPGMQEILLIGFYQPDEPLTQFLEAAQQEFNLPVRYLQEFAPLGTGGGLYHFRDQILAGSPEAFFVLNADVCSDFPLSAMLEAHRRQRHPFLLLGTTANRTQSLNYGCIVENPQTHEVLHYVEKPSTFISDIINCGIYLFSPEALKPLRDVFQRNQQDGQLEDSPGLWPGAGTIRLEQDVFSALAGQGQIYVHLTDGIWSQIKSAGSALYASRLYLSRYQDTHPERLAKHTPGGPWIRGNVYIHPTAKVAPSAVLGPNVSIGKGVTVGEGVRLRESIVLHGATLQEHTCVLHSIVGWGSTVGRWARVEGTPSDPNPNDPRARMDSESLFKDGKLLPAITILGCRVRIPAEVLILNSIVLPHKELSRSFTNQIIL

SEQ ID NO: 20992 - protein, 472 aa, Homo sapiens
VRERETPGAESPASRGVVGASHVTSEAARPCLDGPARVPGRRGTGVPAGVGRGAAPPPRRHHSLRPSSPLPRTTDFPWTPVSWSLWRPATPAPRASAQPLSLRSSGRLQPSTMPGTVATLRFQLLPPEPDDAFWGAPCEQPLERRYQALPALVCIMCCLFGVVYCFFGYRCFKAVLFLTGLLFGSVVIFLLCYRERVLETQLSAGASAGIALGIGLLCGLVAMLVRSVGLFLVGLLLGLLLAAAALLGSAPYYQPGSVWGPLGLLLGGGLLCALLTLRWPRPLTTLATAVTGAALIATAADYFAELLLLGRYVVERLRAAPVPPLCWRSWALLALWPLLSLMGVLVQWRVTAEGDSHTEVVISRQRRRVQLMRIRQQEDRKEKRRKKRPPRAPLRGPRAPPRPGPPDPAYRRRPVPIKRFNGDVLSPSYIQSFRDRQTGSSLSSFMASPTDADYEYGSRGPLTACSGPPVRV

SEQ ID NO: 20993 - protein, 139 aa, Homo sapiens
LDASFPAGPSTCLVSLLLTPSTLFLLDEDAAGSPAEPSPPAASGEASEKVPPSGPGPAVRVREQQPLSSLSSVLLYRSAPEDLRLLFYDEVSRLESFWALRVVCQEQLTALLAWIREPWEELFSIGLRTVIQEALALDR

SEQ ID NO: 20994 - protein, 175 aa, Homo sapiens
LAEPPSKAVNPDEAVAIGAAIQGDVLAGDVTDVLLLDVIPLSLGIETLRGVFTKLINRNTTIPTKKSQVFSTAADGQTQVEIKVCQGEREMAGDNKLLGQFTLIGIPPAPRGVPQIKVTFDIDANGIIHVSAKDKGTGHEQQIVIQSSGGLSKDDVENMVKNAEKYAKEDQRRKE

SEQ ID NO: 20995 - protein, 36 aa, Homo sapiens
MTLECSGFPQLGMFLLFFQFLCRRQQDAPGNVCEKG

SEQ ID NO: 20996 - protein, 18 aa, Homo sapiens
VGLNKAKPLALLLLSFPA

SEQ ID NO: 20997 - protein, 21 aa, Homo sapiens
LFIMAFLKLLGTVYQDEEEKK

SEQ ID NO: 20998 - protein, 193 aa, Homo sapiens
MAAEIHSRPQSSRPVLLSKIEGHQDAVTAALLIPKEDGVITASEDRTIRVWLKRDSGQYWPSIYHTMASPCSAMAYHHDSRRIFVGQDNGAVMEFHVSEDFNKMNFIKTYPAHQNRVSAIIFSLATEWVISTGHDKCVSWMCTRSGNMLGRHFFTSWASCLQYPSEPRTSPSPGLCFSVFGSESHPKWLRSKD

SEQ ID NO: 20999 - protein, 65 aa, Homo sapiens
LRLLPQPTNGLPIKQMLILFYFLEAGSENLHVSHILQKAKIEVSEDGTKASAATSKHWVTWQGFL

SEQ ID NO: 21000 - protein, 32 aa, Homo sapiens
MVLIFLFTSLASEFCQPLNLHILYNFFFFEQC

SEQ ID NO: 21001 - protein, 17 aa, Homo sapiens
LSVSWLGWLKWLWDYLT

SEQ ID NO: 21002 - protein, 21 aa, Homo sapiens
MVLRILVQPSVYLPRYLKLTT

SEQ ID NO: 21003 - protein, 317 aa, Homo sapiens
LAMQRRSRGINTGLILLLSQIFHVGINNIPPVTLATLALNIWFFLNPQKPLYSSCLSVEKCYQQKDWQRLLLSPLHHADDWHLYFNMASMLWKGINLERRLGSRWFAYVITAFSVLTGVVYLLLQFAVAEFMDEPDFKRSCAVGFSGVLFALKVLNNHYCPGGFVNILGFPVPNRFACWVELVAIHLFSPGTSFAGHLAGILVGLMYTQGPLKKIMEACAGGFSSSVGYPGRQYYFNSSGSSGYQDYYPHGRPDHYEEAPRNYDTYTAGLSEEEQLERALQASLWDRGNTRNSPPPYGFHLSPEEMRRQRLHRFDSQ

SEQ ID NO: 21004 - protein, 26 aa, Homo sapiens
LAGILVGLMYTQGPLKKIMEACAGTE

SEQ ID NO: 21005 - protein, 1693 aa, Homo sapiens
LPAMWSLHIVLMRCSFRLTKSLATGPWSLILILFSVQYVYGSGKKYIGPCGGRDCSVCHCVPEKGSRGPPGPPGPQGPIGPLGAPGPIGLSGEKGMRGDRGPPGAAGDKGDKGPTGVPGFPGLDGIPGHPGPPGPRGKPGMSGHNGSRGDPGFPGGRGALGPGGPLGHPGEKGEKGNSVFILGAVKGIQGDRGDPGLPGLPGSWGAGGPAGPTGYPGEPGLVGPPGQPGRPGLKGNPGVGVKGQMGDPGEVGQQGSPGPTLLVEPPDFCLYKGEKGIKGIPGMVGLPGPPGRKGESGIGAKGEKGIPGFPGPRGDPGSYGSPGFPGLKGELGLVGDPGLFGLIGPKGDPGNRGHPGPPGVLVTPPLPLKGPPGDPGFPGRYGETGDVGPPGPPGLLGRPGEACAGMIGPPGPQGFPGLPGLPGEAGIPGRPDSAPGKPGKPGSPGLPGAPGLQGLPGSSVIYCSVGNPGPQGIKGKVGPPGGRGPKGEKGNEGLCACEPGPMGPPGPPGLPGRQGSKGDLGLPGWLGTKGDPGPPGAEGPPGLPGKHGASGPPGNKGAKGDMVVSRVKGHKGERGPDGPPGFPGQPGSHGRDGHAGEKGDPGPPGDHEDATPGGKGFPGPLGPPGKAGPVGPPGLGFPGPPGERGHPGVPGHPGVRGPDGLKGQKGDTISCNVTYPGRHGPPGFDGPPGPKGFPGPQGAPGLSGSDGHKGRPGTPGTAEIPGPPGFRGDMGDPGFGGEKGSSPVGPPGPPGSPGVNGQKGIPGDPAFGHLGPPGKRGLSGVPGIKGPRGDPGCPGAEGPAGIPGFLGLKGPKGREGHAGFPGVPGPPGHSCERGAPGIPGQPGLPGYPGSPGAPGGKGQPGDVGPPGPAGMKGLPGLPGRPGAHGPPGLPGIPGPFGDDGLPGPPGPKGPRGLPGFPGFPGERGKPGAEGCPGAKGEPGEKGMSGLPGDRGLRGAKGAIGPPGDEGEMAIISQKGTPGEPGPPGDDGFPGERGDKGTPGMQGRRGEPGRYGPPGFHRGEPGEKGQPGPPGPPGPPGSTGLRGFIGFPGLPGDQGEPGSPGPPGFSGIDGARGPKGNKGDPASHFGPPGPKGEPGSPGCPGHFGASGEQGLPGIQGPRGSPGRPGPPGSSGPPGCPGDHGMPGLRGQPGEMGDPGPRGLQGDPGIPGPPGIKGPSGSPGLNGLHGLKGQKGTKGASGLHDVGPPGPVGIPGLKGERGDPGSPGISPPGPRGKKGPPGPPGSSGPPGPAGATGRAPKDIPDPGPPGDQGPPGPDGPRGAPGPPGLPGSVDLLRGEPGDCGLPGPPGPPGPPGPPGYKGFPGCDGKDGQKGPVGFPGPQGPHGFPGPPGEKGLPGPPGRKGPTGLPGPRGEPGPPADVDDCPRIPGLPGAPGMRGPEGAMGLPGMRGPSGPGCKGEPGLDGRRGVDGVPGSPGPPGRKGDTGEDGYPGGPGPPGPIGDPGPKGFGPGYLGGFLLVLHSQTDQEPTCPLGMPRLWTGYSLLYLEGQEKAHNQDLGLAGSCLPVFSTLPFAYCNIHQVCHYAQRNDRSYWLASAAPLPMMPLSEEAIRPYVSRCAVCEAPAQAVAVHSQDQSIPPCPQTWRSLWIGYSFLMHTGAGDQGGGQALMSPGSCLEDFRAAPFLECQGRQGTCHFFANKYSFWLTTVKADLQFSSAPAPDTLKESQAQRQKISRCQVCVKYS

SEQ ID NO: 21006 - protein, 158 aa, Homo sapiens
LSVFLFICCACVNSVTPSPQQARVCPPHMLPEDGANLSSARGILSLIQSSTRRAYQQILDVLDENRRPVLRGGSAAATSNPHHDNVRYGISNIDTTIEGTSDDLTVVDAASLRRQIIKLNRRLQLLEEENKERAKREMVMYSITVAFWLLNSWLWFRR

SEQ ID NO: 21007 - protein, 551 aa, Homo sapiens
LPASSLGAAAMAASAKRKQEEKHLKMLRDMTGLPHNRKCFDCDQRGPTYVNMTVGSFVCTSCSGSLRGLNPPHRVKSISMTTFTQQEIEFLQKHGNEVCKQIWLGLFDDRSSAIPDFRDPQKVKEFLQEKYEKKRWYVPPEQAKVVASVHASISGSSASSTSSTPEVKPLKSLLGDSAPTLHLNKGTPSQSPVVGRSQGQQQEKKQFDLLSDLGSDIFAAPAPQSTATANFANFAHFNSHAAQNSANADFANFDAFGQSSGSSNFGGFPTASHSPFQPQTTGGSAASVNANFAHFDNFPKSSSADFGTFNTSQSHQTASAVSKVSTNKAGLQTADKYAALANLDNIFSAGQVPSQSSASSDKYAALAELDSVFSSAATSSNAYTSTSNASSNVFGTVPVVASAQTQPASSSVPAPFGATPSTNPFVAAAGPSVASSTNPFQTNARGATAATFGTASMSMPTGFGTPAPYSLPTSFSGSFQQPAFPAQAAFPQQTAFSQQPNGAGFAAFGQTKPVVTPFGQVAAAGVSSNPFMTGAPTGQFPTGSSSTNPFL

SEQ ID NO: 21008 - protein, 532 aa, Homo sapiens
LPASSLGAAAMAASAKRKQEEKHLKMLRDMTGLPHNRKCFDCDQRGPTYVNMTVGSFVCTSCSGSLRGLNPPHRVKSISMTTFTQQEIEFLQKHGNEVCKQIWLGLFDDRSSAIPDFRDPQKVKEFLQEKYEKKRWYVPPEQAKVVASVHASISGSSASSTSSTPEVKPLKSLLGDSAPTLHLNKGTPSQSPVVGRSQGQQQEKKQFDLLSDLGSDIFAAPAPQSTATANFANFAHFNSHAGGSAASVNANFAHFDNFPKSSSADFGTFNTSQSHQTASAVSKVSTNKAGLQTADKYAALANLDNIFSAGQGGDQGSGFGTTGKAPVGSVVSVPSQSSASSDKYAALAELDSVFSSAATSSNAYTSTSNASSNVFGTVPVVASAQTQPASSSVPAPFGATPSTNPFVAAAGPSVASSTNPFQTNARGATAATFGTASMSMPTGFGTPAPYSLPTSFSGSFQQPAFPAQAAFPQQTAFSQQPNGAGFAAFGQTKPVVTPFGQVAAAGVSSNPFMTGAPTGQFPTGSSSTNPFL

SEQ ID NO: 21009 - protein, 570 aa, Homo sapiens
LPASSLGAAAMAASAKRKQEEKHLKMLRDMTGLPHNRKCFDCDQRGPTYVNMTVGSFVCTSCSGSLRGLNPPHRVKSISMTTFTQQEIEFLQKHGNEVCKQIWLGLFDDRSSAIPDFRDPQKVKEFLQEKYEKKRWYVPPEQAKVVASVHASISGSSASSTSSTPEVKPLKSLLGDSAPTLHLNKGTPSQSPVVGRSQGQQQEKKQFDLLSDLGSDIFAAPAPQSTATANFANFAHFNSHAAQNSANADFANFDAFGQSSGSSNFGGFPTASHSPFQPQTTGGSAASVNANFAHFDNFPKSSSADFGTFNTSQSHQTASAVSKVSTNKAGLQTADKYAALANLDNIFSAGQGGDQGSGFGTTGKAPVGSVVSVPSQSSASSDKYAALAELDSVFSSAATSSNAYTSTSNASSNVFGTVPVVASAQTQPASSSVPAPFGATPSTNPFVAAAGPSVASSTNPFQTNARGATAATFGTASMSMPTGFGTPAPYSLPTSFSGSFQQPAFPAQAAFPQQTAFSQQPNGFAAFGQTKPVVTPFGQVAAAGVSSNPFMTGAPTGQFPTGSSSTNPFL

SEQ ID NO: 21010 - protein, 70 aa, Homo sapiens
LFFELKTMCCTKSLLLAALMSVLLLHLCGESEASNFDCCLGYTDRILHPKFIVGFTRQLANEGCDINAIM

SEQ ID NO: 21011 - protein, 102 aa, Homo sapiens
LFFELKTMCCTKSLLLAALMSVLLLHLCGESEASNFDCCLGYTDRILHPKFIVGFTRQLANEGCDINAIIFHTKKKLSVCANPKQTWVKYIVRLLSKKVKNM

SEQ ID NO: 21012 - protein, 103 aa, Homo sapiens
LFFELKTMCCTKSLLLAALMSVLLLHLCGESEAASNFDCCLGYTDRILHPKFIVGFTRQLANEGCDINAIIFHTKKKLSVCANPKQTWVKYIVRLLSKKVKNM

SEQ ID NO: 21013 - protein, 1994 aa, Homo sapiens
VPMSNRPNNNPGGSLRRSQRNTAGAQPQDDSIGGRSCSSSSAVIVPQPEDPDRANTSERQKTGQVPKKDNSRGVKRSASPDYNRTNSPSSAKKPKALQHTESPSETNKPHSKSKKRHLDQEQQLKSAQSPSTSKAHTRKSGATGGSRSQKRKRTESSCVKSGSGSESTGAEERSAKPTKLASKSATSAKAGCSTITDSSSAASTSSSSSAVASASSTVPPGARVKQGKDQNKARRSRSASSPSPRRSSREKEQSKTGGSSKFDWAARFSPKVSLPKTKLSLPGSSKSETSKPGPSGLQAKLASLRKSTKKRSESPPAELPSLRRSTRQKTTGSCASTSRRGSGLGKRGAAEARRQEKMADPESNQEAVNSSAARTDEAPQGAAGAVGMTTSGESESDDSEMGRLQALLEARGLPPHLFGPLGPRMSQLFHRTIGSGASSKAQQLLQGLQASDESQQLQAVIEMCQLLVMGNEETLGGFPVKSVVPALITLLQMEHNFDIMNHACRALTYMMEALPRSSAVVVDAIPVFLEKLQVIQCIDVAEQALTALEMLSRRHSKAILQAGGLADCLLYLEFFSINAQRNALAIAANCCQSITPDEFHFVADSLPLLTQRLTHQDKKSVESTCLCFARLVDNFQHEENLLQQVASKDLLTNVQQLLVVTPPILSSGMFIMVVRMFSLMCSNCPTLAVQLMKQNIAETLHFLLCGASNGSCQEQIDLVPRSPQELYELTSLICELMPCLPKEGIFAVDTMLKKGNAQNTDGAIWQWRDDRGLWHPYNRIDSRIIEQINEDTGTARAIQRKPNPLANSNTSGYSESKKDDARAQLMKEDPELAKSFIKTLFGVLYEVYSSSAGPAVRHKCLRAILRIIYFADAELLKDVLKNHAVSSHIASMLSSQDLKIVVGALQMAEILMQKLPDIFSVYFRREGVMHQVKHLAESESLLTSPPKACTNGSGSMGSTTSVSSGTATAATHAAADLGSPSLQHSRDDSLDLSPQGRLSDVLKRKRLPKRGPRRPKYSPPRDDDKVDNQAKSPTTTQSPKSSFLASLNPKTWGRLSTQSNSNNIEPARTAGGSGLARAASKDTISNNREKIKGWIKEQAHKFVERYFSSENMDGSNPALNVLQRLCAATEQLNLQVDGGAECLVEIRSIVSESDVSSFEIQHSGFVKQLLLYLTSKSEKDAVSREIRLKRFLHVFFSSPLPGEEPIGRVEPVGNAPLLALVHKMNNCLSQMEQFPVKVHDFPSGNGTGGSFSLNRGSQALKFFNTHQLKCQLQRHPDCANVKQWKGGPVKIDPLALVQAIERYLVVRGYGRVREDDEDSDDDGSDEEIDESLAAQFLNSGNVRHRLQFYIGEHLLPYNMTVYQAVRQFSIQAEDERESTDDESNPLGRAGIWTKTHTIWYKPVREDEESNKDCVGGKRGRAQTAPTKTSPRNAKKHDELWHDGVCPSVSNPLEVYLIPTPPENITFEDPSLDVILLLRVLHAISRYWYYLYDNAMCKEIIPTSEFINSKLTAKANRQLQDPLVIMTGNIPTWLTELGKTCPFFFPFDTRQMLFYVTAFDRDRAMQRLLDTNPEINQSDSQDSRVAPRLDRKKRTVNREELLKQAESVMQDLGSSRAMLEIQYENEVGTGLGPTLEFYALVSQELQRADLGLWRGEEVTLSNPKGSQEGTKYIQNLQGLFALPFGRTAKPAHIAKVKMKFRFLGKLMAKAIMDFRLVDLPLGLPFYKWMLRQETSLTSHDLFDIDPVVARSVYHLEDIVRQKKRLEQDKSQTKESLQYALETLTMNGCSVEDLGLDFTLPGFPNIELKKGGKDIPVTIHNLEEYLRLVIFWALNEGVSRQFDSFRDGFESVFPLSHLQYFYPEELDQLLCGSKADTWDAKTLMECCRPDHGYTHDSRAVKFLFEILSSFDNEQQRLFLQFVTGSPRLPVGGFRSLNPPLTIVRKTFESTENPDDFLPSVMTCVNYLKLPDYSSIEIMREKLLIAAREGQQSFHLS

SEQ ID NO: 21014 - protein, 1724 aa, Homo sapiens
VPMSNRPNNNPGGSLRRSQRNTAGAQPQDDSIGGSRRGSGLGKRGAAEARRQEKMADPESNQEAVNSSAARTDEAPQGAAASSSVAGAVGMTTSGESESDDSEMGRLQALLEARGLPPHLFGPLGPRMSQLFHRTIGSGASSKAQQLLQGLQASDESQQLQAVIEMCQLLVMGNEETLGGFPVKSVVPALITLLQMEHNFDIMNHACRALTYMMEALPRSSAVVVDAIPVFLEKLQVIQCIDVAEQALTALEMLSRRHSKAILQAGGLADCLLYLEFFSINAQRNALAIAANCCQSITPDEFHFVADSLPLLTQRLTHQDKKSVESTCLCFARLVDNFQHEENLLQQVASKDLLTNVQQLLVVTPPILSSGMFIMVVRMFSLMCSNCPTLAVQLMKQNIAETLHFLLCGASNGSCQEQIDLVPRSPQELYELTSLICELMPCLPKEGIFAVDTMLKKGNAQNTDGAIWQWRDDRGLWHPYNRIDSRIIEAAHQVGEDEISLSTLGRVYTIDFNSMQQINEDTGTARAIQRKPNPLANSNTSGYSESKKDDARAQLMKEDPELAKSFIKTLFGVLYEVYSSSAGPAVRHKCLRAILRIIYFADAELLKDVLKNHAVSSHIASMLSSQDLKIVVGALQMAEILMQKLPDIFSVYFRREGVMHQVKHLAESESLLTSPPKACTNGSGSMGSTTSVSSGTATAATHAAADLGSPSLQHSRDDSLDLSPQGRLSDVLKRKRLPKRGPRRPKYSPPRDDDKVDNQAKSPTTTQSPKSSFLASLNPKTWGRLSTQSNSNNIEPARTAGGSGLARAASKDTISNNREKIKGWIKEQAHKFVERYFSSENMDGSNPALNVLQRLCAATEQLNLQVDGGAECLVEIRSIVSESDVSSFEIQHSGFVKQLLLYLTSKSEKDAVSREIRLKRFLHVFFSSPLPGEEPIGRVEPVGNAPLLALVHKMNNCLSQMEQFPVKVHDFPSGNGTGGSFSLNRGSQALKFFNTHQLKCQLQRHPDCANVKQWKGGPVKIDPLALVQAIERYLVVRGYGRVREDDEDSDDDGSDEEIDESLAAQFLNSGNVRHRLQFYIGEHLLPYNMTVYQAVRQFSIQAEDERESTDDESNPLGRAGIWTKTHTIWYKPVREDEESNKDCVGGKRGRAQTAPTKTSPRNAKKHDELWHDGVCPSVSNPLEVYLIPTPPENITFEDPSLDVILLLRVLHAISRYWYYLYDNAMCKEIIPTSEFINSKLTAKANRQLQDPLVIMTGNIPTWLTELGKTCPFFFPFDTRQMLFYVTAFDRDRAMQRLLDTNPEINQSDSQDSRVAPRLDRKKRTVNREELLKQAESVMQDLGSSRAMLEIQYENEVGTGLGPTLEFYALVSQELQRADLGLWRGEEVTLSNPKGSQEGTKYIQNLQGLFALPFGRTAKPAHIAKVKMKFRFLGKLMAKAIMDFRLVDLPLGLPFYKWMLRQETSLTSHDLFDIDPVVARSVYHLEDIVRQKKRLEQDKSQTKESLQYALETLTMNGCSVEDLGLDFTLPGFPNIELKKGGKDIPVTIHNLEEYLRLVIFWALNEGVSRQFDSFRDGFESVFPLSHLQYFYPEELDQLLCGSKADTWDAKTLMECCRPDHGYTHDSRAVKFLFEILSSFDNEQQRLFLQFVTGSPRLPVGGFRSLNPPLTIVRKTFESTENPDDFLPSVMTCVNYLKLPDYSSIEIMREKLLIAAREGQQSFHLS

SEQ ID NO: 21015 - protein, 824 aa, Homo sapiens
VPMSNRPNNNPGGSLRRSQRNTAGAQPQDDSIGGRSCSSSSAVIVPQPEDPDRANTSERQKTGQVPKKDNSRGVKRSASPDYNRTNSPSSAKKPKALQHTESPSETNKPHSKSKKRHLDQEQQLKSAQSPSTSKAHTRKSGATGGSRSQKRKRTESSCVKSGSGSESTGAEERSAKPTKLASKSATSAKAGCSTITDSSSAASTSSSSSAVASASSTVPPGARVKQGKDQNKARRSRSASSPSPRRSSREKEQSKTGGSSKFDWAARFSPKVSLPKTKLSLPGSSKSETSKPGPSGLQAKLASLRKSTKKRSESPPAELPSLRRSTRQKTTGSCASTSRRGSGLGKRGAAEARRQEKMADPESNQEAVNSSAARTDEAPQGAAASSSVAGAVGMTTSGESESDDSEMGRLQALLEARGLPPHLFGPLGPRMSQLFHRTIGSGASSKAQQLLQGLQASDESQQLQAVIEMCQLLVMGNEETLGGFPVKSVVPALITLLQMEHNFDIMNHACRALTYMMEALPRSSAVVVDAIPVFLEKLQVIQCIDVAEQALTALEMLSRRHSKAILQAGGLADCLLYLEFFSINAQRNALAIAANCCQSITPDEFHFVADSLPLLTQRLTHQDKKSVESTCLCFARLVDNFQHEENLLQQVASKDLLTNVQQLLVVTPPILSSGMFIMVVRMFSLMCSNCPTLAVQLMKQNIAETLHFLLCGASNGSCQEQIDLVPRSPQELYELTSLICELMPCLPKEGIFAVDTMLKKGNAQNTDGAIWQWRDDRGLWHPYNRIDSRIIEVVVSSYRLNVSILLESGCRDGMGRWICGFECA

SEQ ID NO: 21016 - protein, 432 aa, Homo sapiens
VPMSNRPNNNPGGSLRRSQRNTAGAQPQDDSIGGRSHLGQAKHKGYSPPESRKSNSKAPKVQSNTTSELSRGHLSKRSCSSSSAVIVPQPEDPDRANTSERQKTGQVPKKDNSRGVKRSASPDYNRTNSPSSAKKPKALQHTESPSETNKPHSKSKKRHLDQEQQLKSAQSPSTSKAHTRKSGATGGSRSQKRKRTESSCVKSGSGSESTGAEERSAKPTKLASKSATSAKAGCSTITDSSSAASTSSSSSAVASASSTVPPGARVKQGKDQNKARRSRSASSPSPRRSSREKEQSKTGGSSKFDWAARFSPKVSLPKTKLSLPGSSKSETSKPGPSGLQAKLASLRKSTKKRSESPPAELPSLRRSTRQKTTGSCASTSRRGSGLGKRGAAEARRQEKMADPESNQEAVNSSAARTDEAPQGAAEEGFRTS

SEQ ID NO: 21017 - protein, 20 aa, Homo sapiens
MVVSRKGMSLQERGANVQPA

SEQ ID NO: 21018 - protein, 84 aa, Homo sapiens
LGNSTCRERLFSEPPSSAQKQILKRNLIIMNPIPKNLINQGRGTEITGKEIGGDTSTDRLSPLLLRSAPDNIYYSQDLFPPFFF

SEQ ID NO: 21019 - protein, 19 aa, Homo sapiens
LSLVVLPMCLLHHFLPASA

SEQ ID NO: 21020 - protein, 57 aa, Homo sapiens
LVFLYFLAPMTSRSTSTWRIPSRKRRFSSSDFSDLSNGEELQETCSSSLRRGSGKED

SEQ ID NO: 21021 - protein, 50 aa, Homo sapiens
LGILMFTFSLYFFFLKMFAVVQKKEISCEIFSNHFKENKRQHLTRWPRME

SEQ ID NO: 21022 - protein, 147 aa, Homo sapiens
MKEILYGTNEKEPQTEAVAQLAQELYNSGLLSTLVADLQLIDFEGKKDVAQIFNNILRRQIGTRTPTVEYICTQQNILFMLLKGYESPEIALNCGIMLRECIRHEPLAKIILWSEQFYDFFRYVEMSTFDIASDAFATFKVTKTVEF

SEQ ID NO: 21023 - protein, 20 aa, Homo sapiens
LPCSSFLLSGCSLALLLPPA

SEQ ID NO: 21024 - protein, 943 aa, Homo sapiens
LTDTLRSWNGERADGRVRGAAMITSAAGIISLLDEDEPQLKEFALHKLNAVVNDFWAEISESVDKIEVLYEDEGFRSRQFAALVASKVFYHLGAFEESLNYALGAGDLFNVNDNSEYVETIIAKCIDHYTKQCVENADLPEGEKKPIDQRLEGIVNKMFQRCLDDHKYKQAIGIALETRRLDVFEKTILESNDVPGMLAYSLKLCMSLMQNKQFRNKVLRVLVKIYMNLEKPDFINVCQCLIFLDDPQAVSDILEKLVKEDNLLMAYQICFDLYESASQQFLSSVIQNLRTVGTPIASVPGSTNTGTVPGSEKDSDSMETEEKTSSAFVGKTPEASPEPKDQTLKMIKILSGEMAIELHLQFLIRNNNTDLMILKNTKDAVRNSVCHTATVIANSFMHCGTTSDQFLRDNLEWLARATNWAKFTATASLGVIHKGHEKEALQLMATYLPKDTSPGSAYQEGGGLYALGLIHANHGGDIIDYLLNQLKNASNDIVRHGGSLGLGLAAMGTARQDVYDLLKTNLYQDDAVTGEAAGLALGLVMLGSKNAQAIEDMVGYAQETQHEKILRGLAVGIALVMYGRMEEADALIESLCRDKDPILRRSGMYTVAMAYCGSGNNKAIRRLLHVAVSDVNDDVRRAAVESLGFILFRTPEQCPSVVSLLSESYNPHVRYGAAMALGICCAGTGNKEAINLLEPMTNDPVNYVRQGALIASALIMIQQTEITCPKVNQFRQLYSKVINDKHDDVMAKFGAILAQGILDAGGHNVTISLQSRTGHTHMPSVVGVLVFTQFWFWFPLSHFLSLAYTPTCVIGLNKDLKVSTAVLSITAKAKKKEKEKEKKEEEKMEVDEAEKKEEKEKKKEPEPNFQLLDNPARVMPAQLKVLTMPETCRYQPFKPLSIGGIIILKDTSEDIEELVEPVAAHGPKIEEEEQEPEPPEPFEYIDD

SEQ ID NO: 21025 - protein, 974 aa, Homo sapiens
LTDTLRSWNGERADGRVRGAAMITSAAGIISLLDEDEPQLKEFALHKLNAVVNDFWAEISESVDKIEVLYEDEGFRSRQFAALVASKVFYHLGAFEESLNYALGAGDLFNVNDNSEYVETIIAKCIDHYTKQCVENADLPEGEKKPIDQRLEGIVNKMFQRCLDDHKYKQAIGIALETRRLDVFEKTILESNDVPGMLAYSLKLCMSLMQNKQFRNKVLRVLVKIYMNLEKPDFINVCQCLIFLDDPQAVSDILEKLVKEDNLLMAYQICFDLYESASQQFLSSVIQNLRTVGTPIASVPGSTNTGTVPGSEKDSDSMETEEKTSSAFVGKTPEASPEPKDQTLKMIKILSGEMAIELHLQFLIRNNNTDLMILKNTKDAVRNSVCHTATVIANSFMHCGTTSDQFLRDNLEWLARATNWAKFTATASLGVIHKGHEKEALQLMATYLPKDTSPGSAYQEGGGLYALGLIHANHGGDIIDYLLNQLKNASNDIVRHGGSLGLGLAAMGTARQDVYDLLKTNLYQDDAVTGEAAGLALGLVMLGSKNAQAIEDMVGYAQETQHEKILRGLAVGIALVMYGRMEEADALIESLCRDKDPILRRSGMYTVAMAYCGSGNNKAIRRLLHVAVSDVNDDVRRAAVESLGFILFRTPEQCPSVVSLLSESYNPHVRYGAAMALGICCAGTGNKEAINLLEPMTNDPVNYVRQGALIASALIMIQQTEITCPKVNQFRQLYSKVINDKHDDVMAKFGAILAQGILDAGGHNVTISLQSRTGHTHMPSVVGVLVFTQFWFWFPLSHFLSLAYTPTCVIGLNKDLKMPKVQYKSNCKPSTFAYPAPLEVPKEKEKEKVSTAVLSITAKAKKKEKEKEKKEEEKMEVDEAEKKEEKEKKKEPEPNFQLLDNPARVMPAQLKVLTMPETCRYQPFKPLSIGGIIILKDTSEDIEELVEPVAAHGPKIEEEEQEPEPPEPFEYIDD

SEQ ID NO: 21026 - protein, 106 aa, Homo sapiens
LFIHYSLILFFFIEELPDGVLESDDDEDEDDEEDHDIMEADLDKDELIQPQLGELSGEKLLTTEYLGIMTNTGKTRRKGLANVQWSGDEPLQRPVTPGGHRNGYPV

SEQ ID NO: 21027 - protein, 395 aa, Homo sapiens
VYLTESLTSAVTTWRDHLCVDTAISPYLAPSLVHYRISNYLLNRAMCVFPLFLLLPPTFGFSGHRAHFCFFNLERDARTLLAKNLPYKVTQDELKEVFEDAAEIRLVSKDGKSKGIAYIEFKTEADAEKTFEEKQGTEIDGRSISLYYTGEKGQNQDYRGGKNSTWSGESKTLVLSNLSYSATEETLQEVFEKATFIKVPQNQNGKSKGYAFIEFASFEDAKEALNSCNKREIEGRAIRLELQGPRGSPNARSQPSKTLFVKGLSEDTTEETLKESFDGSVRARIVTDRETGSSKGFGFVDFNSEEDAKAAKEAMEDGEIDGNKVTLDWAKPKGEGGFGGRGGGRGGFGGRGGGRGGRGGFGGRGRGGFGGRGGFRGGRGGGGDHKPQGKKTKFE

SEQ ID NO: 21028 - protein, 206 aa, Homo sapiens
VETEPCRPLPNETEKGDSVSLLAPSASSAGLGIVRPPRSHTPGFPHSQLGCNRETDGRNCQWKDAKRQLCVRPPLSANVRSCLRSPAFRVGRPLLAAQGRTLRLAILCVAQDLKEKKEVVEEAENGRDAPANGNANEENGEQEADNEVDEEEEEGGEEEEEEEEGDGEEEDGDEDEEAESATGKRAAEDDEDDDVDTKKQKTDEDD

SEQ ID NO: 21029 - protein, 30 aa, Homo sapiens
MPRSGNVIIETKFFDDDLLVSTSRVRLFYV

SEQ ID NO: 21030 - protein, 28 aa, Homo sapiens
MIVKEAPPLVRRGHSSPAPGTTVLTMVQ

SEQ ID NO: 21031 - protein, 98 aa, Homo sapiens
LVPLTSLWLPTLLGTCSPGGLEEPRAVPGGAMAAALSLQESGPLESEAMVMGILKQAFDVLVLRYGVQKRIYCNVSALGEPGGGQGSPSHPALEGHRL

SEQ ID NO: 21032 - protein, 536 aa, Homo sapiens
LLPDMQGPWVLLLLGLRLQLSLGIIPVEEENPDFWNRQAAEALGAAKKLQPAQTAAKNLIIFLGDGMGVSTVTAARILKGQKKDKLGPETFLAMDRFPYVALSKTYSVDKHVPDSGATATAYLCGVKGNFQTIGLSAAARFNQCNTTRGNEVISVMNRAKKAGKSVGVVTTTRVQHASPAGAYAHTVNRNWYSDADVPASARQEGCQDIATQLISNMDIDVILGGGRKYMFPMGTPDPEYPDDYSQGGTRLDGKNLVQEWLAKHQGARYVWNRTELLQASLDPSVTHLMGLFEPGDMKYEIHRDSTLDPSLMEMTEAALLLLSRNPRGFFLFVEGGRIDHGHHESRAYRALTETIMFDDAIERAGQLTSEEDTLSLVTADHSHVFSFGGYPLRGSSIFGLAPGKARDRKAYTVLLYGNGPGYVLKDGARPDVTESESGSPEYRQQSAVPLDGETHAGEDVAVFARGPQAHLVHGVQEQTFIAHVMAFAACLEPYTACDLAPRAGTTDAAHPGPSVVPALLPLLAGTLLLLGTATAP

SEQ ID NO: 21033 - protein, 607 aa, Homo sapiens
LVTMLLAVLLLLPLPSSWFAHGHPLYTRLPPSALQVLSAQGTQALQAAQRSAQWAINRVAMEIQHRSHECRGSGRPRPQALLQDPPEPGPCGERRPSTANVTRAHGRIVGGSAAPPGAWPWLVRLQLGGQPLCGGVLVAASWVLTAAHCFVGAPNELLWTVTLAEGSRGEQAEEVPVNRILPHPKFDPRTFHNDLALVQLWTPVSPGGSARPVCLPQEPQEPPAGTACAIAGWGALFEDGPEAEAVREARVPLLSTDTCRRALGPGLRPSTMLCAGYLAGGVDSCQGDSGGPLTCSEPGPRPREVLFGVTSWGDGCGEPGKPGVYTRVAVFKDWLQEQMSAASSSREPSCRELLAWDPPQELQADAARLCAFYARLCPGSQGACARLAHQQCLQRRRRCELRSLAHTLLGLLRNAQELLGPRPGLRRLAPALALPAPALRESPLHPARELRLHSGSRAAGTRFPKRRPEPRGEANGCPGLEPLRQKLAALQGAHAWILQVPSEHLAMNFHEVLADLGSKTLTGLFRAWVRAGLGGRHVAFSGLVGLEPATLARSLPRLLVQALQAFRVAALAEGEPEGPWMDVGQGPGLERKGHHPLNPQVPPARQP

SEQ ID NO: 21034 - protein, 606 aa, Homo sapiens
LVTMLLAVLLLLPLPSSWFAHGHPLYTRLPPSALQVLSAQGTQALQAAQRSAQWAINRVAMEIQHRSHECRGSGRPRPQALLQDPPEPGPCGERRPSTANVTRAHGRIVGGSAAPPGAWPWLVRLQLGGQPLCGGVLVAASWVLTAAHCFVGAPNELLWTVTLAEGSRGEQAEEVPVNRILPHPKFDPRTFHNDLALVQLWTPVSPGGSARPVCLPQEPQEPPAGTACAIAGWGALFEDGPEAEAVREARVPLLSTDTCRRALGPGLRPSTMLCAGYLAGGVDSCQGDSGGPLTCSEPGPRPREVLFGVTSWGDGCGEPGKPGVYTRVAVFKDWLQEQMSASSSREPSCRELLAWDPPQELQADAARLCAFYARLCPGSQGACARLAHQQCLQRRRRCELRSLAHTLLGLLRNAQELLGPRPGLRRLAPALALPAPALRESPLHPARELRLHSGSRAAGTRFPKRRPEPRGEANGCPGLEPLRQKLAALQGAHAWILQVPSEHLAMNFHEVLADLGSKTLTGLFRAWVRAGLGGRHVAFSGLVGLEPATLARSLPRLLVQALQAFRVAALAEGEPEGPWMDVGQGPGLERKGHHPLNPQVPPARQP

SEQ ID NO: 21035 - protein, 74 aa, Homo sapiens [sequence omitted]

SEQ ID NO: 21036 - protein, 347 aa, Homo sapiens
LVPGGRSASRPEPRGEEAGRGLRDAQTPRHRRPPPTRLAVAEPWRLLKAAAPPRPPRPPVRPQTLPTAGSPPPRRSVVEPRACEERAARQLPASRPASPRSRVLRSAAMASEELACKLERRLRREEAEESGPQLAPLGAPAPEPKPEPEPPARAPTASADAELSAQLSRRLDINEGAARPRRCRVFNPYTEFPEFSRRLIKDLESMFKLYDAGRDGFIDLMELKLMMEKLGAPQTHLGLKSMIKEVDEDFDGKLSFREFLLIFHKAAAGELQEDSGLMALAKLSEIDVALEGVKGAKNFFEAKVQALSSASKFEAELKAEQDERKREEEERRLRQAAFQKLKANFNT

SEQ ID NO: 21037 - protein, 69 aa, Homo sapiens
LRMEEEAARLRHEEEERKRKELEVQRQKELMRQRQQQQEALRRLQQQQQQQQLAQMKVKPEASTLGAPC

SEQ ID NO: 21038 - protein, 289 aa, Homo sapiens
LKQEVSQLSWWQQPRPPRGNGRQVAVEGPPLPSVVCGSWGCLPARPRRPTPTMVPCWNHGNITRSKAEELLSRTGKDGSFLVRASESISRAYALCVLYRNCVYTYRILPNEDDKFTVQASEGVSMRFFTKLDQLIEFYKKENMGLVTHLQYPVPLEEEDTGDDPEEDTESVVSPPELPPRNIPLTASSCEAKEVPFSNENPRATETSRPSLSETLFQRLQSMDTSGLPEEHLKAIQDYLSTQLAQDSEFVKTGSSSLPHLKKLTTLLCKELYGFLVRPIPSTWCPSSAN

SEQ ID NO: 21039 - protein, 265 aa, Homo sapiens
VEGPPLPSVVCGSWGCLPARPRRPTPTMVPCWNHGNITRSKAEELLSRTGKDGSFLVRASESISRAYALCVLYRNCVYTYRILPNEDDKFTVQASEGVSMRFFTKLDQLIEFYKKENMGLVTHLQYPVPLEEEDTGDDPEEDTVESVVSPPELPPRNIPLTASSCEAKEVPFSNENPRATETSRPSLSETLFQRLQSMDTSGLPEEHLKAIQDYLSTQLAQDSEFVKTGSSSLPHLKKLTTLLCKELYGFLVRPIPSTWCPSSAN

SEQ ID NO: 21040 - protein, 104 aa, Homo sapiens
LGFGLLVLSFFFFPFREEMEVIAFPTKTIIKEGMLTKQNNSFQRSKRRYFKLRGRTLYYAKTAKVRPHAGKHTRGHHRSRPRGGTGGAESLCGKSFNSQICYCQ

SEQ ID NO: 21041 - protein, 539 aa, Homo sapiens
VSSAEMATGLQVPLPWLATGLLLLLSVQPWAESGKVLVVPIDGSHWLSMREVLRELHARGHQAVVLTPEVNMHIKEENFFTLTTYAISWTQDEFDRHVLGHTQLYFETEHFLKKFFRSMAMLNNMSLVYHRSCVELLHNEALIRHLNATSFDVVLTDPVNLCAAVLAKYLSIPTVFFLRNIPCDLDFKGTQCPNPSSYIPRLLTTNSDHMTFMQRVKNMLYPLALSYICHAFSAPYASLASELFQREVSVVDILSHASVWLFRGDFVMDYPRPIMPNMVFIGGINCANRKPLSQEFEAYINASGEHGIVVFSLGSMVSEIPEKKAMAIADALGKIPQTVLWRYTGTRPSNLANNTILVKWLPQNDLLGHPMTRAFITHAGSHGVYESICNGVPMVMMPLFGDQMDNAKRMETKGAGVTLNVLEMTSEDLENALKAVINDKSYKENIMRLSSLHKDRPVEPLDLAVFWVEFVMRHKGAPHLRPAAHDLTWYQYHSLDVIGFLLAVVLTVAFITFKCCAYGYRKCLGKKGRVKKAHKSKTH

SEQ ID NO: 21042 - protein, 676 aa, Homo sapiens
LQSGLALGYWLGPMLGTLRAMEGEDVEDDQLLQKLRASRRRFQRRMQRLIEKYNQPFEDTPVVQMATLTYETPQGLRIWGGRLIKERNEGEIQCAGNRAGRDVRVTPLPSLASPAVPAPGYCSRISRKSPGDPAKPASSPREWDPLHPSSTDMALVPRNDSLSLQETSSSSFLSSQPFEDDDICNVTISDLYAGMLHSMSRLLSTKPSSIISTKTFIMQNWNSRRRHRYKSRMNKTYCKGARRSQRSSKENFIPCSEPVKGTGALRDCKNVLDVSCRKTGLKLEKAFLEVNRPQIHKLDPSWKERKVTPSKYSSLIYFDSSATYNLDEENRFRTLKWLISPVKIVSRPTIRQGHGENRQREIEIRFDQLHREYCLSPRNQPRRMCLPDSWAMNMYRGGPASPGGLQGLETRRLSLPSSKAKAKSLSEAFENLGKRSLEAGRCLPKSDSSSSLPKTNPTHSATRPQQTSDLHVQGNSSGIFRKSVSPSKTLSVPDKEVPGHGRNRYDEIKEEFDKLHQKYCLKSPGQMTVPLCIGVSTDKASMEVRYQTEGFLGKLNPDPHFQGFQKLPSSPLGCRKSLLGSTAIEAPSSTCVARAITRDGTRDHQFPAKRPRLSEPQGSGRQGNSLGASDGVDNTVRPGDQGSSSQPNSEERGENTSYRMEEKSDFMLEKLETKSV

SEQ ID NO: 21043 - protein, 707 aa, Homo sapiens
LQSGLALGYWLGPMLGTLRAMEGEDVEDDQLLQKLRASRRRFQRRMQRLIEKYNQPFEDTPVVQMATLTYETPQGLRIWGGRLIKERNEGEIQPAVPQSPLKNELRRKYLTQVDILLQGAEYFECAGNRAGRDVRVTPLPSLASPAVPAPGYCSRISRKSPGDPAKPASSPREWDPLHPSSTDMALVPRNDSLSLQETSSSSFLSSQPFEDDDICNVTISDLYAGMLHSMSRLLSTKPSSIISTKTFIMQNWNSRRRHRYKSRMNKTYCKGARRSQRSSKENFIPCSEPVKGTGALRDCKNVLDVSCRKTGLKLEKAFLEVNRPQIHKLDPSWKERKVTPSKYSSLIYFDSSATYNLDEENRFRTLKWLISPVKIVSRPTIRQGHGENRQREIEIRFDQLHREYCLSPRNQPRRMCLPDSWAMNMYRGGPASPGGLQGLETRRLSLPSSKAKAKSLSEAFENLGKRSLEAGRCLPKSDSSSSLPKTNPTHSATRPQQTSDLHVQGNSSGIFRKSVSPSKTLSVPDKEVPGHGRNRYDEIKEEFDKLHQKYCLKSPGQMTVPLCIGVSTDKASMEVRYQTEGFLGKLNPDPHFQGFQKLPSSPLGCRKSLLGSTAIEAPSSTCVARAITRDGTRDHQFPAKRPRLSEPQGSGRQGNSLGASDGVDNTVRPGDQGSSSQPNSEERGENTSYRMEEKSDFMLEKLETKSV

SEQ ID NO: 21044 - protein, 761 aa, Homo sapiens
LQSGLALGYWLGPMLGTLRAMEGEDVEDDQLLQKLRASRRRFQRRMQRLIEKYNQPFEDTPVVQMATLTYETPQGLRIWGGRLIKERNEGEIQDSSMKPADRTDGSVQAAAWGPELPSHRTVLGADSKSGEVDATSDQEESVAWALAPAVPQSPLKNELRRKYLTQVDILLQGAEYFECAGNRAGRDVRVTPLPSLASPAVPAPGYCSRISRKSPGDPAKPASSPREWDPLHPSSTDMALVPRNDSLSLQETSSSSFLSSQPFEDDDICNVTISDLYAGMLHSMSRLLSTKPSSIISTKTFIMQNWNSRRRHRYKSRMNKTYCKGARRSQRSSKENFIPCSEPVKGTGALRDCKNVLDVSCRKTGLKLEKAFLEVNRPQIHKLDPSWKERKVTPSKYSSLIYFDSSATYNLDEENRFRTLKWLISPVKIVSRPTIRQGHGENRQREIEIRFDQLHREYCLSPRNQPRRMCLPDSWAMNMYRGGPASPGGLQGLETRRLSLPSSKAKAKSLSEAFENLGKRSLEAGRCLPKSDSSSSLPKTNPTHSATRPQQTSDLHVQGNSSGIFRKSVSPSKTLSVPDKEVPGHGRNRYDEIKEEFDKLHQKYCLKSPGQMTVPLCIGVSTDKASMEVRYQTEGFLGKLNPDPHFQGFQKLPSSPLGCRKSLLGSTAIEAPSSTCVARAITRDGTRDHQFPAKRPRLSEPQGSGRQGNSLGASDGVDNTVRPGDQGSSSQPNSEERGENTSYRMEEKSDFMLEKLETKSV

SEQ ID NO: 21045 - protein, 21 aa, Homo sapiens
LVLYSLVFVLFCDEVRQVGLP

SEQ ID NO: 21046 - protein, 43 aa, Homo sapiens
VGRDGLPVDVTSPAWGRKDEMAKVACNEKQKKRKRKKKILGDK

SEQ ID NO: 21047 - protein, 135 aa, Homo sapiens
LRDSLGFGCPDGAAARPAAKMPVAVMAESAFSFKKLLDQCENQELEAPGGIATPPVYGQLLALYLLHNDMNNARYLWKRIPPAIKSANSELGGIWSVGQRIWQRDFPGIYTTINAHQWSETVQPIMEALRGVVLY

SEQ ID NO: 21048 - protein, 229 aa, Homo sapiens
LRDSLGFGCPDGAAARPAAKMPVAVMAESAFSFKKLLDQCENQELEAPGGIATPPVYGQLLALYLLHNDMNNARYLWKRIPPAIKSANSELGGIWSVGQRIWQRDFPGIYTTINAHQWSETVQPIMEALRDATRRRAFALVSQAYTSIIADDFAAFVGLPVEEAVKGILEQGWQADSTTRMVLPRKPVAGALDVSFNKFIPLSEPAPVPPIPNEQQLARLTDYVAFLEN

SEQ ID NO: 21049 - protein, 193 aa, Homo sapiens
LRDSLGFGCPDGAAARPAAKMPVAVMAESAFSFKKLLDQCENQELEAPGGIATPPVYGQLLALYLLHNDMNNARYLWKRIPPAIKSANSELGGIWSVGQRIWQRDFPGIYTTINAHQWSETVQPIMEALRGILEQGWQADSTTRMVLPRKPVAGALDVSFNKFIPLSEPAPVPPIPNEQQLARLTDYVAFLEN

SEQ ID NO: 21050 - protein, 50 aa, Homo sapiens
LYIFFLNLVAGALDVSFNKFIPLSEPAPVPPIPNEQQLARLTDYVAFLEN

SEQ ID NO: 21051 - protein, 81 aa, Homo sapiens
MFSLISFSHVFIKDICKLPKDEGTCRDFILKWYYDPNTKSCARFWYGGCGGNENKFGSQKECEKVCAPVLAKPGVISVMGT

SEQ ID NO: 21052 - protein, 7 aa, Homo sapiens
VLIYLLL

SEQ ID NO: 21053 - protein, 259 aa, Homo sapiens
LSCPACGGKQTFPWTRERRKRRQVATLWTGDDRLFSSLQVTGPGEQGMAQAHRTPQPRAAPSQPRVFKLVLLGSGSVGKSSLALRYVKNDFKSILPTVGCAFFTKVVDVGATSLKLEIWDTAGQEKYHSVCHLYFRGANAALLVYDITRKDSFLKAQQWLKDLEEELHPGEVLVMLVGNKTDLSQEREVTFQEGKEFADSQKLLFMETSAKLNHQVSEVFNTVAQELLQRSDEEGQALRGDAAVALNKGPARQAKCCAH

SEQ ID NO: 21054 - protein, 789 aa, Homo sapiens
VAPSPRTERAPPGPAREGLPARSPSISRRVERAEPGRMTSPAAAQSREIDCLSPEAQKLAEARLAAKRAARAEAREIRMKELERQQKEVEERPEKDFTEKGSRNMPGLSAATLASLGGTSSRRGSGDTSISIDTEASIREIKDSLAEVEEKYKKAMVSNAQLDNEKTNFMYQVDTLKDMLLELEEQLAESRRQYEEKNKEFEREKHAHSILQFQFAEVKEALKQREEMLEKHGIILNSEIATNGETSDTLNNVGYQGPTKMTKEELNALKSTGDGTLGRASEVEVKNEIVANVGKREILHNTEKEQHTEDTVKDCVDIEVFPAGENTEDQKSSEDTAPFLGTLAGATYEEQVQSQILESSSLPENTVQVESNEVMGAPDDRTRTPLEPSNCWSDLDGGNHTENVGEAAVTQVEEQAGTVASCPLGHSDDTVYHDDKCMVEVPQELETSTGHSLEKEFTNQEAAEPKEVPAHSTEVGRDHNEEEGEETGLRDEKPIKTEVPGSPAGTEGNCQEATGPSTVDTQNEPLDMKEPDEEKSDQQGEALDSSQKKTKNKKKKNKKKKSPVPVETLKDVKKELTYQNTDLSEIKEEEQVKSTDRKSAVEAQNEVTENPKQKIAAESSENVDCPENPKIKLDGKLDQEGDDVQTAAEEVLADGDTLDFEDDTVQSSGPRAGGEELDEGVAKDNAKIDGATQSSPAEPKSEDADRCTLPEHESPSQDISDACEAESTERCEMSEHPSQTVRKALDSNSLENDDLSAPGREPGHFNPESREDTRGGNEKGKSKEDCTMS

SEQ ID NO: 21055 - protein, 821 aa, Homo sapiens
VAPSPRTERAPPGPAREGLPARSPSISRRVERAEPGRMTSPAAAQSREIDCLSPEAQKLAEARLAAKRAARAEAREIRMKELERQQKEEDSERYSRRSRRNTSASDEDERMSVGSRGSLRVEERPEKDFTEKGSRNMPGLSAATLASLGGTSSRRGSGDTSISIDTEASIREIKDSLAEVEEKYKKAMVSNAQLDNEKTNFMYQVDTLKDMLLELEEQLAESRRQYEEKNKEFEREKHAHSILQFQFAEVKEALKQREEMLEKHGIILNSEIATNGETSDTLNNVGYQGPTKMTKEELNALKSTGDGTLGRASEVEVKNEIVANVGKREILHNTEKEQHTEDTVKDCVDIEVFPAGENTEDQKSSEDTAPFLGTLAGATYEEQVQSQILESSSLPENTVQVESNEVMGAPDDRTRTPLEPSNCWSDLDGGNHTENVGEAAVTQVEEQAGTVASCPLGHSDDTVYHDDKCMVEVPQELETSTGHSLEKEFTNQEAAEPKEVPAHSTEVGRDHNEEEGEETGLRDEKPIKTEVPGSPAGTEGNCQEATGPSTVDTQNEPLDMKEPDEEKSDQQGEALDSSQKKTKNKKKKNKKKKSPVPVETLKDVKKELTYQNTDLSEIKEEEQVKSTDRKSAVEAQNEVTENPKQKIAAESSENVDCPENPKIKLDGKLDQEGDDVQTAAEEVLADGDTLDFEDDTVQSSGPRAGGEELDEGVAKDNAKIDGATQSSPAEPKSEDADRCTLPEHESPSQDISDACEAESTERCEMSEHPSQTVRKALDSNSLENDDLSAPGREPGHFNPESREDTRGGNEKGKSKEDCTMS

SEQ ID NO: 21056 - protein, 845 aa, Homo sapiens
VAPSPRTERAPPGPAREGLPARSPSISRRVERAEPGRMTSPAAAQSREIDCLSPEAQKLAEARLAAKRAARAEAREIRMKELERQQKEEDSERYSRRSRRNTSASDEDERMSVGSRGSLRVEERPEKDFTEKGSRNMPGLSAATLASLGGTSSRRGSGDTSISIDTEASIREIKELNELKDQIQDVEGKYMQGLKEMKDSLAEVEEKYKKAMVSNAQLDNEKTNFMYQVDTLKDMLLELEEQLAESRRQYEEKNKEFEREKHAHSILQFQFAEVKEALKQREEMLEKHGIILNSEIATNGETSDTLNNVGYQGPTKMTKEELNALKSTGDGTLGRASEVEVKNEIVANVGKREILHNTEKEQHTEDTVKDCVDIEVFPAGENTEDQKSSEDTAPFLGTLAGATYEEQVQSQILESSSLPENTVQVESNEVMGAPDDRTRTPLEPSNCWSDLDGGNHTENVGEAAVTQVEEQAGTVASCPLGHSDDTVYHDDKCMVEVPQELETSTGHSLEKEFTNQEAAEPKEVPAHSTEVGRDHNEEEGEETGLRDEKPIKTEVPGSPAGTEGNCQEATGPSTVDTQNEPLDMKEPDEEKSDQQGEALDSSQKKTKNKKKKNKKKKSPVPVETLKDVKKELTYQNTDLSEIKEEEQVKSTDRKSAVEAQNEVTENPKQKIAAESSENVDCPENPKIKLDGKLDQEGDDVQTAAEEVLADGDTLDFEDDTVQSSGPRAGGEELDEGVAKDNAKIDGATQSSPAEPKSEDADRCTLPEHESPSQDISDACEAESTERCEMSEHPSQTVRKALDSNSLENDDLSAPGREPGHFNPESREDTRGGNEKGKSKEDCTMS

SEQ ID NO: 21057 - protein, 499 aa, Homo sapiens
LGARRPSEAGGLAGVLRSANPDAPGRRGPASSPALWARSAPREGGWMPGSSGAGMEAAVAPGRDAPAPAASQPSGCGKHNSPERKVYMDYNATTPLEPEVIQAMTKAMWEAWGNPSSPYSAGRKAKDIINAARESLAKMIGGKPQDIIFTSGGTESNNLVIHSVVKHFHANQTSKGHTGGHHSPVKGAKPHFITSSVEHDSIRLPLEHLVEEQVAAVTFVPVSKVSGQAEVDDILAAVRPTTRLVTIMLANNETGIVMPVPEISQRIKALNQERVAAGLPPILVHTDAAQALGKQRVDVEDLGVDFLTIVGHKFYGPRIGALYIRGLGEFTPLYPMLFGGGQERNFRPGTENTPMIAGLGKAAELVTQNCEAYEAHMRDVRDYLEERLEAEFGQKRIHLNSQFPGTQRLPNTCNFSIRGPRLQGHVVLAQCRVLMASVGAACHSDHGDQPSPVLLSYGVPFDVARNALRLSVGRSTTRAEVDLVVQDLKQAVAQLEDQA

SEQ ID NO: 21058 - protein, 172 aa, Homo sapiens
MMKMKTFMMICFHLINTVTFVPVSKVSGQAEVDDILAAVRPTTRLVTIMLANNETGIVMPVPEISQRIKALNQERVAAGLPPILVHTDAAQALGKQRVDVEDLGVDFLTIVGHKFYGPRIGALYIRGLGEFTPLYPMLFGGGQERNFRPGTENTPMIAGLGKVSPGELEEMS

SEQ ID NO: 21059 - protein, 296 aa, Homo sapiens
MAPARRPAGARLLLVYAGLLAAAAAGLGSPEPGAPSRSRARREPPPGNELPRGPGESRAGPAARPPEPTAERAHSVDPRDAWMLFVRQSDKGVNGKKRSRGKAKKLKFGLPGPPGPPGPQGPPGPIIPPEALLKEFQLLLKGAVRQRERAEPEPCTCGPAGPVAASLAPVSATAGEDDDDVVGDVLALLAAPLAPGPRAPRVEAAFLCRLRRDALVERRALHELGVYYLPDAEGAFRRGPGLNLTSGQYRAPVAGFYALAATLHVALGEPPRRGPPRPRDHLRLLICIQSRCQRNA

SEQ ID NO: 21060 - protein, 9 aa, Homo sapiens
LSAVLLLVS

SEQ ID NO: 21061 - protein, 188 aa, Homo sapiens
VCSATAGLASGARSAPRRPQPHARRAGAMEEGSSSPVSPVDSLGTSEEELERQPKRFGRKRRYSKKSSEDGSPTPGKRGKKGSPSAQSFEELQSQRILANVRERQRTQSLNEAFAALRKIIPTLPSDKLSKIQTLKLAARYIDFLYQVLQSDEMDNKMTSCSYVAHERLSYAFSVWRMEGAWSMSASH

SEQ ID NO: 21062 - protein, 147 aa, Homo sapiens
LQELGTRRFRESQFSDMAEIDNPSEQLRDQDLRFSAQTTRGSSRKAEAEHAICSPCLASLTQLDEITEQIVLKEAPVVFSGAPLPGGSLKDPPTQTALCDLRSEQSCMCCSSFTPSFIHLEAPSEHCEVVGAGPVVTEGSGGCQVQW

SEQ ID NO: 21063 - protein, 274 aa, Homo sapiens
LCVRVLTPVLDSMVLITDKFWGTSGVESVIGSVHTWLAEAINALQDNRDTLTAKVIQGCGNPKVNPQGPGPEEKRRRGKLAPRERPPSGTLEKLVSEAKAQLRDVQDFWISLPGTLCSEKMALSTASDDRCWNGMARGRYLPEVMGDGLANQINNPEVEVDITKPDMTIRQQIMQLKIMTNRLRSAYNGNDVDFQDASDDGSGSGSGDGCLDDLCSRKVSRKSSSSRTPLTHALPGLSEQEGQKTSAASCPQPPTFLLPLLLFLALTVARPRWR

SEQ ID NO: 21064 - protein, 35 aa, Homo sapiens
LRPPKHMCGVAGTLLIAVDAAVTSFTPAPMACMIH

SEQ ID NO: 21065 - protein, 76 aa, Homo sapiens
LCSPWVTSGGSGPRCSKERMQNSFLQKHLLRHPALPGGRKERQGRTRWSEMRGSPTGPRQARGGTGPATANSGQPA

SEQ ID NO: 21066 - protein, 197 aa, Homo sapiens
VDADQGYVCECPEGFMGLDCRERVPDDCECRNGGRCLGANTTLCQCPLGFFGLLCEFEITAMPCNMNTQCPDGGYCMEHGGSYLCVCHTDHNASHSLPSPCDSDPCFNGGSCDAHDDSYTCECPRGFHGKHCEKARPHLCSSGPCRNGGTCKEAGGEYHCSCPYRFTGRHCEIARLVCLWPLSQRRHLLPLHWQIQV

SEQ ID NO: 21067 - protein, 512 aa, Homo sapiens
MAESGLAMWPSLLLLLLLPGPPPVAGLEDAAFPHLGESLQPLPRACPLRCSCPRVDTVDCDGLDLRVFPDNITRAAQHLSLQNNQLQELPYNELSRLSGLRTLNLHNNLISSEGLPDEAFESLTQLQHLCVAHNKLSVAPQFLPRSLRVADLAANQVMEIFPLTFGEKPALRSVYLHNNQLSNAGLPPDAFRGSEAIATLSLSNNQLSYLPPSLPPSLERLHLQNNLISKVPRGALSRQTQLRELYLQHNQLTDSGLDATTFSKLHSLEYLDLSHNQLTTVPAGLPRTLAILHLGRNRIRQVEAARLHGARGLRYLLLQHNQLGSSGLPAGALRPLRGLHTLHLYGNGLDRVPPALPRRLRALVLPHNHVAALGARDLVATPGLTELNLAYNRLASARVHHRAFRRLRALRSLDLAGNQLTRLPMGLPTGLRTLQLQRNQLRMLEPEPLAGLDQLRELSLAHNRLRVGDIGPGTWHELQALQVRHRLVSHTVPRAPPSPCLPCHVPNILVSW

SEQ ID NO: 21068 - protein, 415 aa, Homo sapiens
LFGGRGGLASPQTSKPIGWMPWISEGRATRPCLRVPSARRGDEGLHQRDEASQKMSKQQPTQFINPETPGYVGFANLPNQVHRKSVKKGFEFTLMVVGESGLGKSTLINSLFLTDLYPERVIPGAAEKIERTVQIEASTVEIEERGVKLRLTVVDTPGYGDAINCRDCFKTIISYIDEQFERYLHDESGLNRRHIIDNRVHCCFYFISPFGHGLKPLDVAFMKAIHNKVNIVPVIAKADTLTLKERERLKKRILDEIEEHNIKIYHLPDAESDEDEDFKEQTRLLKASIPFSVVGSNQLIEAKGKKVRGRLYPWGVVEVENPEHNDFLKLRTMLITHMQDLQEVTQDLHYENFRSERLKRGGRKVENEDMNKDQILLEKEAELRRMQEMIARMQAQMQMQMQGGDGDGGALGHHV

SEQ ID NO: 21069 - protein, 23 aa, Homo sapiens
LWVFFFFFLSGGMGTPKLIWQQR

SEQ ID NO: 21070 - protein, 372 aa, Homo sapiens
LVLFIDEASQKMSKQQPTQFINPETPGYVGFANLPNQVHRKSVKKGFEFTLMVVGESGLGKSTLINSLFLTDLYPERVIPGAAEKIERTVQIEASTVEIEERGVKLRLTVVDTPGYGDAINCRDCFKTIISYIDEQFERYLHDESGLNRRHIIDNRVHCCFYFISPFGHGLKPLDVAFMKAIHNKVNIVPVIAKADTLTLKERERLKKRILDEIEEHNIKIYHLPDAESDEDEDFKEQTRLLKASIPFSVVGSNQLIEAKGKKVRGRLYPWGVVEVENPEHNDFLKLRTMLITHMQDLQEVTQDLHYENFRSERLKRGGRKVENEDMNKDQILLEKEAELRRMQEMIARMQAQMQMQMQGGDGDGGALGHHV

SEQ ID NO: 21071 - protein, 12 aa, Homo sapiens
LVFLLTLPFTVA

SEQ ID NO: 21072 - protein, 53 aa, Homo sapiens
LTQVWKRLNLVECDYFGMEFQNTQSYWIWLEPMKPIIRQIRNRVSLFVAQAGV

SEQ ID NO: 21073 - protein, 95 aa, Homo sapiens
LPSSLSWPSSIAHGGSSRRRGPHELRLGLLQTHAALWPLRPRRRATIRAALPPPPMRWGEATGQPPEECPGRCPPGAHDGHRFALWCWIRYCVCS

SEQ ID NO: 21074 - protein, 291 aa, Homo sapiens
LPVLCQAAANVLLSEQGDVKLADFGVAGQLTDTQIKRNTFVGTPFWMAPEVIKQSAYDFKADIWSLGITAIELAKGEPPNSDLHPMRVLFLIPKNSPPTLEGQHSKPFKEFVEACLNKDPRFRPTAKELLKHKFITRYTKKTSFLTELIDRYKRWKSEGHGEESSSEDSDIDGEAEDGEQGPIWTFPPTIRPSPHSKLHKGTALHSSQKPAEPVKRQPRSQCLSTLVRPVFGELKEKHKQSGGSVGALEELENAFSLAEESCPGISDKLMVHLVERVQRFSHNRNHLTSTR

SEQ ID NO: 21075 - protein, 78 aa, Homo sapiens
MDAATLTYDTLRFAEFEDFPETSEPVWILGRKYSIFTEKDEILSDVASRLWFTYRKNFPAIGGCRDISLSSKCGPWRY

SEQ ID NO: 21076 - protein, 136 aa, Homo sapiens
LSQSLRRPVQAGVRGAAATLRPHAQGLGCSRGGRAHRCVLSAQPGLPRATSVGDEVGGTKARFLLALGRKVFRKWVCGKPEDGVHRTQRGRPGQKGGWLSWSCCWSLPSECPFPVLWHSVAASPGVVTGGGRGLHL

SEQ ID NO: 21077 - protein, 206 aa, Homo sapiens
MATAMYLEHYLDSIENLPCELQRNFQLMRELDQRTEDKKAEIDILAAEYISTVKTLSPDQRVERLQKIQNAYSKCKEYSDDKVQLAMQTYEMVDKHIRRLDADLARFEADLKDKMEGSDFESSGGRGLKKGRGQKEKRGSRGRGRRTSEEDTPKKKKHKGGGNSVLSLPAPSCSEPEGPVPTVPFLRESGTPPGLFLTQCCFSRVC

SEQ ID NO: 21078 - protein, 157 aa, Homo sapiens
VRVPDPSAQWVFTPLVVTLWCQAALPQGRSCSLLGTQAHAPSCPCGLPSSGLFPTCPGLFLECSVPRLHRCSVSRLRSRDLRLPPALLLPCGLALARQNLCVWMKGSVTCSTWNPGAWTGSQPPARSHVECWEAIGAGRGRARWHRLARGACHTLGS

SEQ ID NO: 21079 - protein, 113 aa, Homo sapiens
MVLVSLVLVGSVQLSRAPVSPGSCSPAAGATSDEALLSHFLGIPAHSEQDAQSPPPDPPTPPPPPTPQPSTRLQPHPDMVLGSQALRCSCVTQCRCLPPASAPVRPSLWKILL

SEQ ID NO: 21080 - protein, 44 aa, Homo sapiens
LALFDAQTAAVSFSHDSKLGTASCSVLRVCPLMVLSDLTLCGEP

SEQ ID NO: 21081 - protein, 207 aa, Homo sapiens
LRCGPQGDPGGSPGTRDQPRRTGWGRPKQERRDRWDPALGVRRRRVAGQWRSRMRRQFFRPPLPVPPHFRGRHFHFLFRRSRSPCEELGPPGRREGFALKPGTPGALPQVGVLRDLERPGWVVSGRPFPASSHLGWSRFLLRPVRTCLGARCPLTAPRRIPAWSPGSVMLPDCRGDSEAHTGLGPRRRPHGLAELLLVSRLSQATRR

SEQ ID NO: 21082 - protein, 402 aa, Homo sapiens
LPDLQTSSPALSANLSDMSGPVPSRARVYTDVNTHRPREYWDYESHVVEWGNQDDYQLVRKLGRGKYSEVFEAINITNNEKVVVKILKPVKKKKIKREIKILENLRGGPNIITLADIVKDPVSRTPALVFEHVNNTDFKQLYQTLTDYDIRFYMYEILKALDYCHSMGIMHRDVKPHNVMIDHEHRKLRLIDWGLAEFYHPGQEYNVRVASRYFKGPELLVDYQMYDYSLDMWSLGCMLASMIFRKEPFFHGHDNYDQLVRIAKVLGTEDLYDYIDKYNIELDPRFNDILGRHSRKRWERFVHSENQHLVSPEALDFLDKLLRYDHQSRLTAREAMEHPYFYTVVKDQARMGSSSMPGGSTPVSSANMMSEMKFCRVAQAGLELLSSTVYPPWPPKVLRLEA

SEQ ID NO: 21083 - protein, 408 aa, Homo sapiens
LPDLQTSSPALSANLSDMSGPVPSRARVYTDVNTHRPREYWDYESHVVEWGNQDDYQLVRKLGRGKYSEVFEAINITNNEKVVVKILKPVKKKKIKREIKILENLRGGPNIITLADIVKDPVSRTPALVFEHVNNTDFKQLYQTLTDYDIRFYMYEILKALDYCHSMGIMHRDVKPHNVMIDHEHRKLRLIDWGLAEFYHPGQEYNVRVASRYFKGPELLVDYQMYDYSLDMWSLGCMLASMIFRKEPFFHGHDNYDQLVRIAKVLGTEDLYDYIDKYNIELDPRFNDILGRHSRKRWERFVHSENQHLVSPEALDFLDKLLRYDHQSRLTAREAMEHPYFYTVVKDQARMGSSSMPGGSTPVSSANMMSGISSVPTPSPLGPLAGSPVIAAANPLGMPVPAAAGAQQ

SEQ ID NO: 21084 - protein, 134 aa, Homo sapiens
LPDLQTSSPALSANLSDMSGPVPSRARVYTDVNTHRPREYWDYESHVVEWGNQDDYQLVRKLGRGKYSEVFEAINITNNEKVVVKILKPVKKKKIKREIKILENLRGGPNIITLADIVKDPVVSIVGVSKARQS

SEQ ID NO: 21085 - protein, 515 aa, Homo sapiens
LSRHPSPLTHLQMLSQLAMLQGSLLLVVATMSVAQQTRQEADRGCETLVVQHGHCSYTFLLPKSEPCPPGPEVSRDSNTLQRESLANPLHLGKLPTQQVKQLEQALQNNTQWLKKLERAIKTILRSKLEQVQQQMAQNQTAPMLELGTSLLNQTTAQIRKLTDMEAQLLNQTSRMDAQMPETFLSTNKLENQLLLQRQKLQQLQGQNSALEKRLQALETKQQEELASILSKKAKLLNTLSRQSAALTNIERGLRGVRHNSSLLQDQQHSLRQLLVLLRHLVQERANASAPAFIMAGEQVFQDCAEIQRSGASASGVYTIQVSNATKPRKVFCDLQSSGGRWTLIQRRENGTVNFQRNWKDYKQGFGDPAGEHWLGNEVVHQLTRRAAYSLRVELQDWEGHEAYAQYEHFHLGSENQLYRLSVVGYSGSAGRQSSLVLQNTSFSTLDSDNDHCLCKCAQVMSGGWWFDACGLSNLNGVYYHAPDNKYKMDGIRWHYFKGPSYSLRASRMMIRPLDI

SEQ ID NO: 21086 - protein, 59 aa, Homo sapiens
MGQKVFYLGDKAQSKHGILTMKYPIEHRIFTSWEGMEKIWHHTLQQAACVPGGAPGAAD

SEQ ID NO: 21087 - protein, 582 aa, Homo sapiens
LTVVVLSWVVGTCAPALFNSLVEAAVVCQALAPGVSCRRVRREAMPGSGPSERMTWPGPALSAGPPTRPLSSAPGIPPIPPLTRTHSLMAMSLPGSRRTSAGSRRRTSPPVSVRDAYGTSSLSSSSNSGSYKGSDSSPTPRRSMKYTLCSDNHGIKPPTPEQYLTPLQQKEVCIRHLKARLKDTQDRLQDRDTEIDDLKTQLSRMQEDWIEEECHRVEAQLALKEARKEIKQLKQVIDTVKNNLIDKDKGLQKYFVDINIQNKKLETLLHSMEVAQNGMAKEDGTGESAGGSPARSLTRSSTYTKLSDPAVCGDRQPGDPSSGSAEDGADSGFAAADDTLSRTDALEASSLLSSGVDCGTEETSLHSSFGLGPRFPASNTYEKLLCGMEAGVQASCMQERAIQTDFVQYQPDLDTILEKVTQAQVCGTDPESGDRCPELDAHPSGPRDPNSAVVVTVGDELEAPEPITRGPTPQRPGANPNPGQSVSVVCPMEEEEEAAVAEKEPKSYWSRHYIVDLLAVVVPAVPTVAWLCRSQRRQGQPIYNISSLLRGCCTVALHSIRRISCRSLSQPSPSPAGGGSQL

SEQ ID NO: 21088 - protein, 67 aa, Homo sapiens
VEPPPGRCWSTPPVAPPARSASAAAMGVQVETISPGDGRTFPKRGQTCVVHYTGCSENQPCHPCTHL

SEQ ID NO: 21089 - protein, 58 aa, Homo sapiens
LLPRLPFLLSMLLLIDPREENSGASLSIYFRFQPKQHIARLNAEVDVRTHSIKPSVNV

SEQ ID NO: 21090 - protein, 136 aa, Homo sapiens
VRVRRRRAEVLGRAVEPPPGRCWSTPPVAPPARSASAAAMGVQVETISPGDGRTFPKRGQTCVVHYTDECGSESQTDYISRLCLWCHWAPRHHPTTCHSRLRCGASKTGMTGMASSLSSLFLDLPWRDLVPPDMCT

SEQ ID NO: 21091 - protein, 88 aa, Homo sapiens
LGHQFLGAGMLEDGKKFDSSRDRNKPFKFMLGKQEVIRGWEEGVAQMSVGQRAKLTISPDYAYGATGHPGIIPPHATLVFDVELLKLE

SEQ ID NO: 21092 - protein, 147 aa, Homo sapiens
VRVRRRRAEVLGRAVEPPPGRCWSTPPVAPPARSASAAAMGVQVETISPGDGRTFPKRGQTCVVHYTGMLEDGKKFDSSRDRNKPFKFMLGKQEVIRGWEEGVAQMSVGQRAKLTISPDYAYGATGHPGIIPPHATLVFDVELLKLE

SEQ ID NO: 21093 - protein, 131 aa, Homo sapiens
VRVRRRRAEVLGRAVEPPPGRCWSTPPVAPPARSASAAAMGVQVETISPGDGMLEDGKKFDSSRDRNKPFKFMLGKQEVIRGWEEGVAQMSVGQRAKLTISPDYAYGATGHPGIIPPHATLVFDVELLKLE

SEQ ID NO: 21094 - protein, 168 aa, Homo sapiens
VRVRRRRAEVLGRAVEPPPGRCWSTPPVAPPARSASAAAMGVQVETISPGDGRTFPKRGQTCVVHYTGMLEDGKKFDSSRDRNKPFKFMLGKQEVIRGWEEGVAQVCSLICFVLLSSIYLLYFFIGGIFIRFKNKKSEKSHPHAIPSDQYPHKKLLLLMFLVLWFKHI

SEQ ID NO: 21095 - protein, 223 aa, Homo sapiens
LARVRNWAGCPAFLPSSPCSVEDTKEEKGRVTCPHYSGARELAITYEIYDSGFEVNSAGPVSSIRARFSLSGSIDQQHQTMPGALQMLSNSPRRDSLLARGLVSACVLMPSSLLSTAPQVLSTSSPAQQAENEAKASSSILIDESEPTTNIQIRLADGGRLVQKFNHSHRISDIRLFIVDARPAMAATSFILMTTFPNKELADESQTLKEANLLNAVIVQRLT

SEQ ID NO: 21096 - protein, 82 aa, Homo sapiens
MSAPTCLAHLPPCFLLLALVLVPSDASGQSSRNDWQVLQPEGPMLVAEGETLLLRCMVVGSCTDGMIKWVKGAHWNLPLCEV

SEQ ID NO: 21097 - protein, 148 aa, Homo sapiens
MPVPASWPHLPSPFLLMTLLLGRLTGVAGEDELQVIQPEKSVSVAAGESATLRCAMTSLIPVGPIMWFRGAGAGRELIYNQKEGHFPRVTTVSELTKRNNLDFSISISNITPADAGTYYCVKFRKGSPDDVEFKSGAGTELSVRDHMS

SEQ ID NO: 21098 - protein, 172 aa, Homo sapiens
MPVPASWPHLPSPFLLMTLLLGRLTGVAGEEELQVIQPDKSISVAAGESATLHCTVTSLIPVGPIQWFRGAGPGRELIYNQKEGHFPRVTTVSDLTKRNNMDFSIRISNITPADAGTYYCVKFRKGSPDHVEFKSGAGTELSVRVLQVKEIKIPRTLASVVIQVYLLQHPVA

SEQ ID NO: 21099 - protein, 525 aa, Homo sapiens
LGSPGGASSAFQPSRAAQPRPMEPAGPAPGRLGPLLCLLLAASCAWSGVAGEEELQVIQPDKSVLVAAGETATLRCTATSLIPVGPIQWFRGAGPGRELIYNQKEGHFPRVTTVSDLTKRNNMDFSIRIGNITPADAGTYYCVKFRKGSPDDVEFKSGAGTELSVRAKPSAPVVSGPAARATPQHTVSFTCESHGFSPRDITLKWFKNGNELSDFQTNVDPVGESVSYSIHSTAKVVLTREDVHSQVICEVAHVTLQGDPLRGTANLSETIRVPPTLEVTQQPVRAENQVNVTCQVRKFYPQRLQLTWLENGNVSRTETASTVTENKDGTYNWMSWLLVNVSAHRDDVKLTCQVEHDGQPAVSKSHDLKVSAHPKEQGSNTAAENTGSNERNIYIVVGVVCTLLVALLMAALYLVRIRQKKAQGSTSSTRLHEPEKNAREITQDTNDITYADLNLPKGKKPAPQAAEPNNHTEYASIQTSPQPASEDTLTYADLDMVHLNRTPKQPAPKPEPSFSEYASVQVPRK

SEQ ID NO: 21100 - protein, 42 aa, Homo sapiens
MSPGGGEDPSQRTGDKTLCFLGSLQDSLGPNCVAPPGPISPF

SEQ ID NO: 21101 - protein, 94 aa, Homo sapiens
MVLLHVLFEHAVGYALLALKEVEEISLLQPQVEESVLNLGKFHSIVRLVAFCPFASSQVALENANAVSEDLNAVVPMAGPGFAVMTCESNLSIP

SEQ ID NO: 21102 - protein, 91 aa, Homo sapiens
LANGVEISDLKLSTEYSLRALKTRGNTPKYGLIFHSTFIGRAAAKNKGRISRYLANKCSIASRIDCFSGMGGGALAGVRRGWVAGWGGLQP

SEQ ID NO: 21103 - protein, 100 aa, Homo sapiens
MGTLLTIWLLAWLGELVWSLGARHPFAQAVGRNIANPTAMLLSASNMLRHLNLEYHSSMIADAVKKVIKVGKVRTRDMGGYSTTTDFIKSVIGHLQTKGS

SEQ ID NO: 21104 - protein, 171 aa, Homo sapiens
MKRSKLALSKAIESGDTDLVFTVLLHLKNELNRGDFFMTLRNQPMALSLYRQFCKHQELETLKDLYNQDDNHQELGSFHIRASYAAEERIEGRVAALQTAADAFYKAKNEFAAKATEDQMRLLRLQRRLEDELGGQFLDLSLHDTVTTLILGGHNKRAEQLARDFRIPDKR

SEQ ID NO: 21105 - protein, 550 aa, Homo sapiens
LEDILSATKMVINLCLPQFRPRIHCNKISADGYEVENLISEDLTKRSHGFRTEYFIKPPVYVTVSFPFNVEICRINIDLTAGGGQNVTGLEMYTSASSSRVSWNTPQCRTLGPAEPSVPDKEAFTLVGKVLLKNQSQVVFSHRGFKARPPFGAMEATLPSPAVVAQELWNKGALSLSHVAHLRICITHVTGGGIPCIKRLEVWGQPAKTCSQEVIDSILLVTSENLPQDVALQAPALPMESDCDPGDQPESQQAPSSLQKLAEIIQDVPEEFLDPITLEIMPCPMLLPSGKVIDQSTLEKCNRSEATWGRVPSDPFTGVAFTPHSQPLPHPSLKARIDHFLLQHSIPGCHLLGRAQTALAVIPSSIVLPSQKRKIEQAEHVPDSNFGVNASCFSATSPLVLPTTSEHTAKKMKATNEPSLTHMDCSTGPLSHEQKLSQSLEIALASTLGSMPSFTARLTRGQLQHLGTRGSNTSWRPGTGSEQPGSILGPECASCKRVFSPYFKKEPVYQLPCGHLLCRPCLGEKQRSLPMTCTACQRPVASQDVLRVHF

SEQ ID NO: 21106 - protein, 496 aa, Homo sapiens
LEDILSATKMVINLCLPQFRPRIHCNKISADGYEVENLISEDLTKRSHGFRTEYFIKPPVYVTVSFPFNVEICRINIDLTAGGGQNVTGLEMYTSASSSRVSWNTPQCRTLGPAEPSVPDKEAFTLVGKVLLKNQSQVVFSHRGFKARPPFGAMEATLPSPAVVAQELWNKGALSLSHVAHLRICITHVTGGGIPCIKRLEVWGQPAKTCSQEVIDSILLVTSENLPQDVALQAPALPMESDCDPGDQPESQQAPSSLQKLAEIIQDVPEEFLDPITLEIMPCPMLLPSGKVIDQSTLEKCNRSEATWGRVPSDPFTGVAFTPHSQPLPHPSLKARIDHFLLQHSIPGCHLLGRAQTALAVIPSSIVLPSQKRKIEQAEHVPDSNFGVNASCFSATSPLVLPTTSEHTAKKMKATNEPSLTHMDCSTEQPGSILGPECASCKRVFSPYFKKEPVYQLPCGHLLCRPCLGEKQRSLPMTCTACQRPVASQDVLRVHF

SEQ ID NO: 21107 - protein, 79 aa, Homo sapiens
LGLRRNPGCLNCGRVWEARPRQASSLRCCSTRAIFPSGVPASPARPVSLKELAVLAVGPVLGGAAQPCPGPVHRASSLG

SEQ ID NO: 21108 - protein, 60 aa, Homo sapiens
LGVGGILKDEQMGPARLRVQLAVQELWVSDNRISFGLLRLGRSIRITQRSYWDLEGTLAA

SEQ ID NO: 21109 - protein, 881 aa, Homo sapiens
MARAVGAPGQAPSGVGGEGRRERGRAVGGGGGKVRRRRPEAAPGTGRPQSSLGGAGVASRCLEAEELTAMGWRPRRARGTPLLLLLLLLLLWPVPGAGVLQGHIPGQPVTPHWVLDGQPWRTVSLEEPVSKPDMGLVALEAEGQELLLELEKNHRLLAPGYIETHYGPDGQPVVLAPNHTDHCHYQGRVRGFPDSWVVLCTCSGMSGLITLSRNASYYLRPWPPRGSKDFSTHEIFRMEQLLTWKGTCGHRDPGNKAGMTSLPGGPQSRGRREARRTRKYLELYIVADHTLFLTRHRNLNHTKQRLLEVANYVDQLLRTLDIQVALTGLEVWTERDRSRVTQDANATLWAFLQWRRGLWAQRPHDSAQLLTGRAFQGATVGLAPVEGMCRAESSGGVSTDHSELPIGAAATMAHEIGHSLGLSHDPDGCCVEAAAESGGCVMAAATGHPFPRVFSACSRRQLRAFFRKGGGACLSNAPDPGLPVPPALCGNGFVEAGEECDCGPGQECRDLCCFAHNCSLRPGAQCAHGDCCVRCLLKPAGALCRQAMGDCDLPEFCTGTSSHCPPDVYLLDGSPCARGSGYCWDGACPTLEQQCQQLWGPGSHPAPEACFQVVNSAGDAHGNCGQDSEGHFLPCAGRDALCGKLQCQGGKPSLLAPHMVPVDSTVHLDGQEVTCRGALALPSAQLDLLGLGLVEPGTQCGPRMVCQSRRCRKNAFQELQRCLTACHSHGVCNSNHNCHCAPGWAPPFCDKPGFGGSMDSGPVQAENHDTFLLAMLLSVLLPLLPGAGLAWCCYRLPGAHLQRCSWGCRRDPACSGPKDGPHRDHPLGGVHPMELGPTATGQPWPLDPENSHEPSSHPEKPLPAVSPDPQDQVQMPRSCLW

SEQ ID NO: 21110 - protein, 199 aa, Homo sapiens
LEGFGLCLWVVTLSLLIWPQDDDAVPPGMESLISAPLVKTLEKEEEKDLVMYSKCQRLFRSPSMPCSVIRPILKRLERPQDRDTPVQNKRRRSVTPPEEQQEAEEPKARVLRSKSLCHDEIENLLDSDHRELIGDYSKVVPWVSDPRGASQLPWEPELNLKAKAGLPPTDSRRKAPRPQVHLTRNDGGPIDGQVQQHRG

SEQ ID NO: 21111 - protein, 175 aa, Homo sapiens [sequence omitted]

SEQ ID NO: 21112 - protein, 315 aa, Homo sapiens
VCAGPRGNWSPRRPPPASAAASLPRPASLPLGPARRLSSEPVADSRGAASFSSPHDRGRAVIMANLGCWMLVLFVATWSDLGLCKKRPKPGGWNTGGSRYPGQGSPGGNRYPPQGGGGWGQPHGGGWGQPHGGGWGQPHGGGWGQPHGGGWGQGGGTHSQWNKPSKPKTNMKHMAGAAAAGAVVGGLGGYMLGSAMSRPIIHFGSDYEDRYYRENMHRYPNQVYYRPMDEYSNQNNFVHDCVNITIKQHTVTTTTKGENFTETDVKMMERVVEQMCITQYERESQAYYQRGSSMVLFSSPPVILLISFLIFLIVG

SEQ ID NO: 21113 - protein, 46 aa, Homo sapiens
LSVFREGRGFSRFTIWVVYMLVEILPVCLEGSVNVRALEINKITAT

SEQ ID NO: 21114 - protein, 21 aa, Homo sapiens
MKRERKNGLQPPNVPSPMWTR

SEQ ID NO: 21115 - protein, 24 aa, Homo sapiens
LPPSPPVLLGLCLPCLVLPPSLCC

SEQ ID NO: 21116 - protein, 49 aa, Homo sapiens
LRMVSVSGGLAAFLLSFLECFGGEDYGSQGRHFRQPVRGEQCFGPAISV

SEQ ID NO: 21117 - protein, 524 aa, Homo sapiens
LWEVRLAVATTEEEGRDAVEHGDRLSVMEGSGEQPGPQPQHPGDHRIRDGDFVVLKREDVFKAVQVQRRKKVTFEKQWFYLDNVIGHSYGTAFEVTSGGSLQPKKKREEPTAETKEAGTDNRNIVDDGKSQKLTQDDIKALKDKGIKGEEIVQQLIENSTTFRDKTEFAQDKYIKKKKKKYEAIITVVKPSTRILSIMYYAREPGKINHMRYDTLAQMLTLGNIRAGNKMIVMETCAGLVLGAMMERMGGFGSIIQLYPGGGPVRAATACFGFPKSFLSGLYEFPLNKVDSLLHGTFSAKMLSSEPKDSALVEESNGTLEEKQASEQENEDSMAEAPESNHPEDQETMETISQDPEHKGPKERGSKKDYIQEKQRRQEEQRKRHLEAAALLSERNADGLIVASRFHPTPLLLSLLDFVAPSRPFVVYCQYKEPLLECYTKLRERGGVINLRLSETWLRNYQVLPDRSHPKLLMSGGGGYLLSGFTVAMDNLKADTSLKSNASTLESHETEEPAAKKRKCPESDS

SEQ ID NO: 21118 - protein, 424 aa, Homo sapiens
VRLAVATTEEEGRDAVEHGDRLSVMEGSGEQPGPQPQHPGDHRIRDGDFVVLKREDVFKAVQVQRRKKVTFEKQWFYLDNVIGHSYGTAFEVTSGGSLQPKKKREEPTAETKEAGTDNRNIVDDGKSQKLTQDDIKALKDKGIKGEEIVQQLIENSTTFRDKTEFAQDKYIKKKKKKYEAIITVVKPSTRILSIMYYAREPGKINHMRYDTLAQMLTLGNIRAGNKMIVMETCAGLVLGAMMERMGGFGSIIQLYPGGGPVRAATACFGFPKSFLSGLYEFPLNKVDSLLHGTFSAKMLSSEPKDSALVEESNGTLEEKQASEQENEDSMAEAPESNHPEDQETMETISQDPEHKGPKERGSKKDYIQEKQRRQEEQRKRHLEAAALLSERNADGCVDGRRQETPQCMWALLQTDWHSLSPCLL

SEQ ID NO: 21119 - protein, 227 aa, Homo sapiens
LWEVRLAVATTEEEGRDAVEHGDRLSVMEGSGEQPGPQPQHPGDHRIRDGDFVVLKREDVFKAVQVQRRKKVTFEKQWFYLDNVIGHSYGTAFEVTSGGSLQPKKKREEPTAETKEAGTDNRNIVDDGKSQKLTQDDIKALKDKGIKGEEIVQQLIENSTTFRDKTEFAQDKYIKKKKKKYEAIITVVKPSTRILSIMYYAREPGKIKYALFPFKSIIGGNMSLRKS

SEQ ID NO: 21120 - protein, 119 aa, Homo sapiens
LWEVRLAVATTEEEGRDAVEHGDRLSVMEGSGEQPGPQPQHPGDHRIRDGDFVVLKREDVFKAVQVQRRKKVTFEKQWFYLDNVIGHSYGTAFEVTSGGSLQPKKKREEPTAGNSSAVN

SEQ ID NO: 21121 - protein, 26 aa, Homo sapiens
MEAAVAQCLSGCRVSMEKRLASVPGC

SEQ ID NO: 21122 - protein, 136 aa, Homo sapiens
LTEVLPRTAVVGRYENPWTIPNMLSMTRIGLAPVLGYLIIEEDFNIALGVFALAGLTDLLDGFIARNWANQRSALGSALDPLADKILISILYVSLTYADLIPGKNASCVLLNSTGKNDISQLRISLERQIIFVPKI

SEQ ID NO: 21123 - protein, 82 aa, Homo sapiens
MLSMTRIGLAPVLGYLIIEEDFNIALGVFALAGLTDLLDGFIARNWANQRSALGSALDPLADKILISILYVSLTYADLIPGA

SEQ ID NO: 21124 - protein, 98 aa, Homo sapiens [sequence omitted]

SEQ ID NO: 21125 - protein, 124 aa, Homo sapiens [sequence omitted]

SEQ ID NO: 21126 - protein, 45 aa, Homo sapiens
MLVSLIICLLLDLLNQPSLLRDLILKQHTGNPHLSFPLKYSHWMG

SEQ ID NO: 21127 - protein, 35 aa, Homo sapiens
LLSRAPAHQPYPRDIIHAWAPPPGSGSPRSRLGQR

SEQ ID NO: 21128 - protein, 252 aa, Homo sapiens [sequence omitted]

SEQ ID NO: 21129 - protein, 72 aa, Homo sapiens
LTSWLTLAMVVSVVGWEIECRISQLCKKLVNSTLVVCPLAADTVSDQAPRSLPSPLVFELPLLPDVLMVMQS

SEQ ID NO: 21130 - protein, 1226 aa, Homo sapiens
VPAARGAAMRSPRTRGRSGRPLSLLLALLCALRAKVCGASGQFELEILSMQNVNGELQNGNCCGGARNPGDRKCTRDECDTYFKVCLKEYQSRVTAGGPCSFGSGSTPVIGGNTFNLKASRGNDRNRIVLPFSFAWPRSYTLLVEAWDSSNDTVQPDSIIEKASHSGMINPSRQWQTLKQNTGVAHFEYQIRVTCDDYYYGFGCNKFCRPRDDFFGHYACDQNGNKTCMEGWMGPECNRAICRQGCSPKHGSCKLPGDCRCQYGWQGLYCDKCIPHPGCVHGICNEPWQCLCETNWGGQLCDKDLNYCGTHQPCLNGGTCSNTGPDKYQCSCPEGYSGPNCEIAEHACLSDPCHNRGSCKETSLGFECECSPGWTGPTCSTNIDDCSPNNCSHGGTCQDLVNGFKCVCPPQWTGKTCQLDANECEAKPCVNAKSCKNLIASYYCDCLPGWMGQNCDININDCLGQCQNDASCRDLVNGYRCICPPGYAGDHCERDIDECASNPCLNGGHCQNEINRFQCLCPTGFSGNLCQLDIDYCEPNPCQNGAQCYNRASDYFCKCPEDYEGKNCSHLKDHCRTTPCEVIDSCTVAMASNDTPEGVRYISSNVCGPHGKCKSQSGGKFTCDCNKGFTGTYCHENINDCESNPCRNGGTCIDGVNSYKCICSDGWEGAYCETNINDCSQNPCHNGGTCRDLVNDFYCDCKNGWKGKTCHSRDSQCDEATCNNGGTCYDEGDAFKCMCPGGWEGTTCNIARNSSCLPNPCHNGGTCVVNGESFTCVCKEGWEGPICAQNTNDCSPHPCYNSGTCVDGDNWYRCECAPGFAGPDCRININECQSSPCAFGATCVDEINGYRCVCPPGHSGAKCQEVSGRPCITMGSVIPDGAKWDDDCNTCQCLNGRIACSKVWCGPRPCLLHKGHSECPSGQSCIPILDDQCFVHPCTGVGECRSSSLQPVKTKCTSDSYYQDNCANITFTFNKEMMSPGLTTEHICSELRNLNILKNVSAEYSIYIACEPSPSANNEIHVAISAEDIRDDGNPIKEITDKIIDLVSKRDGNSSLIAAVAEVRVQRRPLKNRTDFLVPLLSSVLTVAWICCLVTAFYWCLRKRRKPGSHTHSASEDNTTNNVREQLNQIKNPIEKHGANTVPIKDYENKNSKMSKIRTHNSEVEEDDMDKHQQKARFAKQPAYTLVDREEKPPNGTPTKHPNWTNKQDNRDLESAQSLNRMEYIV

SEQ ID NO: 21131 - protein, 237 aa, Homo sapiens
LLNSACLWLHKSFSSFFALLCFIDINDCESNPCRNGGTCIDGVNSYKCICSDGWEGAYCETNINDCSQNPCHNGGTCRDLVNDFYCDCKNGWKGKTCHSRDSQCDEATCNNGGTCYDEGDAFKCMCPGGWEGTTCNIARNSSCLPNPCHNGGTCVVNGESFTCVCKEGWEGPICAQSECPPPLNSPRAVGADPDTLGDLQWKPEAELFDVCFCITWVCINDLMGYSPDLGMRKSPIR

SEQ ID NO: 21132 - protein, 74 aa, Homo sapiens
VFGLFPGLAVMINAPWTFLNMSLQLSERRVYVPVHRIWLDFATCFHQSNAEEVKSGPQEVLYSSADSPGMLKTP

SEQ ID NO: 21133 - protein, 212 aa, Homo sapiens
LVEASSSGVSVLSLCEKGDAMIMEETGKIFKKEKEMKKRIAFPTSISVNNCGCHFSPLKRGQDYILKEGDLVKIDLGVHVDGFIANVTHTFVVDVAQGTQVTGRKGDVIKAAQLCVEAALCLVKPGNQNIQVREAWSKVALSFNCMPIEGMLSHQLKQHVIDGEKNIIQNPTDQQKKDHEKAEFEVHEVYAADVLVSSGEGKAKDAGQRTTI

SEQ ID NO: 21134 - protein, 34 aa, Homo sapiens
MFPYDSTHGKSHGTIKAENGKLVINGNPISIFQE

SEQ ID NO: 21135 - protein, 78 aa, Homo sapiens
LSRNFFLLAFFQTLTIIVFLEMYRNEDGSVPATYQIYYMIGWKYHESQARPAERGSATVSFGELGKINNLMPPGKKSQ

SEQ ID NO: 21136 - protein, 652 aa, Homo sapiens
LLTMISAAWSIFLIGTKIGLFLQVAPLSVMAKSCPSVCRCDAGFIYCNDRFLTSIPTGIPEDATTLYLQNNQINNAGIPSDLKNLLKVERIYLYHNSLDEFPTNLPKYVKELHLQENNIRTITYDSLSKIPYLEELHLDDNSVSAVSIEEGAFRDSNYLRLLFLSRNHLSTIPWGLPRTIEELRLDDNRISTISSPSLQGLTSLKRLVLDGNLLNNHGLGDKVFFNLVNLTELSLVRNSLTAAPVNLPGTNLRKLYLQDNHINRVPPNAFSYLRQLYRLDMSNNNLSNLPQGIFDDLDNITQLILRNNPWYCGCKMKWVRDWLQSLPVKVNVRGLMCQAPEKVRGMAIKDLNAELFDCKDSGIVSTIQITTAIPNTVYPAQGQWPAPVTKQPDIKNPKLTKDHQTTGSPSRKTITITVKSVTSDTIHISWKLALPMTALRLSWLKLGHSPAFGSITETIVTGERSEYLVTALEPDSPYKVCMVPMETSNLYLFDETPVCIETETAPLRMYNPTTTLNREQEKEPYKNPNLPLAAIIGGAVALVTIALLALVCWYVHRNGSLFSRNCAYSKGRRRKDDYAEAGTKKDNSILEIRETSFQMLPISNEPISKEEFVIHTIFPPNGMNLYKNNHSESSSNRSYRDSGIPDSDHSHS

SEQ ID NO: 21137 - protein, 49 aa, Homo sapiens
VMEEPPQQCLLVEAGSDAGQLPHARIRVCLLLLKTDMQQRARATSRFHT

SEQ ID NO: 21138 - protein, 66 aa, Homo sapiens
VFCKLECLKESPGGLVKLQLLMGKSEGKPETWHFQHVRGVKMLSAATLPARSQGIDDLYANCESLK

SEQ ID NO: 21139 - protein, 18 aa, Homo sapiens
LLLVLTVVGVGLRFFTVS

SEQ ID NO: 21140 - protein, 143 aa, Homo sapiens
VGSCAFYLAVSVFLAPRPFSPLLQLGADEARSWDFLLSPEEFNTNMDIRPNHTIYINNMNDKIKKEELKRSLYALFSQFGHVVDIVALKTMKMRGQAFVIFKELGSSTNALRQLQGFPFYGKPMVSQFHYFTLIKKLMILMGQ

SEQ ID NO: 21141 - protein, 270 aa, Homo sapiens
VGSCAFYLAVSVFLAPRPFSPLLQLGADEARSWDFLLSPEEFNTNMDIRPNHTIYINNMNDKIKKEELKRSLYALFSQFGHVVDIVALKTMKMRGQAFVIFKELGSSTNALRQLQGFPFYGKPMRIQYAKTDSDIISKMRGTFADKEKKKEKKKAKTVEQTATTTNKKPGQGTPNSANTQGNSTPNPQVPDYPPNYILFLNNLPEETNEMMLSMLFNQFPGFKEVRLVPGRHDIAFVEFENDGQAGAARDALQGFKITPSHAMKITYAKK

SEQ ID NO: 21142 - protein, 663 aa, Homo sapiens
LHPPSESPAPPACAPPSTTFHSQRRMKGGCVSQWKAAAGFLFCVMVFASAERPVFTNHFLVELHKGGEDKARQVAAEHGFGVRKLPFAEGLYHFYHNGLAKAKRRRSLHHKQQLERDPRVKMALQQEGFDRKKRGYRDINEIDINMNDPLFTKQWYLINTGQADGTPGLDLNVAEAWELGYTGKGVTIGIMDDGIDYLHPDLASNYNAEASYDFSSNDPYPYPRYTDDWFNSHGTRCAGEVSAAANNNICGVGVAYNSKVAGIRMLDQPFMTDIIEASSISHMPQLIDIYSASWGPTDNGKTVDGPRELTLQAMADGVNKGRGGKGSIYVWASGDGGSYDDCNCDGYASSMWTISINSAINDGRTALYDESCSSTLASTFSNGRKRNPEAGVATTDLYGNCTLRHSGTSAAAPEAAGVFALALEANLGLTWRDMQHLTVLTSKRNQLHDEVHQWRRNGVGLEFNHLFGYGVLDAGAMVKMAKDWKTVPERFHCVGGSVQDPEKIPSTGKLVLTLTTDACEGKENFVRYLEHVQAVITVNATRRGDLNINMTSPMGTKSILLSRRPRDDDSKVGFDKWPFMTTHTWGEDARGTWTLELGFVGSAPQKGVLKEWTLMLHGTQSAPYIDQVVRDYQSKLAMSKKEELEEELDEAVERSLKSILNKN

SEQ ID NO: 21143 - protein, 628 aa, Homo sapiens
LHPPSESPAPPACAPPSTTFHSQRRMKGGCVSQWKAAAGFLFCVMVFASAERPVFTNHFLVELHKGGEDKARQVAAEHGFGVRKVKMALQQEGFDRKKRGYRDINEIDINMNDPLFTKQWYLINTGQADGTPGLDLNVAEAWELGYTGKGVTIGIMDDGIDYLHPDLASNYNAEASYDFSSNDPYPYPRYTDDWFNSHGTRCAGEVSAAANNNICGVGVAYNSKVAGIRMLDQPFMTDIIEASSISHMPQLIDIYSASWGPTDNGKTVDGPRELTLQAMADGVNKGRGGKGSIYVWASGDGGSYDDCNCDGYASSMWTISINSAINDGRTALYDESCSSTLASTFSNGRKRNPEAGVATTDLYGNCTLRHSGTSAAAPEAAGVFALALEANLGLTWRDMQHLTVLTSKRNQLHDEVHQWRRNGVGLEFNHLFGYGVLDAGAMVKMAKDWKTVPERFHCVGGSVQDPEKIPSTGKLVLTLTTDACEGKENFVRYLEHVQAVITVNATRRGDLNINMTSPMGTKSILLSRRPRDDDSKVGFDKWPFMTTHTWGEDARGTWTLELGFVGSAPQKGVLKEWTLMLHGTQSAPYIDQVVRDYQSKLAMSKKEELEEELDEAVERSLKSILNKN

SEQ ID NO: 21144 - protein, 291 aa, Homo sapiens
VHGHPPLNLRVHRDSKILQEVCVLSNISLNHCASLPLSPCLLPLPSCSLLPVSSLGLTWRDMQHLTVLTSKRNQLHDEVHQWRRNGVGLEFNHLFGYGVLDAGAMVKMAKDWKTVPERFHCVGGSVQDPEKIPSTGKLVLTLTTDACEGKENFVRYLEHVQAVITVNATRRGDLNINMTSPMGTKSILLSRRPRDDDSKVGFDKWPFMTTHTWGEDARGTWTLELGFVGSAPQKGVLKEWTLMLHGTQSAPYIDQVVRDYQSKLAMSKKEELEEELDEAVERSLKSILNKN

SEQ ID NO: 21145 - protein, 173 aa, Homo sapiens
LGSVGPGFRASGVQVADEVCRIFYDMKVRKCSTPEEIKKRKKAVIFCLSADKKCIIVEEGKEILVGDVGVTITDPFKHFVGMLPEKDCRYALYDASFETKESRKEELMFFLWAPELAPLKSKMIYASSKDAIKKKFQGIKHECQANGPEDLNRACIAEKLGGSLIVAFEGCPV

SEQ ID NO: 21146 - protein, 384 aa, Homo sapiens
VVSILHAHSRTLLGGVNTPSALIQEESEKQLCLIEAQTMEALLALLPELSVLAQQNYTEWLQDLKEKGPTLLKHPPAPAEPSSDLASKLREAEETQSTLQAECDQYRSILAETEGMLRDLQKSVEEEEQVWRAKVGAAEEELQKSRVTVKHLEEIVEKLKGELESSDQVREHTSHLEAELEKHMAAASAECQNYAKEVAGLRQLLLESQSQLDAAKSEAQKQSDELALVRQQLSEMKSHVEDGDIAGAPASSPEAPPAEQDPVQLKTQLEWTEAILEDEQTQRQKLTAEFEEAQTSACRLQEELEKLRTAGPLESSETEEASQLKERLEKEKKLTSDLGRAATRLQELLKTTQEQLAREKDTVKKLQEQLEKEDGSSSKEGTSV

SEQ ID NO: 21147 - protein, 1417 aa, Homo sapiens
VKGKQARMDIYDTQTLGVVVFGGFMVVSAIGIFLVSTFSMKETSYEEALANQRKEMAKTHHQKVEKKKKEKTVEKKGKTKKKEEKPNGKIPDHDPAPNVTVLLREPVRAPAVAVAPTPVQPPIIVAPVATVPAMPQEKLASSPKDKKKKEKKVAKVEPAVSSVVNSIQVLTSKAAILETAPKEVPMVVVPPVGAKGNTPATGTTQGKKAEGTQNQSKKAEGAPNQGRKAEGTPNQGKKTEGTPNQGKKAEGTPNQGKKAEGTPNQGKKAEGAQNQGKKVDTTPNQGKKVEGAPTQGRKAEGAQNQAKKVEGAQNQGKKAEGAQNQGKKGEGAQNQGKKAEGAQNQGKKAEGAQNQGKKAEGAQNQGKKAEGAQNQGKKAEGAQNQGKKAEGAQNQGKKVEGAQNQGKKAEGAQNQGKKAEGAQNQGKKAEGAQNQGKKAEGAQNQGKKAEGAQNQGKKAEGAQNQGKKAEGAQNQGKKVEGAQNQGKKAEGAQNQGKKAEGAQNQGKKAEGAQNQGQKGEGAQNQGKKTEGAQGKKAERSPNQGKKGEGAPIQGKKADSVANQGTKVEGITNQGKKAEGSPSEGKKAEGSPNQGKKADAAANQGKKTESASVQGRNTDVAQSPEAPKQEAPAKKKSGSKKKGEPGPPDADGPLYLPYKTLVSTVGSMVFNEGEAQRLIEILSEKAGIIQDTWHKATQKGDPVAILKRQLEEKEKLLATEQEDAAVAKSKLRELNKEMAAEKAKAAAGEAKVKKQLVAREQEITAVQARMQASYREHVKEVQQLQGKIRTLQEQLENGPNTQLARLQQENSILRDALNQATSQVESKQNAELAKLRQELSKVSKELVEKSEAVRQDEQQRKALEAKAAAFEKQVLQLQASHRESEEALQKRLDEVSRELCHTQSSHASLRADAEKAQEQQQQMAELHSKLQSSEAEVRSKCEELSGLHGQLQEARAENSQLTERIRSIEALLEAGQARDAQDVQASQAEADQQQTRLKELESQVSGLEKEAIELREAVEQQKVKNNDLREKNWKAMEALATAEQACKEKLLSLTQAKEESEKQLCLIEAQTMEALLALLPELSVLAQQNYTEWLQDLKEKGPTLLKHPPAPAEPSSDLASKLREAEETQSTLQAECDQYRSILAETEGMLRDLQKSVEEEEQVWRAKVGAAEEELQKSRVTVKHLEEIVEKLKGELESSDQVREHTSHLEAELEKHMAAASAECQNYAKEVAGLRQLLLESQSQLDAAKSEAQKQSDELALVRQQLSEMKSHVEDGDIAGAPASSPEAPPAEQDPVQLKTQLEWTEAILEDEQTQRQKLTAEFEEAQTSACRLQEELEKLRTAGPLESSETEEASQLKERLEKEKKLTSDLGRAATRLQELLKTTQEQLAREKDTVKKLQEQLEKAEDGSSSKEGTSV

SEQ ID NO: 21148 - protein, 82 aa, Homo sapiens
LSRGCWRMRVRVCASVQVREHTSHLEAELEKHMAAASAECQNYAKEVAGVSLPPKECSPCPADLRSSLSCFSSALWEQLSVT

SEQ ID NO: 21149 - protein, 478 aa, Homo sapiens
LGGCSGGARGALLACSRGSWDGGGVRRPPAAVGQGGRRRRGRGRPREAPRRRRRRPSFFFPRTARRPLLESRVAMAAVPELLQQQEEDRSKLRSVSVDLNVDPSLQIDIPDALSERDKVKFTVHTKTTLPTFQSPEFSVTRQHEDFVWLHDTLIETTDYAGLIIPPAPTKPDFDGPREKMQKLGEGEGSMTKEEFAKMKQELEAEYLAVFKKTVSSHEVFLQRLSSHPVLSKDRNFHVFLEYDQDLSVRRKNTKEMFGGFFKSVVKSADEVLFTGVKEVDDFFEQEKNFLINYYNRIKDSCVKADKMTRSHKNVADDYIHTAACLHSLALEEPTVIKKYLLKVAELFEKLRKVEGRVSSDEDLKLTELLRYYMLNIEAAKDLLYRRTKALIDYENSNKALDKARLKSKDVKLAEAHQQECCQKFEQLSESAKEELINFKRKRVAAFRKNLIEMSELEIKHARNNVSLLQSCIDLFKNN

SEQ ID NO: 21150 - protein, 191 aa, Homo sapiens
LGGCSGGARGALLACSRGSWDGGGVRRPPAAVGQGGRRRRGRGRPREAPRRRRRRPSFFFPRTARRPLLESRVAMAAVPELLQQQEEDRSKLRSVSVDLNVDPSLQIDIPDALSERDKVKFTVHTKTTLPTFQSPEFSVTRQHEDFVWLHDTLIETTDYAGLIEWSGCLLWTSKSRMRHQLENIAAGTRGS

SEQ ID NO: 21151 - protein, 26 aa, Homo sapiens
LFSWWVLSFRILPFVLFSHPGALCPL

SEQ ID NO: 21152 - protein, 37 aa, Homo sapiens
MANPGSGWKLLRKTGARKMRQRLENPISSNPDVPGSP

SEQ ID NO: 21153 - protein, 208 aa, Homo sapiens
LREQAGLSSAGPALGNSGLAALMASPSKAVIVPGNGGGDVTTHGWYGWVKKELEKIPGFQCLAKNMPDPITARESIWLPFMETELHCDEKTIIIGHSSGAIAAMRYAETHRVYAIVLVSAYTSDLGDENERASGYFTRPWQWEKIKANCPYIVQFGSTDDPFLPWKEQQEVADRLETKLHKFTDCGHFQNTEFHELITVVKSLLKVPA

SEQ ID NO: 21154 - protein, 255 aa, Homo sapiens
MSFTTRSTFSTNYWSLGSVQMPSYGARLVSSKASVYEGAGASGSLISMSHSTSFGGGMVSRALAVGMAESLAGMEGIQNKKETRQSLNDHLISYLDRVRSLETKNQRLESKICEQLEKKGPQVRDWGHYFKTIEDLRAQIFANTVDNAHIVLQIDNAHLAADDFRVKYETELAMLQSVESYLHGLCKVIDDTNVTRLQLETDQGSQGGAALHEEEPQRGNKRPTSPDYQLWVDHGGRCPQISGPQLDHGRHPGPI

SEQ ID NO: 21155 - protein, 631 aa, Homo sapiens
MSEAASQGLRAAARSVWAGTDRRGCRHRRPVPLCSGTALSQCPRFPRRLHAARLGNMLGVLVLGALALAGLGFPAPAEPQPGGSQCVEHDCFALYPGPATFLNASQICDGLRGHLMTVRSSVAADVISLLLNGDGGVGRRRLWIGLQLPPGCGDPKRLGPLRGFQWVTGDNNTSYSRWARLDLNGAPLCGPLCVAVSAAEATVPSEPIWEEQQCEVKADGFLCEFHFPATCRPLAVEPGAAAAAVSITYGTPFAARGADFQALPVGSSAAVAPLGLQLMCTAPPGAVQGHWAREAPGAWDCSVENGGCEHACNAIPGAPRCQCPAGAALQADGRSCTASATQSCNDLCEHFCVPNPDQPGSYSCMCETGYRLAADQHRCEDVDDCILEPSPCPQRCVNTQGGFECHCYPNYDLVDGECVEPVDPCFRANCEYQCQPLNQTSYLCVCAEGFAPIPHEPHRCQMFCNQTACPADCDPNTQASCECPEGYILDDGFICTDIDECENGGFCSGVCHNLPGTFECICGPDSALARHIGTDCDSGKVDGGDSGSGEPPPSPTPGSTLTPPAVGLVHSGLLIGISIASLCLVVALLALLCHLRKKQGAARAKMEYKCAAPSKEVVLQHVRTERTPQRL

SEQ ID NO: 21156 - protein, 669 aa, Homo sapiens
LSPLGFSPPAEGHTETGMATSMGLLLLLLLLLTQPGAGTGADTEAVVCVGTACYTAHSGKLSAAEAQNHCNQNGGNLATVKSKEEAQHVQRVLAQLLRREAALTARMSKFWIGLQREKGKCLDPSLPLKGFSWVGGGEDTPYSNWHKELRNSCISKRCVSLLLDLSQPLLPSRLPKWSEGPCGSPGSPGSNIEGFVCKFSFKGMCRPLALGGPGQVTYTTPFQTTSSSLEAVPFASAANVACGEGDKDETQSHYFLCKEKAPDVFDWGSSGPLCVSPKYGCNFNNGGCHQDCFEGGDGSFLCGCRPGFRLLDDLVTCASRNPCSSSPCRGGATCVLGPHGKNYTCRCPQGYQLDSSQLDCVDVDECQDSPCAQECVNTPGGFRCECWVGYEPGGPGEGACQDVDECALGRSPCAQGCTNTDGSFHCSCEEGYVLAGEDGTQCQDVDECVGPGGPLCDSLCFNTQGSFHCGCLPGWVLAPNGVSCTMGPVSLGPPSGPPDEEDKGEKEGSTVPRAATASPTRGPEGTPKATPTTSRPSLSSDAPITSAPLKMLAPSGSPGVWREPSIHHATAASGPQEPAGGDSSVATQNNDGTDGQKLLLFYILGTVVAILLLLALALGLLVYRKRRAKREEKKEKKPQNAADSYSWVPERAESRAMENQYSPTPGTDC

SEQ ID NO: 21157 - protein, 149 aa, Homo sapiens
LCSASEETMAWPLCTLLLLLATQAVALAWSPQEEDRIIEGGIYDADLNDERVQRALHFVISEYNKATEDEYYRRLLRVLRAREQIVGGVNYFFDIEVGRTICTKSQPNLDTCAFHEQPELQKKQLCSFQIYEVPWEDRMSLVNSRCQEA

SEQ ID NO: 21158 - protein, 198 aa, Homo sapiens
LARAQTTAPTCPAPSTQEGSARAPTTASNCPMLPEKALHGHPQLPRTVPTRAAMRAAGTLLAFCCLVLSTTGGPSPDTCSQDLNSRVKPGFPKTIKTNDPGVLQAARYSVEKFNNCTNDMFLFKESRITRALVQIVKGLKYMLEVEIGRTTCKKNQHLRLDDCDFQTNHTLKQTLSCYSEVWVVPWLQHFEVPVLRCH

SEQ ID NO: 21159 - protein, 384 aa, Homo sapiens
VTFLMLAVSLTVPLLGAMMLLESPIDPQPLSFKEPPLLLGVLHPNTKLRQAERLFENQLVGPESIAHIGDVMFTGTADGRVVKLENGEIETIARFGSGPCKTRDDEPVCGRPLGIRAGPNGTLFVADAYKGLFEVNPWKREVKLLLSSETPIEGKNMSFVNDLTVTQDGRKIYFTDSSSKWQRRDYLLLVMEGTDDGRLLEYDTVTREVKVLLDQLRFPNGVQLSPAEDFVLVAETTMARIRRVYVSGLMKGGADLFVENMPGFPDNIRPSSSGGYWVGMSTIRPNPGFSMLDFLSERPWIKRMIFKGSCAGCDLLFSQETVMKFVPRYSLVLELSDSGAFRRSLHDPDGLVATYISEVHEHDGHLYLGSFRSPFLCRLSLQAV

SEQ ID NO: 21160 - protein, 510 aa, Homo sapiens
VGSYPAGGGRGGAGRGGGAQKTGCRLLPGKGHSSPWVWRSARCMQPQHGPWQTRMRKISNHGSLRVAKVAYPLGLCVGVFIYVAYIKWHRATATQAFFSITRAAPGARWGQQAHSPLGTAADGHEVFYGIMFDAGSTGTRVHVFQFTRPPRETPTLTHETFKALKPGLSAYADDVEKSAQGIRELLDVAKQDIPFDFWKATPLVLKATAGLRLLPGEKAQKLLQKVKKVFKASPFLVGDDCVSIMNGTDEGVSAWITINFLTGSLKTPGGSSVGMLDLGGGSTQIAFLPRVEGTLQASPPGYLTALRMFNRTYKLYSYSYLGLGLMSARLAILGGVEGQPAKDGKELVSPCLSPSFKGEWEHAEVTYRVSGQKAAASLHELCAARVSEVLQNRVHRTEEVKHVDFYAFSYYYDLAAGVGLIDAEKGGSLVVGDFEIAAKYVCRTLETQPQSSPFSCMDLTYVSLLLQEFGFPRSKVLKLTRKIDNVETSWALGAIFHYIDSLNRQKSPAS

SEQ ID NO: 21161 - protein, 22 aa, Homo sapiens
LLLFVFFVEMGFHRVGQAVLNS

SEQ ID NO: 21162 - protein, 406 aa, Homo sapiens
VAFPAEPVSPPASLLQQPELESDPERTLAMDSALSDPHNGSAEAGGPTNSTTRPPSTPEGIALAYGSLLLMALLPIFFGALRSVRCARGKNASDMPETITSRDAARFPIIASCTLLGLYLFFKIFSQEYINLLLSMYFFVLGILALSHTISPFMNKFFPASFPNRQYQLLFTQGSGENKEEIINYEFDTKDLVCLGLSSIVGVWYLLRKHWIANNLFGLAFSLNGVELLHLNNVSTGCILLGGLFIYDVFWVFGTNVMVTVAKSFEAPIKLVFPQDLLEKGLEANNFAMLGLGDVVIPGIFIALLLRFDISLKKNTHTYFYTSFAAYIFGLGLTIFIMHIFKHAQPALLYLVPACIGFPVLVALAKGEVTEMFSYEESNPKDPAAVTESKEGTEASASKGLEKKEK

SEQ ID NO: 21163 - protein, 455 aa, Homo sapiens
VAFPAEPVSPPASLLQQPELESDPERTLAMDSALSDPHNGSAEAGGPTNSTTRPPSTPEGIALAYGSLLLMALLPIFFGALRSVRCARGKNASDMPETITSRDAARFPIIASCTLLGLYLFFKIFSQEYINLLLSMYFFVLGILALSHTISPFMNKFFPASFPNRQYQLLFTQGSGENKEEIINYEFDTKDLVCLGLSSIVGVWYLLRKHWIANNLFGLAFSLNGVELLHLNNVSTGCILLGGLFIYDVFWVFGTNVMVTVAKSFEAPIKLVFPQDLLEKGLEANNFAMLGLGDVVIPGIFIALLLRFDISLKKNTHTYFYTSFAAYIFGLGLTIFIMHIFKHAQPALLYLVPACIGFPVLVALAKGEVTEMFSYESSAEILPHTPRLTHFPTVSGSPASLADSMQQKLAGPRRRRPQNPSAIYEESNPKDPAAVTESKEGTEASASKGLEKKEK

SEQ ID NO: 21164 - protein, 55 aa, Homo sapiens
LLSMYFFVLGILALSHTISPFMNKFFPASFPNRQYQLLFTQGSGENKEGADRWEG

SEQ ID NO: 21165 - protein, 253 aa, Homo sapiens
LGKTRKGLTGGRGSPASGSGLTWPLCSEIINYEFDTKDLVCLGLSSIVGVWYLLRKHWIANNLFGLAFSLNGVELLHLNNVSTGCILLGGLFIYDVFWVFGTNVMVTVAKSFEAPIKLVFPQDLLEKGLEANNFAMLGLGDVVIPGIFIALLLRFDISLKKNTHTYFYTSFAAYIFGLGLTIFIMHIFKHAQPALLYLVPACIGFPVLVALAKGEVTEMFSYEESNPKDPAAVTESKEGTEASASKGLEKKEK

SEQ ID NO: 21166 - protein, 258 aa, Homo sapiens
VAPVSSPLLKLILIWGSQGLAPPACEPLTVPTAMPSSVQGLTGGRGSPASGSGLTWPLCSEIINYEFDTKDLVCLGLSSIVGVWYLLRKHWIANNLFGLAFSLNGVELLHLNNVSTGCILLGGLFIYDVFWVFGTNVMVTVAKSFEAPIKWIFIALLLRFDISLKKNTHTYFYTSFAAYIFGLGLTIFIMHIFKHAQPALLYLVPACIGFPVLVALAKGEVTEMFSYEESNPKDPAAVTESKEGTEASASKGLEKKEK

SEQ ID NO: 21167 - protein, 120 aa, Homo sapiens
LHRFSCPGGAGQGRSDRDVQLRVLGGNPASYPEAHPLPHSLGLPSQPGRLHAAEASWPSPPAPAESQRHVMPSGCPPARFPLLPRGPSYEESNPKDPAAVTESKEGTEASASKGLEKKEK

SEQ ID NO: 21168 - protein, 183 aa, Homo sapiens
LFHFPYLLRASTSFFSLCPFCFSQSPRIMKVASGSTATAAAGPSCALKAGKTASGAGEVVRCLSEQSVAISRCAGGAGARLPALLDEQQVNVLLYDMNGCYSRLKELVPTLPQNRKVSKVEILQHVIDYIRDLQLELNSESEVGTPGGRGLPVRAPLSTLNGEISALTAEAACVPADDRILCR

SEQ ID NO: 21169 - protein, 10 aa, Homo sapiens
MACILIIFFS

SEQ ID NO: 21170 - protein, 244 aa, Homo sapiens
VSLAVLLWLSLPGCLPVLPGLYLGNFIDAKDLDQLGRNKITHIISIHESPQPLLQDITYLRIPVADTPEVPIKKHFKECINFIHCCRLNGGNCLVHCFAGISRSTTIVTAYVMTVTGLGWRDVLEAIKATRPIANPNPGFRQQLEEFGWASSQKLRRQLEERFGESPFRDEEELRALLPLCKRCRQGSATSASSAGPHSAASEGTVQRLVPRTPREAHRPLPLLARVKQTFSCLPRCLSRKGGK

SEQ ID NO: 21171 - protein, 306 aa, Homo sapiens
VAAAAPPPFPSRAGGRRAVAVAGQGWAGPRTPGPPFPARLQASGLGRQGSCDRIASRAASWGCTRTAAPGIMGNGMTKVLPGLYLGNFIDAKDLDQLGRNKITHIISIHESPQPLLQDITYLRIPVADTPEVPIKKHFKECINFIHCCRLNGGNCLVHCFAGISRSTTIVTAYVMTVTGLGWRDVLEAIKATRPIANPNPGFRQQLEEFGWASSQKLRRQLEERFGESPFRDEEELRALLPLCKRCRQGSATSASSAGPHSAASEGTVQRLVPRTPREAHRPLPLLARVKQTFSCLPRCLSRKGGK

SEQ ID NO: 21172 - protein, 140 aa, Homo sapiens
VAVAGQGWAGPRTPGPPFPARLQASGLGRQGSCDRIASRAASWGCTRTAAPGIMGNGMTKVLPGLYLGNFIDAKDLDQLGRNKITHIISIHESPQPLLQDITYLRIPVADTPEVPMCSDCRPQRSGTPVFPPTHFSERPQ

SEQ ID NO: 21173 - protein, 141 aa, Homo sapiens
MPAQAAQDATPARQAGRPRSGGWAPRSGATPSAAWTGGWGGVGAPRRPGPGEAAAAAWSASAPGRGRRAAGSDGRRSAAAGSGGTEAAAAAAARESRAVAGSGGRRAAAGEAAGSGATPAPTRSTRRTPAPTPTATWSSWL

SEQ ID NO: 21174 - protein, 73 aa, Homo sapiens
MIGRTRAGPGGAQVVAARWLQHHPPGPTPPSYSQTPTLASATVSSSVQWVGWTGKSLFDSCNPQSDILRKPPS

SEQ ID NO: 21175 - protein, 78 aa, Homo sapiens
MGAAAWARPLSVSFLLLLLPLPGMPAGSWDPAGYLLYCPCMAPCVLPEVLQAGAPPGLPSGHQLGGFHGEAGTHPLAP

SEQ ID NO: 21176 - protein, 167 aa, Homo sapiens
LPPWATDAARARGAAAAPPPPPLSRQPVPACPPLLPGRTRDLARRRCHAPPPPPPPPQPRATAPARPARRSRVELPPPPGRRMKDKQKKKKERTWAEAARLVLENYSDAPMTPKQILQVIEAEGLKEMRSGTSPLACLNAMLHSNSRGGEGLFYKLPGRISLFTLKV

SEQ ID NO: 21177 - protein, 43 aa, Homo sapiens
LGCLPSEAGLEIGILRRTESTLQRMYVGQRQSISVGRRCSLRI

SEQ ID NO: 21178 - protein, 80 aa, Homo sapiens
LPSPKIYTAKALCHLATLLVLLEGFPGYNPLGCPRPASLSSPARQSLMWHGVGLRGVGGLPDSQRDLKLKQEGCILHQGS

SEQ ID NO: 21179 - protein, 733 aa, Homo sapiens
LRQESMKGDTRHLNGEEDAGGREDSILVNGACSDQSSDSPPILEAIRTPEIRGRRSSSRLSKREVSSLLSYTQDLTGDGDGEDGDGSDTPVMPKLFRETRTRSESPASLRRRATASAGTPWPSPPSSYLTIDLTDDTEDTHGTPQSSSTPYARLAQDSQQGGMESPQVEADSGDGDSSEYQDGKEFGIGDLVWGKIKGFSWWPAMVVSWKATSKRQAMSGMRWVQWFGDGKFSEVSADKLVALGLFSQHFNLATFNKLVSYRKAMYHALEKARVRAGKTFPSSPGDSLEDQLKPMLEWAHGGFKPTGIEGLKPNNTQPENKTRRRTADDSATSDYCPAPKRLKTNCYNNGKDRGDEDQSREQMASDVANNKSSLEDGCLSCGRKNPVSFHPLFEGGLCQTCRDRFLELFYMYDDDGYQSYCTVCCEGRELLLCSNTSCCRCFCVECLEVLVGTGTAAEAKLQEPWSCYMCLPQRCHGVLRRRKDWNVRLQAFFTSDTGLEYEAPKLYPAIPAARRRPIRVLSLFDGIATGYLVLKELGIKVGKYVASEVCEESIAVGTVKHEGNIKYVNDVRNITKKNIEEWGPFDLVIGGSPCNDLSNVNPARKGLYEGTGRLFFEFYHLLNYSRPKEGDDRPFFWMFENVVAMKVGDKRDISRFLECNPVMIDAIKVSAAHRARYFWGNLPGMNRIFGFPVHYTDVSNMGRGARQKLLGRSWSVPVIRHLFAPLKDYFACE

SEQ ID NO: 21180 - protein, 699 aa, Homo sapiens
LRQESMKGDTRHLNGEEDAGGREDSILVNGACSDQSSDSPPILEAIRTPEIRGRRSSSRLSKREVSSLLSYTQSLRRRATASAGTPWPSPPSSYLTIDLTDDTEDTHGTPQSSSTPYARLAQDSQQGGMESPQVEADSGDGDSSEYQDGKEFGIGDLVWGKIKGFSWWPAMVVSWKATSKRQAMSGMRWVQWFGDGKFSEVSADKLVALGLFSQHFNLATFNKLVSYRKAMYHALEKARVRAGKTFPSSPGDSLEDQLKPMLEWAHGGFKPTGIEGLKPNNTQPENKTRRRTADDSATSDYCPAPKRLKTNCYNNGKDRGDEDQSREQMASDVANNKSSLEDGCLSCGRKNPVSFHPLFEGGLCQTCRDRFLELFYMYDDDGYQSYCTVCCEGRELLLCSNTSCCRCFCVECLEVLVGTGTAAEAKLQEPWSCYMCLPQRCHGVLRRRKDWNVRLQAFFTSDTGLEYEAPKLYPAIPAARRRPIRVLSLFDGIATGYLVLKELGIKVGKYVASEVCEESIAVGTVKHEGNIKYVNDVRNITKKNIEEWGPFDLVIGGSPCNDLSNVNPARKGLYEGTGRLFFEFYHLLNYSRPKEGDDRPFFWMFENVVAMKVGDKRDISRFLECNPVMIDAIKVSAAHRARYFWGNLPGMNRIFGFPVHYTDVSNMGRGARQKLLGRSWSVPVIRHLFAPLKDYFACE

SEQ ID NO: 21181 - protein, 46 aa, Homo sapiens
MKSQCYSPSYFAFFCLVFFQITSASSQTLRGHVLCRTTLRDSSAYC

SEQ ID NO: 21182 - protein, 22 aa, Homo sapiens
LLSSCCLGTRLLLLLSQRQKQG

SEQ ID NO: 21183 - protein, 98 aa, Homo sapiens
MACAGLLTVCLLRPPAPQPQPQTPRHPQLAPDPGPAGHTLFQDVFRRADKNDDGKLSFEEFQNYFADGVLSLGELQELFSGIDGHLTDNLETEKLCGE

SEQ ID NO: 21184 - protein, 108 aa, Homo sapiens
MACAGLLTVCLLRPPAPQPQPQTPRHPQLAPDPGPAGHTLFQDVFRRADKNDDGKLSFEEFQNYFADGVLSLGELQELFSGIDGHLTEDQRMPGDSWAPPASTRECSA

SEQ ID NO: 21185 - protein, 24 aa, Homo sapiens
MFILQLFLCHRGLLAGGQWVVNTF

SEQ ID NO: 21186 - protein, 54 aa, Homo sapiens
VGTMSLKLQASNVTNKNDPKSINSRVFIGNLNTALVKKSDVETIFSKHQHGWRA

SEQ ID NO: 21187 - protein, 126 aa, Homo sapiens [sequence omitted]

SEQ ID NO: 21188 - protein, 162 aa, Homo sapiens
MSDKLPYKVADIGLAAWGRKALDIAENEMPGLMRMRERYSASKPLKGARIAGCLHMTVETAVLIETLVTLGAEVRPTAVSPQSPCPPWVQPGKKTTVPGWGPSRCGADRGPGGVPPSHSVSSVSQCCHPLWCSGPAATSSPPRTMRRLPLPRLAFRVSPACF

SEQ ID NO: 21189 - protein, 16 aa, Homo sapiens
MHFTVALWRQRLNPRK

SEQ ID NO: 21190 - protein, 110 aa, Homo sapiens
MKSKAFWIFSWEYAMMYVGSLVVIICLSFFLLSSWDFIPAVYGFMEHPIFFMFIQIAVIAIFKSYPTVGDVALYMAFFPVWNHLYRLERRKGTWPLPECRSQTLDSLELG

SEQ ID NO: 21191 - protein, 39 aa, Homo sapiens
LRVVREFLSRILIWLLGCYLEIQALKMPASLDLEDDLDK

SEQ ID NO: 21192 - protein, 7 aa, Homo sapiens
LAAGLLP

SEQ ID NO: 21193 - protein, 645 aa, Homo sapiens
VSAEFWGDIAKEFYWKTPCPGPFLRYNFDVTKGKIFIEWMKGATTNICYNVLDRNVHEKKLGDKVAFYWEGNEPGETTQITYHQLLVQVCQFSNVLRKQGIQKGDRVAIYMPMIPELVVAMLACARIGALHSIVFAGFSSESLCERILDSSCSLLITTDAFYRGEKLVNLKELADEALQKCQEKGFPVRCCIVVKHLGRAELGMGDSTSQSPPIKRSCPDVQISWNQGIDLWWHELMQEAGDECEPEWCDAEDPLFILYTSGSTGKPKGVVHTVGGYMLYVATTFKYVFDFHAEDVFWCTADIGWITGHSYVTYGPLANGATSVLFEGIPTYPDVNRLWSIVDKYKVTKFYTAPTAIRLLMKFGDEPVTKHSRASLQVLGTVGEPINPEAWLWYHRVVGAQRCPIVDTFWQTETGGHMLTPLPGATPMKPGSATFPFFGVAPAILNESGEELEGEAEGYLVFKQPWPGIMRTVYGNHERFETTYFKKFPGYYVTGDGCQRDQDGYYWITGRIDDMLNVSGHLLSTAEVESALVEHEAVAEAAVVGHPHPVKGECLYCFVTLCDGHTFSPKLTEELKKQIREKIGPIATPDYIQNAPGLPKTRSGKIMRRVLRKIAQNDHDLGDMSTVADPSVISHLFSHRCLTIQ

SEQ ID NO: 21194 - protein, 2001 aa, Homo sapiens
LSLSDVSAWASQSAGITDMSGNKRGSRASCPHRGAECLLPWAALNLQGFQLLLLHPSATAMMDVSELGESARYLRQGYQEMTKVHTIPWDGKKRVWVPDEQDAYVEAEVKSEATGGRVTVETKDQKVLMVREAELQPMNPPRFDLLEDMAMMTHLNEASVLHNLRQRYARWMIYTYSGLFCVTINPYKWLPVYTASVVAAYKGKRRSDSPPHIYAVADNAYNDMLRNRDNQSMLITGESGAGKTVNTKRVIQYFAIVAALGDGPGKKAQFLATKTGGTLEDQIIEANPAMEAFGNAKTLRNDNSSRFGKFIRIHFGPSGKLASADIDSYLLEKSRVIFQLPGERSYHVYYQILSGRKPELQDMLLLSMNPYDYHFCSQGVITVDNMNDGEELIATDHAMDILGFSVDEKCACYKIVGALLHFGNMKFKQKQREEQAEADGTESADKAAYLMGVSSGDLLKGLLHPRVRVGNEYVTKGQSVEQVVFAVGALAKATYDRLFRWLVSRINQTLDTKLPRQFFIGVLDIAGFEIFEFNSFEQLCINFTNEKLQQFFNQHMFVLEQEEYKREGIDWVFIDFGLDLQPCIDLIEKPLGILSILEEECMFPKASDASFRAKLYDNHAGKSPNFQQPRPDKKRKYQAHFEVVHYAGVVPYSIVGWLEKNKDPLNETVVPIFQKSQNRLLATLYENYAGSCSTEPPKSGVKEKRKKAASFQTVSQLHKENLNKLMTNLRATQPHFVRCIVPNENKTPGVMDAFLVLHQLRCNGVLEGIRICRQGFPNRLLYTDFRQRYRILNPSAIPDDTFMDSRKATEKLLGSLDLDHTQYQFGHTKVFFKAGLLGVLEELRDQRLAKVLTLLQARSRGRLMRLEYQRLLGGRDALFTIQWNIRAFNAVKNWSWMKLFFKMKPLLRSAQAEEELAALRAELRGLRGALAAAEAKRQELEETHVSITQEKNDLALQLQAEQDNLADAEERCHLLIKSKVQLEGKVKELSERLEDEEEVNADLAARRRKLEDECTELKKDIDDLELTLAKAEKEKQATENKVKNLTEEMAALDESVARLTKEKKALQEAHQQALGDLQAEEDRVSALTKAKLRLEQQVEDLECSLEQEKKLRMDTERAKRKLEGDLKLTQESVADAAQDKQQLEEKLKKKDSELSQLSLRVEDEQLLGAQMQKKIKELQARAEELEEELEAERAARARVEKQRAEAARELEELSERLEEAGGASAGQREGCRKREAELGRLRRELEEAALRHEATVAALRRKQAEGAAELGEQVDSLQRVRQKLEKEKSELRMEVDDLAANVETLTRAKASAEKLCRTYEDQLSEAKIKVEELQRQLADASTQRGRLQTESGELSRLLEEKECLISQLSRGKALAAQSLEELRRQLEEESKAKSALAHAVQALRHDCDLLREQHEEEAEAQAELQRLLSKANAEVAQWRSKYEADAIQRTEELEEAKKKLALRLQEAEEGVEAANAKCSSLEKAKLRLQTESEDVTLELERATSAAAALDKKQRHLERALEERRRQEEEMQRELEAAQRESRGLGTELFRLRHGHEEALEALETLKRENKNLQEEISDLTDQVSLSGKSIQELEKTKKALEGEKSEIQAALEEAEGALELEETKTLRIQLELSQVKAEVDRKLAEKDEECANLRRNHQRAVESLQASLDAETRARNEALRLKKKMEGDLNDLELQLGHATRQATEAQAATRLMQAQLKEEQAGRDEEQRLAAELHEQAQALERRASLLAAELEELRAALEQGERSRRLAEQELLEATERLNLLHSQNTGLLNQKKKLEADLAQLSGEVEEAAQERREAEEKAKKAITDAAMMAEELKKEQDTSAHLERMKKTLEQTVRELQARLEEAEQAALRGGKKQVQKLEAKVRELEAELDAEQKKHAEALKGVRKHERRVKELAYQAEEDRKNLARMQDLVDKLQSKVKSYKRQFEEAEQQANTNLAKYRKAQHELDDAEERADMAETQANKLRARTRDALGPKHKE

SEQ ID NO: 21195 - protein, 16 aa, Homo sapiens
MLSEGMKSVYDNVSLP

SEQ ID NO: 21196 - protein, 65 aa, Homo sapiens [sequence omitted]

SEQ ID NO: 21197 - protein, 925 aa, Homo sapiens
LFRWPHYGAPLAGECLSVQVVNCSRVFSLRPLGTLVISLQQLQNAGHLVLREALVDENLQVSPIQVELDLKYQPPEGATGAWSEEDFGAPIQDSFELIIPNVGFQELEPGEAQLERRAVALGRRLARSLGQQDDEENELELELEQDLDDEPDVELSGVMFSPLKSRARALAHGDPFQVSRAQDFQVGVTVLEAQKLVGVNINPYVAVQVGGQRRVTATQRGTSCPFYNEYFLFEFHDTRLRLQDLLLEITAFHSQTLPFMATRIGTFRMDLGIILDQPDGQFYQRWVPLHDPRDTRAGTKGFIKVTLSVRARGDLPPPMLPPAPGHCSDIEKNLLLPRGVPAERPWARLRVRLYRAEGLPALRLGLLGSLVRALHDQRVLVEPYVRVSFLGQEGETSVSAEAAAPEWNEQLSFVELFPPLTRSLRLQLRDDAPLVDAALATHVPDLRRISHPGRAAGFNPTFGPAWVPLYGSPPGAGLRDSLQGLNEGVGQGIWFRGRLLLAVSMQVLEGRAEPEPPQAQQGSTLSRLTRKKKKKARRDQTPKAVPQHLDASPGAEGPEIPRAMEVEVEELLPLPENVLAPCEDFLLFGVLFEATMIDPTVASQPISFEISIGRAGRLEEQLGRGSRAGEGTEGAAVEAQPLLGARPEEEKEEEELGTHAQRPEPMDGSGPYFCLPLCHCKPCMHVWSCWEDHTWRLQSSNCVRKVAERLDQGLQEVERLQRKPGPGACAQLKQALEVLVAGSRQFCHGAERRTMTRPNALDRCRGKLLVHSLNLLAKQGLRLLRGLRRRNVQKKVALAKKLLAKLRFLAEEPQPPLPDVLVWMLSGQRRVAWARIPAQDVLFSVVEEERGRDCGKIQSLMLTAPGAAPGEVCAKLELFLRLGLGKQAKACTSELPPDLLPEPSAGLPSSLHRDGPGADAEPSVG

SEQ ID NO: 21198 - protein, 15 aa, Homo sapiens
LFTAVSLLSLFLSGT

SEQ ID NO: 21199 - protein, 92 aa, Homo sapiens [sequence omitted]

SEQ ID NO: 21200 - protein, 69 aa, Homo sapiens
VGLCGARGAPWWPGAGPSEAFEPAATSAPHKGSRQGCRGSGMPLRPLRSERMQGGRKRMSLRTEVGTRP

SEQ ID NO: 21201 - protein, 132 aa, Homo sapiens [sequence omitted]

SEQ ID NO: 21202 - protein, 506 aa, Homo sapiens
MIMASFFLLRRKKSKSRSRSHERKRSKSKERKRSRDRERKKSKSRERKRSRSKERRRSRSRSRDRRFRGRYRSPYSGPKFNSAIRGKIGLPHSIKLSRRRSRSKSPFRKDKSPVREPIDNLTPEERDARTVFCMQLAARIRPRDLEEFFSTVGKVRDVRMISDRNSRRSKGIAYVEFVDVSSVPLAIGLTGQRVLGVPIIVQASQAEKNRAAAMANNLQKGSAGPMRLYVGSLHFNITEDMLRGIFEPFGRIESIQLMMDSETGRSKGYGFITFSDSECAKKALEQLNGFELAGRPMKVGHVTERTDASSASSFLDSDELERTGIDLGTTGRLQLMARLAEGTGLQIPPAAQQALQMSGSLAFGAVAEFSFVIDLQTRLSQQTEASALAAAASVQPLATQCFQLSNMFNPQTEEEVGWDTEIKDDVIEECNKHGGVIHIYVDKNSAQGNVYVKCPSIAAAIAAVNALHGRWFAGKMITAAYVPLPTYHNLFPDSMTATQLLVPSRR

SEQ ID NO: 21203 - protein, 106 aa, Homo sapiens
MKLIFLFLFLASALAAAASVQPLATQCFQLSNMFNPQTEEEVGWDTEIKDDVIEECNKHGGVIHIYVDKNSAQVFSSFFINDVRLFVSTLIFAHYVVHVMVNRLPL

SEQ ID NO: 21204 - protein, 135 aa, Homo sapiens
MMDSETGRSKGYGFITFSDSECAKKALEQLNGFELAGRPMKVGHVTERTDASSASSFLDSDELERTGIDLGTTGRLQLMARLAEGTGLQIPPAAQQALQMSGSLAFGAVADLQTRLSQQTEGELKCSYFLFLSLK

SEQ ID NO: 21205 - protein, 41 aa, Homo sapiens
LVLERRSRSGAVSTSTRDRIEKGEIQIVTSDSKAIKGIKRE

SEQ ID NO: 21206 - protein, 22 aa, Homo sapiens
MSVHFVLLICVYSVHKGQTSPN

SEQ ID NO: 21207 - protein, 477 aa, Homo sapiens
LLLVSLSLFLSLPGLWVSDPHPALMALCLELLKQCSSCLVAYKKTPPPVPPRTTSKPFISVTVQSSTESAQDTYLDSQDHKSEVTSQSGLSNSSDSLDSSTRPPSVTRGGVAPAPEAPEPPPKHAALKSEQGTLTSSESHPEAAPKRKLSSIGIQVDCIQPVPKEEPSPATKFQSIGVQVEDDWRSSVPSHSMSSRRDTDSDTQDANDSSCKSSERSLPDCTPHPNSISIDAGPRQAPKIAQIKRNLSYGDNSDPALEASSLPPPDPWLETSSSSPAEPAQPGACRRDGYWFLKLLQAETERLEGWCCQMDKETKENNLSEEVLGKVLSAVGSAQLLMSQKFQQFRGLCEQNLNPDANPRPTAQDLAGFWDLLQLSIEDISMKFDELYHLKANSWQLVETPEKRKEEKKPPPPVPKKPAKSKPAVSRDKASDASDKQRQEARKRLLAAKRAASVRQNSATESADSIEIYVPEAQTRL

SEQ ID NO: 21208 - protein, 35 aa, Homo sapiens
LSLQPPRAVTCDPRPRLPLAQPARPRPGPGGATGG

SEQ ID NO: 21209 - protein, 43 aa, Homo sapiens
LCLCVHSSVVLDTLSCSASAKNKKGTYFAFSMVFLRELGRTDF

SEQ ID NO: 21210 - protein, 57 aa, Homo sapiens
LRMLFIAALHINLSVSQPASVLTSLPAFSPASLLSLMAFHGSSPCPSSAARPSSRPL

SEQ ID NO: 21211 - protein, 1711 aa, Homo sapiens
LGRGRGVGAEVGREQPQPQRPEPRRVPPQGRRGRAGLGHARSSLRPREAAMEAPAAEPPVRGCGPQPAPAPAPAPERKKSHRAPSPARPKDVAGWSLAKGRRGPGPGSAVACSAAFSSRPDKKGRAVAPGARGAGVRVAGVRTGVRAKGRPRSGAGPRPPPPPPSLTDSSSEVSDCASEEARLLGLELALSSDAESAAGGPAGVRTGQPAQPAPSAQQPPRPPASPDEPSVAASSVGSSRLPLSASLAFSDLTEEMLDCGPSGLVRELEELRSENDYLKDEIEELRAEMLEMRDVYMEEDVYQLQELRQQLDQASKTCRILQYRLRKAERRSLRAAQTGQVDGELIRGLEQDVKVSKDISMRLHKELEVVEKKRARLEEENEELRQRLIETELAKQVLQTELERPREHSLKKRGTRSLGKADKKTLVQEDSADLKCQLHFAKEESALMCKKLTKLAKENDSMKEELLKYRSLYGDLDSALSAEELADAPHSRETELKVHLKLVEEEANLLSRRIVELEVENRGLRAEMDDMKDHGGGCGGPEARLAFSALGGGECGESLAELRRHLQFVEEEAELLRRSSAELEDQNKLLLNELAKFRSEHELDVALSEDSCSVLSEPSQEELAAAKLQIGELSGKVKKLQYENRVLLSNLQRCDLASCQSTRPMLETDAEAGDSAQCVPAPLGETHESHAVRLCRAREAEVLPGLREQAALVSKAIDVLVADANGFTAGLRLCLDNECADFRLHEAPDNSEGPRDTKLIHAILVRLSVLQQELNAFTRKADAVLGCSVKEQQESFSSLPPLGSQGLSKEILLAKDLGSDFQPPDFRDLPEWEPRIREAFRTGDLDSKPDPSRSFRPYRAEDNDSYASEIKELQLVLAEAHDSLRGLQEQLSQERQLRKEEADNFNQKMVQLKEDQQRALLRREFELQSLSLQRRLEQKFWSQEKNMLVQESQQFKHNFLLLFMKLRWFLKRWRQGKVLPSEGDDFLEVNSMKELYLLMEEEEINAQHSDNKACTGDSWTQNTPNEYIKTLADMKVTLKELCWLLRDERRGLTELQQQFAKAKATWETERAELKGHTSQMELKTGKGAGERAGPDWKAALQREREEQQHLLAESYSAVMELTRQLQISERNWSQEKLQLVERLQGEKQQVEQQVKELQNRLSQLQKAADPWVLKHSELEKQDNSWKETRSEKIHDKEAVSEVELGGNGLKRTKSVSSMSEFESLLDCSPYLAGGDARGKKLPNNPAFGFVSSEPGDPEKDTKEKPGLSSRDCNHLGALACQDPPGRQMQRSYTAPDKTGIRVYYSPPVARRLGVPVVHDKEGKIIIEPGFLFTTAKPKESAEADGLAESSYGRWLCNFSRQRLDGGSAGSPSAAGPGFPAALHDFEMSGNMSDDMKEITNCVRQAMRSGSLERKVKSTSSQTVGLASVGTQTIRTVSVGLQTDPPRSSLHGKAWSPRSSSLVSVRSKQISSSLDKVHSRIERPCCSPKYGSPKLQRRSVSKLDSSKDRSLWNLHQGKQNGSAWARSTTTRDSPVLRNINDGLSSLFSVVEHSGSTESVWKLGMSETRAKPEPPKYGIVQEFFRNVCGRAPSPTSSAGEEGTKKPEPLSPASYHQPEGVARILNKKAAKLGSSEEVRLTMLPQVGKDGVLRDGDGAVVLPNEDAVCDCSTQSLTSCFARSSRSAIRHSPSKCRLHPSESSWGGEERALPPSE

SEQ ID NO: 21212 - protein, 120 aa, Homo sapiens
LLGGMAPPGSSTVFLLALTIIASTWALTPTHYLTKHDVERLKASLDRPFTNLESAFYSIVGLSSLGAQVPDAKKACTYIRSNLDPSNVDSLFYAAQASQALSGCENSPGSADSIPPVPAG

SEQ ID NO: 21213 - protein, 17 aa, Homo sapiens
MVDRADVKSGHPVAPGT

SEQ ID NO: 21214 - protein, 57 aa, Homo sapiens
MCPSLSCPLLVGLHYIWESLSNADKHTLSHYLCTTDLLLISHLCCCCVDRARPHLFV

SEQ ID NO: 21215 - protein, 147 aa, Homo sapiens [sequence omitted]

SEQ ID NO: 21216 - protein, 107 aa, Homo sapiens
LPLSLLRAVTPVPAAIRPGAPDESMRGRARGVVFPRTPGGLPRPVLCTSSPTKGETEAPRGVGRAGWTSGPAAGAVVRPLCRGGPLGFRVSSGKRLAGEPRPRPSLG

SEQ ID NO: 21217 - protein, 132 aa, Homo sapiens
LPLSLLRAVTPVPAAIRPGAPDESMRGRARGVVFPRTPGGLPRPVLCTSSPTKGETEAPRGVGRAGWTSGPAAGAVVRPLCRGGPLGFRVSSGKRLAGLVGCAAILETDDSSPLDGFAGSAPASAPIFPAAP

SEQ ID NO: 21218 - protein, 115 aa, Homo sapiens
LPLSLLRAVTPVPAAIRPGAPDESMRGRARGVVFPRTPGGLPRPASWAVRLSWRQMTALPWMALLVPHQPAPPFFLQHPDLHSLRGSHCPRCEDVPGNWSSVTFLMGADEIFVLH

SEQ ID NO: 21219 - protein, 47 aa, Homo sapiens
LIMMIYILAINFLLKVTILVKHKPFEEKGFYASQLNTCIGSINKFAI

SEQ ID NO: 21220 - protein, 59 aa, Homo sapiens
LSCPPREMGNPKAPSRVSLAPWGCAVARQTMLLAAGGLQAQVMESDCPGSNFRLCLVVG

SEQ ID NO: 21221 - protein, 63 aa, Homo sapiens
LKMSVQPMISLRGFEIIPPVVLQLKCGSGPVHISGQHLVAVEEDAESEDEEEEDVKFLSISGR

SEQ ID NO: 21222 - protein, 54 aa, Homo sapiens
LVALKWAAACSLVLSSRCPQHLHPCWDPGGLCAWAGILLCCSGQSGSWLTQHAH

SEQ ID NO: 21223 - protein, 38 aa, Homo sapiens
MGYRGRTEKRGIATNRQIIFGSQKCGMLHPVKTDGIFR

SEQ ID NO: 21224 - protein, 413 aa, Homo sapiens
VIIHTRFSFIQEVHEDPGQATLSTTHPEGPGPATSAPEPATAASSQAEKSIPSKSLLDWLRQQADYSLEVPGFGANFSDKPKQRRPRCKEPGKLDVSSLSGEERVPAIPKEPGLRGFLPENKFNHTLAEPILRDTGPRRRGRRPRSELLKAPSIVADSPSGMGPLFMNGLIAGMDLVGLQNMRNMPGIPLTGLVGFPAGFATMPTGEEVKSTLSMLPMMLPGMAAVPQMFGVGGLLSPPMATTCTSTAPASLSSTTKSGTAVTEKTAEDKPSSHDVKTDTLAEDKPGPGPFSDQSEPAITTSSPVAFNPFLIPGVSPGLIYPSMFLSPGMGMALPAMQQARHSEIVGLESQKRKKKKTKGDNPNSHPEPAPSCEREPSGDENCAEPSAPLPAEREHGAQAGEGALKDSNNDTN

SEQ ID NO: 21225 - protein, 361 aa, Homo sapiens
LRSAVRQPALGSPPATDMPRVYIGRLSYNVREKDIQRFFSGYGRLLEVDLKNGYGFVEFEDSRDADDAVYELNGKELCGERVIVEHARGPRRDRDGYSYGSRSGGGGYSSRRTSGRDKYGPPVRTEYRLIVENLSSRCSWQDLKDFMRQAGEVTYADAHKERTNEGVIEFRSYSDMKRALDKLDGTEINGRNIRLIEDKPRTSHRRSYSGSRSRSRSRRRSRSRSRRSSRSRSRSISKSRSRSRSRSKGRSRSRSKGRKSRSKSKSKPKSDRGSHSHSRSRSKDEYEKSRSRSRSRSPKENGKGDIKSKSRSRSQSRSNSPLPVPPSKARSVSPPPKRATSRSRSRSRSKSRSRSRSSSRD

SEQ ID NO: 21226 - protein, 62 aa, Homo sapiens
LGRFVGTLNLSFLLSFQQAALLWLVESGLPGMALTSRPGADLAPGLFQPLLASCFPPPGVQW

SEQ ID NO: 21227 - protein, 267 aa, Homo sapiens
LTRSGMEHLERCEWLLRGTLVRAAVRRYLPWALVASMLAGSLLKELSPLPESYLSNKRNVLNVYFVKVAWAWTFCLLLPFIALTNYHLTGKAGLVLRRLSTLLVGTAIWYICTSIFSNIEHYTGSCYQSPALEGVRKEHQSKQQCHQEGGFWHGFDISGHSFLLTFCALMIVEEMSVLHEVKTDRSHCLHTAITTLVVALGILTFIWVLMFLCTAVYFHNLSQKVFGTLFGLLSWYGTYGFWYPKAFSPGLPPQSCSLNLKQDSYKK

SEQ ID NO: 21228 - protein, 34 aa, Homo sapiens
LQYPLKAKKKKCIYITVFLYESPYLYDTSTVFCA

SEQ ID NO: 21229 - protein, 19 aa, Homo sapiens
LMQNRNFSFICILCLLLRI

SEQ ID NO: 21230 - protein, 18 aa, Homo sapiens
MGAVLGVFSLASWKILVS

SEQ ID NO: 21231 - protein, 14 aa, Homo sapiens
MFLGSHLSWQLPPC

SEQ ID NO: 21232 - protein, 146 aa, Homo sapiens
LSGCGIMSDLFCSLYFSVLFALFSIRGNNCHFDRSHCAGELELSSLQNASGLTSAPLPSVPTGLRSDATGMMEVESSYSDFISCDRTGRRNAVPDIQGDSEAVSVRKLAGDMGELALEGAEGQVEGSAPDKEAGNQPQSSDGTTSS

SEQ ID NO: 21233 - protein, 67 aa, Homo sapiens
VKRMDYHYIAKSCLLCSLVPCCLPFWPFQNINAAKSSFLPEDEKRELLDLLYKAYGMPPSASAGQNL

SEQ ID NO: 21234 - protein, 104 aa, Homo sapiens
MRGTPKTHLLAFSLLCLLSKVRTQLCPTPCTCPWPPPRCPLGVPLVLDGCGCCRVCARRLGEPCDQLHVCDASQGLVCQPGAGPGGRGALCLCKQVCRTEWGRV

SEQ ID NO: 21235 - protein, 161 aa, Homo sapiens
LLCIRSLDSFRTTFVELLDKYLIPNATQPESKVFYLKMKGDYFRYLSEVASGDNKQTTVSNSQQAYQEAFEISKKEMQPTHPIRLGLALNFSVFYYEILNSPEKACSLAKTAFDEAIAELDTLNEESYKDSTLIMQLLRDNLTLWTSENQGDEGDAGEGEN

SEQ ID NO: 21236 - protein, 19 aa, Homo sapiens
LTLEWLSLTLCCCLLQRGT

SEQ ID NO: 21237 - protein, 38 aa, Homo sapiens
LGEFWMACLMFVSQHFCSVVSPQHLCELRNVRQWEGLS

SEQ ID NO: 21238 - protein, 31 aa, Homo sapiens
MYIGQVYYLKGFILALLTQSFKPQEQRLLVE

SEQ ID NO: 21239 - protein, 545 aa, Homo sapiens
LSPSAMRGLLCWPVLLLLLQPWETQLQLTGPRCHTGPLDLVFVIDSSRSVRPFEFETMRQFLMGLLRGLNVGPNATRVGVIQYSSQVQSVFPLRAFSRREDMERAIRDLVPLAQGTMTGLAIQYAMNVAFSVAEGARPPEERVPRVAVIVTDGRPQDRVAEVAAQARARGIEIYAVGVQRADVGSLRAMASPPLDEHVFLVESFDLIQEFGLQFQSRLCAIDYCSFGNHSCQHECVSTPGGPRCHCREGHDLQPDGRSCQVRDLCNGVDHGCEFQCVSEGLSYRCLCPEGRQLQADGKSCNRCREGHVDLVLLVDGSKSVRPQNFELVKRFVNQIVDFLDVSPEGTRVGLVQFSSRVRTEFPLGRYGTAAEVKQAVLAVEYMERGTMTGLALRHMVEHSFSEAQGARPRALNVPRVGLVFTDGRSQDDISVWAARAKEEGIVMYAVGVGKAVEAELREIASEPAELHVSYAPDFGTMTHLLENLRGSICPEEGISAGTELRSPCECESLVEFQGRTLGALESLTLNLAQLTARLEDLENQLANQK

SEQ ID NO: 21240 - protein, 504 aa, Homo sapiens
LSPSAMRGLLCWPVLLLLLQPWETQLQLTGPRCHTGPLDLVFVIDSSRSVRPFEFETMRQFLMGLLRGLNVGPNATRVGVIQYSSQVQSVFPLRAFSRREDMERAIRDLVPLAQGTMTGLAIQYAMNVAFSVAEGARPPEERVPRVAVIVTDGRPQDRVAEVAAQARARGIEIYAVGVQRADVGSLRAMASPPLDEHVFLVESFDLIQEFGLQFQSRLCVRDLCNGVDHGCEFQCVSEGLSYRCLCPEGRQLQADGKSCNRCREGHVDLVLLVDGSKSVRPQNFELVKRFVNQIVDFLDVSPEGTRVGLVQFSSRVRTEFPLGRYGTAAEVKQAVLAVEYMERGTMTGLALRHMVEHSFSEAQGARPRALNVPRVGLVFTDGRSQDDISVWAARAKEEGIVMYAVGVGKAVEAELREIASEPAELHVSYAPDFGTMTHLLENLRGSICPEEGISAGTELRSPCECESLVEFQGRTLGALESLTLNLAQLTARLEDLENQLANQK

SEQ ID NO: 21241 - protein, 586 aa, Homo sapiens
LSPSAMRGLLCWPVLLLLLQPWETQLQLTGPRCHTGPLDLVFVIDSSRSVRPFEFETMRQFLMGLLRGLNVGPNATRVGVIQYSSQVQSVFPLRAFSRREDMERAIRDLVPLAQGTMTGLAIQYAMNVAFSVAEGARPPEERVPRVAVIVTDGRPQDRVAEVAAQARARGIEIYAVGVQRADVGSLRAMASPPLDEHVFLVESFDLIQEFGLQFQSRLCAIDLCAEGTHGCEHHCVNSPGSYFCHCQVGFVLQQDQRSCRAIDYCSFGNHSCQHECVSTPGGPRCHCREGHDLQPDGRSCQVRDLCNGVDHGCEFQCVSEGLSYRCLCPEGRQLQADGKSCNRCREGHVDLVLLVDGSKSVRPQNFELVKRFVNQIVDFLDVSPEGTRVGLVQFSSRVRTEFPLGRYGTAAEVKQAVLAVEYMERGTMTGLALRHMVEHSFSEAQGARPRALNVPRVGLVFTDGRSQDDISVWAARAKEEGIVMYAVGVGKAVEAELREIASEPAELHVSYAPDFGTMTHLLENLRGSICPEEGISAGTELRSPCECESLVEFQGRTLGALESLTLNLAQLTARLEDLENQLANQK

SEQ ID NO: 21242 - protein, 17 aa, Homo sapiens
VSGTFAMAWTMAVSSSV

SEQ ID NO: 21243 - protein, 38 aa, Homo sapiens
LFVFLTVHSFVQSVYLCLGKSVEVPRCLHSLAHFHSTC

SEQ ID NO: 21244 - protein, 122 aa, Homo sapiens
MAAAMPLALLVLLLLGPGGWCLAEPPRDSLREELVITPLPSGDVAATFQFRTRWDSELQREGVSHYRLFPKALGQLISKYSLRELHLSFTQGFWRTRYWGPPFLQAPSGAELWVWFQDTVTE

SEQ ID NO: 21245 - protein, 371 aa, Homo sapiens
MAAAMPLALLVLLLLGPGGWCLAEPPRDSLREELVITPLPSGDVAATFQFRTRWDSELQREGVSHYRLFPKALGQLISKYSLRELHLSFTQGFWRTRYWGPPFLQAPSGAELWVWFQDTVTDVDKSWKELSNVLSGIFCASLNFIDSTNTVTPTASFKPLGLANDTDHYFLRYAVLPREVVCTENLTPWKKLLPCSSKAGLSVLLKADRLFHTSYHSQAVHIRPVCRNARCTSISWELRQTLSVVFDAFITGQGKKDWSLFRMFSRTLTEPCPLASESRVYVDITTYNQDNETLEVHPPPTTTYQDVILGTRKTYAIYDLLDTAMINNSRNLNIQLKWKRPPENGEWVVGWTAGLQRLQRKDSQSHVFAVR

SEQ ID NO: 21246 - protein, 578 aa, Homo sapiens
LLVLLLLGPGGWCLAEPPRDSLREELVITPLPSGDVAATFQFRTRWDSELQREGVSHYRLFPKALGQLISKYSLRELHLSFTQGFWRTRYWGPPFLQAPSGAELWVWFQDTVTEREGSPTPSWDCPDCGARGGVGSRRVIPISGMWIPRGQSPRPTPDRPLSPSDTDHYFLRYAVLPREVVCTENLTPWKKLLPCSSKAGLSVLLKADRLFHTSYHSQAVHIRPVCRNARCTSISWELRQTLSVVFDAFITGQGKKDWSLFRMFSRTLTEPCPLASESRVYVDITTYNQDNETLEVHPPPTTTYQDVILGTRKTYAIYDLLDTAMINNSRNLNIQLKWKRPPENEAPPVPFLHAQRYVSGYGLQKGELSTLLYNTHPYRAFPVLLLDTVPWYLRLYVHTLTITSKGKENKPSYIHYQPAQDRLQPHLLEMLIQLPANSVTKVSIQFERALLKWTEYTPDPNHGFYVSPSVLSALVPSMVAAKPVDWEESPLFNSLFPVSDGSNYFVRLYTEPLLVNLPTPDFSMPYNVICLTCTVVAVCYGSFYNLLTRTFHIEEPRTGGLAKRLANLIRRARGVPPL

SEQ ID NO: 21247 - protein, 266 aa, Homo sapiens
MGRAVATAAIPLGTSVASWSRPCSTSSRWTRISSGDPKLPVLYQVERTRTGSSFSVRSVKAVQHGKPIFICQASFQQAQPSPMQHQFSMPTVPPPEELLDCETLIDQYLRDPNLQKRYPLALNRIAAQEVPIEIKPVNPSPLSQLQRMEPKQMFWVRARGYIGEGDMKMHCCVAAYISDYAFLGTALLPHQWQHKVHFMVSLDHSMWFHAPFRADHWMLYECESPWAGGSRGLVHGRLWRQDGVLAVTCAQEGVIRVKPQVSESKL

SEQ ID NO: 21248 - protein, 78 aa, Homo sapiens
MIRAAPPPLFLLLLLLLLLVSWASRGEAAPDQDEIQRLPGLAKQPSFRQYSGYLKGSGSKHLHYWSAALPSGRDWEKR

SEQ ID NO: 21249 - protein, 120 aa, Homo sapiens
MIRAAPPPLFLLLLLLLLLVSWASRGEAAPDQDEIQRLPGLAKQPSFRQYSGYLKGSGSKHLHYWFVESQKDPENSPVVLWLNGGPGCSSLDGLLTEHGPFLVQPDGVTLEYNPYSWNLV

SEQ ID NO: 21250 - protein, 81 aa, Homo sapiens
LRMPGSREGWKGPLQLRQPCPDPPPRFVESQKDPENSPVVLWLNGGPGCSSLDGLLTEHGPFLVQPDGVTLEYNPYSWNLV

SEQ ID NO: 21251 - protein, 446 aa, Homo sapiens
LSPLAMALFGALFLALLAGAHAEFPGCKIRVTSKALELVKQEGLRFLEQELETITIPDLRGKEGHFYYNISEVKVTELQLTSSELDFQPQQELMLQITNASLGLRFRRQLLYWFLKVYDFLSTFITSGMRFLLNQQICPVLYHAGTVLLNSLLDTVPVRSSVDELVGIDYSLMKDPVASTSNLDMDFRGAFFPLTERNWSLPNRAVEPQLQEEERMVYVAFSEFFFDSAMESYFRAGALQLLLVGDKVPHDLDMLLRATYFGSIVLLSPAVIDSPLKLELRVLAPPRCTIKPSGTTISVTASVTIALVPPDQPEVQLSSMTMDARLSAKMALRGKALRTQLDLRRFRIYSNHSALESLALIPLQAPLKTMLQIGVMPMLNERTWRGVQIPLPEGINFVHEVVTNHAGFLTIGADLHFAKGLREVIEKNRPADVRASTAPTPSTAAV

SEQ ID NO: 21252 - protein, 498 aa, Homo sapiens
LSPLAMALFGALFLALLAGAHAEFPGCKIRVTSKALELVKQEGLRFLEQELETITIPDLRGKEGHFYYNISEVKVTELQLTSSELDFQPQQELMLQITNASLGLRFRRQLLYWFFYDGGYINASAEGVSIRTGLELSRDPAGRMKVSNVSCQASVSRMHAAFGGTFKKVYDFLSTFITSGMRFLLNQQICPVLYHAGTVLLNSLLDTVPVRSSVDELVGIDYSLMKDPVASTSNLDMDFRGAFFPLTERNWSLPNRAVEPQLQEEERMVYVAFSEFFFDSAMESYFRAGALQLLLVGDKVPHDLDMLLRATYFGSIVLLSPAVIDSPLKLELRVLAPPRCTIKPSGTTISVTASVTIALVPPDQPEVQLSSMTMDARLSAKMALRGKALRTQLDLRRFRIYSNHSALESLALIPLQAPLKTMLQIGVMPMLNERTWRGVQIPLPEGINFVHEVVTNHAGFLTIGADLHFAKGLREVIEKNRPADVRASTAPTPSTAAV

SEQ ID NO: 21253 - protein, 403 aa, Homo sapiens
LSPLAMALFGALFLALLAGAHAEFPGCKIRVTSKALELVKQEGLRFLEQELETITIPDLRGKEGHFYYNISEKVYDFLSTFITSGMRFLLNQQICPVLYHAGTVLLNSLLDTVPVRSSVDELVGIDYSLMKDPVASTSNLDMDFRGAFFPLTERNWSLPNRAVEPQLQEEERMVYVAFSEFFFDSAMESYFRAGALQLLLVGDKVPHDLDMLLRATYFGSIVLLSPAVIDSPLKLELRVLAPPRCTIKPSGTTISVTASVTIALVPPDQPEVQLSSMTMDARLSAKMALRGKALRTQLDLRRFRIYSNHSALESLALIPLQAPLKTMLQIGVMPMLNERTWRGVQIPLPEGINFVHEVVTNHAGFLTIGADLHFAKGLREVIEKNRPADVRASTAPTPSTAAV

SEQ ID NO: 21254 - protein, 189 aa, Homo sapiens
MFTYKSTQFNVEGFALVLGASFIGGIRWTLTQMLLQKAELGLQNPIDTMFHLQPLMFLGLFPLFAVFEGLHLSTSEKIFRFQDTGLLLRVLGSLFLGGILAFGLGFSEFLLVSRTSSLTLSIAGIFKEVCTLLLAAHLLGDQISLLNWLGFALCLSGISLHVALKALHSRGNPESLPEASVFCSSPCDS

SEQ ID NO: 21255 - protein, 62 aa, Homo sapiens
LLLRLALTSLVFRATRSLWPIQISEQTEISPCKRSVSSQQVKDLLAKSCPLKSPGTLQGKPS

SEQ ID NO: 21256 - protein, 59 aa, Homo sapiens
VRVLQPVNPWSRRDLDLVRTGGEAGAPTTYRKGWRRALSTRASEGTLCFQHSWPFLKRT

SEQ ID NO: 21257 - protein, 95 aa, Homo sapiens
VRVLQPVNPWSRRDLDLVRTGGEAGAPTTYRKGWRRALSTRASEGTVGPGGAGLGSAEGGRALSLSLEGGFPVVGRRGSQGRIGLLTCRPRASSL

SEQ ID NO: 21258 - protein, 934 aa, Homo sapiens
MSAVGEPLFSFEQERLGPLSSRTFSMADPGSAERTAQKRKFPSPPHSSNGHSPQDTSTSPIKKKKKPGLLNSNNKEQDGRNDFYCWVCHREGQVLCCELCPRVYHAKCLRLTSEPEGDWFCPECEKITVAECIETQSKAMTMLTIEQLSYLLKFAIQKMKQPGTDAFQKPVPLEQHPDYAEYIFHPMDLCTLEKNAKKKMYGCTEAFLADAKWILHNCIIYNGGNHKLTQIAKVVIKICEHEMNEIEVCPECYLAACQKRDNWFCEPCSNPHPLVWAKLKGFPFWPAKALRDKDGQVDARFFGQHDRAWVPINNCYLMSKEIPFSVKKTKSIFNSAMQEMEVYVENIRRKFGVFNYSPFRTPYTPNSQYQMLLDPTNPSAGTAKIDKQEKVKLNFDMTASPKILMSKPVLSGGTGRRISLSDMPRSPMSTNSSVHTGSDVEQDAEKKATSSHFSASEESMDFLDKSTASPASTKTGQAGSLSGSPKPFSPQLSAPITTKTDKTSTTGSILNLNLDRSKAEMDLKELSESVQQQSTPVPLISPKRQIRSRFQLNLDKTIESCKAQLGINEISEDVYTAVEHSDSEDSEKSDSSDSEYISDDEQKSKNEPEDTEDKEGCQMDKEPSAVKKKPKPTNPVEIKEELKSTSPASEKADPGAVKDKASPEPEKDFSEKAKPSPHPIKDKLKGKDETDSPTVHLGLDSDSESELVIDLGEDHSGREGRKNKKEPKEPSPKQDVVGKTPPSTTVGSHSPPETPVLTRSSAQTSAAGATATTSTSSTVTVTAPAPAATGSPVKKQRPLLPKETAPAVQRVVWNSSSKFQTSSQKWHMQKMQRQQQQQQQQNQQQQPQSSQGTRYQTRQAVKGTEPPLLFSVAPAPILPHRQEKVIALLFFFFSSRLFPGHCILKALHIPFGIIFKNCFATCFFTFKKFFLFIL

SEQ ID NO: 21259 - protein, 246 aa, Homo sapiens [sequence omitted]

SEQ ID NO: 21260 - protein, 42 aa, Homo sapiens
LSFLGFLLSLLGFIPSEPGLAFLGCKLRAGSRSAEPRFSHLP

SEQ ID NO: 21261 - protein, 36 aa, Homo sapiens
LVYFGIFCCWCCQSLFFLKLCDYIFDILHFKERYVV

SEQ ID NO: 21262 - protein, 590 aa, Homo sapiens
LFTCICSLLLKVTMSQVQVQVQNPSAALSGSQILNKNQSLLSQPLMSIPSTTSSLPSENAGRPIQNSALPSASITSTSAAAESITPTVELNALCMKLGKKPMYKPVDPYSRMQSTYNYNMRGGAYPPRYFYPFPVPPLLYQVELSVGGQQFNGKGKTRQAAKHDAAAKALRILQNEPLPERLEVNGRESEEENLNKSEISQVFEIALKRNLPVNFEVARESGPPHMKNFVTKVSVGEFVGEGEGKSKKISKKNAAIAVLEELKKLPPLPAVERVKPRIKKKTKPIVKPQTSPEYGQGINPISRLAQIQQAKKEKEPEYTLLTERGLPRRREFVMQVKVGNHTAEGTGTNKKVAKRNAAENMLEILGFKVPQAQPTKPALKSEEKTPIKKPGDGRKVTFFEPGSGDENGTSNKEDEFRMPYLSHQQLPAGILPMVPEVAQAVGVSQGHHTKDFTRAAPNPAKATVTAMIARELLYGGTSPTAETILKNNISSGHVPHGPLTRPSEQLDYLSRVQGFQVEYKDFPKNNKNEFVSLINCSSQPPLISHGIGKDVESCHDMAALNILKLLSELDQQSTEMPRTGNGPMSVCGRC

SEQ ID NO: 21263 - protein, 525 aa, Homo sapiens
LFLERPLFKKESITPTVELNALCMKLGKKPMYKPVDPYSRMQSTYNYNMRGGAYPPRYFYPFPVPPLLYQVELSVGGQQFNGKGKTRQAAKHDAAAKALRILQNEPLPERLEVNGRESEEENLNKSEISQVFEIALKRNLPVNFESFPLKQVARESGPPHMKNFVTKVSVGEFVGEGEGKSKKISKKNAAIAVLEELKKLPPLPAVERVKPRIKKKTKPIVKPQTSPEYGQGINPISRLAQIQQAKKEKEPEYTLLTERGLPRRREFVMQVKVGNHTAEGTGTNKKVAKRNAAENMLEILGFKVPQAQPTKPALKSEEKTPIKKPGDGRKVTFFEPGSGDENGTSNKEDEFRMPYLSHQQLPAGILPMVPEVAQAVGVSQGHHTKDFTRAAPNPAKATVTAMIARELLYGGTSPTAETILKNNISSGHVPHGPLTRPSEQLDYLSRVQGFQVEYKDFPKNNKNEFVSLINCSSQPPLISHGIGKDVESCHDMAALNILKLLSELDQQSTEMPRTGNGPMSVCGRC

SEQ ID NO: 21264 - protein, 44 aa, Homo sapiens
LGLYLVRCLFYIVPQEQSMSSLMQTDSNCQALICRLTLIINRGP

SEQ ID NO: 21265 - protein, 114 aa, Homo sapiens
MAAQQRDCGGAAQLAGPAAEADPLGRFTCPVCLEVYEKPVQVPCGHVFCSACLQECLKPKKPVCGVCRSALAPGVRAVELERQIESTETSCHGCRKNVCGSDVEESMSFHDKLG

SEQ ID NO: 21266 - protein, 67 aa, Homo sapiens
LETKNWKPESKIREHLEKKGPQVRDWSHHFKTIEDLRAQIFTNTVDNACIVLQINNACLAADDFTVK

SEQ ID NO: 21267 - protein, 21 aa, Homo sapiens
LNPVHALVLVLLLLPKILSRD

SEQ ID NO: 21268 - protein, 151 aa, Homo sapiens
LFPHQPAGNGKGVKVPRNFRLLEELEEGQKGVGDGTVSWGLEDDEDMTLTRWTGMIIGPPRTIYENRIYSLKIECGPKYPEAPPFVRFVTKINMNGVNSSNGVVDPRAISVLAKWQNSYSIKVVLQELRRLMMSKENMKLPQPPEGQCYSN

SEQ ID NO: 21269 - protein, 70 aa, Homo sapiens
MAATTGSGVKVPRNFRLLEELEEGQKGVGDGTVSWGLEDDEDMTLTRWTGMIIGPPRNFLRLLNTGENPI

SEQ ID NO: 21270 - protein, 287 aa, Homo sapiens
LPPPPPAERTGPIGRVAMAGAENWPGQQLELDEDEASCCRWGAQHAGARELAALYSPGKRLQEWCSVILCFSLIAHNLVHLLLLARWEDTPLVILGVVAGALIADFLSGLVHWGADTWGSVELPIVGKAFIRPFREHHIDPTAITRHDFIETNGDNCLVTLLPLLNMAYKFRTHSPEALEQLYPWECFVFCLIIFGTFTNQIHKWSHTYFGLPRWVTLLQDWHVILPRKHHRIHHVSPHETYFCITTGWLNYPLEKIGFWRRLEDLIQGLTGEKPRADDMKWAQKIK

SEQ ID NO: 21271 - protein, 18 aa, Homo sapiens
VTTCLICLLLTGMQNPSF

SEQ ID NO: 21272 - protein, 20 aa, Homo sapiens
VTTCLICLLLTGMQGSWMLC

SEQ ID NO: 21273 - protein, 19 aa, Homo sapiens
VTTCLICLLLTGMQATQVP

SEQ ID NO: 21274 - protein, 14 aa, Homo sapiens
VTTCLICLLLTGMQ

SEQ ID NO: 21275 - protein, 116 aa, Homo sapiens
LGGMSPSPRWGFLCVLFTAVHPAPSTAPVQDKCPVNTWEAMQASSQQLLQTDPRPKPFLLPPLPPLLLISAGTEVSSLVFQKSPLHTQPEGAIKTVGQPTSVHSKVLSKGSLLLGE

SEQ ID NO: 21276 - protein, 41 aa, Homo sapiens
LSKVGSFYLVMRAGIFVCCVLCVPPVPSQCLADGKCSTHIG

SEQ ID NO: 21277 - protein, 442 aa, Homo sapiens
LQGSGIAAGLGAKSATRPRAADGAVGREGGAAAALARHGDGKGVRADRQVRELGGHLPVDHSRIKLHQEDNDYINASLIKMEEAQRSYILTQGPLPNTCGHFWEMVWEQKSRGVVMLNRVMEKGSLKCAQYWPQKEEKEMIFEDTNLKLTLISEDIKSYYTVRQLELENLTTQETREILHFHYTTWPDFGVPESPASFLNFLFKVRESGSLSPEHGPVVVHCSAGIGRSGTFCLADTCLLLMDKRKDPSSVDIKKVLLEMRKFRMGLIQTADQLRFSYLAVIEGAKFIMGDSSVQDQWKELSHEDLEPPPEHIPPPPRPPKRILEPHNGKCREFFPNHQWVKEETQEDKDCPIKEEKGSPLNAAPYGIESMSQDTEVRSRVVGGSLRGAQAASPAKGEPSLPEKDEDHALSYWKPFLVNMCVATVLTAGAYLCYRFLFNSNT

SEQ ID NO: 21278 - protein, 8 aa, Homo sapiens
VWMEFAEP

SEQ ID NO: 21279 - protein, 1132 aa, Homo sapiens
VPPPSARRRRRCPAPEHAGPARASRPSQETMFQLPVNNLGSLRKARKTVKKILSDIGLEYCKEHIEDFKQFEPNDFYLKNTTWEDVGLWDPSLTKNQDYRTKPFCCSACPFSSKFFSAYKSHFRNVHSEDFENRILLNCPYCTFNADKKTLETHIKIFHAPNASAPSSSLSTFKDKNKNDGLKPKQADSVEQAVYYCKKCTYRDPLYEIVRKHIYREHFQHVAAPYIAKAGEKSLNGAVPLGSNAREESSIHCKRCLFMPKSYEALVQHVIEDHERIGYQVTAMIGHTNVVVPRSKPLMLIAPKPQDKKSMGLPPRIGSLASGNVRSLPSQQMVNRLSIPKPNLNSTGVNMMSSVHLQQNNYGVKSVGQGYSVGQSMRLGLGGNAPVSIPQQSQSVKQLLPSGNGRSYGLGSEQRSQAPARYSLQSANASSLSSGQLKSPSLSQSQASRVLGQSSSKPAAAATGPPPGNTSSTQKWKICTICNELFPENVYSVHFEKEHKAEKVPAVANYIMKIHNFTSKCLYCNRYLPTDTLLNHMLIHGLSCPYCRSTFNDVEKMAAHMRMVHIDEEMGPKTDSTLSFDLTLQQGSHTNIHLLVTTYNLRDAPAESVAYHAQNNPPVPPKPQPKVQEKADIPVKSSPQAAVPYKKDVGKTLCPLCFSILKGPISDALAHHLRERHQVIQTVHPVEKKLTYKCIHCLGVYTSNMTASTITLHLVHCRGVGKTQNGQDKTNAPSRLNQSPSLAPVKRTYEQMEFPLLKKRKLDDDSDSPSFFEEKPEEPVVLALDPKGHEDDSYEARKSFLTKYFNKQPYPTRREIEKLAASLWLWKSDIASHFSNKRKKCVRDCEKYKPGVLLGFNMKELNKVKHEMDFDAEWLFENHDEKDSRVNASKTADKKLNLGKEDDSSSDSFENLEEESNESGSPFDPVFEVEPKISNDNPEEHVLKVIPEDASESEEKLDQKEDGSKYETIHLTEEPTKLMHNASDSEVDQDDVVEWKDGASPSESGPGSQQVSDFEDNTCEMKPGTWSDESSQSEDARSSKPAAKKKATMQGDREQLKWKNSSYGKVEGFWSKDQSQWKNASENDERLSNPQIEWQNSTIDSEDGEQFDNMTDGVAEPMHGSLAGVKLSSQQA

SEQ ID NO: 21280 - protein, 188 aa, Homo sapiens
MASLEVSRSPRRSRRELEVRSPRQNKYSVLLPTYNERENLPLIVWLLVKSFSESGINYEIIIIDDGSPDGTRDVAEQLEKIYGSDRILLRPREKKLGLGTAYIHGMKHATGNYIIIMDADLSHHPKFIPEFIRKQKEGNFDIVSGTRYKGNGGVYGWDLKRKIIRSDCFIWQPWGQFFNSDLAETRSI

SEQ ID NO: 21281 - protein, 1116 aa, Homo sapiens
VSVGRAARALRAWPGARELAPSLRARPARCRRLLPRGGAAPAGGGAEAGPGGGPGGAGGAAAKAGGAADMTDNIPLQPVRQKKRMDSRPRAGCCEWLRCCGGGEARPRTVWLGHPEKRDQRYPRNVINNQKYNFFTFLPGVLFNQFKYFFNLYFLLLACSQFVPEMRLGALYTYWVPLGFVLAVTVIREAVEEIRCYVRDKEVNSQVYSRLTARGTVKVKSSNIQVGDLIIVEKNQRVPADMIFLRTSEKNGSCFLRTDQLDGETDWKLRLPVACTQRLPTAADLLQIRSYVYAEEPNIDIHNFVGTFTREDSDPPISESLSIENTLWAGTVVASGTVVGVVLYTGRELRSVMNTSNPRSKIGLFDLEVNCLTKILFGALVVVSLVMVALQHFAGRWYLQIIRFLLLFSNIIPISLRVNLDMGKIVYSWVIRRDSKIPGTVVRSSTIPEQLGRISYLLTDKTGTLTQNEMIFKRLHLGTVAYGLDSMDEVQSHIFSIYTQQSQDPPAQKGPTLTTKVRRTMSSRVHEAVKAIALCHNVTPVYESNGVTDQAEAEKQYEDSCRVYQASSPDEVALVQWTESVGLTLVGRDQSSMQLRTPGDQILNFTILQIFPFTYESKRMGIIVRDESTGEITFYMKGADVVMAGIVQYNDWLEEECGNMAREGLRVLVVAKKSLAEEQYQDFEARYVQAKLSVHDRSLKVATVIESLEMEMELLCLTGVEDQLQADVRPTLETLRNAGIKVWMLTGDKLETATCTAKNAHLVTRNQDIHVFRLVTNRGEAHLELNAFRRKHDCALVISGDSLEVCLKYYEYEFMELACQCPAVVCCRCAPTQKAQIVRLLQERTGKLTCAVGDGGNDVSMIQESDCGVGVEGKEGKQASLAADFSITQFKHLGRLLMVHGRNSYKRSAALSQFVIHRSLCISTMQAVFSSVFYFASVPLYQGFLIIGYSTIYTMFPVFSLVLDKDVKSEVAMLYPELYKDLLKGRPLSYKTFLIWVLISIYQGSTIMYGALLLFESEFVHIVAISFTSLILTELLMVALTIQTWHWLMTVAELLSLACYIASLVFLHEFIDVYFIATLSFLWKVSVITLVSCLPLYVLKYLRRRFSPPSYSKLTS

SEQ ID NO: 21282 - protein, 118 aa, Homo sapiens
LHTKRALPLDTVTFYKVIPKSRFVLVKFNTQYRYGEKQDEFRRLAENSASSDDLLVAEVGISDYGDKLNMELSEKYKLLKESYPVFYLSREGDFENPVPCTGAVKVGAIQRWLKGQGV

SEQ ID NO: 21283 - protein, 31 aa, Homo sapiens
LHFFMPLPILKKVERNRPGSTSTLEKMLQEH

SEQ ID NO: 21284 - protein, 209 aa, Homo sapiens
LRLPTRLTMGSGRRALSAVPAVLLVLTLPGLPVWAQNDTEPIVLEGKCLVVCDSNPATDSKGSSSSPLGISVRAANSKVAFSAVRSTNHEPSEMSNKTRIIYFDQILVNVGNFFTLESVFVAPRKGIYSFSFHVIKVYQSQTIQVNLMLNGKPVISAFAGDKDVTREAATNGVLLYLDKEDKVYLKLEKGNLVGGWQYSTFSGFLVFPL

SEQ ID NO: 21285 - protein, 441 aa, Homo sapiens
LGRRLECNGVISAHCNLCFLGLSDSPASASRVAGITGIMDRSKENCISGPVKATAPVGGPKRVLVTQQFPCQNPLPVNSGQAQRVLCPSNSSQRIPLQAQKLVSSHKPVQNQKQKQLQATSVPHPVSRPLNNTQKSKQPLPSAPENNPEEELASKQKNEESKKRQWALEDFEIGRPLGKGKFGNVYLAREKQSKFILALKVLFKAQLEKAGVEHQLRREVEIQSHLRHPNILRLYGYFHDATRVYLILEYAPLGTVYRELQKLSKFDEQRTATYITELANALSYCHSKRVIHRDIKPENLLLGSAGELKIADFGWSVHAPSSRRTTLCGTLDYLPPEMIEGRMHDEKVDLWSLGVLCYEFLVGKPPFEANTYQETYKRISRVEFTFPDFVTEGARDLISRLLKHNPSQRPMLREVLEHPWITANSSKPSNCQNKESASKQS

SEQ ID NO: 21286 - protein, 454 aa, Homo sapiens
LSSWKTWVLGSQVGADGLECNGVISAHCNLCFLGLSDSPASASRVAGITGIMDRSKENCISGPVKATAPVGGPKRVLVTQQFPCQNPLPVNSGQAQRVLCPSNSSQRIPLQAQKLVSSHKPVQNQKQKQLQATSVPHPVSRPLNNTQKSKQPLPSAPENNPEEELASKQKNEESKKRQWALEDFEIGRPLGKGKFGNVYLAREKQSKFILALKVLFKAQLEKAGVEHQLRREVEIQSHLRHPNILRLYGYFHDATRVYLILEYAPLGTVYRELQKLSKFDEQRTATYITELANALSYCHSKRVIHRDIKPENLLLGSAGELKIADFGWSVHAPSSRRTTLCGTLDYLPPEMIEGRMHDEKVDLWSLGVLCYEFLVGKPPFEANTYQETYKRISRVEFTFPDFVTEGARDLISRLLKHNPSQRPMLREVLEHPWITANSSKPSNCQNKESASKQS

SEQ ID NO: 21287 - protein, 50 aa, Homo sapiens
LEDLGPWVAGSHSIAQARVRGYLIRNFSEGRARWLMPVIPAFSEAEQVCQ

SEQ ID NO: 21288 - protein, 14 aa, Homo sapiens
LSWPAFKLVWPLLM

SEQ ID NO: 21289 - protein, 257 aa, Homo sapiens
LGFLSALLALVLRARAGSQTPQTLLLPAAAFRRGETPRFKMSLFGTTSGFGTSGTSMFGSATTDNHNPMKDIEVTSSPDDSIGCLSFSPPTLPGNFLIAGSWANDVRCWEVQDSGQTIPKAQQMHTGPVLDVCWSDDGSKVFTASCDKTAKMWDLSSNQAIQIAQHDAPVKTIHWIKAPNYSCVMTGSWDKTLKFWDTRSSNPMMVLQLPERCYCADVIYPMAVVATAERGLIVYQLENQPSEFRRIESPLKHQRQR

SEQ ID NO: 21290 - protein, 477 aa, Homo sapiens
LGFLSALLALVLRARAGSQTPQTLLLPAAAFRRGETPRFKMSLFGTTSGFGTSGTSMFGSATTDNHNPMKDIEVTSSPDDSIGCLSFSPPTLPGNFLIAGSWANDVRCWEVQDSGQTIPKAQQMHTGPVLDVCWSDDGSKVFTASCDKTAKMWDLSSNQAIQIAQHDAPVKTIHWIKAPNYSCVMTGSWDKTLKFWDTRSSNPMMVLQLPERCYCADVIYPMAVVATAERGLIVYQLENQPSEFRRIESPLKHQHRCVAIFKDKQNKPTGFALGSIEGRVAIHYINPPNPAKDNFTFKCHRSNGTNTSAPQDIYAVNGIAFHPVHGTLATVGSDGRFSFWDKDARTKLKTSEQLDQPISACCFNHNGNIFAYASSYDWSKVRTPGPALGAPRQQSQALGSEGLGLSCDSSQDSRVSLGRSPSPPCKGKLQDFLKWLWGFSTAFGQNPAHRKCSASVSHYGLLCSWAQKHRQAGGCTL

SEQ ID NO: 21291 - protein, 408 aa, Homo sapiens
LGFLSALLALVLRARAGSQTPQTLLLPAAAFRRGETPRFKMSLFGTTSGFGTSGTSMFGSATTDNHNPMKDIEVTSSPDDSIGCLSFSPPTLPGNFLIAGSWANDVRCWEVQDSGQTIPKAQQMHTGPVLDVCWSDDGSKVFTASCDKTAKMWDLSSNQAIQIAQHDAPVKTIHWIKAPNYSCVMTGSWDKTLKFWDTRSSNPMMVLQLPERCYCADVIYPMAVVATAERGLIVYQLENQPSEFRRIESPLKHQHRCVAIFKDKQNKPTGFALGSIEGRVAIHYINPPNPAKDNFTFKCHRSNGTNTSAPQDIYAVNGIAFHPVHGTLATVGSDGRFSFWDKDARTKLKTSEQLDQPISACCFNHNGNIFAYASSYDWSKGHEFYNPQKKNYIFLRNAAEELKPRNKK

SEQ ID NO: 21292 - protein, 80 aa, Homo sapiens
LNPTWGSPTKMPPGFQLLPSKFKAWEMWPSRTKIIPCGDRAKMNPEGSLGGRLDLPTSEGRDFPLRRSLRRYAWKATVRC

SEQ ID NO: 21293 - protein, 107 aa, Homo sapiens
LAVTFLEQAVVSKECVPVDQFMEHLLPSLLSLASDPVPNVRVLLAKALRQMLLEKAYFRNAGNPHLEVIEETILALQSDRDQDVSFFAALEPKRRNIIDTAVLEKQN

SEQ ID NO: 21294 - protein, 34 aa, Homo sapiens
LGLRRTTAADLGLCTTAVWPGVRFRKSLVACRSI

SEQ ID NO: 21295 - protein, 61 aa, Homo sapiens
VHHHTQLIFVFLVEMGFHHVCQAGLELLTSGDLLASASQHSGITDVSHRAQPVTIFLKGLS

SEQ ID NO: 21296 - protein, 149 aa, Homo sapiens
VWMKCYHVWCLLRTTLLCIKKSIITWSVTLRLSFVFEQHDVEINKIISTTASKTETPIVSKSLSSSLDDTEVKKVMEECKRLQGEVQRLREENKQFKEEDGLRMRKTVQSNSPISALAPTGKEEGLSTRLLALVVLFFIVGVIIGKIAL

SEQ ID NO: 21297 - protein, 55 aa, Homo sapiens
LLGELVLLLEGCGLLCLWRVWSCGGGVYWDAGEELPGSVFSGSVNNNCHREGNSQ

SEQ ID NO: 21298 - protein, 66 aa, Homo sapiens
LVNMFVGLLTEWQKETAQEEKQVTDGKVDYFLSHPGSQKCARKRKNVEHAWLLEDLEMHAHLGCFP

SEQ ID NO: 21299 - protein, 415 aa, Homo sapiens
VRPPAPAAAAARPRPAAAAAAMGCLGNSKTEDQRNEEKAQREANKKIEKQLQKDKQVYRATHRLLLLGAGESGKSTIVKQMRILHVNGFNGEGGEEDPQAARSNSDGEKATKVQDIKNNLKEAIETIVAAMSNLVPPVELANPENQFRVDYILSVMNVPDFDFPPEFYEHAKALWEDEGVRACYERSNEYQLIDCAQYFLDKIDVIKQADYVPSDQDLLRCRVLTSGIFETKFQVDKVNFHMFDVGGQRDERRKWIQCFNDVTAIIFVVASSSYNMVIREDNQTNRLQEALNLFKSIWNNRWLRTISVILFLNKQDLLAEKVLAGKSKIEDYFPEFARYTTPEDATPEPGEDPRVTRAKYFIRDEFLRISTASGDGRHYCYPHFTCAVDTENIRRVFNDCRDIIQRMHLRQYELL

SEQ ID NO: 21300 - protein, 401 aa, Homo sapiens [sequence omitted]

SEQ ID NO: 21301 - protein, 416 aa, Homo sapiens
VRPPAPAAAAARPRPAAAAAAMGCLGNSKTEDQRNEEKAQREANKKIEKQLQKDKQVYRATHRLLLLGAGESGKSTIVKQMRILHVNGFNGEGGEEDPQAARSNSDGSEKATKVQDIKNNLKEAIETIVAAMSNLVPPVELANPENQFRVDYILSVMNVPDFDFPPEFYEHAKALWEDEGVRACYERSNEYQLIDCAQYFLDKIDVIKQADYVPSDQDLLRCRVLTSGIFETKFQVDKVNFHMFDVGGQRDERRKWIQCFNDVTAIIFVVASSSYNMVIREDNQTNRLQEALNLFKSIWNNRWLRTISVILFLNKQDLLAEKVLAGKSKIEDYFPEFARYTTPEDATPEPGEDPRVTRAKYFIRDEFLRISTASGDGRHYCYPHFTCAVDTENIRRVFNDCRDIIQRMHLRQYELL

SEQ ID NO: 21302 - protein, 400 aa, Homo sapiens
VRPPAPAAAAARPRPAAAAAAMGCLGNSKTEDQRNEEKAQREANKKIEKQLQKDKQVYRATHRLLLLGAGESGKSTIVKQMRILHVNGFNGDEKATKVQDIKNNLKEAIETIVAAMSNLVPPVELANPENQFRVDYILSVMNVPDFDFPPEFYEHAKALWEDEGVRACYERSNEYQLIDCAQYFLDKIDVIKQADYVPSDQDLLRCRVLTSGIFETKFQVDKVNFHMFDVGGQRDERRKWIQCFNDVTAIIFVVASSSYNMVIREDNQTNRLQEALNLFKSIWNNRWLRTISVILFLNKQDLLAEKVLAGKSKIEDYFPEFARYTTPEDATPEPGEDPRVTRAKYFIRDEFLRISTASGDGRHYCYPHFTCAVDTENIRRVFNDCRDIIQRMHLRQYELL

SEQ ID NO: 21303 - protein, 83 aa, Homo sapiens
LKQNIPEPVVEKPFQEAVLRGSGSVLKMGTAGRRWMTSLQRKMAGAGLPRPLRTDLAVSRGPLGTPLGELLSKLTSVFSQEPS

SEQ ID NO: 21304 - protein, 172 aa, Homo sapiens
LGMLAGAACPRPPLQPDLRGTVKRLWLALARRLWLALARGLWPRQHCRVQALEALGRSRRPRGPLSTTDPGAARASPTRTRSVSTIATWTSFGSTLPNRRCPMDCPTTEEASGARGLRGHFQGICSSHIGHTCAALVWGDMTRPACTFAPKLWTSAVIQGRQKKQTKKRKGR

SEQ ID NO: 21305 - protein, 157 aa, Homo sapiens
LGMLAGAACPRPPLQPDLRGTVKRLWLALARRLWLALARGLWPRQHCRVQALEALGRSRRPRGPLSTTDPGAARASPTRTRSVSTIATWTSFGSTLPNRRCPMDCPTTEEASGARGLRGHFQGICSSHIGHTCAALVWGDMTRPACTFAPKLWTSAG

SEQ ID NO: 21306 - protein, 183 aa, Homo sapiens
LGMLAGAACPRPPLQPDLRGTVKRLWLALARRLWLALARGLWPRQHCRVQALEALGRSRRPRGPLSTTDPGAARASPTRTRSVSTIATWTSFGSTLPNRRCPMDCPTTEEASGARGLRGHFQGICSSHIGHTCAALVWGDMTRPACTFAPKLWTSAVIQGRQKKQTKKRKGRLKSRTNKASRL

SEQ ID NO: 21307 - protein, 169 aa, Homo sapiens
LGMLAGAACPRPPLQPDLRGTVKRLWLALARRLWLALARGLWPRQHCRVQALEALGRSRRPRGPLSTTDPGAARASPTRTRSVSTIATWTSFGSTLPNRRCPMDCPTTEEASGARGLRGHFQGICSSHIGHTCAALVWGDMTRPACTFAPKLWTSADRLKSRTNKASRL

SEQ ID NO: 21308 - protein, 182 aa, Homo sapiens
LAVALLFLLRCYFVLEPKRHGCSVSNDEGHQTLVMYNAESKGTSAQTWSDVEGQRPALLICTAAAGPTQGVKGYGKPFEPRSVKNIHSTPAYPDATMHRQLLAPVEGRMAETLNQKLHVANVLEDDPGYLPHVYSEEGECGGAPSLSSLASLEQELQPDLLDSLGSKATPFEEIYSESGVPS

SEQ ID NO: 21309 - protein, 22 aa, Homo sapiens
LGKYSWVTSLRSLYLCFLFSCA

SEQ ID NO: 21310 - protein, 189 aa, Homo sapiens
VRAGRECALLRVAAEGARPPPAGMSYDRAITVFSPDGHLFQVEYAQEAVKKGSTAVGVRGRDIVVLGVEKKSVAKLQDERTVRKICALDDNVCMAFAGLTADARIVINRARVECQSHRLTVEDPVTVEYITRYIASLKQVGACPLACSPLAAGQSRLRHGGSCHVTSALYAEQWAQAVWHLCPHRGFRL

SEQ ID NO: 21311 - protein, 15 aa, Homo sapiens
MQFLNWMALTCFFSC

SEQ ID NO: 21312 - protein, 172 aa, Homo sapiens
VRAGRECALLRVAAEGARPPPAGMSYDRAITVFSPDGHLFQVEYAQEAVKKGSTAVGVRGRDIVVLGVEKKSVAKLQDERTVRKICALDDNVCMAFAGLTADARIVINRARVECQSHRLTVEDPVTVEYITRYIASLKQVGACPLACSPLAAGQSRLRHGGSCHVTSGESEN

SEQ ID NO: 21313 - protein, 64 aa, Homo sapiens
MSVAFASARPRGKGEVTQQTIQKFLKNAGQSSSALGLGTRCVFLTCGSESASIPPSRLVAVSAD

SEQ ID NO: 21314 - protein, 462 aa, Homo sapiens [sequence omitted]

SEQ ID NO: 21315 - protein, 282 aa, Homo sapiens
LAQSLHARPPAKLPRPPPLHCPSEARQPLPGALPEQWPLRCTDGRPRDSAPRPEPPALPAWPLAQGLRALGEEPDPAGDGRGPGLEPGGAAPAAPGGRAPPAPHPLCGRPPGQQPQLQTSDLPGATLPDVGLELEVRPLAVTGLIFHLGQARTPPYLQLQVTEKQVLLRADDGAGEFSTSVTRPSVLCDGQWHRLAVMKSGNVLRLEVDAQSNHTVGPLLAAAAGAPAPLYLGGLPEPMAVQPWPPAYCGCMRRLAVNRSPVAMTRSVEVHGAVGASGCPAA

SEQ ID NO: 21316 - protein, 500 aa, Homo sapiens
MAKRLCAGSALCVRGPRGPAPLLLVGLALLGAARAREEAGGGFSLHPPYFNLAEGARIAASATCGEEAPARGSPRPTEDLYCKLVGGPVAGGDPNQTIRGQYCDICTAANSNKAHPASNAIDGTERWWQSPPLSRGLEYNEVNVTLDLGQVFHVAYVLIKFANSPRPDLWVLERSMDFGRTYQPWQFFASSKRDCLERFGPQTLERITRDDAAICTTEYSRIVPLENGEIVVSLVNGRPGAMNFSYSPLLREFTKATNVRLRFLRTNTLLGHLMGKALRDPTVTRRYYYSIKDISIGGRCVCHGHADACDAKDPTDPFRLQCTCQHNTCGGTCDRCCPGFNQQPWKPATANSANECQSCNCYGHATDCYYDPEVDRRRASQSLDGTYQGGGVCIDCQHHTTGVNCERCLPGFYRSPNHPLDSPHVCRRCNCESDFTDGTCEDLTGRCYCRPNFSGERCDVCAEGFTGFPSCYPTPSSSNDTREQVLPAGQIVTNTKISWV

SEQ ID NO: 21317 - protein, 76 aa, Homo sapiens
VTPQAQPSLEMQNDAGEFVDLYVPRKCSASNRIIGAKDHASIQMNVAEVSWEPGRREGCDICAGKAGCPIVEEPLG

SEQ ID NO: 21318 - protein, 250 aa, Homo sapiens
LPGRGHRGHSHHRHVHVQPQVLGVPVQPECLRSCHLVWVPGGASGWWRHLPGRLLCEQAQAPGLRGHQVLPVLHRCQPAGHPRLLTALPQCAHGGRHSQLRREPPARRPPEPNGSLQRCLQLPARTLQPCVRLGRPHVLLTVPRRVPCSHGDECGRPEGEWSRCLPPLSSPGPWEGAPVPSPCNRSYCWASQVYRDCSCIPQNLSSGFGHATAGKCTSTCQRKPLLLVFIFVVIFFTFLSSIPALTATLR

SEQ ID NO: 21319 - protein, 102 aa, Homo sapiens
LATGGASRPDSHQFETVAPSDLILALGVLAQSRPVSRHNRVPWRRLFRKPAVWAAVVSQLSAACSFFILLSWLPTFFEETFPDAKVSRGLPQGEGAPRRHEA

SEQ ID NO: 21320 - protein, 637 aa, Homo sapiens
MSSGDPAHLGLCLWLWLGATLGREQVQASGLLRLAVLPEDRLQMKWRESEGSGLGYLVQVKPMAGDSEQEVILTTKTPKATVGGLSPSKGYTLQIFELTGSGRFLLARREFVIEDLKSSSLDRSSQRPLGSGAPEPTPSHTGSPDPEQASEPQVAFTPSQDPRTPAGPQFRCLPPVPADMVFLVDGSWSIGHSHFQQVKDFLASVIAPFEIGPDKVQVGLTQYSGDAQTEWDLNSLSTKEQVLAAVRRLRYKGGNTFTGLALTHVLGQNLQPAAGLRPEAAKVVILVTDGKSQDDVHTAARVLKDLGVNVFAVGVKNADEAELRLLASPPRDITVHSVLDFLQLGALAGLLSRLICQRLQGGSPRQGPAAAAPALDTLPAPTSLVLSQVTSSSIRLSWTPAPRHPLKYLIVWRASRGGTPREVVVEGPAASTELHNLASRTEYLVSVFPIYEGGVGEGLRGLVTTAPLPPPRALTLAAVTPRTVHLTWQPSAGATHYLVRCSPASPKGEEEEREVQVGRPEVLLDGLEPGRDYEVSVQSLRGPEGSEARGIRARTPTLAPPRHLGFSDVSHDAARVFWEGAPRPVRLVRVTYVSSEGGHSGQRLLGTPPRPRWGLSLPPPPTLSVSPASTLGVAPLR

SEQ ID NO: 21321 - protein, 125 aa, Homo sapiens
LVEGAQQTWCERDGSQGLDLPWRVPGRRGVRGMVHRAWTCHGGCPADVVGERWLMRLGPAVEGAQQTWYERDGSRGLDLVEGARQTCERDGSQGLDLPWRVPSRRGVRGTAHEAWTCCGGCPAGG

SEQ ID NO: 21322 - protein, 544 aa, Homo sapiens
LVFEVAPPGSTLLPNSPAATRGPSLARLCALVDLCLGCSRCTQRLNESTYVLRRVEHDCSREILLARFKQATKSKVWRVVGCRPTFPRPLCYQVCHYYSPGLGCRRHRNRCTFARSREEALVWTFERQHNLQRLWLKAEVQGSGAQGGAGRAADAILTEFGGRFELLCSLCFRRCPPCICRVDPQGQCPEHGACPSLLAHVSAEGRRKQQFVVVRPRPRAGQPPAYCRFVGRGQPCWRGESRCQFAHSAVEMAVWEAEQLGGLQRGDLLTPPAPDGDGRTAPLGQPPGAQLYCPACLVTCHSQEAFENHCASSEHAQMVAFDQALPWEHRSPPPGLSKFELCPKPDLCEYGDACTKAHSAQELQEWVRRTQAVELRGQAAWQDGLVPYQERLLAEYQRSSSEVLVLAETLDGVRVTCNQPLMYQAQERKTQYSWTFAVHSEVSGEQLRLGGGSPGEVVTSARADVNSLGHGANTEALPLSTCVTCSRSLSLSASVSSPRDRGPGQSHLGRVILWSIWVKTRIWPGAVVHACNPSTLGDRGRWIT

SEQ ID NO: 21323 - protein, 101 aa, Homo sapiens
LVPEAPGRALPAPRGRPGRGTMVSGRTAPGSSAHARQGGTFRPPEAGAGSVGLCAGFLPLHRRTGSPDLSRCHRTPLCLLSPAACLQDPGFRIRGPKLVGK

SEQ ID NO: 21324 - protein, 733 aa, Homo sapiens
LLPLATLSPFPVCLENPHIIDKHQIWVGVVPRGPDGAQLSSAFDRRFSEECLSSLGKALGNIARVVPYGLLIFFPSYPVMEKSLEFWRARDLARKMEALKPLFVEPRSKGSFSETISAYYARVAAPGSTGATFLAVCRGKASEGLDFSDTNGRGVIVTGLPYPPRMDPRVVLKMQFLDEMKGQGGAGGQFLSGQEWYRQQASRAVNQAIGRVIRHRQDYGAVFLCDHRFAFADARAQLPSWVRPHVRVYDNFGHVIRDVAQFFRVAERTMPAPAPRATAPSVRGEDAVSEAKSPGPFFSTRKAKSLDLHVPSLKQRSSGSPAAGDPESSLCVEYEQEPVPARQRPRGLLAALEHSEQRAGSPGEEQAHSCSTLSLLSEKRPAEEPRGGRKKIRLVSHPEEPVAGAQTDRAKLFMVAVKQELSQANFATFTQALQDYKGSDDFAALAACLGPLFAEDPKKHNLLQGFYQFVRPHHKQQFEEVCIQLTGRGCGYRPEHSIPRRQRAQPVLDPTGRTAPDPKLTVSTAAAQQLDPQEHLNQGRPHLSPRPPPTGDPGSQPQWGSGVPRAGKQGQHAVSAYLADARRALGSAGCSQLLAALTAYKQDDDLDKVLAVLAALTTAKPEDFPLLHRFSMFVRPHHKQRFSQTCTDLTGRPYPGMEPPGPQEERLAVPPVLTHRAPQPGPSRSEKTGKTQSKISSFLRQRPAGTVGAGGEDAGPSQSSGPPHGPAASEWGL

SEQ ID NO: 21325 - protein, 151 aa, Homo sapiens
MAAAALTSLSTSPLLLGAPVAAFSPEPGLEPWKEALVRPPGSYSSSSNSGDWGWDLASDQSSPSTPSPPLPPEAAHFLFGEPTLRKRKVSLGAAPREGRVWRLSLTLAPVAAEPGPGHVPVSVEELREGAEHGVGDAETHPPGAPGEAGRA

SEQ ID NO: 21326 - protein, 17 aa, Homo sapiens
MGFCSMSVLWTFRGMTA

SEQ ID NO: 21327 - protein, 217 aa, Homo sapiens
VLPLNCWPHRDKETSRDEFIFYSKRLMRLLIEHALSFLPFQDCVVQTPQGQDYAGKCYAGKQITGVSILRAGETMEPALRAVCKDVRIGTILIQTNQLTGEPELHYLRLPKDISDDHVILMDCTVSTGAAAMMAVRVLLDHDVPEDKIFLLSLLMAEMGVHSVAYAFPRVRIITTAVDKRVNDLFRIIPGIGNFGDRYFGTDAVPDGSDEEEVAYTG

SEQ ID NO: 21328 - protein, 947 aa, Homo sapiens
LVVAATMNKKKKPFLGMPAPLGYVPGLGRGATGFTTRSDIGPARDANDPVDDRHAPPGKRTVGDQMKKNQAADDDDEDLNDTNYDEFNGYAGSLFSSGPYEKDDEEADAIYAALDKRMDERRKERREQREKEEIEKYRMERPKIQQQFSDLKRKLAEVTEEEWLSIPEVGDARNKRQRNPRYEKLTPVPDSFFAKHLQTGENHTSVDPRQTQFGGLNTPYPGGLNTPYPGGMTPGLMTPGTGELDMRKIGQARNTLMDMRLSQVSDSVSGQTVVDPKGYLTDLNSMIPTHGGDINDIKKARLLLKSVRETNPHHPPAWIASARLEEVTGKLQVARNLIMKGTEMCPKSEDVWLEAARLQPGDTAKAVVAQAVRHLPQSVRIYIRAAELETDIRAKKRVLRKALEHVPNSVRLWKAAVELEEPEDARIMLSRAVECCPTSVELWLALARLETYENARKVLNKARENIPTDRHIWITAAKLEEANGNTQMVEKIIDRAITSLRANGVEINREQWIQDAEECDRAGSVATCQAVMRAVIGIGIEEEDRKHTWMEDADSCVAHNALECARAIYAYALQVFPSKKSVWLRAAYFEKNHGTRESLEALLQRAVAHCPKAEVLWLMGAKSKWLAGDVPAARSILALAFQANPNSEEIWLAAVKLESENDEYERARRLLAKARSSAPTARVFMKSVKLEWVQDNIRAAQDLCEEALRHYEDFPKLWMMKGQIEEQKEMMEKAREAYNQGLKKCPHSTPLWLLLSRLEEKIGQLTRARAILEKSRLKNPKNPGLWLESVRLEYRAGLKNIANTLMAKALQECPNSGILWSEAIFLEARPQRRTKSVDALKKCEHDPHVLLAVAKLFWSQRKITKAREWFHRTVKIDSDLGDAWAFFYKFELQHGTEEQQEEVRKRCESAEPRHGELWCAVSKDIANWQKKIGDILRLVAGRIKNTF

SEQ ID NO: 21329 - protein, 58 aa, Homo sapiens
MKSQVDRQVQRSLQTSSGPGARGRKRTDLVGSLSHQSGPPLLPSNSADRPTVPPLFAG

SEQ ID NO: 21330 - protein, 17 aa, Homo sapiens
VLMSGIYSGWKIAVLLA

SEQ ID NO: 21331 - protein, 442 aa, Homo sapiens
LPRQPHAAGEAGARSPARAAAGSDASSPAERGLGGGAEGAEVPPPPRASRERARRGEPGTRSESRLPAAAAHGTAATMALLLCFVLLCGVVDFARSLSITTPEEMIEKAKGETAYLPCKFTLSPEDQGPLDIEWLISPADNQKVDQVIILYSGDKIYDDYYPDLKGRVHFTSNDLKSGDASINVTNLQLSDIGTYQCKVKKAPGVANKKIHLVVLVKPSGARCYVDGSEEIGSDFKIKCEPKEGSLPLQYEWQKLSDSQKMPTSWLAEMTSSVISVKNASSEYSGTYSCTVRNRVGSDQCLLRLNVVPPSNKAGLIAGAIIGTLLALALIGLIIFCCRKKRREEKYEKEVHHDIREDVPPPKSRTSTARSYIGSNHSSLGSMSPSNMEGYSKTQYNQVPSEDFERTPQSPTLPPAKVAAPNLSRMGAIPVMIPAQSKDGSIV

SEQ ID NO: 21332 - protein, 331 aa, Homo sapiens
LRAALGLRSLVCALVRPPVLSTRAWPPDDAGAARAGRGSLRSLLPSAGPLRRSPQFPARTRSGPPNLRPKSGGGSGGKKMKNEIAAVVFFFTRLVRKHDKLKKEAVERFAEKLTLILQEKYKNHWYPEKPSKGQAYRCIRVNKFQRVDPDVLKACENSCILYSDLGLPKELTLWVDPCEVCCRYGEKNNAFIVASFENKDENKDEISRKVTRALDKVTSDYHSGSSSSDEETSKEMEVKPSSVTAAASPVYQISELIFPPLPMWHPLPRKKPGMYRGNGHQNHYPPPVPFGYPNQGRKNKPYRPIPVTWVPPPGMHCDRNHWINPHMLAPH

SEQ ID NO: 21333 - protein, 95 aa, Homo sapiens
LRAALGLRSLVCALVRPPVLSTRAWPPDDAGAARAGRGSLRSLLPSAGPLRRSPQFPARTRSGPPNLRPKSGGGSGAVSRGALWNKVELEEQPPR

SEQ ID NO: 21334 - protein, 362 aa, Homo sapiens
MVWPWVAMASRWGPLIGLAPCCLWLLGAVLLMDASARPANHSSTRERVANREENEILPPDHLNGVKLEMDGHLNRGFHQEVFLGKDLGGFDEDAEPRRSRRKLMVIFSKVDVNTDRKISAKEMQRWIMEKTAEHFQEAMEESKTHFRAVDPDGDGHVSWDEYKVKFLASKGHSEKEVADAIRLNEELKVDEETQEVLENLKDRWYQADSPPADLLLTEEEFLSFLHPEHSRGMLRFMVKEIVRDLDQDGDKQLSVPEFISLPVGTVENQQGQDIDDNWVKDRKKEFEELIDSNHDGIVTAEELESYMDPMNEYNALNEAKQMIAVADENQNHHLEPEEVLKYSEFFTGSKLVDYARSVHEEF

SEQ ID NO: 21335 - protein, 839 aa, Homo sapiens
LNMSLLLSFYLLGLLVSSGQALLQVTISLSKVELSVGESKFFTCTAIGEPESIDWYNPQGEKIISTQRVVVQKEGVRSRLTIYNANIEDAGIYRCQATDAKGQTQEATVVLEIYQKLTFREVVSPQEFKQGEDAEVVCRVSSSPAPAVSWLYHNEEVTTISDNRFAMLANNNLQILNINKSDEGIYRCEGRVEARGEIDFRDIIVIVNVPPAISMPQKSFNATAERGEEMTFSCRASGSPEPAISWFRNGKLIEENEKYILKGSNTELTVRNIINSDGGPYVCRATNKAGEDEKQAFLQVFVQPHIIQLKNETTYENGQVTLVCDAEGEPIPEITWKRAVDGFTFTEGDKSLDGRIEVKGQHGSSSLHIKDVKLSDSGRYDCEAASRIGGHQKSMYLDIEYAPKFISNQTIYYSWEGNPINISCDVKSNPPASIHWRRDKLVLPAKNTTNLKTYSTGRKMILEIAPTSDNDFGRYNCTATNHIGTRFQEYILALADVPSSPYGVKIIELSQTTAKVSFNKPDSHGGVPIHHYQVDVKEVASEIWKIVRSHGVQTMVVLNNLEPNTTYEIRVAAVNGKGQGDYSKIEIFQTLPVREPSPPSIHGQPSSGKSFKLSITKQDDGGAPILEYIVKYRSKDKEDQWLEKKVQGNKDHIILEHLQWTMGYEVQITAANRLGYSEPTVYEFSMPPKPNIIKDTLFNGLGLGAVIGLGVAALLLILVVTDVSCFFIRQCGLLMCITRRMCGKKSGSSGKSKELEEGKAAYLKDGSKEPIVEMRTEDERVTNHEDGSPVNEPNETTPLTEPEKLPLKEEDGKEALNPETIEIKVSNDIIQSKEDDSKA

SEQ ID NO: 21336 - protein, 30 aa, Homo sapiens
LVLVPKQIHRPREQNRGLRNNTTHLQPLKL

SEQ ID NO: 21337 - protein, 18 aa, Homo sapiens
MYIFFCMLFGCEELSLLF

SEQ ID NO: 21338 - protein, 127 aa, Homo sapiens
VSVDRLKRRPIMHCDGGISMILQRLFRFSSVIRSAVSVHLRRNIGVTAVAFNKELDPIQKLFVDKIREYKSKRQTSGGPVDASSEYQQELERELFKLKQMFGNADMNTFPTFKFEDPKFEVIEKPQA

SEQ ID NO: 21339 - protein, 977 aa, Homo sapiens
LLRAVSPGAPMQRAVPEGFGRRKLGSDMGNAERAPGSRSFGPVPTLLLLAAALLAVSDALGRPSEEDEELVVPELERAPGHGTTRLRLHAFDQQLDLELRPDSSFLAPGFTLQNVGRKSGSETPLPETDLAHCFYSGTVNGDPSSAAALSLCEGVRGAFYLLGEAYFIQPLPAASERLATAAPGEKPPAPLQFHLLRRNRQGDVGGTCGVVDDEPRPTGKAETEDEDEGTEGEDEGAQWSPQDPALQGVGQPTGTGSIRKKRFVSSHRYVETMLVADQSMAEFHGSGLKHYLLTLFSVAARLYKHPSIRNSVSLVVVKILVIHDEQKGPEVTSNAALTLRNFCNWQKQHNPPSDRDAEHYDTAILFTRQDLCGSQTCDTLGMADVGTVCDPSRSCSVIEDDGLQAAFTTAHELGHVFNMPHDDAKQCASLNGVNQDSHMMASMLSNLDHSQPWSPCSAYMITSFLDNGHGECLMDKPQNPIQLPGDLPGTSYDANRQCQFTFGEDSKHCPDAASTCSTLWCTGTSGGVLVCQTKHFPWADGTSCGEGKWCINGKCVNKTDRKHFDTPFHGSWGMWGPWGDCSRTCGGGVQYTMRECDNPVPKNGGKYCEGKRVRYRSCNLEDCPDNNGKTFREEQCEAHNEFSKASFGSGPAVEWIPKYAGVSPKDRCKLICQAKGIGYFFVLQPKVVDGTPCSPDSTSVCVQGQCVKAGCDRIIDSKKKFDKCGVCGGNGSTCKKISGSVTSAKPGYHDIITIPTGATNIEVKQRNQRGSRNNGSFLAIKAADGTYILNGDYTLSTLEQDIMYKGVVLRYSGSSAALERIRSFSPLKEPLTIQVLTVGNALRPKIKYTYFVKKKKESFNAIPTFSAWVIEEWGECSKSCELGWQRRLVECRDINGQPASECAKEVKPASTRPCADHPCPQWQLGEWSSCSKTCGKGYKKRSLKCLSHDGGVLSHESCDPLKKPKHFIDFCTMAECS

SEQ ID NO: 21340 - protein, 180 aa, Homo sapiens
MIHTLMWVLDCFLGHVFNMPHDDAKQCASLNGVNQDSHMMASMLSNLDHSQPWSPCSAYMITSFLDNGHGECLMDKPQNPIQLPGDLPGTSYDANRQCQFTFGEDSKHCPDAASTCSTLWCTGTSGGVLVCQTKHFPWADGTSCGEGKWCINGKCVNKTDRKHFDVSFSTETHSELKRTK

SEQ ID NO: 21341 - protein, 54 aa, Homo sapiens [sequence omitted]

SEQ ID NO: 21342 - protein, 64 aa, Homo sapiens
LASTPSLSIRHQEEDGAGCPAQRPMRGCSYGLCRRGTCLLHSYVPTFAPCNHPLCLRLLFCVSK

SEQ ID NO: 21343 - protein, 494 aa, Homo sapiens
LCIETYKLARSLPKPLVQHMDQMVQHPAAKMIVMASHMQEQEVGDGTNFVLVFAGALLELAEELLRIGLSVSEVIEGYEIACRKAHEILPNLVCCSAKNLRDIDEVSSLLRTSIMSKQYGNEVFLAKLIAQACVSIFPDSGHFNVDNIRVCKILGSGISSSSVLHGMVFKKETEGDVTSVKDAKIAVYSCPFDGMITETKGTVLIKTAEELMNFSKGEENLMDAQVKAIADTGANVVVTGGKVADMALHYANKYNIMLVRLNSKWDLRRLCKTVGATALPRLTPPVLEEMGHCDSVYLSEVGDTQVVVFKHEKEDGAISTIVLRGSTDNLMDDIERAVDDGVNTFKVLTRDKRLVPGGGATEIELAKQITSYGETCPGLEQYAIKKFAEAFEAIPRALAENSGVKANEVISKLYAVHQEGNKNVGLDIEAEVPAVKDMLEAGILDTYLGKYWAIKLATNAAVTVLRVDQIIMAKPAGGPKPPSGKKDWDDDQND

SEQ ID NO: 21344 - protein, 534 aa, Homo sapiens
LKERNEHFSGLEEAVYRNIQACKELAQTTRTAYGPNGMNKMVINHLEKLFVTNDAATILRELEVQHPAAKMIVMASHMQEQEVGDGTNFVLVFAGALLELAEELLRIGLSVSEVIEGYEIACRKAHEILPNLVCCSAKNLRDIDEVSSLLRTSIMSKQYGNEVFLAKLIAQACVSIFPDSGHFNVDNIRVCKILGSGISSSSVLHGMVFKKETEGDVTSVKDAKIAVYSCPFDGMITETKGTVLIKTAEELMNFSKGEENLMDAQVKAIADTGANVVVTGGKVADMALHYANKYNIMLVRLNSKWDLRRLCKTVGATALPRLTPPVLEEMGHCDSVYLSEVGDTQVVVFKHEKEDGAISTIVLRGSTDNLMDDIERAVDDGVNTFKVLTRDKRLVPGGGATEIELAKQITSYGETCPGLEQYAIKKFAEAFEAIPRALAENSGVKANEVISKLYAVHQEGNKNVGLDIEAEVPAVKDMLEAGILDTYLGKYWAIKLATNAAVTVLRVDQIIMAKPAGGPKPPSGKKDWDDDQND

SEQ ID NO: 21345 - protein, 550 aa, Homo sapiens
LAMALHVPKAPGFAQMLKEGAKHFSGLEEAVYRNIQACKELAQTTRTAYGPNGMNKMVINHLEKLFVTNDAATILRELEVQHPAAKMIVMASHMQEQEVGDGTNFVLVFAGALLELAEELLRIGLSVSEVIEGYEIACRKAHEILPNLVCCSAKNLRDIDEVSSLLRTSIMSKQYGNEVFLAKLIAQACVSIFPDSGHFNVDNIRVCKILGSGISSSSVLHGMVFKKETEGDVTSVKDAKIAVYSCPFDGMITETKGTVLIKTAEELMNFSKGEENLMDAQVKAIADTGANVVVTGGKVADMALHYANKYNIMLVRLNSKWDLRRLCKTVGATALPRLTPPVLEEMGHCDSVYLSEVGDTQVVVFKHEKEDGAISTIVLRGSTDNLMDDIERAVDDGVNTFKVLTRDKRLVPGGGATEIELAKQITSYGETCPGLEQYAIKKFAEAFEAIPRALAENSGVKANEVISKLYAVHQEGNKNVGLDIEAEVPAVKDMLEAGILDTYLGKYWAIKLATNAAVTVLRVDQIIMAKPAGGPKPPSGKKDWDDDQND

SEQ ID NO: 21346 - protein, 191 aa, Homo sapiens
LAMALHVPKAPGFAQMLKEGAKHFSGLEEAVYRNIQACKELAQTTRTAYGPNGMNKMVINHLEKLFVTNDAATILRELEVQHPAAKMIVMASHMQEQEVGDGTNFVLVFAGALLELAEELLRIGLSVSEVIEGYEIACRKAHEILPNLVCCSAKNLRDIDEVSSLLRTSIMSKQYGNEVFLAKLIAQACGK

SEQ ID NO: 21347 - protein, 90 aa, Homo sapiens
LAMALHVPKAPGFAQMLKEGAKHFSGLEEAVYRNIQACKELAQTTRTAYGPNGTASCCKNDCNGFSYARARSWRWHKLCSGICWSSPGIS

SEQ ID NO: 21348 - protein, 93 aa, Homo sapiens
VLGLQYFSFMLCNKFGHVGGQSKGQQVGYWRLDAHSEAKVYYCARGNPQLPSGLSVAAMQQVQPGLSLSLYSTKATTGQGSGWLWVTQVQTLN

SEQ ID NO: 21349 - protein, 132 aa, Homo sapiens
MLCNKFGHVGGQSKGQQVGYWRLDAHSEAKVYYCARGNPQLPSGLTFVTFLDPIRETLFIISFPNYEDHLGLTEDACFFLFPNALSTSADCRLSVAAMQQVQPGLSLSLYSTKATTGQGSGWLWVTQVQTLN

SEQ ID NO: 21350 - protein, 106 aa, Homo sapiens
LAMFSLWIPCLRGTIMCCLEEKPRDHGKLTQASGNYATVISHNPETKKSRVKLPSGSKKVTSSANRAVVGVVAGGGQIDKPILKAGWAYHRYKAKRNCWPQVRGGV

SEQ ID NO: 21351 - protein, 38 aa, Homo sapiens
MATKAVCVLKGDGPVQGIINFEQKRRRFTMLARMVSIC

SEQ ID NO: 21352 - protein, 61 aa, Homo sapiens
MGRADTPRHPPPPAAGFGVHRGAFLIPVALRVLLAGRTPRPFTPGLADPRRLGPRRVQAAQ

SEQ ID NO: 21353 - protein, 22 aa, Homo sapiens
LFCYLLGLLLWKPRKIIKNATP

SEQ ID NO: 21354 - protein, 573 aa, Homo sapiens
LRVREHVTGGICGGSQMMVVLLGATTLVLVAVAPWVLSAAAGGKNLKSPQKVEVDIIDDNFILRWNRSDESVGNVTFSFDYQKTGMDNWIKLSGCQNITSTKCNFSSLKLNVYEEIKLRIRAEKENTSSWYEVDSFTPFRKAQIGPPEVHLEAEDKAIVIHISPGTKDSVMWALDGLSFTYSLVIWKNSSGVEERIENIYSRHKIYKLSPETTYCLKVKAALLTSWKIGVYSPVHCIKTTVENELPPPENIEVSVQNQNYVLKWDYTYANMTFQVQWLHAFLKRNPGNHLYKWKQIPDCENVKTTQCVFPQNVFQKGIYLLRVQASDGNNTSFWSEEIKFDTEIQAFLLPPVFNIRSLSDSFHIYIGAPKQSGNTPVIQDYPLIYEIIFWENTSNAERKIIEKKTDVTVPNLKPLTVYCVKARAHTMDEKLNKSSVFSDAVCEKTKPGNTSKIWLIVGICIALFALPFVIYAAKVFLRCINYVFFPSLKPSSSIDEYFSEQPLKNLLLSTSEEQIEKCFIIENISTIATVEETNQTDEDHKKYSSQTSQDSGNYSNEDESESKTSEELQQDFV

SEQ ID NO: 21355 - protein, 18 aa, Homo sapiens
LLFAWWFFIMDLAQKKNC

SEQ ID NO: 21356 - protein, 1037 aa, Homo sapiens
VAPSSVSTGICIRERIFQPPPPLAYRTMAARVLIIGSGGREHTLAWKLAQSHHVKQVLVAPGNAGTACSEKISNTAISISDHTALAQFCKEKKIEFVVVGPEAPLAAGIVGNLRSAGVQCFGPTAEAAQLESSKRFAKEFMDRHGIPTAQWKAFTKPEEACSFILSADFPALVVKASGLAAGKGVIVAKSKEEACKAVQEIMQEKAFGAAGETIVIEELLDGEEVSCLCFTDGKTVAPMPPAQDHKRLLEGDGGPNTGGMGAYCPAPQVSNDLLLKIKDTVLQRTVDGMQQEGTPYTGILYAGIMLTKNGPKVLEFNCRFGDPECQVILPLLKSDLYEVIQSTLDGLLCTSLPVWLENHTALTVVMASKGYPGDYTKGVEITGFPEAQALGLEVFHAGTALKNGKVVTHGGRVLAVTAIRENLISALEEAKKGLAAIKFEGAIYRKDVGFRAIAFLQQPRSLTYKESGVDIAAGNMLVKKIQPLAKATSRSGCKVDLGGFAGLFDLKAAGFKDPLLASGTDGVGTKLKIAQLCNKHDTIGQDLVAMCVNDILAQGAEPLFFLDYFSCGKLDLSVTEAVVAGIAKACGKAGCALLGGETAEMPDMYPPGEYDLAGFAVGAMERDQKLPHLERITEGDVVVGIASSGLHSNGFSLVRKIVAKSSLQYSSPAPDGCGDQTLGDLLLTPTRIYSHSLLPVLRSGHVKAFAHITGGGLLENIPRVLPEKLGVDLDAQTWRIPRVFSWLQQEGHLSEEEMARTFNCGVGAVLVVSKEQTEQILRDIQQHKEEAWVIGSVVARAEGSPRVKVKNLIESMQINGSVLKNGSLTNHFSFEKKKARVAVLISGTGSNLQALIDSTREPNSSAQIDIVISNKAAVAGLDKAERAGIPTRVINHKLYKNRVEFDSAIDLVLEEFSIDIVCLAGFMRILSGPFVQKWNGKMLNIHPSLLPSFKGSNAHEQALETGVTVTGCTVHFVAEDVDAGQIILQEAVPVKRGDTVATLSERVKLAEHKIFPAALQLVASGTVQLGENGKICWVKEE

SEQ ID NO: 21357 - protein, 333 aa, Homo sapiens
MHPGENFSAPAPTGFIFLWNFCFTDRTMAARVLIIGSGGREHTLAWKLAQSHHVKQVLVAPGNAGTACSEKISNTAISISDHTALAQFCKEKKIEFVVVGPEAPLAAGIVGNLRSAGVQCFGPTAEAAQLESSKRFAKEFMDRHGIPTAQWKAFTKPEEACSFILSADFPALVVKASGLAAGKGVIVAKSKEEACKAVQEIMQEKAFGAAGETIVIEELLDGEEVSCLCFTDGKTVAPMPPAQDHKRLLEGDGGPNTGGMGAYCPAPQVSNDLLLKIKDTVLQRTVDGMQQEGTPYTGILYAGIMLTKNGPKVLEFNCRFGDPECQVGNPPTS

SEQ ID NO: 21358 - protein, 98 aa, Homo sapiens [sequence omitted]

SEQ ID NO: 21359 - protein, 1451 aa, Homo sapiens
MMSSYERSMMSYERSMMSPMAERSMMSAYERSMMSAYERSMMSPMAERSMMSAYERSMMSAYERSMMSPMADRSMMSMGADRSMMSSYSAADRSMMSSYSAADRSMMSSYTADRSMMSMAADSYTDSYTDTYTEAYMVPPLPPEEPPTMPPLPPEEPPMTPPLPPEEPPEGPALPTEQSALTAENTWPTEVPSSPSEESVSQPEPPVSQSEISEPSAVPTDYSVSASDPSVLVSEAAVTVPEPPPEPESSITLTPVESAVVAEEHEVVPERPVTCMVSETPAMSAEPTVLASEPPVMSETAETFDSMRASGHVASEVSTSLLVPAVTTPVLAESILEPPAMAAPESSAMAVLESSAVTVLESSTVTVLESSTVTVLEPSVVTVPEPPVVAEPDYVTIPVPVVSALEPSVPVLEPAVSVLQPSMIVSEPSVSVQESTVTVSEPAVTVSEQTQVIPTEVAIESTPMILESSIMSSHVMKGINLSSGDQNLAPEIGMQEIALHSGEEPHAEEHLKGDFYESEHGINIDLNINNHLIAKEMEHNTVCAAGTSPVGEIGEEKILPTSETKQRTVLDTYPGVSEADAGETLSSTGPFALEPDATGTSKGIEFTTASTLSLVNKYDVDLSLTTQDTEHDMVISTSPSGGSEADIEGPLPAKDIHLDLPSNNNLVSKDTEEPLPVKESDQTLAALLSPKESSGGEKEVPPPPKETLPDSGFSANIEDINEADLVRPLLPKDMERLTSLRAGIEGPLLASDVGRDRSAASPVVSSMPERASESSSEEKDDYEIFVKVKDTHEKSKKNKNRDKGEKEKKRDSSLRSRSKRSKSSEHKSRKRTSESRSRARKRSSKSKSHRSQTRSRSRSRRRRRSSRSRSKSRGRRSVSKEKRKRSPKHRSKSRERKRKRSSSRDNRKTVRARSRTPSRRSRSHTPSRRRRSRSVGRRRSFSISPSRRSRTPSRRSRTPSRRSRTPSRRSRTPSRRSRTPSRRSRTPSRRRRSRSVVRRRSFSISPVRLRRSRTPLRRRFSRSPIRRKRSRSSERGRSPKRLTDLDKAQLLEIAKANAAAMCAKAGVPLPPNLKPAPPPTIEEKVAKKSGGATIEELTEKCKQIAQSKEDDDVIVNKPHVSDEEEEEPPFYHHPFKLSEPKPIFFNLNIAAAKPTPPKSQVTLTKEFPVSSGSQHRKKEADSVYGEWVPVEKNGEENKDDDNVFSSNLPSEPVDISTAMSERALAQKRLSENAFDLEAMSMLNRAQERIDAWAQLNSIPGQFTGSTGVQVLTQEQLANTGAQAWIKKDQFLRAAPVTGGMGAVLMRKMGWREGEGLGKNKEGNKEPILVDFKTDRKGLVAVGERAQKRSGNFSAAMKDLSGKHPVSALMEICNKRRWQPPEFLLVHDSGPDHRKHFLFRVLINGSAYQPSFASPNKKHAKATAATVVLQAMGLVPKDLMANATCFRSASRR

SEQ ID NO: 21360 - protein, 414 aa, Homo sapiens
LVVLGAGPRLFLRPRAEHDGRCSSETGCHGVLDSLASPTPPFRSDERPDQWEQGAGSLTKDWKVAVVKVQAVGAAQRQVTMKGLYFQQSSTDEEITFVFQEKEDLPVTEDNFVKLQVKACALSQINTKLLAEMKMKKDLFPVGREIAGIVLDGILPLDSEDPGLCEVVRVHEHYLVHKPEKVTWTEAAGSIRDGVRAYTALHYLSHLSPGKSVLIMDGASAFGTIAIQLAHHRGAKVISTACSLEDKQCLERFRPPIARVIDVSNGKVHVAESCLEETGGLGVDIVLDAGVRLYSKDDEPAVKLQLLPHKHDIITLLGVGGHWVTTEENLQLDPPDSHCLFLKGATLAFLNDEVWNLSNVQQGKYLCILKDVMEKLSTGVFRPQLDEPIPLYEAKVSMEAVQKNQGRKKQVVQF

SEQ ID NO: 21361 - protein, 278 aa, Homo sapiens
LVVLGAGPRLFLRPRAEHDGRCSSETGCHGVLDSLASPTPPFRSDERPDQWEQGAGSLTKDWKVAVVKVQAVGAAQRQVTMKGLYFQQSSTDEEITFVFQEKEDLPVTEDNFVKLQVKACALSQINTKLLAEMKMKKDLFPVGREIAGIVLDVGSKVSFFQPDDEVVGILPLDSEDPGLCEVVRVHEHYLVHKPEKVTWTEAAGSIRDGVRAYTALHYLSHLSPGKSVLIMDGASAFGTIAIQLAHHRGAKVISTACSLEDKQCLERFRPPIENSTIA

SEQ ID NO: 21362 - protein, 247 aa, Homo sapiens
MVLSCFFFIGMGGIASMPPLTAVAPVPMGSIPVVGMSPTLVSSVPTAAVPPLANGAPPVIQPLPAFAHPAATLPKSSSFSRSGPGSQLNTKLQKAQSFDVASVPPVAEWAVPQSSRLKYRQLFNSHDKTMSGHLTGPQARTILMQSSLPQAQLASIWNLSDIDQDGKLTAEEFILAMHLIDVAMSGQPLPPVLPPEYIPPSFRRVRSGSGISVISSTSVDQRLPEEPVLEDEQQQLEKKLPVAVFLV

SEQ ID NO: 21363 - protein, 47 aa, Homo sapiens
LAPLPRHFTSNLALFSSLILIKMTFTCPESKRGLQHKILLQQASINH

SEQ ID NO: 21364 - protein, 47 aa, Homo sapiens
MYIFIYTCTYISSTTFGSLSSCFSGLKPVLHDKSGLVTGDNCVLLGL

SEQ ID NO: 21365 - protein, 48 aa, Homo sapiens
MFSTSFLAANFSPIVFLLQQGEKVLCGPRRAVKLRVRGSVRGRMCVRV

SEQ ID NO: 21366 - protein, 143 aa, Homo sapiens
LNIEILVKYLPSTDKQMDKKISILKDHGYIENLTFGWDGPSWRLLTALKLLCLEAEKFTCWKKVLLGEVISDTNEKTSLDIAQKICYYFIEETNAVLQKVSHMKDEKEALINQLTLVESLWTEELKILRASAETLHSLQTAFT

SEQ ID NO: 21367 - protein, 20 aa, Homo sapiens
MSLLPDQEKELYFRKKKLQF

SEQ ID NO: 21368 - protein, 210 aa, Homo sapiens
VRAHDRQTRAVSGTRCGAPGPEPGLFSTQVFRAPRSAMSSGIHVALVTGGNKGIGLAIVRDLCRLFSGDVVLTARDVTRGQAAVQQLQAEGLSPRFHQLDIDDLQSIRALRDFLRKEYGGLDVLVNNAGIAFKVADPTPFHIQAEVTMKTNFFGTRDVCTELLPLIKPQASCVLSAWSCLSQNPSGGKSKPLAWFTEMSIICRCLTLGPF

SEQ ID NO: 21369 - protein, 314 aa, Homo sapiens
VRAHDRQTRAVSGTRCGAPGPEPGLFSTQVFRAPRSAMSSGIHVALVTGGNKGIGLAIVRDLCRLFSGDVVLTARDVTRGQAAVQQLQAEGLSPRFHQLDIDDLQSIRALRDFLRKEYGGLDVLVNNAGIAFKVADPTPFHIQAEVTMKTNFFGTRDVCTELLPLIKPQGRVVNVSSIMSVRALKSCSPELQQKFRSETITEEELVGLMNKFVEDTKKGVHQKEGWPSSAYGVTKIGVTVLSRIHARKLSEQRKGDKILLNACCPGWVRTDMAGPKATKSPEEGAETPVYLALLPPDAEGPHGQFVSEKRVEQW

SEQ ID NO: 21370 - protein, 263 aa, Homo sapiens [sequence omitted]

SEQ ID NO: 21371 - protein, 304 aa, Homo sapiens
LGSSGRAPGGPKPGPPSTQVPRAPRSAMSSCSRVALVTGANRGIGLAIARELCRQFSGDVVLTARDVARGQAAVQQLQAEGLSPRFHQLDIDDLQSIRALRDFLRKEYGGLNVLVNNAAVAFKSDDPMPFDIKAEMTLKTNFFATRNMCNELLPIMKPHGRVVNISSLQCLRAFENCSEDLQERFHSETLTEGDLVDLMKKFVEDTKNEVHEREGWPNSPYGVSKLGVTVLSRILARRLDEKRKADRILVNACCPGPVKTDMDGKDSIRTVEEGAETPVYLALLPPDATEPQGQLVHDKVVQNW

SEQ ID NO: 21372 - protein, 68 aa, Homo sapiens
LNKWALFLVSPFILEAEHIAFVTESIWVQSENLQRSSSSETTECRSVVQAGVQWCGLGSPQPLPTGFQ

SEQ ID NO: 21373 - protein, 147 aa, Homo sapiens
LQDYCDAIKINIFWPLLFQHQNSSVISRLHPCVDANNSRASEINLKKLQHLELMEDIVDLAKKVANDSFLIGGLLRIGCKIENKILAMEEALNWIKYAGDVTILTKLGSIDNCWPMLSIFFTECKYKCFKLLLDSVFKGVWENEICS

SEQ ID NO: 21374 - protein, 36 aa, Homo sapiens
LCVEMATTILLPHPTTKREAVSLDNPEVSVLQSFCV

SEQ ID NO: 21375 - protein, 197 aa, Homo sapiens
LLPKFLLRGHLNSTNCVITQPLTGELVVESSEAAIRSVELQLVRVETCGCAEGYARDATEIQNIQIADGDVCRGLSVPIYMVFPRLFTCPTLETTNFKVGKWHSPPSPHGPMGRAAQRQGLLWVTELRTCRPSVPQCQGLPQAIQLRACCPSAAQQNLVKELLCRTGDTPTGSPGACGTSTVTWGNTQTHISVDMGR

SEQ ID NO: 21376 - protein, 45 aa, Homo sapiens
LYNLKYLLISIFFFDMSCIEMCASVSVIATTLVTHSLTKIPNFNI

SEQ ID NO: 21377 - protein, 210 aa, Homo sapiens
LCARVCGCVRVSVCLCGDSGAGGSGSPGGGAAAAARAPALLAAQVRSARHFVRFTKSSSGRSRRQQPPLGARPRRRRPLRRAGRAAPPPGIGARGLRYLPGRGLSPPRPRAPLEPRAEERLSRLRRGQEPERRGRREAAGAALAAEAAAGARRGSPRLRLTGGSGASAPPSSRRRDFSMQTFICSACTVIFIPCCWPSDGWTDAPFTSVQ

SEQ ID NO: 21378 - protein, 14 aa, Homo sapiens
LNRYKRAKLIFFLT

SEQ ID NO: 21379 - protein, 32 aa, Homo sapiens
LCPFLLFTFSFAFSRHVVSPPFLLHKDVFCSS

SEQ ID NO: 21380 - protein, 92 aa, Homo sapiens
LLVLSFVFGCNVLRILLPSFSSFMSRVLQKDAEQESQMRAEIQDMKQELSTVNMMDEFARYARLERKINKMTDKLKTHGTVSLAAWRLHESG

SEQ ID NO: 21381 - protein, 114 aa, Homo sapiens
LLVLSFVFGCNVLRILLPSFSSFMSRVLQKDAEQESQMRAEIQDMKQELSTVNMMDEFARYARLERKINKMTDKLKTHVKARTAQLAKIKWVISVAFYVLQVSVLERQPGHWSW

SEQ ID NO: 21382 - protein, 677 aa, Homo sapiens
LLLRLFAMSLADLTKTNIDEHFFGVALENNRRSAACKRSPGTGDFSRNSNASNKSVDYSRSQCSCGSLSSQYDYSEDFLCDCSEKAINRNYLKQPVVKEKEKKKYNVSKISQSKGQKEISVEKKHTWNASLFNSQIHMIAQRRDAMAHRILSARLHKIKGLKNELADMHHKLEAILTENQFLKQLQLRHLKAIGKYENSQNNLPQIMAKHQNEVKNLRQLLRKSQEKERTLSRKLRETDSQLLKTKDILQALQKLSEDKNLAEREELTHKLSIITTKMDANDKKIQSLEKQLRLNCRAFSRQLAIETRKTLAAQTATKTLQVEVKHLQQKLKEKDRELEIKNIYSHRILKNLHDTEDYPKVSSTKSVQADRKILPFTSMRHQGTQKSDVPPLTTKGKKATGNIDHKEKSTEINHEIPHCVNKLPKQEDSKRKYEDLSGEEKHLEVQILLENTGRQKDKKEDQEKKNIFVKEEQELPPKIIEVIHPERESNQEDVLVREKFKRSMQRNGVDDTLGKGTAPYTKGPLRQRRHYSFTEATENLHHGLPASGGPANAGNMRYSHSTGKHLSNREEMELEHSDSGYEPSFGKSSRIKVKDTTFRDKKSSLMEELFGSGYVLKTDQSSPGVAKGSEEPLQSKESHPLPPSQASTSHAFGDSKVTVVNSIKPSSPTEGKRKIII

SEQ ID NO: 21383 - protein, 295 aa, Homo sapiens
LLLRLFAMSLADLTKTNIDEHFFGVALENNRRSAACKRSPGTGDFSRNSNASNKSVDYSRSQCSCGSLSSQYDYSEDFLCDCSEKAINRNYLKQPVVKEKEKKKYNVSKISQSKGQKEISVEKKHTWNASLFNSQIHMIAQRRDAMAHRILSARLHKIKGLKNELADMHHKLEAILTENQFLKQLQLRHLKAIGKYENSQNNLPQIMAKHQNEVKNLRQLLRKSQEKERTLSRKLRETDSQLLKTKDILQALQKLSEDKNLAEREELTHKLSIITTKMDANDKKIQVCISGAQTV

SEQ ID NO: 21384 - protein, 96 aa, Homo sapiens
LTIPISRMRRLRHREVRGPVLGHTATGGPQNGTSGCTTAPQQRPPPGTQGMLEQYLNSMAAFRVWKPSESFPTLSRNPFFRGTHRSCQRGYLPSAK

SEQ ID NO: 21385 - protein, 653 aa, Homo sapiens
LSPARVGRAGAGGPRRPPSPAVTLAAGEGLGRCGAVAAARGGSGEELAQLGGAGWGGSAPPRPPPRPPPSPLPRASSPPASLLPWALLPSSPPPPVPVRAHPCPQPRAPAESLSRGCRTGRDRLGWARPPGPAVGMGALARALLLPLLAQWLLRAAPELAPAPFTLPLRVAAATNRVVAPTPGPGTPAERHADGLALALEPALASPAGAANFLAMVDNLQGDSGRGYYLEMLIGTPPQKLQILVDTGSSNFAVAGTPHSYIDTYFDTERSSTYRSKGFDVTVKYTQGSWTGFVGEDLVTIPKGFNTSFLVNIATIFESENFFLPGIKWNGILGLAYATLAKPSSSLETFFDSLVTQANIPNVFSMQMCGAGLPVAGSGTNGGSLVLGGIEPSLYKGDIWYTPIKEEWYYQIEILKLEIGGQSLNLDCREYNADKAIVDSGTTLLRLPQKVFDAVVEAVARASLIPEFSDGFWTGSQLACWTNSETPWSYFPKISIYLRDENSSRSFRITILPQLYIQPMMGAGLNYECYRFGISPSTNALVIGATVMEGFYVIFDRAQKRVGFAASPCAEIAGAAVSEISGPFSTEDVASNCVPAQSLSEPILWIVSYALMSVCGAILLVLIVLLLLPFRCQRRPRDPEVVNDESSLVRHRWK

SEQ ID NO: 21386 - protein, 603 aa, Homo sapiens
LSPARVGRAGAGGPRRPPSPAVTLAAGEGLGRCGAVAAARGGSGEELAQLGGAGWGGSAPPRPPPRPPPSPLPRASSPPASLLPWALLPSSPPPPVPVRAHPCPQPRAPAESLSRGCRTGRDRLGWARPPGPAVGMGALARALLLPLLAQWLLRAAPELAPAPFTLPLRVAAATNRVVAPTPGPGTPAERHADGLALALEPALASPAGAANFLAMVDNLQGDSGRGYYLEMLIGTPPQKLQILVDTGSSNFAVAGTPHSYIDTYFDTERSSTYRSKGFDVTVKYTQGSWTGFVGEDLVTIPKGFNTSFLVNIATIFESENFFLPGIKWNGILGLAYATLAKPSSSLETFFDSLVTQANIPNVFSMQMCGAGLPVAGSGTNGGSLVLGGIEPSLYKGDIWYTPIKEEWYYQIEILKLEIGGQSLNLDCREYNADKAIVDSGTTLLRLPQKVFDAVVEAVARASLLYIQPMMGAGLNYECYRFGISPSTNALVIGATVMEGFYVIFDRAQKRVGFAASPCAEIAGAAVSEISGPFSTEDVASNCVPAQSLSEPILWIVSYALMSVCGAILLVLIVLLLLPFRCQRRPRDPEVVNDESSLVRHRWK

SEQ ID NO: 21387 - protein, 24 aa, Homo sapiens
LLMTEQGREWFICHIKVKWRKGKR

SEQ ID NO: 21388 - protein, 485 aa, Homo sapiens
VRRVLFLCAILWHQIKALIKKYIQRQQTINLVVVPCNVDIATTEALSMAHEVDPEGDRTIGILTKPDLMDRGTEKSVMNVVRNLTYPLKKGYMIVKCRGQQEITNRLSLAEATKKEITFFQTHPYFRVLLEEGSATVPRLAERLTTELIMHIQKSLPLLEGQIRESHQKATEELRRCGADIPSQEADKMFFLIEKIKMFNQDIEKLVEGEEVVRENETRLYNKIREDFKNWVGILATNTQKVKNIIHEEVEKYEKQYRGKELLGFVNYKTFEIIVHQYIQQLVEPALSMLQKAMEIIQQAFINVAKKHFGEFFNLNQTVQSTIEDIKVKHTAKAENMIQLQFRMEQMVFCQDQIYSVVLKKVREEIFNPLGTPSQNMKLNSHFPSNESSVSSFTEIGIHLNAYFLETSKRLANQIPFIIQYFMLRENGDSLQKAMMQILQEKNRYSWLLQEQSETATKRRILKERIYRLTQARHALCQFSSKEIH

SEQ ID NO: 21389 - protein, 18 aa, Homo sapiens
LVSMMLLIWLQKGQLRQP

SEQ ID NO: 21390 - protein, 662 aa, Homo sapiens
MHPAAYLFNRHLLYFKLTLQRRKMVVSEVDIAKADPAAASHPLLLNGDATVAQKNPGSVAENNLCSQYEEKVRPCIDLIDSLRALGVEQDLALPAIAVIGIVTRCPLVLKLKKLVNEDKWRGKVSYQDYEIEISDASEVEKEINKAQNAIAGEGMGISHELITLEISSRDVPDLTLIDLPGITRVAVGNQPADIGYKIKTLIKKYIQRQETISLVVVPSNVDIATTEALSMAQEVDPEGDRTIGILTKPDLVDKGTEDKVVDVVRNLVFHLKKGYMIVKCRGQQEIQDQLSLSEALQREKIFFENHPYFRDLLEEGKATVPCLAEKLTSELITHICKSLPLLENQIKETHQRITEELQKYGVDIPEDENEKMFFLIDKVNAFNQDITALMQGEETVGEEDIRLFTRLRHEFHKWSTIIENNFQEGHKILSRKIQKFENQYRGRELPGFVNYRTFETIVKQQIKALEEPAVDMLHTVTDMVRLAFTDVSIKNFEEFFNLHRTAKSKIEDIRAEQEREGEKLIRLHFQMEQIVYCQDQVYRGALQKVREKELEEEKKKKSWDFGAFQSSSATDSSMEEIFQHLMAYHQEASKRISSHIPLIIQFFMLQTYGQQLQKAMLQLLQDKDTYSWLLKERSDTSDKRKFLKERLARLTQARRRLAQFPG

SEQ ID NO: 21391 - protein, 461 aa, Homo sapiens
LPRSPSQPWARILLPEQPLQTYLAIPSPSFRKPPVLSRTDYDECERKEDDCVPGTSCRNTLGSFTCSCEGGAPDFPVEYSERPCEGDSPGNETWATSPERPLTTAGTKAAFVQGTSPTPQGLPQRLNLTGAVRVLCEIEKVVVAIQKRFLQQESIPESSLYLSHPSCNVSHSNGTHVLLEAGWSECGTLMQSNMTNTVVRTTLRNDLSQEGIIHHLKILSPIYCAFQNDLLTSSGFTLEWGVYTIIEDLHGAGNFVTEMQLFIGDSPIPQNYSVSASDDVRIEVGLYRQKSNLKVVLTECWATPSSNARDPITFSFINNSCPVPNTYTNVIENGNSNKAQFKLRIFSFINDSIVYLHCKLRVCMESPGATCKINCNNFRLLQNSETSATHQMSWGPLIRSEGEPPHAEAGLGAGYVVLIVVAIFVLVAGTATLLIVRYQRMNGRYNFKIQSNNFSYQVFYE

SEQ ID NO: 21392 - protein, 675 aa, Homo sapiens
LPPCETCLSPSAMIMRLPQPHGTNASSYSAEMTEPKSVCVSVDEVVSSNMEATETDLLNGHLKKVDNNLTEAQRFSSLPRRAAVNIEFRDLSYSVPEGPWWRKKGYKTLLKGISGKFNSGELVAIMGPSGAGKSTLMNILAGYRETGMKGAVLINGLPRDLRCFRKVSCYIMQDDMLLPHLTVQEAMMVSAHLKLQEKDEGRREMVKEILTALGLLSCANTRTGSLSGGQRKRLAIALELVNNPPVMFFDEPTSGLDSASCFQVVSLMKGLAQGGRSIICTIHQPSAKLFELFDQLYVLSQGQCVYRGKVCNLVPYLRDLGLNCPTYHNPADFVMEVASGEYGDQNSRLVRAVREGMCDSDHKRDLGGDAEVNPFLWHRPSEEDSSSMEGCHSFSASCLTQFCILFKRTFLSIMRDSVLTHLRITSHIGIGLLIGLLYLGIGNEAKKVLSNSGFLFFSMLFLMFAALMPTVLTFPLEMGVFLREHLNYWYSLKAYYLAKTMADVPFQIMFPVAYCSIVYWMTSQPSDAVRFVLFAALGTMTSLVAQSLGLLIGAASTSLQVATFVGPVTAIPVLLFSGFFVSFDTIPTYLQWMSYISYVRYGFEGVILSIYGLDREDLHCDIDETCHFQKSEAILRELDVENAKLYLDFIVLGIFFISLRLIAYFVLRYKIRAER

SEQ ID NO: 21393 - protein, 151 aa, Homo sapiens
VGAELTSPLWERKTVWELDKGMQERTGAATARRESLPQANNPEQLCKQRCINEASWTMKRVLSCVPEPTVVMAARALCMLGLVLALLSSSSAEEYVGLSANQCAVPAKDRVDCGYPHVTPKECNNRGCCFDSRIPGVPWCFKPLQEAECTF

SEQ ID NO: 21394 - protein, 17 aa, Homo sapiens
LWLVAFGVSGLAVHSPR

SEQ ID NO: 21395 - protein, 33 aa, Homo sapiens
LWLVAFGVSGLAVHSPREGRRQRRMPDEDRNRD

SEQ ID NO: 21396 - protein, 563 aa, Homo sapiens
VLNCQHHLSGPSMPSETPQAEVGPTGCPHRSGPHSAKGSLEKGSPEDKEAKEPLWIRPDAPSRCTWQLGRPASESPHHHTAPAKSPKILPDILKKIGDTPMVRINKIGKKFGLKCELLAKCEFFNAGGSVKDRISLRMIEDAERDGTLKPGDTIIEPTSGNTGIGLALAAAVRGYRCIIVMPEKMSSEKVDVLRALGAEIVRTPTNARFDSPESHVGVAWRLKNEIPNSHILDQYRNASNPLAHYDTTADEILQQCDGKLDMLVASVGTGGTITGIARKLKEKCPGCRIIGVDPEGSILAEPEELNQTEQTTYEVEGIGYDFIPTVLDRTVVDKWFKSNDEEAFTFARMLIAQEGLLCGGSAGSTVAVAVKAAQELQEGQRCVVILPDSVRNYMTKFLSDRWMLQKGFLKEEDLTEKKPWWWHLRVQELGLSAPLTVLPTITCGHTIEILREKGFDQAPVVDEAGVILGMVTLGNMLSSLLAGKVQPSDQVGKVIYKQFKQIRLTDTLGRLSHILEMDHFALVVHEQIQYHSTGKSSQRQMVFGVVTAIDLLNFVAAQERDQK

SEQ ID NO: 21397 - protein, 7 aa, Homo sapiens
MYPSRIP

SEQ ID NO: 21398 - protein, 266 aa, Homo sapiens
VTSPEGVGRVGGVGSSVDGSGGGGWEMAEYLASIFGTEKDKVNCSFYFKIGACRHGDRCSRLHNKPTFSQTIALLNIYRNPQNSSQSADGLRCAVSDVEMQEHYDEFFEEVFTEMEEKYGEVEEMNVCDNLGDHLVGNVYVKFRREEDAEKAVIDLNNRWFNGQPIHAELSPVTDFREACCRQYEMGECTRGGFCNFMHLKPISRELRRELYGRRRKKHRSRSRSRERRSRSRDRGRGGGGGGGGGGGGRERDRRRSRDRERSGRF

SEQ ID NO: 21399 - protein, 144 aa, Homo sapiens
LRSEGGVCADRVRRAPEPESQPRGAGAGARARAEPEPERAAETVPPPRPRAAAARPGMEEECRVLSIQSHVIRGYVGNRAATFPLQVLGFEIDAVNSVQFSNHTETRSVSVAQAGVKWRNQLTAALTSWAEAIFLPPPPEWLGL

SEQ ID NO: 21400 - protein, 341 aa, Homo sapiens
LRSEGGVCADRVRRAPEPESQPRGAGAGARARAEPEPERAAETVPPPRPRAAAARPGMEEECRVLSIQSHVIRGYVGNRAATFPLQVLGFEIDAVNSVQFSNHTGYAHWKGQVLNSDELQELYEGLRLNNMNKYDYVLTVCDPVLGDKWDGEGSMYVPEDLLPVYKEKVVPLADIITPNQFEAELLSGRKIHSQEEALRVMDMLHSMGPDTVVITSSDLPSPQGSNYLIVLGSQRRRNPAGSVVMERIRMDIRKVDAVFVGTGDLFAAMLLAWTHKHPNNLKVACEKTVSTLHHVLQRTIQCAKAQAGEGVRPSPMQLELRMVQSKRDIEDPEIVVQATVL

SEQ ID NO: 21401 - protein, 369 aa, Homo sapiens
LRSEGGVCADRVRRAPEPESQPRGAGAGARARAEPEPERAAETVPPPRPRAAAARPGMEEECRVLSIQSHVIRGYVGNRAATFPLQVLGFEIDAVNSVQFSNHTGYAHWKGQVLNSDELQELYEGLRLNNMNKYDYVLTGYTRDKSFLAMVVDIVQELKQQNPRLVYVCDPVLGDKWDGEGSMYVPEDLLPVYKEKVVPLADIITPNQFEAELLSGRKIHSQEEALRVMDMLHSMGPDTVVITSSDLPSPQGSNYLIVLGSQRRRNPAGSVVMERIRMDIRKVDAVFVGTGDLFAAMLLAWTHKHPNNLKVACEKTVSTLHHVLQRTIQCAKAQAGEGVRPSPMQLELRMVQSKRDIEDPEIVVQATVL

SEQ ID NO: 21402 - protein, 157 aa, Homo sapiens
VPPPRPRAAAARPGMEEECRVLSIQSHVIRGYVGNRAATFPLQVLGFEIDAVNSVQFSNHTGYAHWKGQVLNSDELQELYEGLRLNNMNKYDYVLTGYTRDKSFLAMVVDIVQELKQQNPRLVYGECLSVQTCEARIVCARGQEEEGSCCTCLGDKQ

SEQ ID NO: 21403 - protein, 119 aa, Homo sapiens
VVGSPQPVLQGSARALAEPAPRWLGEQDGPCVPWKSPPGSSGHVGCCEWARGTASLSSLQVACEKTVSTLHHVLQRTIQCAKAQAGEGVRPSPMQLELRMVQSKRDIEDPEIVVQATVL

SEQ ID NO: 21404 - protein, 48 aa, Homo sapiens
LRVFWQLELFSLSFLPSDGATCVGAAVSMFMEIRGVPTVWLDCTLLPG

SEQ ID NO: 21405 - protein, 26 aa, Homo sapiens
VEGAGFCSCFCISLPKFHCVDFFPSQ

SEQ ID NO: 21406 - protein, 153 aa, Homo sapiens
LRGHRDPAGDSEAKVPPPRPLVPPARHVTPAPTWAEEPPRPLAESPRQIPSVAAKMMCGAPSATQPATAETQHIADQVRSQLEEKENKKFPVFKAVSFKSQVVAGTNYFIKVHVGDEDFVHLRVFQSLPHENKPLTLSNYQTNKAKHDELTYF

SEQ ID NO: 21407 - protein, 311 aa, Homo sapiens
LHGRGPSLAGEAAASGSGPSLCLGVCAFHPLPGSFLSPVPSGKVGRASLTWGGPEPGTPASPVCTGLGQLLVWEWQSESYVLKQQGHFNSMVALAYSPDGQYIVTGGDDGKVKVWNTLSGFCFVTFTEHSSGVTGVTFTATGYVVVTSSMDGTVRAFDLHRYRNFRTFTSPRPTQFSCVAVDASGEIVSAGAQDSFEIFVWSMQTGRLLDVLSGHEGPISGLCFNPMKSVLASASWDKTVRLWDMFDSWRTKETLALTSDGEHEAAGRSSGLGTSSMLSHPLPCSSLWVWCEPSGGKQGVAFIQTCWCGSP

SEQ ID NO: 21408 - protein, 219 aa, Homo sapiens
LGSSLGLTLHLCLALAVTFRPDGAELAVATLNSQITFWDPENAVQTGSIEGRHDLKTGRKELDKITAKHAAKGKAFTALCYSADGHSILAGGMSKFVCIYHVREQILMKRFEISCNLSLDAMEVSRQRGAGWMLLPMQVECVGLLRSALLAPWGLGHSCGACPVSKCTGPSPAPAESGREASTCLSCVWSHGPQPFWHLGPVSWKAIFPQTGLGGLILG

SEQ ID NO: 21409 - protein, 221 aa, Homo sapiens
LRHLHSRPCPPAVGRLPSAQPFTSPCRAPRPGSRWILVHLSRGGAEVQIFAPDVPQMHVIDHTKGQPSEGESRNVLTESARIARGKITDLANLSAANHDAAIFPGGFGAAKNLSTFAVDGKDCKVNKEVERVLKEFHQAGKPIGHSLKDLPGHCPGRPLKWSLRKRCRLRAPEGGPCCSRVTAGVKVSPMVSTSGSRPCQRSVPWMSAQREEPMALSSVTD

SEQ ID NO: 21410 - protein, 218 aa, Homo sapiens
LQAEPVGQEATTRARILVHLSRGGAEVQIFAPDVPQMHVIDHTKGQPSEGESRNVLTESARIARGKITDLANLSAANHDAAIFPGGFGAAKNLSTFAVDGKDCKVNKEVERVLKEFHQAGKPIGLCCIAPVLAAKVLRGVEVTVGHEQEEGGKWPYAGTAEAIKALGAKHCVKEVVEAHVDQKNKVVTTPAFMCETALHYIHDGIGAMVRKVLELTGK

SEQ ID NO: 21411 - protein, 111 aa, Homo sapiens
MHVIDHTKGQPSEGESRNVLTESARIARGKITDLANLSAANHDAAIFPGGFGAAKNLCVFELQGLPLSMWSRWEGGAPVCCPMWSVERRWEGVVIGAVSGFRVWAGHVPAL

SEQ ID NO: 21412 - protein, 103 aa, Homo sapiens
LLEPCCLSRNVLTESARIARGKITDLANLSAANHDAAIFPGGFGAAKNLCVFELQGLPLSMWSRWEGGAPVCCPMWSVERRWEGVVIGAVSGFRVWAGHVPAL

SEQ ID NO: 21413 - protein, 252 aa, Homo sapiens
LPPAHRALGAQSLGRGGSAVRADLPRPEVAPLRGLPRPKFSAPRGLRAPRSPRPEVSARTMRLGSPGLLFLLFSSLRAANFSVPVVSAPHSPSQDELTFTCTSINGYPRPNVYWINKTDNSLLDQALQNDTVFLNMRGLYDVVSVLRIARTPSVNIGCCIENVLLQQNLTVGSQTGNDIGERDKITENPVSTGEKNAATWSILAVLCLLVVVAVAIGWVCRDRCLQHSYAGAWAVSPETELTESWNLLLLLS

SEQ ID NO: 21414 - protein, 369 aa, Homo sapiens
LPPAHRALGAQSLGRGGSAVRADLPRPEVAPLRGLPRPKFSAPRGLRAPRSPRPEVSARTMRLGSPGLLFLLFSSLRADTQEKEVRAMVGSDVELSCACPEGSRFDLNDVYVYWQTSESKTVVTYHIPQNSSLENVDSRYRNRALMSPAGMLRGDFSLRLFNVTPQDEQKFHCLVLSQSLGFQEVLSVEVTLHVAANFSVPVVSAPHSPSQDELTFTCTSINGYPRPNVYWINKTDNSLLDQALQNDTVFLNMRGLYDVVSVLRIARTPSVNIGCCIENVLLQQNLTVGSQTGNDIGERDKITENPVSTGEKNAATWSILAVLCLLVVVAVAIGWVCRDRCLQHSYAGAWAVSPETELTESWNLLLLLS

SEQ ID NO: 21415 - protein, 283 aa, Homo sapiens
LLLSEVSRGPSSPRPEVSAPRGLRGPRSPPAPCGWAVLDCSSCSSAAFELNSSLENVDSRYRNRALMSPAGMLRGDFSLRLFNVTPQDEQKFHCLVLSQSLGFQEVLSVEVTLHVAANFSVPVVSAPHSPSQDELTFTCTSINGYPRPNVYWINKTDNSLLDQALQNDTVFLNMRGLYDVVSVLRIARTPSVNIGCCIENVLLQQNLTVGSQTGNDIGERDKITENPVSTGEKNAATWSILAVLCLLVVVAVAIGWVCRDRCLQHSYAGAWAVSPETELTGHV

SEQ ID NO: 21416 - protein, 362 aa, Homo sapiens
LPPAHRALGAQSLGRGGSAVRADLPRPEVAPLRGLPRPKFSAPRGLRAPRSPRPEVSARTMRLGSPGLLFLLFSSLRADTQEKEVRAMVGSDVELSCACPEGSRFDLNDVYVYWQTSESKTVVTYHIPQNSSLENVDSRYRNRALMSPAGMLRGDFSLRLFNVTPQDEQKFHCLVLSQSLGFQEVLSVEVTLHVAANFSVPVVSAPHSPSQDELTFTCTSINGYPRPNVYWINKTDNSLLDQALQNDTVFLNMRGLYDVVSVLRIARTPSVNIGCCIENVLLQQNLTVGSQTGNDIGERDKITENPVSTGEKNAATWSILAVLCLLVVVAVAIGWVCRDRCLQHSYAGAWAVSPETELTGHV

SEQ ID NO: 21417 - protein, 264 aa, Homo sapiens
LFFGGGIGGTILYAKWASHFRERVEKTIPYSDKLFEVVLGSAPYNVPLPKKSTQSGPLKISSVSEVTKEFKQPASQLQKQKGDTPASATAGDTVLVPGVQHEESLKTDHPAIDEGKPTPALSEEASSSSIRERPCEEIAACLAQEEKQEQVKTESLAKSFEDALRQTANVTLQAIAAQNTVVQAVNAHSNILKAAMDNSEIEGKKKSAKWHTVQGALKEHRKAVDEAANALLKAKEEVEKMKSVTENAKKEEVAGAKPHINFTT

SEQ ID NO: 21418 - protein, 54 aa, Homo sapiens
LQAERSPGWSLAPKPLMSALLSLCFVLPLAAPGHGTQGWEPCTACSSLKAWAEC

SEQ ID NO: 21419 - protein, 159 aa, Homo sapiens
VSGQEARARLRRGRSAQLLRGHGGDRAQEADGRVQTGPEDTCFEFGVFPAILSFPLDYPLSPPKMRFTCEMFHPNIYPDGRVCISILHAPGDDPMGYESSAERWSPVQSVEKILLSVVSMLAEPNDESGANVDASKMWRDDREQFYKIAKQIVQKSLGL

SEQ ID NO: 21420 - protein, 87 aa, Homo sapiens
MAGTALKRLMAEYKQLTLNPPEGIVAGPMNEENFFEWEALIMGPEDTCFEFGVFPAILSFPLDYPLSPPKMRFTCEMFHPNSKCFWK

SEQ ID NO: 21421 - protein, 30 aa, Homo sapiens
MSCKILWVLLCAHLCFPPLLQHFFNPKIIA

SEQ ID NO: 21422 - protein, 145 aa, Homo sapiens
VRRDLGDKARPRAQLRRESGGAESVTRPLRAASPAPPPRAARAAMSEEKPKEGVKTENDHINLKVAGQDGSVVQFKIKRHTPLSKLMKAYCERQVRHLAPPQSLPVCALVLCVPGIPRARASRGWTQMQLPEVPSSWMGRRGLVL

SEQ ID NO: 21423 - protein, 389 aa, Homo sapiens
LQTEGWSDGCAPWGQTPDTQNRRKRQTWITFQVKVTATECIQEQSFVIRALGFTDIVTVQVLPQCECRCRDQSRDRSLCHGKGFLECGICRCDTGYIGKNCECQTQGRSSQELEGSCRKDNNSIICSGLGDCVCGQCLCHTSDVPGKLIYGQYCECDTINCERYNGQVCGGPGRGLCFCGKCRCHPGFEGSACQCERTTEGCLNPRRVECSGRGRCRCNVCECHSGYQLPLCQECPGCPSPCGKYISCAECLKFEKGPFGKNCSAACPGLQLSNNPVKGRTCKERDSEGCWVAYTLEQQDGMDRYLIYVDESRECVAGPNIAAIVGGTVAGIVLIGILLLVIWKALIHLSDLREYRRFEKEKLKSQWNNDNPLFKSATTTVMNPKFAES

SEQ ID NO: 21424 - protein, 810 aa, Homo sapiens
VSGLYDPRLQLRFLDVTQGRLVAKPPRPARSTAEDSSTPRDMLGLRPPLLALVGLLSLGCVLSQECTKFKVSSCRECIESGPGCTWCQKLNFTGPGDPDSIRCDTRPQLLMRGCAADDIMDPTSLAETQEDHNGGQKQLSPQKVTLYLRPGQAAAFNVTFRRAKGYPIDLYYLMDLSYSMLDDLRNVKKLGGDLLRALNEITESGRIGFGSFVDKTVLPFVNTHPDKLRNPCPNKEKECQPPFAFRHVLKLTNNSNQFQTEVGKQLISGNLDAPEGGLDAMMQVAACPEEIGWRNVTRLLVFATDDGFHFAGDGKLGAILTPNDGRCHLEDNLYKRSNEFDYPSVGQLAHKLAENNIQPIFAVTSRMVKTYEKLTEIIPKSAVGELSEDSSNVVHLIKNAYNKLSSRVFLDHNALPDTLKVTYDSFCSNGVTHRNQPRGDCDGVQINVPITFQVKVTATECIQEQSFVIRALGFTDIVTVQVLPQCECRCRDQSRDRSLCHGKGFLECGICRCDTGYIGKNCECQTQGRSSQELEGSCRKDNNSIICSGLGDCVCGQCLCHTSDVPGKLIYGQYCECDTINCERYNGQVCGGPGRGLCFCGKCRCHPGFEGSACQCERTTEGCLNPRRVECSGRGRCRCNVCECHSGYQLPLCQECPGCPSPCGKYISCAECLKFEKGPFGKNCSAACPGLQLSNNPVKGRTCKERDSEGCWVAYTLEQQDGMDRYLIYVDESRECVAGPNIAAIVGGTVAGIVLIGILLLVIWKALIHLSDLREYRRFEKEKLKSQWNNDNPLFKSATTTVMNPKFAES

SEQ ID NO: 21425 - protein, 785 aa, Homo sapiens
LTASGLRVQGRASVRDMLGLRPPLLALVGLLSLGCVLSQECTKFKVSSCRECIESGPGCTWCQKLNFTGPGDPDSIRCDTRPQLLMRGCAADDIMDPTSLAETQEDHNGGQKQLSPQKVTLYLRPGQAAAFNVTFRRAKGYPIDLYYLMDLSYSMLDDLRNVKKLGGDLLRALNEITESGRIGFGSFVDKTVLPFVNTHPDKLRNPCPNKEKECQPPFAFRHVLKLTNNSNQFQTEVGKQLISGNLDAPEGGLDAMMQVAACPEEIGWRNVTRLLVFATDDGFHFAGDGKLGAILTPNDGRCHLEDNLYKRSNEFDYPSVGQLAHKLAENNIQPIFAVTSRMVKTYEKLTEIIPKSAVGELSEDSSNVVHLIKNAYNKLSSRVFLDHNALPDTLKVTYDSFCSNGVTHRNQPRGDCDGVQINVPITFQVKVTATECIQEQSFVIRALGFTDIVTVQVLPQCECRCRDQSRDRSLCHGKGFLECGICRCDTGYIGKNCECQTQGRSSQELEGSCRKDNNSIICSGLGDCVCGQCLCHTSDVPGKLIYGQYCECDTINCERYNGQVCGGPGRGLCFCGKCRCHPGFEGSACQCERTTEGCLNPRRVECSGRGRCRCNVCECHSGYQLPLCQECPGCPSPCGKYISCAECLKFEKGPFGKNCSAACPGLQLSNNPVKGRTCKERDSEGCWVAYTLEQQDGMDRYLIYVDESRECVAGPNIAAIVGGTVAGIVLIGILLLVIWKALIHLSDLREYRRFEKEKLKSQWNNDNPLFKSATTTVMNPKFAES

SEQ ID NO: 21426 - protein, 471 aa, Homo sapiens
VSGLYDPRLQLRFLDVTQGRLVAKPPRPARSTAEDSSTPRDMLGLRPPLLALVGLLSLGCVLSQECTKFKVSSCRECIESGPGCTWCQKLNFTGPGDPDSIRCDTRPQLLMRGCAADDIMDPTSLAETQEDHNGGQKQLSPQKVTLYLRPGQAAAFNVTFRRAKGYPIDLYYLMDLSYSMLDDLRNVKKLGGDLLRALNEITESGRIGFGSFVDKTVLPFVNTHPDKLRNPCPNKEKECQPPFAFRHVLKLTNNSNQFQTEVGKQLISGNLDAPEGGLDAMMQVAACPEEIGWRNVTRLLVFATDDGFHFAGDGKLGAILTPNDGRCHLEDNLYKRSNEFDYPSVGQLAHKLAENNIQPIFAVTSRMVKTYEKLTEIIPKSAVGELSEDSSNVVHLIKNAYNVSLPHHSAGTHGVASNLPTAGQLLLQVSRRVVWEESPCPVGQLQPPDLPSGLQDTLARHFHGELWVLSR

SEQ ID NO: 21427 - protein, 72 aa, Homo sapiens
VSGLYDPRLQLRFLDVTQGRLVAKPPRPARSTAEDSSTPRDMLGLRPPLLALVGLLSLGCGEFCVPRRGLHA

SEQ ID NO: 21428 - protein, 149 aa, Homo sapiens
VPAQAQGLGPEPHSARPHPPHLGPFVGYSLRPHPDLLKERPHGKDSATCSFISPQWVPRHEDHRLEAELAGTCLQPLLTPAGPCLRGSTQDVAMTRGLHSIPLLQEPCKVSASQAPGRQSSPLKALRVSVLQLPGAAHDPCPVFDSREP

SEQ ID NO: 21429 - protein, 218 aa, Homo sapiens
MARNRLIAASTSRTRAILPPQPLEKEWPEGSSPGLTEGNTGLVRDLRPAHQDRSGTREDPAGQETTAITNPSPSLAADLAGDALPGCLGAAAHQGPLLDRSSESTLGPQALELEHCHERGCCRGCASFSPFPAPRCPSERLGAHSSRWAIRGRSKINPPPWAPACLPGFPVSWRTRMRAFHLSLPGGAQLLTYLVKVLKRRTWRRNVDNNPGCLCVPS

SEQ ID NO: 21430 - protein, 129 aa, Homo sapiens
MATLSFVFLLLGAVSWPPASASGQEFWPGQSAADILSGAASRRRYLLYDVNPPEGFNLRRDVYIRIASLLKTLLKTEEWVLVLPPWGRLYHWQSPDIHQVRIPWSEFFDLPSLNKNIPVIEYEQFIAGP

SEQ ID NO: 21431 - protein, 139 aa, Homo sapiens
MATLSFVFLLLGAVSWPPASASGQEFWPGQSAADILSGAASRRRYLLYDVNPPEGFNLRRDVYIRIASLLKTLLKTEEWVLVLPPWGRLYHWQSPDIHQVRIPWSEFFDLPSLNKNIPVIEYEQFIAEDGFGVMRRPGV

SEQ ID NO: 21432 - protein, 47 aa, Homo sapiens
LGTLTLPRTGQGVCLGPVGTEPLEMGFPMQPPTPHRGPMALQPSPPL

SEQ ID NO: 21433 - protein, 1365 aa, Homo sapiens
LQRGGPSGCTAAEEAASRGADGPGESMAPRCPWPWPRRRRLLDVLAPLVLLLGVRAASAEPERISEEVGLLQLLGDPPPQQVTQTDDPDVGLAYVFGPDANSGQVARYHFPSLFFRDFSLLFHIRPATEGPGVLFAITDSAQAMVLLGVKLSGVQDGHQDISLLYTEPGAGQTHTAASFRLPAFVGQWTHLALSVAGGFVALYVDCEEFQRMPLARSSRGLELEPGAGLFVAQAGGADPDKFQGVIAELKVRRDPQVSPMHCLDEEGDDSDGASGDSGSGLGDARELLREETGAALKPRLPAPPPVTTPPLAGGSSTEDSRSEEVEEQTTVASLGAQTLPGSDSVSTWDGSVRTPGGRVKEGGLKGQKGEPGVPGPPGRAGPPGSPCLPGPPGLPCPVSPLGPAGPALQTVPGPQGPPGPPGRDGTPGRDGEPGDPGEDGKPGDTGPQGFPGTPGDVGPKGDKGDPGVGERGPPGPQGPPGPPGPSFRHDKLTFIDMEGSGFGGDLEALRGPRGFPGPPGPPGVPGLPGEPGRFGVNSSDVPGPAGLPGVPGREGPPGFPGLPGPPGPPGREGPPGRTGQKGSLGEAGAPGHKGSKGAPGPAGARGESGLAGAPGPAGPPGPPGPPGPPGPGLPAGFDDMEGSGGPFWSTARSADGPQGPPGLPGLKGDPGVPGLPGAKGEVGADGVPGFPGLPGREGIAGPQGPKGDRGSRGEKGDPGKDGVGQPGLPGPPGPPGPVVYVSEQDGSVLSVPGPEGRPGFAGFPGPAGPKGNLGSKGERGSPGPKGEKGEPGSIFSPDGGALGPAQKGAKGEPGFRGPPGPYGRPGYKGEIGFPGRPGRPGMNGLKGEKGEPGDASLGFGMRGMPGPPGPPGPPGPPGTPVYDSNVFAESSRPGPPGLPGNQGPPGPKGAKGEVGPPGPPGQFPFDFLQLEAEMKGEKGDRGDAGQKGERGEPGGGGFFGSSLPGPPGPPGPPGPRGYPGIPGPKGESIRGQPGPPGPQGPPGIGYEGRQGPPGPPGPPGPPSFPGPHRQTISVPGPPGPPGPPGPPGTMGASSGVRLWATRQAMLGQVHEVPEGWLIFVAEQEELYVRVQNGFRKVQLEARTPLPRGTDNEVAALQPPVVQLHDSNPYPRREHPHPTARPWRADDILASPPRLPEPQPYPGAPHHSSYVHLRPARPTSPPAHSHRDFQPVLHLVALNSPLSGGMRGIRGADFQCFQQARAVGLAGTFRAFLSSRLQDLYSIVRRADRAAVPIVNLKDELLFPSWEALFSGSEGPLKPGARIFSFDGKDVLRHPTWPQKSVWHGSDPNGRRLTESYCETWRTEAPSATGQASSLLGGRLLGQSAASCHHAYIVLCIENSFMTASK

SEQ ID NO: 21434 - protein, 419 aa, Homo sapiens
LGGLGAGQGGHPPVGWEGRVLGRERRVLGREGTLLWAGRAGCWGGRGGCWAGRATCCGLGGPGAGQGGHPPVGWQGRVLGREGTLLWTGRAGCWAGSVPWHRLGGAGAGQGGHPPVGWEGQVLGRESRVLGREGTLAQAQPQVLGDPAAFFQLEARTPLPRGTDNEVAALQPPVVQLHDSNPYPRREHPHPTARPWRADDILASPPRLPEPQPYPGAPHHSSYVHLRPARPTSPPAHSHRDFQPVLHLVALNSPLSGGMRGIRGADFQCFQQARAVGLAGTFRAFLSSRLQDLYSIVRRADRAAVPIVNLKDELLFPSWEALFSGSEGPLKPGARIFSFDGKDVLRHPTWPQKSVWHGSDPNGRRLTESYCETWRTEAPSATGQASSLLGGRLLGQSAASCHHAYIVLCIENSFMTASK

SEQ ID NO: 21435 - protein, 101 aa, Homo sapiens
LDRHLSEPVIRALGAEPAAGRQVRRPFLEARREEQASRRAGQTPETLVEKTGFSSRVGGRGAAPPGQRGDCCRPGSCQEPGRGGQRAQHSFFIDSRDKGGG

SEQ ID NO: 21436 - protein, 233 aa, Homo sapiens
LGSGQRLQSWLLEGDAFWAPSVLPHSTLSTLSHHPQPQFGRRMESKVSEGGLNVTLTIRLLMHGKEVGSIIGKKGETVKKMREESGARINISEGNCPERIVTITGPTDAIFKAFAMIAYKFEEVTCTPGTSASLAGAGLVPAGSLGPLPYTWTRGCPSPPRQPHNYAHLLCLPGPLRSSGSPSQGPVSLHPSEASYSRLYALGPPPSASPDPALGHRARPQNTPPFPWGVQPG

SEQ ID NO: 21437 - protein, 282 aa, Homo sapiens
LSPQVVSVGIKDVFDFIPGSDQLNVISCQGLAPSQGRPGLSLVKENYAELLEDAFLKNVTAQICIDKKCPDYTCPITFSSPADITILLDGSASVGSHNFDTTKRFAKRLAERFLTAGRTDPAHDVRVAVVQYSGTGQQRPERASLQFLQNYTALASAVDAMDFINDATDVNDALGYVTRFYREASSGAAKKRLLLFSDGNSQGATPAAIEKAVQEAQRAGIEIFVVVVGRQVNEPHIRVLVTGKTAEYDVAYGESHLFRVPSYQALLRGVFHQTVSRKVALG

SEQ ID NO: 21438 - protein, 74 aa, Homo sapiens
VAPNQNLKEQGLRDIASTPHELYRNDYATMLPDSTEIDQDTINRIIKVMKHEAYGEVSGASLPASAGRQLTQQR

SEQ ID NO: 21439 - protein, 48 aa, Homo sapiens
LLGAVLAFKSQDAAIPCPLRCYYTGRTSVSVSLPSVFFRNHICVQSIV

SEQ ID NO: 21440 - protein, 15 aa, Homo sapiens
MLFFFLSPRVLPHVG

SEQ ID NO: 21441 - protein, 28 aa, Homo sapiens
VGSGLGSALGRLLLHLLSAGLRDTRATL

SEQ ID NO: 21442 - protein, 104 aa, Homo sapiens
LAQAGLSLMLGVPLWRWGSPSPCAAALHRPCRNNTSWTSSLGPRPGAGQAEEPSGQPCPQSCPPRASYPLPPHPRWPQTRQGSSCLRSPSLLPPSFSSSLSSHS

SEQ ID NO: 21443 - protein, 54 aa, Homo sapiens
LEHTGPLRGATVSVTVSLPHRSWSKNGRTWKGDLRASTSSQEMRTGRTMPCRLL

SEQ ID NO: 21444 - protein, 156 aa, Homo sapiens
VCLFAAVTMPFPSVLEWLLADASSPCSLLSNCNLNAPSGSPGISLRIFFLFLRQSRCDAQAIAQWRDLGSLQPPSGSRGSSTARNFLLLTQATVFCVAGLQEVRPALQATPVLGLLLSSSFLRVTEPGREVGCGLPCPYSRLLQLPPCWTHQQQSK

SEQ ID NO: 21445 - protein, 215 aa, Homo sapiens
VCLFAAVTMPFPSVLEWLLADASSPCSLLSNCNLNAPSGSPGISLRIFFLFLRQSRCDAQAIAQWRDLGSLQPPSGSRGSSTARNFLLLTQATVFCVVWAPAADIPHMSVCLLVGLTNSSTWSLMPNQVQTTLLFCVTLCEASCKLDSLPSAPSPKAGLQEVRPALQATPVLGLLLSSSFLRVTEPGREVGCGLPCPYSRLLQLPPCWTHQQQSK

SEQ ID NO: 21446 - protein, 20 aa, Homo sapiens
MQTLVPVSGNTVRSQKWKRK

SEQ ID NO: 21447 - protein, 16 aa, Homo sapiens
LCPSMRGMPSPMPPCA

SEQ ID NO: 21448 - protein, 144 aa, Homo sapiens
LKDIEHMYQNDQPILEKYVRKQQSIEDGLFQLQSQNLLYQQQCNDAHKKADNQEKTIINIQVKCEDTVEKLQAECRKLEENNKGLMKECTLLKERQCQYEKEKEKGELQEMQDQRTETLRCAEEMPDHMQKCSRCTRKHNCRSS

SEQ ID NO: 21449 - protein, 60 aa, Homo sapiens
VRTSGFWPSHSPLRAGGGAGSRGEGGAAGLVSQPPGNCLDRRRARVHRVLAGGRMRPAFL

SEQ ID NO: 21450 - protein, 98 aa, Homo sapiens
LQGRSAGSRRLLDRDRGELAAAHNGHGLGGGVRTIALCLRIPVTLRGRPQAGLPQLRGLSGPGVSTLTSGPGRWGRPLVMFRSSGPLPVKGRSSRANC

SEQ ID NO: 21451 - protein, 409 aa, Homo sapiens
LELFRGAALHLHDIGIVTMDWLVRNVTYRPHCHICFTPRGIMQFRFAHPTPRPSEKCSKWILLEDYRKRVQNVTEFDDSLLRNFTLVTQHPEVIYTNQNVVWSKFETIFFTISGLIHYAPVFRDYVFRSMQEFYEDNVLYMEIRARLLPVYELSGEHHDEEWSVKTYQEVAQKFVETHPEFIGIKIIYSDHRSKDVAVIAESIRMAMGLRIKFPTVVAGFDLVGHEDTGHSLHDYKEALMIPAKDGVKLPYFFHAGETDWQGTSIDRNILDALMLNTTRIGHGFALSKHPAVRTYSWKKDIPIEVCPISNQVLKLVSDLRNHPVATLMATGHPMVISSDDPAMFGAKGLSYDFYEVFMGIGGMKADLRTLKQLAMNSIKYSTLLESEKNTFMEIWKKRWDKFIADVATK

SEQ ID NO: 21452 - protein, 106 aa, Homo sapiens
VSASTTEMNVDSLAGKLSLSSDLNYILGSRKGRGSYRKQGRKPQPKEVVTCREGGSGQAALKTRALSTLLRGQSQGSFHFFPQTAPTAATPRSQQPCVLGSPAPAE

SEQ ID NO: 21453 - protein, 251 aa, Homo sapiens
LPISLTSPFKPKLEPTVHRPSIALAMALSDADVQKQIKHMMAFIEQEANEKAEEIDAKAEEEFNIEKGRLVQTQRLKIMEYYEKKEKQIEQQKKIQMSNLMNQARLKVLRARDDLITDLLNEAKQRLSKVVKDTTRYQVLLDGLVLQGLYQLLEPRMIVRCRKQDFPLVKAAVQKAIPMYKIATKNDVDVQIDQESYLPEDIAGGVEIYNGDRKIKVSNTLESRLDLIAQQMMPEVRGALFGANANRKFLD

SEQ ID NO: 21454 - protein, 229 aa, Homo sapiens
LPISLTSPFKPKLEPTVHRPSIALAMALSDADVQKQAEEEFNIEKGRLVQTQRLKIMEYYEKKEKQIEQQKKIQMSNLMNQARLKVLRARDDLITDLLNEAKQRLSKVVKDTTRYQVLLDGLVLQGLYQLLEPRMIVRCRKQDFPLVKAAVQKAIPMYKIATKNDVDVQIDQESYLPEDIAGGVEIYNGDRKIKVSNTLESRLDLIAQQMMPEVRGALFGANANRKFLD

SEQ ID NO: 21455 - protein, 488 aa, Homo sapiens
LGLQVTSGRRDLRGLRWSVLPLRIPFRMSGSSGPAPTPAVTKARRGDLTLQHGGGGRLGPRVGALTAAGGPCRKQLPPPPLSSLLGQGPGPGVQLDIASQSLDQEILLKVKTEIEEELKSLDKEISEAFTSTGFDRHTSPVFSPANPESSMEDCLAHLGEKVSQELKEPLHKALQMLLSQPVTYQAFRECTLETTVHASGWNKGTVFSLESEEEEYPGITAEDSNDIYILPSDNSGQVSPPESPTVTTSWQSESLPVSLSASQSWHTESLPVSLGPESWQQIAMDPEEVKSLDSNGAGEKSENNSSNSDIVHVEKEEVPEGMEEAAVASVVLPARELQEALPEAPAPLLPHITATSLLGTREPDTEVITVEKSSPATSLFVELDEEEVKAATTEPTEVEEVVPALEPTETLLSEKEINAREESLVEELSPASEKKPVPPSEGKSRLSPAGEMKPMPLSEGKSILLFGGAAAVAILAVAIGVALALRKK

SEQ ID NO: 21456 - protein, 536 aa, Homo sapiens
LGLQVTSGRRDLRGLRWSVLPLRIPFRMSGSSGPAPTPAVTKARRGDLTLQHGGGGRLGPRVGALTAAGGPCRKQLPPPPLSSLLGQGPGPGVQLDIASQSLDQEILLKVKTEIEEELKSLDKEISEAFTSTGFDRHTSPVFSPANPESSMEDCLAHLGEKVSQELKEPLHKALQMLLSQPVTYQAFRECTLETTVHASGWNKILVPLVLLRQMLLELTRRGQEPLSALLQFGVTYLEDYSAEYIIQQGGWGTVFSLESEEEEYPGITAEDSNDIYILPSDNSGQVSPPESPTVTTSWQSESLPVSLSASQSWHTESLPVSLGPESWQQIAMDPEEVKSLDSNGAGEKSENNSSNSDIVHVEKEEVPEGMEEAAVASVVLPARELQEALPEAPAPLLPHITATSLLGTREPDTEVITVEKSSPATSLFVELDEEEVKAATTEPTEVEEVVPALEPTETLLSEKEINAREESLVEELSPASEKKPVPPSEGKSRLSPAGEMKPMPLSEGKSILLFGGAAAVAILAVAIGVALALRKK

SEQ ID NO: 21457 - protein, 143 aa, Homo sapiens
MASSSTVPLGFHYETKYVVLSYLGLLSQEKLQEQHLSSPQGVQLDIASQSLDQEILLKVKTEIEEELKSLDKEISEAFTSTGFDRHTSPVFSPANPESSMEDCLAHLGEKVSQELKEPLHKALQMLLSQFWCLWFCYDKCFWN

SEQ ID NO: 21458 - protein, 335 aa, Homo sapiens
LKILVPLVLLRQMLLELTRRGQEPLSALLQFGVTYLEDYSAEYIIQQGGWGTVFSLESEEEEYPGITAEDSNDIYILPSDNSGQVSPPESPTVTTSWQSESLPVSLSASQSWHTESLPVSLGPESWQQIAMDPEEVKSLDSNGAGEKSENNSSNSDIVHVEKEEVPEGMEEAAVASVVLPARELQEALPEAPAPLLPHITATSLLGTREPDTEVITVEKSSPATSLFVELDEEEVKAATTEPTEVEEVVPALEPTETLLSEKEINAREESLVEELSPASEKKPVPPSEGKSRLSPAGEMKPMPLSEGKSILLFGGAAAVAILAVAIGVALALRKK

SEQ ID NO: 21459 - protein, 94 aa, Homo sapiens
VVLGLLAVVLVLVIVGLCLWLPSASKEPDNHVYTRAAVAADAKQCLEIGRGHTAGRWLCSGCSHCSPVVCGAHECPQHGHRGWPLPHHLQQHHS

SEQ ID NO: 21460 - protein, 269 aa, Homo sapiens
MVPKADSGAFLLLFLLVLTVTEPLRPELRCNPGQFACRSGTIQCIPLPWQCDGWATCEDESDEANCPEVTGEVRPHHGKEAVDPRQGRARGGDPSHFHAVNVAQPVRFSRKCPTGWHHYEGTASCYRVYLSGENYWDAAQTCQRLNGSLATFSTDQELRFVLAQEWDQPERSFGWKDQRKLWVGYQYVITGRNRSLEGRWEVAFKDWGVSDTMVHRRLLCPCVGTLHTHLKLGARFRRVPVRLGGALSRRSPRPTPACEPRLGAKTLQV

SEQ ID NO: 21461 - protein, 239 aa, Homo sapiens
VPAPAGSRPQCPGALPLFLQEGCQPQSPSLALRRGSVSSMFPRVCPPASCRAWAAVPLMPASLLVPAQTGQGVNESPMMTWGEVENTPLRVEGSETPYVDRTPGPAFKILEPGRRERLGLKMANEAAAKNRAKKQEALRRVTENLASLTPKGLSPAMSPALQRLVSRTASKYTDRALRASYTPSPARSTHLKTPASGLQTPTSTPAPGSATRTPLTQDPASITDNLLQLPARRKASDFF

SEQ ID NO: 21462 - protein, 149 aa, Homo sapiens [sequence omitted]

SEQ ID NO: 21463 - protein, 304 aa, Homo sapiens
VENQAHCDFVKLRNMLIRTHMHDLKDVTCDVHYENYRAHCIQQMTSKLTQDSRMESPIPILPLPTPDAETEKLIRMKDEEVCGAAGAAEAGVRDAPPRCCSPAGLSPPAAEAHAGDAAEDEAADAGPVTLAADTPSVSGTPSHPWTPDRTVPDPETRGHSPQLTLIYSQHHPLPGHCVCFRGAWTVAPAQLALSDLGGSGAKLGGTSEIRLPCPSPAPGRSQHPNRRPCSGRQAKLGRRGFPGSWVCSLPQCCRTDLGALLCLLPRVTQRVLRPHFLSRRAESSLIPRRLAGRVGLNQMGALQT

SEQ ID NO: 21464 - protein, 163 aa, Homo sapiens
MKTGRPELTPIAIMAGRLLVQRLFGGSSDLMDYDNVPTTVFTPLEYGCVGLSEEEAVARHGQEHVEVYHAHYKPLEFTVAGRDASQCYVKMVCLREPPQLVLGLHFLGPNAGEVTQGFALGIKCGASYAQVMRTVGIHPTCSEEVVKLRISKRSGLDPTVTGC

SEQ ID NO: 21465 - protein, 178 aa, Homo sapiens
MKTVAGALLSLVMGQPSEGRPELTPIAIMAGRLLVQRLFGGSSDLMDYDNVPTTVFTPLEYGCVGLSEEEAVARHGQEHVEVYHAHYKPLEFTVAGRDASQCYVKMVCLREPPQLVLGLHFLGPNAGEVTQGFALGIKCGASYAQVMRTVGIHPTCSEEVVKLRISKRSGLDPTVTGC

SEQ ID NO: 21466 - protein, 573 aa, Homo sapiens
LKAPAPNPAAFGPGLASALTSPATARPGLDPPRSGAGSAAGSPSCPRSPTTMAAMAVALRGLGGRFRWRTQAVAGGVRGAARGAAAGQRDYDLLVVGGGSGGLACAKEAAQLGRKVAVVDYVEPSPQGTRWGLGGTCVNVGCIPKKLMHQAALLGGLIQDAPNYGWEVAQPVPHDWRKMAEAVQNHVKSLNWGHRVQLQDRKVKYFNIKASFVDEHTVCGVAKGGKEILLSADHIIIATGGRPRYPTHIEGALEYGITSDDIFWLKESPGKTLVVGASYVALECAGFLTGIGLDTTIMMRSIPLRGFDQQMSSMVIEHMASHGTRFLRGCAPSRVRRLPDGQLQVTWEDSTTGKEDTGTFDTVLWAIGRVPDTRSLNLEKAGVDTSPDTQKILVDSREATSVPHIYAIGDVVEGRPELTPIAIMAGRLLVQRLFGGSSDLMDYDNVPTTVFTPLEYGCVGLSEEEAVARHGQEHVEVYHAHYKPLEFTVAGRDASQCYVKMVCLREPPQLVLGLHFLGPNAGEVTQGFALGIKCGASYAQVMRTVGIHPTCSEEVVKLRISKRSGLDPTVTGC

SEQ ID NO: 21467 - protein, 202 aa, Homo sapiens
LNWGHRVQLQDRKVKYFNIKASFVDEHTVCGVAKGGKEILLSADHIIIATGGRPRYPTHIEGALEYGITSDDIFWLKESPGKTLVVGASYVALECAGFLTGIGLDTTIMMRSIPLRGFDQQMSSMVIEHMASHGTRFLRGCAPSRVRRLPDGQLQVTWEDSTTGKEDTGTFDTVLWAIGVSDNRLGTSVRRISCLQMCRLQR

SEQ ID NO: 21468 - protein, 282 aa, Homo sapiens
LRRTGAGPVPGGPSRERNNICFAAELRGDPRPLPQPEGWSLLRGALKMPEAPPLLLAAVLLGLVLLVVLLLLLRHWGWGLCLIGWNEFILQPIHNLLMGDTKEQRILNHVLQHAEPGNAQSVLEAIDTYCEQKEWAMNVGDKKGKIVDAVIQEHQPSVLLELGAYCGYSAVRMARLLSPGARLITIEINPDCAAITQRMVDFAGVKDKVTLVVGASQDIIPQLKKKYDVDTLDMVFLDHWKDRYLPDTLLLEVSPNQDGIRASCCPEPIQSASASPKSQAFQ

SEQ ID NO: 21469 - protein, 318 aa, Homo sapiens
LRRTGAGPVPGGPSRERNNICFAAELRGDPRPLPQPEGWSLLRGALKMPEAPPLLLAAVLLGLVLLVVLLLLLRHWGWGLCLIGWNEFILQPIHNLLMGDTKEQRILNHVLQHAEPGNAQSVLEAIDTYCEQKEWAMNVGDKKGKIVDAVIQEHQPSVLLELGAYCGYSAVRMARLLSPGARLITIEINPDCAAITQRMVDFAGVKDKVTLVVGASQDIIPQLKKKYDVDTLDMVFLDHWKDRYLPDTLLLEECGLLRKGTVLLADNVICPGAPDFLAHVRGSSCFECTHYQSFLEYREVVDGLEKAIYKGPGSEAGP

SEQ ID NO: 21470 - protein, 313 aa, Homo sapiens
LAFLNLAPLQTQGGDGGTPSKGACGCCRRSTEHWRPSPPALQMPEAPPLLLAAVLLGLVLLVVLLLLLRHWGWGLCLIGWNEFILQPIHNLLMGDTKEQRILNHVLQHAEPGNAQSVLEAIDTYCEQKEWAMNVGDKKGKIVDAVIQEHQPSVLLELGAYCGYSAVRMARLLSPGARLITIEINPDCAAITQRMVDFAGVKDKVTLVVGASQDIIPQLKKKYDVDTLDMVFLDHWKDRYLPDTLLLEECGLLRKGTVLLADNVICPGAPDFLAHVRGSSCFECTHYQSFLEYREVVDGLEKAIYKGPGSEAGP

SEQ ID NO: 21471 - protein, 113 aa, Homo sapiens
LFQVTLVVGASQDIIPQLKKKYDVDTLDMVFLDHWKDRYLPDTLLLEECGLLRKGTVLLADNVICPGAPDFLAHVRGSSCFECTHYQSFLEYREVVDGLEKAIYKGPGSEAGP

SEQ ID NO: 21472 - protein, 231 aa, Homo sapiens
VPPAAPAALEEVEKEGAGAATGPGPQPGLYSYIRDDLFTSEIFKLELQNVPRHASFSDVRRFLGRFGLQPHKTKLFGQPPCAFVTFRSAAERDKALRVLHGALWKGRPLSVRLARPKADPMARRRRQEGESEPPVTRVADVVTPLWTVPYAEQLERKQLECEQVLQKLAKEIGSTNRALLPWLLEQRHKHNKACCPLEGVRPSPQQVRLDFGGHKPLSWVLKNFAFAHPSC

SEQ ID NO: 21473 - protein, 253 aa, Homo sapiens
LLLFVAVAVLLWESGLSTCRSLRPSAVSVRFGTCPLVAPRPMAPGRGTLGLALVSERGSFLSGSCSFPERESRGYIGLGSSRSQVQGIGEFQGCGCGLHPGGVGSTRLPSEGLVPGCDVGELPEPSCPRTSTAQARCDLSSGTRRGAMEHAEGSPQRALSRMGAEGGALSTAGHLQRRTGPGAHHGAAPRRGAGVGAPGRCSAEESGCALGARTCHGLGRPCRGIPPQVSPLRPATRSRGGTLAGHTQERPGH

SEQ ID NO: 21474 - protein, 211 aa, Homo sapiens
MAEEQEFTQLCKLPAQPSHPHCVNNTYRSAQHSQALLRGLLALRDSGILFDVVLVVEGRHIEAHRILLAASCDYFSMSFTTRSTFSTNYWSLGSVQAPSYGAWLVSSVASVYAGTEGSGSWIFVSRSTSFQGCMGSGGLAAGMAGDLAGMGSIQNEKETIQSLNDRLASYLDRARSLETENRKLESKIQKHLEKKGPRSETGGITSRPSRT

SEQ ID NO: 21475 - protein, 14 aa, Homo sapiens
MVSLPEKRINGERK

SEQ ID NO: 21476 - protein, 9 aa, Homo sapiens
LPFGGRAGP

SEQ ID NO: 21477 - protein, 19 aa, Homo sapiens
LHWTYSLPVLFHRYMKYCV

SEQ ID NO: 21478 - protein, 265 aa, Homo sapiens
LGALSHTPHQTAQPHAQPRAWWSQQPESSPRWSERKAFQTLARLWSPHLTPSLGAWLLPCMSQKSCWGARTPTDRILRLPASQDMLALQIIDLFKNIFQLVGLDLFVFPYRVVATAPGCGVIECIPDCTSRDQLGRQTDFGMYDYFTRQYGDESTLAFQQARYNFIRSMAAYSLLLFLLQIKDRHNGNIMLDKKGHIIHIGQPATAPPSSPFTPGTQGWIGIPTPQRGECPGPPCQECQGPALRSELSATKLFCCRGCLAPAPGS

SEQ ID NO: 21479 - protein, 89 aa, Homo sapiens
MILQEAMKWAPTVTKSHLQEYLNKHQNWVSGLSQHTGLAMATESILHFAGYNKQNTTLGVCASLLKSSDPLDHRSHSAGEGLELGCRFS

SEQ ID NO: 21480 - protein, 536 aa, Homo sapiens
LGQSHREPAMWMLQRGVDQPGRLSLCSVFPPSFSSAKMKHSLNALLIFLIITSAWGGSKGPLDQLEKGGETAQSADPQWEQLNNKNLSMPLLPADFHKENTVTNDWIPEGEEDDDYLDLEKIFSEDDDYIDIVDSLSVSPTDSDVSAGNILQLFHGKSRIQRLNILNAKFAFNLYRVLKDQVNTFDNIFIAPVGISTAMGMISLGLKGETHEQVHSILHFKDFVNASSKYEITTIHNLFRKLTHRLFRRNFGYTLRSVNDLYIQKQFPILLDFKTKVREYYFAEAQIADFSDPAFISKTNNHIMKLTKGLIKDALENIDPATQMMILNCIYFKGSWVNKFPVEMTHNHNFRLNEREVVKVSMMQTKGNFLAANDQELDCDILQLEYVGGISMLIVVPHKMSGMKTLEAQLTPRVVERWQKSMTNRTREVLLPKFKLEKNYNLVESLKLMGIRMLFDKNGNMAGISDQRIAIDLFKHQGTITVNEEGTQATTVTTVGFMPLSTQVRFTVDRPFLFLIYEHRTSCLLFMGRVANPSRS

SEQ ID NO: 21481 - protein, 64 aa, Homo sapiens
LAQFIFSFHFTKEIMQKHQLKLIYLCWYIQQNSWSHKALVFLKKQNILKMVKVTDFNNEIGHLK

SEQ ID NO: 21482 - protein, 18 aa, Homo sapiens
LLLPCFLLLCCSACPSLL

SEQ ID NO: 21483 - protein, 32 aa, Homo sapiens
VGLGGAGKSSRDGARDDTLHSLEGTTQRQYIA

SEQ ID NO: 21484 - protein, 224 aa, Homo sapiens
VRPSAWVKFCSGQQHGQICRKVVPWGPKARIPGCTCSGTLLPPGTSLIQDMKAYLEGAGAEFCDITLLLDGHPRPAHKAILAARSSYFEAMFRSFMPEDGQVNISIGEMVPSRQAFESMLRYIYYGEVNMPPEDSLHPHSPVNSQVPTKGSWHPPQVALRPALLPQLGDLGPAPPSRGFAGAWGWAWCSLKQLAAGKEGFAARRNQWVPDPHNCPEDGVGHCFV

SEQ ID NO: 21485 - protein, 180 aa, Homo sapiens
LNVYLTEFQTNLVPYPHIHLPLATYALVISAKKAYHEQLSVAKIASARFEPANQMVKCDPHHGKYMACCMLYRGDVVLKDVSAAVATIKSKHTNQFVDWCPIGFKVGINYQPPTVVPVGDLAKVQRAVCMLSNTTAITEAWACLDHKFGQVRLSALVRGGGHGSGGILRGPRGSGSSGGL

SEQ ID NO: 21486 - protein, 422 aa, Homo sapiens
LEQLVEENTGSLSGPAKDFYQRGFDFFNKITNVSAVIKPYPKGDERKKACLSALSEVTVQPGCSLPSNPEAIVLDVDYKSGTPMQSAAKAPYLAKFKVKRCGVSELEKEGLRCRSDSEDECSTQEADGQKISWQAAIFKLGDDCRQDMLALQIIDLFKNIFQLVGLDLFVFPYRVVATAPGCGVIECIPDCTSRDQLGRQTDFGMYDYFTRQYGDESTLAFQQHGRLQPPAVPAADQGQTQRQHYAGQEGPYHPHRSASHSATLLSLHPGTQGWIGIPTPQRGECPGPPCQECQGPALRSELSATKLFCCRGCLAPAPGSWGESRHCSESEAGAGRSGAGPGSVPQLGSFLHFLPSLSLPAAPPPTPSLSPRKHNLPFGGGGGAPVEESFSTPQNRPLVLARPGSYPVTGSSLGFCRLWLHV

SEQ ID NO: 21487 - protein, 161 aa, Homo sapiens
LGPSKLSPCDCRVTQRELEEIRKCGMKNFRNIQVDEANLLTWQGLIVPDNPPYDKGAFRIEINFPAEYPFKPPKITFKTKIYHPNIDEKGQVCLPVISAENWKPATKTDQVIQSLIALVNDPQPEHPLRADLAEEYSKDRKKFCKNAEEFTKKYGEKRPVD

SEQ ID NO: 21488 - protein, 35 aa, Homo sapiens
MGGLLVRRMLCTLCVMNLARKAPEVPGWHFSLQPL

SEQ ID NO: 21489 - protein, 130 aa, Homo sapiens
VLLGLLLALLVPGGGAAKTGAELVTCGSVLKLLNTHHRVRLHSHDIKYGSGSGQQSVTGVEASDDANSYWRIRGGSEGGCPRGSPVRCGQAVRLTHVLTGKNLHTHHFPSPLSNNQVSPSRSPQRDSWPV

SEQ ID NO: 21490 - protein, 282 aa, Homo sapiens
MEVKNLPQTNFRRLPFDHCSLSLQPFVYPVCTPDGIVFDLLNIVPWLKKYGTNPSNGEKLDGRSLIKLNFSKNSEGKYHCPVLFTVFTNNTHIVAVRTTGNVYAYEAVEQLNIKAKNFRDLLTDEPFSRQDIITLQDPTNLDKFNVSNFYHVKNNMKIIDPDEEKAKQDPSYYLKNTNAETRETLQELYKEFKGDEILAATMKAPEKKKVDKLNADLAMLSKLVLNSWLQVRASCLGLRKCWNYRPTIPQGRSALPSPPPRWSRRPHMKQLPSTRMCCATSL

SEQ ID NO: 21491 - protein, 170 aa, Homo sapiens
LASAFLFSLLIILFLAAESEVSPCGGLAPITWWSDSYPSLRLHWKISQPQCMGNPFPRLVPALPLPTPEPGPQRMAMPRAWQRSGASTGSCSALALGPREPSSTPAQQLGTEERSSILTRTAPRSTRCLQPPTSGATFSSSHSPMRAPSQGHWSVNCNPFSSPALHLFLV

SEQ ID NO: 21492 - protein, 59 aa, Homo sapiens
MCLQGAGAVVNTFLLRTLPQLFRVRSAVPVSQESALVIVLCCGRVESKLFHCQCPETGV

SEQ ID NO: 21493 - protein, 11 aa, Homo sapiens
LLYQSHRSQHW

SEQ ID NO: 21494 - protein, 97 aa, Homo sapiens
MAWTPLLLQLLTLCSGSWAQSALTQEASVSGTVGQKVTLSCTGNSNNVGSYAVGWYQQISHGAPKTVMFGNSLPSGIPDRFSGSKSGTTASLTISGL

SEQ ID NO: 21495 - protein, 101 aa, Homo sapiens
LHRFPLAAVLTQPTSLSASPGASARLTCTLRSGIIGSYRIYWYQQKPGSPPRYLLNYYSDSDKHQGSGVPSRFSGSKDASTNAGILFISGLSLRMRLTITV

SEQ ID NO: 21496 - protein, 403 aa, Homo sapiens
VWLGLTPLLALSASRAAGLLSAWSQCPLWQEGEVPHPVLLVWARCCQTMGCRQSSEEKEAARRSRRIDRHLRSESQRQRREIKLLLLGTSNSGKSTIVKQMKIIHSGGFNLEACKEYKPLIIYNAIDSLTRIIRALAALRIDFHNPDRAYDAVQLFALTGPAESKGEITPELLGVMRRLWADPGAQACFSRSSEYHLEDNAAYYLNDLERIAAADYIPTVEDILRSRDMTTGIVENKFTFKELTFKMVDVGGQRSERKKWIHCFEGVTAIIFCVELSGYDLKLYEDNQTSRMAESLRLFDSICNNNWFINTSLILFLNKKDLLAEKIRRIPLTICFPEYKGQNTYEEAAVYIQRQFEDLNRNKETKEIYSHFTCATDTSNIQFVFDAVTDVIIQNNLKYIGLC

SEQ ID NO: 21497 - protein, 69 aa, Homo sapiens
LMVTWKADGTLITQSVEKTTPSKQSNNKYVASSYLSLTPEQWRSRRSYSCQVMQEGSTVEKSVAPAECS

SEQ ID NO: 21498 - protein, 547 aa, Homo sapiens
LMRKLLTNLPAAAVLSAQVYSAVLQGLWEENVCGTPGRTRVCTALLYGQVCPFQDSTDGLRTITSILFNWPPENTSVYYQPPQRSSFRIKLAFRNLSWPGLGLEDHQEIVLGQLVLPEPNEAKPDDPAPRPGQHALTMPALEPAPPLLADLGPALEPESPAALGPPGYLHSAPGPAPAPGEGPPPGTVLEPQSAPESSCPCRGSVKNQPSEELPDMTTFPPRLLAEQLTLMDAELFKKVVLHECLGCIWGQGHLKGNEHMAPTVRATIAHFNRLTNCITTSCLGDHSMRARDRARVVEHWIKVARECLSLNNFSSVHVIVSALCSNPIGQLHKTWAGVSSKSMKELKELCKKDTAVKRDLLIKAGSFKVATQERNPQRVQMRLRRQKKGVVPFLGDFLTELQRLDSAIPDDLDGNTNKRSKEVRVLQEMQLLQVAAMNYRLRPLEKFVTYFTRMEQLSDKERLHCSVTISVHCNVCLLGSSPSSASQAAGTTAVHHHVRLFCCCCSATSCPASWSPKTRRLATSCSGWEPTGMLARTPALHHPSPRP

SEQ ID NO: 21499 - protein, 51 aa, Homo sapiens
LAVPTSMPSCYAGLLWSLLLYTTPPTYIDDVTVTTGVKRDSGEGFWTGWRT

SEQ ID NO: 21500 - protein, 120 aa, Homo sapiens
LQNFYLPASLPLAMACRCLSFLLMGTFLSGQVAQLSCTLSPQHVTIRDYGVSWYQQRAGSAPRYLLYYRSEEDHHRPADIPDRFSAAKDEAHNACVLTISPVQPEDDADYYCSVGYGFSP

SEQ ID NO: 21501 - protein, 195 aa, Homo sapiens
LLEERAESPRVLPCGGRAEAGGDFPTRGGAAASRGRGLAPAVASQKAGPQWCPRSQARSSAAAAARASVPLRGSPGPSAIMPMFIVNTNVPRASVPDGFLSELTQQLAQATGKPPQYIAVHVVPDQLMAFGGSSEPCALCSLHSIGKIGGAQNRSYSKLLCGLLAERLRISPDRVYINYYDMNAANVGWNNSTFA

SEQ ID NO: 21502 - protein, 113 aa, Homo sapiens
MPMFIVNTNVPRASVPDGFLSELTQQLAQATGKPPQYIAVHVVPDQLMAFGGSSEPCALCSLHSIGKIGGAQNRSYSKLLCGLLAERLRISPDRYAESRRGGGGAAARGQARD

SEQ ID NO: 21503 - protein, 99 aa, Homo sapiens
VDVRGPTRSLGRADRALSSQYIAVHVVPDQLMAFGGSSEPCALCSLHSIGKIGGAQNRSYSKLLCGLLAERLRISPDRVYINYYDMNAANVGWNNSTFA

SEQ ID NO: 21504 - protein, 136 aa, Homo sapiens
LGTPSFSSARAVSVPLPAMPFLELDTNLPANRVPAGLEKRLCAAAASILGKPADRVNVTVRPGLAMALSGSTEPCAQLSISSIGVVGTAEDNRSHSAHFFEFLTKELALGQDRILIRFFPLESWQIGKIGTVMTFL

SEQ ID NO: 21505 - protein, 188 aa, Homo sapiens
VLAAESLKADPRWQHGAQHVEAAVREDFFQEALPAVLKAKDLPPVEPAVKENLKTLMQLFLLAVSVPLPAMPFLELDTNLPANRVPAGLEKRLCAAAASILGKPADRVNVTVRPGLAMALSGSTEPCAQLSISSIGVVGTAEDNRSHSAHFFEFLTKELALGQDRILIRFFPLESWQIGKIGTVMTFL

SEQ ID NO: 21506 - protein, 130 aa, Homo sapiens
LGTPSFSSARAVSVPLPAMPFLELDTNLPANRVPAGLEKRLCAAAASILGKPADRVNVTVRPGLAMALSGSTEPCAQLSISSIGVVGTAEDNRSHSAHFFEFLTKELALGQDRCVGVVGDPCGTAADWSH

SEQ ID NO: 21507 - protein, 896 aa, Homo sapiens
LRARNVLTGQLGPCWSTQAPVDFERGLGGEGRGGAGRGGAAECRAGGARPAGSELVWPPRLGATALLAADTGCTMKPALLPWALLLLATALGPGPGPTADAQESCSMRCGALDGPCSCHPTCSGLGTCCLDFRDFCLEILPYSGSMMGGKDFVVRHFKMSSPTDASVICRFKDSIQTLGHVDSSGQVHCVSPLLYESGRIPFTVSLDNGHSFPRAGTWLAVHPNKVSMMEKSELVNETRWQYYGTANTSGNLSLTWHVKSLPTQTITIELWGYEETGMPYSQEWTAKWSYLYPLATHIPNSGSFTFTPKPAPPSYQRWRVGALRIIDSKNYAGQKDVQALWTNDHALAWHLSDDFREDPVAWARTQCQAWEELEDQLPNFLEELPDCPCTLTQARADSGRFFTDYGCDMEQGSVCTYHPGAVHCVRSVQASLRYGSGQQCCYTADGTQLLTADSSGGSTPDRGHDWGAPPFRTPPRVPSMSHWLYDVLSFYYCCLWAPDCPRYMQRRPSNDCRNYRPPRLASAFGDPHFVTFDGTNFTFNGRGEYVLLEAALTDLRVQARAQPGTMSNGTETRGTGLTAVAVQEGNSDVVEVRLANRTGGLEVLLNQEVLSFTEQSWMDLKGMFLSVAAGDRVSIMLASGAGLEVSVQGPFLSVSVLLPEKFLTHTHGLLGTLNNDPTDDFTLHSGRVLPPGTSPQELFLFGANWTVHNASSLLTYDSWFLVHNFLYQPKHDPTFEPLFPSETTLNPSLAQEAAKLCGDDHFCNFDVAATGSLSTGTATRVAHQLHQRRMQSLQPVVSCGWLAPPPNGQKEGNRYLAGSTIYFHCDNGYSLAGAETSTCQADGTWSSPTPKCQPGRSYAVLLGIIFGGLAVVAAVALVYVLLRRRKGNTHVWGAQP

SEQ ID NO: 21508 - protein, 154 aa, Homo sapiens
LTIFLLLSSLSSYLAYLSIHLRVCLQPPPVCPSVQLPVTLCIFLSIHLPTHPSLRLPTSRPSPPGLQSHGPGLRGHGQPSPAGSGAGAGCHCAGCGPLSTPGPMWPPGLCPRCCCRRLQGLLGYWTVSETWEEAGWPLAASPSWRRRVCVCVCE

SEQ ID NO: 21509 - protein, 104 aa, Homo sapiens
LMTGPGGRRNDPWGRQRAREGAHTSKHPTPRTGWTARRRRGAWALRPGTAGGWAKGQDFPSQFHLLIPAPPAAASRSLLRSGGGGGEGTRHAPTALPPQPKRKL

SEQ ID NO: 21510 - protein, 24 aa, Homo sapiens
LNRTLSFFLSGYLSSLEWVLVHIC

SEQ ID NO: 21511 - protein, 46 aa, Homo sapiens
VKNLWDYTFGPEKLNIDTRNCKILLTEPPMNPTKNTEKTVEVMFET

SEQ ID NO: 21512 - protein, 113 aa, Homo sapiens [sequence omitted]

SEQ ID NO: 21513 - protein, 25 aa, Homo sapiens
LLFFFNFLIFWDRASLCHPGWRTVG

SEQ ID NO: 21514 - protein, 30 aa, Homo sapiens
LPPETKGKAAMEELQRTPLPGKNINLAVLF

SEQ ID NO: 21515 - protein, 119 aa, Homo sapiens
MVLIKEFRVVLPCSVQEYQVGQLYSVAEASKNETGGGEGIEVLKNEPYEKDGEKGQYTHKIYHLKSKVPAFVRMIAPEGSLVFHEKAWNAYPYCRTIVTVSKTIFVSHTFFIFKLCFTQ

SEQ ID NO: 21516 - protein, 51 aa, Homo sapiens
LLTRAPPFSFGPSGRLGSLRFPTMEMILDKKQLQVVFLFEFKMGHNAAEIT

SEQ ID NO: 21517 - protein, 307 aa, Homo sapiens
LAVAVAAAAGPGDAGGRGRRRSLLVSPAMAALGRPFSGLPLSGGSDFLQPPQPAFPGRAFPPGADGAELAPRPGPRAVPSSPAGSAARGRVSVHCKKKHKREEEEDDDCPVRKKRITEAELCAGPNDWILCAHQDVEGHGVNPSVSGLSIPGILDVICEEMDQTTGEPQCEVARRKLQEIEDRIIDEDEEVEADRNVNHLPSLVLSDTMKTGLKREFDEVFTKKMIESMSRPSMELVLWKPLPELLSDKPKPSSNTKNYTGESQAKHVAAGTAFPQRTELFSEPRPTGMSLYNSLETATSTEEEMEL

SEQ ID NO: 21518 - protein, 289 aa, Homo sapiens
LAVAVAAAAGPGDAGGRGRRRSLLVSPAMAALGRPFSGLPLSGGSDFLQPPQPAFPGRAFPPGADGAELAPRPGPRAVPSSPAGSAARGRCPVRKKRITEAELCAGPNDWILCAHQDVEGHGVNPSVSGLSIPGILDVICEEMDQTTGEPQCEVARRKLQEIEDRIIDEDEEVEADRNVNHLPSLVLSDTMKTGLKREFDEVFTKKMIESMSRPSMELVLWKPLPELLSDKPKPSSNTKNYTGESQAKHVAAGTAFPQRTELFSEPRPTGMSLYNSLETATSTEEEMEL

SEQ ID NO: 21519 - protein, 232 aa, Homo sapiens
LAVAVAAAAGPGDAGGRGRRRSLLVSPAMAALGRPFSGLPLSGGSDFLQPPQPAFPGRAFPPGADGAELAPRPGPRAVPSSPAGSAARGRVSVHCKKKHKREEEEDDEIIDEDEEVEADRNVNHLPSLVLSDTMKTGLKREFDEVFTKKMIESMSRPSMELVLWKPLPELLSDKPKPSSNTKNYTGESQAKHVAAGTAFPQRTELFSEPRPTGMSLYNSLETATSTEEEMEL

SEQ ID NO: 21520 - protein, 32 aa, Homo sapiens
LLPLPALPLPSPIPFSLSGVCTLMKVSYNIGG

SEQ ID NO: 21521 - protein, 144 aa, Homo sapiens
LIVSVYLFTHHLSLFIFLSSIGDFCCDVIVCRGCGNQNFAWRTECNQCGDRGRGGPGGMRGGRGGLMDRGGPGGMFRGGRGGDRGGFRGGRGMDRGGFGGGRRGGPGGPPGPLMEQMGGRRGGRGGPGKMDKGEHRQERRDRPY

SEQ ID NO: 21522 - protein, 123 aa, Homo sapiens
VSLAVGRECACVCIPTGGILRPWGPRVSHLHSAPRPAGAPEAPILVVGNKRDRQRLRFGPRRALAALVRRGWRCGYLECSAKYNWHVLRLFRELLRCALVRARPAHPALRLQGALHPARCSLM

SEQ ID NO: 21523 - protein, 588 aa, Homo sapiens
LCSNSRGAKGLRVQAVGREGPGPEPRAMAGAIASRMSFSSLKRKQPKTFTVRIVTMDAEMEFNCEMKWKGKDLFDLVCRTLGLRETWFFGLQYTIKDTVAWLKMDKKVLDHDVSKEEPVTFHFLAKFYPENAEEELVQEITQHLFFLQVKKQILDEKIYCPPEASVLLASYAVQAKYGDYDPSVHKRGFLAQEELLPKRVINLYQMTPEMWEERITAWYAEHRGRARDEAEMEYLKIAQDLEMYGVNYFAIRNKKGTELLLGVDALGLHIYDPENRLTPKISFPWNEIRNISYSDKEFTIKPLDKKIDVFKFNSSKLRVNKLILQLCIGNHDLFMRRRKADSLEVQQMKAQAREEKARKQMKEEATMANEALMRSEETADLLAEKAQITEEEAKLLAQKAAEAEQEMQRIKATAIRTEEEKRLMEQKVLEAEVLALKMAEESERRAKEADQLKQDLQEAREAERRAKQKLLEIATKPTYPPMNPIPAPLPPDIPSFNLIGDSLSFDFKDTDMKRLSMEIEKEKVEYMEKSKHLQEQLNELKTEIEALKLKERETALDILHNENSDRGGSSKHNTIKKPQAQGRRPICI

SEQ ID NO: 21524 - protein, 576 aa, Homo sapiens
LCSNSRGAKGLRVQAVGREGPGPEPRAMAGAIASRMSFSSLKRKQPKTFTVRIVTMDAEMEFNCEMKWKGKDLFDLVCRTLGLRETWFFGLQYTIKDTVAWLKMDKKVKKQILDEKIYCPPEASVLLASYAVQAKYGDYDPSVHKRGFLAQEELLPKRVINLYQMTPEMWEERITAWYAEHRGRARDEAEMEYLKIAQDLEMYGVNYFAIRNKKGTELLLGVDALGLHIYDPENRLTPKISFPWNEIRNISYSDKEFTIKPLDKKIDVFKFNSSKLRVNKLILQLCIGNHDLFMRRRKADSLEVQQMKAQAREEKARKQMERQRLAREKQMREEAERTRDELERRLLQMKEEATMANEALMRSEETADLLAEKAQITEEEAKLLAQKAAEAEQEMQRIKATAIRTEEEKRLMEQKVLEAEVLALKMAEESERRAKEADQLKQDLQEAREAERRAKQKLLEIATKPTYPPMNPIPAPLPPDIPSFNLIGDSLSFDFKDTDMKRLSMEIEKEKVEYMEKSKHLQEQLNELKTEIEALKLKERETALDILHNENSDRGGSSKHNTIKKPQAQGRRPICI

SEQ ID NO: 21525 - protein, 617 aa, Homo sapiens
LCSNSRGAKGLRVQAVGREGPGPEPRAMAGAIASRMSFSSLKRKQPKTFTVRIVTMDAEMEFNCEMKWKGKDLFDLVCRTLGLRETWFFGLQYTIKDTVAWLKMDKKVLDHDVSKEEPVTFHFLAKFYPENAEEELVQEITQHLFFLQVKKQILDEKIYCPPEASVLLASYAVQAKYGDYDPSVHKRGFLAQEELLPKRVINLYQMTPEMWEERITAWYAEHRGRARDEAEMEYLKIAQDLEMYGVNYFAIRNKKGTELLLGVDALGLHIYDPENRLTPKISFPWNEIRNISYSDKEFTIKPLDKKIDVFKFNSSKLRVNKLILQLCIGNHDLFMRRRKADSLEVQQMKAQAREEKARKQMERQRLAREKQMREEAERTRDELERRLLQMKEEATMANEALMRSEETADLLAEKAQITEEEAKLLAQKAAEAEQEMQRIKATAIRTEEEKRLMEQKVLEAEVLALKMAEESERRAKEADQLKQDLQEAREAERRAKQKLLEIATKPTYPPMNPIPAPLPPDIPSFNLIGDSLSFDFKDTDMKRLSMEIEKEKVEYMEKSKHLQEQLNELKTEIEALKLKERETALDILHNENSDRGGSSKHNTIKKPQAQGRRPICI

SEQ ID NO: 21526 - protein, 534 aa, Homo sapiens
LCSNSRGAKGLRVQAVGREGPGPEPRAMAGAIASRMSFSSLKRKQPKTFTVRIVTMDAEMEFNCEVKKQILDEKIYCPPEASVLLASYAVQAKYGDYDPSVHKRGFLAQEELLPKRVINLYQMTPEMWEERITAWYAEHRGRARDEAEMEYLKIAQDLEMYGVNYFAIRNKKGTELLLGVDALGLHIYDPENRLTPKISFPWNEIRNISYSDKEFTIKPLDKKIDVFKFNSSKLRVNKLILQLCIGNHDLFMRRRKADSLEVQQMKAQAREEKARKQMERQRLAREKQMREEAERTRDELERRLLQMKEEATMANEALMRSEETADLLAEKAQITEEEAKLLAQKAAEAEQEMQRIKATAIRTEEEKRLMEQKVLEAEVLALKMAEESERRAKEADQLKQDLQEAREAERRAKQKLLEIATKPTYPPMNPIPAPLPPDIPSFNLIGDSLSFDFKDTDMKRLSMEIEKEKVEYMEKSKHLQEQLNELKTEIEALKLKERETALDILHNENSDRGGSSKHNTIKKPQAQGRRPICI

SEQ ID NO: 21527 - protein, 622 aa, Homo sapiens
LCSNSRGAKGLRVQAVGREGPGPEPRAMAGAIASRMSFSSLKRKQPKTFTVRIVTMDAEMEFNCEMKWKGKDLFDLVCRTLGLRETWFFGLQYTIKDTVAWLKMDKKVLDHDVSKEEPVTFHFLAKFYPENAEEELVQEITQHLFFLQVKKQILDEKIYCPPEASVLLASYAVQAKYGDYDPSVHKRGFLAQEELLPKRVINLYQMTPEMWEERITAWYAEHRGRARDEAEMEYLKIAQDLEMYGVNYFAIRNKKGTELLLGVDALGLHIYDPENRLTPKISFPWNEIRNISYSDKEFTIKPLDKKIDVFKFNSSKLRVNKLILQLCIGNHDLFMRRRKADSLEVQQMKAQAREEKARKQMERQRLAREKQMREEAERTRDELERRLLQMKEEATMANEALMRSEETADLLAEKAQITEEEAKLLAQKAAEAEQEMQRIKATAIRTEEEKRLMEQKVLEAEVLALKMAEESERRAKEADQLKQDLQEAREAERRAKQKLLEIATKPTYPPMNPIPAPLPPDIPSFNLIGDSLSFDFKDTDMKRLSMEIEKEKVEYMEKSKHLQEQLNELKTEIEALKLKERETALDILHNENSDRGGSSKHNTIKKLTLQSAKSRVAFFEEL

SEQ ID NO: 21528 - protein, 235 aa, Homo sapiens
VQAVGREGPGPEPRAMAGAIASRMSFSSLKRKQPKTFTVRIVTMDAEMEFNCEVKKQILDEKIYCPPEASVLLASYAVQAKNKKGTELLLGVDALGLHIYDPENRLTPKISFPWNEIRNISYSDKEFTIKPLDKKIDVFKFNSSKLRVNKLILQLCIGNHDLFMRRRKADSLEVQQMKAQAREEKARKQGQRGRSAEAGPAGSTRGGAKSQAEAPGDCHQAHVPAHEPNSSTVAS

SEQ ID NO: 21529 - protein, 72 aa, Homo sapiens
VCHHAWLIFVFLVEMGFRHVSQTGLELLTSGDPPTPASQSSGIIGVSHHARSLLSLEAHPWISTRSYFPPDL

SEQ ID NO: 21530 - protein, 45 aa, Homo sapiens
LAGSLVGWRRGRLCRGGPRHVLLPDFLVKPPSRKSSWDKLHLTSP

SEQ ID NO: 21531 - protein, 1239 aa, Homo sapiens
LAGSLVGWRRGRLCRGGPRHVLLPDFLVKPPSRKSSWDKLHLDEETRHSLECIQANQIFPRKQLIREDENLQVPFLELHGESTEFVGRAEDAIIALSNYRLHIKFKESLVNVPLQLIESVECRDIFQLHLTCKDCKVIRCQFSTFEQCQEWLKRLNNAIRPPAKIEDLFSFAYHAWCMEVYASEKEQHGDLCRPGEHVTSRFKNEVERMGFDMNNAWRISNINEKYKLCGSYPQELIVPAWITDKELESVSSFRSWKRIPAVIYRHQSNGAVIARCGQPEVSWWGWRNADDEHLVQSVAKACASDSRSSGSKLSTRNTSRDFPNGGDLSDVEFDSSLSNASGAESLAIQPQKLLILDARSYAAAVANRAKGGGCECPEYYPNCEVVFMGMANIHSIRRSFQSLRLLCTQMPDPGNWLSALESTKWLHHLSVLLKSALLVVHAVDQDQRPVLVHCSDGWDRTPQIVALAKLLLDPYYRTIEGFQVLVEMEWLDFGHKFADRCGHGENSDDLNERCPVFLQWLDCVHQLQRQFPCSFEFNEAFLVKLVQHTYSCLFGTFLCNNAKERGEKHTQERTCSVWSLLRAGNKAFKNLLYSSQSEAVLYPVCHVRNLMLWSAVYLPCPSPTTPVDDSCAPYPAPGTSPDDPPLSRLPKTRSYDNLTTACDNTVPLASRRCSDPSLNEKWQEHRRSLELSSLAGPGEDPLSADSLGKPTRVPGGAELSVAAGVAEGQMENILQEATKEESGVEEPAHRAGIEIQEGKEDPLLEKESRRKTPEASAIGLHQDPELGDAALRSHLDMSWPLFSQGISEQQSGLSVLLSSLQVPPRGEDSLEVPVEQFRIEEIAEGREEAVLPIPVDAKVGYGTSQSCSLLPSQVPFETRGPNVDSSTDMLVEDKVKSVSGPQGHHRSCLVNSGKDRLPQTMEPSPSETSLVERPQVGSVVHRTSLGSTLSLTRSPCALPLAECKEGLVCNGAPETENRASEQPPGLSTLQMYPTPNGHCANGEAGRSKDSLSRQLSAMSCSSAHLHSRNLHHKWLHSHSGRPSATSSPDQPSRSHLDDDGMSVYTDTIQQRLRQIESGHQQEVETLKKQVQELKSRLESQYLTSSLHFNGDFGDEVTSIPDSESNLDQNCLSRCSTEIFSEASWEQVDKQDTEMTRWLPDHLAAHCYACDSAFWLASRKHHCRNCGNVFCSSCCNQKVPVPSQQLFEPSRVCKSCYSSLHPTSSSIDLELDKPIAATSN

SEQ ID NO: 21532 - protein, 20 aa, Homo sapiens
LSLIILYLDMGCLIKLGPFL

SEQ ID NO: 21533 - protein, 118 aa, Homo sapiens
LPPAPAPDEYLVSPITGEKIPASKMQEHMRIGLLDPRWLEQRDRSIREKQSDDEVYAPGLDIESSLKQLAERRTDIFGVEETAIGKKIGEEEIQKPEEKVRLKWNLVPSLPPVFHTWS

SEQ ID NO: 21534 - protein, 71 aa, Homo sapiens
LAALSVAVMPAGPVQAVPPPPPVPTEPKQPTEEEASSKEDSAPSKPVVGIIYPPPEVRNIVDKTASFVARS

SEQ ID NO: 21535 - protein, 157 aa, Homo sapiens
LAALSVAVMPAGPVQAVPPPPPVPTEPKQPTEEEASSKEDSAPSKPVVGIIYPPPEVRNIVDKTASFVARNGPEFEARIRQNEINNPKFNFLNPNDPYHAYYRHKVSEFKEGKAQEPSAAIPKVMQQQQQTTQQQLPQKVWSPVPPSLTQGLRGKQG

SEQ ID NO: 21536 - protein, 70 aa, Homo sapiens
LAALSVAVMPAGPVQAVPPPPPVPTEPKQPTEEEASSKEDSAPSKPVVGIIYPPPEVRNIVDKTASFVAR

SEQ ID NO: 21537 - protein, 328 aa, Homo sapiens
MFEENYPETLKRLFVVKAPKLFPVAYNLIKPFLSEDTRKKIMVLGANWKEVLLKHISPDQVPVEYGGTMTDPDGNPKCKSKINYGGDIPRKYYVRDQVKQQYEHSVQISRGSSHQVEYEILFPGCVLRWQFMSDGADVGFGIFLKTKMGERQRAGEMTEVLPNQRYNSHLVPEDGTLTCSDPGICYANEVGEAFRSLVPAAVVWLSYGVASSYVLADAIDKGKKAGEVPSPEAGRSARVTVAVVDTFVWQALASVAIPGFTINRVCAASLYVLGTATRWPLAVRKWTTTALGLLTIPIIIHPIDRSVDFLLDSSLRKLYPTVGKPSSS

SEQ ID NO: 21538 - protein, 19 aa, Homo sapiens
LLHLFCLTWTLENLALFNF

SEQ ID NO: 21539 - protein, 415 aa, Homo sapiens
LSLSAPAGTMSSRVGDLSPQQQEALARFRENLQDLLPILPNADDYFLLRWLRARNFDLQKSEDMLRRHMEFRKQQDLDNIVTWQPPEVIQLYDSGGLCGYDYEGCPVYFNIIGSLDPKGLLLSASKQDMIRKRIKVCELLLHECELQTQKLGRKIEMALMVFDMEGLSLKHLWKPAVEVYQQFFSILEANYPETLKNLIVIRAPKLFPVAFNLVKSFMSEETRRKIVILGDNWKQELTKFISPDQLPVEFGGTMTDPDGNPKCLTKINYGGEVPKSYYLCEQVRLQYEHTRSVGRGSSLQVENEILFPGCVLRWQFASDGGDIGFGVFLKTKMGEQQSAREMTEVLPSQRYNAHMVPEDGSLTCLQAGVYVLRFDNTYSRMHAKKLSYTVEVLLPDKASEETLQSLKAMRPSPTQ

SEQ ID NO: 21540 - protein, 369 aa, Homo sapiens
LSLSAPAGTMSSRVGDLSPQQQEALARFRENLQDLLPILPNADDYFLLRWLRARNFDLQKSEDMLRRHMEFRKQQDLDNIVTWQPPEVIQLYDSGGLCGYDYEGCPVYFNIIGSLDPKGLLLSASKQDMIRKRIKVCELLLHECELQTQKLGRKIEMALMVFDMEGLSLKHLWKPAVEVYQQFFSILEANYPETLKNLIVIRAPKLFPVAFNLVKSFMSEETRRKIVILGDNWKQELTKFISPDQLPVEFGGTMTDPDGNPKCLTKINYGGEVPKSYYLCEQVRLQYEHTRSVGRGSSLQVENEILFPGCVLRWQFASDGGDIGFGVFLKTKMGEQQSAREMTEVLPSQRYNAHMVPEDGSLTCLQAGV

SEQ ID NO: 21541 - protein, 102 aa, Homo sapiens
LSLSAPAGTMSSRVGDLSPQQQEALARFRENLQDLLPILPNADDYFLLRWLRARNFDLQKSEDMLRRTQVPPAHLLSPRSESLAHGVPEATRPGQHCHMAAP

SEQ ID NO: 21542 - protein, 21 aa, Homo sapiens
LEEVAMEDSLRYRQPLPHNRE

SEQ ID NO: 21543 - protein, 21 aa, Homo sapiens
LRLSFLLCLSMCVGLKSLCKL

SEQ ID NO: 21544 - protein, 38 aa, Homo sapiens
LLLGIRRPEFLSRPSVQTEDAPSKVNYDSRLLESRVLV

SEQ ID NO: 21545 - protein, 29 aa, Homo sapiens
LTSWVPWLIPCLVLDMSALSGPQFPPFAE

SEQ ID NO: 21546 - protein, 153 aa, Homo sapiens
LRIICGRVPMSLLLPPLALLLLLAALVAPATAATAYRPDWNRLSGLTRARVETCGGQLNRLKEVKAFVTQDIPFYHNLVMKHLPGADPELVLLGRRYEELERIPLSEMTREEINALVQELGFYRKAAPDAQVPPEYVWAPAKPPEETSDHADL

SEQ ID NO: 21547 - protein, 44 aa, Homo sapiens
MSLLLPPLALLLLLAALVAPATAATAYRPDWNRLSGLTRARVEA

SEQ ID NO: 21548 - protein, 281 aa, Homo sapiens
VSVRLAAFGHMLCFLNCHLPAHMDKAEQRKDNFQTILSLQQFQGPGAQGILDHDLVFWFGDLNFRIESYDLHFVKFAIDSDQLHQLWEKDQLNMAKNTWPILKGFQEGPLNFAPTFKFDVGTNKYDTSAKKRKPAWTDRILWKVKAPGGGPSPSGRKSHRLQVTQHSYRSHMEYTVSDHKPVAAQFLLQFAFRDDMPLVRLEVADEWVRPEQAVVRYRMETVFARSSWDWIGLYRVTFSEESLPKGHGDFILGYYSHNHSILIGITEPFQVSRPDCWAGGA

SEQ ID NO: 21549 - protein, 693 aa, Homo sapiens
LRGAAVSPASSSPFPRSRDHVRAGGCSECQDSLTNWYYEKDGKLYCPKDYWGKFGEFCHGCSLLMTGPFMVAGEFKYHPECFACMSCKVIIEDGDAYALVQHATLYCGKCHNEVVLAPMFERLSTESVQEQLPYSVTLISMPATTEGRRGFSVSVESACSNYATTVQVKEVNRMHISPNNRNAIHPGDRILEINGTPVRTLRVEEVEDAISQTSQTLQLLIEHDPVSQRLDQLRLEARLAPHMQNAGHPHALSTLDTKENLEGTLRRRSLRRSNSISKSPGPSSPKEPLLFSRDISRSESLRCSSSYSQQIFRPCDLIHGEVLGKGFFGQAIKVTHKATGKVMVMKELIRCDEETQKTFLTEVKVMRSLDHPNVLKFIGVLYKDKKLNLLTEYIEGGTLKDFLRSMDPFPWQQKVRFAKGIASGMAYLHSMCIIHRDLNSHNCLIKLDKTVVVADFGLSRLIVEERKRAPMEKATTKKRTLRKNDRKKRYTVVGNPYWMAPEMLNGKSYDETVDIFSFGIVLCEIIGQVYADPDCLPRTLDFGLNVKLFWEKFVPTDCPPAFFPLAAICCRLEPESRAPPGAAGEGPGCADDEGPVRRQGKVTIKYDPKELRKHLNLEEWILEQLTRLYDCQEEEISELEIDVDELLDMESDDAWASRVKELLVDCYKPTEAFISGLLDKIRAMQKLSTPQKK

SEQ ID NO: 21550 - protein, 41 aa, Homo sapiens [sequence omitted]

SEQ ID NO: 21551 - protein, 16 aa, Homo sapiens
MDSDLSSFCTGKRVVS

SEQ ID NO: 21552 - protein, 157 aa, Homo sapiens
LGLWSQNWVVTLSLSCWGWGEGVLSSSECVCVCTHVCICACVVGSGQVSKVPLGSLFSRPDHLNGHIKQVHTSERPHKCQTCNASFATRDRLRSHLACHEDKVPCQVCGKYLRAAYMADHLKKHSEGPSNFCSICNRGNLPTVSSLPEDGPERVWEA

SEQ ID NO: 21553 - protein, 172 aa, Homo sapiens
LGLWSQNWVVTLSLSCWGWGEGVLSSSECVCVCTHVCICACVVGSGQVSKVPLGSLFSRPDHLNGHIKQVHTSERPHKCQVWVGSSSGLPPLEPLPSDLPSWDFAQPALWRSSHSVPDTAFSLSLKKSFPALENLGPAHSSNTLFCPAPPGYLRQGWTTPEGSRAFTQWPVG

SEQ ID NO: 21554 - protein, 142 aa, Homo sapiens
LLSFVENSLLQRVVVVEVQEKLLDLPGIIEGAKDGKGRGRQVIAVARTCNLILIVLDVLKPLGHKKIIENELEGFGIRLNSKPPNIGFKKKDKGGINLTATKRRFAMLPRLVLNFWPQAVSCFGLPKCWDYSAPRVSWMLKL

SEQ ID NO: 21555 - protein, 137 aa, Homo sapiens
LFFFTFCRVYIPCIYVLNKIDQISIEELDIIYKVPHCVPISAHHRWNFDDLLEKIWDYLKLVRIYTKPKGQLPDYTSPVVLPYSRTTVEDFCMKIHKNLIKEFKYALVWGLSVKHNPQKVGKDHTLEDEDVIQIVKK

SEQ ID NO: 21556 - protein, 65 aa, Homo sapiens
LHRQSTQLLAQRLSRTCFRQWRQQAHQLPSVCSLHKNSYFKASFSLYSVVLKNTSVEAGRSGSRL

SEQ ID NO: 21557 - protein, 40 aa, Homo sapiens
VFLIWERGEISGLIRVLPISFSLKLSTVFCFLFFFPSFSF

SEQ ID NO: 21558 - protein, 255 aa, Homo sapiens
LLVKFLLVSKWRQLVFCPSILVLLPPLLLAAVAFPSAVVTELNEPLSNEDRNLLSVAYKNVVGARRSSWRVISSIEQKTMADGNEKKLEKVKAYREKIEKELETVCNDVLSLLDKFLIKNCNDFQYESKVFYLKMKGDYYRYLAEVASGEKKNSVVEASEAAYKEAFEISKEQMQPTHPIRLGLALNFSVFYYEIQNAPEQACLLAKQAFDDAIAELDTLNEDSYKDSTLIMQLLRDNLTLWTSDQQDEEAGEGN

SEQ ID NO: 21559 - protein, 65 aa, Homo sapiens
VLNLSVLAAQLLRSALLSLGKQFQINHGHCWTDGCFEPTGAPFLNCVEKCVLMRHFTMPVDLWEI

SEQ ID NO: 21560 - protein, 29 aa, Homo sapiens
MDLFFVTLWLLSLCILTAPCVSAHVNQDG

SEQ ID NO: 21561 - protein, 219 aa, Homo sapiens [sequence omitted]

SEQ ID NO: 21562 - protein, 12 aa, Homo sapiens
MFGGLSLTAFLA

SEQ ID NO: 21563 - protein, 476 aa, Homo sapiens
LIPGVGGSGGSSNGLSPGEPVQLSSGTAHRPKDALRAVKKRIVGNKNFHEVMLALTVLETCVKNCGHRFHVLVASQDFVESVLVRTILPKNNPPTIVHDKVLNLIQSWADAFRSSPDLTGVVTIYEDLRRKGLEFPMTDLDMLSPIHTPQRTVFNSETQSGQDSVGTDSSQQEDSGQHAAPLPAPPILSGDTPIAPTPEQIGKLRSELEMVSGNVRVMSEMLTELVPTQAEPADLELLQELNRTCRAMQQRVLELIPQIANEQLTEELLIVNDNLNNVFLRHERFERFRTGQTTKAPSEAEPAADLIDMGPDPAATGNLSSQLAGMNLGSSSVRAGLQSLEASGRLEDEFDMFALTRGSSLADQRKEVKYEAPQATDGLAGALDARQQSTGAIPVTQACLMEDIEQWLSTDVGNDAEEPKGVTSEEFDKFLEERAKAADRLPNLSSPSAEGPPGPPSGPAPRKKTQEKDDDMLFAL

SEQ ID NO: 21564 - protein, 292 aa, Homo sapiens
LDTQNSPKDALRAVKKRIVGNKNFHEVMLALTVLETCVKNCGHRFHVLVASQDFVESVLVRTILPKNNPPTIVHDKVLNLIQSWADAFRSSPDLTGVVTIYEDLRRKGLEFPMTDLDMLSPIHTPQRTVFNSETQSGQDSVGTDSSQQEDSGQHAAPLPAPPILSGDTPIAPTPEQIGKLRSELEMVSGNVRVMSEMLTELVPTQAEPADLELLQELNRTCRAMQQRVLELIPQIANEQLTEELLIVNDNLNNVFLRHERDRGLTVLPRLVSNSWPQAVLPPWPPKALVLQA

SEQ ID NO: 21565 - protein, 245 aa, Homo sapiens
LASSSPPSLASESIGITGMSHHTHLPTLYHSVQESHPQERLGLAELHCAYQLGFERFRTGQTTKAPSEAEPAADLIDMGPDPAATGNLSSQLAGMNLGSSSVRAGLQSLEASGRLEDEFDMFALTRGSSLADQRKEVKYEAPQATDGLAGALDARQQSTGAIPVTQACLMEDIEQWLSTDVGNDAEEPKGVTSEEFDKFLEERAKAADRLPNLSSPSAEGPPGPPSGPAPRKKTQEKDDDMLFAL

SEQ ID NO: 21566 - protein, 184 aa, Homo sapiens
LDEREKVKEGRGGGQRAIERSLSSIPEDCAMGLSDGEWQLVLNVWGKVEADIPGHGQEVLIRLFKGHPETLEKFDKFKHLKSEDEMKASEDLKKHGATVLTALGGILKKKGHHEAEIKPLAQSHATKHKIPVKYLEFISECIIQVLQSKHPGDFGADAQGAMNKALELFRKDMASNYKELGFQG

SEQ ID NO: 21567 - protein, 172 aa, Homo sapiens
LAGGSARTAGEKGSCDCAMGLSDGEWQLVLNVWGKVEADIPGHGQEVLIRLFKGHPETLEKFDKFKHLKSEDEMKASEDLKKHGATVLTALGGILKKKGHHEAEIKPLAQSHATKHKIPVKYLEFISECIIQVLQSKHPGDFGADAQGAMNKALELFRKDMASNYKELGFQG

SEQ ID NO: 21568 - protein, 169 aa, Homo sapiens
MEKKKMVTQGNQEPTTTPDAMVQPFTTIPFPPPPQNGIPTEYGVPHTQDYAGQTGEHNLTLYGSTQAHGEQSSNSPSTQNGSLTTEGGAQTDGQQSQTQSSENSESKSTPKRLHVSNIPFRFRDPDLRQMFGQFGKILDVEIIFNERGSKVSSISVSSVLDFFLSFMLF

SEQ ID NO: 21569 - protein, 101 aa, Homo sapiens
LWHDASFAIMRFKSHTVELRRPCSDMEGAALLRVSVLCIWMSALFLGVGVRAEEAGARVQQNVPSGTDTGDPQSKPLGDWAAGTMDPGRLTSSSLLVPTRT

SEQ ID NO: 21570 - protein, 423 aa, Homo sapiens
LWHDASFAIMRFKSHTVELRRPCSDMEGAALLRVSVLCIWMSALFLGVGVRAEEAGARVQQNVPSGTDTGDPQSKPLGDWAAGTMDPESSIFIEDAIKYFKEKVSTQNLLLLLTDNEAWNGFVAAAELPRNEADELRKALDNLARQMIMKDKNWHDKGQQYRNWFLKEFPRLKSELEDNIRRLRALADGVQKVHKGTTIANVVSGSLSISSGILTLVGMGLAPFTEGGSLVLLEPGMELGITAALTGITSSTMDYGKKWWTQAQAHDLVIKSLDKLKEVREFLGENISNFLSLAGNTYQLTRGIGKDIRALRRARANLQSVPHASASRPRVTEPISAESGEQVERVNEPSILEMSRGVKLTDVAPVSFFLVLDVVYLVYESKHLHEGAKSETAEELKKVAQELEEKLNILNNNYKILQADQEL

SEQ ID NO: 21571 - protein, 28 aa, Homo sapiens
VIMMMNLVPSLFFIALPHQQSALSHQAS

SEQ ID NO: 21572 - protein, 909 aa, Homo sapiens
VLVPACPELTREMVLAQGLLSMALLALCWERSLAGAEETIPLQTLRCYNDYTSHITCRWADTQDAQRLVNVTLIRRVNEDLLEPVSCDLSDDMPWSACPHPRCVPRRCVIPCQSFVVTDVDYFSFQPDRPLGTRLTVTLTQHVQPPEPRDLQISTDQDHFLLTWSVALGSPQSHWLSPGDLEFEVVYKRLQDSWEDAAILLSNTSQATLGPEHLMPSSTYVARVRTRLAPGSRLSGRPSKWSPEVCWDSQPGDEAQPQNLECFFDGAAVLSCSWEVRKEVASSVSFGLFYKPSPDAGEEECSPVLREGLGSLHTRHHCQIPVPDPATHGQYIVSVQPRRAEKHIKSSVNIQMAPPSLNVTKDGDSYSLRWETMKMRYEHIDHTFEIQYRKDTATWKDSKTETLQNAHSMALPALEPSTRYWARVRVRTSRTGYNGIWSEWSEARSWDTESVLPMWVLALIVIFLTIAVLLALRFCGIYGYRLRRKWEEKIPNPSKSHLFQNGSAELWPPGSMSAFTSGSPPHQGPWGSRFPELEGVFPVGFGDSEVSPLTIEDPKHVCDPPSGPDTTPAASDLPTEQPPSPQPGPPAASHTPEKQASSFDFNGPYLGPPHSRSLPDILGQPEPPQEGGSQKSPPPGSLEYLCLPAGGQVQLVPLAQAMGPGQAVEVERRPSQGAAGSPSLESGGGPAPPALGPRVGGQDQKDSPVAIPMSSGDTEDPGVASGYVSSADLVFTPNSGASSVSLVPSLGLPSDQTPSLCPGLASGPPGAPGPVKSGFEGYVELPPIEGRSPRSPRNNPVPPEAKSPVLNPGERPADVSPTSPQPEGLLVLQQVGDYCFLPGLGPGPLSLRSKPSSPGPGPEIKNLDQAFQVKKPPGQAVPQVPVIQLFKALKQQDYLSLPPWEVNKPGEVC

SEQ ID NO: 21573 - protein, 915 aa, Homo sapiens
VLVPACPELTREMVLAQGLLSMALLALCWERSLAGAEETIPLQTLRCYNDYTSHITCRWADTQDAQRLVNVTLIRRVNEDLLEPVSCDLSDDMPWSACPHPRCVPRRCVIPCQSFVVTDVDYFSFQPDRPLGTRLTVTLTQHVQPPEPRDLQISTDQDHFLLTWSVALGSPQSHWLSPGDLEFEVVYKRLQDSWEDAAILLSNTSQATLGPEHLMPSSTYVARVRTRLAPGSRLSGRPSKWSPEVCWDSQPGDEAQPQNLECFFDGAAVLSCSWEVRKEVASSVSFGLFYKPSPDAGSAVLLREEECSPVLREGLGSLHTRHHCQIPVPDPATHGQYIVSVQPRRAEKHIKSSVNIQMAPPSLNVTKDGDSYSLRWETMKMRYEHIDHTFEIQYRKDTATWKDSKTETLQNAHSMALPALEPSTRYWARVRVRTSRTGYNGIWSEWSEARSWDTESVLPMWVLALIVIFLTIAVLLALRFCGIYGYRLRRKWEEKIPNPSKSHLFQNGSAELWPPGSMSAFTSGSPPHQGPWGSRFPELEGVFPVGFGDSEVSPLTIEDPKHVCDPPSGPDTTPAASDLPTEQPPSPQPGPPAASHTPEKQASSFDFNGPYLGPPHSRSLPDILGQPEPPQEGGSQKSPPPGSLEYLCLPAGGQVQLVPLAQAMGPGQAVEVERRPSQGAAGSPSLESGGGPAPPALGPRVGGQDQKDSPVAIPMSSGDTEDPGVASGYVSSADLVFTPNSGASSVSLVPSLGLPSDQTPSLCPGLASGPPGAPGPVKSGFEGYVELPPIEGRSPRSPRNNPVPPEAKSPVLNPGERPADVSPTSPQPEGLLVLQQVGDYCFLPGLGPGPLSLRSKPSSPGPGPEIKNLDQAFQVKKPPGQAVPQVPVIQLFKALKQQDYLSLPPWEVNKPGEVC

SEQ ID NO: 21574 - protein, 901 aa, Homo sapiens
VLVPACPELTREMVLAQGLLSMALLALCWERSLAGAEETIPLQTLRCYNDYTSHITCRWADTQDAQRLVNVTLIRRVNEDLLEPVSCDLSDDMPWSACPHPRCVPRRCVIPCQSFVVTDVDYFSFQPDRPLGTRLTVTLTQHVQPPEPRDLQISTDQDHFLLTWSVALGSPQSHWLSPGDLEFEVVYKRLQDSWEDAAILLSNTSQATLGPEHLMPSSTYVARVRTRLAPGSRLSGRPSKWSPEVCWDSQPGDEAQPQNLECFFDGAAVLSCSWEVRKEVASSVSFGLFYKPSPDAGEEECSPVLREGLGSLHTRHHCQIPVPDPATHGQYIVSVQPRRAEKHIKSSVNIQMAPPSLNVTKDGDSYSLRWETMKMRYEHIDHTFEIQYRKDTATWKDSKTETLQNAHSMALPALEPSTRYWARVRVRTSRTGYNGIWSEWSEARSWDTESVLPMWVLALIVIFLTIAVLLALRFCGIYGYRLRRKWEEKIPNPSKSHLFQNGSAELWPPGSMSAFTSGSPPHQGPWGSRFPELEGVFPVGFGDSEVSPLTIEDPKHVCDPPSGPDTTPAASDLPTEQPPSPQPGPPAASHTPEKQASSFDFNGPYLGPPHSRSLPDILGQPEPPQEGGSQKSPPPGSLEYLCLPAGGQVQLVPLAQAMGPGQAVEVERRPSQGAAGSPSLESGGGPAPPALGPRVGGQDQKDSPVAIPMSSGDTEDPGVASGYVSSADLVFTPNSGASSVSLVPSLGLPSDQTPSLCPGLASGPPGAPGPVKSGFEGYVELPPIEGRSPRSPRNNPVPPEAKSPVLNPGERPADVSPTSPQPEGLLVLQQVGDYCFLPGLGPGPLSLRSKPSSPGPGPEIKNLDQAFQVKKPPGQAVPQVPVIQLFKALVVSVMSVGPPVP

SEQ ID NO: 21575 - protein, 148 aa, Homo sapiens [sequence omitted]

SEQ ID NO: 21576 - protein, 41 aa, Homo sapiens
LIHLGQRAASYGPDSGTLEAGELGLPGEAAGDGVCAARGAS

SEQ ID NO: 21577 - protein, 332 aa, Homo sapiens
VEGAGSSGSEWPRRWAVPESPPFGPLQARSPSVAAMASPQLCRALVSAQWVAEALRAPRAGQPLQLLDASWYLPKLGRDARREFEERHIPGAAFFDIDQCSDRTSPYDHMLPGAEHFAEYAGRLGVGAATHVVIYDASDQGLYSAPRVWWMFRAFGHHAVSLLDGGLRHWLRQNLPLSSGKSQPAPAEFRAQLDPAFIKTYEDIKENLESRRFQVVDSRATGRFRGTEPEPRDGIEPGHIPGTVNIPFTDFLSQEGLEKSPEEIRHLFQEKKVDLSKPLVATCGSGVTACHVALGAYLCGKPDVPIYDGSWVEWYMRARPEDVISEGRGKTH

SEQ ID NO: 21578 - protein, 64 aa, Homo sapiens
LPLYPLHRKWAGSGLLVFAAPAARAQQGPGEMATVPAPGRTGERALPPPHVSARASFLGSTLWM

SEQ ID NO: 21579 - protein, 16 aa, Homo sapiens
LRLLIGASFLGSTLWM

SEQ ID NO: 21580 - protein, 11 aa, Homo sapiens
LASFLGSTLWM

SEQ ID NO: 21581 - protein, 55 aa, Homo sapiens
LPSLPPGAMDSEKRSMWVQGRGCPLLSHTARLAGWPRVSSTPFRTSVSPHVTWGL

SEQ ID NO: 21582 - protein, 829 aa, Homo sapiens
LAPHSEASAMLRLGLCAAALLCVCRPGAVRADCWLIEGDKGYVWLAICSQNQPPYETIPQHINSTVHDLRLNENKLKAVLYSSLNRFGNLTDLNLTKNEISYIEDGAFLGQSSLQVLQLGYNKLSNLTEGMLRGMSRLQFLFVQHNLIEVVTPTAFSECPSLISIDLSSNRLSRLDGATFASLASLMVCELAGNPFNCECDLFGFLAWLVVFNNVTKNYDRLQCESPREFAGYPLLVPRPYHSLNAITVLQAKCRNGSLPARPVSHPTPYSTDAQREPDENSGFNPDEILSVEPPASSTTDASAGPAIKLHHVTFTSATLVVIIPHPYSKMYILVQYNNSYFSDVMTLKNKKEIVTLDKLRAHTEYTFCVTSLRNSRRFNHTCLTFTTRDPVPGDLAPSTSTTTHYIMTILGCLFGMVIVLGAVYYCLRKRRMQEEKQKSVNVKKTILEMRYGADVDAGSIVHAAQKLGEPPVLPVSRMASIPSMIGEKLPTAKGLEAGLDTPKVATKGNYIEVRTGAGGDGLARPEDDLPDLENGQGSAAEISTIAKEVDKVNQIINNCIDALKLDSASFLGGGSSSGDPELAFECQSLPAAAAASSATGPGALERPSFLSPPYKESSHHPLQRQLSADAAVTRKTCSVSSSGSIKSAKVFSLDVPDHPAATGLAKGDSKYIEKGSPLNSPLDRLPLVPAGSGGGSGGGGGIHHLEVKPAYHCSEHRHSFPALYYEEGADSLSQRVSFLKPLTRSKRDSTYSQLSPRHYYSGYSSSPEYSSESTHKIWERFRPYKKHHREEVYMAAGHALRKKVQFAKDEDLHDILDYWKGVSAQQKL

SEQ ID NO: 21583 - protein, 409 aa, Homo sapiens
LVFLQPLGCSTLRGSLLSLPAWVFSQQRVEAAGLEGACLEAEAQQRTLLWNQGSTLPSLMDSKACQSFHEALEAWAKGPGAEPFYIRANLTLPERADPHALCVKAQEILRLVDSAYKRRQEWFCTRVDPLTLRDLDRGTVPNYQRAQQLLEVQEKCLPSSRHRGPRSNLKKRALDQLRLVRPKPVGAPAGDSPDQLLLEPCAEPERSLRPYSLVRPLLVSALRPVVLLPECLAPRLIRNLLDLPSSRLDFQVCPAESLSGEELCPSSAPGAPKAQPATPGLGSRIRAIQESVGKKHCLLELGARGVRELVQNEIYPIVIHVEVTEKNVREVRGLLGRPGWRDSELLRQCRGSEQVLWGLPCSWVQVPAHEWGHAEELAKVVRGRILQEQARLVWVECGSSRGCPSSSEA

SEQ ID NO: 21584 - protein, 1044 aa, Homo sapiens
VRLLPADPEDTAMPGRAEAGEAEEEAGAGSGSEAEEDALWERIEGVRHRLARALNPAKLTPYLRQCRVIDEQDEEEVLSTYRFPCRVNRTGRLMDILRCRGKRGYEAFLEALEFYYPEHFTLLTGQEPAQRCSMILDEEGPEGLTQFLMTEVRRLREARKSQLQREQQLQARGRVLEEERAGLEQRLRDQQQAQERCQRLREDWEAGSLELLRLKDENYMIAMRLAQLSEEKNSAVLRSRDLQLAVDQLKLKVSRLEEECALLRRARGPPPGAEEKEKEKEKEKEPDNVDLVSELRAENQRLTASLRELQEGLQQEASRPGAPGSERILLDILEHDWREAQDSRQELCQKLHAVQGELQWAEELRDQYLQEMEDLRLKHRTLQKDCDLYKHRMATVLAQLEEIEKERDQAIQSRDRIQLQYSQSLIEKDQYRKQVRGLEAERDELLTTLTSLEGTKALLEVQLQRAQGGTCLKACASSHSLCSNLSSTWSLSEFPSPLGGPEATGEAAVMGGPEPHNSEEATDSEKEINRLSILPFPPSAGSILRRQREEDPAPPKRSFSSMSDITGSVTLKPWSPGLSSSSSSDSVWPLGKPEGLLARGCGLDFLNRSLAIRVSGRSPPGGPEPQDKGPDGLSFYGDRWSGAVVRRVLSGPGSARMEPREQRVEAAGLEGACLEAEAQQRTLLWNQGSTLPSLMDSKACQSFHEALEAWAKGPGAEPFYIRANLTLPERADPHALCVKAQEILRLVDSAYKRRQEWFCTRVDPLTLRDLDRGTVPNYQRAQQLLEVQEKCLPSSRHRGPRSNLKKRALDQLRLVRPKPVGAPAGDSPDQLLLEPCAEPERSLRPYSLVRPLLVSALRPVVLLPECLAPRLIRNLLDLPSSRLDFQVCPAESLSGEELCPSSAPGAPKAQPATPGLGSRIRAIQESVGKKHCLLELGARGVRELVQNEIYPIVIHVEVTEKNVREVRGLLGRPGWRDSELLRQCRGSEQVLWGLPCSWVQVPAHEWGHAEELAKVVRGRILQEQARLVWVECGSSRGCPSSSEA

SEQ ID NO: 21585 - protein, 20 aa, Homo sapiens
MSWAGWGVLWMGASCGWGRV

SEQ ID NO: 21586 - protein, 43 aa, Homo sapiens
LVRLPGNILLDSIMACGLVASNLNLKPGECLRVRGEVAPDAKR

SEQ ID NO: 21587 - protein, 148 aa, Homo sapiens
LVRLPGNILLDSIMACGLVASNLNLKPGECLRVRGEVAPDAKSFVLNLGKDSNNLCLHFNPRFNAHGDANTIVCNSKDGGAWGTEQREAVFPFQPGSVAEVCITFDQANLTVKLPDGYEFKFPNRLNLEAINYMAADGDFKIKCVAFD

SEQ ID NO: 21588 - protein, 34 aa, Homo sapiens
LDSIMACGLVASNLNLKPGECLRVRGEVAPDAKS

SEQ ID NO: 21589 - protein, 42 aa, Homo sapiens
LDSIMACGLVASNLNLKPGECLRVRGEVAPDAKSEFFQQASC

SEQ ID NO: 21590 - protein, 17 aa, Homo sapiens
MMRMYLYFVLLLTYLRG

SEQ ID NO: 21591 - protein, 88 aa, Homo sapiens
LRGGLVCFVGLFAMKVDVGGEKTQGSLFWLDEREPRNCEVSRNIFRVSEFSLSWAPVVRVSEPLASRREVVGSSQPAKEGGGKKPPPG

SEQ ID NO: 21592 - protein, 610 aa, Homo sapiens
LSQMARGLGKASGFPAGPSGAELPASGRRRGPLISLFPAVLASEAAMSYPADDYESEAAYDPYAYPSDYDMHTGDPKQDLAYERQYEQQTYQVIPEVIKNFIQYFHKTVSDLIDQKVYELQASRVSSDVIDQKVYEIQDIYENSWTKLTERFFKNTPWPEAEAIAPQVGNDAVFLILYKELYYRHIYAKVSGGPSLEQRFESYYNYCNLFNYILNADGPAPLELPNQWLWDIIDEFIYQFQSFSQYRCKTAKKSEEEIDFLRSNPKIWNVHSVLNVLHSLVDKSNINRQLEVYTSGGDPESVAGEYGRHSLYKMLGYFSLVGLLRLHSLLGDYYQAIKVLENIELNKKSMYSRVPECQVTTYYYVGFAYLMMRRYQDAIRVFANILLYIQRTKSMFQRTTYKYEMINKQNEQMHALLAIALTMYPMRIDESIHLQLREKYGDKMLRMQKGDPQVYEELFSYSCPKFLSPVVPNYDNVHPNYHKEPFLQQLKVFSDEVQQQAQLSTIRSFLKLYTTMPVAKLAGFLDLTEQEFRIQLLVFKHKMKNLVWTSGISALDGEFQSASEVDFYIDKDMIHIADTKVARRYGDFFIRQIHKFEELNRTLKKMGQRP

SEQ ID NO: 21593 - protein, 98 aa, Homo sapiens
LNPALTPRLAFLTIIPSTCLWFAAPASALYLEQCIFHCSRLGILSSLPSICGLQPLVRTRGEAGHQEVAQSPGWPKSLHLGPASWKLFKQPPQNCWFP

SEQ ID NO: 21594 - protein, 555 aa, Homo sapiens
VVGGKDSGSVLTRPWPEAQGPPPLPPSPPASPPSPELDRTPWDTVFHFLRTSPRLEERSEEVGVGLFARTPAAGPGEAAEAAAAAAGGDMAEEQDLSEVELSPVGSEEPRCLSPGSAPSLGPDGGGGGSGLRASPGPGELGKVKKEQQDGEADDDKFPVCIREAVSQVLSGYDWTLVPMPVRVNGASKSKPHVKRPMNAFMVWAQAARRKLADQYPHLHNAELSKTLGKLWRLLNESDKRPFIEEAERLRMQHKKDHPDYKYQPRRRKNGKAAQGEAECPGGEAEQGGTAAIQAHYKSAHLDHRHPGEGSPMSDGNPEHPSGQSHGPPTPPTTPKTELQSGKADPKRDGRSMGEGGKPHIDFGNVDIGEISHEVMSNMETFDVAELDQYLPPNGHPGHVSSYSAAGYGLGSALAVASGHSAWISKPPGVALPTVSPPGVDAKAQVKTETAGPQGPPHYTDQPSTSQIAYTSLSLPHYGSAFPSISRPQFDYSDHQPSGPYYGHSGQASGLYSAFSYMGPSQRPLYTAISDPSPSGPQSHSPTHWEQPVYTTLSRP

SEQ ID NO: 21595 - protein, 549 aa, Homo sapiens
LLTGGSSARQCHQWASRLTDSPPASPPSPELDRTPWDTVFHFLRTSPRLEERSEEVGVGLFARTPAAGPGEAAEAAAAAAGGDMAEEQDLSEVELSPVGSEEPRCLSPGSAPSLGPDGGGGGSGLRASPGPGELGKVKKEQQDGEADDDKFPVCIREAVSQVLSGYDWTLVPMPVRVNGASKSKPHVKRPMNAFMVWAQAARRKLADQYPHLHNAELSKTLGKLWRLLNESDKRPFIEEAERLRMQHKKDHPDYKYQPRRRKNGKAAQGEAECPGGEAEQGGTAAIQAHYKSAHLDHRHPGEGSPMSDGNPEHPSGQSHGPPTPPTTPKTELQSGKADPKRDGRSMGEGGKPHIDFGNVDIGEISHEVMSNMETFDVAELDQYLPPNGHPGHVSSYSAAGYGLGSALAVASGHSAWISKPPGVALPTVSPPGVDAKAQVKTETAGPQGPPHYTDQPSTSQIAYTSLSLPHYGSAFPSISRPQFDYSDHQPSGPYYGHSGQASGLYSAFSYMGPSQRPLYTAISDPSPSGPQSHSPTHWEQPVYTTLSRP

SEQ ID NO: 21596 - protein, 93 aa, Homo sapiens
LDTLFAALVIYNFLSLCYEYLGGESSIMSEIRGKPIESSCMYGTCCLWGKTYSIGFLRFCKQATLQFCVVKPLMAVSTVVLQAFGKYRDGDFE

SEQ ID NO: 21597 - protein, 107 aa, Homo sapiens
LPRIVRRRRHRHGLLRLACHFLQRFPSGSLLLPGTMTVRGDVLAPDPASPTTAAASPSVSVIPEGSPTAMEQPVFLMTTAAQAISGFFVWTALLITCHQPRARLGQV

SEQ ID NO: 21598 - protein, 246 aa, Homo sapiens
LGIEQSRRDDLESLGYVLMYFNLGSLPWQGLKAATKRQKYERISEKKMSTPIEVLCKGYPSEFSTYLNFCRSLRFDDKPDYSYLRQLFRNLFHRQGFSYDYVFDWNMLKFMRPPSCQPPALPCGRPQDELGCSPESRGCGPGAARTRTRGEDGAATGVRDPSPAPWPTHGGHCQPAPQCRRARGFHASLPHPAGWQYFSQSDLAGRPGEEGEYEAAQGCARQRLLLRPHWAARGLPDPSLTDKCAI

SEQ ID NO: 21599 - protein, 117 aa, Homo sapiens
LGCSARSPPPGLSSDPPPSGPASSQVTTPASGHARTQPQRPGPRAPAEAPQPLRQEERPMQRVLRQPEQQVAALHGGHLHHLRGHALALHAHDLLRGLPCLLALFRPPLLVYRLLPR

SEQ ID NO: 21600 - protein, 249 aa, Homo sapiens
LGHLETGAGDVAAALPARKFPRSLLGAGARLTGWTMNVFRILGDLSHLLAMILLLGKIWRSKCCKGISGKSQILFALVFTTRYLDLFTNFISIYNTVMKVVFLLCAYVTVYMIYGKFRKTFDSENDTFRLEFLLVPVIGLSFLENYSFTLLEILWTFSIYLESVAILPQLFMISKTGEAETITTHYLFFLGLYRALYLANWIRRYQTENFYDQIAVVSGVVQTIFYCDFFYLYVTKVLKGKKLSLPMPI

SEQ ID NO: 21601 - protein, 21 aa, Homo sapiens
VMFRHRMLKAMLLFLVCKLSF

SEQ ID NO: 21602 - protein, 31 aa, Homo sapiens
MHVKTLTSFFLIFHFLLNFTSLFVPPPSYRS

SEQ ID NO: 21603 - protein, 31 aa, Homo sapiens
LFCFLTEALISAADHSIHGRDKSTLAGSSSR

SEQ ID NO: 21604 - protein, 486 aa, Homo sapiens
LPTGFVAPILCVLLPSPTREAATVASATGDSASERESAAPAAAPTAEAPPPSVVTRPEPQALPSPAIRAPLPDLYPFGTMRGGGFGDRDRDRDRGGFGARGGGGLPPKKFGNPGERLRKKKWDLSELPKFEKNFYVEHPEVARLTPYEVDELRRKKEITVRGGDVCPKPVFAFHHANFPQYVMDVLMDQHFTEPTPIQCQGFPLALSGRDMVGIAQTGSGKTLAYLLPAIVHINHQPYLERGDGPICLVLAPTRELAQQVQQVADDYGKCSRLKSTCIYGGAPKGPQIRDLERGVEICIATPGRLIDFLESGKTNLRRCTYLVLDEADRMLDMGFEPQIRKIVDQIRPDRQTLMWSATWPKEVRQLAEDFLRDYTQINVGNLELSANHNILQIVDVCMESEKDHKLIQLMEEIMAEKENKTIIFVETKRRCDDLTRRMRRDGWPAMCIHGDKSQPERDWVLNEFRSGKAPILIATDVASRGLGLYR

SEQ ID NO: 21605 - protein, 34 aa, Homo sapiens
LCQVMIREMSCWGHIVGGRGAGMKACSGPAEVVT

SEQ ID NO: 21606 - protein, 46 aa, Homo sapiens
LPSIAAQHRETFRFLDKQALTIIPKQEFKNVFRNSNDMDGKDALLH

SEQ ID NO: 21607 - protein, 150 aa, Homo sapiens
LLWEAGLGALLGPGCPSSSGARRLPVPQRGQEWMSLFRLRPASTPPQLDETLSERLWGLTEMFPERVRSAAGATFDLSLFVAQKMYRFSRAALWIGTTSFMILVLPVVFETEKLQMEQQQQLQQRQILLGPNTGLSGGMPGALPSLPGKI

SEQ ID NO: 21608 - protein, 18 aa, Homo sapiens
VGFIFFLLIPIFSPSDKA

SEQ ID NO: 21609 - protein, 37 aa, Homo sapiens
LPPWALAALVQVVALLVCSLWGSWWGLGEEAGRSYPG

SEQ ID NO: 21610 - protein, 46 aa, Homo sapiens
MNHRVPEGLRQKCVFVPGRVAVGHGASCALKGTGCCDLLRGPGPTL

SEQ ID NO: 21611 - protein, 257 aa, Homo sapiens
LSHEDTLALLEGLVSRREAALKEDFRRETAARIQEELSALRAEHQQDSEDLFKKIVRASQESEARIQQLKSEWQRYWAPPAGLGLLLPSPTHSPGRTGEQSRRAESSDHLAKQMHDPGVLPGELCEGAEAAGGPAGRPAAGAGGSGTEAELGGGRSGPAAPADPGRAGRRGISVPGLDQSVPCPRWRGPRGAPSERGDASSAARAGEQDPHPCGRDAGQVGQGSRGLPEPDAAERRCDWSDRGAGAPHREAGPAALQ

SEQ ID NO: 21612 - protein, 56 aa, Homo sapiens
LLVAKTLLFRSLTTLAGVRWLRPRLRPPQEQHPPGKDIFCSHRVGRACFLNLLGVS

SEQ ID NO: 21613 - protein, 44 aa, Homo sapiens
VGLCRLLCLVRLFCCSSILYQRQERGVKSLFYPPNKLSHSEAEA

SEQ ID NO: 21614 - protein, 45 aa, Homo sapiens
VEAELGLELGLLLFRCLLCAFPASHLGVGRQGAVSETSQLLHLSC

SEQ ID NO: 21615 - protein, 127 aa, Homo sapiens
LALGLQSHRKFSAPRHGSLGFLPRKRSSRHRGKVKSFPKDDPSKPVHLTAFLGYKAGMTHIVREVDRPGSKVNKKEVVEAVTIVETPPMVVVGIVGYVETPRGLRTFKTVFAEHISDECKRRFYKNW

SEQ ID NO: 21616 - protein, 64 aa, Homo sapiens
MQPKQGLAWGRTGSSLFLTSACATTASRCPILCPQQTLSHGSPGSRVCECRLDLWFIPCHHPGS

SEQ ID NO: 21617 - protein, 59 aa, Homo sapiens
MALLTAFSSSVAVTDKDTFELSTFLDSSKAPQHDRNELPEQRGVGGGLDVPLRPVGFGG

SEQ ID NO: 21618 - protein, 63 aa, Homo sapiens
VPPLDLGWTDTGFYRGVSRVTLFTHPPKDEKAPHLKQVVRQMIQQAQKPLLPEDPEKKLGQRG

SEQ ID NO: 21619 - protein, 36 aa, Homo sapiens
VFLPSFVTLHVYALTILLSVTAKKKNKNKTKKSLVL

SEQ ID NO: 21620 - protein, 16 aa, Homo sapiens
MLKLLLILLVLHGHRN

SEQ ID NO: 21621 - protein, 84 aa, Homo sapiens
LATAVQKLQALFTLVLLLAMLETILPAQLTTVGKRCCLWIQDLCMDLQNLKRVRDDLRFRGVKGTTGTQASFLQLFEGDDHKVF

SEQ ID NO: 21622 - protein, 343 aa, Homo sapiens
LATAVQKLQALFTLVLLLAMLETILPAQLTTVGKRCCLWIQDLCMDLQNLKRVRDDLRFRGVKGTTGTQASFLQLFEGDDHKVEQLDKMVTEKAGFKRAFIITGQTYTRKVDIEVLSVLASLGASVHKICTDIRLLANLKEMEEPFEKQQIGSSAMPYKRNPMRSERCCSLARHLMTLVMDPLQTASVQWFERTLDDSANRRICLAEAFLTADTILNTLQNISEGLVVYPKVIERRIRQELPFMATENIIMAMVKAGGSRQDCHEKIRVLSQQAASVVKQEGGDNDLIERIQVDAYFSPIHSQLDHLLDPSSFTGRASQQVQRFLEEEVYPLLKPYESVMKGR

SEQ ID NO: 21623 - protein, 416 aa, Homo sapiens
VGGASGRGGSSLFCLAAAAPFCAVTPSQRLGLEPGRSPPSFAHHLPTMDPRKVNELRAFVKMCKQDPSVLHTEEMRFLREWVESMGGKVPPATQKAKSEENTKEEKPDSKKVEEDLKADEPSSEESDLEIDKEGVIEPDTDAPQEMGDENAEITEEMMDQANDKKVAAIEALNDGELQKAIDLFTDAIKLNPRLAILYAKRASVFVKLQKPNAAIRDCDRAIEINPDSAQPYKWRGKAHRLLGHWEEAAHDLALACKLDYDEDASAMLKEVQPRAQKIAEHRRKYERKREEREIKERIERVKKAREEHERAQREEEARRQSGAQYGSFPGGFPGGMPGNFPGGMPGMGGGMPGMAGMPGLNEILSDPEVLAAMQDPEVMVAFQDVAQNPANMSKYQSNPKVMNLISKLSAKFGGQA

SEQ ID NO: 21624 - protein, 80 aa, Homo sapiens
LLNFCLSLSSFLFLPTICHPCHYPVGPVVARWLSLHRVIFNKIYVFFQHAFHFHCISRWLKTRQVCPLDNREWEFQKYGH

SEQ ID NO: 21625 - protein, 53 aa, Homo sapiens
MILTCKMSLGVSSLLAFFLLTLPPTHTHTHTHTHTHTHTLSIKLENSKNPQLL

SEQ ID NO: 21626 - protein, 675 aa, Homo sapiens
LVLPLLVLLLLAPARQAAAQRCPQACICDNSRRHVACRYQNLTEVPDAIPELTQRLDLQGNLLKVIPAAAFQGVPHLTHLDLRHCEVELVAEGAFRGLGRLLLLNLASNHLRELPQEALDGLGSLRRLELEGNALEELRPGTFGALGALATLNLAHNALVYLPAMAFQGLLRVRWLRLSHNALSVLAPEALAGLPALRRLSLHHNELQALPGPVLSQARGLARLELGHNPLTYAGEEDGLALPGLRELLLDGGALQALGPRAFAHCPRLHTLDLRGNQLDTLPPLQGPGQLRRLRLQGNPLWCGCQARPLLEWLARARVRSDGACQGPRRLRGEALDALRPWDLRCPGDAAQEEEELEERAVAGPRAPPRGPPRGPGEERAVAPCPRACVCVPESRHSSCEGCGLQAVPRGFPSDTQLLDLRRNHFPSVPRAAFPGLGHLVSLHLQHCGIAELEAGALAGLGRLIYLYLSDNQLAGLSAAALEGAPRLGYLYLERNRFLQVPGAALRALPSLFSLHLQDNAVDRLAPGDLGRTRALRWVYLSGNRITEVSLGALGPARELEKLHLDRNQLREVPTGALEGLPALLELQLSGNPLRALRDGAFQPVGRSLQHLFLNSSGLEQICPGAFSGLGPGLQSLHLQKNQLRALPALPSARRTPIKGRQCGADKVGKEKGRL

SEQ ID NO: 21627 - protein, 620 aa, Homo sapiens
LPPTRGPRRLLFLTATLASSVCRSPGEPTSLVNMASEDIAKLAETLAKTQVAGGQLSFKGKSLKLNTAEDAKDVIKEIEDFDSLEALRLEGNTVGVEAARVIAKALEKKSELKRCHWSDMFTGRLRTEIPPALISLGEGLITAGAQLVELDLSDNAFGPDGVQGFEALLKSSACFTLQELKLNNCGMGIGGGKILAAALTECHRKSSAQGKPLALKVFVAGRNRLENDGATALAEAFRVIGTLEEVHMPQNGINHPGITALAQAFAVNPLLRVINLNDNTFTEKGAVAMAETLKTLRQVEVINFGDCLVRSKGAVAIADAIRGGLPKLKELNLSFCEIKRDAALAVAEAMADKAELEKLDLNGNTLGEEGCEQLQEVLEGFNMAKVLASLSDDEDEEEEEEGEEEEEEAEEEEEEDEEEEEEEEEEEEEEPQQRGQGEKSATPSRKILDPNTGEPAPVLSSPPPADVSTFLAFPSPEKLLRLGPKSSVLIAQQTDTSDPEKVVSAFLKVSSVFKDEATVRMAVQDAVDALMQKAFNSSSFNSNTFLTRLLVHMGLLKSEDKVKAIANLYGPLMALNHMVQQDYFPKALAPLLLAFVTKPNSALESCSFARHSLLQTLYKV

SEQ ID NO: 21628 - protein, 15 aa, Homo sapiens
VGYSSWLFTGIIIAH

SEQ ID NO: 21629 - protein, 83 aa, Homo sapiens
LVGGPFLPPTSVCCSCQKTCLLLPAEREQSPEHHQECLLVYWQLATPSSPFTQTRGRDGKGFFTEHSGTPYRRKLDRLVNGFS

SEQ ID NO: 21630 - protein, 35 aa, Homo sapiens
MSGWESYYKTEGDEEAEEEQEENLEASVYPKCVHQ

SEQ ID NO: 21631 - protein, 53 aa, Homo sapiens
LFLFCFTGLLSPFLSSLPLPSFILLSSLFGTSVQSRQKQGGGTVERQKEPGES

SEQ ID NO: 21632 - protein, 618 aa, Homo sapiens
MEGDAETNVLECANQRLVISETDGEILTPGWDTQDRMGVESRTNIQELGNRNQREAGGENLPETQAHMGENQEQLRCKIDAETQTPEWENQDKNGSEDAVETQTFEKKDKKEAGEEDGEEIQAQGLGKQGQTGDENGEETQTPQWEKQDQMKGDADVEIQMEEGRNKDQVGGQDAAQTQSCGRENVGEVKKENSVETQALDWGKQECVGNGNVTEIQTPRWEKHDQGGSKKAKKTQASGGENQKQLSHEIQVGWGNKGLRRDEDAKETQIATKKKLREIREDWVVIQALWWGNRRQVASEIYREFEILCWENQNWIGGEHRAEIQASEKRDQRKDGCEDGTNILAPEAEIQEQLKGETDVETQSNEPLREEDGTDIQSLGRREVKGEDDKDTQELGRKNQGQLGNEFSGKIHIPKGKNQEHIRGEDGAHTQISESGNWGKLTSQIDGEMHSAEWKKDQQIGGENGAEIQIQGKRNLREVGGEDGVKTWAPGKETQSQFRSDLGRKILLSEWKSQKQMGSENGTEIQAPVERNQREPGGEDGVKTQRPKRENEDQLDSEIGGSHSPGRRNWELIGKDVAENQASEKRNQREVGNEDGRMIWRLRGKNWRLRAKKQTVKK

SEQ ID NO: 21633 - protein, 39 aa, Homo sapiens
LLGPSSQLPGPPGRQRSPGAGVAHKGSESLPVRTVGAGK

SEQ ID NO: 21634 - protein, 1284 aa, Homo sapiens
VPPQLRASEEMAVRQAATAGTPGPRREEEAALLFERAHYRHDPRWLLPVTPRLCLACALELLPDPGVSLVRKKHMLSCFQDALVRHTSLVTQLVSQDQRVCIHFISVLFGLLCSMEDGSVTDLCIEVLIQITTQLKLEQTIRCLLDECHKELCNMPSMRGSLATLTLLGKLVDAIPALADELVMEHGNLMEHLLRGLVYPSEGIQASVCYLYGKLYSSPVAAEMLSGHFREKLFPLFLSILDGAQTKELQINCLGLLRQLLKYDLFVSMIMNQDGLGESAKNIEGSSGNTSLPLVLKKLLLSRDETLQVASAHCITAVLVHSPAKHASAFIHADIPEFLFEHLSSSSEVLVWSSCNCLTLLVEEPLFFSKCHTVYGIEAVVRSLQGSLKMNNIELHKQGLLLFAEILTRQPEEIKLFTSSAMCRDAGRALQEAVSSPVLEVAAEALKATSAFLRKDHQSTPPVQYGELQALLEAMLNRCAEFSQTLLSRRPLGHASSRDSEKAILQRGKFLLSTLEGFRSACRLAIEFQSEPSAQENPFTAPSAKKEDTLEAFSEFLLSACDSLCIPMVMRHLEQTTHPALMEVFLSILHNLFVIVPHMKEKFSKKLASSSFIRLTLELKARFCSGLSHSALNQVCSNFLYYMCLNLLSAPEKTGPPSKEELSAVSELLQHGLPQISSRSPESLAFLSDRQYMEGAARQRQYCILLLFYLAYIHEDRFVSEAELFEAVQSFLLSLQDQGERPPLVVFKASIYLLAICQDKDNTLRETMVSAIRKFLEGIPDLQLVYTHHPLLLRFFLLYPELMSRYGHRVLELWFFWEESSYEELDDVTSAGQPALPASLVVLFQLLRSIPSILLILLDLIYSSPVDTAHKVLISLRTFLRRNEDIQVGGLIRGHFLLILQRLLVEHGASPSGASGNLPLLLSLLSLMQLRNVSEQELDSVAMKLLHQVSKLCGKCSPTDVDILQPSFNFLYWSLHQTTPSSQKRAAAVLLSSTGLMELLEKMLALTLAKADSPRTALLCSAWLLTASFSAQQHKGSLQVHQTLSVEMDQVLKALSFPKKKAALLSAAILCFLRTALRQSFSSALVALVPSGAQPLPATKDTVLAPLRMSQVRSLVIGLQNLLVQKDPLLSQACVGCLEALLDYLDARSPDIALHVASQPWNRFLLFTLLDAGENSFLRPEILRLMTLFMRYRSSSVLSHEEVGDVLQGVALADLSTLSNTTLQALHGFFQQLQSMGHLADHSMAQTLQASLEGLPPSTSSGQPPLQDMLCLGGVAVSLSHIRN

SEQ ID NO: 21635 - protein, 22 aa, Homo sapiens
MIEALLVKYRVTRESSFPQLMS

SEQ ID NO: 21636 - protein, 199 aa, Homo sapiens
LGYRSKEPVRFYHDWNDKEIEVLNKHLFLTSKPMVYLVNLSEKDYIRKKNKWLIKIKEWVDKYDPGALVIPFSGALELKLQELSAEERQQYLEANMTQSALPKIIKAGFAALQLKYFFTAGPDEVRARTIRKGTKAPQAAGKIHTDFEKGFIMAEVMKYEDFKEEGSENAVKAAGKYRQQGRNYIVEDGDIIFFKFNTP

SEQ ID NO: 21637 - protein, 158 aa, Homo sapiens [sequence omitted]

SEQ ID NO: 21638 - protein, 19 aa, Homo sapiens
LGPGLRAHDRALAGLVLSL

SEQ ID NO: 21639 - protein, 51 aa, Homo sapiens
LASPPARSQEASAAGAPGAARGPEAGGADSRTPPAHTRRLCTQGLARPAGH

SEQ ID NO: 21640 - protein, 18 aa, Homo sapiens
LVFQVLGAGGSLLALCLG

SEQ ID NO: 21641 - protein, 329 aa, Homo sapiens
LLRSDAGPGATVSAAAAAATERARRGATMGAQLSTLGHMVLFPVWFLYSLLMKLFQRSTPAITLESPDIKYPLRLIDREIISHDTRRFRFALPSPQHILGLPVGQHIYLSARIDGNLVVRPYTPISSDDDKGFVDLVIKVYFKDTHPKFPAGGKMSQYLESMQIGDTIEFRGPSGLLVYQGKGKFAIRPDKKSNPIIRTVKSVGMIAGGTGITPMLQVIRAIMKDPDDHTVCHLLFANQTEKDILLRPELEELRNKHSARFKLWYTLDRAPEAWDYGQGFVNEEMIRDHLPPPEEEPLVLMCGPPPMIQYACLPNLDHVGHPTERCFVF

SEQ ID NO: 21642 - protein, 86 aa, Homo sapiens
LGHMVLFPVWFLYSLLMKLFQRSTPAITLESPDIKYPLRLIDREIISHDTRRFRFALPSPQHILGLPVGESRPCWAHSEPGRLLGH

SEQ ID NO: 21643 - protein, 106 aa, Homo sapiens [sequence omitted]

SEQ ID NO: 21644 - protein, 527 aa, Homo sapiens
LGQLRRGSQLTMGDPSKQDILTIFKRLRSVPTNKVCFDCGAKNPSWASITYGVFLCIDCSGSHRSLGVHLSFIRSTELDSNWSWFQLRCMQVGGNASASSFFHQHGCSTNDTNAKYNSRAAQLYREKIKSLASQATRKHGTDLWLDSCVVPPLSPPPKEEDFFASHVSPEVSDTAWASAIAEPSSLTSRPVETTLENNEGGQEQGPSVEGLNVPTKATLEVSSIIKKKPNQAKKGLGAKKGSLGAQKLANTCFNEIEKQAQAADKMKEQEDLAKVVSKEESIVSSLRLAYKDLEIQMKKDEKMNISGKKNVDSDRLGMGFGNCRSVISHSVTSDMQTIEQESPIMAKPRKKYNDDSDDSYFTSSSSYFDEPVELRSSSFSSWDDSSDSYWKKETSKDTETVLKTTGYSDRPTARRKPDYEPVENTDEAQKKFGNVKAISSDMYFGRQSQADYETRARLERLSASSSISSADLFEEPRKQPAGNYSLSSVLPNAPDMAQFKQGVRSVAGKLSVFANGVVTSIQDRYGS

SEQ ID NO: 21645 - protein, 483 aa, Homo sapiens
LGQLRRGSQLTMGDPSKQDILTIFKRLRSVPTNKVCFDCGAKNPSWASITYGVFLCIDCSGSHRSLGVHLSFIRSTELDSNWSWFQLRCMQVGGNASALWLDSCVVPPLSPPPKEEDFFASHVSPEVSDTAWASAIAEPSSLTSRPVETTLENNEGGQEQGPSVEGLNVPTKATLEVSSIIKKKPNQAKKGLGAKKGSLGAQKLANTCFNEIEKQAQAADKMKEQEDLAKVVSKEESIVSSLRLAYKDLEIQMKKDEKMNISGKKNVDSDRLGMGFGNCRSVISHSVTSDMQTIEQESPIMAKPRKKYNDDSDDSYFTSSSSYFDEPVELRSSSFSSWDDSSDSYWKKETSKDTETVLKTTGYSDRPTARRKPDYEPVENTDEAQKKFGNVKAISSDMYFGRQSQADYETRARLERLSASSSISSADLFEEPRKQPAGNYSLSSVLPNAPDMAQFKQGVRSVAGKLSVFANGVVTSIQDRYGS

SEQ ID NO: 21646 - protein, 74 aa, Homo sapiens
LGQLRRGSQLTMGDPSKQDILTIFKRLRSVPTNKVCFDCGAKNPSWASITYGVFLCIDCSGSHRSLGVHLSFIR

SEQ ID NO: 21647 - protein, 365 aa, Homo sapiens
LSMGAAAVRWHLCVLLALGTRGRLAGGSGLPGSVDVDECSEGTDDCHIDAICQNTPKSYKCLCKPGYKGEGKQCEDIDECENDYYNGGCVHECINIPGNYRCTCFDGFMLAHDGHNCLDVDECQDNNGGCQQICVNAMGSYECQCHSGFFLSDNQHTCIHRSNEGMNCMNKDHGCAHICRETPKGGVACDCRPGFDLAQNQKDCTLTCNYGNGGCQHSCEDTDTGPTCGCHQKYALHSDGRTCIETCAVNNGGCDRTCKDTATGVRCSCPVGFTLQPDGKTCKDINECLVNNGGCDHFCRNTVGSFECGCRKGYKLLTDERTCQDIDECSFERTCDHICINSPGSFQCLIKLLRSKVSRFLRPYK

SEQ ID NO: 21648 - protein, 349 aa, Homo sapiens
LSMGAAAVRWHLCVLLALGTRGRLAGGSGLPGSVDVDECSEGTDDCHIDAICQNTPKSYKCLCKPGYKGEGKQCEDIDECENDYYNGGCVHECINIPGNYRCTCFDGFMLAHDGHNCLDVDECQDNNGGCQQICVNAMGSYECQCHSGFFLSDNQHTCIHRSNEGMNCMNKDHGCAHICRETPKGGVACDCRPGFDLAQNQKDCTLTCNYGNGGCQHSCEDTDTGPTCGCHQKYALHSDGRTCIEKDEAAIERSQFNATSVADVDKRVKRRLLMETCAVNNGGCDRTCKDTATGVRCSCPVGFTLQPDGKTCKGQHVELCGCPCLYWPGQEPPCACIAGPRAGLNGGHV

SEQ ID NO: 21649 - protein, 289 aa, Homo sapiens
VCGARARARARARAGCEPGGGGGDGDGGGMAESEAETPSTPGEFESKYFEFHGVRLPPFCRGKMEEIANFPVRPSDVWIVTYPKSGTSLLQEVVYLVSQGADPDEIGLMNIDEQLPVLEYPQPGLDIIKELTSPRLIKSHLPYRFLPSDLHNGDSKVIYMARNPKDLVVSYYQFHRSLRTMSYRGTFQEFCRRFMNDKLGYGSWFEHVQEFWEHRMDSNVLFLKYEDMHRDLVTMVEQLARFLGVSCDKAQLEALTEHCHQLVDQCCNAEALPVGRAHCVFARKIFLSW

SEQ ID NO: 21650 - protein, 52 aa, Homo sapiens
VFRVRGFVGVALTCSSATADPPSALSSRRSVPPGQLCEAAAGEGTMGTVHAR

SEQ ID NO: 21651 - protein, 514 aa, Homo sapiens
VFRVRGFVGVALTCSSATADPPSALSSRRSVPPGQLCEAAAGEGTMGTVHARSLEPLPSSGPDFGGLGEEAEFVEVEPEAKQEILENKDVVVQHVHFDGLGRTKDDIIICEIGDVFKAKNLIEVMRKSHEAREKLLRLGIFRQVDVLIDTCQGDDALPNGLDVTFEVTELRRLTGSYNTMVGNNEGSMVLGLKLPNLLGRAEKVTFQFSYGTKETSYGLSFFKPRPGNFERNFSVNLYKVTGQFPWSSLRETDRGMSAEYSFPIWKTSHTVKWEGVWRELGCLSRTASFAVRKESGHSLKSSLSHAMVIDSRNSSILPRRGALLKVNQELAGYTGGDVSFIKEDFELQLNKQLIFDSVFSASFWGGMLVPIGDKPSSIADRFYLGGPTSIRGFSMHSIGPQSEGDYLGGEAYWAGGLHLYTPLPFRPGQGGFGELFRTHFFLNAGNLCNLNYGEGPKAHIRKLAECIRWSYGAGIVLRLGNIARLELNYCVPMGVQTGDRICDGVQFGAGIRFL

SEQ ID NO: 21652 - protein, 89 aa, Homo sapiens
VVVVGLGHPFLVLSLVMGLLLWPLDQLGTGGLQASVSLSVCVSSLHMASLLPPPGRPPGLHHLPYPEALWAISHPPSYSLTPSIHLSHL

SEQ ID NO: 21653 - protein, 68 aa, Homo sapiens
VFIGSVSAEDVFDELFKLAPEKVNAVKEFADGVILLLLIGQLEGFFLHLKEFYLTPNSPAEMGRRLQP

SEQ ID NO: 21654 - protein, 255 aa, Homo sapiens
LLKTELGSFFTEYLQNQLLTKGMVILRDKIRFYEELQRDKAAAAAVLGAVRKRPSVVPMAGQDPALSTSHPFYDVARHGILQVAGDDRFGRRVVTFSCCRMPPSHELDHQRLLEYLKYTLDQYVENDYTIVYFHYGLNSRNKPSLGWLQSAYKEFDRKDGDLTMWPRLVSNSKLKRSSHLSLPKYWDYRQEPPCQANTLVLKGPDSQHFSFAGLLLYCNNSAGLCSSKTLWTLKCEFHVIFTCHEIFFCFFFSTT

SEQ ID NO: 21655 - protein, 94 aa, Homo sapiens
LSVWRSEDTGLCHRVLPSVQRRTVLRGLTVLSEAAGSERNAVWVQRPGLEGGRKATPHSEGKCSPRPPSSQGTSPDFVLSCWLPVLDVLSYFSI

SEQ ID NO: 21656 - protein, 1166 aa, Homo sapiens
VEGGAMAHLELLLVENFKSWRGRQVIGPFRRFTCIIGPNGSGKSNVMDALSFVMGEKIANLRVKNIQELIHGAHIGKPISSSASVKIIYVEESGEEKTFARIIRGGCSEFRFNDNLVSRSVYIAELEKIGIIVKAQNCLVFQGTVESISVKKPKERTQFFEEISTSGELIGEYEEKKRKLQKAEEDAQFNFNKKKNIAAERRQAKLEKEEAERYQSLLEELKMNKIQLQLFQLYHNEKKIHLLNTKLEHVNRDLSVKRESLSHHENIVKARKKEHGMLTRQLQQTEKELKSVETLLNQKRPQYIKAKENTSHHLKKLDVAKKSIKDSEKQCSKQEDDIKALETELADLDAAWRSFEKQIEEEILHKKRDIELEASQLDRYKELKEQVRKKVATMTQQLEKLQWEQKTDEERLAFEKRRHGEVQGNLKQIKEQIEDHKKRIEKLEEYTKTCMDCLKEKKQQEETLVDEIEKTKSRMSEVNEELNLIRSELQNAGIDTHEGKRQQKRAEVLEHLKRLYPDSVFGRLFDLCHPIHKKYQLAVTKVFGRFITAIVVASEKVAKDCIRFLKEERAEPETFLALDYLDIKPINERLRELKGCKMVIDVIKTQFPQLKKVIQFVCGNGLVCETMEEARHIALSGPERQKTVALDGTLFLKSGVISGGSSDLKYKARCWDEKELKNLRDRRSQKIQELKGLMKTLRKETDLKQIQTLIQGTQTRLKYSQNELEMIKKKHLVAFYQEQSQLQSELLNIESQCIMLSEGIKERQRRIKEFQEKIDKVEDDIFQHFCEEIGVENIREFENKHVKRQQEIDQKRLEFEKQKTRLNVQLEYSRSHLKKKLNKINTLKETIQKGSEDIDHLKKAEENCLQTVNELMAKQQQLKDIRVTQNSSAEKVQTQIEEERKKFLAVDREVGKLQKEVVSIQTSLEQKRLEKHNLLLDCKVQDIEIILLSGSLDDIIEVEMGTEAESTQATIDIYEKEEAFEIDYSSLKEDLKALQSDQEIEAHLRLLLQQVASQEDILLKTAAPNLRALENLKTVRDKFQESTDAFEASRKEARLCRQEFEQVKKRRYDLFTQCFEHVSISIDQIYKKLCRNNSAQVSSYIKEQTQDQFQMIVISLKEEFYSRADALIGIYPEYDDCMFSRVLTLDLSQYPDTEGQESSKRHGESR

SEQ ID NO: 21657 - protein, 755 aa, Homo sapiens
LAAEARPERGARAAAPGPRPRLCPPPPTARRPPPMERAAPSRRVPLPLLLLGGLALLAAGVDADVLLEACCADGHRMATHQKDCSLPYATESKECRAVGLASLCQDLNGAWAVWKVGRASQAEGTASARAQRRGMVQEQCCHSQLEELHCATGISLANEQDRCATPHGDNASLEATFVKRCCHCCLLGRAAQAQGQSCEYSLMVGYQCGQVFQACCVKSQETGDLDVGGLQETDKIIEVEEEQEDPYLNDRCRGGGPCKQQCRDTGDEVVCSCFVGYQLLSDGVSCEDVNECITGSHSCRLGESCINTVGSFRCQRDSSCGTGYELTEDNSCKDIDECESGIHNCLPDFICQNTLGSFRCRPKLQCKSGFIQDALGNCIDINECLSISAPCPIGHTCINTEGSYTCQKNVPNCGRGYHLNEEGTRCVDVDECAPPAEPCGKGHRCVNSPGSFRCECKTGYYFDGISRMCVDVNECQRYPGRLCGHKCENTLGSYLCSCSVGFRLSVDGRSCEDINECSSSPCSQECANVYGSYQCYCRRGYQLSDVDGVTCEDIDECALPTGGHICSYRCINIPGSFQCSCPSSGYRLAPNGRNCQDIDECVTGIHNCSINETCFNIQGGFRCLAFECPENYRRSAATRCERLPCHENRECSKLPLRITYYHLSFPTNIQAPAVVFRMGPSSAVPGDSMQLAITGGNEEGFFTTRKVSPHSGVVALTKPVPEPRDLLLTVKMDLSRHGTVSSFVAKLFIFVSAEL

SEQ ID NO: 21658 - protein, 717 aa, Homo sapiens
LAAEARPERGARAAAPGPRPRLCPPPPTARRPPPMERAAPSRRVPLPLLLLGGLALLAAGVDADVLLEACCADGHRMATHQKDCSLPYATESKECRMVQEQCCHSQLEELHCATGISLANEQDRCATPHGDNASLEATFVKRCCHCCLLGRAAQAQGQSCEYSLMVGYQCGQVFQACCVKSQETGDLDVGGLQETDKIIEVEEEQEDPYLNDRCRGGGPCKQQCRDTGDEVVCSCFVGYQLLSDGVSCEDVNECITGSHSCRLGESCINTVGSFRCQRDSSCGTGYELTEDNSCKDIDECESGIHNCLPDFICQNTLGSFRCRPKLQCKSGFIQDALGNCIDINECLSISAPCPIGHTCINTEGSYTCQKNVPNCGRGYHLNEEGTRCVDVDECAPPAEPCGKGHRCVNSPGSFRCECKTGYYFDGISRMCVDVNECQRYPGRLCGHKCENTLGSYLCSCSVGFRLSVDGRSCEDINECSSSPCSQECANVYGSYQCYCRRGYQLSDVDGVTCEDIDECALPTGGHICSYRCINIPGSFQCSCPSSGYRLAPNGRNCQDIDECVTGIHNCSINETCFNIQGGFRCLAFECPENYRRSAATRCERLPCHENRECSKLPLRITYYHLSFPTNIQAPAVVFRMGPSSAVPGDSMQLAITGGNEEGFFTTRKVSPHSGVVALTKPVPEPRDLLLTVKMDLSRHGTVSSFVAKLFIFVSAEL

SEQ ID NO: 21659 - protein, 89 aa, Homo sapiens
VGSFRCQRDSSCGTGYELTEDNSCKDIDECESGIHNCLPDFICQNTLGSFRCRPKLQCKSGFIQDALGNCIGKRCAARISGLFQEGPAT

SEQ ID NO: 21660 - protein, 55 aa, Homo sapiens
MSSQRTIAAKNTLGSFRCRPKLQCKSGFIQDALGNCIGKRCAARISGLFQEGPAT

SEQ ID NO: 21661 - protein, 225 aa, Homo sapiens
LSISAPCPIGHTCINTEGSYTCQKNVPNCGRGYHLNEEGTRCVDVDECAPPAEPCGKGHRCVNSPGSFRCECKTGYYFDGISRMCVDVNECQRYPGRLCGHKCENTLGSYLCSCSVGFRLSVDGRSCEDINECSSSPCSQECANVYGSYQCYCRRGYQLSDVDGVTCEDIDECVTGIHNCSINETCFNIQGGFRCLAFECPENYRRSAATVEALGKLSGPQFPHL

SEQ ID NO: 21662 - protein, 459 aa, Homo sapiens
LRLVQAAPARQPRPGPRPALAGVHGRSTGLRGRGPQPGSIPRAHAAVAAAASRAHHGGSARRVPARRRPPEPQRGLSAVCPQPPGPCPALPGPRVPSGRRCLWRSPPPWIMHRNFRKWIFYVFLCFGVLYVKLGALSSVVALGANIICNKIPGLAPRQRAICQSRPDAIIVIGEGAQMGINECQYQFRFGRWNCSALGEKTVFGQELRVGSREAAFTYAITAAGVAHAVTAACSQGNLSNCGCDREKQGYYNQAEGWKWGGCSADVRYGIDFSRRFVDAREIKKNARRLMNLHNNEAGRKVLEDRMQLECKCHGVSGSCTTKTCWTTLPKFREVGHLLKEKYNAAVQVEVVRASRLRQPTFLRIKQLRSYQKPMETDLVYIEKSPNYCEEDAATGSVGTQGRLCNRTSPGADGCDTMCCGRGYNTHQYTKVWQCNCKFHWCCFVKCNTCSERTEVFTCK

SEQ ID NO: 21663 - protein, 148 aa, Homo sapiens
LRRPQLPGTALLCACLLCQPPLQPPPPTPQRGLLLGPAAGPVAHRAPTLRPPGVPSPSGPLAPGLGSCWCPGRPAPSSVLRVCPTLLPELGGEPGTVPGCLGAQPGQGELSSEGWSQTPGLMQSSCLGLPMCWNYRYELPRSAQTQGS

SEQ ID NO: 21664 - protein, 48 aa, Homo sapiens [sequence omitted]

SEQ ID NO: 21665 - protein, 68 aa, Homo sapiens
VALTWSPCLGLAFLTVSWASCHPGSGGPSLPRALPGDRSSCAGLSCHLATGHPGVQPSCPEATCHRPG

SEQ ID NO: 21666 - protein, 90 aa, Homo sapiens
LLCAPPVCRAQPASSTPWGQKLLRWPLLSPSHRASWSAALMPRGHLPSPRMTQDATWVSLAQNEKGRMRETESHLLLPGGAGGPGGGHLW

SEQ ID NO: 21667 - protein, 107 aa, Homo sapiens
LLGLLWAALPASAFMMRRDMWAVTCCPASWRNCLSVGWFLYTLGQRANIGGLREPWYVVEKDSVKGDVFVVSGPASETALGLVLAGPAVLPDQGLRRPPAAVASWRL

SEQ ID NO: 21668 - protein, 120 aa, Homo sapiens
LLGLLWAALPASAFMMRRDMWAVTCCPASWRNCLSVGWFLYTLGQRANIGGLREPWYVVEKDSVKGDVFVAPRTDHPALYRDLLRTSRVHWIAEEPPAALVRDKMMECHFRFRHQMALGD

SEQ ID NO: 21669 - protein, 114 aa, Homo sapiens
VPQASPLLFSSSSSSKTLLPWELSAWCSEHRPGPIGEHSAPACPRLAPCGTPDARVSPLQFAVFYKGDECLGSGKILRLGPSAYTLQKGQRRAGMATESPSDSPEDGPGLSPLL

SEQ ID NO: 21670 - protein, 63 aa, Homo sapiens
MDLPFYALMEHLLPTASVFGAGMLRTLRSSNRGCHSKQTDPEPWTLKLGPSSPFLRVSDPTVK

SEQ ID NO: 21671 - protein, 75 aa, Homo sapiens
MQLLKALWALAGAALCCFLVLVIHAQFLKEARIIKTKQWCDMLPCLEGEGCDLLINRSGWTCTQPGGRIKTTTVS

SEQ ID NO: 21672 - protein, 428 aa, Homo sapiens
VGGREAGAARPQDLELRLRLPAALPAMRLPRRAALGLLPLLLLLPPAPEAAKKPTPCHRCRGLVDKFNQGMVDTAKKNFGGGNTAWEEKTLSKYESSEIRLLEILEGLCESSDFECNQMLEAQEEHLEAWWLQLKSEYPDLFEWFCVKTLKVCCSPGTYGPDCLACQGGSQRPCSGNGHCSGDGSRQGDGSCRCHMGYQGPLCTDCMDGYFSSLRNETHSICTVRTGLSDSYPPCCLSLGCWRGVGHAWIRGRNTHTQPGYSSRVWIAAFSPACDESCKTCSGLTNRDCGECEVGWVLDEGACVDVDECAAEPPPCSAAQFCKNANGSYTCEECDSSCVGCTGEGPGNCKECISGYAREHGQCADVDECSLAEKTCVRKNENCYNTPGSYVCVCPDGFEETEDACVPPAEAEATEGESPTQLPSREDL

SEQ ID NO: 21673 - protein, 366 aa, Homo sapiens
LELRLRLPAALPAMRLPRRAALGLLPLLLLLPPAPEAAKKPTPCHRCRGLVDKFNQGMVDTAKKNFGGGNTAWEEKTLSKYESSEIRLLEILEGLCESSDFECNQMLEAQEEHLEAWWLQLKSEYPDLFEWFCVKTLKVCCSPGTYGPDCLACQGGSQRPCSGNGHCSGDGSRQGDGSCRCHMGYQGPLCTDCMDGYFSSLRNETHSICTACDESCKTCSGLTNRDCGECEVGWVLDEGACVDVDECAAEPPPCSAAQFCKNANGSYTCEECDSSCVGCTGEGPGNCKECISGYAREHGQCADVDECSLAEKTCVRKNENCYNTPGSYVCVCPDGFEETEDACVPPAEAEATEGESPTQLPSREDL

SEQ ID NO: 21674 - protein, 382 aa, Homo sapiens
LRLPAALPAMRLPRRAALGLLPLLLLLPPAPEAAKKPTPCHRCRGLVDKFNQGMVDTAKKNFGGGNTAWEEKTLSKYESSEIRLLEILEGLCESSDFECNQMLEAQEEHLEAWWLQLKSEYPDLFEWFCVKTLKVCCSPGTYGPDCLACQGGSQRPCSGNGHCSGDGSRQGDGSCRCHMGYQGPLCTDCMDGYFSSLRNETHSICTACDESCKTCSGLTNRDCGECEVGWVLDEGACVDVDECAAEPPPCSAAQFCKNANGSYTCEECDSSCVGCTGEGPGNCKECISGYAREHGQCADVDECSLAEKTCVRKNENCYNTPGSYVCVCPDGFEETEDACVPPAEAGEWHGCPPHRLPSPGPQGLHVDWLLGLKSTQMVALRW

SEQ ID NO: 21675 - protein, 330 aa, Homo sapiens
LRLPAALPAMRLPRRAALGLLPLLLLLPPAPEAAKKPTPCHRCRGLVDKFNQGMVDTAKKNFGGGNTAWEEKTLSKYESSEIRLLEILEGLCESSDFECNQMLEAQEEHLEAWWLQLKSEYPDLFEWFCVKTLKVCCSPGTYGPDCLACQGGSQRPCSGNGHCSGDGSRQGDGSCRCHMGYQGPLCTDCMDGYFSSLRNETHSICTACDESCKTCSGLTNRDCGECEVGWVLDEGACVDVDECAAEPPPCSAAQFCKNANGSYTCEDVDECSLAEKTCVRKNENCYNTPGSYVCVCPDGFEETEDACVPPAEAEATEGESPTQLPSREDL

SEQ ID NO: 21676 - protein, 334 aa, Homo sapiens
LRLPAALPAMRLPRRAALGLLPLLLLLPPAPEAAKKPTPCHRCRGLVDKFNQGMVDTAKKNFGGGNTAWEEKTLSKYESSEIRLLEILEGLCESSDFECNQMLEAQEEHLEAWWLQLKSEYPDLFEWFCVKTLKVCCSPGTYGPDCLACQGGSQRPCSGNGHCSGDGSRQGDGSCRCHMGYQGPLCTDCMDGYFSSLRNETHSICTACDESCKTCSGLTNRDCGECEVGWVLDEGACVECDSSCVGCTGEGPGNCKECISGYAREHGQCADVDECSLAEKTCVRKNENCYNTPGSYVCVCPDGFEETEDACVPPAEAEATEGESPTQLPSREDL

SEQ ID NO: 21677 - protein, 284 aa, Homo sapiens
MRLPRRAALGLLPLLLLLPPAPEAAKKPTPCHRCRGLVDKFNQGMVDTAKKNFGGGNTAWEEKTLSKYESSEIRLLEILEGLCESSDFECNQMLEAQEEHLEAWWLQLKSEYPDLFEWFCVKTLKVCCSPGTYGPDCLACQGGSQRPCSGNGHCSGDGSRQGDGSCRCHMGYQGPLCTDCMDGYFSSLRNETHSICTACDESCKTCSGLTNRDCGECEVGWVLDEGACVDVDECAAEPPPCSAAQFCKNANGSYTCEGGPGGRVCTPGPAGFRCCLCQHSFMAS

SEQ ID NO: 21678 - protein, 1239 aa, Homo sapiens
MTSLPPGTSPCQELPGSGGDGSLGRARAMLSLAAKLVAFFWRTADTPREEAGQLEPELAEGDTKLKTVRGVVTRYCSDYGMIDDMIYFSSDAVTSRVLLNVGQEVIAVVEENKVSNGLKAIRVEAVSDKWEDDSRNHGSPSDCGPRVLIGCVTSLVEGAGCISQTTYFSLESVCEGFEPCKGDWVEAEYRIRPGTWSSEATSVKPLRYKRVDKVCISSLCGRNGVLEESIFFTLDSLKLPDGYTPRRGDVVNAVVVESSQSCYVWRALCMTLVKRRDAAPVHEATHFYGTILLKNKGDIEVTQVTHFGTLKEGRSKTMVIWIENKGDIPQNLVSCKLAGWDKSKQFRFQMLDKDQMCPVVSFVSVPEKENSSDENINSLNSHTKNKTSQMSESSLVNNRGISPGDCTCKGENGEKDNILSRKQMTEPEPGGLVPPGGKTFIVVICDGKNPGRCKELLLLCFSDFLIGRYLEVNVISGEESLIAAREPFSWKKLKSSQALTSAKTTVVVTAQKRNSRRQLPSFLPQYPIPDRLRKCVEQKIDILTFQPLLAELLNMSNYKEKFSTLLWLEEIYAEMELKEYNMSGIILRRNGDLLVLEVPGLAEGRPSLYAGDKLILKTQEYNGHAIEYISYVTEIHEEDVTLKINPEFEQAYNFEPMDVEFTYNRTTSRRCHFALEHVIHLGVKVLFPEEIILQSPQVTGNWNHAQDTKSSGQSTSKKNRKTMTDQAEHGTEERRVGDKDLPVLAPFTAEMSDWVDEIQTPKARKMEFFNPVLNENQKLAVKRILSGDCRPLPYILFGPPGTGKTVTIIEAVLQVHFALPDSRILVCAPSNSAADLVCLRLHESKVLQPATMVRVNATCRFEEIVIDAVKPYCRDGEDIWKASRFRIIITTCSSSGLFYQIGVRVGHFTHVFVDEAGQASEPECLIPLGLMSDISGQIVLAGDPMQLGPVIKSRLAMAYGLNVSFLERLMSRPAYQRDENAFGACGAHNPLLVTKLVKNYRSHEALLMLPSRLFYHRELEVCADPTVVTSLLGWEKLPKKGFPLIFHGVRGSEAREGKSPSWFNPAEAVQVLRYCCLLAHSISSQVSASDIGVITPYRKQVEKIRILLRNVDLMDIKVGSVEEFQGQEYLVIIISTVRSNEDRFEDDRYFLGFLSNSKRFNVAITRPKALLIVLGNPHVLVRDPCFGALLEYSITNGVYMGCDLPPALQSLQNCGEGVADPSYPVVPESTGPEKHQEPS

SEQ ID NO: 21679 - protein, 226 aa, Homo sapiens
LPAGTARAWGWPVLLSSWCLAAWHKCGYGLQRAAGKAGGSSAPLRPQSTFHCARLAAGAGLQLVDAVLTGAVQNGLALVRPPGHHGQRAAANGFCVFNNVAIAAAHAKQKHGLHRILVVDWDVHHGQGIQYLFEDDPSVLYFSWHRYEHGRFWPFLRESDADAVGRGQGLGFTVNLPWNQVPTLKPQVPTQPPPPGPLPSPTVHPQAPGPHPPPPPGPSPAPQFRM

SEQ ID NO: 21680 - protein, 104 aa, Homo sapiens
LCAPAQAGARRPPAPQAGPRPPAAPGRSPECEIERPERLTAALDRLRQRGLEQRCLRLSAREASEEELGLVHRVPFTARGWPQGLDCSWWTLCSLELCKMGLPW

SEQ ID NO: 21681 - protein, 61 aa, Homo sapiens
LCAPAQAGARRPPAPQAGPRPPAAPGRRWGQAVAGTTSEGVWEPRVTTAQPWGPRLCTMRT

SEQ ID NO: 21682 - protein, 380 aa, Homo sapiens
LVQLGWVPPPGNPSSRQPAVGPGGGRAVGPQGRRRARPVSPWETTPPRAVPHPPPAPGRTQPLDSAPQPGPGQGTRLGQAQGILQVSRQALPPARKPAVIGLLDVFTPDETLDDFTDFYLVMPFMGTDLGKLMKHEKLGEDRIQFLVYQMLKGLRYIHAAGIIHRDLKPGNLAVNEDCELKILDFGLARQADSEMTGYVVTRWYRAPEVILNWMRYTQTVDIWSVGCIMAEMITGKTLFKGSDHLDQLKEIMKVTGTPPAEFVQRLQSDEAKNYMKGLPELEKKDFASILTNASPLAVNLLEKMLVLDAEQRVTAGEALAHPYFESLHDTEDEPQVQKYDDSFDDVDRTLDEWKRVTYKEVLSFKPPRQLGARVSKETPL

SEQ ID NO: 21683 - protein, 184 aa, Homo sapiens [sequence omitted]

SEQ ID NO: 21684 - protein, 1846 aa, Homo sapiens
LEPRVRGAMALQLWALTLLGLLGAGASLRPRKLDFFRSEKELNHLAVDEASGVVYLGAVNALYQLDAKLQLEQQVATGPALDNKKCTPPIEASQCHEAEMTDNVNQLLLLDPPRKRLVECGSLFKGICALRALSNISLRLFYEDGSGEKSFVASNDEGVATVGLVSSTGPGGDRVLFVGKGNGPHDNGIIVSTRLLDRTDSREAFEAYTDHATYKAGYLSTNTQQFVAAFEDGPYVFFVFNQQDKHPARNRTLLARMCREDPNYYSYLEMDLQCRDPDIHAAAFGTCLAASVAAPGSGRVLYAVFSRDSRSSGGPGAGLCLFPLDKVHAKMEANRNACYTGTREARDIFYKPFHGDIQCGGHAPGSSKSFPCGSEHLPYPLGSRDGLRGTAVLQRGGLNLTAVTVAAENNHTVAFLGTSDGRILKVYLTPDGTSSEYDSILVEINKRVKRDLVLSGDLGSLYAMTQDKVFRLPVQECLSYPTCTQCRDSQDPYCGWCVVEGRCTRKAECPRAEEASHWLWSRSKSCVAVTSAQPQNMSRRAQGEVQLTVSPLPALSEEDELLCLFGESPPHPARVEGEAVICNSPSSIPVTPPGQDHVAVTIQLLLRRGNIFLTSYQYPFYDCRQAMSLEENLPCISCVSNRWTCQWDLRYHECREASPNPEDGIVRAHMEDSCPQFLGPSPLVIPMNHETDVNFQGKNLDTVKGSSLHVGSDLLKFMEPVTMQESGTFAFRTPKLSHDANETLPLHLYVKSYGKNIDSKLHVTLYNCSFGRSDCSLCRAANPDYRCAWCGGQSRCVYEALCNTTSECPPPVITRIQPETGPLGGGIRITILGSNLGVQAGDIQRISVAGRNCSFQPERYSVSTRIVCVIEAAETPFTGGVEVDVFGKLGRSPPNVQFTFQQPKPLSVEPQQGPQAGGTTLTIHGTHLDTGSQEDVRVTLNGVPCKVTKFGAQLQCVTGPQATRGQMLLEVSYGGSPVPNPGIFFTYRENPVLRAFEPLRSFASGGRSINVTGQGFSLIQRFAMVVIAEPLQSWQPPREAESLQPMTVVGTDYVFHNDTKVVFLSPAVPEEPEAYNLTVLIEMDGHRALLRTEAGAFEYVPDPTFENFTGGVKKQVNKLIHARGTNLNKAMTLQEAEAFVGAERCTMKTLTETDLYCEPPEVQPPPKRRQKRDTTHNLPEFIVKFGSREWVLGRVEYDTRVSDVPLSLILPLVIVPMVVVIAVSVYCYWRKSQQAEREYEKIKSQLEGLEESVRDRCKKEFTDLMIEMEDQTNDVHEAGIPVLDYKTYTDRVFFLPSKDGDKDVMITGKLDIPEPRRPVVEQALYQFSNLLNSKSFLINFIHTLENQREFSARAKVYFASLLTVALHGKLEYYTDIMHTLFLELLEQYVVAKNPKLMLRRSETVVERMLSNWMSICLYQYLKDSAGEPLYKLFKAIKHQVEKGPVDAVQKKAKYTLNDTGLLGDDVEYAPLTVSVIVQDEGVDAIPVKVLNCDTISQVKEKIIDQVYRGQPCSCWPRPDSVVLEWRPGSTAQILSDLDLTSQREGRWKRVNTLMHYNVRDGATLILSKVGVSQQPEDSQQDLPGERHALLEEENRVWHLVRPTDEVDEGKSKRGSVKEKERTKAITEIYLTRLLSVKGTLQQFVDNFFQSVLAPGHAVPPAVKYFFDFLDEQAEKHNIQDEDTIHIWKTNSLPLRFWVNILKNPHFIFDVHVHEVVDASLSVIAQTFMDACTRTEHKLSRDSPSNKLLYAKEISTYKKMVEDYYKGIRQMVQVSDQDMNTHLAEISRAHTDSLNTLVALHQLYQYTQKYYDEIINALEEDPAAQKMQLAFRLQQIAAALENKVTDL

SEQ ID NO: 21685 - protein, 1851 aa, Homo sapiens
LDHWSLGEGVRGAMALQLWALTLLGLLGAGASLRPRKLDFFRSEKELNHLAVDEASGVVYLGAVNALYQLDAKLQLEQQVATGPALDNKKCTPPIEASQCHEAEMTDNVNQLLLLDPPRKRLVECGSLFKGICALRALSNISLRLFYEDGSGEKSFVASNDEGVATVGLVSSTGPGGDRVLFVGKGNGPHDNGIIVSTRLLDRTDSREAFEAYTDHATYKAGYLSTNTQQFVAAFEDGPYVFFVFNQQDKHPARNRTLLARMCREDPNYYSYLEMDLQCRDPDIHAAAFGTCLAASVAAPGSGRVLYAVFSRDSRSSGGPGAGLCLFPLDKVHAKMEANRNACYTGTREARDIFYKPFHGDIQCGGHAPGSSKSFPCGSEHLPYPLGSRDGLRGTAVLQRGGLNLTAVTVAAENNHTVAFLGTSDGRILKVYLTPDGTSSEYDSILVEINKRVKRDLVLSGDLGSLYAMTQDKVFRLPVQECLSYPTCTQCRDSQDPYCGWCVVEGRCTRKAECPRAEEASHWLWSRSKSCVAVTSAQPQNMSRRAQGEVQLTVSPLPALSEEDELLCLFGESPPHPARVEGEAVICNSPSSIPVTPPGQDHVAVTIQLLLRRGNIFLTSYQYPFYDCRQAMSLEENLPCISCVSNRWTCQWDLRYHECREASPNPEDGIVRAHMEDSCPQFLGPSPLVIPMNHETDVNFQGKNLDTVKGSSLHVGSDLLKFMEPVTMQESGTFAFRTPKLSHDANETLPLHLYVKSYGKNIDSKLHVTLYNCSFGRSDCSLCRAANPDYRCAWCGGQSRCVYEALCNTTSECPPPVITRIQPETGPLGGGIRITILGSNLGVQAGDIQRISVAGRNCSFQPERYSVSTRIVCVIEAAETPFTGGVEVDVFGKLGRSPPNVQFTFQQPKPLSVEPQQGPQAGGTTLTIHGTHLDTGSQEDVRVTLNGVPCKVTKFGAQLQCVTGPQATRGQMLLEVSYGGSPVPNPGIFFTYRENPVLRAFEPLRSFASGGRSINVTGQGFSLIQRFAMVVIAEPLQSWQPPREAESLQPMTVVGTDYVFHNDTKVVFLSPAVPEEPEAYNLTVLIEMDGHRALLRTEAGAFEYVPDPTFENFTGGVKKQVNKLIHARGTNLNKAMTLQEAEAFVGAERCTMKTLTETDLYCEPPEVQPPPKRRQKRDTTHNLPEFIVKFGSREWVLGRVEYDTRVSDVPLSLILPLVIVPMVVVIAVSVYCYWRKSQQAEREYEKIKSQLEGLEESVRDRCKKEFTDLMIEMEDQTNDVHEAGIPVLDYKTYTDRVFFLPSKDGDKDVMITGKLDIPEPRRPVVEQALYQFSNLLNSKSFLINFIHTLENQREFSARAKVYFASLLTVALHGKLEYYTDIMHTLFLELLEQYVVAKNPKLMLRRSETVVERMLSNWMSICLYQYLKDSAGEPLYKLFKAIKHQVEKGPVDAVQKKAKYTLNDTGLLGDDVEYAPLTVSVIVQDEGVDAIPVKVLNCDTISQVKEKIIDQVYRGQPCSCWPRPDSVVLEWRPGSTAQILSDLDLTSQREGRWKRVNTLMHYNVRDGATLILSKVGVSQQPEDSQQDLPGERHALLEEENRVWHLVRPTDEVDEGKSKRGSVKEKERTKAITEIYLTRLLSVKGTLQQFVDNFFQSVLAPGHAVPPAVKYFFDFLDEQAEKHNIQDEDTIHIWKTNSLPLRFWVNILKNPHFIFDVHVHEVVDASLSVIAQTFMDACTRTEHKLSRDSPSNKLLYAKEISTYKKMVEDYYKGIRQMVQVSDQDMNTHLAEISRAHTDSLNTLVALHQLYQYTQKYYDEIINALEEDPAAQKMQLAFRLQQIAAALENKVTDL

SEQ ID NO: 21686 - protein, 165 aa, Homo sapiens
MSLEENLPCISCVSNRWTCQWDLRYHECREASPNPEDGIVRAHMEDSCPQFLGPSPLVIPMNHETDVNFQGKNLDTVKGSSLHVGSDLLKFMEPVTMQESGTFAFRTPKEVQCAPACPPAVPRCQRDAAPAPLRQVLRQEYRQQAPCDPLQLLLWPQRLQPVPGR

SEQ ID NO: 21687 - protein, 506 aa, Homo sapiens
LGWDPEQAGEGSALSRPGAMAALMTPGTGAPPAPGDFSGEGSQGLPDPSPEPKQLPELIRMKRDGGRLSEADIRGFVAAVVNGSAQGAQIGAMLMAIRLRGMDLEETSVLTQALAQSGQQLEWPEAWRQQLVDKHSTGGVGDKVSLVLAPALAACGCKVPMISGRGLGHTGGTLDKLESIPGFNVIQSPEQMQVLLDQAGCCIVGQSEQLVPADGILYAARDVTATVDSLPLITASILSKKLVEGLSALVVDVKFGGAAVFPNQEQARELAKTLVGVGASLGLRVAAALTAMDKPLGRCVGHALEVEEALLCMDGAGPPDLRDLVTTLGGALLWLSGHAGTQAQGAARVAAALDDGSALGRFERMLAAQGVDPGLARALCSGSPAERRQLLPRAREQEELLAPADAPLPAGTVELVRALPLALVLHELGAGRSRAGEPLRLGVGAELLVDVGQRLRRGTPWLRVHRDGPALSGPQSRALQEALVLSDRAPFAAPSPFAELVLPPQQ

SEQ ID NO: 21688 - protein, 501 aa, Homo sapiens
LGWDPEQAGEGSALSRPGAMAALMTPGTGAPPAPGDFSGEGSQGLPDPSPEPKQLPELIRMKRDGGRLSEADIRGFVAAVVNGSAQGAQIGAMLMAIRLRGMDLEETSVLTQALAQSGQQLEWPEAWRQQLVDKHSTGGVGDKVSLVLAPALAACGCKVPMISGRGLGHTGGTLDKLESIPGFNVIQSPEQMQVLLDQAGCCIVGQSEQLVPADGILYAARDVTATVDSLPLITASILSKKLVEGLSALVVDVKFGGAAVFPNQEQARELAKTLVGVGASLGLRVAAALTAMDKPLGRCVGHALEVEEALLCMDGAGPPDLRDLVTTLGGALLWLSGHAGTQAQGAARVAAALDDGSALGRFERMLAAQGVDPGLARALCSGSPAERRQLLPRAREQEELLAPADGTVELVRALPLALVLHELGAGRSRAGEPLRLGVGAELLVDVGQRLRRGTPWLRVHRDGPALSGPQSRALQEALVLSDRAPFAAPSPFAELVLPPQQ

SEQ ID NO: 21689 - protein, 505 aa, Homo sapiens
LGWDPEQAGEGSALSRHPRRPGAMAALMTPGTGAPPAPGDFSGEGSQGLPDPSPEPKQLPELIRMKRDGGRLSEADIRGFVAAVVNGSAQGAQIGAMLMAIRLRGMDLEETSVLTQALAQSGQQLEWPEAWRQQLVDKHSTGGVGDKVSLVLAPALAACGCKVPMISGRGLGHTGGTLDKLESIPGFNVIQSPEQMQVLLDQAGCCIVGQSEQLVPADGILYAARDVTATVDSLPLITASILSKKLVEGLSALVVDVKFGGAAVFPNQEQARELAKTLVGVGASLGLRVAAALTAMDKPLGRCVGHALEVEEALLCMDGAGPPDLRDLVTTLGGALLWLSGHAGTQAQGAARVAAALDDGSALGRFERMLAAQGVDPGLARALCSGSPAERRQLLPRAREQEELLAPADGTVELVRALPLALVLHELGAGRSRAGEPLRLGVGAELLVDVGQRLRRGTPWLRVHRDGPALSGPQSRALQEALVLSDRAPFAAPSPFAELVLPPQQ

SEQ ID NO: 21690 - protein, 366 aa, Homo sapiens
LGWDPEQAGEGSALSRPGAMAALMTPGTGAPPAPGDFSGEGSQGLPDPSPEPKQLPELIRMKRDGGRLSEADIRGFVAAVVNGSAQGAQIGAMLMAIRLRGMDLEETSVLTQALAQSGQQLEWPEAWRQQLVDKHSTGGVGDKVSLVLAPALAACGCKVPMISGRGLGHTGGTLDKLESIPGFNVIQSPEQMQVLLDQAGCCIVGQSEQLVPADGILYAARDVTATVDSLPLITGWRGSQPRASGRGSADRHGQAPGSLRGPRPGGGGGAALHGRRRPARLKGPGHHARGRPALAQRTRGDSGPGRCPGGRGAGRRLGPWPLRADAGGAGRGSRSGPSPVLGKSRRTPAAAASRPGAGGAAGARRW

SEQ ID NO: 21691 - protein, 266 aa, Homo sapiens
MGARRAHRSVRGEGWAFLTPTGRSARETLGPWGCDGAPLPAPAPGCPTAVGCHPHAYPHIPGAMLMAIRLRGMDLEETSVLTQALAQSGQQLEWPEAWRQQLVDKHSTGGVGDKVSLVLAPALAACGCKVRNHLLSRREPIPHMQQPVHPQAAPNLKPGPKPPRPYQGFSPPCSPAQFSPPRSPAQRLGPLWLQTRPLGAGKRSTDGIQTPFPLGPQTAPPREELRTFLPLPQALFPQGQVPTSSPTDTSQPRKLPFHSLTSWAPL

SEQ ID NO: 21692 - protein, 59 aa, Homo sapiens
VDRCARTLNPTVPTRGRGRVPGLGSGASGRGQRPKQASPQARSDGSLDDPGNRGPTRAW

SEQ ID NO: 21693 - protein, 131 aa, Homo sapiens
LGGAAVGRPGPIRGAGGQSVGGAARARARNCPGAVAYGKTGEELRLCPVGAGGAAGRRLQLQLRREGSLAGPSSPTPGALRQGRAVQRASVLSVGLEPITESNPRAEESEDSQLAAAPSSACAPPIEGVLI

SEQ ID NO: 21694 - protein, 34 aa, Homo sapiens
MMMPCTNLAKSCPRSHSCARCGIFTGTDKCTSGS

SEQ ID NO: 21695 - protein, 198 aa, Homo sapiens [sequence omitted]

SEQ ID NO: 21696 - protein, 26 aa, Homo sapiens
VRMRPSAGLGLLAVGVVPRLQRVPPA

SEQ ID NO: 21697 - protein, 127 aa, Homo sapiens
MFLLLKFSKAIEIPSSVQQVPTIIKQSKVQVAFPFDEYFQIECEAKGNPEPTFSWTKDGNPFYFTDHRIIPSNNSGTFRIPNEGHISHFQGKYRCFASNKLGIAMSEEIEFIVPSKYYNGNFILQVF

SEQ ID NO: 21698 - protein, 1030 aa, Homo sapiens
VEMRLLWKLVILLPLINSSAGDGLLSRPIFTQEPHDVIFPLDLSKSEVILNCAANGYPSPHYRWKQNGTDIDFTMSYHYRLDGGSLAINSPHTDQDIGMYQCLATNLLGTILSRKAKLQFAYIEDFETKTRSTVSVREGQGVVLLCGPPPHFGDLSYAWTFNDNPLYVQEDNRRFVSQETGNLYIAKVEPSDVGNYTCFITNKEAQRSVQGPPTPLVQRTDGVMGEYEPKIEVRFPETIQAAKDSSVKLECFALGNPVPDISWRRLDGSPLPGKVKYSKSQAILEIPNFQQEDEGFYECIASNLRGRNLAKGQLIFYAPPEWEQKIQNTHLSIYDNLLWECKASGKPNPWYTWLKNGERLNPEERIQIENGTLIITMLNVSDSGVYQCAAENKYQIIYANAELRVLASAPDFSKSPVKKKSFVQVGGDIVIGCKPNAFPRAAISWKRGTETLRQSKRIFLLEDGSLKIYNITRSDAGSYTCIATNQFGTAKNTGSLIVKERTVITVPPSKMDVTVGESIVLPCQVSHDPSIEVVFVWFFNGDVIDLKKGVAHFERIGGESVGDLMIRNIQLHHSGKYLCTVQTTLESLSAVADIIVRGPPGPPEDVQVEDISSTTSQLSWRAGPDNNSPIQIFTIQTRTPFSVGWQAVATVPEILNGKTYNATVVGLSPWVEYEFRVVAGNSIGIGEPSEPSELLRTKASVPVVAPVNIHGGGGSRSELVITWESIPEELQNGEGFGYIIMFRPVGSTTWSKEKVSSVESSRFVYRNESIIPLSPFEVKVGVYNNEGEGSLSTVTIVYSGEDEPQLAPRGTSLQSFSASEMEVSWNAIAWNRNTGRVLGYEVLYWTDDSKESMIGKIRVSGNVTTKNITGLKANTIYFASVRAYNTAGTGPSSPPVNVTTKKSPPSQPPANIAWKLTNSKLCLNWEHVKTMENESEVLGYKILYRQNRQSKTHILETNNTSAELLVPFEEDYLIEIRTVSDGGDGSSSEEIRIPKMSSLSSRGIQFLEPSTHFLSIVIVIFHCFAIQPLI

SEQ ID NO: 21699 - protein, 500 aa, Homo sapiens
LKMRLPWELLVLQSFILCLADDSTLHGPIFIQEPSPVMFPLDSEEKKVKLNCEVKGNPKPHIRWKLNGTDVDTGMDFRYSVVEGSLLINNPNKTQDAGTYQCTATNSFGTIVSREAKLQFAYLDNFKTRTRSTVSVRRGQGMVLLCGPPPHSGELSYAWIFNEYPSYQDNRRFVSQETGNLYIAKVEKSDVGNYTCVVTNTVTNHKVLGPPTPLILRNDGVMGEYEPKIEVQFPETVPTAKGATVKLECFALGNPVPTIIWRRADGKPIARKARRHKSNGILEIPNFQQEDAGLYECVAENSRGKNVARGQLTFYAQPNWIQKINDIHVAMEENVFWECKANGRPKPTYKWLKNGEPLLTRDRIQIEQGTLNITIVNLSDAGMYQCLAENKHGVIFSNAELSVIAVGPDFSRTLLKRVTLVKVGGEVVIECKPKASPKPVYTWKKGRDILKENERITISEDGNLRIINVTKSDAGSYTCIATNHFGTASSTGNLVVKGNG

SEQ ID NO: 21700 - protein, 701 aa, Homo sapiens
LKMRLPWELLVLQSFILCLADDSTLHGPIFIQEPSPVMFPLDSEEKKVKLNCEVKGNPKPHIRWKLNGTDVDTGMDFRYSVVEGSLLINNPNKTQDAGTYQCTATNSFGTIVSREAKLQFAYLDNFKTRTRSTVSVRRGQGMVLLCGPPPHSGELSYAWIFNEYPSYQDNRRFVSQETGNLYIAKVEKSDVGNYTCVVTNTVTNHKVLGPPTPLILRNDGVMGEYEPKIEVQFPETVPTAKGATVKLECFALGNPVPTIIWRRADGKPIARKARRHKSNGILEIPNFQQEDAGLYECVAENSRGKNVARGQLTFYAQPNWIQKINDIHVAMEENVFWECKANGRPKPTYKWLKNGEPLLTRDRIQIEQGTLNITIVNLSDAGMYQCLAENKHGVIFSNAELSVIAVGPDFSRTLLKRVTLVKVGGEVVIECKPKASPKPVYTWKKGRDILKENERITISEDGNLRIINVTKSDAGSYTCIATNHFGTASSTGNLVVKDPTRVMVPPSSMDVTVGESIVLPCQVTHDHSLDIVFTWSFNGHLIDFDRDGDHFERVGGQDSAGDLMIRNIQLKHAGKYVCMVQTSVDRLSAAADLIVRGPPGPPEAVTIDEITDTTAQLSWRPGPDNHSPITMYVIQARTPFSVGWQAVSTVPELIDGKTFTATVVGLNPWVEYEFRTVAANVIGIGEPSRPSEKRRTEEARE

SEQ ID NO: 21701 - protein, 1028 aa, Homo sapiens
LKMRLPWELLVLQSFILCLADDSTLHGPIFIQEPSPVMFPLDSEEKKVKLNCEVKGNPKPHIRWKLNGTDVDTGMDFRYSVVEGSLLINNPNKTQDAGTYQCTATNSFGTIVSREAKLQFAYLDNFKTRTRSTVSVRRGQGMVLLCGPPPHSGELSYAWIFNEYPSYQDNRRFVSQETGNLYIAKVEKSDVGNYTCVVTNTVTNHKVLGPPTPLILRNDGVMGEYEPKIEVQFPETVPTAKGATVKLECFALGNPVPTIIWRRADGKPIARKARRHKSNGILEIPNFQQEDAGLYECVAENSRGKNVARGQLTFYAQPNWIQKINDIHVAMEENVFWECKANGRPKPTYKWLKNGEPLLTRDRIQIEQGTLNITIVNLSDAGMYQCLAENKHGVIFSNAELSVIAVGPDFSRTLLKRVTLVKVGGEVVIECKPKASPKPVYTWKKGRDILKENERITISEDGNLRIINVTKSDAGSYTCIATNHFGTASSTGNLVVKDPTRVMVPPSSMDVTVGESIVLPCQVTHDHSLDIVFTWSFNGHLIDFDRDGDHFERVGGQDSAGDLMIRNIQLKHAGKYVCMVQTSVDRLSAAADLIVRGPPGPPEAVTIDEITDTTAQLSWRPGPDNHSPITMYVIQARTPFSVGWQAVSTVPELIDGKTFTATVVGLNPWVEYEFRTVAANVIGIGEPSRPSEKRRTEEALPEVTPANVSGGGGSKSELVITWETVPEELQNGRGFGYVVAFRPYGKMIWMLTVLASADASRYVFRNESVHPFSPFEVKVGVFNNKGEGPFSPTTVVYSAEEEPTKPPASIFARSLSATDIEVFWASPLEKNRGRIQGYEVKYWRHEDKEENARKIRTVGNQTSTKITNLKGSVLYHLAVKAYNSAGTGPSSATVNVTTRKPPPSQPPGNIIWNSSDSKIILNWDQVKALDNESEVKGYKVLYRWNRQSSTSVIETNKTSVELSLPFDEDYIIEIKPFSDGGDGSSSEQIRIPKISNAYARGSGASTSNACTLSAISTIMISLTARSSL

SEQ ID NO: 21702 - protein, 329 aa, Homo sapiens
VKKDMIIVAHVLLILLGATEILQADLLPDEKISLLPPVNFTIKVTGLAQVLLQWKPNPDQEQRNVNLEYQVKINAPKEDDYETRITESKCVTILHKGFSASVRTILQNDHSLLASSWASAELHAPPGSPGTSIVNLTCTTNTTEDNYSRLRSYQVSLHCTWLVGTDAPEDTQYFLYYRYGSWTEECQEYSKDTLGRNIACWFPRTFILSKGRDWLAVLVNGSSKHSAIRPFDQLFALHAIGNDEHKPLREWFVIVIMATICFILLILSLICKICHLWIKLFPPIPAPKSNIKDLFVTTNYEKAGSSETEIEVICYIEKPGVETLEDSVF

SEQ ID NO: 21703 - protein, 424 aa, Homo sapiens
VKKDMIIVAHVLLILLGATEILQADLLPDEKISLLPPVNFTIKVTGLAQVLLQWKPNPDQEQRNVNLEYQVKINAPKEDDYETRITESKCVTILHKGFSASVRTILQNDHSLLASSWASAELHAPPGSPGTSIVNLTCTTNTTEDNYSRLRSYQVSLHCTWLVGTDAPEDTQYFLYYRYGSWTEECQEYSKDTLGRNIACWFPRTFILSKGRDWLAVLVNGSSKHSAIRPFDQLFALHAIDQINPPLNVTAEIEGTRLSIQWEKPVSAFPIHCFDYEVKIHNTRNGYLQIEKLMTNAFISIIDDLSKYDVQVRAAVSSMCREAGLWSEWSQPIYVGNDEHKPLREWFVIVIMATICFILLILSLICKICHLWIKLFPPIPAPKSNIKDLFVTTNYEKAGSSETEIEVICYIEKPGVETLEDSVF

SEQ ID NO: 21704 - protein, 339 aa, Homo sapiens
VKKDMIIVAHVLLILLGATEILQADLLPDEKISLLPPVNFTIKVTGLAQVLLQWKPNPDQEQRNVNLEYQVKINAPKEDDYETRITESKCVTILHKGFSASVRTILQNDHSLLASSWASAELHAPPGSPGTSIVNLTCTTNTTEDNYSRLRSYQVSLHCTWLVGTDAPEDTQYFLYYRYGSWTEECQEYSKDTLGRNIACWFPRTFILSKGRDWLAVLVNGSSKHSAIRPFDQLFALHAIDQINPPLNVTAEIEGTRLSIQWEKPVSAFPIHCFDYEVKIHNTRNGYLQIEKLMTNAFISIIDDLSKYDVQVRAAVSSMCREAGLWSEWSQPIYVGFSR

SEQ ID NO: 21705 - protein, 337 aa, Homo sapiens
VKKDMIIVAHVLLILLGATEILQADLLPDEKISLLPPVNFTIKVTGLAQVLLQWKPNPDQEQRNVNLEYQVKINAPKEDDYETRITESKCVTILHKGFSASVRTILQNDHSLLASSWASAELHAPPGSPGTSIVNLTCTTNTTEDNYSRLRSYQVSLHCTWLVGTDAPEDTQYFLYYRYGSWTEECQEYSKDTLGRNIACWFPRTFILSKGRDWLAVLVNGSSKHSAIRPFDQLFALHAIDQINPPLNVTAEIEGTRLSIQWEKPVSAFPIHCFDYEVKIHNTRNGYLQIEKLMTNAFISIIDDLSKYDVQVRAAVSSMCREAGLWSEWSQPIYVGK

SEQ ID NO: 21706 - protein, 760 aa, Homo sapiens
MLTFLPSPQELFTRSLAESELRSAPYEFPEESPIEQLEERRQRLERQISQDVKLEPDILLRAKQDFLKTDSDSDLQLYKEQGEGQGDRSLRERDVLEREFQRVTISGEEKCGVPFTDLLDAAKSVVRALFIREKYMALSLQSFCPTTRRYLQQLAEKPLETRTYEQGPDTPVSADAPVHPPALEQHPYEHCEPSTMPGDLGLGLRMVRGVVHVYTRREPDEHCSEVELPYPDLQEFVADVNVLMALIINGPIKSFCYRRLQYLSSKFQMHVLLNEMKELAAQKKVPHRDFYNIRKVDTHIHASSCMNQKHLLRFIKRAMKRHLEEIVHVEQGREQTLREVFESMNLTAYDLSVDTLDVHADRNTFHRFDKFNAKYNPIGESVLREIFIKTDNRVSGKYFAHIIKEVMSDLEESKYQNAELRLSIYGRSRDEWDKLARWAVMHRVHSPNVRWLVQVPRLFDVYRTKGQLANFQEMLENIFLPLFEATVHPASHPELHLFLEHVDGFDSVDDESKPENHVFNLESPLPEAWVEEDNPPYAYYLYYTFANMAMLNHLRRQRGFHTFVLRPHCGEAGPIHHLVSAFMLAENISHGLLLRKAPVLQYLYYLAQIGIAMSPLSNNSLFLSYHRNPLPEYLSRGLMVSLSTDDPLQFHFTKEPLMEEYSIATQVWKLSSCDMCELARNSVLMSGFSHKVKSHWLGPNYTKEGPEGNDIRRTNVPDIRVGYRYETLCQELALITQAVQSEMLETIPEEAGITMSPGPQ

SEQ ID NO: 21707 - protein, 194 aa, Homo sapiens
MAGEGDQQDAAHNMGNHLPLLPAESEEEDEMEVEDQDSKEAKKPNIINFDTSLPTSHTYLGADMEEFHGRTLHDDDSCQVIPVLPQVMMILIPGQTLPLQLFHPQEVSMVRNLIQKDRTFAVLAYSNVQEREAQFGTTAEIYAYREEQDFGIEIVKVKAIGRQRFKVLELRTQSDGYSPVVSNLAMHQNHLGSF

SEQ ID NO: 21708 - protein, 60 aa, Homo sapiens
VRADPAPTAAAAAAAAGGGERRGGGGGLAERRLLPSPQRALAPWGTPGRAPRPETRRRHR

SEQ ID NO: 21709 - protein, 727 aa, Homo sapiens
VSGVELAQQASMARMSFVIAACQLVLGLLMTSLTESSIQNSECPQLCVCEIRPWFTPQSTYREATTVDCNDLRLTRIPSNLSSDTQVLLLQSNNIAKTVDELQQLFNLTELDFSQNNFTNIKEVGLANLTQLTTLHLEENQITEMTDYCLQDLSNLQELYINHNQISTISAHAFAGLKNLLRLHLNSNKLKVIDSRWFDSTPNLEILMIGENPVIGILDMNFKPLANLRSLVLAGMYLTDIPGNALVGLDSLESLSFYDNKLVKVPQLALQKVPNLKFLDLNKNPIHKIQEGDFKNMLRLKELGINNMGELVSVDRYALDNLPELTKLEATNNPKLSYIHRLAFRSVPALESLMLNNNALNAIYQKTVESLPNLREISIHSNPLRCDCVIHWINSNKTNIRFMEPLSMFCAMPPEYKGHQVKEVLIQDSSEQCLPMISHDSFPNRLNVDIGTTVFLDCRAMAEPEPEIYWVTPIGNKITVETLSDKYKLSSEGTLEISNIQIEDSGRYTCVAQNVQGADTRVATIKVNGTLLDGTQVLKIYVKQTESHSILVSWKVNSNVMTSNLKWSSATMKIDNPHITYTARVPVDVHEYNLTHLQPSTDYEVCLTVSNIHQQTQKSCVNVTTKNAAFAVDISDQETSTALAAVMGSMFAVISLASIAVYFAKRFKRKNYHHSLKKYMQKTSSIPLNELYPPLINLWEGDSEKDKDGSADTKPTQVDTSRSYYMW

SEQ ID NO: 21710 - protein, 33 aa, Homo sapiens
MKNMKGNFYICCLVLYMDLILQENLSAKKKKTV

SEQ ID NO: 21711 - protein, 419 aa, Homo sapiens
VAPARRAMERIPSAQPPPACLPKAPGLEHGDLPGMYPAHMYQVYKSRRGIKRSEDSKETYKLPHRLIEKKRRDRINECIAQLKDLLPEHLKLTTLGHLEKAVVLELTLKHVKALTNLIDQQQQKIIALQSGLQAGELSGRNVETGQEMFCSGFQTCAREVLQYLAKHENTRDLKSSQLVTHLHRVVSELLQGGTSRKPSDPAPKVMDFKEKPSSPAKGSEGPGKNCVPVIQRTFAHSSGEQSGSDTDTDSGYGGESEKGDLRSEQPCFKSDHGRRFTMGERIGAIKQESEEPPTKKNRMQLSDDEGHFTSSDLISSPFLGPHPHQPPFCLPFYLIPPSATAYLPMLEKCWYPTSVPVLYPGLNASAAALSSFMNPDKISAPLLMPQRLPSPLPAHPSVDSSVLLQALKPIPPLNLETKD

SEQ ID NO: 21712 - protein, 98 aa, Homo sapiens
VSARVAPGHQGAVGGSGRRPARVEVVDAAARPSSRPFSLPAAIMLALISRLLDWFRSLFWKEEMELTLVGLQYSGKTTFVNVIATKNLESQMFSLRSC

SEQ ID NO: 21713 - protein, 120 aa, Homo sapiens
VSARVAPGHQGAVGGSGRRPARVEVVDAAARPSSRPFSLPAAIMLALISRLLDWFRSLFWKEEMELTLVGLQYSGKTTFVNVIASGQFSEDMIPTVGFNMRKVTKGNVTIKVSYFLPYAI

SEQ ID NO: 21714 - protein, 229 aa, Homo sapiens
VSARVAPGHQGAVGGSGRRPARVEVVDAAARPSSRPFSLPAAIMLALISRLLDWFRSLFWKEEMELTLVGLQYSGKTTFVNVIASGQFSEDMIPTVGFNMRKVTKGNVTIKIWDIGGQPRFRSMWERYCRGVNAIVYMIDAADREKIEASRNELHNLLDKPQLQGIPVLVLGNKRDLPNALDEKQLIEKMNLSAIQDREICCYSISCKEKDNIDITLQWLIQHSKSRRS

SEQ ID NO: 21715 - protein, 220 aa, Homo sapiens
VSARVAPGHQGAVGGSGRRPARVEVVDAAARPSSRPFSLPAAIMLALISRLLDWFRSLFWKEEMELTLVGLQYSGKTTFVNVIASGQFSEDMIPTVGFNMRKIWDIGGQPRFRSMWERYCRGVNAIVYMIDAADREKIEASRNELHNLLDKPQLQGIPVLVLGNKRDLPNALDEKQLIEKMNLSAIQDREICCYSISCKEKDNIDITLQWLIQHSKSRRS

SEQ ID NO: 21716 - protein, 206 aa, Homo sapiens
VSARVAPGHQGAVGGSGRRPARVEVVDAAARPSSRPFSLPAAIMLALISRLLDWFRSLFWKEEMELTLVGLQYSGKTTFVNVIASGQFSEDMIPTVGFNMRKVTKGNVTIKIWDIGGQPRFRSMWERYCRGVNAIVYMIDAADREKIEASRNELHNLLDKPQLQGIPISHFSGLFSIQNLEEAEASPEVFQSFLAIILELLSVPLK

SEQ ID NO: 21717 - protein, 39 aa, Homo sapiens
MVHLLMCCLTLCVILFLLLSSTYVDCISKCVEHSECSQQ

SEQ ID NO: 21718 - protein, 438 aa, Homo sapiens
LGLAGLARAPARSGWRGFRGSPALQLKRPSCAWLRTELPPRPANLAIQPPLSPLRALAPLPEKPGAVPPPQKRMAKVAKDLNPGVKKMSLGQLQSARGVACLGCKGTCSGFEPHSWRKICKSCKCSQEDHCLTSDLEDDRKIGRLLMDSKYSTLTARVKGGDGIRIYKRNRMIMTNPIATGKDPTFDTITYEWAPPGVTQKLGLQYMELIPKEKQPVTGTEGAFYRRRQLMHQLPIYDQDPSRCRGLLENELKLMEEFVKQYKSEALGVGEVALPGQGGLPKEEGKQQEKPEGAETTAATTNGSLSDPSKEVEYVCELCKGAAPPDSPVVYSDRAGYNKQWHPTCFVCAKCSEPLVDLIYFWKDGAPWCGRHYCESLRPRCSGCDEIIFAEDYQRVEDLAWHRKHFVCEGCEQLLSGRAYIVTKGQLLCPTCSKSKRS

SEQ ID NO: 21719 - protein, 98 aa, Homo sapiens
LRTELPPRPANLAIQPPLSPLRALAPLPEKPGAVPPPQKRMAKVAKDLNPGVKKMSLGQLQSARGVACLGCKGTCSGFEPHSWRDCSTWSSSPRRSSQ

SEQ ID NO: 21720 - protein, 287 aa, Homo sapiens
LRTELPPRPANLAIQPPLSPLRALAPLPEKPGAVPPPQKRMAKVAKDLNPGVKKMSLGQLQSARGVACLGCKGTCSGFEPHSWRKICKSCKCSQEDHCLTSDLEDDRKIGRLLMDSKYSTLTARVKGGDGIRIYKRNRMIMTNPIATGKDPTFDTITYEWAPPGVTQKLGLQYMELIPKEKQPVTGTEGAFYRRRQLMHQLPIYDQDPSRCRGLLENELKLMEEFVKQYKSEALGVGEVALPGQGGLPKEEGKQQEKPEGAETTAATTNGSLSDPSKEVEYKPVPLV

SEQ ID NO: 21721 - protein, 53 aa, Homo sapiens
LAIQPPLSPLRALAPLPEKPGAVPPPQKRMAKVAKDLNPGVKKMVITWDIHIK

SEQ ID NO: 21722 - protein, 178 aa, Homo sapiens
LRDICSQESVPGDGKRRELENPAERVHQIQQILVTLPRVVIVVMRYLFAFLNHLSQYSDENMMDPYNLAICFGPTLMHIPDGQDPVSCQAHINEVIKTIIIHHEAIFPSPRELEGPVYEKCMAGGEEYCDSPHSEPGAIDEVDHDNGTEPHTSDEAPRADGQKASLDTRTEDEEGQRE

SEQ ID NO: 21723 - protein, 83 aa, Homo sapiens
MDEELLFRDEQRKWFLEMESTGCSLRAGQFLWLYPLRKHREVCEVKTIVMIARCLSFSFILTVCRGYMMCDDILIDVNEWCYT

SEQ ID NO: 21724 - protein, 58 aa, Homo sapiens [sequence omitted]

SEQ ID NO: 21725 - protein, 912 aa, Homo sapiens
MSQLTLAFCFITFLVEAKKQRDHNYGAPPPPTPPASPPVQTIIPRSDLNGLPSPVEERCGDSPNSEGETVPTWCPCGLSQDGFLLNCDKCRGMSRGKVIRLHRRKQDNISGGDSSATESWDEELSPSTVLYTATQHTPTSITLTVRRTKPKKRKKSPEKGRAAPKTKKIKNSPSEAQNLDENTTEGWENRIRLWTDQYEEAFTNQYSADVQNALEQHLHSSKEFVGKPTILDTINKTELACNNTVIGSQMQLQLGRVTRVQKHRKILRAARDLALDTLIIEYRGKVMLRQQFEVNGHFFKKPYPFVLFYSKFNGVEMCVDARTFGNDARFIRRSCTPNAEVRHMIADGMIHLCIYAVSAITKDAEVTIAFDYEYSNCNYKVDCACHKGNRNCPIQKRNPNATELPLLPPPPSLPTIGAETRRRKARRKELEMEQQNEASEENNDQQSQEVPEKVTVSSDHEEVDNPEEKPEEEKEEVIDDQENLAHSRRTREDRKVEAIMHAFENLEKRKKRRDQPLEQSNSDVEITTTTSETPVGEETKTEAPESEVSNSVSNVTIPSTPQSVGVNTRRSSQAGDIAAEKLVPKPPPAKPSRPRPKSRISRYRTSSAQRLKRQKQANAQQAELSQAALEEGGSNSLVTPTEAGSLDSSGENRPLTGSDPTVVSITGSHVNRAASKYPKTKKYLVTEWLNDKAEKQECPVECPLRITTDPTVLATTLNMLPGLIHSPLICTTPKHYIRFGSPFIPERRRRPLLPDGTFSSCKKRWIKQALEEGMTQTSSVPQETRTQHLYQSNENSSSSSICKDNADLLSPLKKWKSRYLMEQNVTKLLRPLSPVTPPPPNSGSKSPQLATPGSSHPGEEECRNGYSLMFSPVTSLTTASRCNTPLQFEVIWVWLLGVLDMKIIICTFSFQI

SEQ ID NO: 21726 - protein, 23 aa, Homo sapiens
VFRLVTVLSAMSCVEASVSHPCL

SEQ ID NO: 21727 - protein, 62 aa, Homo sapiens
VGRQGAGVARSTVSGVGAPPSRPDFPRRPPQVGSEPRRAPPAMSPDSRWPYISYPVPGPGSP

SEQ ID NO: 21728 - protein, 51 aa, Homo sapiens
VGRQGAGVARSTVSGVGAPPSRPDFPRRPPQVGSEPRRAPPAMSPDSRWPM

SEQ ID NO: 21729 - protein, 379 aa, Homo sapiens
LAVVGGQWAMLGAVEGPRWKQAEDIRDIYDFRDVLGTGAFSEVILAEDKRTQKLVAIKCIAKEALEGKEGSMENEIAVLHKIKHPNIVALDDIYESGGHLYLIMQLVSGGELFDRIVEKGFYTERDASRLIFQVLDAVKYLHDLGIVHRDLKPENLLYYSLDEDSKIMISDFGLSKMEDPGSVLSTACGTPGYVAPEVLAQKPYSKAVDCWSIGVIAYILLCGYPPFYDENDAKLFEQILKAEYEFDSPYWDDISDSAKDFIRHLMEKDPEKRFTCEQALQHPWIAGDTALDKNIHQSVSEQIKKNFAKSKWKQAFNATAVVRHMRKLQLGTSQEGQGQTASHGELLTPVAGGPAAGCCCRDCCVEPGTELSPTLPHQL

SEQ ID NO: 21730 - protein, 48 aa, Homo sapiens
LAVVGGQWAMLGAVEGPRWKQAEDIRDIYDFRDVLGTLSPGGGKDDRH

SEQ ID NO: 21731 - protein, 241 aa, Homo sapiens
VTRVQEFKNTETALGGKLPEGPSVRKGSLPRSEHRWYRPEVRAETVAALLAKGQASRGWPLPYFRFPAQPAPAMTATLRPYLSAVRATLQAALCLENFSSQVVERHNKPEVEVRSSKELLLQPVTISRNEKEKVLIEGSINSVRVSIAVKQADEIEKILCHKFMRFMMMRAENFFILRRKPVEGYDISFLITNFHTEQMYKHKLVDFVIHFMEEIDKEISEMKLSVNARARIVAEEFLKNF

SEQ ID NO: 21732 - protein, 19 aa, Homo sapiens
MAPQHWLGTRAKLVTTSHA

SEQ ID NO: 21733 - protein, 173 aa, Homo sapiens
LIAVIVLTCYVSLSGCRGHSTDLTETYDLRKGVVFPQRKRGGVILGGTERVAAHCLSWLSCCPVFSSQLQVHMVLQLCPVLGDHMYSARVGTVLGQRFLLPAENNKPQRQVLDEALLRRLHLTPSQAAQLPLHLHLHRLLLPGTRARDTPVELLAPLPPYFSRTLQCLGLRLQ

SEQ ID NO: 21734 - protein, 31 aa, Homo sapiens [sequence omitted]

SEQ ID NO: 21735 - protein, 48 aa, Homo sapiens
MPVPWFLLSLALGRSPVVLSLERLVGPQDATHCSPGLSCRLWGKYPYF

SEQ ID NO: 21736 - protein, 267 aa, Homo sapiens
MPVPWFLLSLALGRSPVVLSLERLVGPQDATHCSPGLSCRLWDSDILCLPGDIVPAPGPVLAPTHLQTELVLRCQKETDCDLCLRVAVHLAVHGHWEEPEDEEKFGGAADSGVEEPRNASLQAQVVLSFQAYPTARCVLLEVQVPAALVQFGQSVGSVVYDCFEAALGSEVRIWSYTQPRYEKELNHTQQLPALPWLNVSADGDNVHLVLNVSEEQHFGLSLYWNQVQGPPKPRWHKNLVRPPPSQVHSHCRPMPVQRTQCHIREDP

SEQ ID NO: 21737 - protein, 538 aa, Homo sapiens
MPVPWFLLSLALGRSPVVLSLERLVGPQDATHCSPGLSCRLWDSDILCLPGDIVPAPGPVLAPTHLQTELVLRCQKETDCDLCLRVAVHLAVHGHWEEPEDEEKFGGAADSGVEEPRNASLQAQVVLSFQAYPTARCVLLEVQVPAALVQFGQSVGSVVYDCFEAALGSEVRIWSYTQPRYEKELNHTQQLPALPWLNVSADGDNVHLVLNVSEEQHFGLSLYWNQVQGPPKPRWHKNLTGPQIITLNHTDLVPCLCIQVWPLEPDSVRTNICPFREDPRAHQNLWQAARLQLLTLQSWLLDAPCSLPAEAALCWRAPGGDPCQPLVPPLSWENVTVDKVLEFPLLKGHPNLCVQVNSSEKLQLQECLWADSLGPLKDDVLLLETRGPQDNRSLCALEPSGCTSLPSKASTRAARLGEYLLQDLQSGQCLQLWDDDLGALWACPMDKYIHKRWALVWLACLLFAAALSLILLLKKDHAKGWLRLLKQDVRSGGEWEQALGGGPPPGSQACASSPLPSPSVFSGSGRQGPRGSAPLLSR

SEQ ID NO: 21738 - protein, 102 aa, Homo sapiens
LDVSVSNLIKSIDKSVVLYWKWLLLWMKDLISQLLGTKENLHIAVRRERRQLLVDTQIRVPKNNSVWIKGPREVTVPFLYQEVNIICMLSAVIKNKRLDSTN

SEQ ID NO: 21739 - protein, 148 aa, Homo sapiens
LSFGRSWILQHCVLPSLLQAFQVKLKSKGQASSSGNQESSGQNRIILFDVIKSAIRYEKTISEAWIKAIENTASVSEHKVIDLVMLFIIYSTNTQTKKYIERVLRNKIRSGCIQEQLLQSTFSVHYLVLKDMCSSIMSLAQSLLHSLD

SEQ ID NO: 21740 - protein, 297 aa, Homo sapiens
VSVINTVDTSHEDMIHDAQMDYYGTRLATCSSDRSVKIFDVRNGGQILIADLRGHEGPVWQVAWAHPMYGNILASCSYDRKVIIWREENGTWEKSHEHAGHDSSVNSVCWAPHDYGLILACGSSDGAISLLTYTGEGQWEVKKINNAHTIGCNAVSWAPAVVPGSLIDHPSGQKPNYIKRFASGGCDNLIKLWKEEEDGQWKEEQKLEAHSDWVRDVAWAPSIGLPTSTIASCSQDGRVFIWTCDDASSNTWSPKLLHKFNDVVWHVSWSITANILAVSGGDNKEELQMQPQIDHLP

SEQ ID NO: 21741 - protein, 288 aa, Homo sapiens
LSKVVPAEALWVPLAYLSLCSHEGPVWQVAWAHPMYGNILASCSYDRKVIIWREENGTWEKSHEHAGHDSSVNSVCWAPHDYGLILACGSSDGAISLLTYTGEGQWEVKKINNAHTIGCNAVSWAPAVVPGSLIDHPSGQKPNYIKRFASGGCDNLIKLWKEEEDGQWKEEQKLEAHSDWVRDVAWAPSIGLPTSTIASCSQDGRVFIWTCDDASSNTWSPKLLHKFNDVVWHVSWSITANILAVSGGDNKVTLWKESVDGQWVCISDVNKGQGSVSASVTEGQQNEQ

SEQ ID NO: 21742 - protein, 335 aa, Homo sapiens
LPRPRPGAATAAIMVSVINTVDTSHEDMIHDAQMDYYGTRLATCSSDRSVKIFDVRNGGQILIADLRGHEGPVWQVAWAHPMYGNILASCSYDRKVIIWREENGTWEKSHEHAGHDSSVNSVCWAPHDYGLILACGSSDGAISLLTYTGEGQWEVKKINNAHTIGCNAVSWAPAVVPGSLIDHPSGQKPNYIKRFASGGCDNLIKLWKEEEDGQWKEEQKLEAHSDWVRDVAWAPSIGLPTSTIASCSQDGRVFIWTCDDASSNTWSPKLLHKFNDVVWHVSWSITANILAVSGGDNKVTLWKESVDGQWVCISDVNKGQGSVSASVTEGQQNEQ

SEQ ID NO: 21743 - protein, 295 aa, Homo sapiens [sequence omitted]

SEQ ID NO: 21744 - protein, 207 aa, Homo sapiens
LPRPRPGAATAAIMVSVINTVDTSHEDMIHDAQMDYYGTRLATCSSDRSVKIFDVRNGGQILIADLRGHEGPVWQVAWAHPMYGNILASCSYDRKVIIWREENGTWEKSHEHAGHDSSVNSVCWAPHDYGLILACGSSDGAISLLTYTGEGQWEVKKINNAHTVSPSPAFRAVRAPALPRVCCSLPRGWHGRVPAGQWAGEWSADQT

SEQ ID NO: 21745 - protein, 68 aa, Homo sapiens
LPRPRPGAATAAIMVSVINTVDTSHEDMIHDAQMDYYGTRLATCSSDRSVKIFDVRNGGQILIADLRG

SEQ ID NO: 21746 - protein, 623 aa, Homo sapiens
LLSTWTGGDIARPSARTPASKFRDMATNGSKVADGQISTEVSEAPVANDKPKTLVVKVQKKAADLPDRDTWKGRFDFLMSCVGYAIGLGNVWRFPYLCGKNGGGAFLIPYFLTLIFAGVPLFLLECSLGQYTSIGGLGVWKLAPMFKGVGLAAAVLSFWLNIYYIVIISWAIYYLYNSFTTTLPWKQCDNPWNTDRCFSNYSMVNTTNMTSAVVEFWERNMHQMTDGLDKPGQIRWPLAITLAIAWILVYFCIWKGVGWTGKVVYFSATYPYIMLIILFFRGVTLPGAKEGILFYITPNFRKLSDSEVWLDAATQIFFSYGLGLGSLIALGSYNSFHNNVYRDSIIVCCINSCTSMFAGFVIFSIVGFMAHVTKRSIADVAASGPGLAFLAYPEAVTQLPISPLWAILFFSMLLMLGIDSQFCTVEGFITALVDEYPRLLRNRRELFIAAVCIISYLIGLSNITQGGIYVFKLFDYYSASGMSLLFLVFFECVSISWFYGVNRFYDNIQEMVGSRPCIWWKLCWSFFTPIIVAGVFIFSAVQMTPLTMGNYVFPKWGQGVGWLMALSSMVLIPGYMAYMFLTLKGSLKQRIQVMVQPSEDIVRPENGPEQPQAGSSTSKEAYI

SEQ ID NO: 21747 - protein, 12 aa, Homo sapiens
LILLAFIYVMCR

SEQ ID NO: 21748 - protein, 59 aa, Homo sapiens
LGFFGLLFGFFLAGLSAIVRPSSIRQSTKGIFTAGLKKSVIYSSLKLHKMWKGWLRKTS

SEQ ID NO: 21749 - protein, 51 aa, Homo sapiens [sequence omitted]

SEQ ID NO: 21750 - protein, 128 aa, Homo sapiens
LAARRSLLWYYGTFLRGHVLLSQLLRCPVHWDGFPGKALGQSASQPSQGAVFHHAEFCLPGAAPMGRGRRASLVSLTNKQTNSLVSLVTSCVYKEARNTGFLDDLGFNFVFIAPDKIQLSDGPSIMLF

SEQ ID NO: 21751 - protein, 967 aa, Homo sapiens
MAARGRGLLLLTLSVLLAAGPSAAAAKLNIPKVLLPFTRATRVNFTLEASEGCYRWLSTRPEVASIEPLGLDEQQCSQKAVVQARLTQPARLTSIIFAEDITTGQVLRCDAIVDLIHDIQIVSTTRELYLEDSPLELKIQALDSEGNTFSTLAGLVFEWTIVKDSEADRFSDSHNALRILTFLESTYIPPSYISEMEKAAKQGDTILVSGMKTGSSKLKARIQEAVYKNVRPAEVRLLILENILLNPAYDVYLMVGTSIHYKVQKIRQGKITELSMPSDQYELQLQNSIPGPEGDPARPVAVLAQDTSMVTALQLGQSSLVLGHRSIRMQGASRLPNSTIYVVEPGYLGFTVHPGDRWVLETGRLYEITIEVFDKFSNKVYVSDNIRIETVLPAEFFEVLSSSQNGSYHRIRALKRGQTAIDAALTSVVDQDGGVHILQVPVWNQQEVEIHIPITLYPSILTFPWQPKTGAYQYTIRAHGGSGNFSWSSSSHLVATVTVKGVMTTGSDIGFSVIQAHDVQNPLHFGEMKVYVIEPHSMEFAPCQVEARVGQALELPLRISGLMPGGASEVVTLSDCSHFDLAVEVENQGVFQPLPGRLPPGSEHCSGIRVKAEAQGSTTLLVSYRHGHVHLSAKITIAAYLPLKAVDPSSVALVTLGSSKEMLFEGGPRPWILEPSKFFQNVTAEDTDSIGLALFAPHSSRNYQQHWILVTCQALGEQVIALSVGNKPSLTNPFPAVEPAVVKFVCAPPSRLTLAPVYTSPQLDMSCPLLQQNKQVVPVSSHRNPRLDLAAYDQEGRRFDNFSSLSIQWESTRPVLASIEPELPMQLVSQDDESGQKKLHGLQAILVHEASGTTAITATATGYQESHLSSARTKQPHDPLVPLSASIELILVEDVRVSPEEVTIYNHPGIQAELRIREGSGYFFLNTSTADVVKVAYQEARGVAMVSLGHRSPLLVFIPYLGCCVVN

SEQ ID NO: 21752 - protein, 1248 aa, Homo sapiens
VPRGSYRRGDRPGLAWTMVLLWEPAGAWLALGLALALGPSVAAAAPRQDCTGVECPPLENCIEEALEPGACCATCVQQGCACEGYQYYDCLQGGFVRGRVPAGQSYFVDFGSTECSCPPGGGKISCQFMLCPELPPNCIEAVVVADSCPQCGQVGCVHAGHKYAAGHTVHLPPCRACHCPDAGGELICYQLPGCHGNFSDAEEGDPERHYEDPYSYDQEVAEVEAATALGGEVQAGAVQAGAGGPPAALGGGSQPLSTIQAPPWPAVLPRPTAAAALGPPAPVQAKARRVTEDSEEEEEEEEEREEMAVTEQLAAGGHRGLDGLPTTAPAGPSLPIQEERAEAGARAEAGARPEENLILDAQATSRSTGPEGVTHAPSLGKAALVPTQAVPGSPRDPVKPSPHNILSTSLPDAAWIPPTREVPRKPQVLPHSHVEEDTDPNSVHSIPRSSPEGSTKDLIETCCAAGQQWAIDNDECLEIPESGTEDNVCRTAQRHCCVSYLQEKSCMAGVLGAKEGETCGAEDNDSCGISLYKQCCDCCGLGLRVRAEGQSCESNPNLGYPCNHVMLSCCEGEEPLIVPEVRRPPEPAAAPRRVSEAEMAGREALSLGTEAELPNSLPGDDQDECLLLPGELCQHLCINTVGSYHCACFPGFSLQDDGRTCRPEGHPPQPEAPQEPALKSEFSQVASNTIPLPLPQPNTCKDNGPCKQVCSTVGGSAICSCFPGYAIMADGVSCEDQDECLMGAHDCSRRQFCVNTLGSFYCVNHTVLCADGYILNAHRKCVDINECVTDLHTCSRGEHCVNTLGSFHCYKALTCEPGYALKDGECEDVDECAMGTHTCQPGFLCQNTKGSFYCQARQRCMDGFLQDPEGNCVDINECTSLSEPCRPGFSCINTVGSYTCQRNPLICARGYHASDDGTKCVDVNECETGVHRCGEGQVCHNLPGSYRCDCKAGFQRDAFGRGCIDVNECWASPGRLCQHTCENTLGSYRCSCASGFLLAADGKRCEDVNECEAQRCSQECANIYGSYQCYCRQGYQLAEDGHTCTDIDECAQGAGILCTFRCLNVPGSYQCACPEQGYTMTANGRSCKDVDECALGTHNCSEAETCHNIQGSFRCLRFECPPNYVQVSKTKCERTTCHDFLECQNSPARITHYQLNFQTGLLVPAHIFRIGPAPAFTGDTIALNIIKGNEEGYFGTRRLNAYTGVVYLQRAVLEPRDFALDVEMKLWRQGSVTTFLAKMHIFFTTFAL

SEQ ID NO: 21753 - protein, 149 aa, Homo sapiens
LGLQNRAGPRMQDPRHPQGLPLSPGLPKRQRQDRTIYNWKQQEVLENHFKEEQYPDYDTRQELAEMLNLREYQVQVWFKNRRAKRSRERWFQKQLQQLQKHPQQQHPQQQHPQQQLQQQQPQQQPQQQQPQQQPQQQQPQQQQLHQQPQ

SEQ ID NO: 21754 - protein, 692 aa, Homo sapiens
LTKTITNPPFSATPAAPPGPSPPPRSHLGVSSLARCPASPRPPGSRHPPTPGARAPRALPSAPGAARRRHGTRFEAALAPNPEVTRTQTSRPESPGMTSPSPRIQIISTDSAVASPQRIQIVTDQQTGQKIQIVTAVDASGSPKQQFILTSPDGAGTGKVILASPETSSAKQLIFTTSDNLVPGRIQIVTDSASVERLLGKTDVQRPQVVEYCVVCGDKASGRHYGAVSCEGCKGFFKRSVRKNLTYSCRSNQDCIINKHHRNRCQFCRLKKCLEMGMKMESVQSERKPFDVQREKPSNCAASTEKIYIRKDLRSPLIATPTFVADKDGARQTGLLDPGMLVNIQQPLIREDGTVLLATDSKAETSQGALGTLANVVTSLANLSESLNNGDTSEIQPEDQSASEITRAFDTLAKALNTTDSSSSPSLADGIDTSGGGSIHVISRDQSTPIIEVEGPLLSDTHVTFKLTMPSPMPEYLNVHYICESASRLLFLSMHWARSIPAFQALGQDCNTSLVRACWNELFTLGLAQCAQVMSLSTILAAIVNHLQNSIQEDKLSGDRIKQVMEHIWKLQEFCNSMAKLDIDGYEYAYLKAIVLFSPDHPGLTSTSQIEKFQEKAQMELQDYVQKTYSEDTYRLARILVRLPALRLMSSNITEELFFTGLIGNVSIDSIIPYILKMETAEYNGQITGASL

SEQ ID NO: 21755 - protein, 385 aa, Homo sapiens
METWKIFWGIILLEAGFGFKSQRIVCREASLGDVVFLVDTNINPQHARSVRNFLYILVNSFNVSSETIRVGLAKYSDVPHSEFLLSTYHRKGDVLRHIRQFQFKPGGKKMGLALKFILDHHFQEASGSRASQEVPQIAVVISSGPVEDHVHGPAKALRKAGILLYAIGVRDAVWAELREIASSPQENFTSFVPNFSGLSNLAQKLRQELCDTLAKAAPHVDHVSPACREAALADIVFLVDSSTSIGPQNFQKVKNFLYSVILGLDISSDRVRVGLAQYNDNIYPAFQLNQHPLKSMILEQIQNLPYRTGGTNTGSALEFIRTNYLTEESGSRAKDRVPQIVILVTDGESNDEVQEVADRLKEDGVVVLCGRGQCPGCPRVAKNNQ

SEQ ID NO: 21756 - protein, 154 aa, Homo sapiens
MYSQDDFANNREFITMVVYKTDGKKVYYPADPPPYIDGIRINSPHYLTKIKLTTPGTHTFTLVVSQYEKQNTIHYTVRVYSACSFTFSKIPSPYTLSKRINGKWSGQSAGGCGNFQETHKNNPIYQFHIEKTGPLLIELRGPRRSWSPWLSEEI

SEQ ID NO: 21757 - protein, 491 aa, Homo sapiens
LLCCLRDWISDKQARSLPCCFWPRSHPCLGRYGKCKHELLVEACRLYTKFSARPSSIEAIPFVIEKAVRSSIYGRPGACYVDIPADFVNLQVNVNSIKYMERCMSPPISMAETSAVCTAASVIRNAKQPLLIIGKGAAYAHAEESIKKLVEQYKLPFLPTPMGKGVVPDNHPYCVGAARSRALQFADVIVLFGARLNWILHFGLPPRYQPDVKFIQVDICAEELGNNVKPAVTLLGNIHAVTKQLLEELDKTPWQYPPESKWWKTLREKMKSNEAASKELASKKSLPMNYYTVFYHVQEQLPRDCFVVSEGANTMDIGRTVLQNYLPRHRLDAGTFGTMGVGLGFAIAAAVVAKDRSPGQWIICVEGDSAFGFSGMEVETICRYNLPIILLVVNNNGIYQGFDTDTWKEMLKFQDATAVVPPMCLLPNSHYEQVMTAFGGKGYFVQTPEELQKSLRQSLADTTKPSLINIMIEPQATRKAQDFHWLTRSNM

SEQ ID NO: 21758 - protein, 192 aa, Homo sapiens
LLCCLRDWISDKQARSLPCCFWPRSHPCLGRYGKCKHELLVEACRLYTKFSARPSSIEAIPFVIEKAVRSSIYGRPGACYVDIPADFVNLQVNVNSIKYMERCMSPPISMAETSAVCTAASVIRNAKQPLLIIGKGAAYAHAEESIKKLVEQYKLPFLPTPMGKGVVPDNHPYCVGAARSRLISVQKNWGIM

SEQ ID NO: 21759 - protein, 545 aa, Homo sapiens
MPEGGGTSRRLLPMQSRFVVCIMSGARSKLALFLCGCYVVALGAHTGEESVADHHEAEYYVAAVYEHPSILSLNPLALISRQEALELMNQNLDIYEQQVMTAAQKDVQIIVFPEDGIHGFNFTRTSIYPFLDFMPSPQVVRWNPCLEPHRFNDTEVLQRLSCMAIRGDMFLVANLGTKEPCHSSDPRCPKDGRYQFNTNVVFSNNGTLVDRYRKHNLYFEAAFDVPLKVDLITFDTPFAGRFGIFTCFDILFFDPAIRVLRDYKVKHVVYPTAWMNQLPLLAAIEIQKAFAVAFGINVLAANVHHPVLGMTGSGIHTPLESFWYHDMENPKSHLIIAQVAKNPVGLIGAENATGETDPSHSKFLKILSGDPYCEKDAQEVHCDEATKWNVNAPPTFHSEMMYDNFTLVPVWGKEGYLHVCSNGLCCYLLYERPTLSKELYALGVFDGLHTVHGTYYIQVCALVRCGGLGFDTCGQEITEATGIFEFHLWGNFSTSYIFPLFLTSGMTLEVPDQLGWENDHYFLRKSRLSSGLVTAALYGRLYERD

SEQ ID NO: 21760 - protein, 125 aa, Homo sapiens
VTALNLFLLLLRTPLMLSVLNGHTDCVYSLLNKGANVDAKDKWGRTALHRGAVTGHEECVDALLQHGAKCLLRDSRGRTPIHLSAACGHIGVLGALLQSAASMDANPATADNHGYTALHWACYNG

SEQ ID NO: 21761 - protein, 696 aa, Homo sapiens
LEFSVLKDRMSRVCIVVLEEVEDESPAFISKLPQENKSLHSPPSGNVLVRYPSLVQAIFNGDPDEVRALIFKKEDVNFQDNEKRTPLHAAAYLGDAEIIELLILSGARVNAKDSKWLTPLHRAVASCSEEAVQVLLKHSADVNARDKNWQTPLHIAAANKAVKCAEALVPLLSNVNVSDRAGRTALHHAAFSGHGEMVKLLLSRGANINAFDKKDRRAIHWAAYMGHIEVVKLLVSHGAEVTCKDKKSYTPLHAAASSGMISVVKYLLDLGVDMNEPNAYGNTPLHVACYNGQDVVVNELIDCGAIVNQKNEKGFTPLHFAAASTHGALCLELLVGNGADVNMKSKDGKTPLHMTALHGRFSRSQTIIQSGAVIDCEDKNGNTPLHIAARYGHELLINTLITSGADTAKRGIHGMFPLHLAALSGFSDCCRKLLSSGFDIDTPDDFGRTCLHAAAAGGNLECLNLLLNTGADFNKKDKFGRSPLHYAAANCNYQCLFALVGSGASVNDLDERGCTPLHYAATSDTDGKCLEYLLRNDANPGIRDKQGYNAVHYSAAYGHRLCLQLIASETPLDVLMETSGTDMLSDSDNRATISPLHLAAYHGHHQALEVLVQSLLDLDVRNSSGRTPLDLAAFKGHVECVDVLINQGASILVKDYILKRTPIHAAATNGHSECLRLLIGNAEPQNAVDIQDGNGQ

SEQ ID NO: 21762 - protein, 86 aa, Homo sapiens
LEFSVLKDRMSRVCIVVLEEVEDESPAFISKLPQENKSLHSPPSGNVLPSLVQAIFNGDPDEVRALIFKKEDVNFQQYFWNRNSKH

SEQ ID NO: 21763 - protein, 648 aa, Homo sapiens
LLHLASSSNMLLRKRYRHRPCRLQFLLLLLMLGCVLMMVAMLHPPHHTLHQTVTAQASKHSPEARYRLDFGESQDWVLEAEDEGEEYSPLEGLPPFISLREDQLLVAVALPQARRNQSQGRRGGSYRLIKQPRRQDKEAPKRDWGADEDGEVSEEEELTPFSLDPRGLQEALSARIPLQRALPEVRHPLCLQQHPQDSLPTASVILCFHDEAWSTLLRTVHSILDTVPRAFLKEIILVDDLSQQGQLKSALSEYVARLEGVKLLRSNKRLGAIRARMLGATRATGDVLVFMDAHCECHPGWLEPLLSRIAGDRSRVVSPVIDVIDWKTFQYYPSKDLQRGVLDWKLDFHWEPLPEHVRKALQSPISPIRSPVVPGEVVAMDRHYFQNTGAYDSLMSLRGGENLELSFKAWLCGGSVEILPCSRVGHIYQNQDSHSPLDQEATLRNRVRIAETWLGSFKETFYKHSPEAFSLSKAEKPDCMERLQLQRRLGCRTFHWFLANVYPELYPSEPRPSFSGKLHNTGLGLCADCQAEGDILGCPMVLAPCSDSRQQQYLQHTSRKEIHFGSPQHLCFAVRQEQVILQNCTEEGLAIHQQHWDFQENGMIVHILSGKCMEAVVQENNKDLYLRPCDGKARQQWRFDQINAVDER

SEQ ID NO: 21764 - protein, 626 aa, Homo sapiens
LLHLASSSNMLLRKRYRHRPCRLQFLLLLLMLGCVLMMVAMLHPPHHTLHQTVTAQASKHSPEARYRLDFGESQDWVLEAEDEGEEYSPLEGLPPFISLREDQLLVAVALPQARRNQSQGRRGGSYRLIKQPRRQDKEAPKRDWGADEDGEVSEEEELTPFSLDPRGLQEALSARIPLQRALPEVRHPLCLQQHPQDSLPTASVILCFHDEAWSTLLRTVHSILDTVPRAFLKEIILVDDLSQQGQLKSALSEYVARLEGVKLLRSNKRLGAIRARMLGATRATGDVLVFMDAHCECHPGWLEPLLSRIAGDRSRVVSPVIDVIDWKTFQYYPSKDLQRGVLDWKLDFHWEPLPEHVRKALQSPISPIRSPVVPGEVVAMDRHYFQNTGAYDSLMSLRGGENLELSFKAWLCGGSVEILPCSRVGHIYQNQDSHSPLDQEATLRNRVRIAETWLGSFKETFYKHSPEAFSLSKAEKPDCMERLQLQRRLGCRTFHWFLANVYPELYPSEPRPSFSGKLHNTGLGLCADCQAEGDILGCPMVLAPCSDSRQQQYLQHTSRKEIHFGSPQHLCFAVRQEQVILQNCTEEGLAIHQQHWDFQEDENRANSAAAEAYQRPLTFQQIVNNG

SEQ ID NO: 21765 - protein, 28 aa, Homo sapiens
VPAGKVSLLLIVCFNALNSPLKAAAGAR

SEQ ID NO: 21766 - protein, 185 aa, Homo sapiens
LLVFHLFFFIFLIGTMLPVFCVVEHYENAIEYDCKEEHAEFVLVRKDMLFNQLIEMALLSLGYSHSSAAQAKGLIQVGKWNPVPLSYVTDAPDATVADMLQDVYHVVTLKIQLHSCPKLEDLPPEQWSHTTVRNALKDLLKDMNQSSLAKECPLSQHPEISNMLDNLFINGKINFKKKLPRAPEA

SEQ ID NO: 21767 - protein, 724 aa, Homo sapiens
LAAFLPFPHPSLSPRLACNGAMMAHCRIDLLGSSDPPTSASQIAETTDVSHHAGLIEFLALSNSSALASRSVEITEIKLPVEVDIGLTQAEGPDETKNTEPQMGLVIEPPQCQFAQQHEQRKEAGNIESGVEPPDRIRPIYSGKFFDRTPCWPSAGKVIPVGYRVATCLTEKLPRLITPPEAKKYFNFRYPPAGVERVFYGRANDPQIAPYLTHGIRSKISVLANTLINPQPITTFQQKIKDKKESIYLSNRRAPLGKSHDQAPGLPKGMDTTNTTFGTAVIKEYSAKDVVNPPKSYEEVFKEGNEGHDLYVVSHNDYYAGEAKNRKYNPSSFHRCSVYGVPTPHFNDGRAMAKSLYWLHELQMKRGAKFVSKRADDFKEKFQHKLGRVLDPIAETMNVPPDCTFGACLRPEEYGVGDLIHNRLPDEYLRGKDRQRALIAAVRHHLKKVNYQKFDTLLAAFRHYDKKGDGMIDKDELQEACDQANLSLDDKLLDQLFDYCDVDNDGFINYLEFANFLNWKDKMLLKEYEERVIIKGRKPDCVNPTEANVEEPEQTLLIKPEDIVLKEAGSTEKTLRTLLRPSDKVSNYYKTTSSEINAIVGAIPSTCYPICGVPTIRSDIPAPRIRRISDRTNYGEEGSAYSLLYPTIFARKGVFERDFFKTRSKEEIAEILCNIGVKLSDEEFENVWNLASKKHHRGEVCVENIRNVLDELRHADRIKCKTLM

SEQ ID NO: 21768 - protein, 94 aa, Homo sapiens
LFAGRGEAGCHVTLRVAQIRTGRLSPLPPPQVKNLRHKRLSNLSEITAVWCRSWILICGGLAPERELLNTILVKDNPRCSLPSTGDLLKMCCFS

SEQ ID NO: 21769 - protein, 254 aa, Homo sapiens
VRARTAGRRRLPEVVASLSRTQGQPQRQPRAAASGAGAGTAGGGGSGGAEGSKMSTEAQRVDDSPSTSGGSSDGDQRESVQQEPEREQVQPKKKEGKISSKTAAKLSTSAKRIQKELAEITLDPPPNCSAGPKGDNIYEWRSTILGPPGSVYEGGVFFLDITFSPDYPFKPPKVTFRTRIYHCNINSQGVICLDILKDNWSPALTISKVLLSICSLLTDCNPADPLVGSIATQYMTNRAEHDRMARQWTKRYAT

SEQ ID NO: 21770 - protein, 261 aa, Homo sapiens
VVCVRACVAGGSHCLFNSCCCCTSASLPARERHEWPGPAAAAAAAAAAARRSQTQREGLFAGWGGGFAMSDDDSRASTSSSSSSSSNQQTEKETNTPKKKESKVSMSKNSKLLSTSAKRIQKELADITLDPPPNCSAGPKGDNIYEWRSTILGPPGSVYEGGVFFLDITFTPEYPFKPPKVTFRTRIYHCNINSQGVICLDILKDNWSPALTISKVLLSICSLLTDCNPADPLVGSIATQYMTNRAEHDRMARQWTKRYAT

SEQ ID NO: 21771 - protein, 144 aa, Homo sapiens
LFAGWGGGFAMSDDDSRASTSSSSSSSSNQQTEKETNTPKKKESKVSMSKNSKLLSTSAKRIQKELADITLDPPPNCSAGPKGDNIYEWRSTILGPPGSVYEGGVFFLDITFTPEYPFKPPKVRNLPVCSNLLIPTREQLLRFF

SEQ ID NO: 21772 - protein, 16 aa, Homo sapiens
LLVYFQVAAFFLVWQV

SEQ ID NO: 21773 - protein, 218 aa, Homo sapiens
LQRELGGECERREKAKGDVAALNRRIQLVEEKLDRAQERLATAPQKLEEAEKAADESERGMKVIENRAMKDEEKMEIQELQLKEAKHIAEEADRKYWEVARKLVFLEGELERAEERVEVSELKCGDLEEELKNVTNNLKSLEAASEKYSEKEDKCEEEIKLLCDKLKEAETRAEFAERTVAKLEKTIDDLEEKLAQAKEENVGLHQTLDQTLNELNCI

SEQ ID NO: 21774 - protein, 32 aa, Homo sapiens
LLLPLLLKFFLTLPTFPSFPSRRLRLPTPPPG

SEQ ID NO: 21775 - protein, 20 aa, Homo sapiens
MFPLFCGVTFGLSSLLSVDP

SEQ ID NO: 21776 - protein, 52 aa, Homo sapiens
LLKSFEDFTKCCKNSGVLMVVKCRKENSALKECLTAYSSFGLRLPSFLPGLF

SEQ ID NO: 21777 - protein, 74 aa, Homo sapiens
VLVPTAGLGLARVLLGNGPSLASARPLLPRLVPPSRTSRAPAESEEMGLPPRRARSSSLRCGSGGVFEETGSPW

SEQ ID NO: 21778 - protein, 484 aa, Homo sapiens
LVCVFCFVLFFKKILAVLELASGGVSEASSVTGTVRNSGLRGSSAWGTIPCHPVPCLGDKDSSYMGKRLDQPQMYPQYTYYYPHYLQTKQSYAPAPHPMAPPSPSTNSSSNNSSNNSSGEQLSKTNLYIRGLPPGTTDQDLIKLCQPYGKIVSTKAILDKNTNQCKGYGFVDFDSPAAAQKAVASLKANGVQAQMAKQQEQDPTNLYISNLPISMDEQELENMLKPFGHVISTRILRDANGVSRGVGFARMESTEKCEVVIQHFNGKYLKTPPGIPAPSEPLLCKFADGGQKKRQNQSKYTQNGRPWPREGEAGMALTYDPTAAIQNGFYSSPYSIATNRMIPQTSITPFIAASPVSTYQVQSTSWMPHPPYVMQPTGAVITPTMDHPMSMQPANMMGPLTQQMNHLSLGTTGTYMTAAAPMQGTYIPQYTPVPPTAVSIEGVVADTSPQTVAPSSQDTSGQQQQIAVDTSNEHAPAYSYQQSK

SEQ ID NO: 21779 - protein, 483 aa, Homo sapiens
LVCVFCFVLFFKKILAVLELASGGVSEASSVTGTVRNSGLRGSSAWGTIPCHPVPCLGDKDSSYMGKRLDQPQMYPQYTYYYPHYLQTKSYAPAPHPMAPPSPSTNSSSNNSSNNSSGEQLSKTNLYIRGLPPGTTDQDLIKLCQPYGKIVSTKAILDKNTNQCKGYGFVDFDSPAAAQKAVASLKANGVQAQMAKQQEQDPTNLYISNLPISMDEQELENMLKPFGHVISTRILRDANGVSRGVGFARMESTEKCEVVIQHFNGKYLKTPPGIPAPSEPLLCKFADGGQKKRQNQSKYTQNGRPWPREGEAGMALTYDPTAAIQNGFYSSPYSIATNRMIPQTSITPFIAASPVSTYQGAVITPTMDHPMSMQPANMMGPLTQQMNHLSLGTTGTIQSQDRIMILHQLLCQYMTAAAPMQGTYIPQYTPVPPTAVSIEGVVADTSPQTVAPSSQDTSGQQQQIAVDTSNEHAPAYSYQQSKP

SEQ ID NO: 21780 - protein, 22 aa, Homo sapiens
LWLVLFMFFFLIQEKRPRNNIL

SEQ ID NO: 21781 - protein, 39 aa, Homo sapiens
LRAGARRALPSSFFFLLLLLLRVPAQHPSHQAAAAEEES

SEQ ID NO: 21782 - protein, 23 aa, Homo sapiens
LAHAYLSMFLFFYKTCILFELPE

SEQ ID NO: 21783 - protein, 138 aa, Homo sapiens
LGHYFKTIKDLRAQVFSNTVDNARIVLQIDNACLAADDFRVKYETELAMCQSLENDIHGLFKVIDDTNVTRLQLETEIEALKKELLFMKKNHEEEVKGLQAQIASSGLTVEVDAPKSQDLAKIMADIQAQYDELARKN

SEQ ID NO: 21784 - protein, 33 aa, Homo sapiens
LQIFGFMATFLCMASIWLSYKISCVTQSTDAAV

SEQ ID NO: 21785 - protein, 144 aa, Homo sapiens
MENGAVYSPTTEEDPGPARGPRSGLAAYFFMGRLPLLRRVLKGLQLLLSLLAFICEEVVSQCTLCGGLYFFEFVSCSAFLLSLLILIVYCTPFYERVDTTKVKSSDFYITLGTGCVFLLASIIFVSTHDRTSAEIAAIVSTLYF

SEQ ID NO: 21786 - protein, 66 aa, Homo sapiens
LNPGGGGCSEPRSCPCTPAWATERGSISKKKKRKEKKICPLPSEPEEKRKKICSVVLPLRFIFVFL

SEQ ID NO: 21787 - protein, 79 aa, Homo sapiens
LPRLPGAPVRQLRPSAPARAPHQGPLHRARPAGSRCRSSGAAARARAALSRPALLHPLSVSRAPRLLPAPRRRGAAPVL

SEQ ID NO: 21788 - protein, 558 aa, Homo sapiens
LGADCRAGRLVVMPGFLVRILPLLLVLLLLGPTRGLRNATQRMFEIDYSRDSFLKDGQPFRYISGSIHYSRVPRFYWKDRLLKMKMAGLNAIQTLPGSCGQVVGSPSAQDEASPLSEWRASYNSAGSNITDAFLSQRKCEPKGPLINSEFYTGWLDHWGQPHSTIKTEAVASSLYDILARGASVNLYMFIGGTNFAYWNGANSPYAAQPTSYDYDAPLSEAGDLTEKYFALRNIIQKFEKVPEGPIPPSTPKFAYGKVTLEKLKTVGAALDILCPSGPIKSLYPLTFIQVKQHYGFVLYRTTLPQDCSNPAPLSSPLNGVHDRAYVAVDGIPQGVLERNNVITLNITGKAGATLDLLVENMGRVNYGAYINDFKGLVSNLTLSSNILTDWTIFPLDTEDAVCSHLGGWGHRDSGHHDEAWAHNSSNYTLPAFYMGNFSIPSGIPDLPQDTFIQFPGWTKGQVWINGFNLGRYWPARGPQLTLFVPQHILMTSAPNTITVLELEWAPCSSDDPELCAVTFVDRPVIGSSVTYDHPSKPVEKRLMPPPPQKNKDSWLDHV

SEQ ID NO: 21789 - protein, 339 aa, Homo sapiens
MYIALVWILFVMWTFAQNCRNIEHLNLNGCTKITDSTCYSLSRFCSKLKHLDLTSCVSITNSSLKGISEGCRNLEYLNLSWCDQITKDGIEALVRGCRGLKALLLRGCTQLEDEALKHIQNYCHELVSLNLQSCSRITDEGVVQICRGCHRLQALCLSGCSNLTDASLTALGLNCPRLQILEAARCSHLTDAGFTLLARNCHELEKMDLEECILITDSTLIQLSIHCPKLQALSLSHCELITDDGILHLSNSTCGHERLRVLELDNCLLITDVALEHLENCRGLERLELYDCQQVTRAGIKRMRAQLPHVKVHAYFAPVTPPTAVAGSGQRLCRCCVIL

SEQ ID NO: 21790 - protein, 935 aa, Homo sapiens
VTADSLRTPHPVRLRWSSRKLPDPERRRSASLSASQSASPPAQYLSLLGPRKLSAVCLARTAAEALIMATFISVQLKKTSEVDLAKPLVKFIQQTYPSGGEEQAQYCRAAEELSKLRRAAVGRPLDKHEGALETLLRYYDQICSIEPKFPFSENQICLTFTWKDAFDKGSLFGGSVKLALASLGYEKSCVLFNCAALASQIAAEQNLDNDEGLKIAAKHYQFASGAFLHIKETVLSALSREPTVDISPDTVGTLSLIMLAQAQEVFFLKATRDKMKDAIIAKLANQAADYFGDAFKQCQYKDTLPKEVFPVLAAKHCIMQANAEYHQSILAKQQKKFGEEIARLQHAAELIKTVASRYDEYVNVKDFSDKINRALAAAKKDNDFIYHDRVPDLKDLDPIGKATLVKSTPVNVPISQKFTDLFEKMVPVSVQQSLAAYNQRKADLVNRSIAQMREATTLANGVLASLNLPAAIEDVSGDTVPQSILTKSRSVIEQGGIQTVDQLIKELPELLQRNREILDESLRLLDEEEATDNDLRAKFKERWQRTPSNELYKPLRAEGTNFRTVLDKAVQADGQVKECYQSHRDTIVLLCKPEPELNAAIPSANPAKTMQGSEVVNVLKSLLSNLDEVKKEREGLENDLKSVNFDMTSKFLTALAQDGVINEEALSVTELDRVYGGLTTKVQESLKKQEGLLKNIQVSHQEFSKMKQSNNEANLREEVLKNLATAYDNFVELVANLKEGTKFYNELTEILVRFQNKCSDIVFARKTERDELLKDLQQSIAREPSAPSIPTPAYQSSPAGGHAPTPPTPAPRTMPPTKPQPPARPPPPVLPANRAPSATAPSPVGAGTAAPAPSQTPGSAPPPQAQGPPYPTYPGYPGYCQMPMPMGYNPYAYGQYNMPYPPVYHQSPGQAPYPGPQQPSYPFPQPPQQSYYPQQ

SEQ ID NO: 21791 - protein, 920 aa, Homo sapiens
LPDPERRRSASLSASQSASPPAQYLSLLGPRKLSAVCLARTAAEALIMATFISVQLKKTSEVDLAKPLVKFIQQTYPSGGEEQAQYCRAAEELSKLRRAAVGRPLDKHEGALETLLRYYDQICSIEPKFPFSENQICLTFTWKDAFDKGSLFGGSVKLALASLGYEKSCVLFNCAALASQIAAEQNLDNDEGLKIAAKHYQFASGAFLHIKETVLSALSREPTVDISPDTVGTLSLIMLAQAQEVFFLKATRDKMKDAIIAKLANQAADYFGDAFKQCQYKDTLPKYFYFQEVFPVLAAKHCIMQANAEYHQSILAKQQKKFGEEIARLQHAAELIKTVASRYDEYVNVKDFSDKINRALAAAKKDNDFIYHDRVPDLKDLDPIGKATLVKSTPVNVPISQKFTDLFEKMVPVSVQQSLAAYNQRKADLVNRSIAQMREATTLANGVLASLNLPAAIEDVSGDTVPQSILTKSRSVIEQGGIQTVDQLIKELPELLQRNREILDESLRLLDEEEATDNDLRAKFKERWQRTPSNELYKPLRAEGTNFRTVLDKAVQADGQVKECYQSHRDTIVLLCKPEPELNAAIPSANPAKTMQGSEVVNVLKSLLSNLDEVKKEREGLENDLKSVNFDMTSKFLTALAQDGVINEEALSVTELDRVYGGLTTKVQESLKKQEGLLKNIQVSHQEFSKMKQSNNEANLREEVLKNLATAYDNFVELVANLKEGTKFYNELTEILVRFQNKCSDIVFARKTERDELLKDLQQSIAREPSAPSIPTPAYQSSPAGGHAPTPPTPAPRTMPPTKPQPPARPPPPVLPANRAPSATAPSPVGAGTAAPAPSQTPGSAPPPQAQGPPYPTYPGYPGYCQMPMPMGYNPYAYGQYNMPYPPVYHQSPGQAPYPGPQQPSYPFPQPPQQSYYPQQ

SEQ ID NO: 21792 - protein, 114 aa, Homo sapiens
LSASQSASPPAQYLSLLGPRKLSAVCLARTAAEALIMATFISVQLKKTSEVDLAKPLVKFIQQTYPSGGEEQAQYCRAAEELSKLRRAAVGRPLDKHEGALETLLRLVSNSGLK

SEQ ID NO: 21793 - protein, 108 aa, Homo sapiens
LSASQSASPPAQYLSLLGPRKLSAVCLARTAAEALIMATFISVQLKKTSEVDLAKPLVKFIQQTYPSGGEEQAQYCRAAEELSKLRRAAVGRPLDKHEGALETLLRSA

SEQ ID NO: 21794 - protein, 128 aa, Homo sapiens
LSAVCLARTAAEALIMATFISVQLKKTSEVDLAKPLVKFIQQTYPSGGEEQAQYCRAAEELSKLRRAAVGRPLDKHEGALETLLRYYDQICSIEPKFPFSENQICLTFTWKDAFDKGSLFGGSVKLVC

SEQ ID NO: 21795 - protein, 37 aa, Homo sapiens [sequence omitted]

SEQ ID NO: 21796 - protein, 494 aa, Homo sapiens
VAVTTVRSPARWPRARRGGAGRTLLHARGSAGEVGRAGRERERGWRRARRRLGEDGSPQDPELSSLARGGQGAQDRSLAVPPGAQHRSRAATMIPPSSPREDGVDGLPKEAVGAEQPPSPASTSSQESKLQKLKRSLSFKTKSLRSKSADNFFQRTNSEDMKLQAHMVAEISPSSSPLPAPGSLTSTPARAGLHPGGKAHAFQEYIFKKPTFCDVCNHMIVGTNAKHGLRCKACKMSIHHKCTDGLAPQRCMGKLPKGFRRYYSSPLLIHEQFGCIKEVMPIACGNKVDPVYETLRFGTSLAQRTKKGSSGSGSDSPHRTSTSDLVEVPEEANGPGGGYDLRKRSNSVFTYPENGTDDFRDPAKNINHQGSLSKDPLQMNTYVALYKFVPQENEDLEMRPGDIITLLEDSNEDWWKGKIQDRIGFFPANFVQRLQQNEKIFRCVRTFIGCKEQGQITLKENQICVSSEEEQDGFIRVLSGKKKGLIPLDVLENI

SEQ ID NO: 21797 - protein, 33 aa, Homo sapiens
VPGRWAGRGGRGSEAGGGHVGASARMGVPRTRS

SEQ ID NO: 21798 - protein, 2968 aa, Homo sapiens
LHRAAPAPGSGSFRASALPAAPCPQGSASPGGGGPGADPPAAAMWDPRAARVPPRDLAVLLCNKSNAFFSLGKWNEAFVAAKECLQWDPTYVKGYYRAGYSLLRLHQPYEAARMFFEGLRLVQRSQDQAPVADFLVGVFTTMSSDSIVLQSFLPCFDHIFTTGFPTEVWQSVIEKLAKKGLWHSFLLLSAKKDRLPRNIHVPELSLKSLFEKYVFIGLYEKMEQVPKLVQWLISIGASVETIGPYPLHALMRLCIQARENHLFRWLMDHKPEWKGRINQKDGDGCTVLHVVAAHSPGYLVKRQTEDVQMLLRFGADPTLLDRQSRSVVDVLKRNKNFKAIEKINSHLEKLATCSKDLSGFSNGDGPTSENDIFRKVLEQLVKYMNSGNRLLHKNFLKQEVVQRFLRLLSTLQEIPPDLVCDINQDCATTVFKFLLEKQRWPEVLLLLTRKVSGEPPLGDCLIKDCNFSDLDICTIIPHLSTWDQRKKQLLGCLIDSGALPDGLQESQERPVVTCLKHEDFELAFLLLTKGADPRAISLTEGDTPLHAALHIFLEIKADIGFSFLSHLLDLFWSNPTEFDYLNPNVQDSNGNTLMHILFQKGMLKRVKKLLDLLVKFDINFNLKNKEGKDARHRIKKNDSLLLAWNKALMENRRRSRQDSAAHLGKLSKSTAPGHTSQLKSQGSFKSVPCGATARTLPEGSAVPDSWETLPGTQVTRKEPGALRPCSLRDCLMQDITVLIQQVEVDPSFPEDCLQSSEPLEAGAGKEGKKDDKPTLGAGAPDCSEVGEGHAQVGLGALQLVPDDNRGKEGNDDQDDWSTQEIEACLQDFDNMTWEIECTSEMLKKLSSKVMTKVIKKKIILAIQQLGNGEWTQGLQKRLKHLKGSIQLFEAKLDKGARMLWELAIDFSPRCSENPEKIIATEQNTCAMEKSGRIYTEIIRIWDIVLDHCKLADSIKAICNAYNRGLSCVLRKKLKGINKGQVSANMKIQKRIPRCYVEDTEAEKGREHVNPEYFPPASAVETEYNIMKFHSFSTNMAFNILNDTTATVEYPFRVGELEYAVIDLNPRPLEPIILIGRSGTGKTTCCLYRLWKKFHVYWEKAEQAGSPLLAKQVWLKRRLEVEPGKESPGGEEEEEEEDEEEEDSIEVETVESIDEQEYEACAGGAGVEPAGDGQAAEVCAPEHPHQLEHLHQIFVTKNHVLCQEVQRNFIELSKSTKATSHYKPLDPNIHKLQDLRDENFPLFVTSKQLLLLLDASLPKPFFLRNEDGSLKRTIIGWSAQEESTIPSWQEDEEEAEVDGDYSEEDKAVEMRTGDSDPRVYVTFEVFKNEIWPKMTKGRTAYNPALIWKEIKSFLKGSFEALSCPHGRLTEEVYKKLGRKRCPNFKEDRSEIYSLFSLYQQIRSQKGYFDEEDVLYNISRRLSKLRVLPWSIHELYGDEIQDFTQAELALLMKCINDPNSMFLTGDTAQSIMKGVAFRFSDLRSLFHYASRNTIDKQCAVRKPKKIHQLYQNYRSHSGILNLASGVVDLLQFYFPESFDRLPRDSGLFDGPKPTVLESCSVSDLAILLRGNKRKTQPIEFGAHQVILVANETAKEKIPEELGLALVLTIYEAKGLEFDDVLLYNFFTDSEAYKEWKIISSFTPTSTDSREENRPLVEVPLDKPGSSQGRSLMVNPEMYKLLNGELKQLYTAITRARVNLWIFDENREKRAPAFKYFIRRDFVQVVKTDENKDFDDSMFVKTSTPAEWIAQGDYYAKHQCWKVAAKCYQKGGAFEKEKLALAHDTALSMKSKKVSPKEKQLEYLELAKTYLECKEPTLSLKCLSYAKEFQLSAQLCERLGKIRDAAYFYKRSQCYKDAFRCFEQIQEFDLALKMYCQEELFEEAAIAVEKYEEMLKTKTLPISKLSYSASQFYLEAAAKYLSANKMKEMMAVLSKLDIEDQLVFLKSRKRLAEAADLLNREGRREEAALLMKQHGCLLEAARLTADKDFQASCLLGAARLNVARDSDIEHTKDILREALDICYQTGQLSGIAEAHFLQGVILRDFQKLRDAFFKFDTLNHSAGVVEALYEAASQCEAEPEKILGLAPGGLEILLSLVRALKRVTNNAEKEMVKSCFEFFGISQVDAKYCQIAQNDPGPILRIIFDLDLNLREKKTKDHFLIMTDQVKLALNKHLLGRLCQITRSLLGKTYRGVCMRFIVGLKCEDENCEHFHRPLRRCEAKCLVQSKMNLVAINGLLLEAKKVFPKILAEELKEIDYILSTDMYGLCKSILDVLFPKHFHQRVLSENPMACKEILKPNYKSFRFYRFALKEYIHFLFENESARNRRESTDLWLSAMQAFLLSSNYPEEFEKLLHQEEDNYNRELKALESEKDERGRGRGSRIKGIEGKFGMLAPNRDDENMDKTHLCFIRLLENCIDQFYVYRNPEDYKRLFFRFMNVLIKRCKEPLIPSIGNTVALLEFQFIHCGVVLARLWKNVILCLPKSYIALLHYWEFLFSKKDKELGDVFSIIQEYKPKDVTRAIQDFRFHLSYLAKVLCGYENVNFNVLLDAFSEIDYVVSGEAERTLVLCLVMLVNAEEILQPYCKPLLYRHFREIESRLQLMSMDCPGQVPERLLKVVKRVLVAVNVKSVAEALQDLLFERDEEYLMDCDWRWDPVHTKGSIVRGLYYEEVRLNRLLCLDPVDYFAEPECEFGQDEMDELALEDRDHVLATILSQKQRKASIQRKLRRACLVVSLCISWRRRVGTQMERVREEAREPRAGNFKKADVDRTQCDLCGVKFTRGPENYFSPSKAFEGAASEVAVLSRAELEREECQERNSESYEQHIHLEHHQRQQVAYQKYSEFFHEKVDPAIDEGKLVVQDIEQSVWIHSHVGSKEHSHMLQKVQEHIKRVSDMVEDLYRRKAWAGAEEAMTRLVNILILSVRDARDWLMKTETRLKKEGIVQEDDYENEVEDFGELRPRRRSRKCGKQRKY

SEQ ID NO: 21799 - protein, 32 aa, Homo sapiens
MKGSRCKCQWKGELPSLRAENTVKSLSKLKDY

SEQ ID NO: 21800 - protein, 46 aa, Homo sapiens
VSTKPEGREPGESRPRRLRRLLYTRDSGAGPRRLLLEAVGKSGHSS

SEQ ID NO: 21801 - protein, 301 aa, Homo sapiens
MEDEVVRFAKKMDKMVQKKNAAGALDLLKELKNIPMTLELLQSTRIGMSVNAIRKQSTDEEVTSLAKSLIKSWKKLLDGPSTEKDLDEKKKEPAITSQNSPEAREESTSSGNVSNRKDETNARDTYVSSFPRAPSTSDSVQLKCREMLAAALRTGDDYIAIGADEEELGSQIEEAIYQEIRNTDMKYKNRVRSRISNLKDAKNPNLRKNVLCGNIPPDLFARMTAEEMASDELKEMWKNLTKEAIREHQMAKTGGTQTDLFTCGKCKKKNCTYTQVQTRSADEPVTTFVVCNECGNRWKFC

SEQ ID NO: 21802 - protein, 634 aa, Homo sapiens
LGMGGPAAPRGAGRLRALLLALVVAGIPAGAYNLDPQRPVHFQGPADSFFGYAVLEHFHDNTRWVLVGAPKADSKYSPSVKSPGAVFKCRVHTNPDRRCTELDMARGKNRGTSCGKTCREDRDDEWMGVSLARQPKADGRVLACAHRWKNIYYEADHILPHGFCYIIPSNLQAKGRTLIPCYEEYKKKYGEEHGSCQAGIAGFFTEELVVMGAPGSFYWAGTIKVLNLTDNTYLKLNDEVIMNRRYTYLGYAVTAGHFSHPSTIDVVGGAPQDKGIGKVYIFRADRRSGTLIKIFQASGKKMGSYFGSSLCAVDLNGDGLSDLLVGAPMFSEIRDEGQVTVYINRGNGALEEQLALTGDGAYNAHFGESIASLDDLDNDGFPDVAIGAPKEDDFAGAVYIYHGDAGGIVPQYSMKLSGQKINPVLRMFGQSISGGIDMDGNGYPDVTVGAFMSDSVVLLRARPVITVDVSIFLPGSINITAPQCHDGQQPVNCLNVTTCFSFHGKHVPGEIGLNYVLMADVAKKEKGQMPRVYFVLLGETMGQVTEKLQLTYMEETCRHYVAHVKRRVQDVISPIVFEAAYSLSEHVTGEEERELPPLTPVLRWKKGQKIAQKNQVRTLKLILSTQGGSCTEQK

SEQ ID NO: 21803 - protein, 1037 aa, Homo sapiens
LGMGGPAAPRGAGRLRALLLALVVAGIPAGAYNLDPQRPVHFQGPADSFFGYAVLEHFHDNTRWVLVGAPKADSKYSPSVKSPGAVFKCRVHTNPDRRCTELDMARGKNRGTSCGKTCREDRDDEWMGVSLARQPKADGRVLACAHRWKNIYYEADHILPHGFCYIIPSNLQAKGRTLIPCYEEYKKKYGEEHGSCQAGIAGFFTEELVVMGAPGSFYWAGTIKVLNLTDNTYLKLNDEVIMNRRYTYLGYAVTAGHFSHPSTIDVVGGAPQDKGIGKVYIFRADRRSGTLIKIFQASGKKMGSYFGSSLCAVDLNGDGLSDLLVGAPMFSEIRDEGQVTVYINRGNGALEEQLALTGDGAYNAHFGESIASLDDLDNDGFPDVAIGAPKEDDFAGAVYIYHGDAGGIVPQYSMKLSGQKINPVLRMFGQSISGGIDMDGNGYPDVTVGAFMSDSVVLLRARPVITVDVSIFLPGSINITAPQCHDGQQPVNCLNVTTCFSFHGKHVPGEIGLNYVLMADVAKKEKGQMPRVYFVLLGETMGQVTEKLQLTYMEETCRHYVAHVKRRVQDVISPIVFEAAYSLSEHVTGEEERELPPLTPVLRWKKGQKIAQKNQTVFERNCRSEDCAADLQLQGKLLLSSMDEKTLYLALGAVKNISLNISISNLGDDAYDANVSFNVSRELFFINMWQKEEMGISCELLESDFLKCSVGFPFMRSKSKYEFSVIFDTSHLSGEEEVLSFIVTAQSGNTERSESLHDNTLVLMVPLMHEVDTSITGIMSPTSFVYGESVDAANFIQLDDLECHFQPINITLQVYNTGPSTLPGSSVSISFPNRLSSGGAEMFHVQEMVVGQEKGNCSFQKNPTPCIIPQEQENIFHTIFAFFTKSGRKVLDCEKPGISCLTAHCNFSALAKEESRTIDIYMLLNTEILKKDSSSVIQFMSRAKVKVDPALRVVEIAHGNPEEVTVVFEALHNLEPRGYVVGWIIAISLLVGILIFLLLAVLLWKMGFFRRRYKEIIEAEKNRKENEDSWDWVQKNQ

SEQ ID NO: 21804 - protein, 21 aa, Homo sapiens
LTESSLPAVPTKVPGMRMKLS

SEQ ID NO: 21805 - protein, 447 aa, Homo sapiens
LVCRVDLRNAEAAGSAGPPEGSGRFRLDAAGRALPERCPAGLGRGRGGGARAAHGHLPGGPRRLQGHHPRRASLGSHDRGSQGRESEAGTAGGHLCRSTWSFLCLPFLHTHGNVLQPGAGAIMARIAQFLSDIPETVPLSTVNRQCSSGLQAVASIAGGIRNGSYDIGMACGVESMSLADRGNPGNITSRLMEKEKARDCLIPMGITSENVAERFGISREKQDTFALASQQKAARAQSKGCFQAEIVPVTTTVHDDKGTKRSITVTQDEGIRPSTTMEGLAKLKPAFKKDGSTTAGNSSQVSDGAAAILLARRSKAEELGLPILGVLRSYAVVGVPPDIMGIGPAYAIPVALQKAGLTVSDVDIFEINEAFASQAAYCVEKLRLPPEKVNPLGGAVALGHPLGCTGARQVITLLNELKRRGKRAYGVVSMCIGTGMGAAAVFEYPGN

SEQ ID NO: 21806 - protein, 413 aa, Homo sapiens
LVCRVDLRNAEAAGSAGPPEGSGRFRLDAAGRALPERCPAGLGRGRGGGARAAHGHLPGGPRRLQGHHPRRASLGSHDRGSQGRESEAGTAGGHLCRDIPETVPLSTVNRQCSSGLQAVASIAGGIRNGSYDIGMACGVESMSLADRGNPGNITSRLMEKEKARDCLIPMGITSENVAERFGISREKQDTFALASQQKAARAQSKGCFQAEIVPVTTTVHDDKGTKRSITVTQDEGIRPSTTMEGLAKLKPAFKKDGSTTAGNSSQVSDGAAAILLARRSKAEELGLPILGVLRSYAVVGVPPDIMGIGPAYAIPVALQKAGLTVSDVDIFEINEAFASQAAYCVEKLRLPPEKVNPLGGAVALGHPLGCTGARQVITLLNELKRRGKRAYGVVSMCIGTGMGAAAVFEYPGN

SEQ ID NO: 21807 - protein, 170 aa, Homo sapiens
LPRGDPAPRRRPTRGCSETIGGGAAAAAAAVGGGETRGEETSEVSEFEGGPRAAAAVMSEDSSALPWSINRDDYELQEVIGSGATAVVQAAYCAPKKEKVAIKRINLEKCQTSMDELLKEIQAMSQCHHPNIVSYYTSFVVKDELWLVMKLLSGVTHWRNWIALLKALFI

SEQ ID NO: 21808 - protein, 525 aa, Homo sapiens
LPRGDPAPRRRPTRGCSETIGGGAAAAAAAVGGGETRGEETSEVSEFEGGPRAAAAVMSEDSSALPWSINRDDYELQEVIGSGATAVVQAAYCAPKKEKVAIKRINLEKCQTSMDELLKEIQAMSQCHHPNIVSYYTSFVVKDELWLVMKLLSGGSVLDIIKHIVAKGEHKSGVLDESTIATILREVLEGLEYLHKNGQIHRDVKAGNILLGEDGSVQIADFGVSAFLATGGDITRNKVRKTFVGTPCWMAPEVMEQVRGYDFKADIWSFGITAIELATGAAPYHKYPPMKVLMLTLQNDPPSLETGVQDKEMLKKYGKSFRKMISLCLQKDPEKRPTAAELLRHKFFQKAKNKEFLQEKTLQRAPTISERAKKVRRVPGSSGRLHKTEDGGWEWSDDEFDEESEEGKAAISQLRSPRVKESISNSELFPTTDPVGTLLQVPEQISAHLPQPAGQIATQPTQVSLPPTAEPAKTAQALSSGSGSQETKIPISLVLRLRNSKKELNDIRFEFTPGRGEASNGLKTK

SEQ ID NO: 21809 - protein, 584 aa, Homo sapiens
LPRGDPAPRRRPTRGCSETIGGGAAAAAAAVGGGETRGEETSEVSEFEGGPRAAAAVMSEDSSALPWSINRDDYELQEVIGSGATAVVQAAYCAPKKEKVAIKRINLEKCQTSMDELLKEIQAMSQCHHPNIVSYYTSFVVKDELWLVMKLLSGGSVLDIIKHIVAKGEHKSGVLDESTIATILREVLEGLEYLHKNGQIHRDVKAGNILLGEDGSVQIADFGVSAFLATGGDITRNKVRKTFVGTPCWMAPEVMEQVRGYDFKADIWSFGITAIELATGAAPYHKYPPMKVLMLTLQNDPPSLETGVQDKEMLKKYGKSFRKMISLCLQKDPEKRPTAAELLRHKFFQKAKNKEFLQEKTLQRAPTISERAKKVRRVPGSSGRLHKTEDGGWEWSDDEFDEESEEGKAAISQLRSPRVKESISNSELFPTTDPVGTLLQVPEQISAHLPQPAGQIATQPTQVSLPPTAEPAKTAQALSSGSGSQETKIPISLVLRLRNSKKELNDIRFEFTPGRDTAEGVSQELISAGLVDGRDLVIVAANLQKIVEEPQSNRSVTFKLASGVEGSDIPDDGKLIGFAQLSIS

SEQ ID NO: 21810 - protein, 27 aa, Homo sapiens
LFMVFLSVLLKLLSGTPFFIALSRKGC

SEQ ID NO: 21811 - protein, 607 aa, Homo sapiens
LLPRVWLGLDCGQMAGEENFKEELRSQDASRNLNQHEVAGHPHSWSLEMLLRRLRAVHTKQDDKFANLLDAVGEFGTFQQRLVALTFIPSIMSAFFMFADHFVFTAQKPYCNTSWILAVGPHLSKAEQLNLTIPQAPNGSFLTCFMYLPVPWNLDSIIQFGLNDTDTCQDGWIYPDAKKRSLINEFDLVCGMETKKDTAQIMFMAGLPIGSLIFRLITDKMGRYPAILLSLLGLIIFGFGTAFMNSFHLYLFFRFGISQSVVGYAISSISLATEWLVGEHRAHAIILGHCFFAVGAVLLTGIAYSLPHWQLLFLVGGILVIPFISYIWILPESPRWLMMKGKVKEAKQVLCYAASVNKKTIPSNLLDELQLPRKKVTRASVLDFCKNRQLCKVTLVMSCVWFTVSYTYFTLSLRMRELGVSVHFRHVVPSIMEVPARLCCIFLLQQIGRKWSLAVTLLQAIIWCLLLLFLPEGEDGLRLKWPRCPATELKSMTILVLMLREFSLAATVTVFFLYTAELLPTVLRATGLGLVSLASVAGAILSLTIISQTPSLLPIFLCCVLAIVAFSLSSLLPETRDQPLSESLNHSSQIRNKVKDMKTKETSSDDV

SEQ ID NO: 21812 - protein, 238 aa, Homo sapiens
MTAPWVALALLWGSLCAGSGRGEAETRECIYYNANWELERTNQSGLERCEGEQDKRLHCYASWRNSSGTIELVKKGCWLDDFNCYDRQECVATEENPQVYFCCCEGNFCNERFTHLPEAGGPEVTYEPPPTAPTLLTVLAYSLLPIGGLSLIVLLAFWMYRHRKPPYGHVDIHEVRQCWLGAGQDRGGEDRPDLFKPCSPPGPWASTTIPSGGPEATAAAGDQGSGALWLCLEGPAHE

SEQ ID NO: 21813 - protein, 71 aa, Homo sapiens
LAFRSAEKAVLEQFGFPLTGTEARCYTNHALSYDQAKRVPRWVLEHISKSKIMGTTWKVVLALNGERSKGR

SEQ ID NO: 21814 - protein, 67 aa, Homo sapiens
MLHLAQADHHASHRREREAVYLPPSPGGRCVGNSRPFSRDPFVPRPQYFFFLRDYMPQTCIPSGNSC

SEQ ID NO: 21815 - protein, 258 aa, Homo sapiens
MFLAFGSLGCGIGYGYLHRIPTQPPSYHKKPPGTPPPSALPLGAPPPDALPPGPTPEDSPSLETGSRQSDYMEALLQAPGSSMEDPLPGPGSPSHSAPDPDGLPHFMETPLQPPPPVQRVMDPGFLDVSGISLLDNSNASVWPSLPSSTELTTTAVSTSGPEDICSSSSSHERGGEATWSGSEFEVSFLDSPGAQAQADHLPQLTLPDSLTSAASPEDGLSAELLEAQAEEEPASTEGLDTGTEAEGLDSQAQISTTE

SEQ ID NO: 21816 - protein, 61 aa, Homo sapiens
LLPCLVSAKGCCFLLFCSKMKSYLENQAEIVLPLPSVIPLRRKYMDLISAFRISKRGVINS

SEQ ID NO: 21817 - protein, 108 aa, Homo sapiens
MSGALDVLQMKEEDVLKFLAAGTHLGGTNLDFQMEQYIYKRKSDGIYIINLKRTWEKLLLAARAIVAIENPADVSVISSRNTGQVCGTVVSFYIIEIKLTDIVRHRKT

SEQ ID NO: 21818 - protein, 266 aa, Homo sapiens
LHSQVKCYKSFCPHLGIYIINLKRTWEKLLLAARAIVAIENPADVSVISSRNTGQRAVLKFAAATGATPIAGRFTPGTFTNQIQAAFREPRLLVVTDPRADHQPLTEASYVNLPTIALCNTDSPLRYVDIAIPCNNKGAHSVGLMWWMLAREVLRMRGTISREHPWEVMPDLYFYRDPEEIEKEEQAAAEKAVTKEEFQGEWTAPAPEFTATQPEVADWSEGVQVPSVPIQQFPTEDWSAQPATEDWSAAPTAQATEWVGATTDWS

SEQ ID NO: 21819 - protein, 13 aa, Homo sapiens
MDSKMNLNTWRIS

SEQ ID NO: 21820 - protein, 46 aa, Homo sapiens
LPCEMIPCSKRTFHLFNHSNFHSHLHDYRKHGVCRLVTHKKIAVRW

SEQ ID NO: 21821 - protein, 72 aa, Homo sapiens
LRVMPGIKMAAWDRSQPLRPLPEEPRPVCYTQLIGSSITERKGNMRMTSVTNMAFWTGSIVCLASTQGMLMV

SEQ ID NO: 21822 - protein, 12 aa, Homo sapiens
MRRVGRVFFLLA

SEQ ID NO: 21823 - protein, 24 aa, Homo sapiens
MVSLTVAGSGAVDHAARPPPPLGS

SEQ ID NO: 21824 - protein, 66 aa, Homo sapiens
LTRLPVLEVRLWALAEVAEGPAPPPEPGPSPQSSETPSTFLLRGAGLMSSGRAPQVLTFSNLEGSA

SEQ ID NO: 21825 - protein, 337 aa, Homo sapiens
LAPGDEARTEKEGLTPKDHVSKETESFRLMVGGLPGNVSQHLDFGSSLEQPQGHWIIKTKSKRRHFTDTSARHHEAYEVKNGEKFEKLGKNISVSTQLTTNQTNPSGQISYECGQCGRYFIQMADFHRHEKCHTGEKSFECKECGKYFRYNSLLIRHQIIHTGKKPFKCKECGKGLSSDTALIQHQRIHTGEKPYECKECGKAFSSSSVFLQHQRFHTGEKLYECNECWKTFSCSSSFTVHQRMHTGEKPYECKECGKRLSSNTALTQHQRIHTGEKPFECKECGKAFNQKITLIQHQRVHTGEKPYECKVCGKTFSWCGRFILHQKLHTQKTPVQA

SEQ ID NO: 21826 - protein, 157 aa, Homo sapiens
LADAAGWGYLRDSRPLVLPELGSAAGLLRLETPSQLRPNPKAMNSGVCLCVLMAVLAAGALTQPVPPADPAGSGLQRAEEAPRRQLRVSQRTDGESRAHLGALLARYIQQARKAPSGRMSIVKNLQNLDPSHRISDRDYMGWMDFGRRSAEEYEYPS

SEQ ID NO: 21827 - protein, 306 aa, Homo sapiens
LWTMSVIFFACVVRVRDGLPLSASTDFYHTQDFLEWRRRLKSLALRLAQYPGRGSAEGCDFSIHFSSFGDVACMAICSCQCPAAMAFCFLETLWWEFTASYDTTCIGLASRPYAFLEFDSIIQKVKWHFNYVSSSQMECSLEKIQEELKLQPPAVLTLEDTDVANGVMNGHTPMHLEPAPNFRMEPVTALGILSLILNIMCAALNLIRGVHLAEHSLQVAHEEIGNILAFLVPFVACIFQCYLYLFYSPARTMKVVLMLLFICLGNMYLHGLRNLWQILFHIGVAFLSSYQILTRQLQEKQSDCGV

SEQ ID NO: 21828 - protein, 48 aa, Homo sapiens
LSSSDPPTSDSQVAGTTGVLMTSLVDHVRDLFCLRGTGKGWTAPLSLY

SEQ ID NO: 21829 - protein, 44 aa, Homo sapiens
LAGADFRRPPSGRGVLMTSLVDHVRDLFCLRGTGKGWTAPLSLY

SEQ ID NO: 21830 - protein, 43 aa, Homo sapiens
LIGFLTSLKFLSGVLMTSLVDHVRDLFCLRGTGKGWTAPLSLY

SEQ ID NO: 21831 - protein, 631 aa, Homo sapiens
MTPTLAALLCLGLSLGPRTHVQAGPFPKPTLWAEPGSVISWGSPVTIWCQGSLEAQEYRLDKEGSPEPWDRNNPLEPKNKARFSIPSITEHHAGRYRCHYYSSAGWSEPSDPLELVMTGAYSKPTLSALPSPVVASGGNMTLQCGSQKGYHHFVLMKEGEHQLPRTLDSQQLHSGGFQALFPVGPVNPSHRWRFTCYYYYMNTPRVWSHPSDPLEILPSGVSRKPSLLTLQGPVLAPGQSLTLQCGSDVGYDRFVLYKEGERDFLQRPGQQPQAGLSQANFTLGPVSPSHGGQYRCYGAHNLSSEWSAPSDPLNILMAGQIYDTVSLSAQPGPTVASGENMTLLCQSRGYFDTFLLTKEGAAHPPLRLRSMYGAHKYQAEFPMSPVTSAHAGTYRCYGSRSSNPHLLSFPSEPLELMVSGHSGGSSLPPTGPPSTPGLGRYLEVLIGVSVAFVLLLFLLLFLLLLRQRHSKHRTSDQRKTDFQRPAGAAETEPKDRGLLRRSSPAADVQEENLYAAVKDTQSEDRVELDSQSPHDEDPQAVTYAPVKHSSPRREMASPPSSLSGEFLDTKDRQVEEDRQMDTEAAASEASQDVTYAQLHSLTLRRKATEPPPSQEGEPPAEPSIYATLAIH

SEQ ID NO: 21832 - protein, 132 aa, Homo sapiens
LNLYYDRVHVVFGLVISGFEVIEQIENLKTDAASRPYADVRVIDCGVLATKSIKDVFEKKRKKPTHSEGSDSSSNSSSSSESSSESELEHERSRRRKHKRRPKVKRSKKRRKEASSSEEPRNKHAMNPKGYV

SEQ ID NO: 21833 - protein, 120 aa, Homo sapiens
LGAPAGIGSRLGCERFSRSREILQAITMSTDTGVSLPSYEEDQGSKLIRKAKEAPFVPVGIAGFAAIVAYGLYKLKSRGNTKMSIHLIHMRVAAQGFVVGAMTVGMGYSMYREFWAKPKP

SEQ ID NO: 21834 - protein, 183 aa, Homo sapiens
MMTAVSLTTRPQESVAFEDVAVYFTTKEWAIMVPAERALYRDVMLENYEAVAFVVPPTSKPALVSHLEQGKESCFTQPQGVLSRNDWRAGWIGVLAPEKAAWQEAASDSVLPLDDPICDGCHPLSPTASIRRPRPWSHGASGGNWRPCNPYPAGFELQPEAAGKKHGLLEKPCFAQELHLGLC

SEQ ID NO: 21835 - protein, 244 aa, Homo sapiens
MAGFKRGYDGKIAGLYDLDKTLGRGHFAVVKLARHVFTGEKVAVKVIDKTKLDTLATGHLFQEVRCMKLVQHPNIVRLYEVIDTQTKLYLILELGDGGDMFDYIMKHEEGLNEDLAKKYFAQIVHAISYCHKLHVVHRDLKPENVVFFEKQGLVKLTDFGFSNKFQPGKKLTTSCGSLAYSAPEILLGDEYDAPAVDIWSLGVILFMLVCGQPPFQEANDSETLTMIMDCKYTVPSHVSKECKE

SEQ ID NO: 21836 - protein, 127 aa, Homo sapiens
LGVILFMLVCGQPPFQEANDSETLTMIMDCKYTVPSHVSKECKDLITRMLQRDPKRRASLEEIENHPWLQGVDPSPATKYNIPLVSYKNLSEEEHNSIIQRMVLGDIADRDAIVEYVNARQYRGPQV

SEQ ID NO: 21837 - protein, 8 aa, Homo sapiens
LFHLVLLF

SEQ ID NO: 21838 - protein, 110 aa, Homo sapiens
MPVPLKSGVGFFFFPFLLSAHQHIVPERNSRRCTADTAQLQGPKTLRPGPGMPEVSQVITWRNSGLLPAQEEEASRELQSPILPRKPAGWKGRGPLSWCESNSQPLGARC

SEQ ID NO: 21839 - protein, 26 aa, Homo sapiens
LFVLSLKPNRLAWVPALLSLEGLMYV

SEQ ID NO: 21840 - protein, 11 aa, Homo sapiens
VKIVQAVLSLL

SEQ ID NO: 21841 - protein, 133 aa, Homo sapiens
MAPKLITVLCLGFCLNQKICPHAGAQDKFSLSAWPSPVVPLGGRVTLSCHSHLRFVIWTIFQTTGTRSHELHTGLSNNITISPVTPEHAGTYRCVGIYKHASKWSAESNSLKIIVTGGPHDEAGREVDPLLQL

SEQ ID NO: 21842 - protein, 139 aa, Homo sapiens
MAPKLITVLCLGFCLNQKICPHAGAQDKFSLSAWPSPVVPLGGRVTLSCHSHLRFVIWTIFQTTGTRSHELHTGLSNNITISPVTPEHAGTYRCVGIYKHASKWSAESNSLKIIVTAFSLHPGGPHDEAGREVDPLLQL

SEQ ID NO: 21843 - protein, 365 aa, Homo sapiens
MAPKLITVLCLGFCLNQKICPHAGAQDKFSLSAWPSPVVPLGGRVTLSCHSHLRFVIWTIFQTTGTRSHELHTGLSNNITISPVTPEHAGTYRCVGIYKHASKWSAESNSLKIIVTGLFTKPSISAHPSSLVHAGARVSLRCHSELAFDEFILYKEGHIQHSQQLDQGMEAGIHYVEAVFSMGPVTPAHAGAYRCCGCFSHSRYEWSAPSDPLDIVITGKYKKPSLSTQVDPMMRLGEKLTLFCSSEISFDQYHLFRHGVAHGQWLSGGQRHREAFQANFSVGRATPVPGGTYRCYGSFNDSPYKPPVTRCNFTPQETLRVLLCHSQNPPLNLTPPWQTQSPRKANGRMKRSLQQKRHRRSYMPS

SEQ ID NO: 21844 - protein, 293 aa, Homo sapiens
LRTSPVPVTKRLLPRLWDNALEDLRVDGRGCEDYRCVEVETDVVSNTSGSARVKLGHTDILVGVKAEMGTPKLEKPNEGYLEFFVDCSASATPEFEGRGGDDLGTEIANTLYRIFNNKSSVDLKTLCISPREHCWVLYVDVLLLECGGNLFDAISIAVKAALFNTRIPRVRVLEDEEGSKDIELSDDPYDCIRLSVENVPCIVTLCKIGYRHVVDATLQEEACSLASLLVSVTSKGVVTCMRKVGKGSLDPESIFEMMETGKRVGKVLHASLQSVVHKEESLGPKRQKVGFLG

SEQ ID NO: 21845 - protein, 172 aa, Homo sapiens
LLSSIQDVVNTKMFEELKSRLDTLAQEVALLKEQQALQTVCLKGTKVHMKCFLAFTQTKTFHEASEDCISRGGTLGTPQTGSENDALYEYLRQSVGNEAEIWLGLNDMAAEGTWVDMTGARIAYKNWETEITAQPDGGKTENCAVLSGAANGKWFDKRCRDQLPYICQFGIV

SEQ ID NO: 21846 - protein, 286 aa, Homo sapiens
MLPLLAALLAAACPLPPVRGGAADAPGLLGVPSNASVNASSADEPIAPRLLASAAPGPPERPGPEEAAAAAAPCNISVQRQMLSSLLVRWGRPRGFQCDLLLFSTNAHGRAFFAAAFHRVGPPLLIEHLGLAAGGAQQDLRLCVGCGWVRGRRTGRLRPAAAPSAAAATAGAPTALPAYPAAEPPGPLWLQGEPLHFCCLDFSLEELQGEPGWRLNRKPIESTLVACFMTLVIVVWSVAALIWPVPIIAGFLPNGMEQRRTTASTTAATPAAAAAAAAVTSGVATK

SEQ ID NO: 21847 - protein, 17 aa, Homo sapiens
MPFTLGRWKSLLVLGRT

SEQ ID NO: 21848 - protein, 33 aa, Homo sapiens
VLLPYAFQHPGSPGWQELREGHTLARFQDHSLH

SEQ ID NO: 21849 - protein, 235 aa, Homo sapiens
LTYFGMRVFIQICFSYFLVDSAGQVVANQEGVFRSNCMDCLDRTNVIQSLLARRSLQAQLQRLGVLHVGQKLEEQDEFEKIYKNAWADNANACAKQYAGTGALKTDFTRTGKRTHLGLIMDGWNSMIRYYKNNFSDGFRQDSIDLFLGNYSVDELESHSPLSVPRDWKFLALPIIMVVAFSMCIICLLMAGDTWTETLAYVLFWGVASIGTFFIILYNGKDFVDAPRLVQKEKID

SEQ ID NO: 21850 - protein, 356 aa, Homo sapiens [sequence omitted]

SEQ ID NO: 21851 - protein, 1528 aa, Homo sapiens
LLSRQPPRAEILSLPLDPGRRHTDKKGKLTMASTNAESQLQRIIRDLQDAVTELSKEFQEAGEPITDDSTSLHKFSYKLEYLLQFDQKEKATLLGNKKDYWDYFCACLAKVKGANDGIRFVKSISELRTSLGKGRAFIRYSLVHQRLADTLQQCFMNTKVTSDWYYARSPFLQPKLSSDIVGQLYELTEVQFDLASRGFDLDAAWPTFARRTLTTGSSAYLWKPPSRSSSMSSLVSSYLQTQEMVSNFDLNSPLNNEALEGFDEMRLELDQLEVREKQLRERMQQLDRENQELRAAVSQQGEQLQTERERGRTAAEDNVRLTCLVAELQKQWEVTQATQNTVKELQTCLQGLELGAAEKEEDYHTALRRLESMLQPLAQELEATRDSLDKKNQHLASFPGWLAMAQQKADTASDTKGRQEPIPSDAAQEMQELGEKLQALERERTKVEEVNRQQSAQLEQLVKELQLKEDARASLERLVKEMAPLQEELSGKGQEADQLWRRLQELLAHTSSWEEELAELRREKKQQQEEKELLEQEVRSLTRQLQFLETQLAQVSQHVSDLEEQKKQLIQDKDHLSQQVGMLERLAGPPGPELPVAGEKNEALVPVNSSLQEAWGKPEEEQRGLQEAQLDDTKVQEGSQEEELRQANRELEKELQNVVGRNQLLEGKLQALQADYQALQQRESAIQGSLASLEAEQASIRHLGDQMEASLLAVRKAKEAMKAQMAEKEAILQSKEGECQQLREEVEQCQQLAEARHRELRALESQCQQQTQLIEVLTAEKGQQGVGPPTDNEARELAAQLALSQAQLEVHQGEVQRLQAQVVDLQAKMRAALDDQDKVQSQLSMAEAVLREHKTLVQQLKEQNEALNRAHVQELLQCSEREGALQEERADEAQQREEELRALQEELSQAKCSSEEAQLEHAELQEQLHRANTDTAELGIQVCALTVEKERVEEALACAVQELQDAKEAASREREGLERQVAGLQQEKESLQEKLKAAKAAAGSLPGLQAQLAQAEQRAQSLQEAAHQELNTLKFQLSAEIMDYQSRLKNAGEECKSLRGQLEEQGRQLQAAEEAVEKLKATQADMGEKLSCTSNHLAECQAAMLRKDKEGAALREDLERTQKELEKATTKIQEYYNKLCQEVTNRERNDQKMLADLDDLNRTKKYLEERLIELLRDKDALWQKSDALEFQQKLSAEERWLGDTEANHCLDCKREFSWMVRRHHCRICGRIFCYYCCNNYVLSKHGGKKERCCRACFQKLSEGPGSPDSSGSGTSQGEPSPALSPASPGPQATGGQGANTDYRPPDDAVFDIITDEELCQIQESGSSLPETPTETDSLDPNAAEQASVGASKGLGNLLCESSACRDTTSTSLTPEDTEDMPVGQDSEICLLKSGELMIKVPLTVDEIASFGEGSRELFVRSSTYSLIPITVAEAGLTISWVFSSDPKSISFSVVFQEAEDTPLDQCKVLIPTTRCNSHKENIQGQLKVRTPGIYMLIFDNTFSRFVSKKVFYHLTVDRPVIYDGSDFL

SEQ ID NO: 21852 - protein, 1508 aa, Homo sapiens
LLSRQPPRAEILSLPLDPGRRHTDKKGKLTMASTNAESQLQRIIRDLQDAVTELSKEFQEAGEPITDDSTSLHKFSYKLEYLLQFDQKEKATLLGNKKDYWDYFCACLAKVKGANDGIRFVKSISELRTSLGKGRAFIRYSLVHQRLADTLQQCFMNTKVTSDWYYARSPFLQPKLSSDIVGQLYELTEVQFDLASRGFDLDAAWPTFARRTLTTGSSAYLWKPPSRSSSMSSLVSSYLQTQEMVSNFDLNSPLNNEALEGFDEMRLELDQLEVREKQLRERMQQLDRENQELRAAVSQQGEQLQTERERGRTAAEDNVRLTCLVAELQKQWEVTQATQNTVKELQTCLQGLELGAAEKEEDYHTALRRLESMLQPLAQELEATRDSLDKKNQHLASFPGWLAMAQQKADTASDTKGRQEPIPSDAAQEMQELGEKLQALERERTKVEEVNRQQSAQLEQLVKELQLKEDARASLERLVKEMAPLQEELSGKGQEADQLWRRLQELLAHTSSWEEELAELRREKKQQQEEKELLEQEVRSLTRQLQFLETQLAQVSQHVSDLEEQKKQLIQDKDHLSQQVGMLERLAGPPGPELPVAGEKNEALVPVNSSLQEAWGKPEEEQRGLQEAQLDDTKVQEGSQEEELRQANRELEKELQNVVGRNQLLEGKLQALQADYQALQQRESAIQGSLASLEAEQASIRHLGDQMEASLLAVRKAKEAMKAQMAEKEAILQSKEGECQQLREEVEQCQQLAEARHRELRALESQCQQQTQLIEVLTAEKGQQGVGPPTDNEARELAAQLALSQAQLEVHQGEVQRLQAQVVDLQAKMRAALDDQDKVQSQLSMAEAVLREHKTLVQQLKEQNEALNRAHVQELLQCSEREGALQEERADEAQQREEELRALQEELSQAKCSSEEAQLEHAELQEQLHRANTDTAELGIQVCALTVEKERVEEALACAVQELQDAKEAASREREGLERQVAGLQQEKESLQEKLKAAKAAAGSLPGLQAQLAQAEQRAQSLQEAAHQELNTLKFQLSAEIMDYQSRLKNAGEECKSLRGQLEEQGRQLQAAEEAVEKLKATQADMGEKLSCTSNHLAECQAAMLRKDKEGAALREDLERTQKELEKATTKIQEYYNKLCQEVTNRERNDQKMLADLDDLNRTKKYLEERLIELLRDKDALWQKSDALEFQQKLSAEERWLGDTEANHCLDCKREFSWMVRRHHCRICGRIFCYYCCNNYVLSKHGGKKERCCRACFQKLSEGPGSPDSSGSGTSQGEPSPALSPASPGPQATGGQGANTDYRPPDDAVFDIITDEELCQIQESGSSLPETPTETDSLDPNAAEQDTTSTSLTPEDTEDMPVGQDSEICLLKSGELMIKVPLTVDEIASFGEGSRELFVRSSTYSLIPITVAEAGLTISWVFSSDPKSISFSVVFQEAEDTPLDQCKVLIPTTRCNSHKENIQGQLKVRTPGIYMLIFDNTFSRFVSKKVFYHLTVDRPVIYDGSDFL

SEQ ID NO: 21853 - protein, 56 aa, Homo sapiens
LLSRQPPRAEILSLPLDPGRRHTDKKGKLTMASTNAESQLQRIIRDLQGMVGCWAG

SEQ ID NO: 21854 - protein, 33 aa, Homo sapiens
MAVSTAFPSSSAWPQKVSVLPGGGPTSACHHGV

SEQ ID NO: 21855 - protein, 57 aa, Homo sapiens
LCRLCAGTGENKCAFSSQEPYFSYSGAFKCLRDGAGDVAFIRESTVFGKSRVMSRGY

SEQ ID NO: 21856 - protein, 335 aa, Homo sapiens
VAMGTARIAPGLALLLCCPVLSSAYALVDADDVMTKEEQIFLLHRAQAQCEKRLKEVLQRPASIMESDKGWTSASTSGKPRKDKASGKLYPESEEDKEAPTGSRYRGRPCLPEWDHILCWPLGAPGEVVAVPCPDYIYDFNHKGHAYRRCDRNGSWELVPGHNRTWANYSECVKFLTNETREREVFDRLGMIYTVGYSVSLASLTVAVLILAYFRRLHCTRNYIHMHLFLSFMLRAVSIFVKDAVLYSGATLDEAERLTEEELRAIAQAPPPPATAAAGYAGCRVAVTFFLYFLATNYYWILVEGLYLHSLIFMAFFSEKKYLWGFTVFGWGAGT

SEQ ID NO: 21857 - protein, 595 aa, Homo sapiens
VAMGTARIAPGLALLLCCPVLSSAYALVDADDVMTKEEQIFLLHRAQAQCEKRLKEVLQRPASIMESDKGWTSASTSGKPRKDKASGKLYPESEEDKEAPTGSRYRGRPCLPEWDHILCWPLGAPGEVVAVPCPDYIYDFNHKGHAYRRCDRNGSWELVPGHNRTWANYSECVKFLTNETREREVFDRLGMIYTVGYSVSLASLTVAVLILAYFRRLHCTRNYIHMHLFLSFMLRAVSIFVKDAVLYSGATLDEAERLTEEELRAIAQAPPPPATAAAGYAGCRVAVTFFLYFLATNYYWILVEGLYLHSLIFMAFFSEKKYLWGFTVFGWGLPAVFVAVWVSVRATLANTGCWDLSSGNKKWIIQVPILASIVLNFILFINIVRVLATKLRETNAGRCDTRQQYRKLLKSTLVLMPLFGVHYIVFMATPYTEVSGTLWQVQMHYEMLFNSFQGFFVAIIYCFCNGEVQAEIKKSWSRWTLALDFKRKARSGSSSYSYGPMVSHTSVTNVGPRVGLGLPLSPRLLPTATTNGHPQLPGHAKPGTPALETLETTPPAMAAPKDDGFLNGSCSGLDEEASGPERPPALLQEEWETVM

SEQ ID NO: 21858 - protein, 2578 aa, Homo sapiens
LRGGGSRRRLQPLPMKQLQPQPPPKMGDFYDPEHPTPEEEENEAKIENVQKTGFIKGPMFKGVASSRFLPKGTKTKVNLEEQGRQKVSFSFSLTKKTLQNRFLTALGNEKQSDTPNPPAVPLQVDSTPKMKMEIGDTLSTAEESSPPKSRVELGKIHFKKHLLHVTSRPLLATTTAVASPPTHAAPLPAVIAESTTVDSPPSSPPPPPPPAQATTLSSPAPVTEPVALPHTPITVLMAAPVPLPVDVAVRSLKEPPIIIVPESLEADTKQDTISNSLEEHVTQILNEQADISSKKEDSHIGKDEEIPDSSKISLSCKKTGSKKKSSQSEGIFLGSESDEDSVRTSSSQRSHDLKFSASIEKERDFKKSSAPLKSEDLGKPSRSKTDRDDKYFSYSKLERDTRYVSSRCRSERERRRSRSHSRSERGSRTNLSYSRSERSHYYDSDRRYHRSSPYRERTRYSRPYTDNRARESSDSEEEYKKTYSRRTSSHSSSYRDLRTSSYSKSDRDCKTETSYLEMERRGKYSSKLERESKRTSENEAIKRCCSPPNELGFRRGSSYSKHDSSASRYKSTLSKPIPKSDKFKNSFCCTELNEEIKQSHSFSLQTPCSKGSELRMINKNPEREKAGSPAPSNRLNDSPTLKKLDELPIFKSEFITHDSHDSIKELDSLSKVKNDQLRSFCPIELNINGSPGAESDLATFCTSKTDAVLMTSDDSVTGSELSPLVKACMLSSNGFQNISRCKEKDLDDTCMLHKKSESPFRETEPLVSPHQDKLMSMPVMTVDYSKTVVKEPVDTRVSCCKTKDSDIYCTLNDSNPSLCNSEAENIEPSVMKISSNSFMNVHLESKPVICDSRNLTDHSKFACEEYKQSIGSTSSASVNHFDDLYQPIGSSGIASSLQSLPPGIKVDSLTLLKCGENTSPVLDAVLKSKKSSEFLKHAGKETIVEVGSDLPDSGKGFASRENRRNNGLSGKCLQEAQEEGNSILPERRGRPEISLDERGEGGHVHTSDDSEVVFSSCDLNLTMEDSDGVTYALKCDSSGHAPEIVSTVHEDYSGSSESSNDESDSEDTDSDDSSIPRNRLQSVVVVPKNSTLPMEETSPCSSRSSQSYRHYSDHWEDERLESRRHLYEEKFESIASKACPQTDKFFLHKGTEKNPEISFTQSSRKQIDNRLPELSHPQSDGVDSTSHTDVKSDPLGHPNSEETVKAKIPSRQQEELPIYSSDFEDVPNKSWQQTTFQNRPDSRLGKTELSFSSSCEIPHVDGLHSSEELRNLGWDFSQEKPSTTYQQPDSSYGACGGHKYQQNAEQYGGTRDYWQGNGYWDPRSGRPPGTGVVYDRTQGQVPDSLTDDREEEENWDQQDGSHFSDQSDKFLLSLQKDKGSVQAPEISSNSIKDTLAVNEKKDFSKNLEKNDIKDRGPLKKRRQEIESDSESDGELQDRKKVRVEVEQGETSVPPGSALVGPSCVMDDFRDPQRWKECAKQGKMPCYFDLIEENVYLTERKKNKSHRDIKRMQCECTPLSKDERAQGEIACGEDCLNRLLMIECSSRCPNGDYCSNRRFQRKQHADVEVILTEKKGWGLRAAKDLPSNTFVLEYCGEVLDHKEFKARVKEYARNKNIHYYFMALKNDEIIDATQKGNCSRFMNHSCEPNCETQKWTVNGQLRVGFFTTKLVPSGSELTFDYQFQRYGKEAQKCFCGSANCRGYLGGENRVSIRAAGGKMKKERSRKKDSVDGELEALMENGEGLSDKNQVLSLSRLMVRIETLEQKLTCLELIQNTHSQSCLKSFLERHGLSLLWIWMAELGDGRESNQKLQEEIIKTLEHLPIPTKNMLEESKVLPIIQRWSQTKTAVPPLSEGDGYSSENTSRAHTPLNTPDPSTKLSTEADTDTPKKLMFRRLKIISENSMDSAISDATSELEGKDGKEDLDQLENVPVEEEEELQSQQLLPQQLPECKVDSETNIEASKLPTSEPEADAEIEPKESNGTKLEEPINEETPSQDEEEGVSDVESERSQEQPDKTVDISDLATKLLDSWKDLKEVYRIPKKSQTEKENTTTERGRDAVGFRDQTPAPKTPNRSRERDPDKQTQNKEKRKRRSSLSPPSSAYERGTKRPDDRYDTPTSKKKVRIKDRNKLSTEERRKLFEQEVAQREAQKQQQQMQNLGMTSPLPYDSLGYNAPHHPFAGYPPGYPMQAYVDPSNPNAGKVLLPTPSMDPVCSPAPYDHAQPLVGHSTEPLSAPPPVPVVPHVAAPVEVSSSQYVAQSDGVVHQDSSVAVLPVPAPGPVQGQNYSVWDSNQQSVSVQQQYSPAQSQATIYYQGQTCPTVYGVTSPYSQTTPPIVQSYAQPSLQYIQGQQIFTAHPQGVVVQPAAAVTTIVAPGQPQPLQPSEMVVTNNLLDLPPPSPPKPKTIVLPPNWKTARDPEGKIYYYHVITRQTQWDPPTWESPGDDASLEHEAEMDLGTPTYDENPMKASKKPKTAEADTSSELAKKSKEVFRKEMSQFIVQCLNPYRKPDCKVGRITTTEDFKHLARKLTHGVMNKELKYCKNPEDLECNENVKHKTKEYIKKYMQKFGAVYKPKEDTELE

SEQ ID NO: 21859 - protein, 48 aa, Homo sapiens
MVEDGAEELEDLVHFSVSELPSRGYGVMEEIRRQGKLCDVTLKSFAVP

SEQ ID NO: 21860 - protein, 62 aa, Homo sapiens
LWATEWVLRILAQILPLGMADHFLPWPAALVVDFLSPIPPPGVEFTLLHLRSMFQSKIKPVF

SEQ ID NO: 21861 - protein, 114 aa, Homo sapiens
VGLGPGGPIRAYILAHKDAIQLWRTLMGPTRVFRARHVAPDSIRGSFGLTDTRNTTHGSDSVVSASREIAAFFPDFSEQRWYEEEEPQLRCGPVCYSPEGGVHYVAGTGGLGPA

SEQ ID NO: 21862 - protein, 2137 aa, Homo sapiens
VTMPALGPALLQALWAGWVLTLQPLPPTAFTPNGTYLQHLARDPTSGTLYLGATNFLFQLSPGLQLEATVSTGPVLDSRDCLPPVMPDECPQAQPTNNPNQLLLVSPGALVVCGSVHQGVCEQRRLGQLEQLLLRPERPGDTQYVAANDPAVSTVGLVAQGLAGEPLLFVGRGYTSRGVGGGIPPITTRALWPPDPQAAFSYEETAKLAVGRLSEYSHHFVSAFARGASAYFLFLRRDLQAQSRAFRAYVSRVCLRDQHYYSYVELPLACEGGRYGLIQAAAVATSREVAHGEVLFAAFSSAAPPTVGRPPSAAAGASGASALCAFPLDEVDRLANRTRDACYTREGRAEDGTEVAYIEYDVNSDCAQLPVDTLDAYPCGSDHTPSPMASRVPLEATPILEWPGIQLTAVAVTMEDGHTIAFLGDSQGQLHRVYLGPGSDGHPYSTQSIQQGSAVSRDLTFDGTFEHLYVMTQSTLLKVPVASCAQHLDCASCLAHRDPYCGWCVLLGRCSRRSECSRGQGPEQWLWSFQPELGCLQVAAMSPANISREETREVFLSVPDLPPLWPGESYSCHFGEHQSPALLTGSGVMCPSPDPSEAPVLPRGADYVSVSVELRFGAVVIAKTSLSFYDCVAVTELRPSAQCQACVSSRWGCNWCVWQHLCTHKASCDAGPMVASHQSPLVSPDPPARGGPSPSPPTAPKALATPAPDTLPVEPGAPSTATASDISPGASPSLLSPWGPWAGSGSISSPGSTGSPLHEEPSPPSPQNGPGTAVPAPTDFRPSATPEDLLASPLSPSEVAAVPPADPGPEALHPTVPLDLPPATVPATTFPGAMGSVKPALDWLTREGGELPEADEWTGGDAPAFSTSTLLSGDGDSAELEGPPAPLILPSSLDYQYDTPGLWELEEATLGASSCPCVESVQGSTLMPVHVEREIRLLGRNLHLFQDGPGDNECVMELEGLEVVVEARVECEPPPDTQCHVTCQQHQLSYEALQPELRVGLFLRRAGRLRVDSAEGLHVVLYDCSVGHGDCSRCQTAMPQYGCVWCEGERPRCVTREACGEAEAVATQCPAPLIHSVEPLTGPVDGGTRVTIRGSNLGQHVQDVLGMVTVAGVPCAVDAQEYEVSSSLVCITGASGEEVAGATAVEVPGRGRGVSEHDFAYQDPKVHSIFPARGPRAGGTRLTLNGSKLLTGRLEDIRVVVGDQPCHLLPEQQSEQLRCETSPRPTPATLPVAVWFGATERRLQRGQFKYTLDPNITSAGPTKSFLSGGREICVRGQNLDVVQTPRIRVTVVSRMLQPSQGLGRRRRVVPETACSLGPSCSSQQFEEPCHVNSSQLITCRTPALPGLPEDPWVRVEFILDNLVFDFATLNPTPFSYEADPTLQPLNPEDPTMPFRHKPGSVFSVEGENLDLAMSKEEVVAMIGDGPCVVKTLTRHHLYCEPPVEQPLPRHHALREAPDSLPEFTVQMGNLRFSLGHVQYDGESPGAFPVAAQVGLGVGTSLLALGVIIIVLMYRRKSKQALRDYKKVQIQLENLESSVRDRCKKEFTDLMTEMTDLTSDLLGSGIPFLDYKVYAERIFFPGHRESPLHRDLGVPESRRPTVEQGLGQLSNLLNSKLFLTKFIHTLESQRTFSARDRAYVASLLTVALHGKLEYFTDILRTLLSDLVAQYVAKNPKLMLRRTETVVEKLLTNWMSICLYTFVRDSVGEPLYMLFRGIKHQVDKGPVDSVTGKAKYTLNDNRLLREDVEYRPLTLNALLAVGPGAGEAQGVPVKVLDCDTISQAKEKMLDQLYKGVPLTQRPDPRTLDVEWRSGVAGHLILSDEDVTSEVQGLWRRLNTLQHYKVPDGATVALVPCLTKHVLRENQDYVPGERTPMLEDVDEGGIRPWHLVKPSDEPEPPRPRRGSLRGGERERAKAIPEIYLTRLLSMKGTLQKFVDDLFQVILSTSRPVPLAVKYFFDLLDEQAQQHGISDQDTIHIWKTNSLPLRFWINIIKNPQFVFDVQTSDNMDAVLLVIAQTFMDACTLADHKLGRDSPINKLLYARDIPRYKRMVERYYADIRQTVPASDQEMNSVLAELSWNYSGDLGARVALHELYKYINKYYDQIITALEEDGTAQKMQLGYRLQQIAAAVENKVTDL

SEQ ID NO: 21863 - protein, 18 aa, Homo sapiens
LWCPKVVFVLALGGASLC

SEQ ID NO: 21864 - protein, 2947 aa, Homo sapiens
LPRMTLRLLVAALCAGILAEAPRVRAQHRERVTCTRLYAADIVFLLDGSSSIGRSNFREVRSFLEGLVLPFSGAASAQGVRFATVQYSDDPRTEFGLDALGSGGDVIRAIRELSYKGGNTRTGAAILHVADHVFLPQLARPGVPKVCILITDGKSQDLVDTAAQRLKGQGVKLFAVGIKNADPEELKRVASQPTSDFFFFVNDFSILRTLLPLVSRRVCTTAGGVPVTRPPDDSTSAPRDLVLSEPSSQSLRVQWTAASGPVTGYKVQYTPLTGLGQPLPSERQEVNVPAGETSVRLRGLRPLTEYQVTVIALYANSIGEAVSGTARTTALEGPELTIQNTTAHSLLVAWRSVPGATGYRVTWRVLSGGPTQQQELGPGQGSVLLRDLEPGTDYEVTVSTLFGRSVGPATSLMARTDASVEQTLRPVILGPTSILLSWNLVPEARGYRLEWRRETGLEPPQKVVLPSDVTRYQLDGLQPGTEYRLTLYTLLEGHEVATPATVVPTGPELPVSPVTDLQATELPGQRVRVSWSPVPGATQYRIIVRSTQGVERTLVLPGSQTAFDLDDVQAGLSYTVRVSARVGPREGSASVLTVRREPETPLAVPGLRVVVSDATRVRVAWGPVPGASGFRISWSTGSGPESSQTLPPDSTATDITGLQPGTTYQVAVSVLRGREEGPAAVIVARTDPLGPVRTVHVTQASSSSVTITWTRVPGATGYRVSWHSAHGPEKSQLVSGEATVAELDGLEPDTEYTVHVRAHVAGVDGPPASVVVRTAPEPVGRVSRLQILNASSDVLRITWVGVTGATAYRLAWGRSEGGPMRHQILPGNTDSAEIRGLEGGVSYSVRVTALVGDREGTPVSIVVTTPPEAPPALGTLHVVQRGEHSLRLRWEPVPRAQGFLLHWQPEGGQEQSRVLGPELSSYHLDGLEPATQYRVRLSVLGPAGEGPSAEVTARTESPRVPSIELRVVDTSIDSVTLAWTPVSRASSYILSWRPLRGPGQEVPGSPQTLPGISSSQRVTGLEPGVSYIFSLTPVLDGVRGPEASVTQTPVCPRGLADVVFLPHATQDNAHRAEATRRVLERLVLALGPLGPQAVQVGLLSYSHRPSPLFPLNGSHDLGIILQRIRDMPYMDPSGNNLGTAVVTAHRYMLAPDAPGRRQHVPGVMVLLVDEPLRGDIFSPIREAQASGLNVVMLGMAGADPEQLRRLAPGMDSVQTFFAVDDGPSLDQAVSGLATALCQASFTTQPRPEPCPVYCPKGQKGEPGEMGLRGQVGPPGDPGLPGRTGAPGPQGPPGSATAKGERGFPGADGRPGSPGRAGNPGTPGAPGLKGSPGLPGPRGDPGERGPRGPKGEPGAPGQVIGGEGPGLPGRKGDPGPSGPPGPRGPLGDPGPRGPPGLPGTAMKGDKGDRGERGPPGPGEGGIAPGEPGLPGLPGSPGPQGPVGPPGKKGEKGDSEDGAPGLPGQPGSPGEQGPRGPPGAIGPKGDRGFPGPLGEAGEKGERGPPGPAGSRGLPGVAGRPGAKGPEGPPGPTGRQGEKGEPGRPGDPAVVGPAVAGPKGEKGDVGPAGPRGATGVQGERGPPGLVLPGDPGPKGDPGDRGPIGLTGRAGPPGDSGPPGEKGDPGRPGPPGPVGPRGRDGEVGEKGDEGPPGDPGLPGKAGERGLRGAPGVRGPVGEKGDQGDPGEDGRNGSPGSSGPKGDRGEPGPPGPPGRLVDTGPGAREKGEPGDRGQEGPRGPKGDPGLPGAPGERGIEGFRGPPGPQGDPGVRGPAGEKGDRGPPGLDGRSGLDGKPGAAGPSGPNGAAGKAGDPGRDGLPGLRGEQGLPGPSGPPGLPGKPGEDGKPGLNGKNGEPGDPGEDGRKGEKGDSGASGREGRDGPKGERGAPGILGPQGPPGLPGPVGPPGQGFPGVPGGTGPKGDRGETGSKGEQGLPGERGLRGEPGSVPNVDRLLETAGIKASALREIVETWDESSGSFLPVPERRRGPKGDSGEQGPPGKEGPIGFPGERGLKGDRGDPGPQGPPGLALGERGPPGPSGLAGEPGKPGIPGLPGRAGGVGEAGRPGERGERGEKGERGEQGRDGPPGLPGTPGPPGPPGPKVSVDEPGPGLSGEQGPPGLKGAKGEPGSNGDQGPKGDRGVPGIKGDRGEPGPRGQDGNPGLPGERGMAGPEGKPGLQGPRGPPGPVGGHGDPGPPGAPGLAGPAGPQGPSGLKGEPGETGPPGRGLTGPTGAVGLPGPPGPSGLVGPQGSPGLPGQVGETGKPGAPGRDGASGKDGDRGSPGVPGSPGLPGPVGPKGEPGPTGAPGQAVVGLPGAKGEKGAPGGLAGDLVGEPGAKGDRGLPGPRGEKGEAGRAGEPGDPGEDGQKGAPGPKGFKGDPGVGVPGSPGPPGPPGVKGDLGLPGLPGAPGVVGFPGQTGPRGEMGQPGPSGERGLAGPPGREGIPGPLGPPGPPGSVGPPGASGLKGDKGDPGVGLPGPRGERGEPGIRGEDGRPGQEGPRGLTGPPGSRGERGEKGDVGSAGLKGDKGDSAVILGPPGPRGAKGDMGERGPRGLDGDKGPRGDNGDPGDKGSKGEPGDKGSAGLPGLRGLLGPQGQPGAAGIPGDPGSPGKDGVPGIRGEKGDVGFMGPRGLKGERGVKGACGLDGEKGDKGEAGPPGRPGLAGHKGEMGEPGVPGQSGAPGKEGLIGPKGDRGFDGQPGPKGDQGEKGERGTPGIGGFPGPSGNDGSAGPPGPPGSVGPRGPEGLQGQKGERGPPGERVVGAPGVPGAPGERGEQGRPGPAGPRGEKGEAALTEDDIRGFVRQEMSQHCACQGQFIASGSRPLPSYAADTAGSQLHAVPVLRVSHAEEEERVPPEDDEYSEYSEYSVEEYQDPEAPWDSDDPCSLPLDEGSCTAYTLRWYHRAVTGSTEACHPFVYGGCGGNANRFGTREACERRCPPRVVQSQGTGTAQD

SEQ ID NO: 21865 - protein, 210 aa, Homo sapiens
LHLWWWRGECQREHGTSPSGKRGCWGCVLLCVGVTVCVEDKRVGADHLSPWQHLSSPLASGAVANKLCQSFQTFSICYAETGLLGAHFVCDRMKIDDMMFVLQGQWMRLCTSATESEVARGKNILRNALVSHLDGTTPVCEDIGRSLLTYGRRIPLAEWESRIAEVDASVVREICSKYIYDQCPAVAGYGPIEQLPDYNRIRSGMFWLRF

SEQ ID NO: 21866 - protein, 58 aa, Homo sapiens
LTLADPQGLAVLLLFCVLNADARAAWMPACLGRKAAPEEARPAPGLVSRDGGPEKPEF

SEQ ID NO: 21867 - protein, 115 aa, Homo sapiens
MLALYLSEQWNVPGKKEQPLTDEPLPVSLPRGMPEPSSILARTSQGAKTRGTHGQTTDRRRTGRWTPLPPPSPRHLRPEDEPSLQGHGCGAPRQRRPSGALCPPGRGALMRAPLQ

SEQ ID NO: 21868 - protein, 116 aa, Homo sapiens
MLALYLSEQWNVPGKKEQPLTDEPLPVSLPRGMPEPSQSILARTSQGAKTRGTHGQTTDRRRTGRWTPLPPPSPRHLRPEDEPSLQGHGCGAPRQRRPSGALCPPGRGALMRAPLQ

SEQ ID NO: 21869 - protein, 27 aa, Homo sapiens
MTELFLPLPPLLPLLWLWAFRKLESQH

SEQ ID NO: 21870 - protein, 422 aa, Homo sapiens
LMLTAISCILPMALVSHSVAKLILVNFHWQVSEILDRYKSNSAQLLVEARVQPNPSKHVPTSHPPHHCAVCMQFVRKENLLSLACQHQFCRSCWEQHCSVLVKDGVGVGVSCMAQDCPLRTPEDFVFPLLPNEELREKYRRYLFRDYVESHYQLQLCPGADCPMVIRVQEPRARRVQCNRCNEVFCFKCRQMYHAPTDCATIRKWLTKCADDSETANYISAHTKDCPKCNICIEKNGGCNHMQCSKCKHDFCWMCLGDWKTHGSEYYECSRYKENPDIVNQSQQAQAREALKKYLFYFERWENHNKSLQLEAQTYQRIHEKIQERVMNNLGTWIDWQYLQNAAKLLAKCRYTLQYTYPYAYYMESGPRKKLFEYQQAQLEAEIENLSWKVERADSYDRGDLENQMHIAEQRRRTLLKDFHDT

SEQ ID NO: 21871 - protein, 88 aa, Homo sapiens
LAPSGCFCSTGVSCMAQDCPLRTPEDFVFPLLPNEELREKYRRYLFRDYVESHYQLQLCPGADCPMVIRVQEPRARRVQCNRCNEVFW

SEQ ID NO: 21872 - protein, 861 aa, Homo sapiens [sequence omitted]

SEQ ID NO: 21873 - protein, 365 aa, Homo sapiens
LGTGPLLGALALWPVEHISSVRAVAVWGIGTPGGPQDPQPGLTAHVVSAGGRAEMHCFSIMVTPDPSTPSRLACHVMHLSSHRLDEYWDRQRNRHRMVKVDPETRYMSLAVCELDQPGLGPLVAAACSDGAVRLFLLQDSGRILQLLAETFHHKRCVLKVHSFTHEAPNQRRRLLLCSAATDGSLAFWDLTTMLDHDSTVLEPPVDPGLPYRLGTPSLTLQAHSCGINSLHTLPTREGHHLVASGSEDGSLHVFVLAVEMLQLEEAVGEAGLVPQLRVLEEYSVPCAHAAHVTGLKILSPSIMVSASIDQRLTFWRLGHGEPTFMNSTVFHVPDVADMDCWPVSPEFGHRCALGGQGLEVYNWYD

SEQ ID NO: 21874 - protein, 510 aa, Homo sapiens
MATRRLGVGETLGALNAALGPGGPVWIKETRTRHLRSRDFLAPHRALQARFDDGQVGVSRAGPCGREMGPVPWLFYTPVLPQVPEHLLHALACLQGPGVAPVLRCAPTPAGLSLQLQRSAVFERVLSAVAAYATPASPASLGQRVLLHCPALRSSPCALRLSQLRTVLVADHLARALRAHGVCVRLVPAVRDPHMLTFLQQLRVDWPAASERASSHTLRSHALEELTSANDGRTLSPGILGRLCLKELVEEQGRTAGYDPNLDNCLVTEDLLSVLAELQEALWHWPEDSHPGLAGASDTGTGGCLVVHVVSCEEEFQQQKLDLLWQKLVDKAPLRQKHLICGPVKVAGAPGTLMTAPEYYEFRHTQVCKASALKHGGDLAQDPAWTEIFGVLSVATIKFEMLSTAPQSQLFLALADSSISTKGTKSGTFVMYNCARLATLFESYKCSMEQGLYPTFPPVSSLDFSLLHDEVSVPPGSWHKEAWTSPPSTFLPNRVSGCCSSTVSSPFRIC

SEQ ID NO: 21875 - protein, 286 aa, Homo sapiens
MATRRLGVGETLGALNAALGPGGPVWIKETRTRHLRSRDFLAPHRALQARFDDGQVPEHLLHALACLQGPGVAPVLRCAPTPAGLSLQLQRSAVFERVLSAVAAYATPASPASLGQRVLLHCPALRSSPCALRLSQLRTVLVADHLARALRAHGVCVRLVPAVRDPHMLTFLQQLRVDWPAASERASSHTLRSHALEELTSANDGRTLSPGILGRLCLKELVEEQGRTAGYDPNLDNCLVTEDLLSVLAELQEALWHWPEDSHPGLVSDSQPCRFSQTKYTVLPQL

SEQ ID NO: 21876 - protein, 62 aa, Homo sapiens
LLINIIIYTLLPFCIRCVAGQELMAHWALGGECEETKESLFHLDYLGFLDFSEVGKQYVCLL

SEQ ID NO: 21877 - protein, 104 aa, Homo sapiens
LALGASTVMMGSLLAATTEAPGEYFFSDGIRLKKYRGMGSLDAMDKHLSSQNRYFSEADKIKVAQGVSGAVQDKGSIHKFVPYLIAGIQHSCQDIGAKSLTQVR

SEQ ID NO: 21878 - protein, 244 aa, Homo sapiens
MNGNIHIPVAVQAVAGTYQNTAQTVHIWDPQQQPQQQTPQEQTPPPQQQQQQLQVTCSAQTVQVAEVEPQSQPQPSPELLLPNSLKPEEGLEVWKNWAQTKNAELEKDAQNRLAPIGRRQLLRFQEDLISSAVAELNYGLCLMTREARNGEGEPYDPDVLYYIFLCIQKYLFENGRVDDIFSDLYYVRFTEWLHEVLKDVQPRVTPLGYVLPSHVTEEMLWECKQLGAHSPSTLLTTLMFFNTK

SEQ ID NO: 21879 - protein, 793 aa, Homo sapiens
MPTCRLGPKFLLVSGVSAMAALDSLSLFTSLGLSEQKARETLKNSALSAQLREAATQAQQTLGSTIDKATGILLYGLASRLRDTRRLSFLVSYIASKKIHTEPQLSAALEYVRSHPLDPIDTVDFERECGVGVIVTPEQIEEAVEAAINRHRPQLLVERYHFNMGLLMGEARAVLKWADGKMIKNEVDMQVLHLLGPKLEADLEKKFKVAKARLEETDRRTAKDVVENGETADQTLSLMEQLRGEALKFHKPGENYKTPGYVVTPHTMNLLKQHLEITGGQVRTRFPPEPNGILHIGHAKAINFNFGYAKANNGICFLRFDDTNPEKEEAKFFTAICDMVAWLGYTPYKVTYASDYFDQLYAWAVELIRRGLAYVCHQRGEELKGHNTLPSPWRDRPMEESLLLFEAMRKGKFSEGEATLRMKLVMEDGKMDPVAYRVKYTPHHRTGDKWCIYPTYDYTHCLCDSIEHITHSLCTKEFQARRSSYFWLCNALDVYCPVQWEYGRLNLHYAVVSKRKILQLVATGAVRDWDDPRLFTLTALRRRGFPPEAINNFCARVGVTVAQTTMEPHLLEACVRDVLNDTAPRAMAVLESLRVIITNFPAAKSLDIQVPNFPADETKGFHQVPFAPIVFIERTDFKEEPEPGFKRLAWGQPVGLRHTGYVIELQHVVKGPSGCVESLEVTCRRADAGEKPKAFIHWVSQPLMCEVRLYERLFQHKNPEDPTEVPGGFLSDLNLASLHVVDAALVDCSVALAKPFDKFQFERLGYFSVDPDSHQGKLVFNRTVTLKEDPGKV

SEQ ID NO: 21880 - protein, 313 aa, Homo sapiens
LSPCSPQAMRKGKFSEGEATLRMKLVMEDGKMDPVAYRVKYTPHHRTGDKWCIYPTYDYTHCLCDSIEHITHSLCTKEFQARRSSYFWLCNALDVYCPVQWEYGRLNLHYAVVSKRKILQLVATGAVRDWDDPRLFTLTALRRRGFPPEAINNFCARVGVTVAQTTMEPHLLEACVRDVLNDTAPRAMAVLESLRVIITNFPAAKSLDIQVPNFPADETKGFHQVPFAPIVFIERTDFKEEPEPGFKRLAWGQPVGLRHTGYVIELQHVVKGPSGCVESLEVTCRRADAGEKPKAFIHWVSQPLMCEIPAQEP

SEQ ID NO: 21881 - protein, 282 aa, Homo sapiens
MPTCRLGPKFLLVSGVSAMAALDSLSLFTSLGLSEQKARETLKNSALSAQLREAATQAQQTLGSTIDKATGILLYGLASRLRDTRRLSFLVSYIASKKIHTEPQLSAALEYVRSHPLDPIDTVDFERECGVGVIVTPEQIEEAVEAAINRHRPQLLVERYHFNMGLLMGEARAVLKWADGKMIKNEVDMQVLHLLGPKLEADLEKKFKVAKARLEETDRRTAKDVVENGETADQTLSLMEQLRGEALKFHKPGTYPVPARTQWNPAYWTCQSHQFQLWLCQV

SEQ ID NO: 21882 - protein, 190 aa, Homo sapiens
MPTCRLGPKFLLVSGVSAMAALDSLSLFTSLGLSEQKARETLKNSALSAQLREAATQAQQTLGSTIDKATGILLYGLASRLRDTRRLSFLVSYIASKKIHTEPQLSAALEYVRSHPLDPIDTVDFERECGVGVIVTPEQIEEAVEAAINRHRPQLLVERYHFNMGLLMGEQGLERGYIVLSGHAFSSGHE

SEQ ID NO: 21883 - protein, 1366 aa, Homo sapiens
LSVPCWRIWPQRVAKIAGPGRKRRSPDPDAVADPGALWLSTKRLKMSGGASATGPRRGPPGLEDTTSKKKQKDRANQESKDGDPRKASTPQEEQTKEELLLDWRQSAEEVIVKLRVGVGPLQLEDVDAAFTDTDCVVRFAGGQQWGGVFYAEIKSSCAKVQTRKGSLLHLTLPKKVPMLTWPSLLKPLGTQELVPGLRCQENGQELSPIALEPGPEPHRAKQEARNQKRAQGRGEVGAGAGPGAQAGPSAKRAVHLCRGPEGDGSRDDPGPRGDAPPFVADPATQVEADEQLCIPPLNSQTCLLGSEENLAPLAGEKAVPPGNDPVSPAMVRSRNPGKDDCAKEEMAVAADAATLVDEPESMVNLAFVKNDSYEKGPDSVVVHVYVKEICRDTSRVLFREQDFTLIFQTRDGNFLRLHPGCGPHTTFRWQVKLRNLIEPEQCTFCFTASRIDICLRKRQSQRWGGLEAPAARGAVGGAKVAVPTGPTPLDSTPPGGAPHPLTGQEEARAVEKDKSKARSEDTGLDSVATRTPMEHVTPKPETHLASPKPTCMVPPMPHSPVSGDSVEEEEEEEKKVCLPGFTGLVNLGNTCFMNSVIQSLSNTRELRDFFHDRSFEAEINYNNPLGTGGRLAIGFAVLLRALWKGTHHAFQPSKLKAIVASKASQFTGYAQHDAQEFMAFLLDGLHEDLNRIQNKPYTETVDSDGRPDEVVAEEAWQRHKMRNDSFIVDLFQGQYKSKLVCPVCAKVSITFDPFLYLPVPLPQKQKVLPVFYFAREPHSKPIKFLVSVSKENSTASEVLDSLSQSVHVKPENLRLAEVIKNRFHRVFLPSHSLDTVSPSDTLLCFELLSSELAKERVVVLEVQQRPQVPSVPISKCAACQRKQQSEDEKLKRCTRCYRVGYCNQLCQKTHWPDHKGLCRPENIGYPFLVSVPASRLTYARLAQLLEGYARYSVSVFQPPFQPGRMALESQSPGCTTLLSTGSLEAGDSERDPIQPPELQLVTPMAEGDTGLPRVWAAPDRGPVPSTSGISSEMLASGPIEVGSLPAGERVSRPEAAVPGYQHPSEAMNAHTPQFFIYKIDSSNREQRLEDKGDTPLELGDDCSLALVWRNNERLQEFVLVASKELECAEDPGSAGEAARAGHFTLDQCLNLFTRPEVLAPEEAWYCPQCKQHREASKQLLLWRLPNVLIVQLKRFSFRSFIWRDKINDLVEFPVRNLDLSKFCIGQKEEQLPSYDLYAVINHYGGMIGGHYTACARLPNDRSSQRSDVGWRLFDDSTVTTVDESQVVTRYAYVLFYRRRNSPVERPPRAGHSEHHPDLGPAAEAAASQGLGPGQAPEVAPTRTAPERFAPPVDRPAPTYSNMEEVD

SEQ ID NO: 21884 - protein, 1417 aa, Homo sapiens
LSVPCWRIWPQRVAKIAGPGRKRRSPDPDAVADPGALWLSTKRLKMSGGASATGPRRGPPGLEDTTSKKKQKDRANQESKDGDPRKETGSRYVAQAGLEPLASGDPSASASHAAGITGSRHRTRLFFPSSSGSASTPQEEQTKEGACEDPHDLLATPTPELLLDWRQSAEEVIVKLRVGVGPLQLEDVDAAFTDTDCVVRFAGGQQWGGVFYAEIKSSCAKVQTRKGSLLHLTLPKKKKPLGTQELVPGLRCQENGQELSPIALEPGPEPHRAKQEARNQKRAQGRGEVGAGAGPGAQAGPSAKRAVHLCRGPEGDGSRDDPGPRGDAPPFVADPATQVEADEQLCIPPLNSQTCLLGSEENLAPLAGEKAVPPGNDPVSPAMVRSRNPGKDDCAKEEMAVAADAATLVDEPESMVNLAFVKNDSYEKGPDSVVVHVYVKEICRDTSRVLFREQDFTLIFQTRDGNFLRLHPGCGPHTTFRWQVKLRNLIEPEQCTFCFTASRIDICLRKRQSQRWGGLEAPAARVGGAKVAVPTGPTPLDSTPPGGAPHPLTGQEEARAVEKDKSKARSEDTGLDSVATRTPMEHVTPKPETHLASPKPTCMVPPMPHSPVSGDSVEEEEEEEKKVCLPGFTGLVNLGNTCFMNSVIQSLSNTRELRDFFHDRSFEAEINYNNPLGTGGRLAIGFAVLLRALWKGTHHAFQPSKLKAIVASKASQFTGYAQHDAQEFMAFLLDGLHEDLNRIQNKPYTETVDSDGRPDEVVAEEAWQRHKMRNDSFIVDLFQGQYKSKLVCPVCAKVSITFDPFLYLPVPLPQKQKVLPVFYFAREPHSKPIKFLVSVSKENSTASEVLDSLSQSVHVKPENLRLAEVIKNRFHRVFLPSHSLDTVSPSDTLLCFELLSSELAKERVVVLEVQQRPQVPSVPISKCAACQRKQQSEDEKLKRCTRCYRVGYCNQLCQKTHWPDHKGLCRPENIGYPFLVSVPASRLTYARLAQLLEGYARYSVSVFQPPFQPGRMALESQSPGCTTLLSTGSLEAGDSERDPIQPPELQLVTPMAEGDTGLPRVWAAPDRGPVPSTSGISSEMLASGPIEVGSLPAGERVSRPEAAVPGYQHPSEAMNAHTPQFFIYKIDSSNREQRLEDKGDTPLELGDDCSLALVWRNNERLQEFVLVASKELECAEDPGSAGEAARAGHFTLDQCLNLFTRPEVLAPEEAWYCPQCKQHREASKQLLLWRLPNVLIVQLKRFSFRSFIWRDKINDLVEFPVRNLDLSKFCIGQKEEQLPSYDLYAVINHYGGMIGGHYTACARLPNDRSSQRSDVGWRLFDDSTVTTVDESQVVTRYAYVLFYRRRNSPVERPPRAGHSEHHPDLGPAAEAAASQGLGPGQAPEVAPTRTAPERFAPPVDRPAPTYSNMEEVD

SEQ ID NO: 21885 - protein, 1403 aa, Homo sapiens
LSVPCWRIWPQRVAKIAGPGRKRRSPDPDAVADPGALWLSTKRLKMSGGASATGPRRGPPGLEDTTSKKKQKDRANQESKDGDPRKASTPQEEQTKEELLLDWRQSAEEVIVKLRVGVGPLQLEDVDAAFTDTDCVVRFAGGQQWGGVFYAEIKSSCAKVQTRKGSLLHLTLPKKVPMLTWPSLLKPLGTQELVPGLRCQENGQELSPIALEPGPEPHRAKQEARNQKRAQGRGEVGAGAGPGAQAGPSAKRAVHLCRGPEGDGSRDDPGPRGDAPPFVADPATQVEADEQLCIPPLNSQTCLLGSEENLAPLAGEKAVPPGNDPVSPAMVRSRNPGKDDCAKEEMAVAADAATLVDEPESMVNLAFVKNDSYEKGPDSVVVHVYVKEICRDTSRVLFREQDFTLIFQTRDGNFLRLHPGCGPHTTFRWQVKLRNLIEPEQCTFCFTASRIDICLRKRQSQRWGGLEAPAARGAVGGAKVAVPTGPTPLDSTPPGGAPHPLTGQEEARAVEKDKSKARSEDTGLDSVATRTPMEHVTPKPETHLASPKPTCMVPPMPHSPVSGDSVEEEEEEEKKVCLPGFTGLVNLGNTCFMNSVIQSLSNTRELRDFFHDRSFEAEINYNNPLGTGGRLAIGFAVLLRALWKGTHHAFQPSKLKAIVASKASQFTGYAQHDAQEFMAFLLDGLHEDLNRIQNKPYTETVDSDGRPDEVVAEEAWQRHKMRNDSFIVDLFQGQYKSKLVCPVCAKVSITFDPFLYLPVPLPQKQKVLPVFYFAREPHSKPIKFLVSVSKENSTASEVLDSLSQSVHVKPENLRLAEVIKNRFHRVFLPSHSLDTVSPSDTLLCFELLSSELAKERVVVLEVQQRPQVPSVPISKCAACQRKQQSEDEKLKRCTRCYRVGYCNQLCQKTHWPDHKGLCRPENIGYPFLVSVPASRLTYARLAQLLEGYARYSVSVFQPPFQPGRMALESQSPGCTTLLSTGSLEAGDSERDPIQPPELQLVTPMAEGDTGLPRVWAAPDRGPVPSTSGISSEMLASGPIEVGSLPAGERVSRPEAAVPGYQHPSEAMNAHTPQFFIYKIDSSNREQRLEDKGDTPLELGDDCSLALVWRNNERLQEFVLVASKELECAEDPGSAGEAARAGHFTLDQCLNLFTRPEVLAPEEAWYCPQCKQHREASKQLLLWRLPNVLIVQLKRFSFRSFIWRDKINDLVEFPVRNLDLSKFCIGQKEEQLPSYDLYAVINHYGGMIGGHYTACARLPNDRSSQRSDVGWRLFDDSTVTTVDESQVVTRYAYVLFYRRRNSPVERPPRAGHSEHHPDLGPAAEAAASQASRIWQELEAEEEPVPEGSGPLGPWGPQDWVGPLPRGPTTPDEGCLRYFVLGTVAALVALVLNVFYPLVSQSRWR

SEQ ID NO: 21886 - protein, 1363 aa, Homo sapiens
LSVPCWRIWPQRVAKIAGPGRKRRSPDPDAVADPGALWLSTKRLKMSGGASATGPRRGPPGLEDTTSKKKQKDRANQESKDGDPRKETGSRYVAQAGLEPLASGDPSASASHAAGITGSRHRTRLFFPSSSGSASTPQEEQTKEGACEDPHDLLATPTPELLLDWRQSAEEVIVKLRVGVGPLQLEDVDAAFTDTDCVVRFAGGQQWGGVFYAEIKSSCAKVQTRKGSLLHLTLPKKVPMLTWPSLLVEADEQLCIPPLNSQTCLLGSEENLAPLAGEKAVPPGNDPVSPAMVRSRNPGKDDCAKEEMAVAADAATLVDEPESMVNLAFVKNDSYEKGPDSVVVHVYVKEICRDTSRVLFREQDFTLIFQTRDGNFLRLHPGCGPHTTFRWQVKLRNLIEPEQCTFCFTASRIDICLRKRQSQRWGGLEAPAARVGGAKVAVPTGPTPLDSTPPGGAPHPLTGQEEARAVEKDKSKARSEDTGLDSVATRTPMEHVTPKPETHLASPKPTCMVPPMPHSPVSGDSVEEEEEEEKKVCLPGFTGLVNLGNTCFMNSVIQSLSNTRELRDFFHDRSFEAEINYNNPLGTGGRLAIGFAVLLRALWKGTHHAFQPSKLKAIVASKASQFTGYAQHDAQEFMAFLLDGLHEDLNRIQNKPYTETVDSDGRPDEVVAEEAWQRHKMRNDSFIVDLFQGQYKSKLVCPVCAKVSITFDPFLYLPVPLPQKQKVLPVFYFAREPHSKPIKFLVSVSKENSTASEVLDSLSQSVHVKPENLRLAEVIKNRFHRVFLPSHSLDTVSPSDTLLCFELLSSELAKERVVVLEVQQRPQVPSVPISKCAACQRKQQSEDEKLKRCTRCYRVGYCNQLCQKTHWPDHKGLCRPENIGYPFLVSVPASRLTYARLAQLLEGYARYSVSVFQPPFQPGRMALESQSPGCTTLLSTGSLEAGDSERDPIQPPELQLVTPMAEGDTGLPRVWAAPDRGPVPSTSGISSEMLASGPIEVGSLPAGERVSRPEAAVPGYQHPSEAMNAHTPQFFIYKIDSSNREQRLEDKGDTPLELGDDCSLALVWRNNERLQEFVLVASKELECAEDPGSAGEAARAGHFTLDQCLNLFTRPEVLAPEEAWYCPQCKQHREASKQLLLWRLPNVLIVQLKRFSFRSFIWRDKINDLVEFPVRNLDLSKFCIGQKEEQLPSYDLYAVINHYGGMIGGHYTACARLPNDRSSQRSDVGWRLFDDSTVTTVDESQVVTRYAYVLFYRRRNSPVERPPRAGHSEHHPDLGPAAEAAASQASRIWQELEAEEEPVPEGSGPLGPWGPQDWVGPLPRGPTTPDEGCLRYFVLGTVAALVALVLNVFYPLVSQSRWR

SEQ ID NO: 21887 - protein, 1464 aa, Homo sapiens
LSVPCWRIWPQRVAKIAGPGRKRRSPDPDAVADPGALWLSTKRLKMSGGASATGPRRGPPGLEDTTSKKKQKDRANQESKDGDPRKETGSRYVAQAGLEPLASGDPSASASHAAGITGSRHRTRLFFPSSSGSASTPQEEQTKEGACEDPHDLLATPTPELLLDWRQSAEEVIVKLRVGVGPLQLEDVDAAFTDTDCVVRFAGGQQWGGVFYAEIKSSCAKVQTRKGSLLHLTLPKKVPMLTWPSLLKKPLGTQELVPGLRCQENGQELSPIALEPGPEPHRAKQEARNQKRAQGRGEVGAGAGPGAQAGPSAKRAVHLCRGPEGDGSRDDPGPRGDAPPFVADPATQVEADEQLCIPPLNSQTCLLGSEENLAPLAGEKAVPPGNDPVSPAMVRSRNPGKDDCAKEEMAVAADAATLVDEPESMVNLAFVKNDSYEKGPDSVVVHVYVKEICRDTSRVLFREQDFTLIFQTRDGNFLRLHPGCGPHTTFRWQVKLRNLIEPEQCTFCFTASRIDICLRKRQSQRWGGLEAPAARVGGAKVAVPTGPTPLDSTPPGGAPHPLTGQEEARAVEKDKSKARSEDTGLDSVATRTPMEHVTPKPETHLASPKPTCMVPPMPHSPVSGDSVEEEEEEEKKVCLPGFTGLVNLGNTCFMNSVIQSLSNTRELRDFFHDRSFEAEINYNNPLGTGGRLAIGFAVLLRALWKGTHHAFQPSKLKAIVASKASQFTGYAQHDAQEFMAFLLDGLHEDLNRIQNKPYTETVDSDGRPDEVVAEEAWQRHKMRNDSFIVDLFQGQYKSKLVCPVCAKVSITFDPFLYLPVPLPQKQKVLPVFYFAREPHSKPIKFLVSVSKENSTASEVLDSLSQSVHVKPENLRLAEVIKNRFHRVFLPSHSLDTVSPSDTLLCFELLSSELAKERVVVLEVQQRPQVPSVPISKCAACQRKQQSEDEKLKRCTRCYRVGYCNQLCQKTHWPDHKGLCRPENIGYPFLVSVPASRLTYARLAQLLEGYARYSVSVFQPPFQPGRMALESQSPGCTTLLSTGSLEAGDSERDPIQPPELQLVTPMAEGDTGLPRVWAAPDRGPVPSTSGISSEMLASGPIEVGSLPAGERVSRPEAAVPGYQHPSEAMNAHTPQFFIYKIDSSNREQRLEDKGDTPLELGDDCSLALVWRNNERLQEFVLVASKELECAEDPGSAGEAARAGHFTLDQCLNLFTRPEVLAPEEAWYCPQCKQHREASKQLLLWRLPNVLIVQLKRFSFRSFIWRDKINDLVEFPVRNLDLSKFCIGQKEEQLPSYDLYAVINHYGGMIGGHYTACARLPNDRSSQRSDVGWRLFDDSTVTTVDESQVVTRYAYVLFYRRRNSPVERPPRAGHSEHHPDLGPAAEAAASQASRIWQELEAEEEPVPEGSGPLGPWGPQDWVGPLPRGPTTPDEGCLRYFVLGTVAALVALVLNVFYPLVSQSRWR

SEQ ID NO: 21888 - protein, 144 aa, Homo sapiens
LYQVQERMAGAERALSSAGERARQLDALLEALKLKRAGNSLAASTAEETAGSAQGRAQEAEQLLRGPLGDQYQTVKALAERKAQGVLAAQARAEQLRDEARDLLQAAQDKLQRLQGKKWGTRDTRLRETPPKLTPALPRIGRHL

SEQ ID NO: 21889 - protein, 481 aa, Homo sapiens
LVCGYPGRSAVPNAMSVVVQHVEEKAVHSWSRISTAGKKALEEALLVFNPMSQDLSATEAQLVAFLQGLRDDGFQPTILRSGDVYGYSSCTANPPSQTKLQARAPNPTATSPPASAPRTAMRLPAGRATLLPMPLSGRLAKASTPALAKHATTNLLLSSLKQSSASHARGAAVGFPTHLYPGVYPAMRLSVVLEALVPLKTPMPCLGAKHKAQSLQLSLADSPLKLRKSSGKGPGNPRPKAPRKTTSKGPKCLTRKGPGAGPRRGSGHQSKTNRATGSPSVRRMKGGSALGTKTAQAKVARTLAKAARAQAKVARTQAKAAKARAKAKAAQVKAKAKAKAAQVKAKAKVMAAWAKAKAKAKAVRAKAKVARTQPRGRGRPKGSAKARTTRKGQKNRPETVGQKRKRAEEAKDLPPKKRTRLGPRSPKAWLGPGTAKLLKFRAIKVDRRSSDDEVRQRAQRILRVNLSPVIRLQPLLPYSAV

SEQ ID NO: 21890 - protein, 45 aa, Homo sapiens
MRLILKCCLLILVYDYWPFSFIYNLPKITNQKSSCYQYLEANYDY

SEQ ID NO: 21891 - protein, 61 aa, Homo sapiens
VPTGLGLFCLLSLLPHPGTGQVKSLPVLLSGCLKERDCVLPLSGVITQEASGLGRPSVLLS

SEQ ID NO: 21892 - protein, 11 aa, Homo sapiens
MRFGAETLKYR

SEQ ID NO: 21893 - protein, 14 aa, Homo sapiens
LVPQRQEHKWDLTW

SEQ ID NO: 21894 - protein, 57 aa, Homo sapiens [sequence omitted]

SEQ ID NO: 21895 - protein, 16 aa, Homo sapiens
VRTHRLAFKGLYFSLV

SEQ ID NO: 21896 - protein, 1052 aa, Homo sapiens
LALVPVCTGYSRALAPTVTATYTKTLSLSAAAYCSAPGLRMDALDASKLLDEELYSRQLYVLGSPAMQRIQGARVLVSGLQGLGAEVAKNLVLMGVGSLTLHDPHPTCWSDLAAQFLLSEQDLERSRAEASQELLAQLNRAVQVVVHTGDITEDLLLDFQVVVLTAAKLEEQLKVGTLCHKHGVCFLAADTRGLVGQLFCDFGEDFTVQDPTEAEPLTAAIQHISQGSPGILTLRKGANTHYFRDGDLVTFSGIEGMVELNDCDPRSIHVREDGSLEIGDTTTFSRYLRGGAITEVKRPKTVRHKSLDTALLQPHVVAQSSQEVHHAHCLHQAFCALHKFQHLHGRPPQPWDPVDAETVVGLARDLEPLKRTEEEPLEEPLDEALVRTVALSSAGVLSPMVAMLGAVAAQEVLKAISRKFMPLDQWLYFDALDCLPEDGELLPSPEDCALRGSRYDGQIAVFGAGFQEKLRRQHYLLVGAGAIGCELLKVFALVGLGAGNSGGLTVVDMDHIERSNLSRQFLFRSQDVGRPKAEVAAAAARGLNPDLQVIPLTYPLDPTTEHIYGDNFFSRVDGVAAALDSFQARRYVAARCTHYLKPLLEAGTSGTWGSATVFMPHVTEAYRAPASAAASEDAPYPVCTVRYFPSTAEHTLQWARHEFEELFRLSAETINHHQQAHTSLADMDEPQTLTLLKPVLGVLRVRPQNWQDCVAWALGHWKLCFHYGIKQLLRHFPPNKVLEDGTPFWSGPKQCPQPLEFDTNQDTHLLYVLAAANLYAQMHGLPGSQDWTALRELLKLLPQPDPQQMAPIFASNLELASASAEFGPEQQKELNKALEVWSVGPPLKPLMFEKDDDSNFHVDFVVAAASLRCQNYGIPPVNRAQSKRIVGQIIPAIATTTAAVAGLLGLELYKVVSGPRPRSAFRHSYLHLAENYLIRYMPFAPAIQTFHHLKWTSWDRLKVPAGQPERTLESLLAHLQEQHGLRVRILLHGSALLYAAGWSPEKQAQHLPLRVTELVQQLTGQAPAPGQRVLVLELSCEGDDEDTAFPPLHYEL

SEQ ID NO: 21897 - protein, 94 aa, Homo sapiens [sequence omitted]

SEQ ID NO: 21898 - protein, 908 aa, Homo sapiens
MELLPPLPQSFLLLLLLPAKPAAGEDWQCPRTPYAASRDFDVKYVVPSFSAGGLVQAMVTYEGDRNESAVFVAIRNRLHVLGPDLKSVQSLATGPAGDPGCQTCAACGPGPHGPPGDTDTKVLVLDPALPALVSCGSSLQGRCFLHDLEPQGTAVHLAAPACLFSAHHNRPDDCPDCVASPLGTRVTVVEQGQASYFYVASSLDAAVAASFSPRSVSIRRLKADASGFAPGFVALSVLPKHLVSYSIEYVHSFHTGAFVYFLTVQPASVTDDPSALHTRLARLSATEPELGDYRELVLDCRFAPKRRRRGAPEGGQPYPVLRVAHSAPVGAQLATELSIAEGQEVLFGVFVTGKDGGPGVGPNSVVCAFPIDLLDTLIDEGVERCCESPVHPGLRRGLDFFQSPSFCPNPPGLEALSPNTSCRHFPLLVSSSFSRVDLFNGLLGPVQVTALYVTRLDNVTVAHMGTMDGRILQVELVRSLNYLLYVSNFSLGDSGQPVQRDVSRLGDHLLFASGDQVFQVPIQGPGCRHFLTCGRCLRAWHFMGCGWCGNMCGQQKECPGSWQQDHCPPKLTEFHPHSGPLRGSTRLTLCGSNFYLHPSGLVPEGTHQVTVGQSPCRPLPKDSSKLRPVPRKDFVEEFECELEPLGTQAVGPTNVSLTVTNMPPGKHFRVDGTSVLRGFSFMEPVLIAVQPLFGPRAGGTCLTLEGQSLSVGTSRAVLVNGTECLLARVSEGQLLCATPPGATVASVPLSLQVGGAQVPGSWTFQYREDPVVLSISPNCGYINSHITICGQHLTSAWHLVLSFHDGLRAVESRQCERQLPEQQLCRLPEYVVRDPQGWVAGNLSARGDGAAGFTLPGFRFLPPPHPPSANLVPLKPEEHAIKFEVSVRDRGRDSWGSESRGQPTGWSS

SEQ ID NO: 21899 - protein, 541 aa, Homo sapiens
MELLPPLPQSFLLLLLLPAKPAAGEDWQCPRTPYAASRDFDVKYVVPSFSAGGLVQAMVTYEGDRNESAVFVAIRNRLHVLGPDLKSVQSLATGPAGDPGCQTCAACGPGPHGPPGDTDTKVLVLDPALPALVSCGSSLQGRCFLHDLEPQGTAVHLAAPACLFSAHHNRPDDCPDCVASPLGTRVTVVEQGQASYFYVASSLDAAVAASFSPRSVSIRRLKADASGFAPGFVALSVLPKHLVSYSIEYVHSFHTGAFVYFLTVQPASVTDDPSALHTRLARLSATEPELGDYRELVLDCRFAPKRRRRGAPEGGQPYPVLRVAHSAPVGAQLATELSIAEGQEVLFGVFVTGKDGGPGVGPNSVVCAFPIDLLDTLIDEGVERCCESPVHPGLRRGLDFFQSPSFCPNPVFQVPIQGPGCRHFLTCGRCLRAWHFMGCGWCGNMCGQQKECPGSWQQDHCPPKLTEFHPHSGPLRGSTRLTLCGSNFYLHPSGLVPEGTHQVTVGQSPCRPLPKDSSKLRYNLVPPLPFPEGGNQAAPSP

SEQ ID NO: 21900 - protein, 647 aa, Homo sapiens
MELLPPLPQSFLLLLLLPAKPAAGEDWQCPRTPYAASRDFDVKYVVPSFSAGGLVQAMVTYEGDRNESAVFVAIRNRLHVLGPDLKSVQSLATGPAGDPGCQTCAACGPGPHGPPGDTDTKVLVLDPALPALVSCGSSLQGRCFLHDLEPQGTAVHLAAPACLFSAHHNRPDDCPDCVASPLGTRVTVVEQGQASYFYVASSLDAAVAASFSPRSVSIRRLKADASGFAPGFVALSVLPKHLVSYSIEYVHSFHTGAFVYFLTVQPASVTDDPSALHTRLARLSATEPELGDYRELVLDCRFAPKRRRRGAPEGGQPYPVLRVAHSAPVGAQLATELSIAEGQEVLFGVFVTGKDGGPGVGPNSVVCAFPIDLLDTLIDEGVERCCESPVHPGLRRGLDFFQSPSFCPNPPGLEALSPNTSCRHFPLLVSSSFSRVDLFNGLLGPVQVTALYVTRLDNVTVAHMGTMDGRILQVELVRSLNYLLYVSNFSLGDSGQPVQRDVSRLGDHLLFASGDQVFQVPIQGPGCRHFLTCGRCLRAWHFMGCGWCGNMCGQQKECPGSWQQDHCPPKLTEFHPHSGPLRGSTRLTLCGSNFYLHPSGLVPEGTHQVTVGQSPCRPLPKDSSKLRYNLVPPLPFPEGGNQAAPSP

SEQ ID NO: 21901 - protein, 495 aa, Homo sapiens
MELLPPLPQSFLLLLLLPAKPAAGEDWQCPRTPYAASRDFDVKYVVPSFSAGGLVQAMVTYEGDRNESAVFVAIRNRLHVLGPDLKSVQSLATGPAGDPGCQTCAACGPGPHGPPGDTDTKVLVLDPALPALVSCGSSLQGRCFLHDLEPQGTAVHLAAPACLFSAHHNRPDDCPDCVASPLGTRVTVVEQGQASYFYVASSLDAAVAASFSPRSVSIRRLKADASGFAPGFVALSVLPKHLVSYSIEYVHSFHTGAFVYFLTVQPASVTDDPSALHTRLARLSATEPELGDYRELVLDCRFAPKRRRRGAPEGGQPYPVLRVAHSAPVGAQLATELSIAEGQEVLFGVFVTGKDGGPGVGPNSVVCAFPIDLLDTLIDEGVERCCESPVHPGLRRGLDFFQSPSFCPNPPGLEALSPNTSCRHFPLLVSSSFSRVDLFNGLLGPVQVTALYVTRLDNVTVAHMGTMDGRILQVGPHPHSPLALGPCLHPHFAHI

SEQ ID NO: 21902 - protein, 436 aa, Homo sapiens
LAPPASPPRPSHRLGSPRPHPRPAPPSVRGGREGASRSRSELPTRVLPAEGWWWERSGSGGAEPGRGPCGGRAAAGPADGGMGCTVSAEDKAAAERSKMIDKNLREDGEKAAREVKLLLLGAGESGKSTIVKQMKIIHEDGYSEEECRQYRAVVYSNTIQSIMAIVKAMGNLQIDFADPSRADDARQLFALSCTAEEQGVLPDDLSGVIRRLWADHGVQACFGRSREYQLNDSAAYYLNDLERIAQSDYIPTQQDVLRTRVKTTGIVETHFTFKDLHFKMFDVGGQRSERKKWIHCFEGVTAIIFCVALSAYDLVLAEDEEMNRMHESMKLFDSICNNKWFTDTSIILFLNKKDLFEEKITHSPLTICFPEYTGANKYDEAASYIQSKFEDLNKRKDTKEIYTHFTCATDTKNVQFVFDAVTDVIIKNNLKDCGLF

SEQ ID NO: 21903 - protein, 56 aa, Homo sapiens
LPPGRKDIGAPQARSPPQFLGPFLLPLPARADDTENRILRPTQVPAFFQRPRPGPR

SEQ ID NO: 21904 - protein, 290 aa, Homo sapiens
VAADLMGRDFTIFRSLGQRPSLRTEPHDSRWLNEPKFVKVFWIPESENPDDDKIYFFFRETAVEAAPALGRLSVSRVGQICRNDVGGQRSLVNKWTTFLKARLVCSVPGVEGDTHFDQLRECGSGYGVGEGGSGADSGSPRRSGAVRPTPARPLPRRGCVSVVLAGPPDPAALCRLLHVQQHLPGLCGVRVQHERRAPGLLGTLCTQGGAHAPVGVIPGSRPLPAARHVPQQDLWHLQFHQGLPRRCHPVCAEPPPHVQLCPAHWGAPSFPTSWSQLHLHSNCRGPGCSR

SEQ ID NO: 21905 - protein, 236 aa, Homo sapiens
VVRHCDPGCCARTTGRGSSAWVSHQEARPGPADPCLLPRSEPKFVKVFWIPESENPDDDKIYFFFRETAVEAAPALGRLSVSRVGQICRNDVGGQRSLVNKWTTFLKARLVCSVPGVEGDTHFDQLRECGSGYGVGEGGSGADSGSPRRSGAVRPTPARPLPRRGCVSVVLAGPPDPAALCRLLHVQHLPGLCGVRVQHERRAPGLLGTLCTQGGAHAPVGVIPGSRPLPAARHGS

SEQ ID NO: 21906 - protein, 567 aa, Homo sapiens
VVRHCDPGCCARTTGRGSSAWVSHQEARPGPADPCLLPRSEPKFVKVFWIPESENPDDDKIYFFFRETAVEAAPALGRLSVSRVGQICRNDVGGQRSLVNKWTTFLKARLVCSVPGVEGDTHFDQLQDVFLLSSRDHRTPLLYAVFSTSSIFQGSAVCVYSMNDVRRAFLGPFAHKEGPMHQWVSYQGRVPYPRPGMCPSKTFGTFSSTKDFPDDVIQFARNHPLMYNSVLPTGGRPLFLQVGANYTFTQIAADRVAAADGHYDVLFIGTDVGTVLKVISVPKGSRPSAEGLLLEELHVFEDSAAVTSMQISSKRHQLYVASRSAVAQIALHRCAAHGRVCTECCLARDPYCAWDGVACTRFQPSAKRRFRRQDVRNGDPSTLCSGDSSRPALLEHKVFGVEGSSAFLECEPRSLQARVEWTFQRAGVTAHTQVLAEERTERTARGLLLRRLRRRDSGVYLCAAVEQGFTQPLRRLSLHVLSATQAERLARAEEAAPAAPPGPKLWYRDFLQLVEPGGGGSANSLRMCRPQPALQSLPLESRRKGRNRRTHAPEPRAERGPRSATHW

SEQ ID NO: 21907 - protein, 525 aa, Homo sapiens
VVRHCDPGCCARTTGRGSSAWVSHQEARPGPADPCLLPRSEPKFVKNDVGGQRSLVNKWTTFLKARLVCSVPGVEGDTHFDQLQDVFLLSSRDHRTPLLYAVFSTSSSIFQGSAVCVYSMNDVRRAFLGPFAHKEGPMHQWVSYQGRVPYPRPGMCPSKTFGTFSSTKDFPDDVIQFARNHPLMYNSVLPTGGRPLFLQVGANYTFTQIAADRVAAADGHYDVLFIGTDVGTVLKVISVPKGSRPSAEGLLLEELHVFEDSAAVTSMQISSKRHQLYVASRSAVAQIALHRCAAHGRVCTECCLARDPYCAWDGVACTRFQPSAKRRFRRQDVRNGDPSTLCSGDSSRPALLEHKVFGVEGSSAFLECEPRSLQARVEWTFQRAGVTAHTQVLAEERTERTARGLLLRRLRRRDSGVYLCAAVEQGFTQPLRRLSLHVLSATQAERLARAEEAAPAAPPGPKLWYRDFLQLVEPGGGGSANSLRMCRPQPALQSLPLESRRKGRNRRTHAPEPRAERGPRSATHW

SEQ ID NO: 21908 - protein, 215 aa, Homo sapiens
LRTRPLSPACKFLPRGRFRRQDVRNGDPSTLCSGDSSRPALLEHKVFGVEGSSAFLECEPRSLQARVEWTFQRAGVTAHTQVLAEERTERTARGLLLRRLRRRDSGVYLCAAVEQGFTQPLRRLSLHVLSATQAERLARAEEAAPAAPPGPKLWYRDFLQLVEPGGGGSANSLRMCRPQPALQSLPLESRRKGRNRRTHAPEPRAERGPRSATHW

SEQ ID NO: 21909 - protein, 608 aa, Homo sapiens
MGPKKSWRSHFFPLPEVWLLLLLSQALSPSHGPQTQAGVGLVWSVPLPSALRSQSCLGAPLRDASELTTVHLFPTRGWGARRALWVHSSASASSAASRRRLRAQASGISSFSLVDGGAPREDGGARGVWLPSSGQVSAQRTGRRLVGLEPTPTGSLTPRPPRPVPGMPRARKGNTLRKGGQRRGGGARSSAQADSGSSDDEAASEARSTASECPSLLSTTAEDSLGGDVVDEQGQQEDLEEKLKEYVDCLTDKSAKTRQGALESLRLALASRLLPDFLLERRLTLADALEKCLKKGKGEEQALAAAVLGLLCVQLGPGPKGEELFHSLQPLLVSVLSDSTASPAARLHCASALGLGCYVAAADIQDLVSCLACLESVFSRFYGLGGSSTSPVVPASLHGLLSAALQAWALLLTICPSTQISHILDRQLPRLPQLLSSESVNLRIAAGETIALLFELARDLEEEFVYEDMEALCSVLRTLATDSNKYRAKADRRRQRSTFRAVLHSVEGGECEEEIVRFGFEVLYMDSWARHRIYAAFKEVLGSGMHHHLQNNELLRDIFGLGPVLLLDATALKACKVPRFEKHLYNAAAFKARTKARSRVRDKRADIL

SEQ ID NO: 21910 - protein, 90 aa, Homo sapiens
LAAAVLGLLCVQLGPGPKGEELFHSLQPLLVSVLSDSTASPAARLHVSVPVPHETLPAPYPSAEWWVPPIFSLLYSEGSELQGWEPRFTR

SEQ ID NO: 21911 - protein, 397 aa, Homo sapiens
VADAGFHPWGMTTQLGPALVLGVALCLGCGQPLPQVPERPFSVLWNVPSAHCEARFGVHLPLNALGIIANRGQHFHGQNMTIFYKNQLGLYPYFGPRGTAHNGGIPQALPLDRHLALAAYQIHHSLRPGFAGPAVLDWEEWCPLWAGNWGRRRAYQAASWAWAQQVFPDLDPQEQLYKAYTGFEQAARALMEDTLRVAQALRPHGLWGFYHYPACGNGWHSMASNYTGRCHAATLARNTQLHWLWAASSALFPSIYLPPRLPPAHHQAFVRHRLEEAFRVALVGHRHPLPVLAYVRLTHRRSGRFLSQEECWHLHDYLVDTLGPYVINVTRAAMACSHQRCHGHGRCARRDPGQMEAFLHLWPDGSLGDWKSFSCHCYWGWAGPTCQEPRPGPKEAV

SEQ ID NO: 21912 - protein, 81 aa, Homo sapiens [sequence omitted]

SEQ ID NO: 21913 - protein, 115 aa, Homo sapiens
LHLLQAVSRQSFKNSRKLHALSTGKNAFGYKCSCFHRIIPEFMCQGSDFTHHNGTGGKSIYREKFDDKNFTLKHTSPGILSMSNAGPNTNGSQFFICTAKTSVVGWQACGLWQGE

SEQ ID NO: 21914 - protein, 234 aa, Homo sapiens
MGKWHVGGRRGAPRQWGATARGRDLEAVRRGGCGSVGRRRQRRRRRRRRMRRMRRMWATQGLAVALALSVLPGSRALRPGDCEVCISYLGRFYQDLKDRDVTFSPATIENELIKFCREARGKENRLCYYIGATDDAATKIINEVSKPLAHHIPVEKICEKLKKKDSQICELKYDKQIDLSTVDLKKLRVKELKKILDDWGETCKGCAEKSDYIRKINELMPKYAPKAASARTDL

SEQ ID NO: 21915 - protein, 151 aa, Homo sapiens
LVTLKFIWWLSAWTEHVLRVQGLHWLNLTTSTGRAPKNAAVGQCYYIGATDDAATKIINEVSKPLAHHIPVEKICEKLKKKDSQICELKYDKQIDLSTVDLKKLRVKELKKILDDWGETCKGCAEKSDYIRKINELMPKYAPKAASARTDL

SEQ ID NO: 21916 - protein, 111 aa, Homo sapiens
LLQCYYIGATDDAATKIINEVSKPLAHHIPVEKICEKLKKKDSQICELKYDKQIDLSTVDLKKLRVKELKKILDDWGETCKGCAEKSDYIRKINELMPKYAPKAASARTDL

SEQ ID NO: 21917 - protein, 1484 aa, Homo sapiens
VRDLRLCVCELWPLAGSGGGSGGAASDGKAMTTVVVHVDSKAELTTLLEQWEKEHGSGQDMVPILTRMSQLIEKETEEYRKGDPDPFDDRHPGRADPECMLGHLLRILFKNDDFMNALVNAYVMTSREPPLNTAACRLLLDIMPGLETAVVFQEKEGIVENLFKWAREADQPLRTYSTGLLGGAMENQDIAANYRDENSQLVAIVLRRLRELQLQEVALRQENKRPSPRKLSSEPLLPLDEEAVDMDYGDMAVDVVDGDQEEASGDMEISFHLDSGHKTSSRVNSTTKPEDGGLKKNKSAKQGDRENFRKAKQKLGFSSSDPDRMFVELSNSSWSEMSPWVIGTNYTLYPMTPAIEQRLILQYLTPLGEYQELLPIFMQLGSRELMMFYIDLKQTNDVLLTFEALKVCMHPHNVLSDVVNYTLWLMECSHASGCCHATMFFSICFSFRAVLELFDRYDGLRRLVNLISTLEILNLEDQGALLSDDEIFASRQTGKHTCMALRKYFEAHLAIKLEQVKQSLQRTEGGILVHPQPPYKACSYTHEQIVEMMEFLIEYGPAQLYWEPAEVFLKLSCVQLLLQLISIACNWKTYYARNDTVRFALDVLAILTVVPKIQLQLAESVDVLDEAGSTVSTVGISIILGVAEGEFFIHDAEIQKSALQIIINCVCGPDNRISSIGKFISGTPRRKLPQNPKSSEHTLAKMWNVVQSNNGIKVLLSLLSIKMPITDADQIRALACKALVGLSRSSTVRQIISKLPLFSSCQIQQLMKEPVLQDKRSDHVKFCKYAAELIERVSGKPLLIGTDVSLARLQKADVVAQSRISFPEKELLLLIRNHLISKGLGETATVLTKEADLPMTAASHSSAFTPVTAAASPVSLPRTPRIANGIATRLGSHAAVGASAPSAPTAHPQPRPPQGPLALPGPSYAGNSPLIGRISFIRERPSPCNGRKIRVLRQKSDHGAYSQSPAIKKQLDRHLPSPPTLDSIITEYLREQHARCKNPVATCPPFSLFTPHQCPEPKQRRQAPINFTSRLNRRASFPKYGGVDGGCFDRHLIFSRFRPISVFREANEDESGFTCCAFSARERFLMLGTCTGQLKLYNVFSGQEEASYNCHNSAITHLEPSRDGSLLLTSATWSQPLSALWGMKSVFDMKHSFTEDHYVEFSKHSQDRVIGTKGDIAHIYDIQTGNKLLTLFNPDLANNYKRNCATFNPTDDLVLNDGVLWDVRSAQAIHKFDKFNMNISGVFHPNGLEVIINTEIWDLRTFHLLHTVPALDQCRVVFNHTGTVMYGAMLQADDEDDLMEERMKSPFGSSFRTFNATDYKPIATIDVKRNIFDLCTDTKDCYLAVIENQGSMDALNMDTVCRLYEVGRQRLAEDEDEEEDQEEEEQEEEDDDEDDDDTDDLDELDTDQLLEAELEEDDNNENAGEDGDNDFSPSDEELANLLEEGEDGEDEDSDADEEVELILGDTDSSDNSDLEDDIILSLNE

SEQ ID NO: 21918 - protein, 1483 aa, Homo sapiens
VRDLRLCVCELWPLAGSGGGSGGAASDGKAMTTVVVHVDSKAELTTLLEQWEKEHGSGQDMVPILTRMSQLIEKETEEYRKGDPDPFDDRHPGRADPECMLGHLLRILFKNDDFMNLVNAYVMTSREPPLNTAACRLLLDIMPGLETAVVFQEKEGIVENLFKWAREADQPLRTYSTGLLGGAMENQDIAANYRDENSQLVAIVLRRLRELQLQEVALRQENKRPSPRKLSSEPLLPLDEEAVDMDYGDMAVDVVDGDQEEASGDMEISFHLDSGHKTSSRVNSTTKPEDGGLKKNKSAKQGDRENFRKAKQKLGFSSSDPDRMFVELSNSSWSEMSPWVIGTNYTLYPMTPAIEQRLILQYLTPLGEYQELLPIFMQLGSRELMMFYIDLKQTNDVLLTFEALKVCMHPHNVLSDVVNYTLWLMECSHASGCCHATMFFSICFSFRAVLELFDRYDGLRRLVNLISTLEILNLEDQGALLSDDEIFASRQTGKHTCMALRKYFEAHLAIKLEQVKQSLQRTEGGILVHPQPPYKACSYTHEQIVEMMEFLIEYGPAQLYWEPAEVFLKLSCVQLLLQLISIACNWKTYYARNDTVRFALDVLAILTVVPKIQLQLAESVDVLDEAGSTVSTVGISIILGVAEGEFFIHDAEIQKSALQIIINCVCGPDNRISSIGKFISGTPRRKLPQNPKSSEHTLAKMWNVVQSNNGIKVLLSLLSIKMPITDADQIRALACKALVGLSRSSTVRQIISKLPLFSSCQIQQLMKEPVLQDKRSDHVKFCKYAAELIERVSGKPLLIGTDVSLARLQKADVVAQSRISFPEKELLLLIRNHLISKGLGETATVLTKEADLPMTAASHSSAFTPVTAAASPVSLPRTPRIANGIATRLGSHAAVGASAPSAPTAHPQPRPPQGPLALPGPSYAGNSPLIGRISFIRERPSPCNGRKIRVLRQKSDHGAYSQSPAIKKQLDRHLPSPPTLDSIITEYLREQHARCKNPVATCPPFSLFTPHQCPEPKQRRQAPINFTSRLNRRASFPKYGGVDGGCFDRHLIFSRFRPISVFREANEDESGFTCCAFSARERFLMLGTCTGQLKLYNVFSGQEEASYNCHNSAITHLEPSRDGSLLLTSATWSQPLSALWGMKSVFDMKHSFTEDHYVEFSKHSQDRVIGTKGDIAHIYDIQTGNKLLTLFNPDLANNYKRNCATFNPTDDLVLNDGVLWDVRSAQAIHKFDKFNMNISGVFHPNGLEVIINTEIWDLRTFHLLHTVPALDQCRVVFNHTGTVMYGAMLQADDEDDLMEERMKSPFGSSFRTFNATDYKPIATIDVKRNIFDLCTDTKDCYLAVIENQGSMDALNMDTVCRLYEVGRQRLAEDEDEEEDQEEEEQEEEDDDEDDDDTDDLDELDTDQLLEAELEEDDNNENAGEDGDNDFSPSDEELANLLEEGEDGEDEDSDADEEVELILGDTDSSDNSDLEDDIILSLNE

SEQ ID NO: 21919 - protein, 459 aa, Homo sapiens
LGAMSDESASGSDPDLDPDVELEDAEEEEEEEEVAVEECDRDDEEDLLDDPSLEGMCGTEHAQLGEDGQQPPRCTSTTSSQSEPSEQLRRHQGKNLASEDPKKKRAQKPSHMRRNIRKLLREDQLEPVTKAAQQEELERRKRLEQQRKDYAAPIPTVPLEFLPEEIALRASDGPQLPPRVLAQEVICLDSSSGSEDEKSSRDEVIELSSGEEDTLHIVDSSESVSEDDEEEEKGGTHVNDVLNQRDALGRVLVNLNHPPEEENVFLAPQLARAVKPHQIGGIRFLYDNLVESLERFKTSSGFGCILAHSMGLGKTLQVISFIDVLFRHTPAKTVLAIVPVNTLQNWLAEFNMWLPPPEALPADNKPEEVQPRFFKVHILNDEHKTMASRAKVMADWVSEGGVLLMGYEMYRLLTLKKSFATGRPKKTKKRSHPVIIDLDEEDRQQEFRRGCTPTSHIID

SEQ ID NO: 21920 - protein, 1470 aa, Homo sapiens
LGAMSDESASGSDPDLDPDVELEDAEEEEEEEEVAVEECDRDDEEDLLDDPSLEGMCGTEHAQLGEDGQQPPRCTSTTSSQSEPSEQLRRHQGKNLASEDPKKKRAQKPSHMRRNIRKLLREDQLEPVTKAAQQEELERRKRLEQQRKDYAAPIPTVPLEFLPEEIALRASDGPQLPPRVLAQEVICLDSSSGSEDEKSSRDEVIELSSGEEDTLHIVDSSESVSEDDEEEEKGGTHVNDVLNQRDALGRVLVNLNHPPEEENVFLAPQLARAVKPHQIGGIRFLYDNLVESLERFKTSSGFGCILAHSMGLGKTLQVISFIDVLFRHTPAKTVLAIVPVNTLQNWLAEFNMWLPPPEALPADNKPEEVQPRFFKVHILNDEHKTMASRAKVMADWVSEGGVLLMGYEMYRLLTLKKSFATGRPKKTKKRSHPVIIDLDEEDRQQEFRREFEKALCRPGPDVVICDEGHRIKNCQASTSQALKNIRSRRRVVLTGYPLQNNLIEYWCMVDFVRPDFLGTRQEFSNMFERPILNGQCIDSTPQDVRLMRYRSHVLHSLLEGFVQRRGHTVLKIHLPAKEENVILVRLSKIQRDLYTQFMDRFRDCGSSGWLGLNPLKAFCVCCKIWNHPDVLYEALQKESLANEQDLDVEELGSAGTSARCPPQGTKGKGEDSTLASSMGEATNSKFLQGVGFNPFQERGNNIVTYEWAKDLLTNYQTGVLENSPKMVLLFHLIEESVKLGDKILVFSQSLSTLALIEEFLGKREVPCPPGTEGQGAQKWVRNISYFRLDGSTPAFERERLINQFNDPSNLTTWLFLLSTRAGCLGVNLIGANRVVVFDASWNPCHDAQAVCRVYRYGQKKPCYIYRLVADYTLEKKIYDRQISKQGMSDRVVDDLNPMLNFTRKEVENLLHFVEKEPAPQVSLNVKGIKESVLQLACLKYPHLITKEPFEHESLLLNRKDHKLTKAEKKAAKKSYEEDKRTSVPYTRPSYAQYYPASDQSLTSIPAFSQRNWQPTLKGDEKPVASVRPVQSTPIPMMPRHVPLGGSVSSASSTNPSMNFPINYLQRAGVLVQKVVTTTDIVIPGLNSSTDVQARINAGESIHIIRGTKGTYIRTSDGRIFAVRATGKPKVPEDGRMAASGSQGPSCESTSNGRHSASSPKAPDPEGLARPVSPDSPEIISELQQYADVAAARESRQSSPSTNAALPGPPAQLMDSSAVPGTALGTEPRLGGHCLNSSLLVTGQPCGDRHPVLDLRGHKRKLATPPAAQESSRRRSRKGHLPAPVQPYEHGYPVSGGFAMPPVSLNHNLTTPFTSQAGENSLFMGSTPSYYQLSNLLADARLVFPVTTDPLVPAGPVSSSSTATSVTASNPSFMLNPSVPGILPSYSLPFSQPLLSEPRMFAPFPSPVLPSNLSRGMSIYPGYMSPHAGYPAGGLLRSQVPPFDSHEVAEVGFSSNDDEDKDDDVIEVTGK

SEQ ID NO: 21921 - protein, 892 aa, Homo sapiens
LTLIFGVTVFIVGRVCLSKYVFPDSLGHPWNVFCPVSPLPFLEPQIWNHPDVLYEALQKESLANEQDLDVEELGSAGTSARCPPQGTKGKGEDSTLASSMGEATNSKFLQGVGFNPFQERGNNIVTYEWAKDLLTNYQTGVLENSPKMVLLFHLIEESVKLGDKILVFSQSLSTLALIEEFLGKREVPCPPGTEGQGAQKWVRNISYFRLDGSTPAFERERLINQFNDPSNLTTWLFLLSTRAGCLGVNLIGANRVVVFDASWNPCHDAQAVCRVYRYGQKKPCYIYRLVADYTLEKKIYDRQISKQGMSDRVVDDLNPMLNFTRKEVENLLHFVEKEPAPQVSLNVKGIKESVLQLACLKYPHLITKEPFEHESLLLNRKDHKLTKAEKKAAKKSYEEDKRTSVPYTRPSYAQYYPASDQSLTSIPAFSQRNWQPTLKGDEKPVASVRPVQSTPIPMMPRHVPLGGSVSSASSTNPSMNFPINYLQRAGVLVQKVVTTTDIVIPGLNSSTDVQARINAGESIHIIRGTKGTYIRTSDGRIFAVRATGKPKVPEDGRMAASGSQGPSCESTSNGRHSASSPKAPDPEGLARPVSPDSPEIISELQQYADVAAARESRQSSPSTNAALPGPPAQLMDSSAVPGTALGTEPRLGGHCLNSSLLVTGQPCGDRHPVLDLRGHKRKLATPPAAQESSRRRSRKGHLPAPVQPYEHGYPVSGGFAMPPVSLNHNLTTPFTSQAGENSLFMGSTPSYYQLSNLLADARLVFPVTTDPLVPAGPVSSSSTATSVTASNPSFMLNPSVPGILPSYSLPFSQPLLSEPRMFAPFPSPVLPSNLSRGMSIYPGYMSPHAGYPAGGLLRSQVPPFDSHEVAEVGFSSNDDEDKDDDVIEVTGK

SEQ ID NO: 21922 - protein, 8 aa, Homo sapiens
MSLLFLAR

SEQ ID NO: 21923 - protein, 172 aa, Homo sapiens
MGPGLFPAFLLRPQVTASTRLLPVCASPRSSPGLGHSKEAAAPAPIGELAPGSFLAAVVDALELGPPVVISPSLSGMYSLPFLTAPGSQLPGFVPVAPICTDKINAANYASVKTPALIVYGDQDPMGQTSFEHLKQLPNHRVLIMKGAGHPCYLDKPEEWHTGLLDFLQGLQ

SEQ ID NO: 21924 - protein, 304 aa, Homo sapiens
MWGCQAPLSRLPASGETPMSQSWLVSPLATRPSFTARCSHSTRHTGWRWCCFMERPLTLTRGSSWAHCSYCHRGATGPWPLTFQLTTRSAMTSKGPEEEHPSVTLFRQYLRIRTVQPKPDYGAAVAFFEETARQLGLGCQKVEVAPGYVVTVLTWPGTNPTLSSILLNSHTDVVPVFKEHWSHDPFEAFKDSEGYIYARGAQDMKCVSIQYLEAVRRLKVEGHRFPRTIHMTFVPDEEVGGHQGMELFVQRPEFHALRAGFALDEGEQVGKPMSSQAGSRRLLVGTELLHPLNPLSLLRHSQSH

SEQ ID NO: 21925 - protein, 245 aa, Homo sapiens
MWGCQAPLSRLPASGETPMSQSWLVSPLATRPSFTARCSHSTRHTGWRWCCFMERPLTLTRGSSWAHCSYCHRGATGPWPLTFQVAPGYVVTVLTWPGTNPTLSSILLNSHTDVVPVFKEHWSHDPFEAFKDSEGYIYARGAQDMKCVSIQYLEAVRRLKVEGHRFPRTIHMTFVPDEEVGGHQGMELFVQRPEFHALRAGFALDEGEQVGKPMSSQAGSRRLLVGTELLHPLNPLSLLRHSQSH

SEQ ID NO: 21926 - protein, 238 aa, Homo sapiens
MTSKGPEEEHPSVTLFRQYLRIRTVQPKPDYGAAVAFFEETARQLGLGCQKVEVAPGYVVTVLTWPGTNPTLSSILLNSHTDVVPVFKEHWSHDPFEAFKDSEGYIYARGAQDMKCVSIQYLEAVRRLKVEGHRFPRTIHMTFVPGIANPTDAFTVFYSERSPWSPQAEDTAFPLHLPRGAGYQHWEARPCLTLHGGHSSREAAQGCKLHPGIPGEGMAEVRQPGRQWGGSGRRYHRG

SEQ ID NO: 21927 - protein, 169 aa, Homo sapiens
LSSPSLTMVAPGYVVTVLTWPGTNPTLSSILLNSHTDVVPVFKEHWSHDPFEAFKDSEGYIYARGAQDMKCVSIQYLEAVRRLKVEGHRFPRTIHMTFVPDEEVGGHQGMELFVQRPEFHALRAGFALDEGEQVGKPMSSQAGSRRLLVGTELLHPLNPLSLLRHSQSH

SEQ ID NO: 21928 - protein, 114 aa, Homo sapiens
LWGQPAHLVAPPAPGLCPLRYLEAVRRLKVEGHRFPRTIHMTFVPDEEVGGHQGMELFVQRPEFHALRAGFALDEGEQVGKPMSSQAGSRRLLVGTELLHPLNPLSLLRHSQSH

SEQ ID NO: 21929 - protein, 48 aa, Homo sapiens
MGNRARCPGPCPDPAILPVPQKWMHPQVTPTDDSNPWWAAFSRVCKDM

SEQ ID NO: 21930 - protein, 440 aa, Homo sapiens
LAALSVGCLGLGNWARRPWRRPPVIQLCFQSSGKKLRRFSFNCGGRGVPTRPALLLVAVGGAETERAATATAAAFGAASPAMAAPCAEDPSLERHFKGHRDAVTCVDFSINTKQLASGSMDSCLMVWHMKPQSRAYRFTGHKDAVTCVNFSPSGHLLASGSRDKTVRIWVPNVKGESTVFRAHTATVRSVHFCSDGQSFVTASDDKTVKVWATHRQKFLFSLSQHINWVRCAKFSPDGRLIVSASDDKTVKLWDKSSRECVHSYCEHGGFVTYVDFHPSGTCIAAAGMDNTVKVWDVRTHRLLQHYQLHSAAVNGLSFHPSGNYLITASSDSTLKILDLMEGRLLYTLHGHQGPATTVAFSRTGEYFASGGSDEQVMVWKSNFDIVDHGEVTKVPRPPATLASSMGNLTVSILEQRLTLTEDKLKQCLENQQLIMQRATP

SEQ ID NO: 21931 - protein, 52 aa, Homo sapiens
LGLLISQAERVAADRGFWLRCLWVVWAWGTGHGDRGAGRRSYSSASSRRAKS

SEQ ID NO: 21932 - protein, 420 aa, Homo sapiens
LRARAAPSPRLPAAPVGGGAPLGAGPAAPPGKLREGRQPPPHPPPLLVQRALPGQGQAEGSDGADGAKRRAMAHQTGIHATEELKEFFAKARAGSVRLIKVVIEDEQLVLGASQEPVGRWDQDYDRAVLPLLDAQQPCYLLYRLDSQNAQGFEWLFLAWSPDNSPVRLKMLYAATRATVKKEFGGGHIKDELFGTVKDDLSFAGYQKHLSSCAAPAPLTSAERELQQIRINEVKTEISVESKHQTLQGLAFPLQPEAQRALQQLKQKMVNYIQMKLDLERETIELVHTEPTDVAQLPSRVPRDAARYHFFLYKHTHEGDPLESVVFIYSMPGYKCSIKERMLYSSCKSRLLDSVEQDFHLEIAKKIEIGDGAELTAEFLYDEVHPKQHAFKQAFAKPKGPGGKRGHKRLIRGPGENGDDS

SEQ ID NO: 21933 - protein, 293 aa, Homo sapiens
LREGRQPPPHPPPLLVQRALPGQGQAEGSDGADGAKRRAMAHQTGIHATEELKEFFAKARAGSVRLIKVVIEDEQLVLGASQEPVGRWDQDYDRAVLPLLDAQQPCYLLYRLDSQNAQGFEWLFLAWSPDNSPVRLKMLYAATRATVKKEFGGGHIKDELFGTVKDDLSFAGYQKHLSSCAAPAPLTSAERELQQIRINEVKTEISVESKHQTLQGLAFPLQPEAQRALQQLKQKMVNYIQMKLDLERETIELVHTEPTDVAQLPSRVPRDAARYHFFLYKHTHEGDPLESVD

SEQ ID NO: 21934 - protein, 13 aa, Homo sapiens
MADTMSRRRAGCP

SEQ ID NO: 21935 - protein, 10 aa, Homo sapiens
LLLLLLASCC

SEQ ID NO: 21936 - protein, 242 aa, Homo sapiens
LDFCPHLVRGLAGLFSLSPGLPQEIHGRLRLLPFHSCCCCLPQEYKELKGDGPFTIFVPHADLMSNLSQDELARIRAHRQLVFRYHVVGCRRLRSEDLLEQGYATALSGHPLRFSEREGSIYLNDFARVVSSDHEAVNGILHFIDRVLLPPEALHWEPDDAPIPRRNVTAAAQGFGYKIFSGLLKVLLPCGPVIVDTHARVSVCKCVCVPVCAYPPVCTLSRVSLCELMCAQATSVCMCTPG

SEQ ID NO: 21937 - protein, 56 aa, Homo sapiens
LPPETPPHRDKGMRHMVGPDWRQLFDVVIVQADKPSFFTDRRKYGHGGGCRAREGE

SEQ ID NO: 21938 - protein, 109 aa, Homo sapiens
MKRPKLKKASKRMTCHKRYKIQKKVREHHRKLRKEAKKRGHKKPRKDPGVPNSAPFKEALLREAELRKQRLEELKQQQKLDRQKELEKKRKLETNPDIKPSNVEPMEKV

SEQ ID NO: 21939 - protein, 221 aa, Homo sapiens
LPPACPSCSRSRAPAVPAPIQAPSAILPLPGQSVERLCVDPRHRQGPVNLLSDPEQGVEVTGQYEREKAGFSWIEVTFKNPLVWVHASPEHVVVTRNRRSSAYKWKETLFSVMPGLKMTMDKTGLLLLSDPDKVTIGLLFWDGRGEGLRLLLRDTDRFSSHVGGTLGQFYQEVLWGSPAASDDGRRTLRVQGNDHSATRERRLDYQEGPPGVEISCWSVEL

SEQ ID NO: 21940 - protein, 937 aa, Homo sapiens
LADTGATMKPPRPVRTCSKVLVLLSLLAIHQTTTAEKNGIDIYSLTVDSRVSSRFAHTVVTSRVVNRANTVQEATFQMELPKKAFITNFSMIIDGMTYPGIIKEKAEAQAQYSAAVAKGKSAGLVKATGRNMEQFQVSVSVAPNAKITFELVYEELLKRRLGVYELLLKVRPQQLVKHLQMDIHIFEPQGISFLETESTFMTNQLVDALTTWQNKTKAHIRFKPTLSQQQKSPEQQETVLDGNLIIRYDVDRAISGGSIQIENGYFVHYFAPEGLTTMPKNVVFVIDKSGSMSGRKIQQTREALIKILDDLSPRDQFNLIVFSTEATQWRPSLVPASAENVNKARSFAAGIQALGGTNINDAMLMAVQLLDSSNQEERLPEGSVSLIILLTDGDPTVGETNPRSIQNNVREAVSGRYSLFCLGFGFDVSYAFLEKLALDNGGLARRIHEDSDSALQLQDFYQEVANPLLTAVTFEYPSNAVEEVTQNNFRLLFKGSEMVVAGKLQDRGPDVLTATVSGKLPTQNITFQTESSVAEQEAEFQSPKYIFHNFMERLWAYLTIQQLLEQTVSASDADQQALRNQALNLSLAYSFVTPLTSMVVTKPDDQEQSQVAEKPMEGESRNRNVHSGSTFFKYYLQGAKIPKPEASFSPRRGWNRQAGAAGSRMNFRPGVLSSRQLGLPGPPDVPDHAAYHPFRRLAILPASAPPATSNPDPAVSRVMNMKIEETTMTTQTPAPIQAPSAILPLPGQSVERLCVDPRHRQGPVNLLSDPEQGVEVTGQYEREKAGFSWIEVTFKNPLVWVHASPEHVVVTRNRRSSAYKWKETLFSVMPGLKMTMDKTGLLLLSDPDKVTIGLLFWDGRGEGLRLLLRDTDRFSSHVGGTLGQFYQEVLWGSPAASDDGRRTLRVQGNDHSATRERRLDYQEGPPGVEISCWSVEL

SEQ ID NO: 21941 - protein, 942 aa, Homo sapiens
LADTGATMKPPRPVRTCSKVLVLLSLLAIHQTTTAEKNGIDIYSLTVDSRVSSRFAHTVVTSRVVNRANTVQEATFQMELPKKAFITNFSMIIDGMTYPGIIKEKAEAQAQYSAAVAKGKSAGLVKATGRNMEQFQVSVSVAPNAKITFELVYEELLKRRLGVYELLLKVRPQQLVKHLQMDIHIFEPQGISFLETESTFMTNQLVDALTTWQNKTKAHIRFKPTLSQQQKSPEQQETVLDGNLIIRYDVDRAISGGSIQIENGYFVHYFAPEGLTTMPKNVVFVIDKSGSMSGRKIQQTREALIKILDDLSPRDQFNLIVFSTEATQWRPSLVPASAENVNKARSFAAGIQALGGTNINDAMLMAVQLLDSSNQEERLPEGSVSLIILLTDGDPTVGETNPRSIQNNVREAVSGRYSLFCLGFGFDVSYAFLEKLALDNGGLARRIHEDSDSALQLQDFYQEVANPLLTAVTFEYPSNAVEEVTQNNFRLLFKGSEMVVAGKLQDRGPDVLTATVSGKLPTQNITFQTESSVAEQEAEFQSPKYIFHNFMERLWAYLTIQQLLEQTVSASDADQQALRNQALNLSLAYSFVTPLTSMVVTKPDDQEQSQVAEKPMEGESRNRNVHSGSTFFKYYLQGAKIPKPGLDHTEASFSPRRGWNRQAGAAGSRMNFRPGVLSSRQLGLPGPPDVPDHAAYHPFRRLAILPASAPPATSNPDPAVSRVMNMKIEETTMTTQTPAPIQAPSAILPLPGQSVERLCVDPRHRQGPVNLLSDPEQGVEVTGQYEREKAGFSWIEVTFKNPLVWVHASPEHVVVTRNRRSSAYKWKETLFSVMPGLKMTMDKTGLLLLSDPDKVTIGLLFWDGRGEGLRLLLRDTDRFSSHVGGTLGQFYQEVLWGSPAASDDGRRTLRVQGNDHSATRERRLDYQEGPPGVEISCWSVEL

SEQ ID NO: 21942 - protein, 907 aa, Homo sapiens
LADTGATMKPPRPVRTCSKVLVLLSLLAIHQTTTAEKNGIDIYSLTVDSRVSSRFAHTVVTSRVVNRANTVQEATFQMELPKKAFITNFSMIIDGMTYPGIIKEKAEAQAQYSAAVAKGKSAGLVKATGRNMEQFQVSVSVAPNAKITFELVYEELLKRRLGVYELLLKVRPQQLVKHLQMDIHIFEPQGISFLETESTFMTNQLVDALTTWQNKTKAHIRFKPTLSQQQKSPEQQETVLDGNLIIRYDVDRAISGGSIQIENGYFVHYFAPEGLTTMPKNVVFVIDKSGSMSGRKIQQTREALIKILDDLSPRDQFNLIVFSTEATQWRPSLVPASAENVNKARSFAAGIQALGGTNINDAMLMAVQLLDSSNQEERLPEGSVSLIILLTDGDPTVGETNPRSIQNNVREAVSGRYSLFCLGFGFDVSYAFLEKLALDNGGLARRIHEDSDSALQLQDFYQEVANPLLTAVTFEYPSNAVEEVTQNNFRLLFKGSEMVVAGKLQDRGPDVLTATVSGKLPTQNITFQTESSVAEQEAEFQSPKYIFHNFMERLWAYLTIQQLLEQTVSASDADQQALRNQALNLSLAYSFVTPLTSMVVTKPDDQEQSQVAEKPMEGESRNRNVHSAGAAGSRMNFRPGVLSSRQLGLPGPPDVPDHAAYHPFRRLAILPASAPPATSNPDPAVSRVMNMKIEETTMTTQTPAPIQAPSAILPLPGQSVERLCVDPRHRQGPVNLLSDPEQGVEVTGQYEREKAGFSWIEVTFKNPLVWVHASPEHVVVTRNRRSSAYKWKETLFSVMPGLKMTMDKTGLLLLSDPDKVTIGLLFWDGRGEGLRLLLRDTDRFSSHVGGTLGQFYQEVLWGSPAASDDGRRTLRVQGNDHSATRERRLDYQEGPPGVEISCWSVEL

SEQ ID NO: 21943 - protein, 52 aa, Homo sapiens
VRLLLHGNKSLRHNLYERKEHSLVRRTVSLTSCAPLATGNCWSLQIWLGVSQ

SEQ ID NO: 21944 - protein, 550 aa, Homo sapiens
LVSEPGAEAMGSQEVLGHAARLASSGLLLQVLFRLITFVLNAFILRFLSKEIVGVVNVRLTLLYSTTLFLAREAFRRACLSGGTQRDWSQTLNLLWLTVPLGVFWSLFLGWIWLQLLEVPDPNVVPHYATGVVLFGLSAVVELLGEPFWVLAQAHMFVKLKVIAESLSVILKSVLTAFLVLWLPHWGLYIFSLAQLFYTTVLVLCYVIYFTKLLGSPESTKLQTLPVSRITDLLPNITRNGAFINWKEAKLTWSFFKQSFLKQILTEGERYVMTFLNVLNFGDQGVYDIVNNLGSLVARLIFQPIEESFYIFFAKVLERGKDATLQKQEDVAVAAAVLESLLKLALLAGLTITVFGFAYSQLALDIYGGTMLSSGSGPVLLRSYCLYVLLLAINGVTECFTFAAMSKEEVDRYNFVMLALSSSFLVLSYLLTRWCGSVGFILANCFNMGIRITQSLCFIHRYYRRSPHRPLAGLHLSPVLLGTFALSGGVTAVSEVFLCCEQGWPARLAHIAVGAFCLGATLGTAFLTETKLIHFLRTQLGVPRRTDKMT

SEQ ID NO: 21945 - protein, 511 aa, Homo sapiens
LVSEPGAEAMGSQEVLGHAARLASSGLLLQVLFRLITFVLNAFILRFLSKEIVGVVNVRVPLGVFWSLFLGWIWLQLLEVPDPNVVPHYATGVVLFGLSAVVELLGEPFWVLAQAHMFVKLKVIAESLSVILKSVLTAFLVLWLPHWGLYIFSLAQLFYTTVLVLCYVIYFTKLLGSPESTKLQTLPVSRITDLLPNITRNGAFINWKEAKLTWSFFKQSFLKQILTEGERYVMTFLNVLNFGDQGVYDIVNNLGSLVARLIFQPIEESFYIFFAKVLERGKDATLQKQEDVAVAAAVLESLLKLALLAGLTITVFGFAYSQLALDIYGGTMLSSGSGPVLLRSYCLYVLLLAINGVTECFTFAAMSKEEVDRYNFVMLALSSSFLVLSYLLTRWCGSVGFILANCFNMGIRITQSLCFIHRYYRRSPHRPLAGLHLSPVLLGTFALSGGVTAVSEVFLCCEQGWPARLAHIAVGAFCLGATLGTAFLTETKLIHFLRTQLGVPRRTDKMT

SEQ ID NO: 21946 - protein, 753 aa, Homo sapiens
VCRGAGARGGCSPHLPSDPRRPPAARRPGPHLTGRLAHPSQRRAEPRPRAPGSGAPAAAAATLGACPCNGSPTAGPTMAPFLRIAFNSYELGSLQAEDEANQPFCAVKMKEALSTERGKTLVQKKPTMYPEWKSTFDAHIYEGRVIQIVLMRAAEEPVSEVTVGVSVLAERCKKNNGKAEFWLDLQPQAKVLMSVQYFLEDVDCKQSMRSEDEAKFPTMNRRGAIKQAKIHYIKNHEFIATFFGQPTFCSVCKDFVWGLNKQGYKCRQCNAAIHKKCIDKIIGRCTGTAANSRDTIFQKERFNIDMPHRFKVHNYMSPTFCDHCGSLLWGLVKQGLKCEDCGMNVHHKCREKVANLCGINQKLLAEALNQVTQRASRRSDSASSEPVGIYQGFEKKTGVAGEDMQDNSGTYGKIWEGSSKCNINNFIFHKVLGKGSFGKVLLGELKGRGEYFAIKALKKDVVLIDDDVECTMVEKRVLTLAAENPFLTHLICTFQTKDHLFFVMEFLNGGDLMYHIQDKGRFELYRATFYAAEIMCGLQFLHSKGIIYRDLKLDNVLLDRDGHIKIADFGMCKENIFGESRASTFCGTPDYIAPEILQGLKYTFSVDWWSFGVLLYEMLIGQSPFHGDDEDELFESIRVDTPHYPRWITKESKDILEKLFEREPTKRLGVTGNIKIHPFFKTINWTLLEKRRLEPPFRPKVKSPRDYSNFDQEFLNEKARLSYSDKNLIDSMDQSAFAGFSFVNPKFEHLLED

SEQ ID NO: 21947 - protein, 398 aa, Homo sapiens
LEQPPGPLGASVLPIPLSSRVGSAGVEDKESWHGKPLPKNMAEQIIQEIYSQIQSKKKILATPPQEDAPSVDIANIRMPSLPSYKVGDKIATRKAYGQALAKLGHASDRIIALDGDTKNSTFSEIFKKEHPDRFIECYIAEQNMVSIAVGCATRNRTVPFCSTFAAFFTRAFDQIRMAAISESNINLCGSHCGVSIGEDGPSQMALEDLAMFRSVPTSTVFYPSDGVATEKAVELAANTKGICFIRTSRPENAIIYNNNEDFQVGQAKVVLKSKDDQVTVIGAGVTLHEALAAAELLKKEKINIRVLDPFTIKPLDRKLILDSARATKGRILTVEDHYYEGGIGEAVSSAVVGEPGITVTHLAVNRVPRSGKPAELLKMFGIDRDAIAQAVRGLITKA

SEQ ID NO: 21948 - protein, 465 aa, Homo sapiens
LAPWARASGPLVGWPTPANTSTRPDINRLGQSDPAPLQHQMDIYQKRCEAFGWHAIIVDGHSVEELCKAFGQAKHQPTAIIAKTFKGRGITGVEDKESWHGKPLPKNMAEQIIQEIYSQIQSKKKILATPPQEDAPSVDIANIRMPSLPSYKVGDKIATRKAYGQALAKLGHASDRIIALDGDTKNSTFSEIFKKEHPDRFIECYIAEQNMVSIAVGCATRNRTVPFCSTFAAFFTRAFDQIRMAAISESNINLCGSHCGVSIGEDGPSQMALEDLAMFRSVPTSTVFYPSDGVATEKAVELAANTKGICFIRTSRPENAIIYNNNEDFQVGQAKVVLKSKDDQVTVIGAGVTLHEALAAAELLKKEKINIRVLDPFTIKPLDRKLILDSARATKGRILTVEDHYYEGGIGEAVSSAVVGEPGITVTHLAVNRVPRSGKPAELLKMFGIDRDAIAQAVRGLITKA

SEQ ID NO: 21949 - protein, 160 aa, Homo sapiens [sequence omitted]

SEQ ID NO: 21950 - protein, 405 aa, Homo sapiens
LEQPPGPLGASVLPIPLSSRVGSAGVEDKESWHGKPLPKNMAEQIIQEIYSQIQSKKKILATPPQEDAPSVDIANIRMPSLPSYKVGDKIATRKAYGQALAKLGHASDRIIALDGDTKNSTFSEIFKKEHPDRFIECYIAEQNMVSIAVGCATRNRTVPFCSTFAAFFTRAFDQIRMAAISESNINLCGSHCGVSIGEDGPSQMALEDLAMFRSVPTSTVFYPSDGVATEKAVELAANTKGICFIRTSRPENAIIYNNNEDFQVGQAKVVLKSKDDQVTVIGAGVTLHEALAAAELLKKGEEKGPPKSSTERPLHARSWGSFFRSFCSFLKSSQLERKHFISLNNDSNYSHPLSTCSVWHVAKSWGCSAHSPYPMTLKSRPPQHGGQISGLEPASWAGITQPGTS

SEQ ID NO: 21951 - protein, 143 aa, Homo sapiens
VSIAVGCATRNRTVPFCSTFAAFFTRAFDQIRMAAISESNINLCGSHCGVSIGEDGPSQMALEDLAMFRSVPTSTVFYPSDGVATEKAVELAANTKVGCMAVLSPAGSHHFPRETEEEARAGHLLPQGVFPDLAPGVRVACGS

SEQ ID NO: 21952 - protein, 155 aa, Homo sapiens
LTSSFMPFSLGVWLVVGCRNLVTLLPLECKCHLFCISMRGCSFTQNAGSLDGWGGGSQLGPGERDWPDSLSVHSYRVYCLLGDGELSEGSVWEAMAFASIYKLDNLVAILDINRLGQSDPAPLQHQMDIYQKRCEAFGYVRGCGLSVVTARESGL

SEQ ID NO: 21953 - protein, 145 aa, Homo sapiens
MESYHKPDQQKLQALKDTANRLRISSIQATTAAGSGHPTSCCSAAEIMAVLFFHTMRYKSQDPRNPHNDRFVLSKGHAAPILYAVWAEAGFLAEAELLNLRKISSDLWDGLHRQILRQGQLPSLLLAGRPWPSPASISWTTLWPF

SEQ ID NO: 21954 - protein, 62 aa, Homo sapiens
MVIWFLVLFSLLFRKESLENKKNNKPEVNQIANSDNKVTIDDYREEDEDKDPYPPCDVPGSA

SEQ ID NO: 21955 - protein, 544 aa, Homo sapiens
LGLRLMGETWLCPAALGLLYKAIDSNGENIGPIYNHRVEISIFFIIYIIIVAFFMMNIFVGFVIVTFQEQGEKEYKNCELDKNQRQCVEYALKARPLRRYIPKNPYQYKFWYVVNSSPFEYMMFVLIMLNTLCLAMQHYEQSKMFNDAMDILNMVFTGVFTVEMVLKVIAFKPKGYFSDAWNTFDSLIVIGSIIDVALSEADNSEESNRISITFFRLFRVMRLVKLLSRGEGIRTLLWTFIKSFQALPYVALLIAMLFFIYAVIGMQMFGKVAMRDNNQINRNNNFQTFPQAVLLLFRCATGEAWQEIMLACLPGKLCDPESDYNPGEEYTCGSNFAIVYFISFYMLCAFLIINLFVAVIMDNFDYLTRDWSILGPHHLDEFKRIWSEYDPEAKGRIKHLDVVTLLRRIQPPLGFGKLCPHRVACKRLVAMNMPLNSDGTVMFNATLFALVRTALKIKTEGNLEQANEELRAVIKKIWKKTSMKLLDQVVPPAGDDEVTVGKFYATFLIQDYFRKFKKRKEQGLVGKYPAKNTTIALQMLERML

SEQ ID NO: 21956 - protein, 288 aa, Homo sapiens
MSLVLLSLAALCRSAVPREPTVQCGSETGPSPEWMLQHDLIPGDLRDLRVEPVTTSVATGDYSILMNVSWVLRADASIRLLKATKICVTGKSNFQSYSCVRCNYTEAFQTQTRPSGGKWTFSYIGFPVELNTVYFIGAHNIPNANMNEDGPSMSVNFTSPGCLDHIMKYKKKCVKAGSLWDPNITACKKNEETVEVNFTTTPLGNRYMALIQHSTIIGFSQVFEPHQKKQTRASVVIPVTGDSEGATVQVKFSELLWGGKGHRRLFHHSLLLRMSSLLSNALLPADTS

SEQ ID NO: 21957 - protein, 317 aa, Homo sapiens
VGLGSLVLTLGLCYRCVTKGKMCMTTLEVWAKPERREVLAEVGVLVRFCSDAWCELSEPLVFPQLTPYFPTCGSDCIRHKGTVVLCPQTGVPFPLDNNKSKPGGWLPLLLLSLLVATWVLVAGIYLMWRHERIKKTSFSTTTLLPPIKVLVVYPSEICFHHTICYFTEFLQNHCRSEVILEKWQKKKIAEMGPVQWLATQKKAADKVVFLLSNDVNSVCDGTCGKSEGSPSENSQDLFPLAFNLFCSDLRSQIHLHKYVVVYFREIDTKDDYNALSVCPKYHLMKDATAFCAELLHVKQQVSAGKRSQACHDGCCSL

SEQ ID NO: 21958 - protein, 31 aa, Homo sapiens
MSALRSRQPDMRIHSRRKPSRSGRLTMMSSR

SEQ ID NO: 21959 - protein, 97 aa, Homo sapiens
MIQFLLSFVFYLRENEWKPADIFSTLGERECDRSSLEAKKAQWRKELDEQVALKKKEKEVSEKWNDPWKKSESDKIIWEKHQILDQSRLFKHSITVS

SEQ ID NO: 21960 - protein, 82 aa, Homo sapiens
LGWAGPGAGRPGRPRGREAGRGPPRAPEPGDAGLGRGHARPPLDTPAPHARPRSTGRLERGERRPQDIPPPPPPKSDSGGEN

SEQ ID NO: 21961 - protein, 745 aa, Homo sapiens
LGERTAMAPWLQLCSVFFTVNACLNGSQLAVAAGGSGRARGADTCGWRGVGPASRNSGLYNITFKYDNCTTYLNPVGKHVIADAQNITISQYACHDQVAVTILWSPGALGIEFLKGFRVILEELKSEGRQCQQLILKDPKQLNSSFKRTGMESQPFLNMKFETDYFVKVVPFPSIKNESNYHPFFFRTRACDLLLQPDNLACKPFWKPRNLNISQHGSDMQVSFDHAPHNFGFRFFYLHYKLKHEGPFKRKTCKQEQTTETTSCLLQNVSPGDYIIELVDDTNTTRKVMHYALKPVHSPWAGPIRAVAITVPLVVISAFATLFTVMCRKKQQENIYSHLDEESSESSTYTAALPRERLRPRPKVFLCYSSKDGQNHMNVVQCFAYFLQDFCGCEVALDLWEDFSLCREGQREWVIQKIHESQFIIVVCSKGMKYFVDKKNYKHKGGGRGSGKGELFLVAVSAIAEKLRQAKQSSSAALSKFIAVYFDYSCEGDVPGILDLSTKYRLMDNLPQLCSHLHSRDHGLQEPGQHTRQGSRRNYFRSKSGRSLYVAICNMHQFIDEEPDWFEKQFVPFHPPPLRYREPVLEKFDSGLVLNDVMCKPGPESDFCLKVEAAVLGATGPADSQHESQHGGLDQDGEARPALDGSAALQPLLHTVKAGSPSDMPRDSGIYDSSVPSSELSLPLMEGLSTDQTETSSLTESVSSSSGLGEEEPPALPSKLLSSGSCKADLGCRSYTDELHAVAPL

SEQ ID NO: 21962 - protein, 124 aa, Homo sapiens
LGERTAMAPWLQLCSVFFTVNACLNGSQLAVAAGGSGRARGADTCGWRVRRGRRVSCRRQLAGDAARTGARGEASPRQPVCSSRGPRPAWVSLLPRILLVSLPGRVSSGPGRDESGCPTPALCC

SEQ ID NO: 21963 - protein, 755 aa, Homo sapiens
LEKAVRAGTAAALAGEGGPGSAAAGGPARGAVGGSCVSCHRPPSATMPGIDKLPIEETLEDSPQTRSLLGVFEEDATAISNYMNQLYQAMHRIYDAQNELSAATHLTSKLLKEYEKQRFPLGGDDEVMSSTLQQFSKVIDELSSCHAVLSTQLADAMMFPITQFKERDLKEILTLKEVFQIASNDHDAAINRYSRLSKKRENDKVKYEVTEDVYTSRKKQHQTMMHYFCALNTLQYKKKIALLEPLLGYMQAQISFFKMGSENLNEQLEEFLANIGTSVQNVRREMDSDIETMQQTIEDLEVASDPLYVPDPDPTKFPVNRNLTRKAGYLNARNKTGLVSSTWDRQFYFTQGGNLMSQARGDVAGGLAMDIDNCSVMAVDCEDRRYCFQITSFDGKKSSILQAESKKDHEEWICTINNISKQIYLSENPEETAARVNQSALEAVTPSPSFQQRHESLRPAAGQSRPPTARTSSSGSLGSESTNLAALSLDSLVAPDTPIQFDIISPVCEDQPGQAKAFGQGGRRTNPFGESGGSTKSETEDSILHQLFIVRFLGSMEVKSDDHPDVVYETMRQILAARAIHNIFRMTESHLLVTCDCLKLIDPQTQVTRLTFPLPCVVLYATHQENKRLFGFVLRTSSGRSESNLSSVCYIFESNNEGEKICDSVGLAKQIALHAELDRRASEKQKEIERVKEKQQKELNKQKQIEKDLEEQSRLIAASSRPNQASSEGQFVVLSSSQSEESDLGEGGKKRESEA

SEQ ID NO: 21964 - protein, 153 aa, Homo sapiens [sequence omitted]

SEQ ID NO: 21965 - protein, 31 aa, Homo sapiens
MLHVAFVISLIFCSVYDSSADVLFIGQTYLH

SEQ ID NO: 21966 - protein, 140 aa, Homo sapiens
LRSFLFFFVGFNVETVEYKNICFTVWDVGGQDRIRPLWKHYFQNTQGLIFVVDSNDRERIQEVADELQKMLLVDELRDAVLLLFANKQDLPNAMAISEMTDKLGLQSLRNRTWYVQATCATQGTGLYEGLDWLSNELSKR

SEQ ID NO: 21967 - protein, 32 aa, Homo sapiens
VWWLTPVILALWEAKVDRSLKVESPRPAWPTW

SEQ ID NO: 21968 - protein, 16 aa, Homo sapiens
LLFYLLFMRWIFSGKE

SEQ ID NO: 21969 - protein, 8 aa, Homo sapiens
MRPSRGRP

SEQ ID NO: 21970 - protein, 260 aa, Homo sapiens
LRGGGPCAERRPRSLGVRGPTSCRLGTRASRCRASLGPHRPAEPGPRPGRGDARQVPRSPDLATARAPPASTPRAENLSHRRLGSCQAGDRVPLPGAASAQQGRCRLSRRPSRAPPSPSPLAPSLRARTGGGCPEVPSHTFLRPKRTFLAAPNRPFIHAAVLQRFRHQGGKAAAISNQTQELACDSSAWIPPVPKLCSRSFLGRSCPMFEPFLPREEDGLKAASWGLFVITALQRFKGGDGACAGLSSHPSEELMFTGYA

SEQ ID NO: 21971 - protein, 236 aa, Homo sapiens
LQCAWNEKVSVLGRQSAQYPDLLNKANLPLFLMGIQSEFFINTTRAGPGTLSVTIEGPSKVKMDCQETPEGYKVMYTPMAPGNYLISVKYGGPNHIVGSPFKAKVTGQRLVSPGSANETSSILVESVTRSSTETCYSAIPKASSDASKVTSKGAGLSKAFVGQKSSFLVDCSKAGSNMLLIGVHGPTTPCEEVSMKHVGNQQYNVTYVVKERGDYVLAVKWGEEHIPGSPFHVTVP

SEQ ID NO: 21972 - protein, 28 aa, Homo sapiens
LPHTDGEAEQVTWGRVGPLGLKVKCKGI

SEQ ID NO: 21973 - protein, 77 aa, Homo sapiens
MSRELAPLLLLLLSIHSALAMRICSFNVRSFGESKQEDKNAMDVIVKVIKRCDIILVMEIKDSNNRICPILMEKLNR

SEQ ID NO: 21974 - protein, 49 aa, Homo sapiens
VTQPMTLLLLLKSPYLAFLKFQGSLCATYHSPLTLVPSGPIVDGCMGAM

SEQ ID NO: 21975 - protein, 159 aa, Homo sapiens
LLLFLVFLTSTFLILQAGLRPICEFMTFNFSMQAIDQVINSAAKTYYMSGGLQPVPIVFRGPNGASAGVAAQHSQCFAAWYGHCPGLKVVSPWNSEDAKGLIKSAIRDNNPVVVLENELMYGVPFEFPPEAQSKDFLIPIGKAKIERQGKKTKIYKQYF

SEQ ID NO: 21976 - protein, 124 aa, Homo sapiens
MAAVSGLVRRPLREVSGLLKRRFHWTAPAALQVTVRDAINQGMDEELERDEKVFLLGEEVAQYDGAYKVTKIYESYTKLRSLLPPDTLKGSTLNCRLVEGCGRNMETRGLLTLPYQRWALLELL

SEQ ID NO: 21977 - protein, 82 aa, Homo sapiens
LTNAESRPSEQPGWKCLSIVTRQIQDRMGSPVHRVSLGDTWSRQMHPDIESERYMQSFDVERLTNILDGGAQNTALRRKVDP

SEQ ID NO: 21978 - protein, 98 aa, Homo sapiens
LTNAESRPSEQPGWKCLSIVTRQIQDRMGSPVHRVSLGDTWSRQMHPDIESERYMQSFDVERLTNILDGGAQNTALRRKVGKGKLGNGTSVLCPMLLL

SEQ ID NO: 21979 - protein, 148 aa, Homo sapiens
LRTAMYSEIQRERADIGGLMARPEYREWNPELIKPKKLLNPVKASRSHQELHRELLMNHRRGLGVDSKPELQRVLEHRRRNQLIKKKKEELEAKRLQCPFEQELLRRQQRLNQLEKPPEKEEDHAPEFIKVRENLRRIATLTSEEREL

SEQ ID NO: 21980 - protein, 36 aa, Homo sapiens
VKLGELQKHDKEDFPASWRSEEEMAAEAAALRVYFQ

SEQ ID NO: 21981 - protein, 164 aa, Homo sapiens [sequence omitted]

SEQ ID NO: 21982 - protein, 104 aa, Homo sapiens
LCCAADSSWGSSAARRRRPRSLPAPGPGHRRRPPTPRPARSALSFLNGKQPFSAERIVPSVALRSRSLFEIFRGALGGFPDSKGTRAAERGGPVERASRGSAPA

SEQ ID NO: 21983 - protein, 1479 aa, Homo sapiens
LRFSGGRSAASRIPRGLGPPSAGGPWSGRAGEAPRLSGGSHGGKNLFNKFTSLLSSFRCAFSDMRRLLEPCWWILFLKITSSVLHYVVCFPALTEGYVGALHENRHGSAVQIRRRKASGDPYWAYSGAYGPEHWVTSSVSCGGRHQSPIDILDQYARVGEEYQELQLDGFDNESSNKTWMKNTGKTVAILLKDDYFVSGAGLPGRFKAEKVEFHWGHSNGSAGSEHSINGRRFPVEMQIFFYNPDDFDSFQTAISENRIIGAMAIFFQVSPRDNSALDPIIHGLKGVVHHEKETFLDPFVLRDLLPASLGSYYRYTGSLTTPPCSEIVEWIVFRRPVPISYHQLEAFYSIFTTEQQDHVKSVEYLRNNFRPQQRLHDRVVSKSAVRDSWNHDMTDFLENPLGTEASKVCSSPPIHMKVQPLNQTALQVSWSQPETIYHPPIMNYMISYSWTKNEDEKEKTFTKDSDKDLKATISHVSPDSLYLFRVQAVCRNDMRSDFSQTMLFQANTTRIFQGTRIVKTGVPTASPASSADMAPISSGSSTWTSSGIPFSFVSMATGMGPSSSGSQATVASVVTSTLLAGLGFGGGGISSFPSTVWPTRLPTAASASKQAARPVLATTEALASPGPDGDSSPTKDGEGTEEGEKDEKSESEDGEREHEEDGEKDSEKKEKSGVTHAAEERNQTEPSPTPSSPNRTAEGGHQTIPGHEQDHTAVPTDQTGGRRDAGPGLDPDMVTSTQVPPTATEEQYAGSDPKRPEMPSKKPMSRGDRFSEDSRFITVNPAEKNTSGMISRPAPGRMEWIIPLIVVSALTFVCLILLIAVLVYWRKCFQTAHFYVEDSSSPRVVPNESIPIIPIPDDMEAIPVKQFVKHIGELYSNNQHGFSEDFEEVQRCTADMNITAEHSNHPENKHKNRYINILAYDHSRVKLRPLPGKDSKHSDYINANYVDGYNKAKAYIATQGPLKSTFEDFWRMIWEQNTGIIVMITNLVEKGRRKCDQYWPTENSEEYGNIIVTLKSTKIHACYTVRRFSIRNTKVKKGQKGNPKGRQNERVVIQYHYTQWPDMGVPEYALPVLTFVRRSSAARMPETGPVLVHCSAGVGRTGTYIVIDSMLQQIKDKSTVNVLGFLKHIRTQRNYLVQTEEQYIFIHDALLEAILGKETEVSSNQLHSYVNSILIPGVGGKTRLEKQFKLVTQCNAKYVECFSAQKECNKEKNRNSSVVPSERARVGLAPLPGMKGTDYINASYIMGYYRSNEFIITQHPLPHTTKDFWRMIWDHNAQIIVMLPDNQSLAEDEFVYWPSREESMNCEAFTVTLISKDRLCLSNEEQIIIHDFILEATQDDYVLEVRHFQCPKWPNPDAPISSTFELINVIKEEALTRDGPTIVHDEYGAVSAGMLCALTTLSQQLENENAVDVFQVAKMINLMRPGVFTDIEQYQFIYKAMLSLVSTKENGNGPMTVDKNGAVLIADESDPAESMESLV

SEQ ID NO: 21984 - protein, 1508 aa, Homo sapiens
LRFSGGRSAASRIPRGLGPPSAGGPWSGRAGEAPRLSGGSHGGKNLFNKFTSLLSSFRCAFSDMRRLLEPCWWILFLKITSSVLHYVVCFPALTEGYVGALHENRHGSAVQIRRRKASGDPYWAYSGAYGPEHWVTSSVSCGGRHQSPIDILDQYARVGEEYQELQLDGFDNESSNKTWMKNTGKTVAILLKDDYFVSGAGLPGRFKAEKVEFHWGHSNGSAGSEHSINGRRFPVEMQIFFYNPDDFDSFQTAISENRIIGAMAIFFQVSPRDNSALDPIIHGLKGVVHHEKETFLDPFVLRDLLPASLGSYYRYTGSLTTPPCSEIVEWIVFRRPVPISYHQLEAFYSIFTTEQQDHVKSVEYLRNNFRPQQRLHDRVVSKSAVRDSWNHDMTDFLENPLGTEASKVCSSPPIHMKVQPLNQTALQVSWSQPETIYHPPIMNYMISYSWTKNEDEKEKTFTKDSDKDLKATISHVSPDSLYLFRVQAVCRNDMRSDFSQTMLFQANTTRIFQGTRIVKTGVPTASPASSADMAPISSGSSTWTSSGIPFSFVSMATGMGPSSSGSQATVASVVTSTLLAGLGFGGGGISSFPSTVWPTRLPTAASASKQAARPVLATTEALASPGPDGDSSPTKDGEGTEEGEKDEKSESEDGEREHEEDGEKDSEKKEKSGVTHAAEERNQTEPSPTPSSPNRTAEGGHQTIPGHEQDHTAVPTDQTGGRRDAGPGLDPDMVTSTQVPPTATEEQYAGSDPKRPEMPSKKPMSRGDRFSEDSRFITVNPAEKNTSGMISRPAPGRMEWIIPLIVVSALTFVCLILLIAVLVYWRGCNKIKSKGFPRRFREVPSSGERGEKGSRKCFQTAHFYVEDSSSPRVVPNESIPIIPIPDDMEAIPVKQFVKHIGELYSNNQHGFSEDFEEVQRCTADMNITAEHSNHPENKHKNRYINILAYDHSRVKLRPLPGKDSKHSDYINANYVDGYNKAKAYIATQGPLKSTFEDFWRMIWEQNTGIIVMITNLVEKGRRKCDQYWPTENSEEYGNIIVTLKSTKIHACYTVRRFSIRNTKVKKGQKGNPKGRQNERVVIQYHYTQWPDMGVPEYALPVLTFVRRSSAARMPETGPVLVHCSAGVGRTGTYIVIDSMLQQIKDKSTVNVLGFLKHIRTQRNYLVQTEEQYIFIHDALLEAILGKETEVSSNQLHSYVNSILIPGVGGKTRLEKQFKLVTQCNAKYVECFSAQKECNKEKNRNSSVVPSERARVGLAPLPGMKGTDYINASYIMGYYRSNEFIITQHPLPHTTKDFWRMIWDHNAQIIVMLPDNQSLAEDEFVYWPSREESMNCEAFTVTLISKDRLCLSNEEQIIIHDFILEATQDDYVLEVRHFQCPKWPNPDAPISSTFELINVIKEEALTRDGPTIVHDEYGAVSAGMLCALTTLSQQLENENAVDVFQVAKMINLMRPGVFTDIEQYQFIYKAMLSLVSTKENGNGPMTVDKNGAVLIADESDPAESMESLV

SEQ ID NO: 21985 - protein, 46 aa, Homo sapiens
MCVFGHAEVTGTVLVDFVPENHQFRAPLCRVLPRVDRRLRWGPARE

SEQ ID NO: 21986 - protein, 45 aa, Homo sapiens
LNILRTGIFVSALLMYPQQPELPDMPSSGDDFTFDRSCPSKANMQ

SEQ ID NO: 21987 - protein, 19 aa, Homo sapiens
MATLYLLIYSFCIYQAQFW

SEQ ID NO: 21988 - protein, 25 aa, Homo sapiens
LNILRTGIFVSALLMYPQQPELPDI

SEQ ID NO: 21989 - protein, 24 aa, Homo sapiens
MSCLQFWRPSEHFTRPLSVSVQCL

SEQ ID NO: 21990 - protein, 41 aa, Homo sapiens
LALDIEIATYRKLLEGKESRLESGMQNRSIHRRPPVAVEVC

SEQ ID NO: 21991 - protein, 980 aa, Homo sapiens
LPWGRPAGSSIGGCISDFALAPVRGLDVQTSPERAEREGPASGRRRREASPLKGAGRVPPLGRTRGRKEGAGQPGRARGCKRPKGAERMSERAADDVRGEPRRAAAAAGGAAAAAARQQQQQQQQQQPPPPQPQRQQHPPPPPRRTRPEDGGPGAASTSAAAMATVGERRPLPSPEVMLGQSWNLWVEASKLPGKDGTELDESFKEFGKNREVMGLCREDMPIFGFCPAHDDFYLVVCNDCNQVVKPQAFQSHYERRHSSSSKPPLAVPPTSVFSFFPSLSKSKGGSASGSNRSSSGGVLSASSSSSKLLKSPKEKLQLRGNTRPMHPIQQSRVPHGRIMTPSVKVEKIHPKMDGTLLKSAVGPTCPATVSSLVKPGLNCPSIPKPTLPSPGQILNGKGLPAPPTLEKKPEDNSNNRKFLNKRLSEREFDPDIHCGVIDLDTKKPCTRSLTCKTHSLTQRRAVQGRRKRFDVLLAEHKNKTREKELIRHPDSQQPPQPLRDPHPAPPRTSQEPHQNPHGVIPSESKPFVASKPKPHTPSLPRPPGCPAQQGGSAPIDPPPVHESPHPPLPATEPASRLSSEEGEGDDKEESVEKLDCHYSGHHPQPASFCTFGSRQIGRGYYVFDSRWNRLRCALNLMVEKHLNAQLWKKIPPVPSTTSPISTRIPHRTNSVPTSQCGVSYLAAATVSTSPVLLSSTCISPNSKSVPAHGTTLNAQPAASGAMDPVCSMQSRQVSSSSSSPSTPSGLSSVPSSPMSRKPQKLKSSKSLRPKESSGNSTNCQNASSSTSGGSGKKRKNSSPLLVHSSSSSSSSSSSSHSMESFRKNCVAHSGPPYPSTVTSSHSIGLNCVTNKANAVNVRHDQSGRGPPTGSPAESIKRMSVMVNSSDSTLSLGPFIHQSNELPVNSHGSFSHSHTPLDKLIGKKRKCSPSSSSINNSSSKPTKVAKVPAVNNVHMKHTGTIPGAQGLMNSSLLHQPKARP

SEQ ID NO: 21992 - protein, 68 aa, Homo sapiens
MPLLCFLPIIRELSRFIAAGRLHCKIDKVNEIVETNRPDSKNWQYQETIKKGDLLLNRVQKLSRVINM

SEQ ID NO: 21993 - protein, 359 aa, Homo sapiens
LSAAVPFAAMPLENLEEEDMAPYYEALCKSLDWQIDVDLLNKMKKANEDELKRLDEELEDAEKNLGESEIRDAMMAKAEYLCRIGDKEGALTAFRKTYDKTVALGHRLDIVFYLLRIGLFYMDNDLITRNTEKAKSLIEEGGDWDRRNRLKVYQGLYCVAIRDFKQAAELFLDTVSTFTSYELMDYKTFVTYTVYVSMIALERPDLREKVIKGAEILEVLHSLPAVRQYLFSLYECRYSVFFQSLAVVEQEMKKDWLFAPHYRYYVREMRIHAYSQLLESYRSLTLGYMAEAFGVGVEFIDQELSRFIAAGRLHCKIDKVNEIVETNRPDSKNWQYQETIKKGDLLLNRVQKLSRVINM

SEQ ID NO: 21994 - protein, 1911 aa, Homo sapiens
VGSTMQFVSWATLLTLLVRDLAEMGSPDAAAAVRKDRLHPRQVKLLETLSEYEIVSPIRVNALGEPFPTNVHFKRTRRSINSATDPWPAFASSSSSSTSSQAHYRLSAFGQQFLFNLTANAGFIAPLFTVTLLGTPGVNQTKFYSEEEAELKHCFYKGYVNTNSEHTAVISLCSGMLGTFRSHDGDYFIEPLQSMDEQEDEEEQNKPHIIYRRSAPQREPSTGRHACDTSEHKNRHSKDKKKTRARKWGERINLAGDVAALNSGLATEAFSAYGNKTDNTREKRTHRRTKRFLSYPRFVEVLVVADNRMVSYHGENLQHYILTLMSIDGPSISFNAQTTLKNFCQWQHSKNSPGGIHHDTAVLLTRQDICRAHDKCDTLGLAELGTICDPYRSCSISEDSGLSTAFTIAHELGHVFNMPHDDNNKCKEEGVKSPQHVMAPTLNFYTNPWMWSKCSRKYITEFLDTGYGECLLNEPESRPYPLPVQLPGILYNVNKQCELIFGPGSQVCPYMMQCRRLWCNNVNGVHKGCRTQHTPWADGTECEPGKHCKYGFCVPKEMDVPVTDGSWGSWSPFGTCSRTCGGGIKTAIRECNRPEPKNGGKYCVGRRMKFKSCNTEPCLKQKRDFRDEQCAHFDGKHFNINGLLPNVRWVPKYSGILMKDRCKLFCRVAGNTAYYQLRDRVIDGTPCGQDTNDICVQGLCRQAGCDHVLNSKARRDKCGVCGGDNSSCKTVAGTFNTVHYGYNTVVRIPAGATNIDVRQHSFSGETDDDNYLALSSSKGEFLLNGNFVVTMAKREIRIGNAVVEYSGSETAVERINSTDRIEQELLLQVLSVGKLYNPDVRYSFNIPIEDKPQQFYWNSHGPWQACSKPCQGERKRKLVCTRESDQLTVSDQRCDRLPQPGHITEPCGTDCDLRWHVASRSECSAQCGLGYRTLDIYCAKYSRLDGKTEKVDDGFCSSHPKPSNREKCSGECNTGGWRYSAWTECSKSCDGGTQRRRAICVNTRNDVLDDSKCTHQEKVTIQRCSEFPCPQWKSGDWSECLVTCGKGHKHRQVWCQFGEDRLNDRMCDPETKPTSMQTCQQPECASWQAGPWGQCSVTCGQGYQLRAVKCIIGTYMSVVDDNDCNAATRPTDTQDCELPSCHPPPAAPETRRSTYSAPRTQWRFGSWTPCSATCGKGTRMRYVSCRDENGSVADESACATLPRPVAKEECSVTPCGQWKALDWSSCSVTCGQGRATRQVMCVNYSDHVIDRSECDQDYIPETDQDCSMSPCPQRTPDSGLAQHPFQNEDYRPRSASPSRTHVLGGNQWRTGPWGACSSTCAGGSQRRVVVCQDENGYTANDCVERIKPDEQRACESGPCPQWAYGNWGECTKLCGGGIRTRLVVCQRSNGERFPDLSCEILDKPPDREQCNTHACPHDAAWSTGPWSSCSVSCGRGHKQRNVYCMAKDGSHLESDYCKHLAKPHGHRKCRGGRCPKWKAGAWSQCSVSCGRGVQQRHVGCQIGTHKIARETECNPYTRPESERDCQGPRCPLYTWRAEEWQECTKTCGEGSRYRKVVCVDDNKNEVHGARCDVSKRPVDRESCSLQPCEYVWITGEWSECSVTCGKGYKQRLVSCSEIYTGKENYEYSYQTTINCPGTQPPSVHPCYLRDCPVSATWRVGNWGSCSVSCGVGVMQRSVQCLTNEDQPSHLCHTDLKPEERKTCRNVYNCELPQNCKEVKRLKGASEDGEYFLMIRGKLLKIFCAGMHSDHPKEYVTLVHGDSENFSEVYGHRLHNPTECPYNGSRRDDCQCRKDYTAAGFSSFQKIRIDLTSMQIITTDLQFARTSEGHPVPFATAGDCYSAAKCPQGRFSINLYGTGLSLTESARWISQGNYAVSDIKKSPDGTRVVGKCGGYCGKCTPSSGTGLEVRVL

SEQ ID NO: 21995 - protein, 1072 aa, Homo sapiens
MQFVSWATLLTLLVRDLAEMGSPDAAAAVRKDRLHPRQVKLLETLSEYEIVSPIRVNALGEPFPTNVHFKRTRRSINSATDPWPAFASSSSSSTSSQAHYRLSAFGQQFLFNLTANAGFIAPLFTVTLLGTPGVNQTKFYSEEEAELKHCFYKGYVNTNSEHTAVISLCSGMLGTFRSHDGDYFIEPLQSMDEQEDEEEQNKPHIIYRRSAPQREPSTGRHACDTSEHKNRHSKDKKKTRARKWGERINLAGDVAALNSGLATEAFSAYGNKTDNTREKRTHRRTKRFLSYPRFVEVLVVADNRMVSYHGENLQHYILTLMSIVASIYKDPSIGNLINIVIVNLIVIHNEQDGPSISFNAQTTLKNFCQWQHSKNSPGGIHHDTAVLLTRQDICRAHDKCDTLGLAELGTICDPYRSCSISEDSGLSTAFTIAHELGHVFNMPHDDNNKCKEEGVKSPQHVMAPTLNFYTNPWMWSKCSRKYITEFLDTGYGECLLNEPESRPYPLPVQLPGILYNVNKQCELIFGPGSQVCPYMMQCRRLWCNNVNGVHKGCRTQHTPWADGTECEPGKHCKYGFCVPKEMDVPVTDGSWGSWSPFGTCSRTCGGGIKTAIRECNRPEPKNGGKYCVGRRMKFKSCNTEPCLKQKRDFRDEQCAHFDGKHFNINGLLPNVRWVPKYSGILMKDRCKLFCRVAGNTAYYQLRDRVIDGTPCGQDTNDICVQGLCRQAGCDHVLNSKARRDKCGVCGGDNSSCKTVAGTFNTVHYGYNTVVRIPAGATNIDVRQHSFSGETDDDNYLALSSSKGEFLLNGNFVVTMAKREIRIGNAVVEYSGSETAVERINSTDRIEQELLLQVLSVGKLYNPDVRYSFNIPIEDKPQQFYWNSHGPWQACSKPCQGERKRKLVCTRESDQLTVSDQRCDRLPQPGHITEPCGTDCDLRWHVASRSECSAQCGLGYRTLDIYCAKYSRLDGKTEKVDDGFCSSHPKPSNREKCSGECNTGGWRYSAWTECSKSCDGGTQRRRAICVNTRNDVLDDSKCTHQEKVTIQRCSEFPCPQWKSGDWSEVRWEGCYFP

SEQ ID NO: 21996 - protein, 52 aa, Homo sapiens
LGIMRPSSRAPVLLLLLLLRLLLRPERLSSRQAAALLSRAQTGPSQRDLSDS

SEQ ID NO: 21997 - protein, 71 aa, Homo sapiens
LDLLLSLQTLRAQSPSSFMKQGVPSETQVFIETCFVLGNVPDVGDKMETSEMKMQRQQGKPYMFMDSHAKV

SEQ ID NO: 21998 - protein, 358 aa, Homo sapiens
MSKVIQKKNHWTSRVHECTVKRGPQGELGVTVLGGAEHGEFPYVGAVAAVEAAGLPGGGEGPRLGEGELLLEVQGVRVSGLPRYDVLGVIDSCKEAVTFKAVRQGGRLNKDLRHFLNQRFQKGSPDHELQQTIRDNLYRHAVPCTTRSPREGEVPGVDYNFLTVKEFLDLEQSGTLLEVGTYEGNYYGTPKPPSQPVSGKVITTDALHSLQSGSKQSTPKRTKSYNDMQNAGIVHAENEEEDDVPEMNSSFTAADSGEQEEHTLQETALPPVNSSIIAAPITDPSQKFPQYLPLSAEDNLGPLPENWEMAYTENGEVYFIDHNTKTTSWLDPRCLNKQQKPLEECEDDGKGPGRSWVK

SEQ ID NO: 21999 - protein, 41 aa, Homo sapiens
VDSGPGEHGRAPERGPRGTGMQTKLAGACAGLAGKPRKFVL

SEQ ID NO: 22000 - protein, 23 aa, Homo sapiens
LYYFTEMCPAPPVVCERKQLQLK

SEQ ID NO: 22001 - protein, 1220 aa, Homo sapiens
LNACLPGAAAALPSAGVGSGTRRAPGGRRAQAGYTLPESAEFAASAGGPAGPDGRGVCGPRRVLRSGPGTGGTLSAGAAAAERTWGGGHAPVRSLEPSGAPRGPARVCGRSGPHSPRARSSQRAPDKMARPVRGGLGAPRRSPCLLLLWLLLLRLEPVTAAAGPRAPCAAACTCAGDSLDCGGRGLAALPGDLPSWTRSLNLSYNKLSEIDPAGFEDLPNLQEVYLNNNELTAVPSLGAASSHVVSLFLQHNKIRSVEGSQLKAYLSLEVLDLSLNNITEVRNTCFPHGPPIKELNLAGNRIGTLELGAFDGLSRSLLTLRLSKNRITQLPVRAFKLPRLTQLDLNRNRIRLIEGLTFQGLNSLEVLKLQRNNISKLTDGAFWGLSKMHVLHLEYNSLVEVNSGSLYGLTALHQLHLSNNSIARIHRKGWSFCQKLHELVLSFNNLTRLDEESLAELSSLSVLRLSHNSISHIAEGAFKGLRSLRVLDLDHNEISGTIEDTSGAFSGLDSLSKLTLFGNKIKSVAKRAFSGLEGLEHLNLGGNAIRSVQFDAFVKMKNLKELHISSDSFLCDCQLKWLPPWLIGRMLQAFVTATCAHPESLKGQSIFSVPPESFVCDDFLKPQIITQPETTMAMVGKDIRFTCSAASSSSSPMTFAWKKDNEVLTNADMENFVHVHAQDGEVMEYTTILHLRQVTFGHEGRYQCVITNHFGSTYSHKARLTVNVLPSFTKTPHDITIRTTTMARLECAATGHPNPQIAWQKDGGTDFPAARERRMHVMPDDDVFFITDVKIDDAGVYSCTAQNSAGSISANATLTVLETPSLVVPLEDRVVSVGETVALQCKATGNPPPRITWFKGDRPLSLTERHHLTPDNQLLVVQNVVAEDAGRYTCEMSNTLGTERAHSQLSVLPAAGCRKDGTTVGIFTIAVVSSIVLTSLVWVCIIYQTRKKSEEYSVTNTDETVVPPDVPSYLSSQGTLSDRQETVVRTEGGPQANGHIESNGVCPRDASHFPEPDTHSVACRQPKLCAGSAYHKEPWKAMEKAEGTPGPHKMEHGGRVVCSDCNTEVDCYSRGQAFHPQPVSRDSAQPSAPNGPEPGGSDQEHSPHHQCSRTAAGSCPECQGSLYPSNHDRMLTAVKKKPMASLDGKGDSSWTLARLYHPDSTELQPASSLTSGSPERAEAQYLLVSNGHLPKACDASPESTPLTGQLPGKQRVPLLLAPKS

SEQ ID NO: 22002 - protein, 1268 aa, Homo sapiens
LRGRRDSCCAEEPCGTRGCARARALWPRRGDSEAHWGLPARGRPRRPARGLRLCAPSPEEDACRHRARAAGLNACLPGAAAALPSAGVGSGTRRAPGGRRAQAGYTLPESAEFAASAGGPAGPDGRGVCGPRRVLRSGPGTGGTLSAGAAAAERTWGGGHAPVRSLEPSGAPRGPARVCGRSGPHSPRARSSQRAPDKMARPVRGGLGAPRRSPCLLLLWLLLLRLEPVTAAAGPRAPCAAACTCAGDSLDCGGRGLAALPGDLPSWTRSLNLSYNKLSEIDPAGFEDLPNLQEVYLNNNELTAVPSLGAASSHVVSLFLQHNKIRSVEGSQLKAYLSLEVLDLSLNNITEVRNTCFPHGPPIKELNLAGNRIGTLELGAFDGLSRSLLTLRLSKNRITQLPVRAFKLPRLTQLDLNRNRIRLIEGLTFQGLNSLEVLKLQRNNISKLTDGAFWGLSKMHVLHLEYNSLVEVNSGSLYGLTALHQLHLSNNSIARIHRKGWSFCQKLHELVLSFNNLTRLDEESLAELSSLSVLRLSHNSISHIAEGAFKGLRSLRVLDLDHNEISGTIEDTSGAFSGLDSLSKLLLLEPSQSAGCSSPSQPHMSAGGRTLFGNKIKSVAKRAFSGLEGLEHLNLGGNAIRSVQFDAFVKMKNLKELHISSDSFLCDCQLKWLPPWLIGRMLQAFVTATCAHPESLKGQSIFSVPPESFVCDDFLKPQIITQPETTMAMVGKDIRFTCSAASSSSSPMTFAWKKDNEVLTNADMENFVHVHAQDGEVMEYTTILHLRQVTFGHEGRYQCVITNHFGSTYSHKARLTVNVLPSFTKTPHDITIRTTTMARLECAATGHPNPQIAWQKDGGTDFPAAQTPSLVVPLEDRVVSVGETVALQCKATGNPPPRITWFKGDRPLSLTERHHLTPDNQLLVVQNVVAEDAGRYTCEMSNTLGTERAHSQLSVLPAAGCRKDGTTVGIFTIAVVSSIVLTSLVWVCIIYQTRKKSEEYSVTNTDETVVPPDVPSYLSSQGTLSDRQETVVRTEGGPQANGHIESNGVCPRDASHFPEPDTHSVACRQPKLCAGSAYHKEPWKAMEKAEGTPGPHKMEHGGRVVCSDCNTEVDCYSRGQAFHPQPVSRDSAQPSAPNGPEPGGSDQEHSPHHQCSRTAAGSCPECQGSLYPSNHDRMLTAVKKKPMASLDGKGDSSWTLARLYHPDSTELQPASSLTSGSPERAEAQYLLVSNGHLPKACDASPESTPLTGQLPGKQRVPLLLAPKS

SEQ ID NO: 22003 - protein, 294 aa, Homo sapiens
MGQSQSGGHGPGGGKKDDKDKKKKYEPPVPTRVGKKKKKTKGPDAASKLPLVTPHTQCRLKLLKLERIKDYLLMEEEFIRNQEQMKPLEEKQEEERSKVDDLRGTPMSVGTLEEIIDDNHAIVSTSVGSEHYVSILSFVDKDLLEPGCSVLLNHKVHAVIGVLMDDTDPLVTVMKVEKAPQETYADIGGLDNQIQEIKESVELPLTHPEYYEEMGIKPPKGVILYGPPGTGKTLLAKAVANQTSATFLRVVGSELIQKYLGDGPKLVRELFRVAEEHAPSIVFIDEIDAIGTKR

SEQ ID NO: 22004 - protein, 540 aa, Homo sapiens
LSGSEDSRGLQVAMLMLFVFGVLLHEVSLSGQNEAPPNTHSIPGEPLYNYASIRLPEEHIPFFLHNNRHIATVCRKDSLCPYKKHLEKLKYCWGYEKSCKPEFRFGYPVCSYVDMGWTDTLESAEDIFWKQADFGYARERLEEMHVLCQPKETSDSSLVCSRYLQYCRATNLYLDLRNIKRNHDRFKEDFFQSGEIGGHCKLDIRTLTSEGQRKSPLQSWFAELQSYTQLNFRPIEDAKCDIVIEKPTYFMKLDAGVNMYHHFCDFINLYITQHVNNSFSTDVYIVMWDTSSYGYGDLFSDTWNAFTDYDVIHLKTYDSKRVCFKEAVFSLLPRMRYGLFYNTPLISGCQNTGLFRAFAQHVLHRLNITQEGPKDGKIRVTILARSTEYRKILNQNELVNALKTVSTFEVQIVDYKYRELGFLDQLRITHNTDIFIGMHGAGLTHLLFLPDWAAVFELYNCEDERCYLDLARLRGVHYITWRRQNKVFPQDKGHHPTLGEHPKFTNYSFDVEEFMYLVLQAADHVLQHPKWPFKKKHDEL

SEQ ID NO: 22005 - protein, 456 aa, Homo sapiens
LSGSEDSRGLQVAMLMLFVFGVLLHEVSLSGQNEAPPNTHSIPGEPLYNYASIRLPEEHIPFFLHNNRHIATVCRKDSLCPYKKHLEKLKYCWGYEKSCKPEFRFGYPVCSYVDMGWTDTLESAEDIFWKQADFGYARERLEEMHVLCQPKETSDSSLVCSRYLQYCRATNLYLDLRNIKRNHDRFKEDFFQSGEIGGHCKLDIRTLTSEGQRKSPLQSWFAELQSYTQLNFRPIEDAKCDIVIEKPTYFMKLDAGVNMYHHFCDFINLYITQHVNNSFSTDVYIVMWDTDGKIRVTILARSTEYRKILNQNELVNALKTVSTFEVQIVDYKYRELGFLDQLRITHNTDIFIGMHGAGLTHLLFLPDWAAVFELYNCEDERCYLDLARLRGVHYITWRRQNKVFPQDKGHHPTLGEHPKFTNYSFDVEEFMYLVLQAADHVLQHPKWPFKKKHDEL

SEQ ID NO: 22006 - protein, 219 aa, Homo sapiens
LSGSEDSRGLQVAMLMLFVFGVLLHEVSLSGQNEAPPNTHSIPGEPLYNYASIRLPEEHIPFFLHNNRHIATVCRKDSLCPYKKHLEKLKYCWGYEKSCKPEFRFGYPVCSYVDMGWTDTLESAEDIFWKQADFGYARERLEEMHVLCQPKETSDSSLVCSRYLQYCRATNLYLDLRNIKRNHDRFKEDFFQSGEIGGHCKLDIRTLTSEGQRKSPLQS

SEQ ID NO: 22007 - protein, 78 aa, Homo sapiens
VAGATCRPGPGDAAGAGCPESPGVGLRSSRAELELGQRGRGRRGRQPPPGKAQRRVDLQDWRRAGSPGPARCAAETIK

SEQ ID NO: 22008 - protein, 14 aa, Homo sapiens
MTNNQLFRFPCQWL

SEQ ID NO: 22009 - protein, 22 aa, Homo sapiens
MGITDYIHKSRQANSENQMKPF

SEQ ID NO: 22010 - protein, 55 aa, Homo sapiens
LNLLFIKKKKSAVHNFPCTLQLVFCFCFVAGGEGWEGEGTFIYCVHKLHPFSISF

SEQ ID NO: 22011 - protein, 236 aa, Homo sapiens
LPASASQSAGITGKSAVLKCLLDIHKIFQENDPAYILNDLYISDYCVWIQKVKSKKLAALAEALKEVSLTKAQLGLELEELEAAALLVQEEETALKAAHSVSGQQTLCSSSEASDSEDSDSSVSSGNEDSGSDSEQDELKDSPSETVSSLQGPFLEESSAFLIVDGGVRRNTAIQESDASQGKPLASSWPLGVSGPLIEELGEQLKTTVQVSEPKGTTAVNRSNIQERDGCQTPNN

SEQ ID NO: 22012 - protein, 1070 aa, Homo sapiens
LAATMGFELDRFDGDVDPDLKCALCHKVLEDPLTTPCGHVFCAGCVLPWVVQEGSCPARCRGRLSAKELNHVLPLKRLILKLDIKCAYATRGCGRVVKLQQLPEHLERCDFAPARCRHAGCGQVLLRRDVEAHMRDACDARPVGRCQEGCGLPLTHGEQRAGGHCCARALRAHNGALQARLGALHKALKKEALRAGKREKSLVAQLAAAQLELQMTALRYQKKFTEYSARLDSLSRCVAAPPGGKGEETKSLTLVLHRDSGSLGFNIIGGRPSVDNHDGSSSEGIFVSKIVDSGPAAKEGGLQIHDRIIEVNGRDLSRATHDQAVEAFKTAKEPIVVQVLRRTPRTKMFTPPSESQLVDTGTQTDITFEHIMALTKMSSPSPPVLDPYLLPEEHPSAHEYYDPNDYIGDIHQEMDREELELEEVDLYRMNSQDKLGLTVCYRTDDEDDIGIYISEIDPNSIAAKDGRIREGDRIIQINGIEVQNREEAVALLTSEENKNFSLLIARPELQLDEGWMDDDRNDFLDDLHMDMLEEQHHQAMQFTASVLQQKKHDEDGGTTDTATILSNQHEKDSGVGRTDESTRNDESSEQENNGDDATASSNPLAGQRKLTCSQDTLGSGDLPFSNESFISADCTDADYLGIPVDECERFRELLELKCQVKSATPYGLYYPSGPLDAGKSDPESVDKELELLNEELRSIELECLSIVRAHKMQQLKEQYRESWMLHNSGFRNYNTSIDVRRHELSDITELPEKSDKDSSSAYNTGESCRSTPLTLEISPDNSLRRAAEGISCPSSEGAVGTTEAYGPASKNLLSITEDPEVGTPTYSPSLKELDPNQPLESKERRASDGSRSPTPSQKLGSAYLPSYHHSPYKHAHIPAHAQHYQSYMQLIQQKSAVEYAQSQMSLVSMCKDLSSPTPSEPRMEWKVKIRSDGTRYITKRPVRDRLLRERALKIREERSGMTTDDDAVSEMKMGRYWSKEERKQHLVKAKEQRRRREFMMQSRLDCLKEQQAADDRKEMNILELSHKKMMKKRNKKIFDNWMTIQELLTHGTKSPDGTRVYNSFLSVTTV

SEQ ID NO: 22013 - protein, 364 aa, Homo sapiens
LAATMGFELDRFDGDVDPDLKCALCHKVLEDPLTTPCGHVFCAGCVLPWVVQEGSCPARCRGRLSAKELNHVLPLKRLILKLDIKCAYATRGCGRVVKLQQLPEHLERCDFAPARCRHAGCGQVLLRRDVEAHMRDACDARPVGRCQEGCGLPLTHGEQRAGGHCCARALRAHNGALQARLGALHKALKKEALRAGKREKSLVAQLAAAQLELQMTALRYQKKFTEYSARLDSLSRCVAAPPGGKGEETKSLTLVLHRDSGSLGFNIIGGRPSVDNHDGSSSEGIFVSKIVDSGPAAKEGGLQIHDRIIEMRKLELRTVKLPKAHSQDSNAGFIPQLLSLHTPPLSCEKGGGHLACGGAYLNCI

SEQ ID NO: 22014 - protein, 83 aa, Homo sapiens
LTCTVGMETAPYVQAFDSLLAGPVAEYLKISKETGGDVQKYAEMVHTGLTLERALLVTDSQCQQPADNKLSNLLAPISEQIKK

SEQ ID NO: 22015 - protein, 136 aa, Homo sapiens [sequence omitted]

SEQ ID NO: 22016 - protein, 179 aa, Homo sapiens
LFAQINQGESITHALNHVSDDMKTHKNPALKAQSGPVCSGPKPFSAPKPQTSPSPKPATKKEPAVLELEGKKWRVENQENVSNLVIEDAELKQMAYIYKCVNMTLQIKGKMNSITVDNCKKLGLVFDDMVGIVEIINSRDVKVQVMGKVPTISINKTDGCHAYLSKNSLDCEIVSAKSS

SEQ ID NO: 22017 - protein, 1605 aa, Homo sapiens
MIAEPAHFYLFGLICLCSGSRLRQEDFPPRIVEHPSDLIVSKGEPATLNCKAEGRPTPTIEWYKGGERVETDKDDPRSHRMLLPSGSLFFLRIVHGRKSRPDEGVYVCVARNYLGEAVSHNASLEVAILRDDFRQNPSDVMVAVGEPAVMECQPPRGHPEPTISWKKDGSPLDDKDERITIRGGKLMITYTRKSDAGKYVCVGTNMVGERESEVAELTVLERPSFVKRPSNLAVTVDDSAEFKCEARGDPVPTVRWRKDDGELPKSRYEIRDDHTLKIRKVTAGDMGSYTCVAENMVGKAEASATLTVQVGSEPPHFVVKPRDQVVALGRTVTFQCEATGNPQPAIFWRREGSQNLLFSYQPPQSSSRFSVSQTGDLTITNVQRSDVGYYICQTLNVAGSIITKAYLEVTDVIADRPPPVIRQGPVNQTVAVDGTFVLSCVATGSPVPTILWRKDGVLVSTQDSRIKQLENGVLQIRYAKLGDTGRYTCIASTPSGEATWSAYIEVQEFGVPVQPPRPTDPNLIPSAPSKPEVTDVSRNTVTLSWQPNLNSGATPTSYIIEAFSHASGSSWQTVAENVKTETSAIKGLKPNAIYLFLVRAANAYGISDPSQISDPVKTQDVLPTSQGVDHKQVQRELGNAVLHLHNPTVLSSSSIEVHWTVDQQSQYIQGYKILYRPSGANHGESDWLVFEVRTPAKNSVVIPDLRKGVNYEIKARPFFNEFQGADSEIKFAKTLEEGNAPPQGVTVSKNDGNGTAILVSWQPPPEDTQNGMVQEYKVWCLGNETRYHINKTVDGSTFSVVIPFLVPGIRYSVEVAASTGAGSGVKSEPQFIQLDAHGNPVSPEDQVSLAQQISDVVKQPAFIAGIGAACWIILMVFSIWLYRHRKKRNGLTSTYAGIRKVTYQRGGEAVSSGGRPGLLNISEPAAQPWLADTWPNTGNNHNDCSISCCTAGNGNSDSNLTTYSRPADCIANYNNQLDNKQTNLMLPESTVYGDVDLSNKINEMKTFNSPNLKDGRFVNPSGQPTPYATTQLIQSNLSNNMNNGSGDSGEKHWKPLGQQKQEVAPVQYNIVEQNKLNKDYRANDTVPPTIPYNQSYDQNTGGSYNSSDRGSSTSGNQGHKKGARTPKVPKQGGMNWADLLPPPPAHPPPHSNSEEYNISVDESYDQEMPCPVPPARMYLQQDELEEEEDERGPTPPVRGAASSPAAVSYSHQSTATLTPSPQEELQPMLQDCPEETGHMQHQPDRRRQPVSPPPPPRPISPPHTYGYISGPLVSDMDTDAPEEEEDEADMEVAKMQTRRLLLRGLEQTPASSVGDLESSVTGSMINGWGSASEEDNISSGRSSVSSSDGSFFTDADFAQAVAAAAEYAGLKVARRQMQDAAGRRHFHASQCPRPTSPVSTDSNMSAAVMQKTRPAKKLKHQPGHLRRETYTDDLPPPPVPPPAIKSPTAQSKTQLEVRPVVVPKLPSMDARTDRSSDRKGSSYKGREVLDGRQVVDMRTNPGDPREAQEQQNDGKGRGNKAAKRDLPPAKTHLIQEDILPYCRPTFPTSNNPRDPSSSSSMSSRGSGSRQREQANVGRRNIAEMQVLGGYERGEDNNEELEETES

SEQ ID NO: 22018 - protein, 239 aa, Homo sapiens
LSFSSCPLPALGRTGPSRAARAQSLTMASLFKKKTVDDVIKEQNRELRGTQRAIIRDRAALEKQEKQLELEIKKMAKIGNKEACKVLAKQLVHLRKQKTRTFAVSSKVTSMSTQTKVMNSQMKMAGAMSTTAKTMQAVNKKMDPQKTLQTMQNFQKENMKMEMTEEMINDTLDDIFDGSDDEEESQDIVNQVLDEIGIEISGKMAKAPSAARSLPSASTSKATISDEEIERQLKALGVD

SEQ ID NO: 22019 - protein, 85 aa, Homo sapiens
LKVTALLLLPYPLVNDTLDDIFDGSDDEEESQDIVNQVLDEIGIEISGKMAKAPSAARSLPSASTSKATISDEEIERQLKALGVD

SEQ ID NO: 22020 - protein, 148 aa, Homo sapiens
MLSNKKDCKDVDECSLKPSICGTAVCKNIPGDFECECPEGYRYNLKSKSCEDIDERSENMCAQLCVNYPGGYTCYCDGKKGFKLAQDQKSCEVVSVCLPLNLDTQYELLYLTEQFSGVVLYLKFHLPEISRFSAEFHFWTYDSEGMIL

SEQ ID NO: 22021 - protein, 738 aa, Homo sapiens
LGAGSGRSPPPPAVPPRLAGSLAPPRSTAQTEAHRLAAPRRLALRSPPRRATVPAGASARFEMRVLGGRCGALLACLLLVLPVSEANFLSKQQASQVLVRKRRANSLLEETKQGNLERECIEELCNKEEAREVFENDPETDYFYPKYLVCLRSFQTGLFTAARQSTNAYPDLRSCVNAIPDQCSPLPCNEDGYMSCKDGKASFTCTCKPGWQGEKCEFDINECKDPSNINGGCSQICDNTPGSYHCSCKNGFVMLSNKKDCKDVDECSLKPSICGTAVCKNIPGDFECECPEGYRYNLKSKSCEDIDECSENMCAQLCVNYPGGYTCYCDGKKGFKLAQDQKSCEVVSVCLPLNLDTKYELLYLAEQFAGVVLYLKFRLPEISRFSAEFDFRTYDSEGVILYAESIDHSAWLLIALRGGKIEVQLKNEHTSKITTGGDVINNGLWNMVSVEELEHSISIKIAKEAVMDINKPGPLFKPENGLLETKVYFAGFPRKVESELIKPINPRLDGCIRSWNLMKQGASGIKEIIQEKQNKHCLVTVEKGSYYPGSGIAQFHIDYNNVSSAEGWHVNVTLNIRPSTGTGVMLALVSGNNTVPFAVSLVDSTSEKSQDILLSVENTVIYRIQALSLCSDQQSHLEFRVNRNNLELSTPLKIETISHEDLQRQLAVLDKAMKAKVATYLGGLPDVPFSATPVNAFYNGCMEVNINGVQLDLDEAISKHNDIRAHSCPSVWKKTKNS

SEQ ID NO: 22022 - protein, 413 aa, Homo sapiens
MPSLKLFFCLGLQECWDYRHEPPRPARPEYPEDVAPTVGFSKINLRQGKFEVTIFDLGGGIRIRGIWKNYYAESYGVIFVVDSSDEERMEETKEAMSEMLRHPRISGKPILVLANKQDKEGALGEADVIECLSLEKLVNEHKCLCQIEPCSAISGYGKKIDKSIKKGLYWLLHVIARDFDALNERIQKETTEQRALEEQEKQERAERVRKLREERKQNEQEQAELDGTSGLAELDPEPTNPFQPIASVIIENEGKLEREKKNQKMEKDSDGCHLKHKMEHEQIETQGQVNHNGQKNNEFGLVENYKEALTQQLKNEDETDRPSLESANGKKKTKKLRMKRNHRVEPLNIDDCAPESPTPPPPPPPVGWGTPKVTRLPKLEPLGETHHNDFYRKPLPPLAVPQRPNSDAHDVIS

SEQ ID NO: 22023 - protein, 50 aa, Homo sapiens
VLTAAVMFLLLNCIVAVSQNMGIGKNGDLPRPPLRNEFRDGLLPCCTDWF

SEQ ID NO: 22024 - protein, 193 aa, Homo sapiens
VLTAAVMFLLLNCIVAVSQNMGIGKNGDLPRPPLRNEFRYFQRMTTTSSVEGKQNLVIMGRKTWFSIPEKNRPLKDRINLVLSRELKEPPQGAHFLARSLDDALKLTERPELANKVDMIWIVGGSSVYKEAMNHLGHLKLFVTRIMQDFESDTFFSEIDLEKYKLLPEYPGVLSDVQEGKHIKYKFEVCEKDD

SEQ ID NO: 22025 - protein, 42 aa, Homo sapiens
LGGCGPAARRGRLLLHLQADPGSAAGRPRARDTLFEVRRRLN

SEQ ID NO: 22026 - protein, 159 aa, Homo sapiens [sequence omitted]

SEQ ID NO: 22027 - protein, 291 aa, Homo sapiens
LAFSGPAVRPRRWLLQASGLDEPPFPVLGPFKSSLNARMDNRFATAFVIACVLSLISTIYMAASIGTDFWYEYRSPVQENSSDLNKSIWDEFISDEADEKTYNDALFRYNGTVGLWRRCITIPKNMHWYSPPERTESFDVVTKCVSFTLTEQFMEKFVDPGNHNSGIDLLRTYLWRCQFLLPFVSLGLMCFGALIGLCACICRSLYPTIATGILHLLAGLCTLGSVSCYVAGIELLHQKLELPDNVSGEFGWSFCLACVSAPLQFMASALFIWAAHTNRKEYTLMKAYRVA

SEQ ID NO: 22028 - protein, 12 aa, Homo sapiens
VKLAEQEDGRVI

SEQ ID NO: 22029 - protein, 12 aa, Homo sapiens
VKLAEQEDGRAV

SEQ ID NO: 22030 - protein, 20 aa, Homo sapiens
VKLAEQEDGRVVCFSMQVID

SEQ ID NO: 22031 - protein, 15 aa, Homo sapiens
VKLAEQEDGRMQVID

SEQ ID NO: 22032 - protein, 10 aa, Homo sapiens
VKLAEQEDGR

SEQ ID NO: 22033 - protein, 428 aa, Homo sapiens
LRLRAGLLPPLLPRQIRGEGIVPAPPLARATFLWFLPASGFCGPMWQAPRERQQPAGAAAPQVSEPGAPLRSSLLGLGGSLLPAGFAAGLHCPGEPAMRGYLVAIFLSAVFLYYVLHCILWGTNVYWVAPVEMKRRNKIQPCLSKPAFASLLRFHQFHPFLCAADFRKIASLYGSDKFDLPYGMRTSAEYFRLALSKLQSCDLFDEFDNIPCKKCVVVGNGGVLKNKTLGEKIDSYDVIIRMNNGPVLGHEEEVGRRTTFRLFYPESVFSDPIHNDPNTTVILTAFKPHDLRWLLELLMGDKINTNGFWKKPALNLIYKPYQIRILDPFIIRTAAYELLHFPKVFPKNQKPKHPTTGIIAITLAFYICHEVHLAGFKYNFSDLKSPLHYYGNATMSLMNKNAYHNVTAEQLFLKDIIEKNLVINLTQD

SEQ ID NO: 22034 - protein, 201 aa, Homo sapiens
LILIIILSRCNLRPRAKNKNMFKWRNLALTSIDLKYQFFVVFLKIFQGNKDYHQDVRNNFLPPIIARFIRVNPTQWQQKIAMKMELLGCQFIPKGRPPKLTQPPPPRNSNDLKNTTAPPKIAKGRAPKFTQPLQPRSSNEFPAQTEQTTASPDIRNTTVTPNVTKDVALAAVLVPVLVMVLTTLILILVCAWHWRNRLVHN

SEQ ID NO: 22035 - protein, 67 aa, Homo sapiens
VGASEPLSLILRAQGSSFTYGMRKLGKKSSSVLLLKVWSMDQQHQHHLGSSWKKCRNSGLTPESAFL

SEQ ID NO: 22036 - protein, 62 aa, Homo sapiens
VGQYTGLLTLFLAPQTTLYLPHCHPATLMGLHSKGRISSELFFFLKKKKKKPLVIQALSFNR

SEQ ID NO: 22037 - protein, 750 aa, Homo sapiens
LSSINVMAVLPGPLQLLGVLLTISLSSIRLIQAGAYYGIKPLPPQIPPQMPPQIPQYQPLGQQVPHMPLAKDGLAMGKEMPHLQYGKEYPHLPQYMKEIQPAPRMGKEAVPKKGKEIPLASLRGEQGPRGEPGPRGPPGPPGLPGHGIPGIKGKPGPQGYPGVGKPGMPGMPGKPGAMGMPGAKGEIGQKGEIGPMGIPGPQGPPGPHGLPGIGKPGGPGLPGQPGPKGDRGPKGLPGPQGLRGPKGDKGFGMPGAPGVKGPPGMHGPPGPVGLPGVGKPGVTGFPGPQGPLGKPGAPGEPGPQGPIGVPGVQGPPGIPGIGKPGQDGIPGQPGFPGGKGEQGLPGLPGPPGLPGIGKPGFPGPKGDRGMGGVPGALGPRGEKGPIGAPGIGGPPGEPGLPGIPGPMGPPGAIGFPGPKGEGGIVGPQGPPGPKGEPGLQGFPGKPGFLGEVGPPGMRGLPGPIGPKGEAGQKGVPGLPGVPGLLGPKGEPGIPGDQGLQGPPGIPGIGGPSGPIGPPGIPGPKGEPGLPGPPGFPGIGKPGVAGLHGPPGKPGALGPQGQPGLPGPPGPPGPPGPPAVMPPTPPPQGEYLPDMGLGIDGVKPPHAYGAKKGKNGGPAYEMPAFTAELTAPFPPVGAPVKFNKLLYNGRQNYNPQTGIFTCEVPGVYYFAYHVHCKGGNVWVALFKNNEPVMYTYDEYKKGFLDQASGSAVLLLRPGDRVFLQMPSEQAAGLYAGQYVHSSFSGYLLYPM

SEQ ID NO: 22038 - protein, 283 aa, Homo sapiens
VVLVCRVMTSFRLALIQLQISSIKSDNVTRACSFIREAATQGAKIVSLPECFNSPYGAKYFPEYAEKIPGESTQKLSEVAKECSIYLIGGSIPEEDAGKLYNTCAVFGPDGTLLAKYRKIHLFDIDVPGKITFQESKTLSPGDSFSTFDTPYCRVGLGICYDMRFAELAQIYAQRGCQLLVYPGAFNLTTGPAHWELLQRSRAVDNQVYVATASPARDDKASYVAWGHSTVVNPWGEVLAKAGTEEAIVYSDIDLKKLAEIRQQIPVFRQKRSDLYAVEMKKP

SEQ ID NO: 22039 - protein, 16 aa, Homo sapiens
VRFSHLTWLFTINMMY

SEQ ID NO: 22040 - protein, 585 aa, Homo sapiens
LICLLFCFFIFPAPGKTQFISLKPKIPLSPEVTHTKPAPKQTPRAPPKPKTSPRPRIPQTQPVPKVPQRVTAKPKTSPSPEVSYTTPAPLETRGIPFIPMISPSPSQEELQTTLEETDQSTQEPFTTKIPRTTELAKTTQAPHRFYTTVRPRTSDKPHIRPVLNRTTTRPTRPKPSGMPSGNGVGTGVKQAPRPSGADRNVSVDSTHPTKKPGTRRPPLPPRPTHPRRKPLPPNNVTGKPGSAGIISSGPITTPPLRSTPRPTGTPLERIETDIKQPTVPASGEELENITDFSSSPTRETDPLGKPRFKGPHVRYIQKPDNSPCSITDSVKRFPKEEATEGNATSPPQNPPTNLTVVTVEGCPSFVILDWEKPLNDTVTEYEVISRENGSFSGKNKSIQMTNQTFSTVENLKPNTSYEFQVKPKNPLGEGPVSNTVAFSTESADPRVSEPVSAGRDAIWTERPFNSDSYSECKGKQYVKRTWYKKFVGVQLCNSLRYKIYLSDSLTGKFYNIGDQRGHGEDHCQFVDSFLDGRTGQQLTSDQLPIKEGYFRAVRQEPVQFGEIGGHTQINYVQWYECGTTIPGKW

SEQ ID NO: 22041 - protein, 1800 aa, Homo sapiens
LSLGDSPLKCSSRVARHPPASFPMRGGKCNMLSSLGCLLLCGSITLALGNAQKLPKGKRPNLKVHINTTSDSILLKFLRPSPNVKLEGLLLGYGSNVSPNQYFPLPAEGKFTEAIVDAEPKYLIVVRPAPPPSQKKSCSGKTRSRKPLQLVVGTLTPSSVFLSWGFLINPHHDWTLPSHCPNDRFYTIRYREKDKEKKWIFQICPATETIVENLKPNTVYEFGVKDNVEGGIWSKIFNHKTVVGSKKVNGKIQSTYDQDHTVPAYVPRKLIPITIIKQVIQNVTHKDSAKSPEKAPLGGVILVHLIIPGLNETTVKLPASLMFEISDALKTQLAKNETLALPAESKTPEVEKISARPTTVTPETVPRSTKPTTSSALDVSETTLVLSKRTPETLQTILIPQFELPLSTLAPKSLPEFPEAKTPFPFEKPRGTLASSEKPWIVPTAKISEDSKVLQPQTATYDVFSSPTTSDEPEISDSYTATSDRILDSIPPKTSRTLEQPRATLAPSETPFVPQKLEIFTSPEMQPTTPAPQQTTSIPSTPKRRPRPKPPRTKPERTTSAGTITPKISKSPEPTWTTPAPGKTQFISLKPKIPLSPEVTHTKPAPEPQTLLPSQSTIGPETPGTKPSTTLAPRKTKRPGRRPRPRPRPKTTPSPEVPKSKPALEPATIQPEPLVPTTASKPSERPKTTHRPDAPQIQPGSKPPKQLLPKPQTTAEPDMPPTKSVSEPVPFETEAPSMTIVPTTDIEPVTVRTEATVTTLAPKTSQRTRTRRPRPKHKTTPRPETLQTKLDFGPITPGTSSAPTTTTKRTRRPHPKPKTTPHPEVPQTKLVPATILEPVLRTEASGTTAAPKVPQRTHRPHPKPKTTLSPEELQTELVPATIFEPVSPIKEAPGTTFVPVTDLEPVTFRTEIPATTLATKTSKRTRPPRPRPKTTPSPQAPETKPVPATVLEPVTLRPEASTTLASKTSQRTRRPRLRTKTTPRPEAPESKPVPTAELKPVTLRTETWVTTQAPKTSQRTRRPRPKTKTTPSPEVPQTKLVPSTDLEPGTLRTEAPKTMVVTTVLEPDTFRTKFPETTLAPKTQRTRRPRPRPKTTSSPEVPQNKSVSVTGFEPVVHSTDAPGTTFALTELQTLILKPVTSPSLEMTESQPVSDVLESVTLSTESPKETIAPAKTDYVYPTAKAPLWPEEPKTEVVESITYVSEPPETTLETSPLPSQSITLPSPDEPQTEPAPKQTPRAPPKPKTSPRPRIPQTQPVPKVPQRVTAKPKTSPSPEVSYTTPAPKDVLLPHKPYPEVSQSEPAPLETRGIPFIPMISPSPSQEELQTTLEETDQSTQEPFTTKIPRTTELAKTTQAPHRFYTTVRPRTSDKPHIRPVLNRTTTRPTRPKPSGMPSGNGVGTGVKQAPRPSGADRNVSVDSTHPTKKPGTRRPPLPPRPTHPRRKPLPPNNVTGKPGSAGIISSGPITTPPLRSTPRPTGTPLERIETDIKQPTVPASGEELENITDFSSSPTRETDPLGKPRFKGPHVRYIQKPDNSPCSITDSVKRFPKEEATEGNATSPPQNPPTNLTVVTVEGCPSFVILDWEKPLNDTVTEYEVISRENGSFSGKNKSIQMTNQTFSTVENLKPNTSYEFQVKPKNPLGEGPVSNTVAFSTESADPRVSEPVSAGRDAIWTERPFNSDSYSECKGKQYVKRTWYKKFVGVQLCNSLRYKIYLSDSLTGKFYNIGDQRGHGEDHCQFVDSFLDGRTGQQLTSDQLPIKEGYFRAVRQEPVQFGEIGGHTQINYVQWYECGTTIPGKW

SEQ ID NO: 22042 - protein, 1098 aa, Homo sapiens
LSLGDSPLKCSSRVARHPPASFPMRGGKCNMLSSLGCLLLCGSITLALGNAQKLPKGKRPNLKVHINTTSDSILLKFLRPSPNVKLEGLLLGYGSNVSPNQYFPLPAEGKFTEAIVDAEPKYLIVVRPAPPPSQKKSCSGKTRSRKPLQLVVGTLTPSSVFLSWGFLINPHHDWTLPSHCPNDRFYTIRYREKDKEKKWIFQICPATETIVENLKPNTVYEFGVKDNVEGGIWSKIFNHKTVVGSKKVNGKIQSTYDQDHTVPAYVPRKLIPITIIKQVIQNVTHKDSAKSPEKAPLGGVILVHLIIPGLNETTVKLPASLMFEISDALKTQLAKNETLALPAESKTPEVEKISARPTTVTPETVPRSTKPTTSSALDVSETTLASSEKPWIVPTAKISEDSKVLQPQTATYDVFSSPTTSDEPEISDSYTATSDRILDSIPPKTSRTLEQPRATLAPSETPFVPQKLEIFTSPEMQPTTPAPQQTTSIPSTPKRRPRPKPPRTKPERTTSAGTITPKISKSPEPTWTTPAPGKTQFISLKPKIPLSPEVTHTKPAPKQTPRAPPKPKTSPRPRIPQTQPVPKVPQRVTAKPKTSPSPEVSYTTPAPKDVLLPHKPYPEVSQSEPAPLETRGIPFIPMISPSPSQEELQTTLEETDQSTQEPFTTKIPRTTELAKTTQAPHRFYTTVRPRTSDKPHIRPGVKQAPRPSGADRNVSVDSTHPTKKPGTRRPPLPPRPTHPRRKPLPPNNVTGKPGSAGIISSGPITTPPLRSTPRPTGTPLERIETDIKQPTVPASGEELENITDFSSSPTRETDPLGKPRFKGPHVRYIQKPDNSPCSITDSVKRFPKEEATEGNATSPPQNPPTNLTVVTVEGCPSFVILDWEKPLNDTVTEYEVISRENGSFSGKNKSIQMTNQTFSTVENLKPNTSYEFQVKPKNPLGEGPVSNTVAFSTESADPRVSEPVSAGRDAIWTERPFNSDSYSECKGKQYVKRTWYKKFVGVQLCNSLRYKIYLSDSLTGKFYNIGDQRGHGEDHCQFVDSFLDGRTGQQLTSDQLPIKEGYFRAVRQEPVQFGEIGGHTQINYVQWYECGTTIPGKW

SEQ ID NO: 22043 - protein, 370 aa, Homo sapiens
MRGGKCNMLSSLGCLLLCGSITLALGNAQKLPKGKRPNLKVHINTTSDSILLKFLRPSPNVKLEGLLLGYGSNVSPNQYFPLPAEGKFTEAIVDAEPKYLIVVRPAPPPSQKKSCSGKTRSRKPLQLVVGTLTPSSVFLSWGFLINPHHDWTLPSHCPNDRFYTIRYREKDKEKKWIFQICPATETIVENLKPNTVYEFGVKDNVEGGIWSKIFNHKTVVGSKKVNGKIQSTYDQDHTVPAYVPRKLIPITIIKQVIQNVTHKDSAKSPEKAPLGGVILVHLIIPGLNETTVKLPASLMFEISDALKTQLAKNETLALPAESKTPEVEKISARPTTVTPETVPRSTKPTTSSALDVSETTLGNSKNFFFF

SEQ ID NO: 22044 - protein, 89 aa, Homo sapiens [sequence omitted]

SEQ ID NO: 22045 - protein, 362 aa, Homo sapiens
MTQELSFQKFIEQSDLLGELKYDFNEKDEFRHTETQRPFVFNYYENVLEKNSKRYQALGHLLEQYIYELLEKVCKLEKVYIPPEADKEEPRSFFFMSEKALTNHHSALLILLQDHGVFRAGQWSQQAIIHHGLQHGSQIPCIQMALQAHYDVIVLNPNDNFVEPKVEKEWKGLLTQNIESSSLKMVQGGSFFSLQHPPKCIPKRCSNTPEEHTAYIWDYFISKTEGKDIAFIVHGYGGLVFMDLLVRRRWEVMSKVYAVALIDSEHHVGHQLGSDVQLLAWIKHHCREWVTSPKPLDKPAATVFKKEFPMVSAGTEKYILAPSSSLQSIFKYFKKALKARTTINFSRMPIVTRSSTKRKQSA

SEQ ID NO: 22046 - protein, 152 aa, Homo sapiens [sequence omitted]

SEQ ID NO: 22047 - protein, 75 aa, Homo sapiens
LTLLEVADGQTGEYSRLENRIIQPASGVRGVFLCVCTRSNSRMARTSLKDSRCGDMSSQGPEEKRNYQAWDLLSC

SEQ ID NO: 22048 - protein, 41 aa, Homo sapiens
MCFLNQLQSLLCIRALKGTSRIEANETESSSAAQKSKDMEF

SEQ ID NO: 22049 - protein, 419 aa, Homo sapiens
LGFAMEQIWLLLLLTIRVLPGSAQFNGYNCDANLHSRFPAERDISVYCGVQAITMKINFCTVLFSGYSETDLALNGRHGDSHCRGFINNNTFPAVVIFIINLSTLEGCGNNLVVSTIPGVSAYGNATSVQVGNISGYIDTPDPPTIISYLPGLLYKFSCSYPLEYLVNNTQLASSSAAISVRENNGTFVSTLNLLLYNDSTYNQQLIIPSIGLPLKTKVFAAVQATNLDGRWNVLMDYCYTTPSGNPNDDIRYDLFLSCDKDPQTTVIENGRSQRGRFSFEVFRFVKHKNQKMSTVFLHCVTKLCRADDCPFLMPICSHRERRDAGRRTTWSPQSSSGSAVLSAGPIITRSDETPTNNSQLGSPSMPPFQLNAITSALISGMVILGVTSFSLLLCSLALLHRKGPTSLVLNGIRNPVFD

SEQ ID NO: 22050 - protein, 427 aa, Homo sapiens
VVEHGAWNKCFAMEQIWLLLLLTIRVLPGSAQFNGYNCDANLHSRFPAERDISVYCGVQAITMKINFCTVLFSGYSETDLALNGRHGDSHCRGFINNNTFPAVVIFIINLSTLEGCGNNLVVSTIPGVSAYGNATSVQVGNISGYIDTPDPPTIISYLPGLLYKFSCSYPLEYLVNNTQLASSSAAISVRENNGTFVSTLNLLLYNDSTYNQQLIIPSIGLPLKTKVFAAVQATNLDGRWNVLMDYCYTTPSGNPNDDIRYDLFLSCDKDPQTTVIENGRSQRGRFSFEVFRFVKHKNQKMSTVFLHCVTKLCRADDCPFLMPICSHRERRDAGRRTTWSPQSSSGSAVLSAGPIITRSDETPTNNSQLGSPSMPPFQLNAITSALISGMVILGVTSFSLLLCSLALLHRKGPTSLVLNGIRNPVFD

SEQ ID NO: 22051 - protein, 195 aa, Homo sapiens
VVESCVRQRTEGAAPQPRGRCVWEKTLPLRRDPPARGHRGARDDAPSCGVDSVSGPPRRRRNMESKGASSCRLLFCLLISATVFRPGLGWYTVNSAYGDTIIIPCRLDVPQNLMFGKWKYEKPDGSPVFIAFRSSTKKSVQYDDVPEYKDRLNLSENYTLSISNARISDEKRFVCMLVTEDNVFEAPTIVKVFSK

SEQ ID NO: 22052 - protein, 645 aa, Homo sapiens
VVESCVRQRTEGAAPQPRGRCVWEKTLPLRRDPPARGHRGARDDAPSCGVDSVSGPPRRRRNMESKGASSCRLLFCLLISATVFRPGLGWYTVNSAYGDTIIIPCRLDVPQNLMFGKWKYEKPDGSPVFIAFRSSTKKSVQYDDVPEYKDRLNLSENYTLSISNARISDEKRFVCMLVTEDNVFEAPTIVKVFKQPSKPEIVSKALFLETEQLKKLGDCISEDSYPDGNITWYRNGKVLHPLEGAVVIIFKKEMDPVTQLYTMTSTLEYKTTKADIQMPFTCSVTYYGPSGQKTIHSEQAVFDIYYPTEQVTIQVLPPKNAIKEGDNITLKCLGNGNPPPEEFLFYLPGQPEGIRSSNTYTLTDVRRNATGDYKCSLIDKKSMIASTAITVHYLDLSLNPSGEVTRQIGDALPVSCTISASRNATVVWMKDNIRLRSSPSFSSLHYQDAGNYVCETALQEVEGLKKRESLTLIVEGKPQIKMTKKTDPSGLSKTIICHVEGFPKPAIQWTITGSGSVINQTEESPYINGRYYSKIIISPEENVTLTCTAENQLERTVNSLNVSAISIPEHDEADEISDENREKVNDQAKLIVGIVVGLLLAALVAGVVYWLYMKKSKTASKHVNKDLGNMEENKKLEENNHKTEA

SEQ ID NO: 22053 - protein, 1044 aa, Homo sapiens
LLRFHVSEACALGCSFFGSELFSAIPLPAGAPHTHWAACVWSGTRAHACLWTATAPKELKFQMANSMNGRNPGGRGGNPRKGRILGIIDAIQDAVGPPKQAAADRRTVEKTWKLMDKVVRLCQNPKLQLKNSPPYILDILPDTYQHLRLILSKYDDNQKLAQLSENEYFKIYIDSLMKKSKRAIRLFKEGKERMYEEQSQDRRNLTKLSLIFSHMLAEIKAIFPNGQFQGDNFRITKADAAEFWRKFFGDKTIVPWKVFRQCLHEVHQISSGLEAMALKSTIDLTCNDYISVFEFDIFTRLFQPWGSILRNWNFLAVTHPGYMAFLTYDEVKARLQKYSTKPGSYIFRLSCTRLGQWAIGYVTGDGNILQTIPHNKPLFQALIDGSREGFYLYPDGRSYNPDLTGLCEPTPHDHIKVTQEQYELYCEMGSTFQLCKICAENDKDVKIEPCGHLMCTSCLTAWQESDGQGCPFCRCEIKGTEPIIVDPFDPRDEGSRCCSIIDPFGMPMLDLDDDDDREESLMMNRLANVRKCTDRQNSPVTSPGSSPLAQRRKPQPDPLQIPHLSLPPVPPRLDLIQKGIVRSPCGSPTGSPKSSPCMVRKQDKPLPAPPPPLRDPPPPPPERPPPIPPDNRLSRHIHHVESVPSRDPPMPLEAWCPRDVFGTNQLVGCRLLGEGSPKPGITASSNVNGRHSRVGSDPVLMRKHRRHDLPLEGAKVFSNGHLGSEEYDVPPRLSPPPPVTTLLPSIKCTGPLANSLSEKTRDPVEEDDDEYKIPSSHPVSLNSQPSHCHNVKPPVRSCDNGHCMLNGTHGPSSEKKSNIPDLSIYLKGDVFDSASDPVPLPPARPPTRDNPKHGSSLNRTPSDYDLLIPPLGEDAFDALPPSLPPPPPPARHSLIEHSKPPGSSSRPSSGQDLFLLPSDPFVDLASGQVPLPPARRLPGENVKTNRTSQDYDQLPSCSDGSQAPARPPKPRPRRTAPEIHHRKPHGPEAALENVDAKIAKLMGEGYAFEEVKRALEIAQNNVEVARSILREFAFPPPVSPRLNL

SEQ ID NO: 22054 - protein, 227 aa, Homo sapiens
LKRSVKSSKEPLEGTPESRVAEVSHDPAMLPVQRRKLDPLLKKYRHHKKATRTKRRRKEKMEAQCSPVPPTPSTPPQSEEDEAVDKKPTLLSAQEDTPDLLHEDRLQYLQEEGSGVMHQECQIQSCELSVAQKPRPSSPAVTSLASPPLCFGSFLSCVCQTFSRSRKQKPPRRKGNNQAEAGGDAEVLRPGPAKPELSLSKTCSHLKSIELSFVFSFIVLSVCHCSS

SEQ ID NO: 22055 - protein, 356 aa, Homo sapiens
VSGTGLRLASLLTTGMLAVRKARRKLRMGTICSPNPSGTKTSSEVCNADWMASLPPHLHNLPLSNLAIPGSHDSFSYWVDEKSPVGPDQTQAIKRLARISLVKKLMKKWSVTQNLTFREQLEAGIRYFDLRVSSKPGDADQEIYFIHGLFGIKVWDGLMEIDSFLTQHPQEIIFLDFNHFYAMDETHHKCLVLRIQEAFGNKLCPACSVESLTLRTLWEKNCQVLIFYHCPFYKQYPFLWPGKKIPAPWANTTSVRKLILFLETTLSERASRGSFHVSQAILTPRVKTIARGLVGGLKNTLVHRNLPAILDWVKTQKPGAMGVNIITSDFVDLVDFAATVIKLNDLLQEDTALAKC

SEQ ID NO: 22056 - protein, 320 aa, Homo sapiens
VSGTGLRLASLLTTGMLAVRKARRKLRMGTICSPNPSGTKTSSEVCNADWMASLPPHLHNLPLSNLAIPGSHDSFSYWVDEKSPVGPDQTQAIKRLARISLVKKLMKKWSVTQNLTFREQLEAGIRYFDLRVSSKPGDADQEIYFIHGLFGIKVWDGLMEIDSFLTQHPQEIIFLDFNHFYAMDETHHKCLVLRIQEAFGNKLCPACSVESLTLRTLWEKNCQVLIFYHCPFYKQYPFLWPGKKIPAPWANTTSVRKLILFLETTLSERASRGSFHVSQAILTPRVKTIARGLVGGLKNTLVHSNRWNSHGPSLLSQERS

SEQ ID NO: 22057 - protein, 319 aa, Homo sapiens
VSGTGLRLASLLTTGMLAVRKARRKLRMGTICSPNPSGTKTSSEVCNADWMASLPPHLHNLPLSNLAIPGSHDSFSYWVDEKSPVGPDQTQAIKRLARISLVKKLMKKWSVTQNLTFREQLEAGIRYFDLRVSSKPGDADQEIYFIHGLFGIKVWDGLMEIDSFLTQHPQEIIFLDFNHFYAMDETHHKCLVLRIQEAFGNKLCPACSVESLTLRTLWEKNCQVLIFYHCPFYKQYPFLWPGKKIPAPWANTTSVRKLILFLETTLSERASRGSFHVSQAILTPRVKTIARGLVGGLKNTLVHRLALIPVYPLRFSRRS

SEQ ID NO: 22058 - protein, 1276 aa, Homo sapiens
LLELPGCPPRWLQRGSRVPDPAARSPPLRPEGDPTGARRCGVAQGARLPSLAAGNGLHQWPDSSKIMEEHSYIQKELDLQNGSLEEDSVVHSVENDSQNMMESLSPKKYSSSLRFKANGDYSGSYLTLSQPVPAKRSPSPLGTSVRSSPSLAKIQGSKQFSYDGTDKNIPMKPPTPLLNTTSSLSGYPLGRADFDHYTGRDSERALRLSEKPPYSKYSSRHKSHDNVYSLGGLEGRKASGSLLAMWNGSSLSDAGPPPISRSGAASMPSSPKQARKMSIQDSLALQPKLTRHKELASENINLRTRKYSSSSLSHMGAYSRSLPRLYRATENQLTPLSLPPRNSLGNSKRTKLGEKDLPHSVIDNDNYLNFSSLSSGALPYKTSASEGNPYVSSTLSVPASPRVARKMLLASTSSCASDDFDQASYVGTNPSHSLLAGESDRVFATRRNFSCGSVEFDEADLESLRQASGTPQPALRERKSSISSISGRDDLMDYHRRQREERLREQEMERLERQRLETILSLCAEYTKPDSRLSTGTTVEDVQKINKELEKLQLSDEESVFEEALMSPDTRYRCHRKDSLPDADLASCGSLSQSSASFFTPRSTRNDELLSDLTRTPPPPSSTFPKASSESSYLSILPKTPEGISEEQRSQELAAMEETRIVILNNLEELKQKIKDINDQMDESFRELDMECALLDGEQKSETTELMKEKEILDHLNRKIAELEKNIVGEKTKDADLLDVESKHFEDLEFQQLEHESRLDEEKENLTQQLLREVAEYQRNIVSRKEKISALKKQANHIVQQAQREQDHFVKEKNNLIMMLQREKENLCNLEKKYSSLSGGKGFPVNPNTLKEGYISVNEINEPCGNSTNLSPSTQFPADADAVATEPATAVLASQPQSKEHFRSLEERKKQHKEGLYLSDTLPRKKTTSSISPHFSSATMGRSITPKAHLPLGQSNSCGSVLPPSLAAMAKDSESRRMLRGYNHQQMSEGHRQKSEFYNRTASESNVYLNSFHYPDHSYKDQAFDTLSLDSSDSMETSISACSPDNISSASTSNIARIEEMERLLKQAHAEKTRLLESREREMEAKKRALEEEKRRREILEKRLQEETSQRQKLIEKEVKIRERQRAQARPLTRYLPVRKEDFDLRSHVETAGHNIDTCYHVSITEKTCRGFLIKMGGKIKTWKKRWFVFDRNKRTFSYYADKHETKLKGVIYFQAIEEVYYDHLKNANKSPNPLLTFSVKTHDRIYYMVAPSPEAMRIWMDVIVTGAEGYTHFLL

SEQ ID NO: 22059 - protein, 1319 aa, Homo sapiens
LLELPGCPPRWLQRGSRVPDPAARSPPLRPEGDPTGARRCGVAQGARLPSLAAGNGLHQWPDSSKIMEEHSYIQKELDLQNGSLEEDSVVHSVENDSQNMMESLSPKKYSSSLRFKANGDYSGSYLTLSQPVPAKRSPSPLGTSVRSSPSLAKIQGSKQFSYDGTDKNIPMKPPTPLLNTTSSLSGYPLGRADFDHYTGRDSERALRLSEKPPYSKYSSRHKSHDNVYSLGGLEGRKASGSLLAMWNGSSLSDAGPPPISRSGAASMPSSPKQARKMSIQDSLALQPKLTRHKELASENINLRTRKYSSSSLSHMGAYSRSLPRLYRATENQLTPLSLPPRNSLGNSKRTKLGEKDLPHSVIDNDNYLNFSSLSSGALPYKTSASEGNPYVSSTLSVPASPRVARKMLLASTSSCASDDFDQASYVGTNPSHSLLAGESDRVFATRRNFSCGSVEFDEADLESLRQASGTPQPALRERKSSISSISGRDDLMDYHRRQREERLREQEMERLERQRLETILSLCAEYTKPDSRLSTGTTVEDVQKINKELEKLQLSDEESVFEEALMSPDTRYRCHRKDSLPDADLASCGSLSQSSASFFTPRSTRNDELLSDLTRTPPPPSSTFPKASSESSYLSILPKTPEGISEEQRSQELAAMEETRIVILNNLEELKQKIKDINDQMDESFRELDMECALLDGEQKSETTELMKEKEILDHLNRKIAELEKNIVGEKTKEKVKLDAEREKLERLQELYSEQKTQLDNCPESMREQLQQQLKRDADLLDVESKHFEDLEFQQLEHESRLDEEKENLTQQLLREVAEYQRNIVSRKEKISALKKQANHIVQQAQREQDHFVKEKNNLIMMLQREKENLCNLEKKYSSLSGGKGFPVNPNTLKEGYISVNEINEPCGNSTNLSPSTQFPADADAVATEPATAVLASQPQSKEHFRSLEERKKQHKEGLYLSDTLPRKKTTSSISPHFSSATMGRSITPKAHLPLGQSNSCGSVLPPSLAAMAKDSESRRMLRGYNHQQMSEGHRQKSEFYNRTASESNVYLNSFHYPDHSYKDQAFDTLSLDSSDSMETSISACSPDNISSASTSNIARIEEMERLLKQAHAEKTRLLESREREMEAKKRALEEEKRRREILEKRLQEETSQRQKLIEKEVKIRERQRAQARPLTRYLPVRKEDFDLRSHVETAGHNIDTCYHVSITEKTCRGFLIKMGGKIKTWKKRWFVFDRNKRTFSYYADKHETKLKGVIYFQAIEEVYYDHLKNANKSPNPLLTFSVKTHDRIYYMVAPSPEAMRIWMDVIVTGAEGYTHFLL

SEQ ID NO: 22060 - protein, 11 aa, Homo sapiens
MRRFQQDYGRA

SEQ ID NO: 22061 - protein, 232 aa, Homo sapiens
LLPSHIPAPSAGSRRLLLLLLCGCRACLLFFPEMANRGPSYGLSREVQEKIEQKYDADLENKLVDWIILQCAEDIEHPPPGRAHFQKWLMDGTVLCKLINSLYPPGQEPIPKISESKMAFKQMEQISQFLKAAETYGVRTTDIFQTVDLWEGKDMAAVQRTLMALGSVAVTKDDGCYRGEPSWFHRKAQQNRRGFSEEQLRQGQNVIGLQMGSNKGASQAGMTGYGMPRQIM

SEQ ID NO: 22062 - protein, 395 aa, Homo sapiens
VTAGSGPSRAAWGARIAHPVFARCACRPAPSSRPSRRVASRPLGCCQPGADASRWQRGHFLTPWPLTRLHFPSRRGAGRYSGPRMQNVINTVKGKALEVAEYLTPVLKESKFKETGVITPEEFVAAGDHLVHHCPTWQWATGEELKVKAYLPTGKQFLVTKNVPCYKRCKQMEYSDELEAIIEEDDGDGGWVDTYHNTGITGITEAVKEITLENKDNIRLQDCSALCEEEEDEDEGEAADMEEYEESGLLETDEATLDTRKIVEACKAKTDAGGEDAILQTRTYDLYITYDKYYQTPRLWLFGYDEQRQPLTVEHMYEDISQDHVKKTVTIENHPHLPPPPMCSVHPCRHAEVMKKIIETVAEGGGELGVHMYPSLYVRLVAKWLLTIFFLRNLV

SEQ ID NO: 22063 - protein, 373 aa, Homo sapiens
VTAGSGPSRAAWGARIAHPVFARCACRPAPSSRPSRRVASRPLGCCQPGADASRWQRGHFLTPWPLTRLHFPSRRGAGRYSGPRMQNVINTVKGKALEVAEYLTPVLKESKFKETGVITPEEFVAAGDHLVHHCPTWQWATGEELKVKAYLPTGKQFLVTKNVPCYKRCKQMEYSDELEAIIEEDDGDGGWVDTYHNTGITGITEAVKEITLENKDNIRLQDCSALCEEEEDEDEGEAADMEEYEESGLLETDEATLDTRKIVEACKAKTDAGGEDAILQTRTYDLYITYDKYYQTPRLWLFGYDEQRQPLTVEHMYEDISQDHVKKTVTIENHPHLPPPPMCSVHPCRSVYVEINIFFDVIVYFMDLLLENL

SEQ ID NO: 22064 - protein, 57 aa, Homo sapiens [sequence omitted]

SEQ ID NO: 22065 - protein, 954 aa, Homo sapiens
VDYTMTWRMGPRFTMLLAMWLVCGSEPHPHATIRGSHGGRKVPLVSPDSSRPARFLRHTGRSRGIERSTLEEPNLQPLQRRRSVPVLRLARPTEPPARSDINGAAVRPEQRPAARGSPREMIRDEGSSARSRMLRFPSGSSSPNILASFAGKNRVWVISAPHASEGYYRLMMSLLKDDVYCELAERHIQQIVLFHQAGEEGGKVRRITSEGQILEQPLDPSLIPKLMSFLKLEKGKFGMVLLKKTLQVEERYPYPVRLEAMYEVIDQGPIRRIEKIRQKGFVQKCKASGVEGQVVAEGNDGGGGAGRPSLGSEKKKEDPRRAQVPPTRESRVKVLRKLAATAPALPQPPSTPRATTLPPAPATTVTRSTSRAVTVAARPMTTTAFPTTQRPWTPSPSHRPPTTTEVITARRPSVSENLYPPSRKDQHRERPQTTRRPSKATSLESFTNAPPTTISEPSTRAAGPGRFRDNRMDRREHGHRDPNVVPGPPKPAKEKPPKKKAQDKILSNEYEEKYDLSRPTASQLEDELQVGNVPLKKAKESKKHEKLEKPEKEKKKKMKNENADKLLKSEKQMKKSEKKSKQEKEKSKKKKGGKTEQDGYQKPTNKHFTQSPKKSVADLLGSFEGKRRLLLITAPKAENNMYVQQRDEYLESFCKMATRKISVITIFGPVNNSTMKIDHFQLDNEKPMRVVDDEDLVDQRLISELRKEYGMTYNDFFMVLTDVDLRVKQYYEVPITMKSVFDLIDTFQSRIKDMEKQKKEGIVCKEDKKQSLENFLSRFRWRRRLLVISAPNDEDWAYSQQLSALSGQACNFGLRHITILKLLGVGEEVGGVLELFPINGSSVVEREDVPAHLVKDIRNYFQVSPEYFSMLLVGKDGNVKSWYPSPMWSMVIVYDLIDSMQLRRQEMAIQQSLGMRCPEDEYAGYGYHSYHQGYQDGYQDDYRHHESYHHGYPY

SEQ ID NO: 22066 - protein, 13 aa, Homo sapiens
MGRRRCFADLLNS

SEQ ID NO: 22067 - protein, 37 aa, Homo sapiens
LGSLDLDLKKPIYQRTVAYGHFGRDSFPWEVPKKLKY

SEQ ID NO: 22068 - protein, 19 aa, Homo sapiens
LAVRLAVCFIGRAMLENHL

SEQ ID NO: 22069 - protein, 97 aa, Homo sapiens
MPIAFAAKGINKLLNKLFLINEQSPRASEETLLGISKKAKQMKINVQNNVDLGQPVKNKRVFKEESSEFDVRAFCNQLKHKATQVCLASLNLAYDFC

SEQ ID NO: 22070 - protein, 339 aa, Homo sapiens
MLRGTMTAWRGMRPEVTLACLLLATAGCFADLNEVPQVTVQPASTVQKPGGTVILGCVVEPPRMNVTWRLNGKELNGSDDALGVLITHGTLVITALNNHTVGRYQCVARMPAGAVASVPATVTLANLQDFKLDVQHVIEVDEGNTAVIACHLPESHPKAQVRYSVKQEWLEASRGNYLIMPSGNLQIVNASQEDEGMYKCAAYNPVTQEVKTSGSSDRLRVRRKARAHLLGDGGSLMEGLTKMEREVDTWRCHIQAPVLCALALARGTARGSQPGILSPLAGLRASISQHTAPGDCLLPHLPDGRFPSRLLCDWDGSECVCWDRTVGLVSSSAADTACA

SEQ ID NO: 22071 - protein, 144 aa, Homo sapiens
LGLEAHATTPGLARWKSSRDLFHSNASLAETDKITLEVAKLIKDDFLQQNGYTPYDRFCPFYKTVGMLSNMIAFYDMARRAVETTAQSDNKITWSIIREHMGDILYKLSSMKFKDPLKDGEAKIKSDYAQLLEDMQNAFRSLED

SEQ ID NO: 22072 - protein, 391 aa, Homo sapiens
MNIFLWTKAALQILLMKYAAGHGLVIRCLPEFRTLGRSTLAPSGQIENVPEKDLHGRLFINRIFHISADRMFELLFTSSRFMQKFASSRNIIDVVSTPWTAELGGDQLRTMTYTIVLNSPLTGKCTAATEKQTLYKESREARFYLVDSEVLTHDVPYHDYFYTVNRYCIIRSSKQKCRLRVSTDLKYRKQPWGLVKSLIEKNSWSSLEDYFKQLESDLLIEESVLNQAIEDPGKLTGLRRRRRTFNRTAETVPKLSSQHSSGDVGLGAKGDITGKKKEMENYNVTLIVVMSIFVLLLVLLNVTLFLKLSKIEHAAQSFYRLRLQEEKSLNLASDMVSRAETIQKNKDQAHRLKGVLRDSIVMLEQLKSSLIMLQKTFDLLNKNKTGMAVES

SEQ ID NO: 22073 - protein, 40 aa, Homo sapiens
LPSVLLLVLLNVTLFLKLSKIEHAAQSFYRLRLQEEKSLK

SEQ ID NO: 22074 - protein, 101 aa, Homo sapiens
LPSVLLLVLLNVTLFLKLSKIEHAAQSFYRLRLQEEKSLNLASDMVSRAETIQKNKDQAHRLKGVLRDSIVMLEQLKSSLIMLQKTFDLLNKNKTGMAVES

SEQ ID NO: 22075 - protein, 137 aa, Homo sapiens [sequence omitted]

SEQ ID NO: 22076 - protein, 25 aa, Homo sapiens
MLPLILGRDRRHQTAVTAMELPYHF

SEQ ID NO: 22077 - protein, 154 aa, Homo sapiens
LLPVGPLGRSMRWCLLLIWAQGLRQAPLASGMMTGTIETTGNISAEKGGSIILQCHLSSTTAQVTQVNWEQQDQLLAICNADLGWHISPSFKDRVAPGPGLGLTLQSLTVNDTGEYFCIYHTYPDGTYTGRIFLEVLESSGIPAGASWWINLSL

SEQ ID NO: 22078 - protein, 746 aa, Homo sapiens
VTPLILKLLKKPKTAENQKASEENEITQPGGSSAKPGLPCLNFEAVLSPDPALIHSTHSLTNSHAHTGSSDCDISCKGMTERIHSINLHNFSNSVLETLNEQRNRGHFCDVTVRIHGSMLRAHRCVLAAGSPFFQDKLLLGYSDIEIPSVVSVQSVQKLIDFMYSGVLRVSQSEALQILTAASILQIKTVIDECTRIVSQNVGDVFPGIQDSGQDTPRGTPESGTSGQSSDTESGYLQSHPQHSVDRIYSALYACSMQNGSGERSFYSGAVVSHHETALGLPRDHHMEDPSWITRIHERSQQMERYLSTTPETTHCRKQPRPVRIQTLVGNIHIKQEMEDDYDYYGQQRVQILERNESEECTEDTDQAEGTESEPKGESFDSGVSSSIGTEPDSVEQQFGPGAARDSQAEPTQPEQAAEAPAEGGPQTNQLETGASSPERSNEVEMDSTVITVSNSSDKSVLQQPSVNTSIGQPLPSTQLYLRQTETLTSNLRMPLTLTSNTQVIGTAGNTYLPALFTTQPAGSGPKPFLFSLPQPLAGQQTQFVTVSQPGLSTFTAQLPAPQPLASSAGHSTASGQGEKKPYECTLCNKTFTAKQNYVKHMFVHTGEKPHQCSICWRSFSLKDYLIKHMVTHTGVRAYQCSICNKRFTQKSSLNVHMRLHRGEKSYECYICKKKFSHKTLLERHVALHSASNGTPPAGTPPGARAGPPGVVACTEGTTYVCSVCPAKFDQIEQFNDHMRMHVSDG

SEQ ID NO: 22079 - protein, 341 aa, Homo sapiens
VATMVRRVQPDRKQLPLVLLRLLCLLPTGLPVRSVDFNRGTDNITVRQGDTAILRCVVEDKNSKVAWLNRSGIIFAGHDKWSLDPRVELEKRHSLEYSLRIQKVDVYDEGSYTCSVQTQHEPKTSQVYLIVQVPPKISNISSDVTVNEGSNVTLVCMANGRPEPVITWRHLTPTGREFEGEEEYLEILGITREQSGKYECKAANEVSSADVKQVKVTVNYPPTITESKSNEATTGRQASLKCEASAVPAPDFEWYRDDTRINSANGLEIKSTEGQSSLTVTNVTEEHYGNYTCVAANKLGVTNASLVLFRPGSVRGINGSISLAVPLWLLAASLLCLLSKC

SEQ ID NO: 22080 - protein, 108 aa, Homo sapiens
LQCCPDAFYITVKRLLLWLLPGLAGLAVHQINLQTPPLYFVLCRSGHTCISDCLALTTLKQPTNFFSDLFPRLLMILIPCLNKSVFSFWMCSLTPSYHHTFCSLLLQA

SEQ ID NO: 22081 - protein, 264 aa, Homo sapiens
LQEGRKAPGSGADCGAGPTVCAERGGACCGIALTAECIFFVSDQHSLYPLLEATDNDDIYGAAWIGIFVGICLFCLSVLGIVGIMKSSRKILLAYFILMFIVYAFEVASCITAATQQDFFTPNLFLKQMLERYQNNSPPNNDDQWKNNGVTKTWDRLMLQDNCCGVNGPSDWQKYTSAFRTENNDADYPWPRQCCVMNNLKEPLNLEACKLGVPGFYHNQGCYELISGPMNRHAWGVAWFGFAILCWTFWVLLGTMFYWSRIEY

SEQ ID NO: 22082 - protein, 93 aa, Homo sapiens
LLLTLCLTVVGWATSNYFVGAIQEIPKAKEFMANFHKTLILGKGKTLTNEASTKKVELDNCPSVSPYLRGQSKLIFKPDLTLEEVQEIRLLNV

SEQ ID NO: 22083 - protein, 24 aa, Homo sapiens
LPYSRHTLSSLGLLWPLTSLSSAF

SEQ ID NO: 22084 - protein, 110 aa, Homo sapiens
LPAMEWWASSPLRLWLLLFLLPSAQGRQKESGSKWKVFIDQINRSLENYEPCSSQNCSCYHGVIEEDLTPFRGGISRKMMAEVVRRKLGTHYQITKNRLYRENDCMFPSR

SEQ ID NO: 22085 - protein, 190 aa, Homo sapiens
LPAMEWWASSPLRLWLLLFLLPSAQGRQKESGSKWKVFIDQINRSLENYEPCSSQNCSCYHGVIEEDLTPFRGGISRKMMAEVVRRKLGTHYQITKNRLYRENDCMFPSRCSGVEHFILEVIGRLPDMEMVINVRDYPQVPKWMEPAIPVFSFSKTCFISCVASGQRPHLCCISHGLASFLESVWFHCLS

SEQ ID NO: 22086 - protein, 166 aa, Homo sapiens
LPAMEWWASSPLRLWLLLFLLPSAQGRQKESGSKWKVFIDQINRSLENYEPCSSQNCSCYHGVIEEDLTPFRGGISRKMMAEVVRRKLGTHYQITKNRLYRENDCMFPSRCSGVEHFILEVIGRLPDMEMVINVRDYPQVPKWMEPAIPVFSFSKARLWKIGKIYL

SEQ ID NO: 22087 - protein, 22 aa, Homo sapiens
LGQMHGFSPRTVTLSRGTSART

SEQ ID NO: 22088 - protein, 148 aa, Homo sapiens [sequence omitted]

SEQ ID NO: 22089 - protein, 441 aa, Homo sapiens
LEAPRLAHSARPSAGAGALAATLLIWGQSRNPVTRLRPNPRPRPPAAAKASSPAPGARATPVARAFQSRLQQTPSPEPSNCEGLMEKYVAAMVLSAAGDALGYYNGKWEFLQDGEKIHRQLAQLGGLDALDVGRWRVSDDTVMHLATAEALVEAGKAPKLTQLYYLLAKHYQDCMEDMDGRAPGGASVHNAMQLKPGKPNGWRIPFNSHEGGCGAAMRAMCIGLRFPHHSQLDTLIQVSIESGRMTHHHPTGYLGALASALFTAYAVNSRPPLQWGKGLMELLPEAKKYIVQSGYFVEENLQHWSYFQTKWENYLKLRGILDGESAPTFPESFGVKERDQFYTSLSYSGWGGSSGHDAPMIAYDAVLAAGDSWKELAHRAFFHGGDSDSTAAIAGCWWGVMYGFKGVSPSNYEKLEYRNRLEETARALYSLGSKEDTVISL

SEQ ID NO: 22090 - protein, 74 aa, Homo sapiens
LLIWGQSRNPVTRLRPNPRPRPPAAAKASSPAPGARATPVARAFQSRLQQVSRSRPSAPRSPPPPLALSECGRP

SEQ ID NO: 22091 - protein, 72 aa, Homo sapiens
LLIWGQSRNPVTRLRPNPRPRPPAAAKASSPAPGARATPVARAFQSRLQQGLSSLHSMANSSAAAEALLEAS

SEQ ID NO: 22092 - protein, 60 aa, Homo sapiens
LLIWGQSRNPVTRLRPNPRPRPPAAAKASSPAPGARATPVARAFQSRLQQVVPRCTTPCS

SEQ ID NO: 22093 - protein, 454 aa, Homo sapiens
LSFQAGSGVLSSRWMHKSSSIWGDAPPTPQPKCADFQSANLFEGTDLKVQFLLFVPSNPSCGQLVEGSSDLQNSGFNATLGTKLIIHGFRVLGTKPSWIDTFIRTLLRATNANVIAVDWIYGSTGVYFSAVKNVIKLSLEISLFLNKLLVLGVSESSIHIIGVSLGAHVGGMVGQLFGGQLGQITGLDPAGPEYTRASVEERLDAGDALFVEAIHTDTDNLGIRIPVGHVDYFVNGGQDQPGCPTFFYAGYSYLICDHMRAVHLYISALENSCPLMAFPCASYKAFLAGRCLDCFNPFLLSCPRIGLVEQGGVKIEPLPKEVKVYLLTTSSAPYCMHHSLVEFHLKELRNKDTNIEVTFLSSNITSSSKITIPKQQRYGKGIIAHATPQCQINQVKFKFQSSNRVWKKDRTTIIGKFCTALLPVNDREKMVCLPEPVNLQASVTVSCDLKIACV

SEQ ID NO: 22094 - protein, 27 aa, Homo sapiens
MGLVLQRVRKWSLLAALLQALAPCPAP

SEQ ID NO: 22095 - protein, 12 aa, Homo sapiens
MVIIQDYSTLQH

SEQ ID NO: 22096 - protein, 17 aa, Homo sapiens
LLLEQEMSDGQKQDDQI

SEQ ID NO: 22097 - protein, 45 aa, Homo sapiens
LVLLAGKNQKGAQTQTEEEMTRYVQELQKHQETAEKTKRVSTKEI

SEQ ID NO: 22098 - protein, 402 aa, Homo sapiens
VRREGFGGARTPAGSPEQGSEGGGAGAAGAAAAEGGGEWGGAGGAGRRGRRGLKGRRGEVAFPPRLAIGGAPTSAYSSLPPSCPAPPGDLDQTTMWKRWLALALALVAVAWVRAEEELRSKSKICANVFCGAGRECAVTEKGEPTCLCIEQCKPHKRPVCGSNGKTYLNHCELHRDACLTGSKIQVDYDGHCKEKKSVSPSASPVVCYQSNRDELRRRIIQWLEAEIIPDGWFSKGSNYSEILDKYFKNFDNGDSRLDSSEFLKFVEQNETAINITTYPDQENNKLLRGLCVDALIELSDENADWKLSFQEFLKCLNPSFNPPEKKCALEDETYADGAETEVDCNRCVCACGNWVCTAMTCDGKNQKGAQTQTEEEMTRYVQELQKHQETAEKTKRVSTKEI

SEQ ID NO: 22099 - protein, 219 aa, Homo sapiens
LAIGGAPTSAYSSLPPSCPAPPGDLDQTTMWKRWLALALALVAVAWVRAEEELRSKSKICANVFCGAGRECAVTEKGEPTCLCIEQCKPHKRPVCGSNGKTYLNHCELHRDACLTGSKIQVDYDGHCKEKKSVSPSASPGECLFFLLCASQGGHSFHDRNFVFHNPCQAHKIFYASELCPRTGHSSTQLRKAAKLHLCMCLPIEAAGWVRMLAVFSHFS

SEQ ID NO: 22100 - protein, 24 aa, Homo sapiens
LSLQDRKEKLIQEGKLDRTFHLSY

SEQ ID NO: 22101 - protein, 109 aa, Homo sapiens
MAELKYISGFGNECSSEDPRCPGSLPEGQNNPQVCPYNLYAEQLSGSAFTCPRSTNKRSWLYRILPSVSHKPFESIDEGQVTHNWDEVDPDPNQVTWSCELKLIIYPKP

SEQ ID NO: 22102 - protein, 27 aa, Homo sapiens
MASLDRVKVLVLGDSEIKKLRKNPQGT

SEQ ID NO: 22103 - protein, 163 aa, Homo sapiens
LLKMADPDVLTEVPAALKRLAKYVIRGFYGIEHALALDILIRNSCVKEEDMLELLKFDRKQLRSVLNNLKGDKFIKCRMRVETAADGKTTRHNYYFINYRTLVNVVKYKLDHMRRRIETDERDSTNRASFKCPVCSSTFTDLEANQLFDPMTGEVYPVCESLK

SEQ ID NO: 22104 - protein, 442 aa, Homo sapiens
LLKMADPDVLTEVPAALKRLAKYVIRGFYGIEHALALDILIRNSCVKEEDMLELLKFDRKQLRSVLNNLKGDKFIKCRMRVETAADGKTTRHNYYFINYRTLVNVVKYKLDHMRRRIETDERDSTNRASFKCPVCSSTFTDLEANQLFDPMTGTFRCTFCHTEVEEDESAMPKKDARTLLARFNEQIEPIYALLRETEDVNLAYEILEPEPTEIPALKQSKDHAATTAGAASLAGGHHREAWATKGPSYEDLYTQNVVINMDDQEDLHRASLEGKSAKERPIWLRESTVQGAYGSEDMKEGGIDMDAFQEREEGHAGPDDNEEVMRALLIHEKKTSSAMAGSVGAAAPVTAANGSDSESETSESDDDSPPRPAAVAVHKREEDEEEDDEFEEVADDPIVMVAGRPFSYSEVSQRPELVAQMTPEEKEAYIAMGQRMFEDLFE

SEQ ID NO: 22105 - protein, 21 aa, Homo sapiens
LSSVLLLLYPLSLLSCPLLLS

SEQ ID NO: 22106 - protein, 57 aa, Homo sapiens
MDPQCTMGLSNILFVMAFLLSGKNLSALLSPGILLSPDESDHSKPRPETWWVLLTFY

SEQ ID NO: 22107 - protein, 55 aa, Homo sapiens
MGLSNILFVMAFLLSGKNLSALLSPGILLSPDESDHSKPRPETWCCSSEDSSLFQ

SEQ ID NO: 22108 - protein, 104 aa, Homo sapiens
LKSRSEQWGQLPHTNCVVIRDPNTKHSRGFGFVTYALMEEVDAAMNARPHKEDGRVVEPKRAVSREDSQRLGAHLTLKKIFVGGIKEDTEEHHLRDYFEEYGKN

SEQ ID NO: 22109 - protein, 17 aa, Homo sapiens
VAMGSLSGLRLAAGWFM

SEQ ID NO: 22110 - protein, 143 aa, Homo sapiens
VAMGSLSGLRLAAGSCFRLCERDVSSSLRLTRSSDLKRINGFCTKPQESPGAPSRTYNRVPLHKPTDWQKKILIWSGRFKKEDEIPETVSLEMLDAAKNKMRVKISYLMIALTVVGCIFMVIEGKKVRRGFFSIQYVCSPPRT

SEQ ID NO: 22111 - protein, 156 aa, Homo sapiens
VAMGSLSGLRLAAGSCFRLCERDVSSSLRLTRSSDLKRINGFCTKPQESPGAPSRTYNRVPLHKPTDWQKKILIWSGRFKKEDEIPETVSLEMLDAAKNKMRVKISYLMIALTVVGCIFMVIEGKKAAQRHETLTSLNLEKKARLKEEAAMKAKTE

SEQ ID NO: 22112 - protein, 25 aa, Homo sapiens
LKIQELCYNVPVLKRMWYEDPFHKV

SEQ ID NO: 22113 - protein, 42 aa, Homo sapiens
LRPPSRGAAGQPQRVTLALAVGRMRRWGGGRGMTLPFLGPLC

SEQ ID NO: 22114 - protein, 459 aa, Homo sapiens
LRPAVASRATRRHGLSLEQRRGEAAAAGARARAWAGGLLEKPGGGGGGAARGGPGSRAGIRAPLAGAAALLAAGVRSGPGLEHLGSHPELGAPGLRLLQLGHRAARAVGAHRLPALLRVHVAPGQERLIHGGQMLNGLAGPTVMNAAPFLSTTWFSADERATATAIASMLSYLGGACAFLVGPLVVPAPNGTSPLLAAESSRAHIKDRIEAVLYAEFGVVCLIFSATLAYFPPRPPLPPSVAAASQRLSYRRSVCRLLSNFRFLMIALAYAIPLGVFAGWSGVLDLILTPAHVSQVDAGWIGFWSIVGGCVVGIAMARFADFIRGMLKLILLLLFSGATLSSTWFTLTCLNSITHLPLTTVTLYASCILLGVFLNSSVPIFFELFVETVYPVPEGITCGVVTFLSNMFMGVLLFFLTFYHTELSWFNWCLPGSCLLSLLLILCFRESYDRLYLDVVVSV

SEQ ID NO: 22115 - protein, 85 aa, Homo sapiens
MVLAGPLAVSLLLPSLTLLVSHLSSSQDVSSEPSSEQQLCALSKHPTVAFEDLQPWVSNFTYPGARDFSQLALDPSGNQLIVGAR

SEQ ID NO: 22116 - protein, 525 aa, Homo sapiens
VGSAAGMARAGPAWLLLAIWVVLPSWLSSAKVSSLIERISDPKDLKKLLRTRNNVLVLYSKSEVAAENHLRLLSTVAQAVKGQGTICWVDCGDAESRKLCKKMKVDLSPKDKKVELFHYQDGAFHTEYNRAVTFKSIVAFLKDPKGPPLWEEDPGAKDVVHLDSEKDFRRLLKKEEKPLLIMFYAPWCSMCKRMMPHFQKAATQLRGHAVLAGMNVYSSEFENIKEEYSVRGFPTICYFEKGRFLFQYDNYGSTAEDIVEWLKNPQPPQPQVPETPWADEGGSVYHLTDEDFDQFVKEHSSVLVMFHAPWCGHCKKMKPEFEKAAEALHGEADSSGVLAAVDATVNKALAERFHISEFPTLKYFKNGEKYAVPVLRTKKKFLEWMQNPEAPPPPEPTWEEQQTSVLHLVGDNFRETLKKKKHTLVMFYAPWCPHCKKVIPHFTATADAFKDDRKIACAAVDCVKDKNQDLCQQEAVKGYPTFHYYHYGKFAEKYDSDRTELGFTNYIRALREGDHERLGKKKEEL

SEQ ID NO: 22117 - protein, 1887 aa, Homo sapiens
VAPGCLCCSSEQLQELPSRELQDAFPVPLAQLPQQTTEKTVTMGDVKLVASSHISKTSLSVDPSRVDSMPLTEAPAFILPPRNLCIKEGATAKFEGRVRGYPEPQVTWHRNGQPITSGGRFLLDCGIRGTFSLVIHAVHEEDRGKYTCEATNGSGARQVTVELTVEGSFAKQLGQPVVSKTLGDRFSAPAVETRPSIWGECPPKFATKLGRVVVKEGQMGRFSCKITGRPQPQVTWLKGNVPLQPSARVSVSEKNGMQVLEIHGVNQDDVGVYTCLVVNGSGKASMSAELSIQGLDSANRSFVRETKATNSDVRKEVTNVISKESKLDSLEAAAKSKNCSSPQRGGSPPWAANSQPQPPRESKLESCKDSPRTAPQTPVLQKTSSSITLQAARVQPEPRAPGLGVLSPSGEERKRPAPPRPATFPTRQPGLGSQDVVSKAANRRIPMEGQRDSAFPKFESKPQSQEVKENQTVKFRCEGLAVMEVAPSFSSVLKDCAVIEGQDFVLQCSVRGTPVPRITWLLNGQPIQYARSTCEAGVAELHIQDALPEDHGTYTCLAENALGQVSCSAWVTVHEKKSSRKSEYLLPVAPSKPTAPIFLQGLSDLKVMDGSQVTMTVQVSGNPPPEVIWLHNGNEIQESEDFHFEQRGTQHSLCIQEVFPEDTGTYTCEAWNSAGEVRTQAVLTVQEPHDGTQPWFISKPRSVTASLGQSVLISCAIAGDPFPTVHWLRDGKALCKDTGHFEVLQNEDVFTLVLKKVQPWHAGQYEILLKNRVGECSCQVSLMLQNSSARALPRGREPASCEDLCGGGVGADGGGSDRYGSLRPGWPARGQGWLEEEDGEDVRGVLKRRVETRQHTEEAIRQQEVEQLDFRDLLGKKVSTKTLSEDDLKEIPAEQMDFRANLQRQVKPKTVSEEERKVHSPQQVDFRSVLAKKGTSKTPVPEKVPPPKPATPDFRSVLGGKKKLPAENGSSSAETLNAKAVESSKPLSNAQPSGPLKPVGNAKPAETLKPMGNAKPAETLKPMGNAKPDENLKSASKEELKKDVKNDVNCKRGHAGTTDNEKRSESQGTAPAFKQKLQDVHVAEGKKLLLQCQVSSDPPATIIWTLNGKTLKTTKFIILSQEGSLCSVSIEKALPEDRGLYKCVAKNDAGQAECSCQVTVDDAPASENTKAPEMKSRRPKSSLPPVLGTESDATVKKKPAPKTPPKAAMPPQIIQFPEDQKVRAGESVELFGKVTGTQPITCTWMKFRKQIQESEHMKVENSENGSKLTILAARQEHCGCYTLLVENKLGSRQAQVNLTVVDKPDPPAGTPCASDIRSSSLTLSWYGSSYDGGSAVQSYSIEIWDSANKTWKELATCRSTSFNVQDLLPDHEYKFRVRAINVYGTSEPSQESELTTVGEKPEEPKDEVEVSDDDEKEPEVDYRTVTINTEQKVSDFYDIEERLGSGKFGQVFRLVEKKTRKVWAGKFFKAYSAKEKENIRQEISIMNCLHHPKLVQCVDAFEEKANIVMVLEIVSGGELFERIIDEDFELTERECIKYMRQISEGVEYIHKQGIVHLDLKPENIMCVNKTGTRIKLIDFGLARRLENAGSLKVLFGTPEFVAPEVINYEPIGYATDMWSIGVICYILVSGLSPFMGDNDNETLANVTSATWDFDDEAFDEISDDAKDFISNLLKKDMKNRLDCTQCLQHPWLMKDTKNMEAKKLSKDRMKKYMARRKWQKTGNAVRAIGRLSSMAMISGLSGRKSSTGSPTSPLNAEKLESEEDVSQAFLEAVAEEKPHVKPYFSKTIRDLEVVEGSAARFDCKIEGYPDPEVVWFKDDQSIRESRHFQIDYDEDGNCSLIISDVCGDDDAKYTCKAVNSLGEATCTAELIVETMEEGEGEGEEEEE

SEQ ID NO: 22118 - protein, 1956 aa, Homo sapiens
VAPGCLCCSSEQLQELPSRELQDAFPVPLAQLPQQTTEKTVTMGDVKLVASSHISKTSLSVDPSRVDSMPLTEAPAFILPPRNLCIKEGATAKFEGRVRGYPEPQVTWHRNGQPITSGGRFLLDCGIRGTFSLVIHAVHEEDRGKYTCEATNGSGARQVTVELTVEGSFAKQLGQPVVSKTLGDRFSAPAVETRPSIWGECPPKFATKLGRVVVKEGQMGRFSCKITGRPQPQVTWLKGNVPLQPSARVSVSEKNGMQVLEIHGVNQDDVGVYTCLVVNGSGKASMSAELSIQGLDSANRSFVRETKATNSDVRKEVTNVISKESKLDSLEAAAKSKNCSSPQRGGSPPWAANSQPQPPRESKLESCKDSPRTAPQTPVLQKTSSSITLQAARVQPEPRAPGLGVLSPSGEERKRPAPPRPATFPTRQPGLGSQDVVSKAANRRIPMEGQRDSAFPKFESKPQSQEVKENQTVKFRCEVSGIPKPEVAWFLEGTPVRRQEGSIEVYEDAGSHYLCLLKARTRDSGTYSCTASNAQGQLSCSWTLQVERLAVMEVAPSFSSVLKDCAVIEGQDFVLQCSVRGTPVPRITWLLNGQPIQYARSTCEAGVAELHIQDALPEDHGTYTCLAENALGQVSCSAWVTVHEKKSSRKSEYLLPVAPSKPTAPIFLQGLSDLKVMDGSQVTMTVQVSGNPPPEVIWLHNGNEIQESEDFHFEQRGTQHSLCIQEVFPEDTGTYTCEAWNSAGEVRTQAVLTVQEPHDGTQPWFISKPRSVTASLGQSVLISCAIAGDPFPTVHWLRDGKALCKDTGHFEVLQNEDVFTLVLKKVQPWHAGQYEILLKNRVGECSCQVSLMLQNSSARALPRGREPASCEDLCGGGVGADGGGSDRYGSLRPGWPARGQGWLEEEDGEDVRGVLKRRVETRQHTEEAIRQQEVEQLDFRDLLGKKVSTKTLSEDDLKEIPAEQMDFRANLQRQVKPKTVSEEERKVHSPQQVDFRSVLAKKGTSKTPVPEKVPPPKPATPDFRSVLGGKKKLPAENGSSSAETLNAKAVESSKPLSNAQPSGPLKPVGNAKPAETLKPMGNAKPAETLKPMGNAKPDENLKSASKEELKKDVKNDVNCKRGHAGTTDNEKRSESQGTAPAFKQKLQDVHVAEGKKLLLQCQVSSDPPATIIWTLNGKTLKTTKFIILSQEGSLCSVSIEKALPEDRGLYKCVAKNDAGQAECSCQVTVDDAPASENTKAPEMKSRRPKSSLPPVLGTESDATVKKKPAPKTPPKAAMPPQIIQFPEDQKVRAGESVELFGKVTGTQPITCTWMKFRKQIQESEHMKVENSENGSKLTILAARQEHCGCYTLLVENKLGSRQAQVNLTVVDKPDPPAGTPCASDIRSSSLTLSWYGSSYDGGSAVQSYSIEIWDSANKTWKELATCRSTSFNVQDLLPDHEYKFRVRAINVYGTSEPSQESELTTVGEKPEEPKDEVEVSDDDEKEPEVDYRTVTINTEQKVSDFYDIEERLGSGKFGQVFRLVEKKTRKVWAGKFFKAYSAKEKENIRQEISIMNCLHHPKLVQCVDAFEEKANIVMVLEIVSGGELFERIIDEDFELTERECIKYMRQISEGVEYIHKQGIVHLDLKPENIMCVNKTGTRIKLIDFGLARRLENAGSLKVLFGTPEFVAPEVINYEPIGYATDMWSIGVICYILVSGLSPFMGDNDNETLANVTSATWDFDDEAFDEISDDAKDFISNLLKKDMKNRLDCTQCLQHPWLMKDTKNMEAKKLSKDRMKKYMARRKWQKTGNAVRAIGRLSSMAMISGLSGRKSSTGSPTSPLNAEKLESEEDVSQAFLEAVAEEKPHVKPYFSKTIRDLEVVEGSAARFDCKIEGYPDPEVVWFKDDQSIRESRHFQIDYDEDGNCSLIISDVCGDDDAKYTCKAVNSLGEATCTAELIVETMEEGEGEGEEEEE

SEQ ID NO: 22119 - protein, 1971 aa, Homo sapiens
LCACGRGAPPSAGAPAPGPPSPRGKDSSKLTETNSGQLKRKNKAFLPSDGARLSLEWGSYDLQSNKVAPGCLCCSSEQLQELPSRELQDAFPVPLAQLPQQTTEKTVTMGDVKLVASSHISKTSLSVDPSRVDSMPLTEAPAFILPPRNLCIKEGATAKFEGRVRGYPEPQVTWHRNGQPITSGGRFLLDCGIRGTFSLVIHAVHEEDRGKYTCEATNGSGARQVTVELTVEGSFAKQLGQPVVSKTLGDRFSAPAVETRPSIWGECPPKFATKLGRVVVKEGQMGRFSCKITGRPQPQVTWLKGNVPLQPSARVSVSEKNGMQVLEIHGVNQDDVGVYTCLVVNGSGKASMSAELSIQGLDSANRSFVRETKATNSDVRKEVTNVISKESKLDSLEAAAKSKNCSSPQRGGSPPWAANSQPQPPRESKLESCKDSPRTAPQTPVLQKTSSSITLQAARVQPEPRAPGLGVLSPSGEERKRPAPPRPATFPTRQPGLGSQDVVSKAANRRIPMEGQRDSAFPKFESKPQSQEVKENQTVKFRCEVSGIPKPEVAWFLEGTPVRRQEGSIEVYEDAGSHYLCLLKARTRDSGTYSCTASNAQGQLSCSWTLQVERLAVMEVAPSFSSVLKDCAVIEGQDFVLQCSVRGTPVPRITWLLNGQPIQYARSTCEAGVAELHIQDALPEDHGTYTCLAENALGQVSCSAWVTVHEKKSSRKSEYLLPVAPSKPTAPIFLQGLSDLKVMDGSQVTMTVQVSGNPPPEVIWLHNGNEIQESEDFHFEQRGTQHSLCIQEVFPEDTGTYTCEAWNSAGEVRTQAVLTVQEPHDGTQPWFISKPRSVTASLGQSVLISCAIAGDPFPTVHWLRDGKALCKDTGHFEVLQNEDVFTLVLKKVQPWHAGQYEILLKNRVGECSCQVSLMLQNSSARALPRGREPASCEDLCGGGVGADGGGSDRYGSLRPGWPARGQGWLEEEDGEDVRGVLKRRVETRQHTEEAIRQQEVEQLDFRDLLGKKVSTKTLSEDDLKEIPAEQMDFRANLQRQVKPKTVSEEERKVHSPQQVDFRSVLAKKGTSKTPVPEKVPPPKPATPDFRSVLGGKKKLPAENGSSSAETLNAKAVESSKPLSNAQPSGPLKPVGNAKPAETLKPMGNAKPAETLKPMGNAKPDENLKSASKEELKKDVKNDVNCKRGHAGTTDNEKRSESQGTAPAFKQKLQDVHVAEGKKLLLQCQVSSDPPATIIWTLNGKTLKTTKFIILSQEGSLCSVSIEKALPEDRGLYKCVAKNDAGQAECSCQVTVDDAPASENTKAPEMKSRRPKSSLPPVLGTESDATVKKKPAPKTPPKAAMPPQIIQFPEDQKVRAGESVELFGKVTGTQPITCTWMKFRKQIQESEHMKVENSENGSKLTILAARQEHCGCYTLLVENKLGSRQAQVNLTVVDKPDPPAGTPCASDIRSSSLTLSWYGSSYDGGSAVQSYSIEIWDSANKTWKELATCRSTSFNVQDLLPDHEYKFRVRAINVYGTSEPSQESELTTVGEKPEEPKDEVEVSDDDEKEPEVDYRTVTINTEQKVSDFYDIEERLGSGKFGQVFRLVEKKTRKVWAGKFFKAYSAKEKENIRQEISIMNCLHHPKLVQCVDAFEEKANIVMVLEIVSGGELFERIIDEDFELTERECIKYMRQISEGVEYIHKQGIVHLDLKPENIMCVNKTGTRIKLIDFGLARRLENAGSLKVLFGTPEFVAPEVINYEPIGYATDMWSIGVICYILNRLDCTQCLQHPWLMKDTKNMEAKKLSKDRMKKYMARRKWQKTGNAVRAIGRLSSMAMISGLSGRKSSTGSPTSPLNAEKLESEEDVSQAFLEAVAEEKPHVKPYFSKTIRDLEVVEGSAARFDCKIEGYPDPEVVWFKDDQSIRESRHFQIDYDEDGNCSLIISDVCGDDDAKYTCKAVNSLGEATCTAELIVETMEEGEGEGEEEEE

SEQ ID NO: 22120 - protein, 51 aa, Homo sapiens
LGKIFVRILISLFSRTYLRKIPRFNADSGYSIHSDSESQVRLNRYNTHYFN

SEQ ID NO: 22121 - protein, 401 aa, Homo sapiens
LECSSVIIAHCSLELLGLRDLLASGTKRLVEGTINPGETCLIIEDVVTSGSSVLETVEVLQKEGLKVTDAIVLLDREQGGKDKLQAHGIRLHSVCTLSKMLEILEQQKKVDAETVGRVKRFIQENVFVAANHNGSPLSIKEAPKELSFGARAELPRIHPVASKLLRLMQKKETNLCLSADVSLARELLQLADALGPSICMLKTHVDILNDFTLDVMKELITLAKCHEFLIFEDRKFADIGNTVKKQYEGGIFKIASWADLVNAHVVPGSGVVKGLQEVGLPLHRGCLLIAEMSSTGSLATGDYTRAAVRMAEEHSEFVVGFISGSRVSMKPEFLHLTPGVQLEAGGDNLGQQYNSPQEVIGKRGSDIIIVGRGIISAADRLEAAEMYRKAAWEAYLSRLGV

SEQ ID NO: 22122 - protein, 15 aa, Homo sapiens
MTCFLSISQLCFLLC

SEQ ID NO: 22123 - protein, 171 aa, Homo sapiens
LLSLHLSALLSSLLTSFSGGIFKIASWADLVNAHVVPGSGVVKGLQEVGLPLHRGCLLIAEMSSTGSLATGDYTRAAVRMAEEHSEFVVGFISGSRVSMKPEFLHLTPGVQLEAGGDNLGQQYNSPQEVIGKRGSDIIIVGRGIISAADRLEAAEMYRKAAWEAYLSRLGV

SEQ ID NO: 22124 - protein, 242 aa, Homo sapiens
MEQAPPDPERQLQPAPLEPLGSPDAGLGAAVGKEAEGAGEESSGVDTMTHNNFWLKKIEISVSEAEKRTGRNAMNMQETYTAYLIETRSVEHTDGQSVLTDSLWRRYSEFELLRSYLLVYYPHIVVPPLPEKRAEFVWHKLSADNMDPDFVERRRIGLENFLLRIASHPILCRDKIFYLFLTQEGNWKETVNETGFQLKRVADRLYGVYKVHGNYGRVFSEWSAIEKEMGDGLQSAGHHMDV

SEQ ID NO: 22125 - protein, 57 aa, Homo sapiens
LLSSPGSSSVGHTAAVPRRCTASPGWGLIQPFICTQHLIVSLLSFYFPFCLLAKTSI

SEQ ID NO: 22126 - protein, 470 aa, Homo sapiens
MTPSLSVCSATNTRRCPSLWAPAAVPADGAVLYSLICAAPAACRHCAWHRGCNRTQTDACLPWPGSCSAGGVRGQHAVEERTADGVHRQAVVLYGAIREAPQRREHRPAGNEVWSGQQEGQSRGQWGTGLVCTGQKGKAGGRVKPQGVGGSGEALAGSCFLQQSMLWAYPGPCHLGSQCPYLPWRDRPHQPSVPCSCAISNVKKVSLELGGKSPLIIFADCDLNKAVQMGMSSVFFNKGENCIAAGRLFVEDSIHDEFVRRVVEEVRKMKVGNPLDRDTDHGPQNHHAHLVKLMEYCQHGVKEGATLVCGGNQVPRPGFFFEPTVFTDVEDHMFIAKEESFGPVMIISRFADGDLDAVLSRANATEFGLASGVFTRDINKALYVSDKLQAGTVFVNTYNKTDVAAPFGGFKQSGFGKDLGNLLLPVGLLSFIHSTNICSKPLRARSYLRCRDVALNMMAVRVRFLLGGNL

SEQ ID NO: 22127 - protein, 241 aa, Homo sapiens
LPPEEGGPRSGGCVHCSRQGWKGRPPGTLIHGDKKGGFSIFWADDGLDTGDLLLQKECEVLPDDTVSTLYNRFLFPEGIKGMVQAVRLIAEGKAPRLPQPEEGATYEGIQKKETAKINWDQPAEAIHNWIRGNDKVPGAWTEACEQKLTFFNSTLNTSGLVPEGDALPIPGAHRPGVVTKAGLILFGNDDKMVRARLWVTCLLKATHAPVLGLRPHRKTLGSSGENGKNQTQEGTLTLICP

SEQ ID NO: 22128 - protein, 25 aa, Homo sapiens
MMLWLWAVGCPQLRLGFLPASSCWS

SEQ ID NO: 22129 - protein, 426 aa, Homo sapiens
LSCSGWGGWFTGVLCAAPLIFPWESQVQGKEDSGPGHTAHWAALTPPGLAAGGMDTLEEVTWANGSTALPPPLAPNISVPHRCLLLLYEDIGTSRVRYWDLLLLIPNVLFLIFLLWKLPSARAKIRITSSPIFITFYILVFVVALVGIARAVVSMTVSTSNAATVADKILWEITRFFLLAIELSVIILGLAFGHLESKSSIKRVLAITTVLSLAYSVTQGTLEILYPDAHLSAEDFNIYGHGGRQFWLVSSCFFFLVYSLVVILPKTPLKERISLPSRRSFYVYAGILALLNLLQGLGSVLLCFDIIEGLCCVDATTFLYFSFFAPLIYVAFLRGFFGSEPKILFSYKCQVDETEEPDVHLPQPYAVARREGLEAAGAAGASAASYSSTQFDSAGGVAYLDDIASMPCHTGSINSTDSERWKAINA

SEQ ID NO: 22130 - protein, 551 aa, Homo sapiens
VTGRLAGAWAACAVGSCMVSLASPDSDEEDEERPARKRRQVERATEDGEEDEEMIESIENLEDLKGHSVREWVSMAGPRLEIHHRFKNFLRTHVDSHGHNVFKERISDMCKENRESLVVNYEDLAAREHVLAYFLPEAPAELLQIFDEAALEVVLAMYPKYDRITNHIHVRISHLPLVEELRSLRQLHLNQLIRTSGVVTSCTGVLPQLSMVKYNCNKCNFVLGPFCQSQNQEVKPGSCPECQSAGPFEVNMEETIYQNYQRIRIQESPGKVAAGRLPRSKDAILLADLVDSCKPGDEIELTGIYHNNYDGSLNTANGFPVFATVILANHVAKKDNKVAVGELTDEDVKMITSLSKDQQIGEKIFASIAPSIYGHEDIKRGLALALFGGEPKNPGGKHKVRGDINVLLCGDPGTAKSQFLKYIEKVSSRAIFTTGQGASAVGLTAYVQRHPVSREWTLEAGALVLADRGVCLIDEFDKMNDQDRTSIHEAMEQQSISISKAGIVTSLQARCTVIAAANPIGRDAGPLRGGQPRQTPPQQQGGGGAGQWQRC

SEQ ID NO: 22131 - protein, 791 aa, Homo sapiens
VTGRLAGAWAACAVGSCMVSLASPDSDEEDEERPARKRRQVERATEDGEEDEEMIESIENLEDLKGHSVREWVSMAGPRLEIHHRFKNFLRTHVDSHGHNVFKERISDMCKENRESLVVNYEDLAAREHVLAYFLPEAPAELLQIFDEAALEVVLAMYPKYDRITNHIHVRISHLPLVEELRSLRQLHLNQLIRTSGVVTSCTGVLPQLSMVKYNCNKCNFVLGPFCQSQNQEVKPGSCPECQSAGPFEVNMEETIYQNYQRIRIQESPGKVAAGRLPRSKDAILLADLVDSCKPGDEIELTGIYHNNYDGSLNTANGFPVFATVILANHVAKKDNKVAVGELTDEDVKMITSLSKDQQIGEKIFASIAPSIYGHEDIKRGLALALFGGEPKNPGGKHKVRGDINVLLCGDPGTAKSQFLKYIEKVSSRAIFTTGQGASAVGLTAYVQRHPVSREWTLEAGALVLADRGVCLIDEFDKMNDQDRTSIHEAMEQQSISISKAGIVTSLQARCTVIAAANPIGGRYDPSLTFSENVDLTEPIISRFDILCVVRDTVDPVQDEMLARFVVGSHVRHHPSNKEEEGLANGSAAEPAMPNTYGVEPLPQEVLKKYIIYAKERVHPKLNQMDQDKVAKMYSDLRKESMATGSIPITVRHIESMIRMAEAHARIHLRDYVIEDDVNMAIRVMLESFIDTQKFSVMRSMRKTFARYLSFRRDNNELLLFILKQLVAEQVTYQRNRFGAQQDTIEVPEKDLVDKARQINIHNLSAFYDSELFRMNKFSHDLKRKMILQQF

SEQ ID NO: 22132 - protein, 31 aa, Homo sapiens
LRPYAIHKDSLGFWFGVVSALCALWTQNQST

SEQ ID NO: 22133 - protein, 366 aa, Homo sapiens
LEVTVGRVSLSRGSSCLKPLGARDGGILLRSEAIWTFWACGVIVELIKSKKMAGRAVLLAGPPGTGKTALALAIAQELGSKVPFCPMVGSEVYSTEIKKTEVLMENFRRAIGLRIKETKEVYEGEVTELTPCETENPMGGYGKTISHVIIGLKTAKGTKQLKLDPSIFESLQKERVEAGDVIYIEANSGAVKRQGRCDTYATEFDLEAEEYVPLPKGDVHKKKEIIQDVTLHDLDVANARPQGGQDILSMMGQLMKPKKTEITDKLRGEINKVVNKYIDQGIAELVPGVLFVDEVHMLDIECFTYLHRALESSIAPIVIFASNRGNCVIRGTEDITSPHGIPLDLLDRVMIIRTMLYTPQEMKQVP

SEQ ID NO: 22134 - protein, 235 aa, Homo sapiens
LGSSNSPTSASQSAGITGGFRVDLPIKSARYRGQYNTYPIKLFYTSNIPIILQSALVSNLYVISQMLSARFSGNLLVSLLGTWSDTSSGGPARAYPVGGLCYYLSPPESFGSVLEDPVHAVVYIVFMLGSCAFFSKTWIEVSGSSAKDVAKQLKEQQMVMRGHRETSMVHELNRYIPTAAAFGGLCIGALSVLADFLGAIGSGTGILLAVTIIYQYFEIFVKEQSEVGSMGALLF

SEQ ID NO: 22135 - protein, 10 aa, Homo sapiens
MVTQAPGALS

SEQ ID NO: 22136 - protein, 612 aa, Homo sapiens
LLFPVMEAPAAGLFLLLLLGTWAPAPGSASSEAPPLINEDVKRTVDLSSHLAKVTAEVVLAHLGGGSTSRATSFLLALEPELEARLAHLGVQVKGEDEEENNLEVRETKIKGKSGRFFTVKLPVALDPGAKISVIVETVYTHVLHPYPTQITQSEKQFVVFEGNHYFYSPYPTKTQTMRVKLASRNVESYTKLGNPTRSEDLLDYGPFRDVPAYSQDTFKVHYENNSPFLTITSMTRVIEVSHWGNIAVEENVDLKHTGAVLKGPFSRYDYQRQPDSGISSIRSFKTILPAAAQDVYYRDEIGNVSTSHLLILDDSVEMEIRPRFPLFGGWKTHYIVGYNLPSYEYLYNLGDQYALKMRFVDHVFDEQVIDSLTVKIILPEGAKNIEIDSPYEISRAPDELHYTYLDTFGRPVIVAYKKNLVEQHIQDIVVHYTFNKVLMLQEPLLVVAAFYILFFTVIIYVRLDFSITKDPAAEARMKVACITEQVLTLVNKRIGLYRHFDETVNRYKQSRDISTLNSGKKSLETEHKALTSEIALLQSRLKTEGSDLCDRVSEMQKLDAQVKELVLKSAVEAERLVAGKLKKDTYIENEKLISGKRQELVTKIDHILDAL

SEQ ID NO: 22137 - protein, 552 aa, Homo sapiens
LSLTYPAFGFRDRLAAVNAELGRRGARFLGLGVKGEDEEENNLEVRETKIKGKSGRFFTVKLPVALDPGAKISVIVETVYTHVLHPYPTQITQSEKQFVVFEGNHYFYSPYPTKTQTMRVKLASRNVESYTKLGNPTRSEDLLDYGPFRDVPAYSQDTFKVHYENNSPFLTITSMTRVIEVSHWGNIAVEENVDLKHTGAVLKGPFSRYDYQRQPDSGISSIRSFKTILPAAAQDVYYRDEIGNVSTSHLLILDDSVEMEIRPRFPLFGGWKTHYIVGYNLPSYEYLYNLGDQYALKMRFVDHVFDEQVIDSLTVKIILPEGAKNIEIDSPYEISRAPDELHYTYLDTFGRPVIVAYKKNLVEQHIQDIVVHYTFNKVLMLQEPLLVVAAFYILFFTVIIYVRLDFSITKDPAAEARMKVACITEQVLTLVNKRIGLYRHFDETVNRYKQSRDISTLNSGKKSLETEHKALTSEIALLQSRLKTEGSDLCDRVSEMQKLDAQVKELVLKSAVEAERLVAGKLKKDTYIENEKLISGKRQELVTKIDHILDAL

SEQ ID NO: 22138 - protein, 159 aa, Homo sapiens
LLFPVMEAPAAGLFLLLLLGTWAPAPGSASSEAPPLINEDVKRTVDLSSHLAKVTAEVVLAHLGGGSTSRATSFLLALEPELEARLAHLGVQVKGEDEEENNLEVRETKIKGKRQGLLPRLHYCGAMLTHCNLHLQGSNRPSPSASQIGGTRDPAREEL

SEQ ID NO: 22139 - protein, 126 aa, Homo sapiens
LLFPVMEAPAAGLFLLLLLGTWAPAPGSASSEAPPLINEDVKRTVDLSSHLAKVTAEVVLAHLGGGSTSRATSFLLALEPELEARLAHLGVQVKGEDEEENNLEVRETKIKGKRVCCPGSITVVPC

SEQ ID NO: 22140 - protein, 114 aa, Homo sapiens
LLFPVMEAPAAGLFLLLLLGTWAPAPGSASSEAPPLINEDVKRTVDLSSHLAKVTAEVVLAHLGGGSTSRATSFLLALEPELEARLAHLGVQVKGEDEEENNLEVRETKIKGKR

SEQ ID NO: 22141 - protein, 10 aa, Homo sapiens
LCWLLLWALR

SEQ ID NO: 22142 - protein, 51 aa, Homo sapiens
LSLVFLVGFVHIFCYCVDPFIFIVECIQQVANWLPVSYFDLHCHFEGRRIN

SEQ ID NO: 22143 - protein, 81 aa, Homo sapiens
MKMMVLLCLWNRNMKRNSDEEGSQEKGGDDSQQKFIAHVPVPSQQEIEEALVRRKKMELLQKYASETLQAQSEEARRLLGY

SEQ ID NO: 22144 - protein, 13 aa, Homo sapiens
MFSLVEVLCIMLC

SEQ ID NO: 22145 - protein, 204 aa, Homo sapiens
LRAVFPRPASESPPLRARSDAEDLTAAMSSNECFKCGRSGHWARECPTGGGRGRGMRSRGRGGFTSDRGFQFVSSSLPDICYRCGESGHLAKDCDLQEDACYNCGRGGHIAKDCKEPKREREQCCYNCGKPGHLARDCDHADEQKCYSCGEFGHIQKDCTKVKCYRCGETGHVAINCSKTSEVNCYRCGESGHLARECTIEATA

SEQ ID NO: 22146 - protein, 60 aa, Homo sapiens
LFLLKTGFQFVSSSLPDICYRCGESGHLAKDCDLQEDGKYLTLPFHTPLELGEVSTCNCV

SEQ ID NO: 22147 - protein, 24 aa, Homo sapiens
LKQPRRRLYWLSALATAVVMVTGP

SEQ ID NO: 22148 - protein, 12 aa, Homo sapiens
VGFSVFLFFYPK

SEQ ID NO: 22149 - protein, 264 aa, Homo sapiens
LPPGPRPGRGRSRLEPPRAPSPPAPPRPLAFLFPARPPGFRAPPATNPLATMSVELEEALPVTTAEGMAKKVTKAGGSAALSPSKKRKNSKKKNQPGKYSQLVVETIRRLGERNGSSLAKIYTEAKKVPWFDQQNGRTYLKYSIKALVQNDTLLQVKGTGANGSFKLNRKKLEGGGERRGAPAAATAPAPTAHKAKKAAPGAAGSRRADKKPARGQKPEQRSHKKGAGAKKDKGGKAKKTAAAGGKKVKKAAKPSVPKVPKGRK

SEQ ID NO: 22150 - protein, 91 aa, Homo sapiens
LVIGAKKKKKKKNQKARAAQWLPEVPGPQCQGAESAADMQQMRRIMSGVKVKHPAQDSAARKWPSALYTTGAGIHTEKWRPRRENSSMTAL

SEQ ID NO: 22151 - protein, 1204 aa, Homo sapiens
VRRLLRQTLRRVGGARAVREAVMRAVLTWRDKAEHCINDIAFKPDGTQLILAAGSRLLVYDTSDGTLLQPLKGHKDTVYCVAYAKDGKRFASGSADKSVIIWTSKLEGILKYTHNDAIQCVSYNPITHQLASCSSSDFGLWSPEQKSVSKHKSSSKIICCSWTNDGQYLALGMFNGIISIRNKNGEEKVKIERPGGSLSPIWSICWNPSREERNDILAVADWGQKVSFYQLSGKQIGKDRALNFDPCCISYFTKGEYILLGGSDKQVSLFTKDGVRLGTVGEQNSWVWTCQAKPDSNYVVVGCQDGTISFYQLIFSTVHGLYKDRYAYRDSMTDVIVQHLITEQKVRIKCKELVKKIAIYRNRLAIQLPEKILIYELYSEDLSDMHYRVKEKIIKKFECNLLVVCANHIILCQEKRLQCLSFSGVKEREWQMESLIRYIKVIGGPPGREGLLVGLKNGQILKIFVDNLFAIVLLKQATAVRCLDMSASRKKLAVVDENDTCLVYDIDTKELLFQEPNANSVAWNTQCEDMLCFSGGGYLNIKASTFPVHRQKLQGFVVGYNGSKIFCLHVFSISAVEVPQSAPMYQYLDRKLFKEAYQIACLGVTDTDWRELAMEALEGLDFETAKKAFIRVQDLRYLELISSIEERKKRGETNNDLFLADVFSYQGKFHEAAKLYKRSGHENLALEMYTDLCMFEYAKDFLGSGDPKETKMLITKQADWARNIKEPKAAVEMYISAGEHVKAIEICGDHGWVDMLIDIARKLDKAEREPLLLCATYLKKLDSPGYAAETYLKMGDLKSLVQLHVETQRWDEAFALGEKHPEFKDDIYMPYAQWLAENDRFEEAQKAFHKAGRQREAVQVLEQLTNNAVAESRFNDAAYYYWMLSMQCLDIAQDPAQKDTMLGKFYHFQRLAELYHGYHAIHRHTEDPFSVHRPETLFNISRFLLHSLPKDTPSGISKVKILFTLAKQSKALGAYRLARHAYDKLRGLYIPARFQKSIELGTLTIRAKPFHDSEELVPLCYRCSTNNPLLNNLGNVCINCRQPFIFSASSYDVLHLVEFYLEEGITDEEAISLIDLEVLRPKRDDRQLEIANNSSQILRLVETKDSIGDEDPFTAKLSFEQGGSEFVPVVVSRLVLRSMSRRDVLIKRWPPPLRWQYFRSLLPDASITMCPSCFQMFHSEDYELLVLQHGCCPYCRRCKDDPGP

SEQ ID NO: 22152 - protein, 1314 aa, Homo sapiens
VRRLLRQTLRRVGGARAVREAVMRAVLTWRDKAEHCINDIAFKPDGTQLILAAGSRLLVYDTSDGTLLQPLKGHKDTVYCVAYAKDGKRFASGSADKSVIIWTSKLEGILKYTSWSVMSSLHLHLPFLGLHKTVRVTATDKAPKGQGGRIDCLRPSVQNQPGQKHNDAIQCVSYNPITHQLASCSSSDFGLWSPEQKSVSKHKSSSKIICCSWTNDGQYLALGMFNGIISIRNKNGEEKVKIERPGGSLSPIWSICWNPSSRWESFWMNRENEDAEDVIVNRYIQEIPSTLKSAVYSSQGSEAEEEEPEEEDDSPRDDNLEERNDILAVADWGQKVSFYQLSGKQIGKDRALNFDPCCISYFTKGEYILLGGSDKQVSLFTKDGVRLGTVGEQNSWVWTCQAKPDSNYVVVGCQDGTISFYQLIFSTVHGLYKDRYAYRDSMTDVIVQHLITEQKVRIKCKELVKKIAIYRNRLAIQLPEKILIYELYSEDLSDMHYRVKEKIIKKFECNLLVVCANHIILCQEKRLQCLSFSGVKEREWQMESLIRYIKVIGGPPGREGLLVGLKNGQILKIFVDNLFAIVLLKQATAVRCLDMSASRKKLAVVDENDTCLVYDIDTKELLFQEPNANSVAWNTQCEDMLCFSGGGYLNIKASTFPVHRQKLQGFVVGYNGSKIFCLHVFSISAVEVPQSAPMYQYLDRKLFKEAYQIACLGVTDTDWRELAMEALEGLDFETAKKAFIRVQDLRYLELISSIEERKKRGETNNDLFLADVFSYQGKFHEAAKLYKRSGHENLALEMYTDLCMFEYAKDFLGSGDPKETKMLITKQADWARNIKEPKAAVEMYISAGEHVKAIEICGDHGWVDMLIDIARKLDKAEREPLLLCATYLKKLDSPGYAAETYLKMGDLKSLVQLHVETQRWDEAFALGEKHPEFKDDIYMPYAQWLAENDRFEEAQKAFHKAGRQREAVQVLEQLTNNAVAESRFNDAAYYYWMLSMQCLDIAQDPAQKDTMLGKFYHFQRLAELYHGYHAIHRHTEDPFSVHRPETLFNISRFLLHSLPKDTPSGISKVKILFTLAKQSKALGAYRLARHAYDKLRGLYIPARFQKSIELGTLTIRAKPFHDSEELVPLCYRCSTNNPLLNNLGNVCINCRQPFIFSASSYDVLHLVEFYLEEGITDEEAISLIDLEVLRPKRDDRQLEIANNSSQILRLVETKDSIGDEDPFTAKLSFEQGGSEFVPVVVSRLVLRSMSRRDVLIKRWPPPLRWQYFRSLLPDASITMCPSCFQMFHSEDYELLVLQHGCCPYCRRCKDDPGP

SEQ ID NO: 22153 - protein, 1256 aa, Homo sapiens
VRRLLRQTLRRVGGARAVREAVMRAVLTWRDKAEHCINDIAFKPDGTQLILAAGSRLLVYDTSDGTLLQPLKGHKDTVYCVAYAKDGKRFASGSADKSVIIWTSKLEGILKYTSWSVMSSLHLHLPFLGLHKTVRVTATDKAPKGQGGRIDCLRPSVQNQPGQKHNDAIQCVSYNPITHQLASCSSSDFGLWSPEQKSVSKHKSSSKIICCSWTNDGQYLALGMFNGIISIRNKNGEEKVKIERPGGSLSPIWSICWNPSREERNDILAVADWGQKVSFYQLSGKQIGKDRALNFDPCCISYFTKGEYILLGGSDKQVSLFTKDGVRLGTVGEQNSWVWTCQAKPDSNYVVVGCQDGTISFYQLIFSTVHGLYKDRYAYRDSMTDVIVQHLITEQKVRIKCKELVKKIAIYRNRLAIQLPEKILIYELYSEDLSDMHYRVKEKIIKKFECNLLVVCANHIILCQEKRLQCLSFSGVKEREWQMESLIRYIKVIGGPPGREGLLVGLKNGQILKIFVDNLFAIVLLKQATAVRCLDMSASRKKLAVVDENDTCLVYDIDTKELLFQEPNANSVAWNTQCEDMLCFSGGGYLNIKASTFPVHRQKLQGFVVGYNGSKIFCLHVFSISAVEVPQSAPMYQYLDRKLFKEAYQIACLGVTDTDWRELAMEALEGLDFETAKKAFIRVQDLRYLELISSIEERKKRGETNNDLFLADVFSYQGKFHEAAKLYKRSGHENLALEMYTDLCMFEYAKDFLGSGDPKETKMLITKQADWARNIKEPKAAVEMYISAGEHVKAIEICGDHGWVDMLIDIARKLDKAEREPLLLCATYLKKLDSPGYAAETYLKMGDLKSLVQLHVETQRWDEAFALGEKHPEFKDDIYMPYAQWLAENDRFEEAQKAFHKAGRQREAVQVLEQLTNNAVAESRFNDAAYYYWMLSMQCLDIAQADPAQKDTMLGKFYHFQRLAELYHGYHAIHRHTEDPFSVHRPETLFNISRFLLHSLPKDTPSGISKVKILFTLAKQSKALGAYRLARHAYDKLRGLYIPARFQKSIELGTLTIRAKPFHDSEELVPLCYRCSTNNPLLNNLGNVCINCRQPFIFSASSYDVLHLVEFYLEEGITDEEAISLIDLEVLRPKRDDRQLEIANNSSQILRLVETKDSIGDEDPFTAKLSFEQGGSEFVPVVVSRLVLRSMSRRDVLIKRWPPPLRWQYFRSLLPDASITMCPSCFQMFHSEDYELLVLQHGCCPYCRRCKDDPGP

SEQ ID NO: 22154 - protein, 1263 aa, Homo sapiens
VRRLLRQTLRRVGGARAVREAVMRAVLTWRDKAEHCINDIAFKPDGTQLILAAGSRLLVYDTSDGTLLQPLKGHKDTVYCVAYAKDGKRFASGSADKSVIIWTSKLEGILKYTHNDAIQCVSYNPITHQLASCSSSDFGLWSPEQKSVSKHKSSSKIICCSWTNDGQYLALGMFNGIISIRNKNGEEKVKIERPGGSLSPIWSICWNPSSRWESFWMNRENEDAEDVIVNRYIQEIPSTLKSAVYSSQGSEAEEEEPEEEDDSPRDDNLEERNDILAVADWGQKVSFYQLSGKQIGKDRALNFDPCCISYFTKGEYILLGGSDKQVSLFTKDGVRLGTVGEQNSWVWTCQAKPDSNYVVVGCQDGTISFYQLIFSTVHGLYKDRYAYRDSMTDVIVQHLITEQKVRIKCKELVKKIAIYRNRLAIQLPEKILIYELYSEDLSDMHYRVKEKIIKKFECNLLVVCANHIILCQEKRLQCLSFSGVKEREWQMESLIRYIKVIGGPPGREGLLVGLKNGQILKIFVDNLFAIVLLKQATAVRCLDMSASRKKLAVVDENDTCLVYDIDTKELLFQEPNANSVAWNTQCEDMLCFSGGGYLNIKASTFPVHRQKLQGFVVGYNGSKIFCLHVFSISAVEVPQSAPMYQYLDRKLFKEAYQIACLGVTDTDWRELAMEALEGLDFETAKKAFIRVQDLRYLELISSIEERKKRGETNNDLFLADVFSYQGKFHEAAKLYKRSGHENLALEMYTDLCMFEYAKDFLGSGDPKETKMLITKQADWARNIKEPKAAVEMYISAGEHVKAIEICGDHGWVDMLIDIARKLDKAEREPLLLCATYLKKLDSPGYAAETYLKMGDLKSLVQLHVETQRWDEAFALGEKHPEFKDDIYMPYAQWLAENDRFEEAQKAFHKAGRQREAVQVLEQLTNNAVAESRFNDAAYYYWMLSMQCLDIAQDPAQKDTMLGKFYHFQRLAELYHGYHAIHRHTEDPFSVHRPETLFNISRFLLHSLPKDTPSGISKVKILFTLAKQSKALGAYRLARHAYDKLRGLYIPARFQKSIELGTLTIRAKPFHDSEELVPLCYRCSTNNPLLNNLGNVCINCRQPFIFSASSYDVLHLVEFYLEEGITDEEAISLIDLEVLRPKRDDRQLEIANNSSQILRLVETKDSIGDEDPFTAKLSFEQGGSEFVPVVVSRLVLRSMSRRDVLIKRWPPPLRWQYFRSLLPDASITMCPSCFQMFHSEDYELLVLQHGCCPYCRRCKDDPGP

SEQ ID NO: 22155 - protein, 1983 aa, Homo sapiens
LRGEADPGPGAGVGGGWRGQEAHRGPGPPPASRRLRAPGSRPRLAPCTRRAAQPAHARMAPRAAGGAPLSARAAAASPPPFQTPPRCPVPLLLLLLLGAARAGALEIQRRFPSPTPTNNFALDGAAGTVYLAAVNRLYQLSGANLSLEAEAAVGPVPDSPLCHAPQLPQASCEHPRRLTDNYNKILQLDPGQGLVVVCGSIYQGFCQLRRRGNISAVAVRFPPAAPPAEPVTVFPSMLNVAANHPNASTVGLVLPPAAGAGGSRLLVGATYTGYGSSFFPRNRSLEDHRFENTPEIAIRSLDTRGDLAKLFTFDLNPSDDNILKIKQGAKEQHKLGFVSAFLHPSDPPPGAQSYAYLALNSEARAGDKESQARSLLARICLPHGAGGDAKKLTESYIQLGLQCAGGAGRGDLYSRLVSVFPARERLFAVFERPQGSPAARAAPAALCAFRFADVRAAIRAARTACFVEPAPDVVAVLDSVVQGTGPACERKLNIQLQPEQLDCGAAHLQHPLSILQPLKATPVFRAPGLTSVAVASVNNYTAVFLGTVNGRLLKINLNESMQVVSRRVVTVAYGEPVHHVMQFDPADSGYLYLMTSHQMARVKVAACNVHSTCGDCVGAADAYCGWCALETRCTLQQDCTNSSQQHFWTSASEGPSRCPAMTVLPSEIDVRQEYPGMILQISGSLPSLSGMEMACDYGNNIRTVARVPGPAFGHQIAYCNLLPRDQFPPFPPNQDHVTVEMSVRVNGRNIVKANFTIYDCSRTAQVYPHTACTSCLSAQWPCFWCSQQHSCVSNQSRCEASPNPTSPQDCPRTLLSPLAPVPTGGSQNILVPLANTAFFQGAALECSFGLEEIFEAVWVNESVVRCDQVVLHTTRKSQVFPLSLQLKGRPARFLDSPEPMTVMVYNCAMGSPDCSQCLGREDLGHLCMWSDGCRLRGPLQPMAGTCPAPEIHAIEPLSGPLDGGTLLTIRGRNLGRRLSDVAHGVWIGGVACEPLPDRYTVSEEIVCVTGPAPGPLSGVVTVNASKEGKSRDRFSYVLPLVHSLEPTMGPKAGGTRITIHGNDLHVGSELQVLVNDTDPCTELMRTDTSIACTMPEGALPAPVPVCVRFERRGCVHGNLTFWYMQNPVITAISPRRSPVSGGRTITVAGERFHMVQNVSMAVHHIGREPTLCKVLNSTLITCPSPGALSNASAPVDFFINGRAYADEVAVAEELLDPEEAQRGSRFRLDYLPNPQFSTAKREKWIKHHPGEPLTLVIHKEQDSLGLQSHEYRVKIGQVSCDIQIVSDRIIHCSVNESLGAAVGQLPITIQVGNFNQTIATLQLGGSETAIIVSIVICSVLLLLSVVALFVFCTKSRRAERYWQKTLLQMEEMESQIREEIRKGFAELQTDMTDLTKELNRSQGIPFLEYKHFVTRTFFPKCSSLYEERYVLPSQTLNSQGSSQAQETHPLLGEWKIPESCRPNMEEGISLFSSLLNNKHFLIVFVHALEQQKDFAVRDRCSLASLLTIALHGKLEYYTSIMKELLVDLIDASAAKNPKLMLRRTESVVEKMLTNWMSICMYSCLRETVGEPFFLLLCAIKQQINKGSIDAITGKARYTLSEEWLLRENIEAKPRNLNVSFQGCGMDSLSVRAMDTDTLTQVKEKILEAFCKNVPYSQWPRAEDVDLEWFASSTQSYILRDLDDTSVVEDGRKKLNTLAHYKIPEGASLAMSLIDKKDNTLGRVKDLDTEKYFHLVLPTDELAEPKKSHRQSHRKKVLPEIYLTRLLSTKGTLQKFLDDLFKAILSIREDKPPLAVKYFFDFLEEQAEKRGISDPDTLHIWKTNSLPLRFWVNILKNPQFVFDIDKTDHIDACLSVIAQAFIDACSISDLQLGKDSPTNKLLYAKEIPEYRKIVQRYYKQIQDMTPLSEQEMNAHLAEESRKYQNEFNTNVAMAEIYKYAKRYRPQIMAALEANPTARRTQLQHKFEQVVALMEDNIYECYSEA

SEQ ID NO: 22156 - protein, 1381 aa, Homo sapiens
LTLSRGLGYYILTLLKTTEVLAIMGNQLAGIAPSQILSVESYFSDIHDFEYDKSLGSTRFFKVARAKHREGLVVVKVFAIQDPTLPLTSYKQELEELKIRLNSAQNCLPFQKASEKASEKAAMLFRQYVRDNLYDRISTRPFLNNIEKRWIAFQILTAVDQAHKSGVRHGDIKTENVMVTSWNWVLLTDFASFKPTYLPEDNPADFNYFFDTSRRRTCYIAPERFVDGGMFATELEYMRDPSTPLVDLNSNQRTRGELKRAMDIFSAGCVIAELFTEGVPLFDLSQLLAYRNGHFFPEQVLNKIEDHSIRELVTQMIHREPDKRLEAEDYLKQQRGNAFPEIFYTFLQPYMAQFAKETFLSADERILVIRKDLGNIIHNLCGHDLPEKAEGEPKENGLVILVSVITSCLQTLKYCDSKLAALELILHLAPRLSVEILLDRITPYLLHFSNDSVPRVRAEALRTLTKVLALVKEVPRNDINIYPEYILPGIAHLAQDDATIVRLAYAENIALLAETALRFLELVQLKNLNMENDPNNEEIDEVTHPNGNYDTELQALHEMVQQKVVTLLSDPENIVKQTLMENGITRLCVFFGRQKANDVLLSHMITFLNDKNDWHLRGAFFDSIVGVAAYVGWQSSSILKPLLQQGLSDAEEFVIVKALYALTCMCQLGLLQKPHVYEFASDIAPFLCHPNLWIRYGAVGFITVVARQISTADVYCKLMPYLDPYITQPIIQIERKLVLLSVLKEPVSRSIFDYALRSKDITSLFRHLHMRQKKRNGSLPDCPPPEDPAIAQLLKKLLSQGMTEEEEDKLLALKDFMMKSNKAKANIVDQSHLHDSSQKGVIDLAALGITGRQVDLVKTKQEPDDKRARKHVKQDSNVNEEWKSMFGSLDPPNMPQALPKGSDQEVIQTGKPPRSESSAGICVPLSTSSQVPEVTTVQNKKPVIPVLSSTILPSTYQIRITTCKTELQQLIQQKREQCNAERIAKQMMENAEWESKPPPPGWRPKGLLVAHLHEHKSAVNRIRVSDEHSLFATCSNDGTVKIWNSQKMEGKTTTTRSILTYSRIGGRVKTLTFCQGSHYLAIASDNGAVQLLGIEASKLPKSPKIHPLQSRILDQKEDGCVVDMHHFNSGAQSVLAYATVNGSLVGWDLRSSSNAWTLKHDLKSGLITSFAVDIHQCWLCIGTSSGTMACWDMRFQLPISSHCHPSRARIRRLSMHPLYQSWVIAAVQGNNEVSMWDMETGDRRFTLWASSAPPLSELQPSPHSVHGIYCSPADGNPILLTAGSDMKIRFWDLAYPERSYVVAGSTSSPSVSYYRKIIEGTEVVQEIQNKQKVGPSDDTPRRGPESLPVGHHDIITDVATFQTTQGFIVTASRDGIVKVWK

SEQ ID NO: 22157 - protein, 82 aa, Homo sapiens
LLGLQQLKCSVFLGLAVCTSLPGSISPRPVVRPSRRARTGVAIRARGRRGPGTHVPQGRLGGWRGQIPGYLWRLFSVASSLC

SEQ ID NO: 22158 - protein, 931 aa, Homo sapiens
LRPRSLEEGCPGLWVARFQKIPNGENETMIPVLTSKKASELPVSEVASILQADLQNGLNKCEVSHRRAFHGWNEFDISEDEPLWKKYISQFKNPLIMLLLASAVISVLMHQFDDAVSITVAILIVVTVAFVQEYRSEKSLEELSKLVPPECHCVREGKLEHTLARDLVPGDTVCLSVGDRVPADLRLFEAVDLSIDESSLTGETTPCSKVTAPQPAATNGDLASRSNIAFMGTLVRCGKAKGVVIGTGENSEFGEVFKMMQAEEAPKTPLQKSMDLLGKQLSFYSFGIIGIIMLVGWLLGKDILEMFTISVSLAVAAIPEGLPIVVTVTLALGVMRMVKKRAIVKKLPIVETLGCCNVICSDKTGTLTKNEMTVTHIFTSDGLHAEVTGVGYNQFGEVIVDGDVVHGFYNPAVSRIVEAGCVCNDAVIRNNTLMGKPTEGALIALAMKMGLDGLQQDYIRKAEYPFSSEQKWMAVKCVHRTQQDRPEICFMKGAYEQVIKYCTTYQSKGQTLTLTQQQRDVYQQEKARMGSAGLRVLALASGPELGQLTFLGLVGIIDPPRTGVKEAVTTLIASGVSIKMITGDSQETAVAIASRLGLYSKTSQSVSGEEIDAMDVQQLSQIVPKVAVFYRASPRHKMKIIKSLQKNGSVVAMTGDGVNDAVALKAADIGVAMGQTGTDVCKEAADMILVDDDFQTIMSAIEEGKGIYNNIKNFVRFQLSTSIAALTLISLATLMNFPNPLNAMQILWINIIMDGPPAQSLGVEPVDKDVIRKPPRNWKDSILTKNLILKILVSSIIIVCGTLFVFWRELRDNVITPRDTTMTFTCFVFFDMFNALSSRSQTKSVFEIGLCSNRMFCYAVLGSIMGQLLVIYFPPLQKVFQTESLSILDLLFLLGLTSSVCIVAEIIKKVERSREKIQKHVSSTSSSFLEV

SEQ ID NO: 22159 - protein, 68 aa, Homo sapiens [sequence omitted]

SEQ ID NO: 22160 - protein, 125 aa, Homo sapiens
LQQYFILLILTDGVITDMADTREAIVHASHLPMSVIIVGVGNADFSDMQMLDGDDGILRSPKGEPVLRDIVQFVPFRNFKHASPAALAKSVLAEVPNQVVDYYNGKGIKPKCSSEMYESSRTLAP

SEQ ID NO: 22161 - protein, 39 aa, Homo sapiens
MSVERYIRFELLARLCPNGTAAEIRSVCTEAGMFAIRAR

SEQ ID NO: 22162 - protein, 8 aa, Homo sapiens
MAASRVKL

SEQ ID NO: 22163 - protein, 74 aa, Homo sapiens
VGRRRRRRPGLGALAAGVPAMAESVERLQQRVQELERELAQERSLQVPRSGDGGGGRVRIEKMSSEVVDSNPYR

SEQ ID NO: 22164 - protein, 136 aa, Homo sapiens
VGRRRRRRPGLGALAAGVPAMAESVERLQQRVQELERELAQERSLQVPRSGDGGGGRVRIEKMSSEVVDSNPYSRLMALKRMGIVSDYEKIRTFAVAIVGVGGVGSVTAEMLTRCGIGKVKTFLFACHIGNYSLLE

SEQ ID NO: 22165 - protein, 84 aa, Homo sapiens
VGRRRRRRPGLGALAAGVPAMAESVERLQQRVQELERELAQERSLQVPRSGDGGGGRVRIEKMSSEVVDSNPYSCYSLIMTRWN

SEQ ID NO: 22166 - protein, 397 aa, Homo sapiens
VGRRRRRRPGLGALAAGVPAMAESVERLQQRVQELERELAQERSLQVPRSGDGGGGRVRIEKMSSEVVDSNPYSRLMALKRMGIVSDYEKIRTFAVAIVGVGGVGSVTAEMLTRCGIGKLLLFDYDKVELANMNRLFFQPHQAGLSKVQAAEHTLRNINPDVLFEVHNYNITTVENFQHFMDRISNGGLEEGKPVDLVLSCVDNFEARMTINTACNELGQTWMESGVSENAVSGHIQLIIPGESACFACAPPLVVAANIDEKTLKREGVCAASLPTTMGVVAGILVQNVLKFLLNFGTVSFYLGYNAMQDFFPTMSMKPNPQCDDRNCRKQQEEYKKKVAALPKQEVIQEEEEIIHEDNEWGIELVSEVSEEELKNFSGPVPDLPEGITVAYTIPKK

SEQ ID NO: 22167 - protein, 367 aa, Homo sapiens
VGRRRRRRPGLGALAAGVPAMAESVERLQQRVQELERELAQERSLQVPRSGDGGGGRVRIEKMSSEVVDSNPYSRLMALKRMGIVSDYEKIRTFAVAIVGVGGVGSVTAEMLTRCGIGKLLLFDYDKVELANMNRLFFQPHQAGLSKVQAAEHTLRNINPDVLFEVHNYNITTVENFQHFMDRISNGGLEEGKPVDLVLSCVDNFEARMTINTACNELGQTWMESGVSENAVSGHIQLIIPGESACFACAPPLVVAANIDEKTLKREGVCAASLPTTMGVVAGILVQNVLKFLLNFGTVSFYLGYNAMQDFFPTMSMKPNPQCDDRNCRKQQEEYKKKVAALPKQEVIQEEEEIIHEDNEWARRFCH

SEQ ID NO: 22168 - protein, 567 aa, Homo sapiens
LSPFQGFLLILALTEALAFAIQEPSPRESLQVLPSGTPPGTMVTAPHSSTRHTSVVMLTPNPDGPPSQAAAPMATPTPRAEGHPPTHTISTIAATVTAPHSESSLSTGPAPAAMATTSSKPEGRPRGQAAPTILLTKPPGATSRPTTAPPRTTTRRPPRPPGSSRKGAGNSSRPVPPAPGGHSRSKEGQRGRNPSSTPLGQKRPLGKIFQIYKGNFTGSVEPEPSTLTPRTPLWGYSSSPQPQTVAATTVPSNTSWAPTTTSLGPAKDKPGLRRAAQGGGSTFTSQGGTPDATAASGAPVSPQAAPVPSQRPHHGDPQDGPSHSDSWLTVTPGTSRPLSTSSGVFTAATGPTPAAFDTSVSAPSQGIPQGASTTPQAPTHPSRVSESTISGAKEETVATLTMTDRVPSPLSTVVSTATGNFLNRLVPAGTWKPGTAGNISHVAEGDKPQHRATICLSKMDIAWVILAISVPISSCSVLLTVCCMKRKKKTANPENNLSYWNNTITMDYFNRHAVELPREIQSLETSEDQLSEPRSPANGDYRDTGMVLVNPFCQETLFVGNDQVSEI

SEQ ID NO: 22169 - protein, 289 aa, Homo sapiens
VSAEPASTPSSEPRGPRPPPAPPIRVEEAEAMAETEERSLDNFFAKRDKKKKKERSNRAASAAGAAGSAGGSSGAAGAAGGGAGAGTRPGDGGTASAGAAGPGAATKAVTKDEDEWKELEQKEVDYSGLRVQAMQISSEKEEDDNEKRQDPGDNWEEGGGGGGGMEKSSGPWNKTAPVQAPPAPVIVTETPEPAMTSGVYRPPGARLTTTRKTPQGPPEIYSDTQFPSLQSTAKHVESRKDKEMEKSFEVVRHKNRGRDEVSKNQALKLQLDNQYAVLENQKSSHSQYN

SEQ ID NO: 22170 - protein, 13 aa, Homo sapiens
VKKKYLLITFLFP

SEQ ID NO: 22171 - protein, 175 aa, Homo sapiens
LRPARPGREWNKGTRGAGGCTEASPTVLAAQRRTRKMRLAVGALLVCAVLGLCLAVPDKTVRWCAVSEHEATKCQSFRDHMKSVIPSDGPSVACVKKASYLDCIRAIAANEADAVTLDAGLVYDAYLAPNNLKPVVAEFYGSKEGKFSLGPQEGVVILILYAECCVLQAGFGYQI

SEQ ID NO: 22172 - protein, 29 aa, Homo sapiens
MRLAVGALLVCAVLGKRSGCCDTGCRFGV

SEQ ID NO: 22173 - protein, 212 aa, Homo sapiens
MRLAVGALLVCAVLGLCLAVPDKTVRWCAVSEHEATKCQSFRDHMKSVIPSDGPSVACVKKASYLDCIRAIAANEADAVTLDAGLVYDAYLAPNNLKPVVAEFYGSKEDPQTFYYAVAVVKKDSGFQMNQLRGKKSCHTGLGRSAGWNIPIGLLYCDLPEPRKPLEKAVANFFSGSCAPCADGTDFPQLCQLCPGCGCSTLNQYFGYSGAFK

SEQ ID NO: 22174 - protein, 59 aa, Homo sapiens
LCMGSGLNLCEPNNKEGYYGYTGAFRCLVEKGDVAFVKHQTVPQNTGGKCTCSSVPLDH

SEQ ID NO: 22175 - protein, 163 aa, Homo sapiens
LSHRTLGRQYRKEEAKGPRWDTDLYHTGKNPDPWAKNLNEKDYELLCLDGTRKPVEEYANCHLARAPNHAVVTRKDKEACVHKILRQQQHLFGSNVTDCSGNFCLFRSETKDLLFRDDTVCLAKLHDRNTYEKYLGEEYVKAVGNLRKCSTSSLLEACTFRRP

SEQ ID NO: 22176 - protein, 130 aa, Homo sapiens
LSLGKNPDPWAKNLNEKDYELLCLDGTRKPVEEYANCHLARAPNHAVVTRKDKEACVHKILRQQQHLFGSNVTDCSGNFCLFRSETKDLLFRDDTVCLAKLHDRNTYEKYLGEEYVKAVGNLRKCSTSCE

SEQ ID NO: 22177 - protein, 227 aa, Homo sapiens
LGSLTALAFHGCSAGLLAALPDSSLSATCSGWMWHMTRNWPLVGKTSLITRFMYDSFDNTYQATIGIDFLSKTMYLEDRTVRLQLWDTAGQERFRSLIPSYIRDSTVAVVVYDITNLNSFQQTSKWIDDVRTERGSDVIIMLVGNKTDLADKRQITIEEGEQRAKELSVMFIETSAKTGYNVKQLFRRVASALPGMENVQEKSKEGMIDIKLDKPQEPPASEGGCSC

SEQ ID NO: 22178 - protein, 317 aa, Homo sapiens
LRPAPPAPLSQRRASGVKSAPLAPQPVPTAAAQPQPSSASASLSSSSSAAGHAAAGRDRDAAGESGTRAASPSPSGSRTAGRLPSPSYSPLPAPSLFPPPPLPAPAASTMSAGGDFGNPLRKFKLVFLGEQSVGKTSLITRFMYDSFDNTYQATIGIDFLSKTMYLEDRTVRLQLWDTAGQERFRSLIPSYIRDSTVAVVVYDITNLNSFQQTSKWIDDVRTERGSDVIIMLVGNKTDLADKRQITIEEGEQRAKELSVMFIETSAKTGYNVKQLFRRVASALPGMENVQEKSKEGMIDIKLDKPQEPPASEGGCSC

SEQ ID NO: 22179 - protein, 19 aa, Homo sapiens
VSSFPPGGFGRGAKQLKTS

SEQ ID NO: 22180 - protein, 814 aa, Homo sapiens
LWCLTALGTLGPQRCSGARCHRPLSRQLCASQRSMRTLEDSSGTVLHRLIQEQLRYGNLTETRTLLAIQQQALRGGAGTGGTGSPQASLEILAPEDSQVLQQATRQEPQGQEHQGGENHLAENTLYRLCPQPSKGEELPTYEEAKAHSQYYAAQQAGTRPHAGDRDPRGAPGGSRRQDEALRELRHGHVRSLSERLLQLSLERNGARAPSHMSSSHSFPQLARNQQGPPLRGPPAEGPESRGPPPQYPHVVLAHETTTAVTDPRYRARGSPHFQHAEVRILQAQVPPVFLQQQQQYQYLQQSQEHPPPPHPAALGHGPLSSLSPPAVEGPVSAQASSATSGSAHLAQMEAVLRENARLQRDNERLQRELESSAEKAGRIEKLESEIQRLSEAHESLTRASSKREALEKTMRNKMDSEMRRLQDFNRDLRERLESANRRLASKTQEAQAGSQDMVAKLLAQSYEQQQEQEKLEREMALLRGAIEDQRRRAELLEQALGNAQGRAARAEEELRKKQAYVEKVERLQQALGQLQAACEKREQLELRLRTRLEQELKALRAQQRQAGAPGGSSGSGGSPELSALRLSEQLREKEEQILALEADMTKWEQKYLEERAMRQFAMDAAATAAAQRDTTLIRHSPQPSPSSSFNEGLLTGGHRHQEMESRLKVLHAQILEKDAVIKVLQQRSRRDPGKAIQGSLRPAKSVPSVFAAAAAGTQGWQGLSSSERQTADAPARLTTADRAPTEEPVVTAPPAAHAKHGSRDGSTQTEGPPDSTSTCLPPEPDSLLGCSSSQRAASLDSVATSRVQDLSDMVEILI

SEQ ID NO: 22181 - protein, 14 aa, Homo sapiens
LGPKIFRLTVGSLE

SEQ ID NO: 22182 - protein, 551 aa, Homo sapiens
LLNLIIFRSVLDSCEVNIYFSKMMIKETSLRRDPDLRGELAFLARGCDFVLPSRFKKRLKSFQQTQIQNKPEKKPGTPLPPPATSPSSPRPLSPVPHVNNVVNAPLSINIPRFYFPEGLPDTCSNHEQTLSRIETAFMDIEEQKADIYEMGKIAKVCGCPLYWKAPMFRAAGGEKTGFVTAQSFIAMWRKLLNNHHDDASKFICLLAKPNCSSLEQEDFIPLLQDVVDTHPGLTFLKDAPEFHSRYITTVIQRIFYTVNRSWSGKITSTEIRKSNFLQTLALLEEEEDINQITDYFSYEHFYVIYCKFWELDTDHDLYISQADLSRYNDQASSSRIIERIFSGAVTRGKTIQKEGRMSYADFVWFLISEEDKRNPTSIEYWFRCMDVDGDGVLSMYELEYFYEEQCERMEAMGIEPLPFHDLLCQMLDLVKPAVDGKITLRDLKRCRMAHIFYDTFFNLEKYLDHEQRDPFAVQKDVENDGPEPSDWDRFAAEEYETLVAEESAQAQFQEGFEDYETDEPASPSEFGNKSNKILSASLPEKCGKLQSVDEE

SEQ ID NO: 22183 - protein, 10 aa, Homo sapiens
MSLMFLLLES

SEQ ID NO: 22184 - protein, 14 aa, Homo sapiens
LHGFWLLVWPMVRL

SEQ ID NO: 22185 - protein, 129 aa, Homo sapiens
LSDSVMHSIFHSSLLLMSLAFYLAYGGAYDVMSSKHLCGDTNYAWPTAEIAVMGAKGAVEIIFKGHENVEAAQAEYIEKFANPFPAAVRGFVDDIIQPSSTRARICCDLDVLASKKVQRPWRKHANIPL

SEQ ID NO: 22186 - protein, 106 aa, Homo sapiens
LDDFRNMAKNLYFPLLSCLMSMTLERQSVGAEIFVVHRRFVDIFSQGKTRARVSGGRASSRPRVAEKAQGKSAQPPAATGRKRRIFPHSALGAVEFLRHVHPFGLI

SEQ ID NO: 22187 - protein, 22 aa, Homo sapiens
MYTAILMFTYECLLCYITDRVL

SEQ ID NO: 22188 - protein, 107 aa, Homo sapiens
MNVKLALDIKIATYRKLLEGKESRLESEMQNTSIHTKTTSGYAGGLSSAYGGLTSPGLSYGLGSSFGSGAGSSSFSRTSSTRATVVVKKIETCDGKLVSESSDVLPK

SEQ ID NO: 22189 - protein, 38 aa, Homo sapiens
LAVESAGPRAGACSSRVGRLKMACLLETPIRMSVLSFF

SEQ ID NO: 22190 - protein, 39 aa, Homo sapiens
LAVESAGPRAGACSSRVGRLKMACLLETPIRMSVLSDQE

SEQ ID NO: 22191 - protein, 76 aa, Homo sapiens
LAVESAGPRAGACSSRVGRLKMACLLETPIRMSVLSRHEKCCNWKQQAESQSHCFRSCSKIVVLASARNLKHRAEN

SEQ ID NO: 22192 - protein, 663 aa, Homo sapiens
LAVESAGPRAGACSSRVGRLKMACLLETPIRMSVLSEVTASSRHYVDRLFDPDPQKVLQGVIDMKNAVIGNNKQKANLIVLGAVPRLLYLLQQETSSTELKTECAVVLGSLAMGTENNVKSLLDCHIIPALLQGLLSPDLKFIEACLRCLRTIFTSPVTPEELLYTGPDHQTILFNHGAVQNIAHLLTSLSYKVRMQALKCFSVLAFENPQVSMTLVNVLVDGELLPQIFVKMLQRDKPIEMQLTSAKCLTYMCRAGAIRTDDNCIVLKTLPCLVRMCSKERLLEERVEGAETLAYLIEPDVELQRIASITDHLIAMLADYFKYPSSVSAITDIKRLDHDLKHAHELRQAAFKLYASLGANDEDIRKKIIETENMMDRIVTGLSESSVKVRLAAVRCLHSLSRSVQQLRTSFQDHAVWKPLMKVLQNAPDEILVVASSMLCNLLLEFSPSKEPILESGAVELLCGLTQSENPALRVNGIWALMNMAFQAEQKIKADILRSLSTEQLFRLLSDSDLNVLMKTLGLLRNLLSTRPHIDKIMSTHGKQIMQAVTLILEGEHNIEVKEQTLCILANIADGTTAKDLIMTNDDILQKIKYYMGHSHVKLQLAAMFCISNLIWNEEEGSQERQDKLRDMGIVDILHKLSQSPDSNLCDKAKMALQQYLA

SEQ ID NO: 22193 - protein, 694 aa, Homo sapiens
LAVESAGPRAGACSSRVGRLKMACLLETPIRMSVLSEVTASSRHYVDRLFDPDPQKVLQGVIDMKNAVIGNNKQKANLIVLGAVPRLLYLLQQETSSTELKTECAVVLGSLAMGTENNVKSLLDCHIIPALLQGLLSPDLKFIEACLRCLRTIFTSPVTPEELLYTDATVIPHLMALLSRSRYTQEYICQIFSHCCKGPDHQTILFNHGAVQNIAHLLTSLSYKVRMQALKCFSVLAFENPQVSMTLVNVLVDGELLPQIFVKMLQRDKPIEMQLTSAKCLTYMCRAGAIRTDDNCIVLKTLPCLVRMCSKERLLEERVEGAETLAYLIEPDVELQRIASITDHLIAMLADYFKYPSSVSAITDIKRLDHDLKHAHELRQAAFKLYASLGANDEDIRKKIIETENMMDRIVTGLSESSVKVRLAAVRCLHSLSRSVQQLRTSFQDHAVWKPLMKVLQNAPDEILVVASSMLCNLLLEFSPSKEPILESGAVELLCGLTQSENPALRVNGIWALMNMAFQAEQKIKADILRSLSTEQLFRLLSDSDLNVLMKTLGLLRNLLSTRPHIDKIMSTHGKQIMQAVTLILEGEHNIEVKEQTLCILANIADGTTAKDLIMTNDDILQKIKYYMGHSHVKLQLAAMFCISNLIWNEEEGSQERQDKLRDMGIVDILHKLSQSPDSNLCDKAKMALQQYLA

SEQ ID NO: 22194 - protein, 452 aa, Homo sapiens
LLFVLFLVLVDGELLPQIFVKMLQRDKPIEMQLTSAKCLTYMCRAGAIRTDDNCIVLKTLPCLVRMCSKERLLEERVEGAETLAYLIEPDVELQRIASITDHLIAMLADYFKYPSSVSAITDIKRLDHDLKHAHELRQAAFKLYASLGANDEDIRKKIIETENMMDRIVTGLSESSVKVRLAAVRCLHSLSRSVQQLRTSFQDHAVWKPLMKVLQNAPDEILVVASSMLCNLLLEFSPSKEPILESGAVELLCGLTQSENPALRVNGIWALMNMAFQAEQKIKADILRSLSTEQLFRLLSDSDLNVLMKTLGLLRNLLSTRPHIDKIMSTHGKQIMQAVTLILEGEHNIEVKEQTLCILANIADGTTAKDLIMTNDDILQKIKYYMGHSHVKLQLAAMFCISNLIWNEEEGSQERQDKLRDMGIVDILHKLSQSPDSNLCDKAKMALQQYLA

SEQ ID NO: 22195 - protein, 59 aa, Homo sapiens
VCVREIGHDQDPSGEGLRAAQRDPFMDSLCPGPDQRGWLTRLGIVASRGLSGSRSKMEI

SEQ ID NO: 22196 - protein, 610 aa, Homo sapiens
LPISVSFDSTKVTMFPVAPKPQDSSQPSDRLMTEKQQEEAEWESINVLLMMHGLKPLSLVKRTDLKDLIIFDKQSSQRMRQNLKLLVEETSCQQNMIQELIETNQQLRNELQLEQSRAANQEQRANDLEQIMESVKSKIGELEDESLSRACHQQNKIKDLQKEQKTLQVKCQHYKKKRTEQEETIASLQMEVCRLKKEEEDRIVTQNRVFAYLCKRVPHTVLDRQLLCLIDYYESKIRKIHTQRQYKEDESQSEEENDYRNLDASPTYKGLLMSLQNQLKESKSKIDALSSEKLNLQKDLETRPTQHELRLYKQQVKKLEKALKKNVKLQELINHKKAEDTEKKDEPSKYNQQQALIDQRYFQVLCSINSIIHNPRAPVIIYKQTKGGVQNFNKDLVQDCGFEHLVPVIEMWADQLTSLKDLYKSLKTLSAELVPWLNLKKQDENEGIKVEDLLFIVDTMLEEVENKEKDSNMPHFQTLQAIVSHFQKLFDVPSLNGVYPRMNEVYTRLGEMNNAVRNLQELLELDSSSSLCVLVSTVGKLCRLINEDVNEQVMQVLGPEDLQSIIYKLEEHEEFFPAFQAFTNDLLEILEIDDLDAIVPAVKKLKVLSY

SEQ ID NO: 22197 - protein, 225 aa, Homo sapiens
LPISVSFDSTKVTMFPVAPKPQDSSQPSDRLMTEKQQEEAEWESINVLLMMHGLKPLSLVKRTDLKDLIIFDKQSSQRMRQNLKLLVEETSCQQNMIQELIETNQQLRNELQLEQSRAANQEQRANDLEQIMESVKSKIGELEDESLSRACHQQNKIKDLQKEQKTLQVKCQHYKKKRTEQEETIASLQMEVCRLKKEEEDRIVTQNRVFAYLCKRVPHTVLDRQ

SEQ ID NO: 22198 - protein, 14 aa, Homo sapiens
LKSAGTRSAGWAGR

SEQ ID NO: 22199 - protein, 189 aa, Homo sapiens
LPVLALRAGLGDDEDPGGVCPHPAKAQEARAPARKGAPSLLAAFRGTESPALVKKRMPDACTLGRAGIGLPKMCLHMAVRHSKAQKTGPGILQQRQKPPAPRASGGPALLGKRRGCSEAGSASLEPLSSSRAAAGCLNQVPLSPFLAGPRNTRRLPAPERERIELAATLCLEGWPLRCLASKGKLHCVY

SEQ ID NO: 22200 - protein, 363 aa, Homo sapiens
LIIMAPLGTTVLLWSLLRSSPGVERVCFRARIQPWHGGLLQPLPCSFEMGLPRRRFSSEAAESGSPETKKPTFMDEEVQSILTKMTGLNLQKTFKPAIQELKPPTYKLMTQAQLEEATRQAVEAAKVRLKMPPVLEERVPINDVLAEDKILEGTETTKYVFTDISYSIPHRERFIVVREPSGTLRKASWEERDRMIQVYFPKEGRKILTPIIFKEENLRTMYSQDRHVDVLNLCFAQFEPDSTEYIKVHHKTYEDIDKRGKYDLLRSTRYFGGMVWYFVNNKKIDGLLIDQIQRDLIDDATNLVQLYHVLHPDGQSAQGAKDQAAEGINLIKVFAKTEAQKGAYIELTLQTYQEALSRHSAAS

SEQ ID NO: 22201 - protein, 20 aa, Homo sapiens
LIATLTTVLWTMRNFLDFYM

SEQ ID NO: 22202 - protein, 16 aa, Homo sapiens
LTVSGSVGLSQGLSSR

SEQ ID NO: 22203 - protein, 87 aa, Homo sapiens
VAGRGSLHRQGRYALLLFLAALCARSNSGLKRKSTGDRMKVDCPREVDTLTQMEMISPSPEKCGRQPHIQTTTCVFFKMRSLVKRSV

SEQ ID NO: 22204 - protein, 614 aa, Homo sapiens
LAAAARMLPGRLCWVPLLLALGVGSGSGGGGDSRQRRLLAAKVNKHKPWIETSYHGVITENNDTVILDPPLVALDKDAPVPFAGEICAFKIHGQELPFEAVVLNKTSGEGRLRAKSPIDCELQKEYTFIIQAYDCGAGPHETAWKKSHKAVVHIQVKDVNEFAPTFKEPAYKAVVTEGKIYDSILQVEAIDEDCSPQYSQICNYEIVTTDVPFAIDRNGNIRNTEKLSYDKQHQYEILVTAYDCGQKPAAQDTLVQVDVKPVCKPGWQDWTKRIEYQPGSGSMPLFPSIHLETCDGAVSSLQIVTELQTNYIGKGCDRETYSEKSLQKLCGASSGIIDLLPSPSAATNWTAGLLVDSSEMIFKFDGRQGAKVPDGIVPKNLTDQFTITMWMKHGPSPGVRAEKETILCNSDKTEMNRHHYALYVHNCRLVFLLRKDFDQADTFRPAEFHWKLDQICDKEWHYYVINVEFPVVTLYMDGATYEPYLVTNDWPIHPSHIAMQLTVGACWQGGEVTKPQFAQFFHGSLASLTIRPGKMESQKVISCLQACKEGLDINSLESLGQGIKYHFNPSQSILVMEGDDIGNINRALQKVSYINSRQFPTAGVRRLKVSSKVQ

SEQ ID NO: 22205 - protein, 498 aa, Homo sapiens
VSPLGSLFGCPSPQTGSATLSAPHEESMRYFIKSMEHSVCPSSAVHLIPVSTPKNGMSSKSRKRIMPDPVTEPPVTDPVYEALLYCNIPSVAERSMEGHAPHHFKLVSVHVFIRHGDRYPLYVIPKTKRPEIDCTLVANRKPYHPKLEAFISHMSKGSGASFESPLNSLPLYPNHPLCEMGELTQTGVVQHLQNGQLLRDIYLKKHKLLPNDWSADQLYLETTGKSRTLQSGLALLYGFLPDFDWKKIYFRHQPSALFCSGSCYCPVRNQYLEKEQRRQYLLRLKNSQLEKTYGEMAKIVDVPTKQLRAANPIDSMLCHFCHNVSFPCTRNGCVDMEHFKVIKTHQIEDERERREKKLYFGYSLLGAHPILNQTIGRMQRATEGRKEELFALYSAHDVTLSPVLSALGLSEARFPRFAARLIFELWQDREKPSEHSVRILYNGVDVTFHTSFCQDHHKRSPKPMCPLENLVRFVKRDMFVALGGSGTNYYDACHREGF

SEQ ID NO: 22206 - protein, 35 aa, Homo sapiens [sequence omitted]

SEQ ID NO: 22207 - protein, 101 aa, Homo sapiens
LRPGLSLRELRLQVGRRQDVLPQEVERGGHVELGRGVRYVRHLQGPDACLRCQAENKQEDCVVVWGECNHSFHNCCMSLWVKQNNRCPLCQQDWVVQRIGK

SEQ ID NO: 22208 - protein, 12 aa, Homo sapiens
LRRGDARLLLLL

SEQ ID NO: 22209 - protein, 272 aa, Homo sapiens
LPSPGCAAGAGTRLRSPRRLHPRGRSSSRRPRAHHDEEREEVPQPEPGRVEALHLQPDHRRIPGAHRQELGIAVCGREVMLSEGDILFSSLLSSPSLFWPPGLILLFYLVFYGFLAALFSFTMWVMLQTLNDEVPKYRDQIPSPGLMVFPKPVTALEYTFSRSDPTSYAGYIEDLKKFLKPYTLEEQKNLTVCPDGALFEQKGPVYVACQFPISLLQACSGMNDPDFGYSQGNPCILVKMNRIIGLKPEGVPRIDCVSKTNNVKDGMKIYQM

SEQ ID NO: 22210 - protein, 295 aa, Homo sapiens
VEALHLQPDHRRIPGAHRQELGIAVCGREVMLSEGDILFSSLLSSPSLFWPPGLILLFYLVFYGFLAALFSFTMWVMLQTLNDEVPKYRDQIPSPGLMVFPKPVTALEYTFSRSDPTSYAGYIEDLKKFLKPYTLEEQKNLTVCPDGALFEQKGPVYVACQFPISLLQACSGMNDPDFGYSQGNPCILVKMNRIIGLKPEGVPRIDCVSKNEDIPNVAVYPHNGMIDLKYFPYYGKKLHVGYLQPLVAVQVSFAPNNTGKEVTVECKIDGSANLKSQDDRDKFLGRVMFKITARA

SEQ ID NO: 22211 - protein, 424 aa, Homo sapiens
MLDPKWMQPEGIIFEAENKPSPGTESAGTFILDLSATSRTIISTPQRLTSSGSVLIGSPYTPAPAMVTQTHIAEATGWVPGDRKRARKFIDSDFSESKRSKKGDKNGKGLRHFSMKVCEKVQRKGTTSYNEVADELVSEFTNSNNHLAADSAYDQKNIRRRVYDALNVLMAMNIISKEKKEIKWIGLPTNSAQECQNLEIEKQRRIERIKQKRAQLQELLLQQIAFKNLVQRNRQNEQQNQGPPALNSTIQLPFIIINTSRKTVIDCSISSDKFEYLFNFDNTFEIHDDIEVLKRMGMSFGLESGKCSLEDLKLAKSLVPKALEGYITDISTGPSWLNQGLLLNSTQSVSNLDLTTGATLPQSSVNQGLCLDAEVALATGQFLAPNSHQSSSAASHCSESRGETPCSFNDEDEEDDEEDSSSPE

SEQ ID NO: 22212 - protein, 198 aa, Homo sapiens
MGSAVRVFCCLFVFADLFTDAAETEKMAKSLEDSEGVCFVPSFSGLQAPLNDPWACASFMGLKPSTSKYHLVRAILESIAFRNKQLYEMMKKEIHIPVRKIRADGGVCKNGFVMQMTSDLINENIDRPADIDMSCLGAASLAGLAVGFWTDKEELKKLRQSEVVFKPQKKCQEYEMSLENWAKAVKRSMNWVLLCCPG

SEQ ID NO: 22213 - protein, 18 aa, Homo sapiens
MALIYVCFNLCFVASEGL

SEQ ID NO: 22214 - protein, 28 aa, Homo sapiens
MLFKRLCIKLCTLSMCSLLYVNYTSINL

SEQ ID NO: 22215 - protein, 77 aa, Homo sapiens
VQTPSVYAAMRGANAWAPLCLLLAAATQLSRQQSPERPVFTCGGILTGESGFIGSEGFPGVYPPNSKCTWKITVSIF

SEQ ID NO: 22216 - protein, 442 aa, Homo sapiens
LTILKFKTIYISFQILFHYFDQKSMLENHILHKRIYILTFFSQQIFILCHAHFIFFFTVRDFCRQDEKCDYYFSVDADVVLTNPRTLKILIEQNRKIIAPLVTRHGKLWSNFWGALSPDGYYARSEDYVDIVQGNRVGVWNVPYMANVYLIKGKTLRSEMNERNYFVRDKLDPDMALCRNAREMTLQREKDSPTPETFQMLSPPKGVFMYISNRHEFGRLLSTANYNTSHYNNDLWQIFENPVDWKEKYINRDYSKIFTENIVEQPCPDVFWFPIFSEKACDELVEEMEHYGKWSGGKHHDSRISGGYENVPTDDIHMKQVDLENVWLHFIREFIAPVTLKVFAGYYTKGFALLNFVVKYSPERQRSLRPHHDASTFTINIALNNVGEDFQGGGCKFLRYNCSIESPRKGWSFMHPGRLTHLHEGLPVKNGTRYIAVSFIDP

SEQ ID NO: 22217 - protein, 231 aa, Homo sapiens
LTILKFKTIYISFQILFHYFDQKSMLENHILHKRIYILTFFSQQIFILCHAHFIFFFTVRDFCRQDEKCDYYFSVDADVVLTNPRTLKILIEQNRKIIAPLVTRHGKLWSNFWGALSPDGYYARSEDYVDIVQGNRVGVWNVPYMANVYLIKGKTLRSEMNERNYFVRDKLDPDMALCRNAREMTLQREKDSPTPETFQMLSPPKVLFLLILFIFVYLIFDIVYCLVVKFL

SEQ ID NO: 22218 - protein, 70 aa, Homo sapiens
MGGCTVKPQLLLLALVLHPWNPCLGADSEKPSSIPTGEHPAVRRCPARLGRRGGSSFIHQPFRGAGQINY

SEQ ID NO: 22219 - protein, 44 aa, Homo sapiens [sequence omitted]

SEQ ID NO: 22220 - protein, 334 aa, Homo sapiens
LEFFKMSGVVPTAPEQPAGEMENQTKPPDPRPDAPPEYNSHFLPGPPGTAVPPPTGYPGGLPMGYYSPQQPSTFPLYQPVGGIHPVRYQPGKYPMPNQSVPITWMPGPTPMANCPPGLEYLVQLDNIHVLQHFEPLEMMTCFETNNRYDIKNNSDQMVYIVTEDTDDFTRNAYRTLRPFVLRVTDCMGREIMTMQRPFRCTCCCFCCPSARQELEVQCPPGVTIGFVAEHWNLCRAVYSIQNEKKENVMRVRGPCSTYGCGSDSVFEVKSLDGISNIGSIIRKWNGLLSAMADADHFDIHFPLDLDVKMKAMIFGACFLIDFMYFERSPPQRSR

SEQ ID NO: 22221 - protein, 14 aa, Homo sapiens
MLFCKCHIFKKAQR

SEQ ID NO: 22222 - protein, 333 aa, Homo sapiens
LAPALWTLSRSGAETAAARDSQMNASHPETNLPVGYPPQYPPTAFQGPPGYSGYPGPQVSYPPPPAGHSGPGPAGFPVPNQPVYNQPVYNQPVGAAGVPWMPAPQPPLNCPPGLEYLSQIDQILIHQQIELLEVLTGFETNNKYEIKNSFGQRVYFAAEDTDCCTRNCCGPSRPFTLRIIDNMGQEVITLERPLRCSSCCCPCCLQEIEIQAPPGVPIGYVIQTWHPCLPKFTIQNEKREDVLKISGPCVVCSCCGDVDFEIKSLDEQCVVGKISKHWTGILREAFTDADNFGIQFPLDLDVKMKAVMIGACFLIDFMFFESTGSQEQKSGVW

SEQ ID NO: 22223 - protein, 81 aa, Homo sapiens
LAPALWTLSRSGAETAAARGPHKPILNYSTIAELLETVLIMDKQNSQMNASHPETNLPVGYPPQYPPTAFQDRSDTDSSAN

SEQ ID NO: 22224 - protein, 56 aa, Homo sapiens
LAPALWTLSRSGAETAAARDSQMNASHPETNLPVGYPPQYPPTAFQDRSDTDSSAN

SEQ ID NO: 22225 - protein, 174 aa, Homo sapiens
LMNLGETLTYVWKIPERSGAGTEDSACIPWAYYSTVDQVKDLYSGLIGPLIVCRRPYLKVFNPRRKLEFALLFLVFDENESWYLDDNIKTYSDHPEKVNKDDEEFIESNKMHAINGRMFGNLQGLTMHVGDEVNWYLMGMGNEIDLHTVHFHGHSFQYKKCFQEHLEFGYSTAM

SEQ ID NO: 22226 - protein, 1018 aa, Homo sapiens
MKILILGIFLFLCSTPAWAKEKHYYIGIIETTWDYASDHGEKKLISVDTEHSNIYLQNGPDRIGRLYKKALYLQYTDETFRTTIEKPVWLGFLGPIIKAETGDKVYVHLKNLASRPYTFHSHGITYYKEHEGAIYPDNTTDFQRADDKVYPGEQYTYMLLATEEQSPGEGDGNCVTRIYHSHIDAPKDIASGLIGPLIICKKDSLDKEKEKHIDREFVVMFSVVDENFSWYLEDNIKTYCSEPEKVDKDNEDFQESNRMYSVNGYTFGSLPGLSMCAEDRVKWYLFGMGNEVDVHAAFFHGQALTNKNYRIDTINLFPATLFDAYMVAQNPGEWMLSCQNLNHLKAGLQAFFQVQECNKSSSKDNIRGKHVRHYYIAAEEIIWNYAPSGIDIFTKENLTAPGSDSAVFFEQGTTRIGGSYKKLVYREYTDASFTNRKERGPEEEHLGILGPVIWAEVGDTIRVTFHNKGAYPLSIEPIGVRFNKNNEGTYYSPNYNPQSRSVPPSASHVAPTETFTYEWTVPKEVGPTNADPVCLAKMYYSAVEPTKDIFTGLIGPMKICKKGSLHANGRQKDVDKEFYLFPTVFDENESLLLEDNIRMFTTAPDQVDKEDEDFQESNKMHSMNGFMYGNQPGLTMCKGDSVVWYLFSAGNEADVHGIYFSGNTYLWRGERRDTANLFPQTSLTLHMWPDTEGTFNVECLTTDHYTGGMKQKYTVNQCRRQSEDSTFYLGERTYYIAAVEVEWDYSPQREWEKELHHLQEQNVSNAFLDKGEFYIGSKYKKVVYRQYTDSTFRVPVERKAEEEHLGILGPQLHADVGDKVKIIFKNMATRPYSIHAHGVQTESSTVTPTLPGETLTYVWKIPERSGAGTEDSACIPWAYYSTVDQVKDLYSGLIGPLIVCRRPYLKVFNPRRKLEFALLFLVFDENESWYLDDNIKTYSDHPEKVNKDDEEFIESNKMHAINGRMFGNLQGLTMHVGDEVNWYLMGMGNEIDLHTVHFHGHSFQYKVRAIHGNYSCSV

SEQ ID NO: 22227 - protein, 422 aa, Homo sapiens
MCAEDRVKWYLFGMGNEVDVHAAFFHGQALTNKNYRIDTINLFPATLFDAYMVAQNPGEWMLSCQNLNHLKAGLQAFFQVQECNKSSSKDNIRGKHVRHYYIAAEEIIWNYAPSGIDIFTKENLTAPGSDSAVFFEQGTTRIGGSYKKLVYREYTDASFTNRKERGPEEEHLGILGPVIWAEVGDTIRVTFHNKGAYPLSIEPIGVRFNKNNEGTYYSPNYNPQSRSVPPSASHVAPTETFTYEWTVPKEVGPTNADPVCLAKMYYSAVEPTKDIFTGLIGPMKICKKGSLHANGRQKDVDKEFYLFPTVFDENESLLLEDNIRMFTTAPDQVDKEDEDFQESNKMHSMNGFMYGNQPGLTMCKGDSVVWYLFSAGNEADVHGIYFSGNTYLWRGERRDTANLFPQTSLTLHMWPDTEGIFT

SEQ ID NO: 22228 - protein, 155 aa, Homo sapiens
VRFNKNNEGTYYSPNYNPQSRSVPPSASHVAPTETFTYEWTVPKEVGPTNADPVCLAKMYYSAVEPTKDIFTGLIGPMKICKKGSLHANGRQKDVDKEFYLFPTVFDENESLLLEDNIRMFTTAPDQVDKEDEDFQESNKMHCKYCIIHQSTKLF

SEQ ID NO: 22229 - protein, 10 aa, Homo sapiens
LYTLEISRRF

SEQ ID NO: 22230 - protein, 59 aa, Homo sapiens
LLPMTEAVSHILPLVLPVPRISSEGRDIPPASSHHSQSLPLGPMKAKYLIPSVTKNRSI

SEQ ID NO: 22231 - protein, 452 aa, Homo sapiens
LPGTESGRDLSAKPRLQLRNLGTHPSDPGPTASSGGTAAAARSGSASLPAQKMNPASAPPPLPPPGQQVIHVTQDLDTDLEALFNSVMNPKPSSWRKKILPESFFKEPDSGSHSRQSSTDSSGGHPGPRLAGGAQHVRSHSSPASLQLGTGAGAAGSPAQQHAHLRQQSYDVTDELPLPPGWEMTFTATGQRYFLNHIEKITTWQDPRKAMNQPLNHMNLHPAVSSTPVPQRSMAVSQPNLVMNHQHQQQMAPSTLSQQNHPTQNPPAGLMSMPNALTTQQQQQQKLRLQRIQMERERIRMRQEELMRQEAALCRQLPMEAETLAPVQAAVNPPTMTPDMRSITNNSSDPFLNGGPYHSREQSTDSGLGLGCYSVPTTPEDFLSNVDEMDTGENAGQTPMNINPQQTRFPDFLDCLPGTNVDLGTLESEDLIPLFNDVESALNKSEPFLTWL

SEQ ID NO: 22232 - protein, 70 aa, Homo sapiens [sequence omitted]

SEQ ID NO: 22233 - protein, 123 aa, Homo sapiens
LLPGGRHCRLLRRQIRLGSHGRGRLSEHYEIDMIVGKDREGFFTNGLTLGAKKCSVIRDSLYVDGDCTMDIRTKSQGGEPTYNVAVGRAGRALVIVMGKEGVHGGTLNKKAYELALYLRRSDV

SEQ ID NO: 22234 - protein, 117 aa, Homo sapiens
LLPGGRHCRLLRRQIRLGSHGRGRLSEHYGKDREGFFTNGLTLGAKKCSVIRDSLYVDGDCTMDIRTKSQGGEPTYNVAVGRAGRALVIVMGKEGVHGGTLNKKAYELALYLRRSDV

SEQ ID NO: 22235 - protein, 117 aa, Homo sapiens
LLPGGRHCRLLRRQIRLGSHGRGRLSEHYGKDREGFFTNGLTLGAKKCSVIRDSLYVDGDCTMDIRTKSQGGEPTYNVAVGRAGRVLVFVMGKEGVHGGGLNKKAYSMAKYLRDSGF

SEQ ID NO: 22236 - protein, 93 aa, Homo sapiens
LLPGGRHCRLLRRQIRLGSHGRGRLSEHYEIDMIVGKDREGFFTNGLTLGAKKCSVIRDSLYVDGDCTMDIRTKSQGGEPTYNVAVGRAGRGE

SEQ ID NO: 22237 - protein, 32 aa, Homo sapiens
LSNSLFKMPRTWTPSTGDTAMWNCLRLCEITC

SEQ ID NO: 22238 - protein, 18 aa, Homo sapiens
MEQLHSLVLPQPLASKKF

SEQ ID NO: 22239 - protein, 574 aa, Homo sapiens
LVNSHPSGFSFRDNMAPSTPLLTVRGSEGLYMVNGPPHFTESTVFPRVNIISVTNKGLLHSFDLLKAVCLEFSPKNTVLATWQPYTTSKDGTAGIPNLQLYDVKTGTCLKSFIQKKMQNWCPSWSEDETLCARNVNNEVHFFENNNFNTIANKLHLQKINDFVLSPGPQPYKVAVYVPGSKGAPSFVRLYQYPNFAGPHAALANKSFFKADKVTMLWNKKATAVLVIASTDVDKTGASYYGEQTLHYIATNGESAVVQLPKNGPIYDVVWNSSSTEFCAVYGFMPAKATIFNLKCDPVFDFGTGPRNAAYYSPHGHILVLAGFGNLRGQMEVWDVKNYKLISKPVASDSTYFAWCPDGEHILTATCAPRLRVNNGYKIWHYTGSILHKYDVPSNAELWQVSWQPFLDGIFPAKTITYQAVPSEVPNEEPKVATAYRPPALRNKPITNSKLHEEEPPQNMKPQSGNDKPLSKTALKNQRKHEAKKAAKQEARSDKSPDLAPTPAPQSTPRNTVSQSISGDPEIDKKIKNLKKKLKAIEQLKEQAATGKQLEKNQLEKIQKETALLQELEDLELGI

SEQ ID NO: 22240 - protein, 599 aa, Homo sapiens
LVNSHPSGFSFRDNMAPSTPLLTVRGSEGLYMVNGPPHFTESTVFPRESGKNCKVCIFSKDGTLFAWGNGEKVNIISVTNKGLLHSFDLLKAVCLEFSPKNTVLATWQPYTTSKDGTAGIPNLQLYDVKTGTCLKSFIQKKMQNWCPSWSEDETLCARNVNNEVHFFENNNFNTIANKLHLQKINDFVLSPGPQPYKVAVYVPGSKGAPSFVRLYQYPNFAGPHAALANKSFFKADKVTMLWNKKATAVLVIASTDVDKTGASYYGEQTLHYIATNGESAVVQLPKNGPIYDVVWNSSSTEFCAVYGFMPAKATIFNLKCDPVFDFGTGPRNAAYYSPHGHILVLAGFGNLRGQMEVWDVKNYKLISKPVASDSTYFAWCPDGEHILTATCAPRLRVNNGYKIWHYTGSILHKYDVPSNAELWQVSWQPFLDGIFPAKTITYQAVPSEVPNEEPKVATAYRPPALRNKPITNSKLHEEEPPQNMKPQSGNDKPLSKTALKNQRKHEAKKAAKQEARSDKSPDLAPTPAPQSTPRNTVSQSISGDPEIDKKIKNLKKKLKAIEQLKEQAATGKQLEKNQLEKIQKETALLQELEDLELGI

SEQ ID NO: 22241 - protein, 52 aa, Homo sapiens
VAGSFKMRLLLLLLVAASAMVRSEASANLGGVPSKRLKMQYATGPLLKFQIW

SEQ ID NO: 22242 - protein, 30 aa, Homo sapiens
MNGVGLLVIWMLFCDLKQLLLNCIYSLNNT

SEQ ID NO: 22243 - protein, 46 aa, Homo sapiens
LLCLLGSLTALGTCLFGRHLRSHQEHGWGPTCIHMTSLPLVLSCGQ

SEQ ID NO: 22244 - protein, 15 aa, Homo sapiens
MGLLLLRLTKQLMLL

SEQ ID NO: 22245 - protein, 98 aa, Homo sapiens
LVWIATPVKMVTNLALLVELLGINHFMNTATFFVSFQEVPPTSDENVTMIETTFSNIPVRVYMPTLKSEILRTGLVYIHGGGWCMGDAALFNYDFLSR

SEQ ID NO: 22246 - protein, 61 aa, Homo sapiens
LVWIATPVKMVTNLLCLIMTFCQDEQLIDLMLLLYQPTHRRPRCQDQTQASVFNISCPSDA

SEQ ID NO: 22247 - protein, 25 aa, Homo sapiens
VPFLTSLLLGTASRAVSAFALLAAS

SEQ ID NO: 22248 - protein, 68 aa, Homo sapiens
MAVSVTPIRDTKWLTLEVCREFQRGTCSRPDTECKFAHPSKSCQVENGRVIACFDSLKTVDGALVAAK

SEQ ID NO: 22249 - protein, 25 aa, Homo sapiens
LLFFHLKIFFFSCCSLMATEQSLFE

SEQ ID NO: 22250 - protein, 208 aa, Homo sapiens
MQLANAMMPGAPLQPVPMFSVAPSLATNASAAAFNPYLGPVSPSLVPAEILPTAPMLVTGNPGVPVPAAAAAAAQKLMRTDRLEVCREYQRGNCNRGENDCRFAHPADSTMIDTNDNTVTVCMDYIKGRCSREKCKYFHPPAHLQAKIKAAQYQVNQAAAAQAAATAAAMALANMQLQQHTAFLPPGSILCMTPATSVDTHNICRTSD

SEQ ID NO: 22251 - protein, 22 aa, Homo sapiens
LIIQILKVYVMKIIACVQTLEG

SEQ ID NO: 22252 - protein, 74 aa, Homo sapiens
LFSWPFRKHRIVPLATYMGIHKKGDIVDIKGMDTVQKGMPHKCYHGKPGRVYNVTQHAVGIVLNKQGQDSCQEN

SEQ ID NO: 22253 - protein, 15 aa, Homo sapiens
MIKVLVQWYLNIKKR

SEQ ID NO: 22254 - protein, 10 aa, Homo sapiens
LNIYLLLYLL

SEQ ID NO: 22255 - protein, 262 aa, Homo sapiens
VIALTVAFFLFEFLAATQDIAVDGWALTMLSRENIGFSAADAVTGLKLVEEGVPKEHLALLAVPMVPLQIILPLIISKYTAGPQPLNTFYKAMPYRLLLGLEYALLVWWTPKVEHQGGFPIYYYIVVLLSYALHQVTVYSMYVSIMAFNAKVSDPLIGGTYMTLLNTVSNLGGNWPSTVALWLVDPLTVKECVGASNQNCRTPDAVELCKKLGGSCVTALDGYYVESIICVFIGFGWWFFLGPKFKKLQDEGSSSWKCKRNN

SEQ ID NO: 22256 - protein, 590 aa, Homo sapiens
LPPSREPPKPWSSATALDLGLDGSKTLSLGPPQTGLCIVSDMSPTISHKDSSRQRRPGNFSHSLDMKSGPLPPGGWDDSHLDSAGREGDREALLGDTGTGDFLKAPQSFRAELSSILLLLFLYVLQGIPLGLAGSIPLILQSKNVSYTDQAFFSFVFWPFSLKLLWAPLVDAVYVKNFGRRKSWLVPTQYILGLFMIYLSTQVDRLLGNTDDRTPDVIALTVAFFLFEFLAATQDIAVDGWALTMLSRENVGYASTCNSVGQTAGYFLGNVLFLALESADFCNKYLRFQPQPRGIVTLSDFLFFWGTVFLITTTLVALLKKENEVSVVKEETQGITDTYKLLFAIIKMPAVLTFCLLILTAKIGFSAADAVTGLKLVEEGVPKEHLALLAVPMVPLQIILPLIISKYTAGPQPLNTFYKAMPYRLLLGLEYALLVWWTPKVEHQGGFPIYYYIVVLLSYALHQVTVYSMYVSIMAFNAKVSDPLIGGTYMTLLNTVSNLGGNWPSTVALWLVDPLTVKECVGASNQNCRTPDAVELCKKLGGSCVTALDGYYVESIICVFIGFGWWFFLGPKFKKLQDEGSSSWKCKRNN

SEQ ID NO: 22257 - protein, 148 aa, Homo sapiens
LEVLGRETSRSIPPQVGAGFHPGTTAHTSSLEPGAAARGSPSGSLTPFQGAPIQASSGPLARGLAPGFSTPGCSKKCPYRSEPCHHPVNHRNPGPARQPWTWDWTDPKRSASAPHRRGSASSLICHPPSPTRTAAGNGGQGISVTLWI

SEQ ID NO: 22258 - protein, 778 aa, Homo sapiens
VAGRGGSRRRGQRARCWSSLPRRWGPRSAAVAPFGAFLAAGSSPLPAAPRPGLLLNLSPRRRPFRHPPAPSRTVAVTAAAPALAPMALCNGDSKLENAGGDLKDGHHHYEGAVVILDAGAQYGKVIDRRVRELFVQSEIFPLETPAFAIKEQGFRAIIISGGPNSVYAEDAPWFDPAIFTIGKPVLGICYGMQMMNKVFGGTVHKKSVREDGVFNISVDNTCSLFRGLQKEEVVLLTHGDSVDKVADGFKVVARSGNIVAGIANESKKLYGAQFHPEVGLTENGKVILKNFLYDIAGCSGTFTVQNRELECIREIKERVGTSKVLVLLSGGVDSTVCTALLNRALNQEQVIAVHIDNGFMRKRESQSVEEALKKLGIQVKVINAAHSFYNGTTTLPISDEDRTPRKRISKTLNMTTSPEEKRKIIGDTFVKIANEVIGEMNLKPEEVFLAQGTLRPDLIESASLVASGKAELIKTHHNDTELIRKLREEGKVIEPLKDFHKDEVRILGRELGLPEELVSRHPFPGPGLAIRVICAEEPYICKDFPETNNILKIVADFSASVKKPHTLLQRVKACTTEEDQEKLMQITSLHSLNAFLLPIKTVGVQGDCRSYSYVCGISSKDEPDWESLIFLARLIPRMCHNVNRVVYIFGPPVKEPPTDVTPTFLTTGVLSTLRQADFEAHNILRESGYAGKISQMPVILTPLHFDRDPLQKQPSCQRSVVIRTFITSDFMTGIPATPGNEIPVEVVLKMVTEIKKIPGISRIMYDLTSKPPGTTEWE

SEQ ID NO: 22259 - protein, 642 aa, Homo sapiens
LAAGSSPLPAAPRPGLLLNLSPRRRPFRHPPAPSRTVAVTAAAPALAPMALCNGDSKMMNKVFGGTVHKKSVREDGVFNISVDNTCSLFRGLQKEEVVLLTHGDSVDKVADGFKVVARSGNIVAGIANESKKLYGAQFHPEVGLTENGKVILKNFLYDIAGCSGTFTVQNRELECIREIKERVGTSKVLVLLSGGVDSTVCTALLNRALNQEQVIAVHIDNGFMRKRESQSVEEALKKLGIQVKVINAAHSFYNGTTTLPISDEDRTPRKRISKTLNMTTSPEEKRKIIGDTFVKIANEVIGEMNLKPEEVFLAQGTLRPDLIESASLVASGKAELIKTHHNDTELIRKLREEGKVIEPLKDFHKDEVRILGRELGLPEELVSRHPFPGPGLAIRVICAEEPYICKDFPETNNILKIVADFSASVKKPHTLLQRVKACTTEEDQEKLMQITSLHSLNAFLLPIKTVGVQGDCRSYSYVCGISSKDEPDWESLIFLARLIPRMCHNVNRVVYIFGPPVKEPPTDVTPTFLTTGVLSTLRQADFEAHNILRESGYAGKISQMPVILTPLHFDRDPLQKQPSCQRSVVIRTFITSDFMTGIPATPGNEIPVEVVLKMVTEIKKIPGISRIMYDLTSKPPGTTEWE

SEQ ID NO: 22260 - protein, 35 aa, Homo sapiens
MQYCEKSYWSSYITSEFSTAKIYGLRAELGITKRD

SEQ ID NO: 22261 - protein, 231 aa, Homo sapiens
LLKKGEKEQQEAIEHIDEVQNETDRLNEQASEEILKVEQKYNKLRQPFFQKRSELIAKIPNFWVTTFVSHPQVSALLGEEDEEALHYLTRVEVTEFEDIKSGYRIDFYFDENPYFENKVLSKEFLLNESGDPSSKSTEIKWKSGKDLTKRSSQTQNKASRKRQHEEPESFFTWFTDHSDAGADELGEVIKDDIWPNPLQYYLVPDMDDEEGEGEEDDDDDEEEEGLEDIDE

SEQ ID NO: 22262 - protein, 154 aa, Homo sapiens
LITHAKLYFLWLQSSLTIFWEVMDHHIPMHALPEEIQKMLPEEKVCKYCGVSYLILHEFKAMEEKVKAMEKEMKFYQGSVDREKRLQEKLHSLSQELEQYKIDNKSKTERIYDVGMQLKSQQNEFQKVKKQLSHLQDELKIKYRQSYIFRLCFC

SEQ ID NO: 22263 - protein, 327 aa, Homo sapiens
LSLQFYVSFRRTGLFTCKLIVEIFFRNYMNDSLRTNVFVRFQPETIACACIYLAARALQIPLPTRPHWFLLFGTTEEEIQEICIETLRLYTRKKPNYELLEKEVEKRKVALQEAKLKAKGLNPDGTPALSTLGGFSPASKPSSPREVKAEEKSPISINVKTVKKEPEDRQQASKSPYNGVRKDSKRSRNSRSASRSRSRTRSRSRSHTPRRHYNNRRSRSGTYSSRSRSRSRSHSESPRRHHNHGSPHLKAKHTRDDLKSSNRHGHKRKKSRSRSQSKSRDHSDAAKKHRHERGHHRDRRERSRSFERSHKSKHHGGSRSGHGRHRR

SEQ ID NO: 22264 - protein, 105 aa, Homo sapiens
LSLQFYVSFRRTGLFTCKLIVEIFFRNYMNDSLRTNVFVRFQPETIACACIYLAARALQIPLPTRPHWFLLFGTTEEEIQEICIETLRLYTRKKVFSIYSFVPTC

SEQ ID NO: 22265 - protein, 70 aa, Homo sapiens
LSLQFYVSFRRTGLFTCKLIVEIFFRNYMNDSLRTNVFVRFQPETIACACIYLAARALQVGVYFPFCSVG

SEQ ID NO: 22266 - protein, 14 aa, Homo sapiens
VSKGFVYLLLEVTI

SEQ ID NO: 22267 - protein, 129 aa, Homo sapiens
LRVFYIHAVEAMKVVGNYRVNTANSSTDTSGEHLTCLRSQLFVAYRNGRVDEAVSLGFLDCWIGGDLTNFKGCYLTNQLPIQIFTAIFDMNTDVIILSQFMYYRLKNQKKKISEEDLRKELHFCCLHWP

SEQ ID NO: 22268 - protein, 89 aa, Homo sapiens
MNQSIVLKGKIPSDIKLHFPRTSNINHPDFNYGITGATAYLLSRGQEDLCDWDFMDLASPARCVSNSWEYCSMIIELVSIVCFLFVALS

SEQ ID NO: 22269 - protein, 255 aa, Homo sapiens
VRVCVCSCGCTCGPAGVPPPVSPELKDRKEDAKGMEDEGQTKIKQRRSRTNFTLEQLNELERLFDETHYPDAFMREELSQRLGLSEARVQVWFQNRRAKCRKQENQLHKGVLIGAASQFEACRVAPYVNVGALRMPFQQASSGAAAAGQRCGARAPPPASAPGRARALHDVPSTALRTAARHAGRGFGFRRLGSGGRSSRQDHQQELQHRRSQTESQKARRSPGSVTPTPAPMSRLSRGTQPARPPRPAASPLPL

SEQ ID NO: 22270 - protein, 140 aa, Homo sapiens
LGLQVHTATPNYDFCIFGGDGVSPCCPGWSQIPELKRSPCLGLTKCRDYRSRSRPRLRSHSRSSERSSHRRTRSRSRDRERRKGRDKEKREKEKDKGKDKELHNIKRGESGNIKAGLEHLPPAEQAKARLQLVLEAAGKC

SEQ ID NO: 22271 - protein, 217 aa, Homo sapiens
LQRVVLLCLLAILVHTDVSSFQTMDQMVSNMRNYMQKLERNFGQLSVDPNGHSFCSSSVMTYSKIGDEPPKVFQASTQTRRAPGGIKETRKAMRDSDSGLEKMAIGHHIHDRAHVIKKSKNKKTGDEEVNQEFINMNESDAHAFDEEWQSEVLKYKPGRHNLGNTRMRSVGHENPGSRELKRREKPQQSPAIEHGRRSNVLGDKLHIKGSSVKSNKK

SEQ ID NO: 22272 - protein, 19 aa, Homo sapiens
MVTGRYQVFESNRHRFPGT

SEQ ID NO: 22273 - protein, 33 aa, Homo sapiens
LLKKLIGPNNLDMSFCRLEFLKRVLLSYKLTRL

SEQ ID NO: 22274 - protein, 406 aa, Homo sapiens
LTCWLFPLAALSRGALRLLTPSVKSCCSVAQAGVQWQDLSSLQSPSLRFKQFSCLSLPSRWDYRTFGSRASELLWMASALWTVLPSRMSLRSLKWSLLLLSLLSFFVMWYLSLPHYNVIERVNWMYFYEYEPIYRQDFHFTLREHSNCSHQNPFLVILVTSHPSDVKARQAIRVTWGEKKSWWGYEVLTFFLLGQEAEKEDKMLALSLEDEHLLYGDIIRQDFLDTYNNLTLKTIMAFRWVTEFCPNAKYVMKTDTDVFINTGNLVKYLLNLNHSEKFFTGYPLIDNYSYRGFYQKTHISYQEYPFKVFPPYCSGLGYIMSRDLVPRIYEMMGHVKPIKFEDVYVGICLNLLKVNIHIPEDTNLFFLYRIHLDVCQLRRVIAAHGFSSKEIITFWQVMLRNTTCHY

SEQ ID NO: 22275 - protein, 643 aa, Homo sapiens [sequence omitted]

SEQ ID NO: 22276 - protein, 603 aa, Homo sapiens
MSVQSNLQAGAAAASCISPKYYMIFTPCKLCHLCCRESEINMHSKVTIICIRFLFWFLLLCMLIGKSHTEDDIIIATKNGKVRGMNLTVFGGTVTAFLGIPYAQPPLGRLRFKKPQSLTKWSDIWNATKYANSCCQNIDQSFPGFHGSEMWNPNTDLSEDCLYLNVWIPAPKPKNATVLIWIYGGGFQTGTSSLHVYDGKFLARVERVIVVSMNYRVGALGFLALPGNPEAPGNMGLFDQQLALQWVQKNIAAFGGNPKSVTLFGESAGAASVSLHLLSPGSHSLFTRAILQSGSFNAPWAVTSLYEARNRTLNLAKLTGCSRENETEIIKCLRNKDPQEILLNEAFVVPYGTPLSVNFGPTVDGDFLTDMPDILLELGQFKKTQILVGVNKDEGTAFLVYGAPGFSKDNNSIITRKEFQEGLKIFFPGVSEFGKESILFHYTDWVDDQRPENYREALGDVVGDYNFICPALEFTKKFSEWGNNAFFYYFEHRSSKLPWPEWMGVMHGYEIEFVFGLPLERRDNYTKAEEILSRSIVKRWANFAKYGNPNETQNNSTSWPVFKSTEQKYLTLNTESTRIMTKLRAQQCRFWTSFFPKVLEMTG

SEQ ID NO: 22277 - protein, 566 aa, Homo sapiens
MSVQSNLQAGAAAASCISPKYYMIFTPCKLCHLCCRESEINMHSKVTIICIRFLFWFLLLCMLIGKSHTEDDIIIATKNGKVRGMNLTVFGGTVTAFLGIPYAQPPLGRLRFKKPQSLTKWSDIWNATKYANSCCQNIDQSFPGFHGSEMWNPNTDLSEDCLYLNVWIPAPKPKNATVLIWIYGGGFQTGTSSLHVYDGKFLARVERVIVVSMNYRVGALGFLALPGNPEAPGNMGLFDQQLALQWVQKNIAAFGGNPKSVTLFGESAGAASVSLHLLSPGSHSLFTRAILQSGSFNAPWAVTSLYEARNRTLNLAKLTGCSRENETEIIKCLRNKDPQEILLNEAFVVPYGTPLSVNFGPTVDGDFLTDMPDILLELGQFKKTQILVGVNKDEGTAFLVYGAPGFSKDNNSIITRKEFQEGLKIFFPGVSEFGKESILFHYTDWVDDQRPENYREALGDVVGDYNFICPALEFTKKFSEWGNNAFFYYFEHRSSKLPWPEWMGVMHGYEIEFVFGLPLERRDNYTKAEEILSRSIVKRWANFAKYGCSSSTILNYVLETEPVVLI

SEQ ID NO: 22278 - protein, 803 aa, Homo sapiens
VVIMNRKDFVVLPWGKPGNSVKLKYRNAQELRMEKVQLEFENQEMEKKLQEFRSTRNKEKEDRESSEYYWKSGKVGKLVNQSYMMSQNKGNVVKFSAGKVKLKLLKEQIQEPVKPTVNYKMANSSECEKPKINGKVCGQCENKAALLVCLECGEDYCSGCFAKVHQKGALKLHRTTLLQAKSQILFNVLDVAHQFIKDVNPDEPKEENNSTKETSKIQHKPKSVLLQRSSSEVEITTMKRAQRTKPRKSLLCEGSFDEEASAQSFQEVLSQWRTGNHDDNKKQNLHAAVKDSLEECEVQTNLKIWREPLNIELKEDILSYMEKLWLKKHRRTPQEQLFKMLPDTFPHPHETTGDAQCSQNENDEDSDGEETKVQHTALLLPVETLNIERPEPSLKIVELDDTYEEEFEEAENIVPYKVKLADADSQRSCAFHDCQKNSFPYENGIHQHHVFDKGKRDFLNLCLRNSSTYYKDNSKAETSNTDFDNIVDPDVYSSDIEKIEESTSFERNLKEKNIGLESNQKSDDSCVSLESKDTLLGRDLEKAPIEEKLSQDIKESLELSNLYKRPSFEESKTTKSSLLLQEIACRSKPITKQYQGLERFFIFDTNERLNLLPSHRLECNNSSTRITLAGQKSQRPSTANFPLSNSVKESSSCLSSSHPRSRSAAAQSSSRAASEISEIEYIDITDQNELSLDDTTDQHTLDNLEKELQVLRSLADTSEKLYSLTSEEFPDFSSQSLNISQISTDFLKTSHVRGPCGVEELSCSGRDTKIQSLLSLSESSTDEEEEDFLNKQHVITLPWSKST

SEQ ID NO: 22279 - protein, 842 aa, Homo sapiens
VVIMNRKDFVVLPWGKPGNSVKLKYRNAQELRMEKVQLEFENQEMEKKLQEFRSTRNKEKEDRESSEYYWKSGKVGKLVNQSYMMSQNKGNVVKFSAGKVKLKLLKEQIQEPVKPTVNYKMANSSECEKPKINGKVCGQCENKAALLVCLECGEDYCSGCFAKVHQKGALKLHRTTLLQAKSQILFNVLDVAHQFIKDVNPDEPKEENNSTKETSKIQHKPKSVLLQRSSSEVEITTMKRAQRTKPRKSLLCEGSFDEEASAQSFQEVLSQWRTGNHDDNKKQNLHAAVKDSLEECEVQTNLKIWREPLNIELKEDILSYMEKLWLKKHRRTPQEQLFKMLPDTFPHPHETTGDAQCSQNENDEDSDGEETKVQHTALLLPVETLNIERPEPSLKIVELDDTYEEEFEEAENIVPYKVKLADADSQRSCAFHDCQKNSFPYENGIHQHHVFDKGKRDFLNLCLRNSSTYYKDNSKAETSNTDFDNIVDPDVYSSDIEKIEESTSFERNLKEKNIGLESNQKSDDSCVSLESKDTLLGRDLEKAPIEEKLSQDIKESLELSNLYKRPSFEESKTTKSSLLLQEIACRSKPITKQYQGLERFFIFDTNERLNLLPSHRLECNNSSTRITLAEDREWIPDHSLSEYADNAIVLGVLQGAQSPSSSRKQQKMGQKSQRPSTANFPLSNSVKESSSCLSSSHPRSRSAAAQSSSRAASEISEIEYIDITDQNELSLDDTTDQHTLDNLEKELQVLRSLADTSEKLYSLTSEEFPDFSSQSLNISQISTDFLKTSHVRGPCGVEELSCSGRDTKIQSLLSLSESSTDEEEEDFLNKQHVITLPWSKST

SEQ ID NO: 22280 - protein, 17 aa, Homo sapiens
MKIPLHFSTAFSTVVGF

SEQ ID NO: 22281 - protein, 104 aa, Homo sapiens
LNVQHQMLKSQHEELKKQHSDLEEEHRKQGEDFSRTFNDHKQKYLQLQQEKEQELSKLKETVYNLREENRQLRKAHQDIHTQLQDVKVKENQTFHYLVFACFIW

SEQ ID NO: 22282 - protein, 38 aa, Homo sapiens
MRRASSRPRAFAENEPRRSLAAAARAASMAARPAPRGG

SEQ ID NO: 22283 - protein, 15 aa, Homo sapiens
VQERWGLLIILFCLF

SEQ ID NO: 22284 - protein, 30 aa, Homo sapiens
LGGVVAIFCLTLTEKGVGAVLLLPARCFSR

SEQ ID NO: 22285 - protein, 98 aa, Homo sapiens [sequence omitted]

SEQ ID NO: 22286 - protein, 16 aa, Homo sapiens
LDFLCWLITILNTWHL

SEQ ID NO: 22287 - protein, 34 aa, Homo sapiens
LDFFLLLNMLGLARMHIPTSFTKRLHASCKALTK

SEQ ID NO: 22288 - protein, 63 aa, Homo sapiens
MLPFNAWINLLQAWIQLTILYLPPTKKHPISSLVDYMNQLLHLFYYEKKINTTSFQTIMSKFS

SEQ ID NO: 22289 - protein, 10 aa, Homo sapiens
MPLALFLGLC

SEQ ID NO: 22290 - protein, 86 aa, Homo sapiens [sequence omitted]

SEQ ID NO: 22291 - protein, 42 aa, Homo sapiens
MCWKIAVVNFVIHISDSILDTMVALYFKYIELLKELNLPFSH

SEQ ID NO: 22292 - protein, 211 aa, Homo sapiens
LAATMVATCLQVVGFVTSFVGWIGVIVTTSTNDWVVTCGYTIPTCRKLDELGSKGLWADCVMATGLYHCKPLVDILILPGYVQACRALMIAASVLGLPAILLLLTVLPCIRMGQEPGVAKYRRAQLAGVLLILLALCALVATIWFPVCAHRETTIVSFGYSLYAGWIGAVLCLVGGCVILCCAGDAQAFGENRFYYTAGSSSPTHAKSAHV

SEQ ID NO: 22293 - protein, 167 aa, Homo sapiens
LKVPTEKLPSPLPTMADEIDFTTGDAGASSTYPMQCSALRKNGFVVLKGRPCKIVEMSTSKTGKHGHAKVHLVGIDIFTGKKYEDICPSTHNMDVPNIKRNDYQLICIQDGYLSLLTETGEVREDLKLPEGELGKEIEGKYNAGEDVQVSVMCAMSEEYAVAIKPCK

SEQ ID NO: 22294 - protein, 123 aa, Homo sapiens
LKVPTEKLPSPLPTMADEIDFTTGDAGASSTYPMQCSALRKNGFVVLKGRPCKIVEMSTSKTGKHGHAKVHLVGIDIFTGKKYEDICPSTHNMDVPNIKRNDYQVSVMCAMSEEYAVAIKPCK

SEQ ID NO: 22295 - protein, 119 aa, Homo sapiens
LKVPTEKLPSPLPTMADEIDFTTGDAGASSTYPMQCSALRKNGFVVLKGRPCKIVEMSTSKTGKHGHAKVHLVGIDIFTGKKYEDICPSTHNMDVPNIKRNDYQKLVKFVRILNCQKVN

SEQ ID NO: 22296 - protein, 33 aa, Homo sapiens
MVPDFSLLFSVSATTVLAQALHISHMNACRTVP

SEQ ID NO: 22297 - protein, 8 aa, Homo sapiens
VVYMILLL

SEQ ID NO: 22298 - protein, 165 aa, Homo sapiens
MLLTVCLTFFLYSGYSQEVVCYTLGNIPQMPSAPRLVRAGITWVTLQWSKPEGCSPEEVITYTLEIQEDENDNLFHPKYTGEDLTCTVKNLKRSTQYKFRLTASNTEGKSCPSEVLVCTTSPDRPGPPTRPLVKGPVTSHGFSVKWGMFCCCCYCFFFFFLLIDF

SEQ ID NO: 22299 - protein, 226 aa, Homo sapiens
MPLSQIKKVLDIRETEDCHNAFALLVRPPTEQANVLLSFQMTSDELPKENWLKMLCRHVANTICKADAENLIYTADPESFEVNTKDMDSTLSRASRAIKKTSKKVTRAFSFSKTPKRALRRALMTSHGSVEGRSPSSNDKHVMSRLSSTSSLAITHSVSTSNVIGFTKHVYVQRLNSTGGRSQYSWFQSVRHSAFRASFSEILEGNTDFSNFKKVLSKSSLTFVKN

SEQ ID NO: 22300 - protein, 45 aa, Homo sapiens
LIICISCLMVGFTWRWLWVPRILDRGCIWREKRINRHVLEVSVGE

SEQ ID NO: 22301 - protein, 107 aa, Homo sapiens [sequence omitted]

SEQ ID NO: 22302 - protein, 34 aa, Homo sapiens
LHLDLAGRGVTNYLMNILTQRLQLHHHCQAGNCG

SEQ ID NO: 22303 - protein, 42 aa, Homo sapiens
LPLLNNIKEYLFLSPCRKSHKFLYLFQFPFPAIDQITSLTFK

SEQ ID NO: 22304 - protein, 12 aa, Homo sapiens
MLLGTVLFSFFS

SEQ ID NO: 22305 - protein, 24 aa, Homo sapiens
VGKSSLFVYTMFLLWDNHTSNSLK

SEQ ID NO: 22306 - protein, 31 aa, Homo sapiens
LVMICLRVCVFLKSVMSLVLILSKEKAKIMN

SEQ ID NO: 22307 - protein, 12 aa, Homo sapiens
LSSLQLFSLISS

SEQ ID NO: 22308 - protein, 142 aa, Homo sapiens
LPVVAMAAMSLLRRVSVTAVAALSGRPLGTRLGFGGFLTRGFPKAAGQAELAEIPEGYVPEHWEYYKHPISRWIARNFYDSPEKIYERTMAVLQIEAEKAELRVKELEVRKLMHVRGDGPWYYYETIDKELIDHSPKATPDN

SEQ ID NO: 22309 - protein, 30 aa, Homo sapiens
VERLAFFFLLVQSFGYCERPRRSCGLAFCA

SEQ ID NO: 22310 - protein, 66 aa, Homo sapiens
LSATQVYTILAVQLFAFLNLLPVEADILAYNFENTSQSFGDLPARFGYRLPAEGLKGFLIKTRECL

SEQ ID NO: 22311 - protein, 568 aa, Homo sapiens
MAELTVEVRGSNGAFYKGFIKDVHEDSLTVVFENNWQPERQVPFNEVRLPPPPDIKKEISEGDEVEVYSRANDQEPCGWWLAKVRMMKGEFYVIEYAACDATYNEIVTFERLRPVNQNKTVKKNTFFKCTVDVPEDLREACANENAHKDFKKAVGACRIFYHPETTQLMILSASEATVKRVNILSDMHLRSIRTKLMLMSRNEEATKHLECTKQLAAAFHEEFVVREDLMGLAIGTHGSNIQQARKVPGVTAIELDEDTGTFRIYGESADAVKKARGFLEFVEDFIQVPRNLVGKVIGKNGKVIQEIVDKSGVVRVRIEGDNENKLPREDGMVPFVFVGTKESIGNVQVLLEYHIAYLKEVEQLRMERLQIDEQLRQIGMGFRPSSTRGPEKEKGYATDESTVSSVQGSRSYSGRGRGRRGPNYTSGYGTNSELSNPSETESERKDELSDWSLAGEDDRDSRHQRDSRRRPGGRGRSVSGGRGRGGPRGGKSSISSVLKDPDSNPYSLLDNTESDQTADTDASESHHSTNRRRRSRRRRTDEDAVLMDGMTESDTASVNENGLGKRCD

SEQ ID NO: 22312 - protein, 570 aa, Homo sapiens
LAKVRMMKGEFYVIEYAACDATYNEIVTFERLRPVNQNKTVKKNTFFKCTVDVPEDLREACANENAHKDFKKAVGACRIFYHPETTQLMILSASEATVKRVNILSDMHLRSIRTKLMLMSRNEEATKHLECTKQLAAAFHEEFVVREDLMGLAIGTHGSNIQQARKVPGVTAIELDEDTGTFRIYGESADAVKKARGFLEFVEDFIQVPRNLVGKVIGKNGKVIQEIVDKSGVVRVRIEGDNENKLPREDGMVPFVFVGTKESIGNVQVLLEYHIAYLKEVEQLRMERLQIDEQLRQIGMGFRPSSTRGPEKEKGYATDESTVSSVQGSRSYSGRGRGRRGPNYTSGYGTNSELSNPSETESERKDELSDWSLAGEDDRDSRHQRDSRRRPGGRGRSVSGGRGRGGPRGGKSSISSVLKDPDSNPYSLLDNTESDQTADTDASESHHSTNRRRRSRRRRTDEDAVLMDGMTESDTASVNENGLVTVADYISRAESQSRQRNLPRETLAKNKKEMAKDVIEEHGPSEKAINGPTSASGDDISKLQRTPGEEKINTLKEENTQEAAVLNGVS

SEQ ID NO: 22313 - protein, 149 aa, Homo sapiens
LRRSLVKACRCWPRPLSWDEPCSRWKQGSPAGAMASTVVAVGLTIAAAGFAGRYVLQAMKHMEPQVKQVFQSLPKSAFSGGYYRGGFEPKMTKREAALILGVSPTANKGKIRDAHRRIMLLNHPDKGGSPYIAAKINEAKDLLEGQAKK

SEQ ID NO: 22314 - protein, 34 aa, Homo sapiens
LQWSTGIDIPLPLLPSLDCKVFLFGKVMESSQLH

SEQ ID NO: 22315 - protein, 11 aa, Homo sapiens
LSQGIAVAKLG

SEQ ID NO: 22316 - protein, 1195 aa, Homo sapiens
LQPRGPRAPRDPDGDDGGMWRWIRQQLGFDPPHQSDTRTIYVANRFPQNGLYTPQKFIDNRIISSKYTVWNFVPKNLFEQFRRVANFYFLIIFLVQLMIDTPTSPVTSGLPLFFVITVTAIKQGYEDWLRHNSDNEVNGAPVYVVRSGGLVKTRSKNIRVGDIVRIAKDEIFPADLVLLSSDRLDGSCHVTTASLDGETNLKTHVAVPETALLQTVANLDTLVAVIECQQPEADLYRFMGRMIITQQMEEIVRPLGPESLLLRGARLKNTKEIFGVAVYTGMETKMALNYKSKSQKRSAVEKSMNTFLIIYLVILISEAVISTILKYTWQAEEKWDEPWYNQKTEHQRNSSKILRFISDFLAFLVLYNFIIPISLYVTVEMQKFLGSFFIGWDLDLYHEESDQKAQVNTSDLNEELGQVEYVFTDKTGTLTENEMQFRECSINGMKYQEINGRLVPEGPTPDSSEGNLSYLSSLSHLNNLSHLTTSSSFRTSPENETELIKEHDLFFKAVSLCHTVQISNVQTDCTGDGPWQSNLAPSQLEYYASSPDEKALVEAAARIGIVFIGNSEETMEVKTLGKLERYKLLHILEFDSDRRRMSVIVQAPSGEKLLFAKGAESSILPKCIGGEIEKTRIHVDEFALKGLRTLCIAYRKFTSKEYEEIDKRIFEARTALQQREEKLAAVFQFIEKDLILLGATAVEDRLQDKVRETIEALRMAGIKVWVLTGDKHETAVSVSLSCGHFHRTMNILELINQKSDSECAEQLRQLARRITEDHVIQHGLVVDGTSLSLALREHEKLFMEVCRNCSAVLCCRMAPLQKAKVIRLIKISPEKPITLAVGDGANDVSMIQEAHVGIGIMGKEGRQAARNSDYAIARFKFLSKLLFVHGHFYYIRIATLVQYFFYKNVCFITPQFLYQFYCLFSQQTLYDSVYLTLYNICFTSLPILIYSLLEQHVDPHVLQNKPTLYRDISKNRLLSIKTFLYWTILGFSHAFIFFFGSYLLIGKDTSLLGNGQMFGNWTFGTLVFTVMVITVTVKMALETHFWTWINHLVTWGSIIFYFVFSLFYGGILWPFLGSQNMYFVFIQLLSSGSAWFAIILMVVTCLFLDIIKKVFDRHLHPTSTEKAQLTETNAGIKCLDSMCCFPEGEAACASVGRMLERVIGRCSPTHISRSWSASDPFYTNDRSILTLSTMDSSTC

SEQ ID NO: 22317 - protein, 736 aa, Homo sapiens
MKYQEINGRLVPEGPTPDSSEGNLSYLSSLSHLNNLSHLTTSSSFRTSPENETELIKEHDLFFKAVSLCHTVQISNVQTDCTGDGPWQSNLAPSQLEYYASSPDEKALVEAAARIGIVFIGNSEETMEVKTLGKLERYKLLHILEFDSDRRRMSVIVQAPSGEKLLFAKGAESSILPKCIGGEIEKTRIHVDEFALKGLRTLCIAYRKFTSKEYEEIDKRIFEARTALQQREEKLAAVFQFIEKDLILLGATAVEDRLQDKVRETIEALRMAGIKVWVLTGDKHETAVSVSLSCGHFHRTMNILELINQKSDSECAEQLRQLARRITEDHVIQHGLVVDGTSLSLALREHEKLFMEVCRNCSAVLCCRMAPLQKAKVIRLIKISPEKPITLAVGDGANDVSMIQEAHVGIGIMGKEGRQAARNSDYAIARFKFLSKLLFVHGHFYYIRIATLVQYFFYKNVCFITPQFLYQFYCLFSQQTLYDSVYLTLYNICFTSLPILIYSLLEQHVDPHVLQNKPTLYRDISKNRLLSIKTFLYWTILGFSHAFIFFFGSYLLIGKDTSLLGNGQMFGNWTFGTLVFTVMVITVTVKMALETHFWTWINHLVTWGSIIFYFVFSLFYGGILWPFLGSQNMYFVFIQLLSSGSAWFAIILMVVTCLFLDIIKKVFDRHLHPTSTEKAQLTETNAGIKCLDSMCCFPEGEAACASVGRMLERVIGRCSPTHISRCEISLSSLCCR

SEQ ID NO: 22318 - protein, 40 aa, Homo sapiens
LASSLFTVFVSLRLAQFSHQSRMLSCMYFFHYKPHELLLC

SEQ ID NO: 22319 - protein, 772 aa, Homo sapiens
LDQPKGRLRLRRWPAGVTRLRSGGTGLACGTQLPLYWGVTEWPGSRDMAAASAVSVLLVAAERNRWHRLPSLLLPPRTWVWRQRTMKYTTATGRNITKVLIANRGEIACRVMRTAKKLGVQTVAVYSEADRNSMHVDMADEAYSIGPAPSQQSYLSMEKIIQVAKTSAAQAIHPGCGFLSENMEFAELCKQEGIIFIGPPPSAIRDMGIKSTSKSIMAAAGVPVVEGYHGEDQSDQCLKEHARRIGYPVMIKAVRGGGGKGMRIVRSEQEFQEQLESARREAKKSFNDDAMLIEKFVDTPRHVEVQVFGDHHGNAVYLFERDCSVQRRHQKIIEEAPAPGIKSEVRKKLGEAAVRAAKAVNYVGAGTVEFIMDSKHNFCFMEMNTRLQVEHPVTEMITGTDLVEWQLRIAAGEKIPLSQEEITLQGHAFEARIYAEDPSNNFMPVAGPLVHLSTPRADPSTRIETGVRQGDEVSVHYDPMIAKLVVWAADRQAALTKLRYSLRQYNIVGLHTNIDFLLNLSGHPEFEAGNVHTDFIPQHHKQLLLSRKAAAKESLCQAALGLILKEKAMTDTFTLQAHDQFSPFSSSSGRRLNISYTRNMTLKDGKNNVAIAVTYNHDGSYSMQIEDKTFQVLGNLYSEGDCTYLKCSVNGVASKAKLIILENTIYLFSKEGSIEIDIPVPKYLSSVSSQETQGGPLAPMTGTIEKVFVKAGDKVKAGDSLMVMIAMKMEHTIKSPKDGTVKKVFYREGAQANRHTPLVEFEEEESDKRESE

SEQ ID NO: 22320 - protein, 70 aa, Homo sapiens
LLAASSVRREVPGVTAPGPAERRGTGSPGECDRLKSSLLVWWDDRRFCPGGMTGSSHIKKIPNSHFSTII

SEQ ID NO: 22321 - protein, 36 aa, Homo sapiens
LLAASSVRREVPGVTAPGPAESHIKKIPNSHFSTII

SEQ ID NO: 22322 - protein, 26 aa, Homo sapiens
LTGALINQMLKSHIKKIPNSHFSTII

SEQ ID NO: 22323 - protein, 38 aa, Homo sapiens
MVRSRLTATSASRVQVILLSPGFNHIKKIPNSHFSTII

SEQ ID NO: 22324 - protein, 1475 aa, Homo sapiens
VCFRRLRGSLGPCGGAAPRGFARSLTSPCSLAAAGGARAAAGDPEKGEELNVIMSGIKRTIKETDPDYEDVSVALPNKRHKAIENSARDAAVQKIETIIKEQFALEMKNKEHEIEVIDQRLIEARRMMDKLRACIVANYYASAGLLKVSEGSKTCDTMVFNHPAIKKFLESPSRSSSPANQRAETPSANHSESDSLSQHNDFLSDKDNNSNMDIEERLSNNMEQRPSRNTGRDTSRITGSHKTEQRNADLTDETSRLFVKKTIVVGNVSKYIPPDKREENDQSTHKWMVYVRGSRREPSINHFVKKVWFFLHPSYKPNDLVEVREPPFHLTRRGWGEFPVRVQVHFKDSQNKRIDIIHNLKLDRTYTGLQTLGAETVVDVELHRHSLGEDCIYPQSSESDISDAPPSLPLTIPAPVKASSPIKQSHEPVPDTSVEKGFPASTEAERHTPFYALPSSLERTPTKMTTSQKVTFCSHGNSAFQPIASSCKIVPQSQVPNPESPGKSFQPITMSCKIVSGSPISTPSPSPLPRTPTSTPVHVKQGTAGSVINNPYVIMDKQPGQVIGATTPSTGSPTNKISTASQVSQGTGSPVPKIHGSSFVTSTVKQEDSLFASMPPLCPIGSHPKVQSPKPITGGLGAFTKVIIKQEPGEAPHVPATGAASQSPLPQYVTVKGGHMIAVSPQKQVITPGEGIAQSAKVQPSKVVGVPVGSALPSTVKQAVAISGGQILVAKASSSVSKAVGPKQVVTQGVAKAIVSGGGGTIVAQPVQTLTKAQVTAAGPQKSGSQGSVMATLQLPATNLANLANLPPGTKLYLTTNSKNPSGKGKLLLIPQGAILRATNNANLQSGSAASGGSGAGGGGGGGGGGGSGSGGGGSTGGGGGTAGGGTQSTAGPGGISQHLTYTSYILKQTPQGTFLVGQPSPQTSGKQLTTGSVVQGTLGVSTSSAQGQQTLKVISGQKTTLFTQAAHGGQASLMKISDSTLKTVPATSQLSKPGTTMLRVAGGVITTATSPAVALSANGPAQQSEGMAPVSSSTVSSVTKTSGQQQVCVSQATVGTCKAATPTVVSATSLVPTPNPISGKATVSGLLKIHSSQSSPQQAVLTIPSQLKPLSVNTSGGVQTILMPVNKVVQSFSTSKPPAILPVAAPTPVVPSSAPAAVAKVKTEPETPGPSCLSQEGQTAVKTEESSELGNYVIKIDHLETIQQLLTAVVKKIPLITAKSEDASCFSAKSVEQYYGWNIGKRRAAEWQRAMTMRKVLQEILEKNPRFHHLTPLKTKHIAHWCRCHGYTPPDPESLRNDGDSIEDVLTQIDSEPECPSSFSSADNLCRKLEDLQQFQKREPENEEEVDILSLSEPVKINIKKEQEEKQEEVKFYLPPTPGSEFIGDVTQKIGITLQPVALHRNVYASVVEDMILKATEQLVNDILRQALAVGYQTASHNRIPKEITVSNIHQAICNIPFLDFLTNKHMGILNEDQ

SEQ ID NO: 22325 - protein, 48 aa, Homo sapiens
LGMLCAARLRGVAADAAIKACFAAGLMLGSVVERLARLSWSRGAGILM

SEQ ID NO: 22326 - protein, 33 aa, Homo sapiens
LVVLVLFLLAEWRLAFSNLVWWSPLLQSTLQLK

SEQ ID NO: 22327 - protein, 80 aa, Homo sapiens [sequence omitted]

SEQ ID NO: 22328 - protein, 175 aa, Homo sapiens
LTAIVQKRFGFPEGSVELYAEKVATRGLCAIAQAESLRYKLLGGLAVWRACYGVLRFIMESGAKGCKVMASGKLRGQRAKSMKFVDGLTIHSGDPINYYVGTAVCHVLLRQGVLGIKVKIMLPWDPTGKTGPKKPLPDHVSIVEPKDEILPTTPISEQKGGKPEPSAMPQPVPTA

SEQ ID NO: 22329 - protein, 385 aa, Homo sapiens
LQAMAAARLARAAPAAAGAALHAAGGRLPLPGGGGHHLLGHSQGGMYPAGFVYIFMGLYYATSRGTDIRMAQNIFAVLYLATLLLVFLIYHQTCKVPPFVFFFMCCASYRVHSIFVLRLFNDPVAMVLLFLSINLLLAQRWGWGCCFFSLAVSVKMNVLLFAPGLLFLLLTQFGFRGALPKLGICAGLQVVLGLPFLLENPSGYLSRSFDLGRQFLFHWTVNWRFLPEALFLHRAFHLALLTAHLTLLLLFALCRWHRTGESILSLLRDPSKRKVPPQPLTPNQIVSTLFTSNFIGICFSRSLHYQFYVWYFHTLPYLLWAMPARWLTHLLRLLVLGLIELSWNTYPSTSCSSAALHICHAVILLQLWLGPQPFPKSTQHSKKAH

SEQ ID NO: 22330 - protein, 988 aa, Homo sapiens
MARGRLGIVVSTCLRGRGPRAGLSGRGGGWVAERPGSPRRFRSQAGSGGGGAPRPTRASWSGKKGGASGCARSGPAVAAEMEEGGRDKAPVQPQQSPAAAPGGTDEKPSGKERRDAGDKDKEQELSEEDKQLQDELEMLVERLGEKDTSLYRPALEELRRQIRSSTTSMTSVPKPLKFLRPHYGKLKEIYENMAPGENKRFAADIISVLAMTMSGERECLKYRLVGSQEELASWGHEYVRHLAGEVAKEWQELDDAEKVQREPLLTLVKEIVPYNMAHNAEHEACDLLMEIEQVDMLEKDIDENAYAKVCLYLTSCVNYVPEPENSALLRCALGVFRKFSRFPEALRLALMLNDMELVEDIFTSCKDVVVQKQMAFMLGRHGVFLELSEDVEEYEDLTEIMSNVQLNSNFLALARELDIMEPKVPDDIYKTHLENNRFGGSGSQVDSARMNLASSFVNGFVNAAFGQDKLLTDDGNKWLYKNKDHGMLSAAASLGMILLWDVDGGLTQIDKYLYSSEDYIKSGALLACGIVNSGVRNECDPALALLSDYVLHNSNTMRLGSIFGLGLAYAGSNREDVLTLLLPVMGDSKSSMEVAGVTALACGMIAVGSCNGDVTSTILQTIMEKSETELKDTYARWLPLGLGLNHLGKGEAIEAILAALEVVSEPFRSFANTLVDVCAYAGSGNVLKVQQLLHICSEHFDSKEKEEDKDKKEKKDKDKKEAPADMGAHQGVAVLGIALIAMGEEIGAEMALRTFGHLLRYGEPTLRRAVPLALALISVSNPRLNILDTLSKFSHDADPEVSYNSIFAMGMVGSGTNNARLAAMLRQLAQYHAKDPNNLFMVRLAQGLTHLGKGTLTLCPYHSDRQLMSQVAVAGLLTVLVSFLDVRNIILGKSHYVLYGLVAAMQPRMLVTFDEELRPLPVSVRVGQAVDVVGQAGKPKTITGFQTHTTPVLLAHGERAELATEEFLPVTPILEGFVILRKNPNYDL

SEQ ID NO: 22331 - protein, 18 aa, Homo sapiens
MPRTCRPHRGLVLNRGGE

SEQ ID NO: 22332 - protein, 20 aa, Homo sapiens
MPRTCRPHRGLVLNRGALLP

SEQ ID NO: 22333 - protein, 96 aa, Homo sapiens
LGGGELAQSLKIGAGWRGGLFLLPTHLIAFFPQIRIRDPNQGGKDITEEIMSGARTASTPTPPQTGGGLEPQANGETPQVAVIVRPVAHSSFLWCR

SEQ ID NO: 22334 - protein, 1454 aa, Homo sapiens
LGGGELAQSLKIGAGWRGGLFLLPTHLIAFFPQIRIRDPNQGGKDITEEIMSGARTASTPTPPQTGGGLEPQANGETPQVAVIVRPDDRSQGAIIADRPGLPGPEHSPSESQPSSPSPTPSPSPVLEPGSEPNLAVLSIPGDTMTTIQMSVEESTPISRETGEPYRLSPEPTPLAEPILEVEVTLSKPVPESEFSSSPLQAPTPLASHTVEIHEPNGMVPSEDLEPEVESSPELAPPPACPSESPVPIAPTAQPEELLNGAPSPPAVDLSPVSEPEEQAKEVTASMAPPTIPSATPATAPSATSPAQEEEMEEEEEEEEGEAGEAGEAESEKGGEELLPPESTPIPANLSQNLEAAAATQVAVSVPKRRRKIKELNKKEAVGDLLDAFKEANPAVPEVENQPPAGSNPGPESEGSGVPPRPEEADETWDSKEDKIHNAENIQPGEQKYEYKSDQWKPLNLEEKKRYDREFLLGFQFIFASMQKPEGLPHISDVVLDKANKTPLRPLDPTRLQGINCGPDFTPSFANLGRTTLSTRGPPRGGPGGELPRGPQAGLGPRRSQQGPRKEPRKIIATVLMTEDIKLNKAEKAWKPSSKRTAADKDRGEEDADGSKTQDLFRRVRSILNKLTPQMFQQLMKQVTQLAIDTEERLKGVIDLIFEKAISEPNFSVAYANMCRCLMALKVPTTEKPTVTVNFRKLLLNRCQKEFEKDKDDDEVFEKKQKEMDEAATAEERGRLKEELEEARDIARRRSLGNIKFIGELFKLKMLTEAIMHDCVVKLLKNHDEESLECLCRLLTTIGKDLDFEKAKPRMDQYFNQMEKIIKEKKTSSRIRFMLQDVLDLRGSNWVPRRGDQGPKTIDQIHKEAEMEEHREHIKVQQLMAKGSDKRRGGPPGPPISRGLPLVDDGGWNTVPISKGSRPIDTSRLTKITKPGSIDSNNQLFAPGGRLSWGKGSSGGSGAKPSDAASEAARPATSTLNRFSALQQAVPTESTDNRRVVQRSSLSRERGEKAGDRGDRLERSERGGDRGDRLDRARTPATKRSFSKEVEERSRERPSQPEGLRKAASLTEDRDRGRDAVKREAALPPVSPLKAALSEEELEKKSKAIIEEYLHLNDMKEAVQCVQELASPSLLFIFVRHGVESTLERSAIAREHMGQLLHQLLCAGHLSTAQYYQGLYEILELAEDMEIDIPHVWLYLAELVTPILQEGGVPMGELFREITKPLRPLGKAASLLLEILGLLCKSMGPKKVGTLWREAGLSWKEFLPEGQDIGAFVAEQKVEYTLGEESEAPGQRALPSEELNRQLEKLLKEGSSNQRVFDWIEANLSEQQIVSNTLVRALMTAVCYSAIIFETPLRVDVAVLKARAKLLQKYLCDEQKELQALYALQALVVTLEQPPNLLRMFFDALYDEDVVKEDAFYSWESSKDPAEQQGKGVALKSVTAFFKWLREAEEESDHN

SEQ ID NO: 22335 - protein, 259 aa, Homo sapiens
VRARSPEMPPTVWFWLFAVALKLHGPLVEWSDGDDRIVLVPGRGNTEGPKKVGTLWREAGLSWKEFLPEGQDIGAFVAEQKVEYTLGEESEAPGQRALPSEELNRQLEKLLKEGSSNQRVFDWIEANLSEQQIVSNTLVRALMTAVCYSAIIFETPLRVDVAVLKARAKLLQKYLCDEQKELQALYALQALVVTLEQPPNLLRMFFDALYDEDVVKEDAFYSWESSKDPAEQQGKGVALKSVTAFFKWLREAEEESDHN

SEQ ID NO: 22336 - protein, 31 aa, Homo sapiens
MACNLLFSFWLVAFLGTNSWPRLRDRDGCSS

SEQ ID NO: 22337 - protein, 156 aa, Homo sapiens
LDTETFSLLLRLLLFSLQQSCLLPSQSGAPLLFHTNLVLGPCGLSFRAAPRPSSPIAFLPTLQTHTIFSLLGVDHAYVTSIGRLIGIVTLKELRKAIEGSVTAQGVKVRPPLASFRDSATSSSDTETTEVHALWGPHSRHGLPREGSPSDSDDKCQ

SEQ ID NO: 22338 - protein, 51 aa, Homo sapiens
LLFPALVTLLISTLTFPPGFGQFMAGQVTTGRTGVLCFPLEGIPPKPTAPV

SEQ ID NO: 22339 - protein, 9 aa, Homo sapiens
LLLLLFFTL

SEQ ID NO: 22340 - protein, 235 aa, Homo sapiens
MPSLPAPPAPLLLLGLLLLGSRPARGAGPEPPVLPIRSEKEPLPVRGAAGCTFGGKVYALDETWHPDLGEPFGVMRCVLCACEAPQWGRRTRGPGRVSCKNIKPECPTPACGQPRQLPGHCCQTCPQERSSSERQPSGLSFEYPRDPEHRSYSDRGEPGAEERARGDGHTDFVALLTGPRSQAVARARVSLLRSSLRFSISYRRLDRPTRIRFSDSNGSVLFEHPAAPTQDGLVR

SEQ ID NO: 22341 - protein, 186 aa, Homo sapiens
LLLLGLLLLGSRPARGAGPEPPVLPIRSEKEPLPVRGAAGCTFGGKVYALDETWHPDLGEPFGVMRCVLCACEAVSAPRGRPGPWRVGSAGSRGRRSGLGAAEKEPSRQMLGIFFWWRKGNQPLQFLGAVTDRPLCVRLCANSVSFPAHLTLMAALLDREYYYPHFPDRDLEAQRDEVACLGSRSL

SEQ ID NO: 22342 - protein, 408 aa, Homo sapiens
LLLLGLLLLGSRPARGAGPEPPVLPIRSEKEPLPVRGAAGCTFGGKVYALDETWHPDLGEPFGVMRCVLCACEAPQWGRRTRGPGRVSCKNIKPECPTPACGQPRQLPGHCCQTCPQERSSSERQPSGLSFEYPRDPEHRSYSDRGEPGAEERARGDGHTDFVALLTGPRSQAVARARVSLLRSSLRFSISYRRLDRPTRIRFSDSNGSVLFEHPAAPTQDGLVCGVWRAVPRLSLRLLRAEQLHVALVTLTHPSGEVWGPLIRHRALAAETFSAILTLEGPPQQGVGGITLLTLSDTEDSLHFLLLFRGLLEPRSGGKWDGGKTREKVRESTCLRKAHMCGLAGLTQVPLRLQILHQGQLLRELQANVSAQVSGDLALAATCLGLLLLPITPCSVPRNQALLRCCPT

SEQ ID NO: 22343 - protein, 127 aa, Homo sapiens
LSRVTQLPQWGRRTRGPGRVSCKNIKPECPTPACGQPRQLPGHCCQTCPQERSSSERQPSGLSFEYPRDPEHRSYSDRGEPGAEERARGDGHTDFVALLTGPRSQAVARARVSLLRSSLRFSISYRR

SEQ ID NO: 22344 - protein, 158 aa, Homo sapiens
LSRVTQLPQWGRRTRGPGRVSCKNIKPECPTPACGQPRQLPGHCCQTCPQERSSSERQPSGLSFEYPRDPEHRSYSDRGEPGAEERARGDGHTDFVALLTGPRSQAVARARVSLLRSSLRFSISYRRLDRPTRIRFSDSNGSVLFEHPAAPTQDGLVR

SEQ ID NO: 22345 - protein, 273 aa, Homo sapiens
LSRVTQLPQWGRRTRGPGRVSCKNIKPECPTPACGQPRQLPGHCCQTCPQERSSSERQPSGLSFEYPRDPEHRSYSDRGEPGAEERARGDGHTDFVALLTGPRSQAVARARVSLLRSSLRFSISYRRLDRPTRIRFSDSNGSVLFEHPAAPTQDGLVCGVWRAVPRLSLRLLRAEQLHVALVTLTHPSGEVWGPLIRHRALAAETFSAILTLEGPPQQGVGGITLLTLSDTEDSLHFLLLFRGLLEPRSGDSTPGAATARTSGQCLSPGTRLC

SEQ ID NO: 22346 - protein, 180 aa, Homo sapiens
LTLRDILAWGGLISWHLALTWVSRLFREQPQWGRRTRGPGRVSCKNIKPECPTPACGQPRQLPGHCCQTCPQERSSSERQPSGLSFEYPRDPEHRSYSDRGEPGAEERARGDGHTDFVALLTGPRSQAVARARVSLLRSSLRFSISYRRLDRPTRIRFSDSNGSVLFEHPAAPTQDGLVR

SEQ ID NO: 22347 - protein, 29 aa, Homo sapiens
MGVIDYNILVICETFLLKCDPHFSLHERT

SEQ ID NO: 22348 - protein, 109 aa, Homo sapiens
LKNLRIMLKLNPYAKTMRRNTILRQARNHKLRVDKAAAAAAALPAKSDEKAAVAGKKPVVGKKGKKAAVGVKKQKKPLVGKKAAATKKPAPEKKPAEKKPTTEEKKPAA

SEQ ID NO: 22349 - protein, 34 aa, Homo sapiens
VLLTYMMISVTLLCSDTLTLPCMSDLLMIACPDS

SEQ ID NO: 22350 - protein, 16 aa, Homo sapiens
MLFSFCICVVWCFVPS

SEQ ID NO: 22351 - protein, 44 aa, Homo sapiens
LKPALELGYCLWAIFFIVSCLKSEQCLVKLGDFYTFYDDYFWWS

SEQ ID NO: 22352 - protein, 37 aa, Homo sapiens
VKGISKVGIMFLIFICELSHPAPQLFLCWPSTSDYFL

SEQ ID NO: 22353 - protein, 141 aa, Homo sapiens
LKEHAVEGDCDFQLLKLDGKFSVVYAKCDSSPDSAEDVRKVCQDCPLLAPLNDTRVVHAAKAALAAFNAQNNGSNFQLEEISRAQLVVKTEILLTGWAVRWHFGNVLYVVEREAGKNRRRGSDEKARRGLFGKGRKHPKGV

SEQ ID NO: 22354 - protein, 339 aa, Homo sapiens
LALCILVLCCGAMSPPQLALNPSALLSRGCNDSDVLAVAGFALRDINKDRKDGYVLRLNRVNDAQEYRRVYGQCKAIFYMNNPSRVLYLAAYNCTLRPVSKKKIYMTCPDCPSSIPTDSSNHQVLEAATESLAKYNNENTSKQYSLFKVTRASSQWVVGPSYFVEYLIKESPCTKSQASSCSLQSSDSVPVGLCKGSLTRTHWEKFVSVTCDFFESQAPATGSENSAVNQKPTNLPKVEESQQKNTPPTDSPSKAGPRGSVQYLPDLDDKNSQEKGPQEAFPVHLDLTTNPQGETLDISFLFLEPMEEKLVVLPFPKEKARTAECPGPAQNASPLVLPP

SEQ ID NO: 22355 - protein, 81 aa, Homo sapiens
VVFRIMSGGSADYNREHGGPEGMDPDGVIESNWNEIVDNFDDMNLKESLLRGIYAYGFEKPSAIQQRAIIPCIKGKRNWHF

SEQ ID NO: 22356 - protein, 125 aa, Homo sapiens
VVFRIMSGGSADYNREHGGPEGMDPDGVIESNWNEIVDNFDDMNLKESLLRGIYAYGFEKPSAIQQRAIIPCIKGYDVIAQAQSGTGKTATFAISILQQLEIEFKETQALVLAPTRELAQQVLIV

SEQ ID NO: 22357 - protein, 101 aa, Homo sapiens
VVFRIMSGGSADYNREHGGPEGMDPDGVIESNWNEIVDNFDDMNLKESLLRGIYAYGFEKPSAIQQRAIIPCIKDPKGNSGTWRLYGSHLSCLHWWNKCSK

SEQ ID NO: 22358 - protein, 367 aa, Homo sapiens
VVFRIMSGGSADYNREHGGPEGMDPDGVIESNWNEIVDNFDDMNLKESLLRGIYAYGFEKPSAIQQRAIIPCIKGYDVIAQAQSGTGKTATFAISILQQLEIEFKETQALVLAPTRELAQQIQKVILALGDYMGATCHACIGGTNVRNEMQKLQAEAPHIVVGTPGRVFDMLNRRYLSPKWIKMFVLDEADEMLSRGFKDQIYEIFQKLNTSIQVVLLSATMPTDVLEVTKKFMRDPIRILVKKEELTLEGIKQFYINVEREEWKLDTLCDLYETLTITQAVIFLNTRRKVDWLTEKMHARDFTVSALHGDMDQKERDVIMREFRSGSSRVLITTDLLARGIDVQQVSLVINYDLPTNRENYIHRSR

SEQ ID NO: 22359 - protein, 412 aa, Homo sapiens
VVFRIMSGGSADYNREHGGPEGMDPDGVIESNWNEIVDNFDDMNLKESLLRGIYAYGFEKPSAIQQRAIIPCIKGYDVIAQAQSGTGKTATFAISILQQLEIEFKETQALVLAPTRELAQQIQKVILALGDYMGATCHACIGGTNVRNEMQKLQAEAPHIVVGTPGRVFDMLNRRYLSPKWIKMFVLDEADEMLSRGFKDQIYEIFQKLNTSIQVVLLSATMPTDVLEVTKKFMRDPIRILVKKEELTLEGIKQFYINVEREEWKLDTLCDLYETLTITQAVIFLNTRRKVDWLTEKMHARDFTVSALHGDMDQKERDVIMREFRSGSSRVLITTDLLARGIDVQQVSLVINYDLPTNRENYIHRIGRGGRFGRKGVAINFVTEEDKRILRDIETFYNTTVEEMPMNVADLI

SEQ ID NO: 22360 - protein, 222 aa, Homo sapiens
VASMLTVLRSLPLFSRELLFPVLKIQKVILALGDYMGATCHACIGGTNVRNEMQKLQAEAPHIVVGTPGRVFDMLNRRYLSPKWIKMFVLDEADEMLSRGFKDQIYEIFQKLNTSIQVVLLSATMPTDVLEVTKKFMRDPIRILVKKEELTLEGIKQFYINVEREEWKLDTLCDLYETLTITQAVIFLNTRRKVDWLTEKMHARDFTVSALVRGVLKCLDFH

SEQ ID NO: 22361 - protein, 213 aa, Homo sapiens
VASMLTVLRSLPLFSRELLFPVLKIQKVILALGDYMGATCHACIGGTNVRNEMQKLQAEAPHIVVGTPGRVFDMLNRRYLSPKWIKMFVLDEADEMLSRGFKDQIYEIFQKLNTSIQVVLLSATMPTDVLEVTKKFMRDPIRILVKKEELTLEGIKQFYINVEREEWKLDTLCDLYETLTITQAVIFLNTRRKVDWLTEKMHARDFTVSALVY

SEQ ID NO: 22362 - protein, 315 aa, Homo sapiens
VASMLTVLRSLPLFSRELLFPVLKIQKVILALGDYMGATCHACIGGTNVRNEMQKLQAEAPHIVVGTPGRVFDMLNRRYLSPKWIKMFVLDEADEMLSRGFKDQIYEIFQKLNTSIQVVLLSATMPTDVLEVTKKFMRDPIRILVKKEELTLEGIKQFYINVEREEWKLDTLCDLYETLTITQAVIFLNTRRKVDWLTEKMHARDFTVSALHGDMDQKERDVIMREFRSGSSRVLITTDLLARGIDVQQVSLVINYDLPTNRENYIHRIGRGGRFGRKGVAINFVTEEDKRILRDIETFYNTTVEEMPMNVADLI

SEQ ID NO: 22363 - protein, 250 aa, Homo sapiens
MQKLQAEAPHIVVGTPGRVFDMLNRRYLSPKWIKMFVLDEADEMLSRGFKDQIYEIFQKLNTSIQVVLLSATMPTDVLEVTKKFMRDPIRILVKKEELTLEGIKQFYINVEREEWKLDTLCDLYETLTITQAVIFLNTRRKVDWLTEKMHARDFTVSALHGDMDQKERDVIMREFRSGSSRVLITTDLLVSLLMLFKNLPKVSFLGGRFLSNLCQLGLFGRVKDHTPQWAIPLSIVRYYFVAYMTGVKFF

SEQ ID NO: 22364 - protein, 66 aa, Homo sapiens
LKSQIVSLSRSRNDSMTLFLTAPKWIKMFVLDEADEMLSRGFKDQIYEIFQKLNTSIQVSITSPPS

SEQ ID NO: 22365 - protein, 37 aa, Homo sapiens
MQCSLLLNRRSQRALCFFLWEYLNLVSMLITDQKYRF

SEQ ID NO: 22366 - protein, 24 aa, Homo sapiens
VMSFDHPEKNGPWPADPINLPSHG

SEQ ID NO: 22367 - protein, 41 aa, Homo sapiens
LSWLCTWHVVGAQFMLVSFLPLVGTCSVLTPRLHAPCCDGG

SEQ ID NO: 22368 - protein, 783 aa, Homo sapiens
LGVQEQVKGEREERGKARGREGERGSVAGRGRRDLNGECQPIPETHRDLRTKIRHHGHHTGHELTGKSSWEDQGRAAGSTQGRKMRWLLLYYALCFSLSKASAHTVELNNMFGQIQSPGYPDSYPSDSEVTWNITVPDGFRIKLYFMHFNLESSYLCEYDYVKVETEDQVLATFCGRETTDTEQTPGQEVVLSPGSFMSITFRSDFSNEERFTGFDAHYMAVDVDECKEREDEELSCDHYCHNYIGGYYCSCRFGYILHTDNRTCRVECSDNLFTQRTGVITSPDFPNPYPKSSECLYTIELEEGFMVNLQFEDIFDIEDHPEVPCPYDYIKIKVGPKVLGPFCGEKAPEPISTQSHSVLILFHSDNSGENRGWRLSYRAAGNECPELQPPVHGKIEPSQAKYFFKDQVLVSCDTGYKVLKDNVEMDTFQIECLKDGTWSNKIPTCKIVDCRAPGELEHGLITFSTRNNLTTYKSEIKYSCQEPYYKMLNNNTGIYTCSAQGVWMNKVLGRSLPTCLPVCGLPKFSRKLMARIFNGRPAQKGTTPWIAMLSHLNGQPFCGGSLLGSSWIVTAAHCLHQSLDPEDPTLRDSDLLSPSDFKIILGKHWRLRSDENEQHLGVKHTTLHPQYDPNTFENDVALVELLESPVLNAFVMPICLPEGPQQEGAMVIVSGWGKQFLQRFPETLMEIEIPIVDHSTCQKAYAPLKKKVTRDMICAGEKEGGKDACAGDSGGPMVTLNRERGQWYLVGTVSWGDDCGKKDRYGVYSYIHHNKDWIQRVTGVRN

SEQ ID NO: 22369 - protein, 697 aa, Homo sapiens [sequence omitted]

SEQ ID NO: 22370 - protein, 778 aa, Homo sapiens
LNGECQPIPETHRDLRTKIRHHGHHTGHELTGKSSWEDQGRAAGSTQGRKMRWLLLYYALCFSLSKASAHTVELNNMFGQIQSPGYPDSYPSDSEVTWNITVPDGFRIKLYFMHFNLESSYLCEYDYVKVETEDQVLATFCGRETTDTEQTPGQEVVLSPGSFMSITFRSDFSNEERFTGFDAHYMAVDVDECKEREDEELSCDHYCHNYIGGYYCSCRFGYILHTDNRTCRVECSDNLFTQRTGVITSPDFPNPYPKSSECLYTIELEEGFMVNLQFEDIFDIEDHPEVPCPYDYIKIKVGPKVLGPFCGEKAPEPISTQSHSVLILFHSDNSGENRGWRLSYRAAGNECPELQPPVHGKIEPSQAKYFFKDQVLVSCDTGYKVLKDNVEMDTFQIECLKDGTWSNKIPTCKIVDCRAPGELEHGLITFSTRNNLTTYKSEIKYSCQEPYYKMLNNNTGIYTCSAQGVWMNKVLGRSLPTCLPECGQPSRSLPSLVKRIIGGRNAEPGLFPWQALIVVEDTSRVPNDKWFGSGALLSASWILTAAHVLRSQRRDTTVIPVSKEHVTVYLGLHDVRDKSGAVNSSAARVVLHPDFNIQNYNHDIALVQLQEPVPLGPHVMPVCLPRLEPEGPAPHMLGLVAGWGISNPNVTVDEIISSGTRTLSDVLQYVKLPVVPHAECKTSYESRSGNYSVTENMFCAGYYEGGKDTCLGDSGGAFVIFDDLSQRWVVQGLVSWGGPEECGSKQVYGVYTKVSNYVDWVWEQMGLPQSVVEPQVER

SEQ ID NO: 22371 - protein, 464 aa, Homo sapiens
LGVQEQVKGEREERGKARGREGERGSVAGRGRRDLNGECQPIPETHRDLRTKIRHHGHHTGHELTGKSSWEDQGRAAGSTQGRKMRWLLLYYALCFSLSKASAHTVELNNMFGQIQSPGYPDSYPSDSEVTWNITVPDGFRIKLYFMHFNLESSYLCEYDYVKVETEDQVLATFCGRETTDTEQTPGQEVVLSPGSFMSITFRSDFSNEERFTGFDAHYMAVDVDECKEREDEELSCDHYCHNYIGGYYCSCRFGYILHTDNRTCRVECSDNLFTQRTGVITSPDFPNPYPKSSECLYTIELEEGFMVNLQFEDIFDIEDHPEVPCPYDYIKIKVGPKVLGPFCGEKAPEPISTQSHSVLILFHSDNSGENRGWRLSYRAAGNECPELQPPVHGKIEPSQAKYFFKDQVLVSCDTGYKVLKDNVEMDTFQIECLKDGTWSNKIPTCKKNEIDLESELKSEQVTE

SEQ ID NO: 22372 - protein, 48 aa, Homo sapiens
LLSLFQHFVAASLLCSVLLPVKGFSPHRGAKQYVWPDPVAWLSRLLSQ

SEQ ID NO: 22373 - protein, 95 aa, Homo sapiens
MPANSRDTQGPQNKDKASRTPHRARAHRQVKLGGPRPGSREHPRQENETYIHVFQVAASLLCSVLLPVKGFSPHRGAKQYVWPDPVAWLSRLLSQ

SEQ ID NO: 22374 - protein, 86 aa, Homo sapiens
LRGWERTKSSVKIQTKCWWCFHTCGIWGGGGDNIAHTQPTHSGVGGGWFLRRVGLQRSELEKDLRLVYVHLFLARQRLTVKSPRPS

SEQ ID NO: 22375 - protein, 25 aa, Homo sapiens
LIIFLIYLQGSVCQMCATLLISHQR

SEQ ID NO: 22376 - protein, 43 aa, Homo sapiens
MSHHCSPTAKTSVASVLSSSLPVWKGNIAQIGDTGHFIDFKAT

SEQ ID NO: 22377 - protein, 712 aa, Homo sapiens
LRRRMRERIWAPPLLLLLPLLLPPPLWGGPPDSPRRELELEPGPLQPFDLLYASGAAAYYSGDYERAVRDLEAALRSHRRLREIRTRCARHCAARHPLPPPPPGEGPGAELPLFRSLLGRARCYRSCETQRLGGPASRHRVSEDVRSDFQRRVPYNYLQRAYIKLNQLEKAVEAAHTFFVANPEHMEMQQNIENYRATAGVEALQLVDREAKPHMESYNAGVKHYEADDFEMAIRHFEQALREYFVEDTECRTLCEGPQRFEEYEYLGYKAGLYEAIADHYMQVLVCQHECVRELATRPGRLSPIENFLPLHYDYLQFAYYRVGEYVKALECAKAYLLCHPDDEDVLDNVDYYESLLDDSIDPASIEAREDLTMFVKRHKLESELIKSAAEGLGFSYTEPNYWIRYGGRQDENRVPSGVNVEGAEVHGFSMGKKLSPKIDRDLREGGPLLYENITFVYNSEQLNGTQRVLLDNVLSEEQCRELHSVASGIMLVGDGYRGKTSPHTPNEKFEGATVLKALKSGYEGRVPLKSARLFYDISEKARRIVESYFMLNSTLYFSYTHMVCRTALSGQQDRRNDLSHPIHADNCLLDPEANECWKEPPAYTFRDYSALLYMNDDFEGGEFIFTEMDAKTVTASIKPKCGRMISFSSGGENPHGVKAVTKGKRCAVALWFTLDPLYRELERIQADEVIAILDQEQQGKHELNINPKDEL

SEQ ID NO: 22378 - protein, 154 aa, Homo sapiens [sequence omitted]

SEQ ID NO: 22379 - protein, 116 aa, Homo sapiens
LIFHEMLDWRLASAHFILAVTLTLWSSGKVLSVDVTTTEAFDSGVIDVQSTPTVREEKSATDLTAKLLLLDELVSLENDVIETKKKRSFSGFGSPLDRLSAGSVDHKGKQRCNFLG

SEQ ID NO: 22380 - protein, 379 aa, Homo sapiens
LRRHESCHTGIKVVSQPKKTPTTVFPLISTMAGDSSRTSLVSTIAGILSTVTTSSSGTNPSSSASTTALPVTQSVKKPSKPVKKNQACEMCGKAFRDVYHLSRHKLSHSDEKPFECPICNQRFKRKDRMTYRVRSHEGGITKPYTCSVCGKGFSRPDPLSCHVKHVHSTERPFKCQTCTAAFAAKDRLRTHMVRHEDKVSCNICGKLLSAAYITSHLKTHGQSQSINCNTCKQGISKTSMSEETSNQKQQQQQQQQQQHVTSWPGKQVATLRLWEEAVKARKKEAANLCQTSTAATTPVTLTTPFNITSSVSSGAMSNPVTLAAAMSMRSSVNVSRAVNITSPMNIGHPVTITSPLSMTSPLTLTTQINLPTPSLPQRI

SEQ ID NO: 22381 - protein, 63 aa, Homo sapiens
LGMLAGEMLAIQGSSGFIRKPDFAGRPGVEERVLEKQTWEERHSQRSGRAGLLPEHRCHENHP

SEQ ID NO: 22382 - protein, 7 aa, Homo sapiens
VVVSVTD

SEQ ID NO: 22383 - protein, 1041 aa, Homo sapiens
LSTGACQALAEVHAPLGGPRPRLCALAAEGHFLGHSWTGSRAGAHTGAPAWPSRRLRDLPAGGMWRLRRAAVACEVCQSLVKHSSGIKGSLPLQKLHLVSRSIYHSHHPTLKLQRPQLRTSFQQFSSLTNLPLRKLKFSPIKYGYQPRRNFWPARLATRLLKLRYLILGSAVGGGYTAKKTFDQWKDMIPDLSEYKWIVPDIVWEIDEYIDFEKIRKALPSSEDLVKLAPDFDKIVESLSLLKDFFTSGHKLVSEVIGASDLLLLLGSPEETAFRATDRGSESDKHFRKVSDKEKIDQLQEELLHTQLKYQRILERLEKENKELRKLVLQKDDKGIHHRKLKKSLIDMYSEVLDVLSDYDASYNTQDHLPRVVVVGDQSAGKTSVLEMIAQARIFPRGSGEMMTRSPVKVTLSEGPHHVALFKDSSREFDLTKEEDLAALRHEIELRMRKNVKEGCTVSPETISLNVKGPGLQRMVLVDLPGVINTVTSGMAPDTKETIFSISKAYMQNPNAIILCIQDGSVDAERSIVTDLVSQMDPHGRRTIFVLTKVDLAEKNVASPSRIQQIIEGKLFPMKALGYFAVVTGKGNSSESIEAIREYEEEFFQNSKLLKTSMLKAHQVTTRNLSLAVSDCFWKMVRESVEQQADSFKATRFNLETEWKNNYPRLRELDRNELFEKAKNEILDEVISLSQVTPKHWEEILQQSLWERVSTHVIENIYLPAAQTMNSGTFNTTVDIKLKQWTDKQLPNKAVEVAWETLQEEFSRFMTEPKGKEHDDIFDKLKEAVKEESIKRHKWNDFAEDSLRVIQHNALEDRSISDKQQWDAAIYFMEEALQARLKDTENAIENMVGPDWKKRWLYWKNRTQEQCVHNETKNELEKMLKCNEEHPAYLASDEITTVRKNLESRGVEVDPSLIKDTWHQVYRRHFLKTALNHCNLCRRGFYYYQRHFVDSELECNDVVLFWRIQRMLAITANTLRQQLTNTEVRRLEKNVKEVLEDFAEDGEKKIKLLTGKRVQLAEDLKKVREIQEKLDAFIEALHQEK

SEQ ID NO: 22384 - protein, 1042 aa, Homo sapiens
LSTGACQALAEVHAPLGGPRPRLCALAAEGHFLGHSWTGSRAGAHTGAPAWPSRRLRDLPAGGMWRLRRAAVACEVCQSLVKHSSGIKGSLPLQKLHLVSRSIYHSHHPTLKLQRPQLRTSFQQFSSLTNLPLRKLKFSPIKYGYQPRRNFWPARLATRLLKLRYLILGSAVGGGYTAKKTFDQWKDMIPDLSEYKWIVPDIVWEIDEYIDFGHKLVSEVIGASDLLLLLGSPEETAFRATDRGSESDKHFRKGLLGELILLQQQIQEHEEEARRAAGQYSTSYAQQKRKVSDKEKIDQLQEELLHTQLKYQRILERLEKENKELRKLVLQKDDKGIHHRKLKKSLIDMYSEVLDVLSDYDASYNTQDHLPRVVVVGDQSAGKTSVLEMIAQARIFPRGSGEMMTRSPVKVTLSEGPHHVALFKDSSREFDLTKEEDLAALRHEIELRMRKNVKEGCTVSPETISLNVKGPGLQRMVLVDLPGVINTVTSGMAPDTKETIFSISKAYMQNPNAIILCIQDGSVDAERSIVTDLVSQMDPHGRRTIFVLTKVDLAEKNVASPSRIQQIIEGKLFPMKALGYFAVVTGKGNSSESIEAIREYEEEFFQNSKLLKTSMLKAHQVTTRNLSLAVSDCFWKMVRESVEQQADSFKATRFNLETEWKNNYPRLRELDRNELFEKAKNEILDEVISLSQVTPKHWEEILQQSLWERVSTHVIENIYLPAAQTMNSGTFNTTVDIKLKQWTDKQLPNKAVEVAWETLQEEFSRFMTEPKGKEHDDIFDKLKEAVKEESIKRHKWNDFAEDSLRVIQHNALEDRSISDKQQWDAAIYFMEEALQARLKDTENAIENMVGPDWKKRWLYWKNRTQEQCVHNETKNELEKMLKCNEEHPAYLASDEITTVRKNLESRGVEVDPSLIKDTWHQVYRRHFLKTALNHCNLCRRGFYYYQRHFVDSELECNDVVLFWRIQRMLAITANTLRQQLTNTEVRRLEKNVKEVLEDFAEDGEKKIKLLTGKRVQLAEDLKKVREIQEKLDAFIEALHQEK

SEQ ID NO: 22385 - protein, 1078 aa, Homo sapiens
LSTGACQALAEVHAPLGGPRPRLCALAAEGHFLGHSWTGSRAGAHTGAPAWPSRRLRDLPAGGMWRLRRAAVACEVCQSLVKHSSGIKGSLPLQKLHLVSRSIYHSHHPTLKLQRPQLRTSFQQFSSLTNLPLRKLKFSPIKYGYQPRRNFWPARLATRLLKLRYLILGSAVGGGYTAKKTFDQWKDMIPDLSEYKWIVPDIVWEIDEYIDFEKIRKALPSSEDLVKLAPDFDKIVESLSLLKDFFTSGHKLVSEVIGASDLLLLLGSPEETAFRATDRGSESDKHFRKGLLGELILLQQQIQEHEEEARRAAGQYSTSYAQQKRKVSDKEKIDQLQEELLHTQLKYQRILERLEKENKELRKLVLQKDDKGIHHRKLKKSLIDMYSEVLDVLSDYDASYNTQDHLPRVVVVGDQSAGKTSVLEMIAQARIFPRGSGEMMTRSPVKVTLSEGPHHVALFKDSSREFDLTKEEDLAALRHEIELRMRKNVKEGCTVSPETISLNVKGPGLQRMVLVDLPGVINTVTSGMAPDTKETIFSISKAYMQNPNAIILCIQDGSVDAERSIVTDLVSQMDPHGRRTIFVLTKVDLAEKNVASPSRIQQIIEGKLFPMKALGYFAVVTGKGNSSESIEAIREYEEEFFQNSKLLKTSMLKAHQVTTRNLSLAVSDCFWKMVRESVEQQADSFKATRFNLETEWKNNYPRLRELDRNELFEKAKNEILDEVISLSQVTPKHWEEILQQSLWERVSTHVIENIYLPAAQTMNSGTFNTTVDIKLKQWTDKQLPNKAVEVAWETLQEEFSRFMTEPKGKEHDDIFDKLKEAVKEESIKRHKWNDFAEDSLRVIQHNALEDRSISDKQQWDAAIYFMEEALQARLKDTENAIENMVGPDWKKRWLYWKNRTQEQCVHNETKNELEKMLKCNEEHPAYLASDEITTVRKNLESRGVEVDPSLIKDTWHQVYRRHFLKTALNHCNLCRRGFYYYQRHFVDSELECNDVVLFWRIQRMLAITANTLRQQLTNTEVRRLEKNVKEVLEDFAEDGEKKIKLLTGKRVQLAEDLKKVREIQEKLDAFIEALHQEK

SEQ ID NO: 22386 - protein, 1024 aa, Homo sapiens
LSTGACQALAEVHAPLGGPRPRLCALAAEGHFLGHSWTGSRAGAHTGAPAWPSRRLRDLPAGGMWRLRRAAVACEVCQSLVKHSSGIKGSLPLQKLHLVSRSIYHSHHPTLKLQRPQLRTSFQQFSSLTNLPLRKLKFSPIKYGYQPRRNFWPARLATRLLKLRYLILGSAVGGGYTAKKTFDQWKDMIPDLSEYKWIVPDIVWEIDEYIDFGSPEETAFRATDRGSESDKHFRKGLLGELILLQQQIQEHEEEARRAAGQYSTSYAQQKRKVSDKEKIDQLQEELLHTQLKYQRILERLEKENKELRKLVLQKDDKGIHHRKLKKSLIDMYSEVLDVLSDYDASYNTQDHLPRVVVVGDQSAGKTSVLEMIAQARIFPRGSGEMMTRSPVKVTLSEGPHHVALFKDSSREFDLTKEEDLAALRHEIELRMRKNVKEGCTVSPETISLNVKGPGLQRMVLVDLPGVINTVTSGMAPDTKETIFSISKAYMQNPNAIILCIQDGSVDAERSIVTDLVSQMDPHGRRTIFVLTKVDLAEKNVASPSRIQQIIEGKLFPMKALGYFAVVTGKGNSSESIEAIREYEEEFFQNSKLLKTSMLKAHQVTTRNLSLAVSDCFWKMVRESVEQQADSFKATRFNLETEWKNNYPRLRELDRNELFEKAKNEILDEVISLSQVTPKHWEEILQQSLWERVSTHVIENIYLPAAQTMNSGTFNTTVDIKLKQWTDKQLPNKAVEVAWETLQEEFSRFMTEPKGKEHDDIFDKLKEAVKEESIKRHKWNDFAEDSLRVIQHNALEDRSISDKQQWDAAIYFMEEALQARLKDTENAIENMVGPDWKKRWLYWKNRTQEQCVHNETKNELEKMLKCNEEHPAYLASDEITTVRKNLESRGVEVDPSLIKDTWHQVYRRHFLKTALNHCNLCRRGFYYYQRHFVDSELECNDVVLFWRIQRMLAITANTLRQQLTNTEVRRLEKNVKEVLEDFAEDGEKKIKLLTGKRVQLAEDLKKVREIQEKLDAFIEALHQEK

SEQ ID NO: 22387 - protein, 1060 aa, Homo sapiens
LSTGACQALAEVHAPLGGPRPRLCALAAEGHFLGHSWTGSRAGAHTGAPAWPSRRLRDLPAGGMWRLRRAAVACEVCQSLVKHSSGIKGSLPLQKLHLVSRSIYHSHHPTLKLQRPQLRTSFQQFSSLTNLPLRKLKFSPIKYGYQPRRNFWPARLATRLLKLRYLILGSAVGGGYTAKKTFDQWKDMIPDLSEYKWIVPDIVWEIDEYIDFEKIRKALPSSEDLVKLAPDFDKIVESLSLLKDFFTSGSPEETAFRATDRGSESDKHFRKGLLGELILLQQQIQEHEEEARRAAGQYSTSYAQQKRKVSDKEKIDQLQEELLHTQLKYQRILERLEKENKELRKLVLQKDDKGIHHRKLKKSLIDMYSEVLDVLSDYDASYNTQDHLPRVVVVGDQSAGKTSVLEMIAQARIFPRGSGEMMTRSPVKVTLSEGPHHVALFKDSSREFDLTKEEDLAALRHEIELRMRKNVKEGCTVSPETISLNVKGPGLQRMVLVDLPGVINTVTSGMAPDTKETIFSISKAYMQNPNAIILCIQDGSVDAERSIVTDLVSQMDPHGRRTIFVLTKVDLAEKNVASPSRIQQIIEGKLFPMKALGYFAVVTGKGNSSESIEAIREYEEEFFQNSKLLKTSMLKAHQVTTRNLSLAVSDCFWKMVRESVEQQADSFKATRFNLETEWKNNYPRLRELDRNELFEKAKNEILDEVISLSQVTPKHWEEILQQSLWERVSTHVIENIYLPAAQTMNSGTFNTTVDIKLKQWTDKQLPNKAVEVAWETLQEEFSRFMTEPKGKEHDDIFDKLKEAVKEESIKRHKWNDFAEDSLRVIQHNALEDRSISDKQQWDAAIYFMEEALQARLKDTENAIENMVGPDWKKRWLYWKNRTQEQCVHNETKNELEKMLKCNEEHPAYLASDEITTVRKNLESRGVEVDPSLIKDTWHQVYRRHFLKTALNHCNLCRRGFYYYQRHFVDSELECNDVVLFWRIQRMLAITANTLRQQLTNTEVRRLEKNVKEVLEDFAEDGEKKIKLLTGKRVQLAEDLKKVREIQEKLDAFIEALHQEK

SEQ ID NO: 22388 - protein, 1023 aa, Homo sapiens
LSTGACQALAEVHAPLGGPRPRLCALAAEGHFLGHSWTGSRAGAHTGAPAWPSRRLRDLPAGGMWRLRRAAVACEVCQSLVKHSSGIKGSLPLQKLHLVSRSIYHSHHPTLKLQRPQLRTSFQQFSSLTNLPLRKLKFSPIKYGYQPRRNFWPARLATRLLKLRYLILGSAVGGGYTAKKTFDQWKDMIPDLSEYKWIVPDIVWEIDEYIDFEKIRKALPSSEDLVKLAPDFDKIVESLSLLKDFFTSGSPEETAFRATDRGSESDKHFRKVSDKEKIDQLQEELLHTQLKYQRILERLEKENKELRKLVLQKDDKGIHHRKLKKSLIDMYSEVLDVLSDYDASYNTQDHLPRVVVVGDQSAGKTSVLEMIAQARIFPRGSGEMMTRSPVKVTLSEGPHHVALFKDSSREFDLTKEEDLAALRHEIELRMRKNVKEGCTVSPETISLNVKGPGLQRMVLVDLPGVINTVTSGMAPDTKETIFSISKAYMQNPNAIILCIQDGSVDAERSIVTDLVSQMDPHGRRTIFVLTKVDLAEKNVASPSRIQQIIEGKLFPMKALGYFAVVTGKGNSSESIEAIREYEEEFFQNSKLLKTSMLKAHQVTTRNLSLAVSDCFWKMVRESVEQQADSFKATRFNLETEWKNNYPRLRELDRNELFEKAKNEILDEVISLSQVTPKHWEEILQQSLWERVSTHVIENIYLPAAQTMNSGTFNTTVDIKLKQWTDKQLPNKAVEVAWETLQEEFSRFMTEPKGKEHDDIFDKLKEAVKEESIKRHKWNDFAEDSLRVIQHNALEDRSISDKQQWDAAIYFMEEALQARLKDTENAIENMVGPDWKKRWLYWKNRTQEQCVHNETKNELEKMLKCNEEHPAYLASDEITTVRKNLESRGVEVDPSLIKDTWHQVYRRHFLKTALNHCNLCRRGFYYYQRHFVDSELECNDVVLFWRIQRMLAITANTLRQQLTNTEVRRLEKNVKEVLEDFAEDGEKKIKLLTGKRVQLAEDLKKVREIQEKLDAFIEALHQEK

SEQ ID NO: 22389 - protein, 563 aa, Homo sapiens
LLLRKTGQPGATRSALTKMLPGAWLLWTSLLLLARPAQPCPMGCDCFVQEVFCSDEELATVPLDIPPYTKNIIFVETSFTTLETRAFGSNPNLTKVVFLNTQLCQFRPDAFGGLPRLEDLEVTGSSFLNLSTNIFSNLTSLGKLTLNFNMLEALPEGLFQHLAALESLHLQGNQLQALPRRLFQPLTHLKTLNLAQNLLAQLPEELFHPLTSLQTLKLSNNALSGLPQGVFGKLGSLQELFLDSNNISELPPQVFSQLFCLERLWLQRNAITHLPLSIFASLGNLTFLSLQWNMLRVLPAGLFAHTPCLVGLSLTHNQLETVAEGTFAHLSNLRSLMLSYNAITHLPAGIFRDLEELVKLYLGSNNLTALHPALFQNLSKLELLSLSKNQLTTLPEGIFDTNYNLFNLALHGNPWQCDCHLAYLFNWLQQYTDRLLNIQTYCAGPAYLKGQVVPALNEKQLVCPVTRDHLGFQVTWPDESKAGGSWDLAVQERAARSQCTYSNPEGTVVLACDQAQCRWLNVQLSPQQGSLGLQYNASQEWDLRSSCGSLRLTVSIEARAAGP

SEQ ID NO: 22390 - protein, 562 aa, Homo sapiens
LLLRKTGQPGATRSALTMLPGAWLLWTSLLLLARPAQPCPMGCDCFVQEVFCSDEELATVPLDIPPYTKNIIFVETSFTTLETRAFGSNPNLTKVVFLNTQLCQFRPDAFGGLPRLEDLEVTGSSFLNLSTNIFSNLTSLGKLTLNFNMLEALPEGLFQHLAALESLHLQGNQLQALPRRLFQPLTHLKTLNLAQNLLAQLPEELFHPLTSLQTLKLSNNALSGLPQGVFGKLGSLQELFLDSNNISELPPQVFSQLFCLERLWLQRNAITHLPLSIFASLGNLTFLSLQWNMLRVLPAGLFAHTPCLVGLSLTHNQLETVAEGTFAHLSNLRSLMLSYNAITHLPAGIFRDLEELVKLYLGSNNLTALHPALFQNLSKLELLSLSKNQLTTLPEGIFDTNYNLFNLALHGNPWQCDCHLAYLFNWLQQYTDRLLNIQTYCAGPAYLKGQVVPALNEKQLVCPVTRDHLGFQVTWPDESKAGGSWDLAVQERAARSQCTYSNPEGTVVLACDQAQCRWLNVQLSPQQGSLGLQYNASQEWDLRSSCGSLRLTVSIEARAAGP

SEQ ID NO: 22391 - protein, 11 aa, Homo sapiens
VVLLIAVFRNM

SEQ ID NO: 22392 - protein, 134 aa, Homo sapiens
VVIAAIVLAIALRWPGCELEACSSEADMLDYLLSLGQISCRDALEVTWYHAANSKKAVTAALNSNITVLEADVNVEGLGTADETGAPIVAHPPAIYSDDTLEQWLDGVLGSSQKGIKLDFKNIKAVGPSLDLLW

SEQ ID NO: 22393 - protein, 65 aa, Homo sapiens
MCRQTKELEGVVFSDTGSFSRAPPGPHLSASHSDLQQPPLCARVLGRHPGAPSLPGRQSHQLSIF

SEQ ID NO: 22394 - protein, 70 aa, Homo sapiens
MCRQTKELEGVVFSDTGSFSRAPPGPHLSASHSDLQQPPLCARVLGRHPGAPSLPGRQSHQILLLAPYPN

SEQ ID NO: 22395 - protein, 38 aa, Homo sapiens
VVALIFFLHASCPGSLSQACLHQVEANCPACLKNMCFL

SEQ ID NO: 22396 - protein, 127 aa, Homo sapiens
VPPARATLRRAPAVDACGNRGGKRCDQPHSVDPSWAALEEVEGDVAELELKLDKLVKLCIAMIDTGKAFCVANKQFMNGIRDLAQYSSNDAVVETSLTKFSDSLQEMINFHTITQSQAVLYSSVRMD

SEQ ID NO: 22397 - protein, 65 aa, Homo sapiens
MCTMTNVLYSSNAVRIRWNFFLQPSAGKPCVSWFSYGFISSHTIDELCTTFVSTKIICYMNRLLK

SEQ ID NO: 22398 - protein, 152 aa, Homo sapiens
LGLQYLGRWYEIEKIPTTFENGRCIQANYSLMENGKIKVLNQELRADGTVNQIEGEATPVNLTEPAKLEVKFSWFMPSAPYWILATDYENYALVYSCTCIIQLFHVDFAWILARNPNLPPETVDSLKNILTSNNIDVKKMTVTDQVNCPKLS

SEQ ID NO: 22399 - protein, 128 aa, Homo sapiens
MVMLLLLLSALAGLFGAAEGQAFHLGKCPNPPVQENFDVNKYLGRWYEIEKIPTTFENGRCIQANYSLMENGKIKVLNQELRADGTVNQIEGEATPVNLTEPAKLEVKFSWCKYPLFPGGFRDRKYAN

SEQ ID NO: 22400 - protein, 79 aa, Homo sapiens
LIFVQSTRVGFCLVQIDEYDHSKPIQGQQKKPFEVHWRKHTLSYVDVGTGKVTVEYRPIIDKTLNEADCATVPPAIHSY

SEQ ID NO: 22401 - protein, 102 aa, Homo sapiens
LDAEHDLKIVPGEPQCSRATEGLGWDLLYSRRPPWTREAVGLGSMRRFHSRKDTPGLLDKPENVPGEVGLQGHHSGLPAVWAGPRRLKEMISGLKWGEETVL

SEQ ID NO: 22402 - protein, 122 aa, Homo sapiens
MGCLWGLALPLFFFCWEVGVSGSSADLKIVPGEPQCSRATEGLGWDLLYSRRPPWTREAVGLGSMRRFHSRKDTPGLLDKPENVPGEVGLQGHHSGLPAVWAGPRRLKEMISGLKWGEETVL

SEQ ID NO: 22403 - protein, 43 aa, Homo sapiens
LAPAAGSLWLLLVGLWGLLPPGPPALAWNHSTCPPCLELLRSP

SEQ ID NO: 22404 - protein, 225 aa, Homo sapiens
LLPQGYWRNYLSCTSAHTSTSDGTAMITRAGLPCQDLEFVQFHPTGTYGAGCLITEGCRGEGGILINSQGERFMERYAPIAKDLASRDVVSRWMTLEIREGRGCGPEKDHVYLQLHHLPPEQLAMPLPGISETAMIFAGVDVTKEPIPVLPTVHYNMDGIPTSYEGQVLRHGNGQDQIVPGLYACGEAACASAHGVNRLGANSLLDLVVWSGMCPEHRRVVQAWR

SEQ ID NO: 22405 - protein, 24 aa, Homo sapiens
MLKFHPIILVLLDVFRQQLLIQGR

SEQ ID NO: 22406 - protein, 837 aa, Homo sapiens
VRASRTTPTLVSSLHPAGLAGAAAPVLSSSHREPHGERESGRGPRRGGRDGAGPRACGEGAVAAPRAAAGSSVWQFRMMDQARSAFSNLFGGEPLSYTRFSLARQVDGDNSHVEMKLAVDEEENADNNTKANVTKPKRCSGSICYGTIAVIVFFLIGFMIGYLGYCKGVEPKTECERLAGTESPVREEPGEDFPAARRLYWDDLKRKLSEKLDSTDFTGTIKLLNENSYVPREAGSQKDENLALYVENQFREFKLSKVWRDQHFVKIQVKDSAQNSVIIVDKNGRLVYLVENPGGYVAYSKAATVTGKLVHANFGTKKDFEDLYTPVNGSIVIVRAGKITFAEKVANAESLNAIGVLIYMDQTKFPIVNAELSFFGHAHLGTGDPYTPGFPSFNHTQFPPSRSSGLPNIPVQTISRAAAEKLFGNMEGDCPSDWKTDSTCRMVTSESKNVKLTVSNVLKEIKILNIFGVIKGFVEPDHYVVVGAQRDAWGPGAAKSGVGTALLLKLAQMFSDMVLKDGFQPSRSIIFASWSAGDFGSVGATEWLEGYLSSLHLKAFTYINLDKAVLGTSNFKVSASPLLYTLIEKTMQNVKHPVTGQFLYQDSNWASKVEKLTLDNAAFPFLAYSGIPAVSFCFCEDTDYPYLGTTMDTYKELIERIPELNKVARAAAEVAGQFVIKLTHDVELNLDYERYNSQLLSFVRDLNQYRADIKEMGLSLQWLYSARGDFFRATSRLTTDFGNAEKTDRFVMKKLNDRVMRVEYHFLSPYVSPKESPFRHVFWGSGSHTLPALLENLKLRKQNNGAFNETLFRNQLALATWTIQGAANALSGDVWDIDNEF

SEQ ID NO: 22407 - protein, 64 aa, Homo sapiens
VVAVSAAGLLVPLSLLLLIQALSVSSADRTYKGKTPSGIQPLRPGLCQQLVFNNLCTTGTQVHG

SEQ ID NO: 22408 - protein, 34 aa, Homo sapiens
VVAVSAAGLLVPLSLLLLIQALSVSSADRTYKGK

SEQ ID NO: 22409 - protein, 509 aa, Homo sapiens
VGEGSPCVSVLLFGGGGGGKMAAHGGSAASSALKGLIQQFTTITGASESVGKHMLEACNNNLEMAVTMFLDGGGIAEEPSTSSASVSTVRPHTEEEVRAPIPQKQEILVEPEPLFGAPKRRRPARSIFDGFRDFQTETIRQEQELRNGGAIDKKLTTLADLFRPPIDLMHKGSFETAKECGQMQNKWLMINIQNVQDFACQCLNRDVWSNEAVKNIIREHFIFWQVYHDSEEGQRYIQFYKLGDFPYVSILDPRTGQKLVEWHQLDVSSFLDQVTGFLGEHGQLDGLSSSPPKKCARSESLIDASEDSQLEAAIRASLQETHFDSTQTKQDSRSDEESESELFSGSEEFISVCGSDEEEEVENLAKSRKSPHKDLGHRKEENRRPLTEPPVRTDPGTATNHQGLPAVDSEILEMPPEKADGVVEGIDVNGPKAQLMLRYPDGKREQITLPEQAKLLALVKHVQSKGYPNERFELLTNFPRRKLSHLDYDITLQEAGLCPQETVFVQERN

SEQ ID NO: 22410 - protein, 43 aa, Homo sapiens
LLFGGGGGGKMAAHGGSAASSALKGLIQQFTTITGQRVWPDAK

SEQ ID NO: 22411 - protein, 116 aa, Homo sapiens
LFGGGGGGKMAAHGGSAASSALKGLIQQFTTITGASESVGKHMLEACNNNLEMAVTMFLDGGGIAEEPSTSSASVSTVRPHTEEEVRAPIPQKQEILVEPEPLFGEMESVAQAGVQ

SEQ ID NO: 22412 - protein, 203 aa, Homo sapiens
LTLVMVMLWSLQKARPLWITNLQEDETEEMEGPQSPGQLLNPALAHSISVASCGNIFSCGAEDGKVRIFRVMGVKCEQELGFKGHTSGVSQVCFLPESYLLLTGGNDGKITLWDANSEVEKKQKSPTKRTHRKKPKRGTCTKQGGNTNASVTDEEEHGNILPKLNIEHGEKVNWLLGTKIKGHQNILVADQTSCISVYPLNEF

SEQ ID NO: 22413 - protein, 702 aa, Homo sapiens
LRLREPAALEMELLPLWLCLGFHFLTVGWRNRSGTATAASQGVCKLVGGAADCRGQSLASVPSSLPPHARMLTLDANPLKTLWNHSLQPYPLLESLSLHSCHLERISRGAFQEQGHLRSLVLGDNCLSENYEETAAALHALPGLRRLDLSGNALTEDMAALMLQNLSSLRSVSLAGNTIMRLDDSVFEGLERLRELDLQRNYIFEIEGGAFDGLAELRHLNLAFNNLPCIVDFGLTRLRVLNVSYNVLEWFLATGGEAAFELETLDLSHNQLLFFPLLPQYSKLRTLLLRDNNMGFYRDLYNTSSPREMVAQFLLVDGNVTNITTVSLWEEFSSSDLADLRFLDMSQNQFQYLPDGFLRKMPSLSHLNLHQNCLMTLHIREHEPPGALTELDLSHNQLSELHLAPGLASCLGSLRLFNLSSNQLLGVPPGLFANARNITTLDMSHNQISLCPLPAASDRVGPPSCVDFRNMASLRSLSLEGCGLGALPDCPFQGTSLTYLDLSSNWGVLNGSLAPLQDVAPMLQVLSLRNMGLHSSFMALDFSGFGNLRDLDLSGNCLTTFPRFGGSLALETLDLRRNSLTALPQKAVSEQLSRGLRTIYLSQNPYDCCGVDGWGALQHGQTVADWAMVTCNLSSKIIRVTELPGGVPRDCKWERLDLGLLYLVLILPSCLTLLVACTVIVLTFKKPLLQVIKSRCHWSSVY

SEQ ID NO: 22414 - protein, 172 aa, Homo sapiens
MSGGLLKALRSDSYVELSQYRDQHFRGDNEEQEKLLKKSCTLYVGNLSFYTTEEQIYELFSKSGDIKKIIMGLDKMKKTACGFCFVEYYSRADAENAMRYINGTRLDDRIIRTDWDAGFKEGRQYGRGRSGGQVCKKGLWAQPLPGIPVTMTGVLAICIYSFVNNFVSITLA

SEQ ID NO: 22415 - protein, 47 aa, Homo sapiens
VLWGGLSLLRVLWCLLPQTGYVHPDEFFQSPEVMAGSGRSWGRGLAW

SEQ ID NO: 22416 - protein, 195 aa, Homo sapiens
LEGQALRAAFGLSEAEFDTACVTKLFPTRSHTVAAQVGINAALGNMEEDNWRWHFYDTVKGSDWLGDQDAIHYVTEQAPTAMVELENYGMPFSRTEDGKIYQRAFGGQSLKFGKGRQAHRCCCVADRTGHSILHTSYGRSLRYDTSCFVEYFALDLLIENRECRGVIALCIEDGSIHHIRAKNTVVATGVKKLFF

SEQ ID NO: 22417 - protein, 50 aa, Homo sapiens
LSRLLSARRLALALAWPTVLQTGTRGVHFTVEGTRGHLLKFQIPFLLSIQ

SEQ ID NO: 22418 - protein, 138 aa, Homo sapiens
LGANNRSRFVPVPWRVAGLLGTGLLKGTMSGRLWSKAIFAGYKRGLRNQREHTALLKIEGVYARDETEFYLGKRCAYVYKAKNNTVTPGGKPNKTRVIWGKVTRAHGNSGMVRAKFRSNLPAKAIGHRIRVMLYPSRI

SEQ ID NO: 22419 - protein, 65 aa, Homo sapiens
LLGTGLLKGTMSGRLWSKAIFAGYKRGLRNQREHTALLKIEGVYARDETEFYLGKRCAYVYKAKK

SEQ ID NO: 22420 - protein, 92 aa, Homo sapiens
LLGTGLLKGTMSGRLWSKAIFAGYKRGLRNQREHTALLKIEGVYARDETEFYLGKRCAYVYKAKKLKCNGTISAHCNLCFPGSSDYPASASE

SEQ ID NO: 22421 - protein, 123 aa, Homo sapiens
LLGTGLLKGTMSGRLWSKAIFAGYKRGLRNQREHTALLKIEGVYARDETEFYLGKRCAYVYKAKNNTVTPGGKPNKTRVIWGKVTRAHGNSGMVRAKFRSNLPAKAIGHRIRVVSMVFSKMDV

SEQ ID NO: 22422 - protein, 951 aa, Homo sapiens
LLRGGYLEPEARLQQGEAPGASSNWTTLPPPLFSKVVIVLIDALRDDFVFGSKGVKFMPYTTYLVEKGASHSFVAEAKPPTVTMPRIKALMTGSLPGFVDVIRNLNSPALLEDSVIRQAKAAGKRIVFYGDETWVKLFPKHFVEYDGTTSFFVSDYTEVDNNVTRHLDKVLKRGDWDILILHYLGLDHIGHISGPNSPLIGQKLSEMDSVLMKIHTSLQSKERETPLPNLLVLCGDHGMSETGSHGASSTEEVNTPLILISSAFERKPGDIRHPKHVQQTDVAATLAIALGLPIPKDSVGSLLFPVVEGRPMREQLRFLHLNTVQLSKLLQENVPSYEKDPGFEQFKMSERLHGNWIRLYLEEKHSEVLFNLGSKVLRQYLDALKTLSLSLSAQVAQYDIYSMMVGTVVVLEVLTLLLLSVPQALRRKAELEVPLSSPGFSLLFYLVILVLSAVHVIVCTSAESSCYFCGLSWLAAGGVMVLASALLCVIVSVLTNVLVGGNTPRKNPMHPSSRWSELDLLILLGTAGHVLSLGASSFVEEEHQTWYFLVNTLCLALSQETYRNYFLGDDGEPPCGLCVEQGHDGATAAWQDGPGCDVLERDKGHGSPSTSEVLRGREKWMVLASPWLILACCRLLRSLNQTGVQWAHRPDLGHWLTSSDHKAELSVLAALSLLVVFVLVQRGCSPVSKAALALGLLGVYCYRAAIGSVRFPWRPDSKDISKGIIEARFVYVFVLGILFTGTKDLLKSQVIAADFKLKTVGLWEIYSGLVLLAALLFRPHNLPVLAFSLLIQTLMTKFIWKPLRHDAAEITVMHYWFGQAFFYFQGNSNNIATVDISAGFVGLDTYVEIPAVLLTAFGTYAGPVLWASHLVHFLSSETRSGSALSHACFCYALICSIPVFTYIVLVTSLRYHLFIWSVFSPKLLYEGMHLLITAAVCVFFTAMDQTRLTQS

SEQ ID NO: 22423 - protein, 104 aa, Homo sapiens
VPRARQAPCLPQLLDWIEGKERNIRALLSTLHTVLWDGESRWTPVGMADLVAPEQVKKHYRRAVLAVHPDKAAGQPYEQHAKMIFMELNDAWSEFENQGSRPLF

SEQ ID NO: 22424 - protein, 180 aa, Homo sapiens
VFYFASACFPIYVVLCVIETVVAPHGQPDAEFPISISTGSPAGFPPGGFIPKTATTPKGSSSWQTSRPPAQGASWPPQAKPPPKACTQPRPNYASNFSVIGAREERGVRAPSFGESPTLCCCGVCRDLPELAKGRTYVVFFISEPSPGTGTAKPLRERRGFRCVFTGLSLGQASGSLLFQ

SEQ ID NO: 22425 - protein, 160 aa, Homo sapiens
LLSPQALGCILYLLCFRQHPFEDGAKLRIVNGKYSIPPHDTQYTVFHSLIRAMLQVNPEERLSIAEVVHQLQEIAAARNVNPKSPITELLEQNGGYGSATLSRGPPPPVGPAGSGYSGGLALAEYDQPYGGFLDILRGGTERLFTNLKDTSSKVIQSVAK

SEQ ID NO: 22426 - protein, 168 aa, Homo sapiens
VAMRPLRPRAALLALLASLLAAPPVAPAEAPHLVHVDAARALWPLRRFWRSTGFWGSTGRGLSYNFTHLDGYLDLLRENQLLPGFELMGSASGHFTDFEDKQQVFEWKDLVSSLARRYIGGRAQALGPWPGRGYSWAGCTPITQAAAWSGDTLVGRRRPLWGDGGDKG

SEQ ID NO: 22427 - protein, 215 aa, Homo sapiens
VAMRPLRPRAALLALLASLLAAPPVAPAEAPHLVHVDAARALWPLRRFWRSTGFCPPLPHSQADQYVLSWDQQLNLAYVGAVPHRGIKQVRTHWLLELVTTRGSTGRGLSYNFTHLDGYLDLLRENQLLPGFELMGSASGHFTDFEDKQQVFEWKDLVSSLARRYIGGRAQALGPWPGRGYSWAGCTPITQAAAWSGDTLVGRRRPLWGDGGDKG

SEQ ID NO: 22428 - protein, 614 aa, Homo sapiens
VAMRPLRPRAALLALLASLLAAPPVAPAEAPHLVHVDAARALWPLRRFWRSTGFWGSTGRGLSYNFTHLDGYLDLLRENQLLPGFELMGSASGHFTDFEDKQQVFEWKDLVSSLARRYIGRYGLAHVSKWNFETWNEPDHHDFDNVSMTMQGFLNYYDACSEGLRAASPALRLGGPGDSFHTPPRSPLSWGLLRHCHDGTNFFTGEAGVRLDYISLHRKVRPAPPSAPVFCALSRCAPGRADPGGAEAAPPAGCAQLHLHPGAGEGRRAADPAALPQVRGHPHLQRRGGPAGGLVPATAVEGGRDLRGHGGEGGPAQRPARPPATFLPRRDRRAVAAPPGPSCPGHPQVIAQHQNLLLANTTSAFPYALLSNDNAFLSYHPHPFAQRTLTARFQVNNTRPPHVQLLRKPVLTAMGLLALLDEEQLWAEVSQAGTVLDSNHTVGVLASAHRPQGPADAWRAAVLIYASDDTRAHPNRSVAVTLRLRGVPPGPGLVYVTRYLDNGLCSPDGEWRRLGRPVFPTAEQFRRMRAAEDPVAAAPRPLPAGGRLTLRPALRLPSLLLVHVCARPEKPPGQVTRLRALPLTQGQLVLVWSDEHVGSKCVPVDIRDPVLSGR

SEQ ID NO: 22429 - protein, 515 aa, Homo sapiens
LSPPPRSGQAEMTPSPLLLLLLPPLLLGAFPPAAAARGPPKMADKVVPRQVARLGRTVRLQCPVEGDPPPLTMWTKDGRTIHSGWSRFRVLPQGLKVKQVEREDAGVYVCKATNGFGSLSVNYTLVVLDDISPGKESLGPDSSSGGQEDPASQQWARPRFTQPSKMRRRVIARPVGSSVRLKCVASGHPRPDITWMKDDQALTRPEAAEPRKKKWTLSLKNLRPEDSGKYTCRVSNRAGAINATYKVDVIQRTRSKPVLTGTHPVNTTVDFGGTTSFQCKVRSDVKPVIQWLKRVEYGAEGRHNSTIDVGGQKFVVLPTGDVWSRPDGSYLNKLLITRARQDDAGMYICLGANTMGYSFRSAFLTVLPDPKPPGPPVASSSSATSLPWPVVIGIPAGAVFILGTLLLWLCQAQKKPCTPAPAPPLPGHRPPGTARDRSGDKDLPSLAALSAGPGVGLCEEHGSPAAPQHLLGPGPVAGPKLYPKLYTDIHTHTHTHSHTHSHVEGKVHQHIHYQC

SEQ ID NO: 22430 - protein, 32 aa, Homo sapiens
MRLRDRTRFCLGILKIKSFEKSNSWSWKLSPY

SEQ ID NO: 22431 - protein, 12 aa, Homo sapiens
MQAWVFFLTISA

SEQ ID NO: 22432 - protein, 234 aa, Homo sapiens
LRGQLQGHTPVGCLLVPPRSTASSLMPPAPWQSGARGAGGLGLDRVPRVPLEAPHGTVPLGHCSRDLGCGLAPSCGEVLGGSVWPACLLTWVWPEQVKATQEENRELRSRCEELHGKNLELGKIMDRFEEVVYQAMEEVQKQKELSKAEIQKVLKEKDQLTTDLNSMEKSFSDLFKRFEKQKEVIEGYRKVCLRHPGVLTSEADGLMVQASGATSCCLCTLVLGQASPCHGGMG

SEQ ID NO: 22433 - protein, 17 aa, Homo sapiens
LILLGVMFFFLSCLQLF

SEQ ID NO: 22434 - protein, 375 aa, Homo sapiens
LPEDAAAPAPAMGAPACALALCVAVAIVAGASSESLGTEQRVVGRAAEVPGPEPGQQEQLVFGSGDAVELSCPPPGGGPMGPTVWVKDGTGLVPSERVLVGPQRLQVLNASHEDSGAYSCRQRLTQRVLCHFSVRVTDAPSSGDDEDGEDEAEDTGVDTGAPYWTRPERMDKKLLAVPAANTVRFRCPAAGNPTPSISWLKNGREFRGEHRIGGIKLRHQQWSLVMESVVPSDRGNYTCVVENKFGSIRQTYTLDVLERSPHRPILQAGLPANQTAVLGSDVEFHCKVYSDAQPHIQWLKHVEVNGSKVGPDGTPYVTVLKSWISESVEADVRLRLANVSERDGGEYLCRATNFIGVAEKAFWLSVHGPRADGGR

SEQ ID NO: 22435 - protein, 819 aa, Homo sapiens
LPEDAAAPAPAMGAPACALALCVAVAIVAGASSESLGTEQRVVGRAAEVPGPEPGQQEQLVFGSGDAVELSCPPPGGGPMGPTVWVKDGTGLVPSERVLVGPQRLQVLNASHEDSGAYSCRQRLTQRVLCHFSVRVTDAPSSGDDEDGEDEAEDTGVDTGAPYWTRPERMDKKLLAVPAANTVRFRCPAAGNPTPSISWLKNGREFRGEHRIGGIKLRHQQWSLVMESVVPSDRGNYTCVVENKFGSIRQTYTLDVLERSPHRPILQAGLPANQTAVLGSDVEFHCKVYSDAQPHIQWLKHVEVNGSKVGPDGTPYVTVLKSWISESVEADVRLRLANVSERDGGEYLCRATNFIGVAEKAFWLSVHGPRAAEEELVEADEAGSVYAGILSYGVGFFLFILVVAAVTLCRLRSPPKKGLGSPTVHKISRFPLKRQVSLESNASMSSNTPLVRIARLSSGEGPTLANVSELELPADPKWELSRARLTLGKPLGEGCFGQVVMAEAIGIDKDRAAKPVTVAVKMLKDDATDKDLSDLVSEMEMMKMIGKHKNIINLLGACTQGGPLYVLVEYAAKGNLREFLRARRPPGLDYSFDTCKPPEEQLTFKDLVSCAYQVARGMEYLASQKCIHRDLAARNVLVTEDNVMKIADFGLARDVHNLDYYKKTTNGRLPVKWMAPEALFDRVYTHQSDVWSFGVLLWEIFTLGGSPYPGIPVEELFKLLKEGHRMDKPANCTHDLYMIMRECWHAAPSQRPTFKQLVEDLDRVLTVTSTDEYLDLSAPFEQYSPGGQDTPSSSSSGDDSVFAHDLLPPAPPSSGGSRT

SEQ ID NO: 22436 - protein, 705 aa, Homo sapiens
LPEDAAAPAPAMGAPACALALCVAVAIVAGASSESLGTEQRVVGRAAEVPGPEPGQQEQLVFGSGDAVELSCPPPGGGPMGPTVWVKDGTGLVPSERVLVGPQRLQVLNASHEDSGAYSCRQRLTQRVLCHFSVRVTDAPSSGDDEDGEDEAEDTGVDTGAPYWTRPERMDKKLLAVPAANTVRFRCPAAGNPTPSISWLKNGREFRGEHRIGGIKLRHQQWSLVMESVVPSDRGNYTCVVENKFGSIRQTYTLDVLERSPHRPILQAGLPANQTAVLGSDVEFHCKVYSDAQPHIQWLKHVEVNGSKVGPDGTPYVTVLKVSLESNASMSSNTPLVRIARLSSGEGPTLANVSELELPADPKWELSRARLTLGKPLGEGCFGQVVMAEAIGIDKDRAAKPVTVAVKMLKDDATDKDLSDLVSEMEMMKMIGKHKNIINLLGACTQGGPLYVLVEYAAKGNLREFLRARRPPGLDYSFDTCKPPEEQLTFKDLVSCAYQVARGMEYLASQKCIHRDLAARNVLVTEDNVMKIADFGLARDVHNLDYYKKTTNGRLPVKWMAPEALFDRVYTHQSDVWSFGVLLWEIFTLGGSPYPGIPVEELFKLLKEGHRMDKPANCTHDLYMIMRECWHAAPSQRPTFKQLVEDLDRVLTVTSTDEYLDLSAPFEQYSPGGQDTPSSSSSGDDSVFAHDLLPPAPPSSGGSRT

SEQ ID NO: 22437 - protein, 817 aa, Homo sapiens
LPEDAAAPAPAMGAPACALALCVAVAIVAGASSESLGTEQRVVGRAAEVPGPEPGQQEQLVFGSGDAVELSCPPPGGGPMGPTVWVKDGTGLVPSERVLVGPQRLQVLNASHEDSGAYSCRQRLTQRVLCHFSVRVTDAPSSGDDEDGEDEAEDTGVDTGAPYWTRPERMDKKLLAVPAANTVRFRCPAAGNPTPSISWLKNGREFRGEHRIGGIKLRHQQWSLVMESVVPSDRGNYTCVVENKFGSIRQTYTLDVLERSPHRPILQAGLPANQTAVLGSDVEFHCKVYSDAQPHIQWLKHVEVNGSKVGPDGTPYVTVLKTAGANTTDKELEVLSLHNVTFEDAGEYTCLAGNSIGFSHHSAWLVVLPAEEELVEADEAGSVYAGILSYGVGFFLFILVVAAVTLCRLRSPPKKGLGSPTVHKISRFPLKRQVSLESNASMSSNTPLVRIARLSSGEGPTLANVSELELPADPKWELSRARLTLGKPLGEGCFGQVVMAEAIGIDKDRAAKPVTVAVKMLKDDATDKDLSDLVSEMEMMKMIGKHKNIINLLGACTQGGPLYVLVEYAAKGNLREFLRARRPPGLDYSFDTCKPPEEQLTFKDLVSCAYQVARGMEYLASQKCIHRDLAARNVLVTEDNVMKIADFGLARDVHNLDYYKKTTNGRLPVKWMAPEALFDRVYTHQSDVWSFGVLLWEIFTLGGSPYPGIPVEELFKLLKEGHRMDKPANCTHDLYMIMRECWHAAPSQRPTFKQLVEDLDRVLTVTSTDEYLDLSAPFEQYSPGGQDTPSSSSSGDDSVFAHDLLPPAPPSSGGSRT

SEQ ID NO: 22438 - protein, 803 aa, Homo sapiens
LPEDAAAPAPAMGAPACALALCVAVAIVAGASSESLGTEQRVVGRAAEVPGPEPGQQEQLVFGSGDAVELSCPPPGGGPMGPTVWVKDGTGLVPSERVLVGPQRLQVLNASHEDSGAYSCRQRLTQRVLCHFSVRVTDAPSSGDDEDGEDEAEDTGVDTGAPYWTRPERMDKKLLAVPAANTVRFRCPAAGNPTPSISWLKNGREFRGEHRIGGIKLRHQQWSLVMESVVPSDRGNYTCVVENKFGSIRQTYTLDVLERSPHRPILQAGLPANQTAVLGSDVEFHCKVYSDAQPHIQWLKHVEVNGSKVGPDGTPYVTVLKTAGANTTDKELEVLSLHNVTFEDAGEYTCLAGNSIGFSHHSAWLVVLPAEEELVEADEAGSVYAGILSYGVGFFLFILVVAAVTLCRLRSPPKKGLGSPTVHKISRFPLKRQQVSLESNASMSSNTPLVRIARLSSGEGPTLANVSELELPADPKWELSRARLTLGKPLGEGCFGQVVMAEAIGIDKDRAAKPVTVAVKMLKDDATDKDLSDLVSEMEMMKMIGKHKNIINLLGACTQGGPLYVLVEYAAKGNLREFLRARRPPGLDYSFDTCKPPEEQLTFKDLVSCAYQVARGMEYLASQKCIHRDLAARNVLVTEDNVMKIADFGLARDVHNLDYYKKTTNLVLWGPALGDLHAGGLPVPRHPCGGALQAAEGGPPHGQARQLHTRPVHDHAGVLACRALPEAHLQAAGGGPGPCPYRDVHRRVPGPVGAFRAVLPGWPGHPQLQLLRGRLRVCPRPAAPGPTQQWGLADVKGHWSPTM

SEQ ID NO: 22439 - protein, 988 aa, Homo sapiens
VSVSSEEPRAPVPASVRAPERPLPGLRSARRAACRAYSGPRTCPAHLPAARSALRASLASLPATARGLRPCLRVRPAPQPGPGAALRRARAARSPARAGAAMMNRFRKWLYKPKRSDPQLLARFYYADEELNQVAAELDSLDGRKDPQRCTLLVSQFRSCQDNVLNIINQIMDECIPQDRAPRDFCVKFPEEIRHDNLAGQLWFGAECLAAGSIIMNRELESMAMRPLAKELTRSLEDVRGALRDQALRDLNTYTEKMREALRHFDVLFAEFELSYVSAMVPVKSPREYYVQQEVIVLFCETVERALDFGYLTQDMIDDYEPALMFSIPRLAIVCGLVVYADGPLNLDRKVEDMSELFRPFHTLLRKIRDLLQTLTEEELHTLERNLCISQDVEFPIRADVQGPAALAPALSAPLPPEGPLSAKAKDPDAELACSMQYDDQELEQLSRMVHRAGDEMSSLLSPPIACQSPAHRPGAEGSPGGEASPGRPRLRSGSDEEERVFFMDDVEGTAEALARPESPAGPFGWAGSTWADPQEKGQGGPGGAAGISLPASEKEEDLSNNNLEAEGTDGASLAGTSSCSCLDSRLHLDGWEVGADDAETAEMIAHRTGGMKLSATVIFNPKSPTSLDSAVATQEAASEPVAEGMDGGPHKLSTGATNCLLHSCVCCGSCGDSREDVVERLREKCSPGGVIGASYAAGLAKASDRAPERQEEAPPPSEDASNGREPKAPTSDKCLPHTSGSQVDTASGLQGEAGVAGQQEPEARELHAGSPSAHEAPQALSGSSSSTAGSCSSDKMGPEAAPAATHAAPQATREKIRSRFHGSHDLIHRLFVCISGVADQLQTNYASDLRSILKTLFEVMATKPETDDKEKLRKVTQTLRSAALEDCALCQETLSSSELAAKTRDGDFEDPPEWVPDEACGFCTACKAPFTVIRRKHHCRSCGKIFCSRCSSHSAPLPRYGQVKPVRVCTHCYMFHVTPFYSDKAGL

SEQ ID NO: 22440 - protein, 958 aa, Homo sapiens
VSVSSEEPRAPVPASVRAPERPLPGLRSARRAACRAYSGPRTCPAHLPAARSALRASLASLPATARGLRPCLRVRPAPQPGPGAALRRARAARSPARAGAAMMNRFRKWLYKPKRSDPQLLARFYYADEELNQVAAELDSLDGRKDPQRCTLLVSQFRSCQDNVLNIINQIMDECIPQDRAPRDFCVKFPEEIRHDNLAGQLWFGAECLAAGSIIMNRELESMAMRPLAKELTRSLEDVRGALRDQALRDLNTYTEKMREALRHFDVLFAEFELSYVSAMVPVKSPREYYVQQEVIVLFCETVESGLVVYADGPLNLDRKVEDMSELFRPFHTLLRKIRDLLQTLTEEELHTLERNLCISQDVEFPIRADVQGPAALAPALSAPLPPEGPLSAKAKDPDAELACSMQYDDQELEQLSRMVHRAGDEMSSLLSPPIACQSPAHRPGAEGSPGGEASPGRPRLRSGSDEEERVFFMDDVEGTAEALARPESPAGPFGWAGSTWADPQEKGQGGPGGAAGISLPASEKEEDLSNNNLEAEGTDGASLAGTSSCSCLDSRLHLDGWEVGADDAETAEMIAHRTGGMKLSATVIFNPKSPTSLDSAVATQEAASEPVAEGMDGGPHKLSTGATNCLLHSCVCCGSCGDSREDVVERLREKCSPGGVIGASYAAGLAKASDRAPERQEEAPPPSEDASNGREPKAPTSDKCLPHTSGSQVDTASGLQGEAGVAGQQEPEARELHAGSPSAHEAPQALSGSSSSTAGSCSSDKMGPEAAPAATHAAPQATREKIRSRFHGSHDLIHRLFVCISGVADQLQTNYASDLRSILKTLFEVMATKPETDDKEKLRKVTQTLRSAALEDCALCQETLSSSELAAKTRDGDFEDPPEWVPDEACGFCTACKAPFTVIRRKHHCRSCGKIFCSRCSSHSAPLPRYGQVKPVRVCTHCYMFHVTPFYSDKAGL

SEQ ID NO: 22441 - protein, 273 aa, Homo sapiens
VSVSSEEPRAPVPASVRAPERPLPGLRSARRAACRAYSGPRTCPAHLPAARSALRASLASLPATARGLRPCLRVRPAPQPGPGAALRRARAARSPARAGAAMMNRFRKWLYKPKDNVLNIINQIMDECIPQDRAPRDFCVKFPEEIRHDNLAGQLWFGAECLAAGSIIMNRELESMAMRPLAKELTRSLEDVRGALRDQALRDLNTYTEKMREALRHFDVLFAEFELSYVSAMVPVKSPREYYVQQEVIVLFCETVERNGKGVLKFMWNCNGP

SEQ ID NO: 22442 - protein, 377 aa, Homo sapiens
VPASVRAPERPLPGLRSARRAACRAYSGPRTCPAHLPAARSALRASLASLPATARGLRPCLRVRPAPQPGPGAALRRARAARSPARAGAAMMNRFRKWLYKPKRSDPQLLARFYYADEELNQVAAELDSLDGRKDPQRCTLLVSQFRSCQDNVLNIINQIMDECIPQDRAPRDFCVKFPEEIRHDNLAGQLWFGAECLAAGSIIMNRELESMAMRPLAKELTRSLEDVRGALRDQALRDLNTYTEKMREALRHFDVLFAEFELSYVSAMVPVKSPREYYVQQEVIVLFCETVERALDFGYLTQDMIDDYEPALMFSIPRLAIVCPLLPAHPRTRAGATAHVACRMVAGSSSGALTHPPVSKQGVISALLRPLPELPP

SEQ ID NO: 22443 - protein, 382 aa, Homo sapiens
VHEPPAAPTSRNYAEMREKLRLRLTKRKEEQPKKMDQISERESVVDHRRVEDLLQFINSSETKPVSSTRAAKRARHKQRKLEEKARLEAEARAREHLHLQEEQRRREEEEDEEEEEDRFKEEFQRLQELQKLRAVKKKKKERPSKDCPKLDMLTRNFQAATESVPNSGNIHNGSLEQTEEPETSSHSPSRHMNHSEPRPGLGADGDAADPVDTRDSKFLLPKEVNGKQHEPLSFFFDIMQHHKEGNGKQKLRQTSKASSEPARRPTEPPKATEGQSKPRAQTESKAKVVDLMSITEQKREERKVNSNNNNKKQLNHIKDEKSNPTPMEPTSPGEHQQNSKLVLAESPQPKGKNKKNKKKKGDRVNNSIGMVVCTFDPSYSGG

SEQ ID NO: 22444 - protein, 391 aa, Homo sapiens [sequence omitted]

SEQ ID NO: 22445 - protein, 223 aa, Homo sapiens
LETRVNSEQEHFLIVPFGLLYSEVTASSLVKINLQGDIVDRGSTNLGVNQAGFTLHSAIYAARPDVKCVVHIHTPAGAAVSAMKCGLLPISPEALSLGEVAYHDYHGILVDEEEKVLIQKNLGPKSKVSRHLIWYLNYSRKKNKAKDQSSCPAPQSIHASPQVLILRNHGLVSVGESVEEAFYYIHNLVVACEIQVGDSHSSHSAVYLDVSGVHIDFFLILIE

SEQ ID NO: 22446 - protein, 54 aa, Homo sapiens
LQLWLHVTLLSLTFPAVPPVVKSPHSVSAWLPLHPKVSGDGLRLLASCGILSAQ

SEQ ID NO: 22447 - protein, 30 aa, Homo sapiens
VAGFSPVLRVAAWLWVSSTLSGAEELPAAA

SEQ ID NO: 22448 - protein, 37 aa, Homo sapiens
LTPLSVHLLLLRLVLSLKSQDRRLRGKDGVNWVGRDN

SEQ ID NO: 22449 - protein, 118 aa, Homo sapiens
VAHIPPLLHRELPIVGRHRRNPVSSHLRECSVLNGEPQHPEASTEGLNSTHEGKRPWLTEITLARIPSPHEACPDAVNQSQLITHRPFPIPEVHFRIHSISSETGSSCVAQAGLELLG

SEQ ID NO: 22450 - protein, 326 aa, Homo sapiens
LSSFLFLGRFLLQLVGILLEDIVTKQLKVEMSEQQHTFYCQELGTLLMCLIHIFKSGMFRRITAAATRLFRSDGCGGSFYTLDSLNLRARSMITTHPALVLLWCQILLLVNHTDYRWWAEVQQTPKRHSLSSTKLLSPQMSGEEEDSDLAAKLGMCNREIVRRGALILFCDYVCQNLHDSEHLTWLIVNHIQDLISLSHEPPVQDFISAVHRNSAASGLFIQAIQSRCENLSTPTMLKKTLQCLEGIHLSQSGAVLTLYVDRLLCTPFRVLARMVDILACRRVEMLLAANLQHGPVANGRTQQNPGIPSEQRARSEVSSLHHARLT

SEQ ID NO: 22451 - protein, 614 aa, Homo sapiens
VARRYQVAHHGSTFSFAPLALAALALAERRTEVGPCQAVWEVPAGRGSCLDSSRVPAQGSDQTRVCPASGAPFCSPPLTSWHPCPLSATVSDGELTGADLKDCVSNNSLSSNASLPSVQSCRRLRERRVASWAVSFERLLQDPVGVRYFSDFLRKEFSEENILFWQACEYFNHVPAHDKKELSYRAREIFSKFLCSKATTPVNIDSQAQLADDVLRAPHPDMFKEQQLQIFNLMKFDSYTRFLKSPLYQECILAEVEGRALPDSQQVPSSPASKHSLGSDHSSVSTPKKLSGKSKSGRSLNEELGDEDSEKKRKGAFFSWSRTRSTGRSQKKREHGDHADDALHANGGLCRRESQGSVSSAGSLDLSEACRTLAPEKDKATKHCCIHLPDGTSCVVAVKAGFSIKDILSGLCERHGINGAAADLFLVGGDKPLVLHQDSSILESRDLRLEKRTLFRLDLVPINRSVGLKAKPTKPVTEVLRPVVARYGLDLSGLLVRLSGEKEPLDLGAPISSLDGQRVVLEEKDPSRGKASADKQKGVPVKQNTAVNSSSRNHSATVIPHPGPPCALLLSLWPPPALRSALVLPYRLLITVCLPHAPWRGLSRPCRCPAPSYL

SEQ ID NO: 22452 - protein, 121 aa, Homo sapiens
MAPRRVRSFLRGLPALLLLLLFLGPWPAASHGGKYSREKNQPKPSPKRESGEEFRMEKLNQLWEKAQRLHLPPVRLAELHADLKIQERDELAWKKLKLDGLDEDGEKEARLIRNLNGNHIK

SEQ ID NO: 22453 - protein, 13 aa, Homo sapiens
VMIPRPADRCEWP

SEQ ID NO: 22454 - protein, 72 aa, Homo sapiens
LPVLLLLLAGAPAARPTPPTCYSRMRALSQEITRDFNLLQVSEPSDLVFLLDDCNALEYPIPVTTVLPDRQR

SEQ ID NO: 22455 - protein, 87 aa, Homo sapiens
LPVLLLLLAGAPAARPTPPTCYSRMRALSQEITRDFNLLQVSEPSEPCVRYLPRLYLDIHDLVFLLDDCNALEYPIPVTTVLPDRQR

SEQ ID NO: 22456 - protein, 91 aa, Homo sapiens
LPPRHRACSLNAWLSHGAFCFWGVFLSQRERVICSTLAHPCRPAVVLGTVWGTGLHDEDAWAVGAFIRHKLAPVPASRSMMGTSMLELLPD

SEQ ID NO: 22457 - protein, 622 aa, Homo sapiens
VGIHGRRASVRVSIPPGPLSARPLGAGPRAPVPVRQPRRSAAGPRAPEGAMSYQGKKSIPHITSDRLLIKGGRIINDDQSLYADVYLEDGLIKQIGENLIVPGGVKTIEANGRMVIPGGIDVNTYLQKPSQGMTAADDFFQGTRAALVGGTTMIIDHVVPEPGSSLLTSFEKWHEAADTKSCCDYSLHVDITSWYDGVREELEVLVQDKGVNSFQVYMAYKDVYQMSDSQLYEAFTFLKGLGAVILVHAENGDLIAQEQKRILEMGITGPEGHALSRPEELEAEAVFRAITIAGRINCPVYITKVMSKSAADIIALARKKGPLVFGEPIAASLGTDGTHYWSKNWAKAAAFVTSPPLSPDPTTPDYLTSLLACGDLQVTGSGHCPYSTAQKAVGKDNFTLIPEGVNGIEERMTVVWDKAVATGKMDENQFVAVTSTNAAKIFNLYPRKGRIAVGSDADVVIWDPDKLKTITAKSHKSAVEYNIFEGMECHGSPLVVISQGKIVFEDGNINVNKGMGRFIPRKAFPEHLYQRVKIRNKVFGLQGVSRGMYDGPVYEVPATPKYATPAPSAKSSPSKHQPPPIRNLHQSNFSLSGAQIDDNNPRRTGHRIVAPPGGRSNITSLG

SEQ ID NO: 22458 - protein, 93 aa, Homo sapiens
VGIHGRRASVRVSIPPGPLSARPLGAGPRAPVPVRQPRRSAAGPRAPEGAMSYQGKKSIPHITSDRLLIKGGRIINDDQSLYADVYLEDGLIN

SEQ ID NO: 22459 - protein, 933 aa, Homo sapiens
VQIAPPRPQISRLRRVQLLPNNFSAGPEAPGRRSAACGPLTGRMDSNTAPLGPSCPQPPPAPQPQARSRLNATASLEQERSERPRAPGPQAGPGPGVRDAAAPAEPQAQHTRSRERADGTGPTKGDMEIPFEEVLERAKAGDPKAQTEVGKHYLQLAGDTDEELNSCTAVDWLVLAAKQGRREAVKLLRRCLADRRGITSENEREVRQLSSETDLERAVRKAALVMYWKLNPKKKKQVAVAELLENVGQVNEHDGGAQPGPVPKSLQKQRRMLERLVSSESKNYIALDDFVEITKKYAKGVIPSSLFLQDDEDDDELAGKSPEDLPLRLKVVKYPLHAIMEIKEYLIDMASRAGMHWLSTIIPTHHINALIFFFIVSNLTIDFFAFFIPLVIFYLSFISMVICTLKVFQDSKAWENFRTLTDLLLRFEPNLDVEQAEVNFGWNHLEPYAHFLLSVFFVIFSFPIASKDCIPCSELAVITGFFTVTSYLSLSTHAEPYTRRALATEVTAGLLSLLPSMPLNWPYLKVLGQTFITVPVGHLVVLNVSVPCLLYVYLLYLFFRMAQLRNFKGTYCYLVPYLVCFMWCELSVVILLESTGLGLLRASIGYFLFLFALPILVAGLALVGVLQFARWFTSLELTKIAVTVAVCSVPLLLRWWTKASFSVVGMVKSLTRSSMVKLILVWLTAIVLFCWFYVYRSEGMKVYNSTLTWQQYGALCGPRAWKETNMARTQILCSHLEGHRVTWTGRFKYVRVTDIDNSAESAINMLPFFIGDWMRCLYGEAYPACSPGNTSTAEEELCRLKLLAKHPCHIKKFDRYKFEITVGMPFSSGADGSRSREEDDVTKDIVLRASSEFKSVLLSLRQGSLIEFSTILEGRLGSKWPVFELKAISCLNCMAQLSPTRRHVKIEHDWRSTVHGAVKFAFDFFFFPFLSAA

SEQ ID NO: 22460 - protein, 791 aa, Homo sapiens
LVSGLQVGKHYLQLAGDTDEELNSCTAVDWLVLAAKQGRREAVKLLRRCLADRRGITSENEREVRQLSSETDLERAVRKAALVMYWKLNPKKKKQVAVAELLENVGQVNEHDGGAQPGPVPKSLQKQRRMLERLVSSESKNYIALDDFVEITKKYAKGVIPSSLFLQDDEDDDELAGKSPEDLPLRLKVVKYPLHAIMEIKEYLIDMASRAGMHWLSTIIPTHHINALIFFFIVSNLTIDFFAFFIPLVIFYLSFISMVICTLKVFQDSKAWENFRTLTDLLLRFEPNLDVEQAEVNFGWNHLEPYAHFLLSVFFVIFSFPIASKDCIPCSELAVITGFFTVTSYLSLSTHAEPYTRRALATEVTAGLLSLLPSMPLNWPYLKVLGQTFITVPVGHLVVLNVSVPCLLYVYLLYLFFRMAQLRNFKGTYCYLVPYLVCFMWCELSVVILLESTGLGLLRASIGYFLFLFALPILVAGLALVGVLQFARWFTSLELTKIAVTVAVCSVPLLLRWWTKASFSVVGMVKSLTRSSMVKLILVWLTAIVLFCWFYVYRSEGMKVYNSTLTWQQYGALCGPRAWKETNMARTQILCSHLEGHRVTWTGRFKYVRVTDIDNSAESAINMLPFFIGDWMRCLYGEAYPACSPGNTSTAEEELCRLKLLAKHPCHIKKFDRYKFEITVGMPFSSGADGSRSREEDDVTKDIVLRASSEFKSVLLSLRQGSLIEFSTILEGRLGSKWPVFELKAISCLNCMAQLSPTRRHVKIEHDWRSTVHGAVKFAFDFFFFPFLSAA

SEQ ID NO: 22461 - protein, 1020 aa, Homo sapiens
VGLAPSRPAAGMGQLCWLPLLAPLLLLRPPGVQSAGPIRAFVVPHSHMDVGWVYTVQESMRAYAANVYTSVVEELARGQQRRFIAVEQEFFRLWWDGVASDQQKYQVRQLLEEGRLEFVIGGQVMHDEAVTHLDDQILQLTEGHGFLYETFGIRPQFSWHVDPFGASATTPTLFALAGFNAHLGSRIDYDLKAAMQEARGLQFVWRGSPSLSERQEIFTHIMDQYSYCTPSHIPFSNRSGFYWNGVAVFPKPPQDGVYPNMSEPVTPANINLYAEALVANVKQRAAWFRTPHVLWPWGCDKQFFNASVQFANMDPLLDHINSHAAELGVSVQYATLGDYFRALHALNVTWRVRDHHDFLPYSTEPFQAWTGFYTSRSSLKGLARRASALLYAGESMFTRYLWPAPRGHLDPTWALQQLQQLRWAVSEVQHHDAITGTESPKVRDMYATHLASGMLGMRKLMASIVLDELQPQAPMAASSDAGPAGHFASVYNPLAWTVTTIVTLTVGFPGVRVTDEAGHPVPSQIQNSTETPSAYDLLILTTIPGLSYRHYNIRPTAGAQEGTQEPAATVASTLQFGRRLRRRTSHAGRYLVPVANDCYIVLLDQDTNLMHSIWERQSNRTVRVTQEFLEYHVNGDVKQGPISDNYLFTPGKAAVPAWEAVEMEIVAGQLVTEIRQYFYRNMTAQNYTYAIRSRLTHVPQGHDGELLCHRIEQEYQAGPLELNREAVLRTSTNLNSQQVIYSDNNGYQMQRRPYVSYVNNSIARNYYPMVQSAFMEDGKSRLVLLSERAHGISSQGNGQVEVMLHRRLWNNFDWDLGYNLTLNDTSVVHPVLWLLLGSWSLTTALRQRSALALQHRPVVLFGDLAGTAPKLPGPQQQEAVTLPPNLHLQILSIPGWRYSSNHTEHSQNLRKGHRGEAQADLRRVLLRLYHLYEVGEDPVLSQPVTVNLEAVLQALGSVVAVEERSLTGTWDLSMLHRWSWRTGPGRHRGDTTSPSRPPGGPIITVHPKEIRTFFIHFQQQ

SEQ ID NO: 22462 - protein, 951 aa, Homo sapiens
LCWLPLLAPLLLLRPPGVQSAGPIRAFVVPHSHMDVGWVYTVQESMRAYAANVYTSVVEELARGQQRRFIAVEQEFFRLWWDGVASDQQKYQVRQLLEEGRLEFVIGGQVMHDEAVTHLDDQILQLTEGHGFLYETFGIRPQFSWHVDPFGASATTPTLFALAGFNAHLGSRIDYDLKAAMQEARGLQFVWRGSPSLSERQEIFTHIMDQYSYCTPSHIPFSNRSGFYWNGVAVFPKPPQDGVYPNMSEPVTPANINLYAEALVANVKQRAAWFRTPHVLWPWGCDKQFFNASVQFANMDPLLDHINSHAAELGVSVQYATLGDYFRALHALNVTWRVRDHHDFLPYSTEPFQAWTGFYTSRSSLKGLARRASALLYAGESMFTRYLWPAPRGHLDPTWALQQLQQLRWAVSEVQHHDAITGTESPKVRDMYATHLASGMLGMRKLMASIVLDELQPQAPMAASSDAGPAGHFASVYNPLAWTVTTIVTLTVGFPGVRVTDEAGHPVPSQIQNSTETPSAYDLLILTTIPGLSYRHYNIRPTAGAQEGTQEPAATVASTLQFGRRLRRRTSHAGRYLVPVANDCYIVLLDQDTNLMHSIWERQSNRTVRVTQEFLEYHVNGDVKQGPISDNYLFTPGKAAVPAWEAVEMEIVAGQLVTEIRQYFYRNMTAQNYTYAIRSRLTHVPQGHDGELLCHRIEQEYQAGPLELNREAVLRTSTNLNSQQVIYSDNNGYQMQRRPYVSYVNNSIARNYYPMVQSAFMEDGKSRLVLLSERAHGISSQGNGQVEVMLHRRLWNNFDWDLGYNLTLNDTSVVHPVLWLLLGSWSLTTALRQRSALALQHRPVVLFGDLAGTAPKLPGPQQQEAVTLPPNLHLQILSIPGWRYSSNHTEHSQNLRKGHRGEAQADLRRVLLRLYHLYEVGEDPVLSQPVTVNLEVNFPTPIQTISQGSKP

SEQ ID NO: 22463 - protein, 155 aa, Homo sapiens
LLLSWFSAQLWNLVQLTLPLLLSLQAVLQALGSVVAVEERSLTGTWDLSMLHRWSWRTGPGRHRGLGTPASAPYPGLPARLSSWSDPVHIQPSACPGLCDLARLLSYSEPAALPNLLQSVKKGFGLVSACQGSTQACVCTCTCAHADHTPCLCPG

SEQ ID NO: 22464 - protein, 166 aa, Homo sapiens
LKKGKSFQEYSGSLLLSIASVGFLSPTDIAIAVPRQWEEMRPLDIVELAEPEEVEVLEPEEDFEQFLLPVINEMREDIASLTREHGRAYLRNRSKLWEMDNMLIQIKTQVEASEESALNHLQNPGDAAEGRAAKRCEKAEEKAKEIAKMAEMLVELVRRIEKSESS

SEQ ID NO: 22465 - protein, 44 aa, Homo sapiens
LDTVLAAESWGNLLLVWSLVTARLPRSLLVSSPGVPRGLEEAAA

SEQ ID NO: 22466 - protein, 20 aa, Homo sapiens
MVRCIFLLIGAFSLEKTAFH

SEQ ID NO: 22467 - protein, 477 aa, Homo sapiens
LAGSGGGWAGAAVAAAAAAGGGCSCAAAAAGPAGGGALTAGGAAAAAGRAAGGERGKMAELGKKYCVYCLAEVSPLRFRCTECQDIELCPECFSAGAEIGHHRRYHGYQLVDGGRFTLWGPEAEGGWTSREEQLLLDAIEQFGFGNWEDMAAHVGASRTPQEVMEHYVSMYIHGNLGKACIPDTIPNRVTDHTCPSGGPLSPSLTTPLPPLDISVAEQQQLGYMPLRDDYEIEYDQDAETLISGLSVNYDDDDVEIELKRAHVDMYVRKLKERQRRKNIARDYNLVPAFLGKDKKEKEKALKRKITKEEKELRLKLRPLYQFMSCKEFDDLFENMHKEKMLRAKIRELQRYRRNGITKMEESAEYEAARHKREKRKENKNLAGSKRGKEDGKDSEFAAIENLPGFELLSDREKVLCSSLNLSPARYVTVKTIIIKDHLQKRQGIPSKSRLPSYLDKVLKKRILNFLTESGWISRDAS

SEQ ID NO: 22468 - protein, 63 aa, Homo sapiens
LKEAIVTILYWIMGEANVCILSEFLRVIHCDDAPPLPVQLGAYCEIGSFPFECSSLWYKSYCG

SEQ ID NO: 22469 - protein, 234 aa, Homo sapiens
LHARLVRARRLRRAVAVMAAQCVRLARRSLPALALSLRPSPRLLCTATKQKNSGQNLEEDMGQSEQKADPPATEKTLLEEKVKLEEQLKETVEKYKRALADTENLRQRSQKLVEEAKLYGIQAFCKDLLEVADVLEKATQCVPKEEIKDDNPHLKNLYEGLVMTEVQIQKVFTKHGLLKLNPVGAKFDPYEHEALFHTPVEGKEPGTVALVSKVGYKLHGRTLRPALVGVVKEA

SEQ ID NO: 22470 - protein, 117 aa, Homo sapiens
LRRAVAVMAAQCVRLARRSLPALALSLRPSPRLLCTATKQKNSGQNLEEDMGQSEQKADPPATEKTLLEEKVKLEEQLKETVEKYKRALADTENLRQRSQKLVEEAKLYGTFNITWC

SEQ ID NO: 22471 - protein, 1193 aa, Homo sapiens
LRSRSRSPAPSCSPGRGPLVRAAPPPAPLPPLATMAHRGPSRASKGPGPTARAPSPGAPPPPRSPRSRPLLLLLLLLGACGAAGRSPEPGRLGPHAQLTRVPRSPPAGRAEPGGGEDRQARGTEPGAPGPSPGPAPGPGEDGAPAAGYRRWERAAPLAGVASRAQVSLISTSFVLKGDATHNQAMVHWTGENSSVILILTKYYHADMGKVLESSLWRSSDFGTSYTKLTLQPGVTTVIDNFYICPTNKRKVILVSSSLSDRDQSLFLSADEGATFQKQPIPFFVETLIFHPKEEDKVLAYTKESKLYVSSDLGKKWTLLQERVTKDHVFWSVSGVDADPDLVHVEAQDLGGDFRYVTCAIHNCSEKMLTAPFAGPIDHGSLTVQDDYIFFKATSANQTKYYVSYRRNEFVLMKLPKYALPKDLQIISTDESQVFVAVQEWYQMDTYNLYQSDPRGVRYALVLQDVRSSRQAEESVLIDILEVRGVKGVFLANQKIDGKVMTLITYNKGRDWDYLRPPSMDMNGKPTNCKPPDCHLHLHLRWADNPYVSGTVHTKDTAPGLIMGAGNLGSQLVEYKEEMYITSDCGHTWRQVFEEEHHILYLDHGGVIVAIKDTSIPLKILKFSVDEGLTWSTHNFTSTSVFVDGLLSEPGDETLVMTVFGHISFRSDWELVKVDFRPSFSRQCGEEDYSSWELSNLQGDRCIMGQQRSFRKRKSTSWCIKGRSFTSALTSRVCECRDSDFLCDYGFERSSSSESSTNKCSANFWFNPLSPPDDCALGQTYTSSLGYRKVVSNVCEGGVDMQQSQVQLQCPLTPPRGLQVSIQGEAVAVRPGEDVLFVVRQEQGDVLTTKYQVDLGDGFKAMYVNLTLTGEPIRHRYESPGIYRVSVRAENTAGHDEAVLFVQVNSPLQALYLEVVPVIGLNQEVNLTAVLLPLNPNLTVFYWWIGHSLQPLLSLDNSVTTRFSDTGDVRVTVQAACGNSVLQDSRVLRVLDQFQVMPLQFSKELDAYNPNTPEWREDVGLVVTRLLSKETSVPQELLVTVVKPGLPTLADLYVLLPPPRPTRKRSLSSDKRLAAIQQVLNAQKISFLLRGGVRVLVALRDTGTGAEQLGGGGGYWAVVVLFVIGLFAAGAFILYKFKRKRPGRTVYAQMHNEKEQEMTSPVSHSEDVQGAVQGNHSGVVLSINSREMHSYLVS

SEQ ID NO: 22472 - protein, 75 aa, Homo sapiens
LRMDGSMSPQMKTWIRQGRAWIPGCPGHECGWPWALGSPCTPTRRARGIRSPDVDFVSWRTLSTCPSPSSSEVKA

SEQ ID NO: 22473 - protein, 10 aa, Homo sapiens
MIKLNMKCFE

SEQ ID NO: 22474 - protein, 377 aa, Homo sapiens
LSPPAPARSPALPPAAGPAAMQARALLLAALAALALAREPPAAPCPARCDVSRCPSPRCPGGYVPDLCNCCLVCAASEGEPCGGPLDSPCGESLECVRGLCRCRWSHAVCGTDGHTYANVCALQAASRRALQLSGTPVRQLQKGACPLGLHQLSSPRYKFNFIADVVEKIAPAVVHIELFLRHPLFGRNVPLSSGSGFIMSEAGLIITNAHVVSSNSAAPGRQQLKVQLQNGDSYEATIKDIDKKSDIATIKIHPKKKLPVLLLGHSADLRPGEFVVAIGSPFALQNTVTTGIVSTAQREGRELGLRDSDMDYIQTDAIINYGNSGGPLVNLDGEVIGINTLKVTAGISFAIPSDRITRFLTEFQDKQIKAPSLAVH

SEQ ID NO: 22475 - protein, 473 aa, Homo sapiens
LSPPAPARSPALPPAAGPAAMQARALLLAALAALALAREPPAAPCPARCDVSRCPSPRCPGGYVPDLCNCCLVCAASEGEPCGGPLDSPCGESLECVRGLCRCRWSHAVCGTDGHTYANVCALQAASRRALQLSGTPVRQLQKGACPLGLHQLSSPRYKFNFIADVVEKIAPAVVHIELFLRHPLFGRNVPLSSGSGFIMSEAGLIITNAHVVSSNSAAPGRQQLKVQLQNGDSYEATIKDIDKKSDIATIKIHPKKKLPVLLLGHSADLRPGEFVVAIGSPFALQNTVTTGIVSTAQREGRELGLRDSDMDYIQTDAIINYGNSGGPLVNLDGEVIGINTLKVTAGISFAIPSDRITRFLTEFQDKQIKDWKKRFIGIRMRTITPSLVDELKASNPDFPEVSSGIYVQEVAPNSPSQRGGIQDGDIIVKVNGRPLVDSSELQEAVLTESPLLLEVRRGNDDLLFSIAPEVVM

SEQ ID NO: 22476 - protein, 652 aa, Homo sapiens
LRWPSKVRRPTMPPPLPLLLLTVLVVAAARPGCEFERNPAATCVDLQLRTCSDAAYNHTTFPNLLQHRSWEVVEASSEYILLSVLHQLLEGQCNPDLRLLGCAVLAPRCEGGWVRRPCRHICEGLREVCQPAFDAIDMAWPYFLDCHRYFTREDEGCYDPLEKLRGGLEADEALPSGLPPTFIRFSHHSYAQMVRVLRRTASRCAHVARTYSIGRSFDGRELLVIEFSSRPGQHELMEPEVKLIGNIHGNEVAGREMLIYLAQYLCSEYLLGNPRIQRLLNTTRIHLLPSMNPDGYEVAAAEGAGYNGWTSGRQNAQNLDLNRNFPDLTSEYYRLAETRGARSDHIPIPQHYWWGKVAPETKAIMKWMQTIPFVLSASLHGGDLVVSYPFDFSKHPQEEKMFSPTPDEKMFKLLSRAYADVHPMMMDRSENRCGGNFLKRGSIINGADWYSFTGGMSDFNYLHTNCFEITVELGCVKFPPEEALYILWQHNKESLLNFVETVHRGIKGVVTDKFGKPVKNARISVKGIRHDITTAPDGDYWRLLPPGIHIVIAQAPGYAKVIKKVIIPARMKRAGRVDFILQPLGMGPKNFIHGLRRTGPHDPLGGASSLGEATEPDPLRARRQPSADGSKPWWWSYFTSLSTHRPRWLLKY

SEQ ID NO: 22477 - protein, 43 aa, Homo sapiens
LPLLLLTVLVVAAARPGCEFERNPADWWSLGTLCLDHEGLGVT

SEQ ID NO: 22478 - protein, 65 aa, Homo sapiens
LPLLLLTVLVVAAARPGCEFERNPAGECHRPPAADSGTVPGPPWLLFCRRAAAPTLSEHFRQLNP

SEQ ID NO: 22479 - protein, 56 aa, Homo sapiens
LLLLTVLVVAAARPGCEFERNPAGSDSCTVAVVLVLPCQTVGAPPCRPWPCVGSPT

SEQ ID NO: 22480 - protein, 393 aa, Homo sapiens
VDLQLRTCSDAAYNHTTFPNLLQHRSWEVVEASSEYILLSVLHQLLEGQCNPDLRLLGCAVLAPRCEGGWVRRPCRHICEGLREVCQPAFDAIDMAWPYFLDCHRYFTREDEGCYDPLEKLRGGLEADEALPSGLPPTFIRFSHHSYAQMVRVLRRTASRCAHVARTYSIGRSFDGRELLVIEFSSRPGQHELMEPEVKLIGNIHGNEVAGREMLIYLAQYLCSEYLLGNPRIQRLLNTTRIHLLPSMNPDGYEVAAAEGAGYNGWTSGRQNAQNLDLNRNFPDLTSEYYRLAETRGARSDHIPIPQHYWWGKVAPETKAIMKWMQTIPFVLSASLHGGDLVVSYPFDFSKHPQEEKMFSPTPDEKREPPPQHRPVLLGGALMSSCRVSPSPA

SEQ ID NO: 22481 - protein, 279 aa, Homo sapiens
LSPPTAPPGGLEADEALPSGLPPTFIRFSHHSYAQMVRVLRRTASRCAHVARTYSIGRSFDGRELLVIEFSSRPGQHELMEPEVKLIGNIHGNEVAGREMLIYLAQYLCSEYLLGNPRIQRLLNTTRIHLLPSMNPDGYEVAAAEGAGYNGWTSGRQNAQNLDLNRNFPDLTSEYYRLAETRGARSDHIPIPQHYWWGKVAPETKAIMKWMQTIPFVLSASLHGGDLVVSYPFDFSKHPQEEKMFSPTPDEKREPPPQHRPVLLGGALMSSCRVSPSPA

SEQ ID NO: 22482 - protein, 179 aa, Homo sapiens
LVGGSEDCGEGGSLIQDHSRFVNCVRFSPDGNRFATASADGQIYIYDGKTGEKVCALGGSKAHDGGIYAISWSPDSTHLLSASGDKTSKIWDVSVNSVVSTFPMGSTVLDQQLGCLWQKDHLLSVSLSGYINYLDRNNPSKPLHVIKGHSKSIQCLTVHKNGGKSYIYSGSHDGHINIL

SEQ ID NO: 22483 - protein, 143 aa, Homo sapiens
LDRKLETRFVQDHSRFVNCVRFSPDGNRFATASADGQIYIYDGKTGEKVCALGGSKAHDGGIYALESRQHPFAFCFWGQNFQDLGRQRELRGQHISHGLHGSGPAAGLPMAEGPPAQCLPVRVHQLSGQKQPQQAPARHQGSQ

SEQ ID NO: 22484 - protein, 86 aa, Homo sapiens
VGRAGGAPLPPRAWPGARTRKSRGSWRSWKVEAALPAQSTEKVFASLPQVERGVSKIIGGDPKGNNFLYTNGKCVILRNIDVSPTF

SEQ ID NO: 22485 - protein, 18 aa, Homo sapiens
VVMPLGLMLCIHYLVCIS

SEQ ID NO: 22486 - protein, 89 aa, Homo sapiens
LALRSFEVIILYCVTLSCFHLEKQRNQAVSCSCLGPFCCPSSTLGFRWKSRIPSMGTFVGSIWKYFSSSGWQSICNSVISVQGSLAKRL

SEQ ID NO: 22487 - protein, 311 aa, Homo sapiens
VVSSMAALLLGAVLLVAQPQLVPSRPAELGQQELLRKAGTLQDDVRDGVAPNGSAQQLPQTIIIGVRKGGTRALLEMLSLHPDVAAAENEVHFFDWEEHYSHGLGWYLSQMPFSWPHQLTVEKTPAYFTSPKVPERVYSMNPSIRLLLILRDPSERVLSDYTQVFYNHMQKHKPYPSIEEFLVRDGRLNVDYKALNRSLYHVHMQNWLRFFPLRHIHIVDGDRLIRDPFPEIQKVERFLKLSPQINASNFYFNKTKGFYCLRDSGRDRCLHESKGRAHPQVDPKLLNKLHEYFHEPNKKFFELVGRTFDWH

SEQ ID NO: 22488 - protein, 67 aa, Homo sapiens
LDKIRYESLTDPSKLDSGKELKIDIIPNTQEHTLTLVDTGIGMTKADLINNLGTIAKFRTKAFMEAF

SEQ ID NO: 22489 - protein, 589 aa, Homo sapiens
MPPPSPDSENGFYPGLPSSMNPAFFPSFSPVSPHGCTGLSVPTSGGGGGGFGGPFSATAVPPPPPPAMNIPQQQPPPPAAPQQPQSRRSPVSPQLQQQHQAAAAAFLQQRNSYNHHQPLLKQSPWSNHQSSGWGTGSMSWGAMHGRDHRRTGNMGIPGTMNQISPLKKPFSGNVIAPPKFTRSTPSLTPKSWIEDNVFRTDNNSNTLLPLQVRSSLQLPAWGSDSLQDSWCTAAGTSRIDQDRSRMYDSLNMHSLENSLIDIMRAEHDPLKGRLSYPHPGTDNLLMLNGRSSLFPIDDGLLDDGHSDQVGVLNSPTCYSAHQNGERIERFSRKVFVGGLPPDIDEDEITASFRRFGPLVVDWPHKAESKSYFPPKGYAFLLFQEESSVQALIDACIEEDGKLYLCVSSPTIKDKPVQIRPWNLSDSDFVMDGSQPLDPRKTIFVGGVPRPLRAVELAMIMDRLYGGVCYAGIDTDPELKYPKGAGRVAFSNQQSYIAAISARFVQLQHGDIDKRVEVKPYVLDDQMCDECQGARCGGKFAPFFCANVTCLQYYCEFCWANIHSRAGREFHKPLVKEGADRPRQIHFRWN

SEQ ID NO: 22490 - protein, 559 aa, Homo sapiens
MPPPSPDSENGFYPGLPSSMNPAFFPSFSPVSPHGCTGLSVPTSGGGGGGFGGPFSATAVPPPPPPAMNIPQQQPPPPAAPQQPQSRRSPVSPQLQQQHQAAAAAFLQQRNSYNHHQPLLKQSPWSNHQSSGWGTGSMSWGAMHGRDHRRTGNMGIPGTMNQISPLKKPFSGNVIAPPKFTRSTPSLTPKSWIEDNVFRTDNNSNTLLPLQDRSRMYDSLNMHSLENSLIDIMRAEHDPLKGRLSYPHPGTDNLLMLNGRSSLFPIDDGLLDDGHSDQVGVLNSPTCYSAHQNGERIERFSRKVFVGGLPPDIDEDEITASFRRFGPLVVDWPHKAESKSYFPPKGYAFLLFQEESSVQALIDACIEEDGKLYLCVSSPTIKDKPVQIRPWNLSDSDFVMDGSQPLDPRKTIFVGGVPRPLRAVELAMIMDRLYGGVCYAGIDTDPELKYPKGAGRVAFSNQQSYIAAISARFVQLQHGDIDKRVEVKPYVLDDQMCDECQGARCGGKFAPFFCANVTCLQYYCEFCWANIHSRAGREFHKPLVKEGADRPRQIHFRWN

SEQ ID NO: 22491 - protein, 567 aa, Homo sapiens
MPPPSPDSENGFYPGLPSSMNPAFFPSFSPVSPHGCTGLSVPTSGGGGGGFGGPFSATAVPPPPPPAMNIPQQQPPPPAAPQQPQSRRSPVSPQLQQQHQAAAAAFLQQRNSYNHHQPLLKQSPWSNHQSSGWGTGSMSWGAMHGRDHRRTGNMGIPGTMNQISPLKKPFSGNVIAPPKFTRSTPSLTPKSWIEDNVFRTDNNSNTLLPLQDRSRMYDSLNMHSLENSLIDIMRAEHDPLKGRLSYPHPGTDNLLMLNARSYGRRRGRSSLFPIDDGLLDDGHSDQVGVLNSPTCYSAHQNGERIERFSRKVFVGGLPPDIDEDEITASFRRFGPLVVDWPHKAESKSYFPPKGYAFLLFQEESSVQALIDACIEEDGKLYLCVSSPTIKDKPVQIRPWNLSDSDFVMDGSQPLDPRKTIFVGGVPRPLRAVELAMIMDRLYGGVCYAGIDTDPELKYPKGAGRVAFSNQQSYIAAISARFVQLQHGDIDKRVEVKPYVLDDQMCDECQGARCGGKFAPFFCANVTCLQYYCEFCWANIHSRAGREFHKPLVKEGADRPRQIHFRWN

SEQ ID NO: 22492 - protein, 562 aa, Homo sapiens
MPPPSPDSENGFYPGLPSSMNPAFFPSFSPVSPHGCTGLSVPTSGGGGGGFGGPFSATAVPPPPPPAMNIPQQQPPPPAAPQQPQSRRSPVSPQLQQQHQAAAAAFLQQRNSYNHHQPLLKQSPWSNHQSSGWGTGSMSWGAMHGRDHRRTGNMGIPGTMNQISPLKKPFSGNVIAPPKFTRSTPSLTPKSWIEDNVFRTDNNSNTLLPLQVRMDRSRMYDSLNMHSLENSLIDIMRAEHDPLKGRLSYPHPGTDNLLMLNGRSSLFPIDDGLLDDGHSDQVGVLNSPTCYSAHQNGERIERFSRKVFVGGLPPDIDEDEITASFRRFGPLVVDWPHKAESKSYFPPKGYAFLLFQEESSVQALIDACIEEDGKLYLCVSSPTIKDKPVQIRPWNLSDSDFVMDGSQPLDPRKTIFVGGVPRPLRAVELAMIMDRLYGGVCYAGIDTDPELKYPKGAGRVAFSNQQSYIAAISARFVQLQHGDIDKRVEVKPYVLDDQMCDECQGARCGGKFAPFFCANVTCLQYYCEFCWANIHSRAGREFHKPLVKEGADRPRQIHFRWN

SEQ ID NO: 22493 - protein, 331 aa, Homo sapiens
VEEARDWRDQSSPMAAQGCAASRLLQLLLQLLLLLLLLAAGGARARWRGEGTSAHLRDIFLGRCAEYRALLSPEQRNKNCTAIWEAFKVALDKDPCSVLPSDYDLFINLSRHSIPRDKSLFWENSHLLVNSFADNTRRFMPLSDVLYGRVADFLSWCRQKNDSGLDYQSCPTSEDCENNPVDSFWKRASIQYSKDSSGVIHVMLNGSEPTGAYPIKGFFADYEIPNLQKEKITRIEIWVMHEIGGPNVESCGEGSMKVLEKRLKDMGFQYSCINDYRPVKLLQCVDHSTHPDCALKSAAAATQRKAPSLYTEQRAGLIIPLFLVLASRTQL

SEQ ID NO: 22494 - protein, 346 aa, Homo sapiens
VEEARDWRDQSSPMAAQGCAASRLLQLLLQLLLLLLLLAAGGARARWRGEGTSAHLRDIFLGRCAEYRALLSPEQRQIRNSREPPVLHTTQNKNCTAIWEAFKVALDKDPCSVLPSDYDLFINLSRHSIPRDKSLFWENSHLLVNSFADNTRRFMPLSDVLYGRVADFLSWCRQKNDSGLDYQSCPTSEDCENNPVDSFWKRASIQYSKDSSGVIHVMLNGSEPTGAYPIKGFFADYEIPNLQKEKITRIEIWVMHEIGGPNVESCGEGSMKVLEKRLKDMGFQYSCINDYRPVKLLQCVDHSTHPDCALKSAAAATQRKAPSLYTEQRAGLIIPLFLVLASRTQL

SEQ ID NO: 22495 - protein, 63 aa, Homo sapiens
MHEIGGPNVESCGEGSMKVLEKRLKDMGFQYSCINDYRPVKLLQCVDHSTHPDCALKSKLWEP

SEQ ID NO: 22496 - protein, 868 aa, Homo sapiens
LLAMALVLGSLLLLGLCGNSFSGGQPSSTDAPKAWNYELPATNYETQDSHKAGPIGILFELVHIFLYVVQPRDFPEDTLRKFLQKAYESKIDYDKPETVILGLKIVYYEAGIILCCVLGLLFIILMPLVGYFFCMCRCCNKCGGEMHQRQKENGPFLRKCFAISLLVICIIISIGIFYGFVANHQVRTRIKRSRKLADSNFKDLRTLLNETPEQIKYILAQYNTTKDKAFTDLNSINSVLGGGILDRLRPNIIPVLDEIKSMATAIKETKEALENMNSTLKSLHQQSTQLSSSLTSVKTSLRSSLNDPLCLVHPSSETCNSIRLSLSQLNSNPELRQLPPVDAELDNVNNVLRTDLDGLVQQGYQSLNDIPDRVQRQTTTVVAGIKRVLNSIGSDIDNVTQRLPIQDILSAFSVYVNNTESYIHRNLPTLEEYDSYWWLGGLVICSLLTLIVIFYYLGLLCGVCGYDRHATPTTRGCVSNTGGVFLMVGVGLSFLFCWILMIIVVLTFVFGANVEKLICEPYTSKELFRVLDTPYLLNEDWEYYLSGKLFNKSKMKLTFEQVYSDCKKNRGTYGTLHLQNSFNISEHLNINEHTGSISSELESLKVNLNIFLLGAAGRKNLQDFAACGIDRMNYDSYLAQTGKSPAGVNLLSFAYDLEAKANSLPPGNLRNSLKRDAQTIKTIHQQRVLPIEQSLSTLYQSVKILQRTGNGLLERVTRILASLDFAQNFITNNTSSVIIEETKKYGRTIIGYFEHYLQWIEFSISEKVASCKPVATALDTAVDVFLCSYIIDPLNLFWFGIGKATVFLLPALIFAVKLAKYYRRMDSEDVYDDVETIPMKNMENGNNGYHKDHVYGIHNPVMTSPSQH

SEQ ID NO: 22497 - protein, 845 aa, Homo sapiens
LLAMALVLGSLLLLGLCGNSFSGGQPSSTDAPKAWNYELPATNYETQDSHKAGPIGILFELVHIFLYVVQPRDFPEDTLRKFLQKAYESKIDYDKPETVILGLKIVYYEAGIILCCVLGLLFIILMPLVGYFFCMCRCCNKCGGEMHQRQKENGPFLRKCFAISLLVICIIISIGIFYGFVANHQVRTRIKRSRKLADSNFKDLRTLLNETPEQIKYILAQYNTTKDKAFTDLNSINSVLGGGILDRLRPNIIPVLDEIKSMATAIKETKEALENMNSTLKSLHQQSTQLSSSLTSVKTSLRSSLNDPLCLVHPSSETCNSIRLSLSQLNSNPELRQLPPVDAELDNVNNVLRTDLDGLVQQGYQSLNDIPDRVQRQTTTVVAGIKRVLNSIGSDIDNVTQRLPIQDILSAFSVYVNNTESYIHRNLPTLEEYDSYWWLGGLVICSLLTLIVIFYYLGLLCGVCGYDRHATPTTRGCVSNTGGVFLMVGVGLSFLFCWILMIIVVLTFVFGANVEKLICEPYTSKELFRVLDTPYLLNEDWEYYLSGKLFNKSKMKLTFEQVYSDCKKNRGTYGTLHLQNSFNISEHLNINEHTGSISSELESLKVNLNIFLLGAAGRKNLQDFAACGIDRMNYDSYLAQTGKSPAGVNLLSFAYDLEAKANSLPPGNLRNSLKRDAQTIKTIHQQRVLPIEQSLSTLYQSVKILQRTGNGLLERVTRILASLDFAQNFITNNTSSVIIEETKKYGRTIIGYFEHYLQWIEFSISEKVASCKPVATALDTAVDVFLCSYIIDPLNLFWFGIGKATVFLLPALIFAVKLAKYYRRMDSEDVYDDVETIPMKNPSQH

SEQ ID NO: 22498 - protein, 837 aa, Homo sapiens
LLAMALVLGSLLLLGLCGNSFSGGQPSSTDAPKAWNYELPATNYETQDSHKAGPIGILFELVHIFLYVVQPRDFPEDTLRKFLQKAYESKIDYDKPETVILGLKIVYYEAGIILCCVLGLLFIILMPLVGYFFCMCRCCNKCGGEMHQRQKENGPFLRKCFAISLLVICIIISIGIFYGFVANHQVRTRIKRSRKLADSNFKDLRTLLNETPEQIKYILAQYNTTKDKAFTDLNSINSVLGGGILDRLRPNIIPVLDEIKSMATAIKETKEALENMNSTLKSLHQQSTQLSSSLTSVKTSLRSSLNDPLCLVHPSSETCNSIRLSLSQLNSNPELRQLPPVDAELDNVNNVLRTDLDGLVQQGYQSLNDIPDRVQRQTTTVVAGIKRVLNSIGSDIDNVTQRLPIQDILSAFSVYVNNTESYIHRNLPTLEEYDSYWWLGGLVICSLLTLIVIFYYLGLLCGVCGYDRHATPTTRGCVSNTGGVFLMVGVGLSFLFCWILMIIVVLTFVFGANVEKLICEPYTSKELFRVLDTPYLLNEDWEYYLSGKLFNKSKMKLTFEQVYSDCKKNRGTYGTLHLQNSFNISEHLNINEHTGSISSELESLKVNLNIFLLGAAGRKNLQDFAACGIDRMNYDSYLAQTGKSPAGVNLLSFAYDLEAKANSLPPGNLRNSLKRDAQTIKTIHQQRVLPIEQSLSTLYQSVKILQRTGNGLLERVTRILASLDFAQNFITNNTSSVIIEETKKYGRTIIGYFEHYLQWIEFSISEKVASCKPVATALDTAVDVFLCSYIIDPLNLFWFGIGKATVFLLPALIFAVKLAKYYRRMDSEDVYDDPSQH

SEQ ID NO: 22499 - protein, 859 aa, Homo sapiens
LLAMALVLGSLLLLGLCGNSFSGGQPSSTDAPKAWNYELPATNYETQDSHKAGPIGILFELVHIFLYVVQPRDFPEDTLRKFLQKAYESKIDYDKIVYYEAGIILCCVLGLLFIILMPLVGYFFCMCRCCNKCGGEMHQRQKENGPFLRKCFAISLLVICIIISIGIFYGFVANHQVRTRIKRSRKLADSNFKDLRTLLNETPEQIKYILAQYNTTKDKAFTDLNSINSVLGGGILDRLRPNIIPVLDEIKSMATAIKETKEALENMNSTLKSLHQQSTQLSSSLTSVKTSLRSSLNDPLCLVHPSSETCNSIRLSLSQLNSNPELRQLPPVDAELDNVNNVLRTDLDGLVQQGYQSLNDIPDRVQRQTTTVVAGIKRVLNSIGSDIDNVTQRLPIQDILSAFSVYVNNTESYIHRNLPTLEEYDSYWWLGGLVICSLLTLIVIFYYLGLLCGVCGYDRHATPTTRGCVSNTGGVFLMVGVGLSFLFCWILMIIVVLTFVFGANVEKLICEPYTSKELFRVLDTPYLLNEDWEYYLSGKLFNKSKMKLTFEQVYSDCKKNRGTYGTLHLQNSFNISEHLNINEHTGSISSELESLKVNLNIFLLGAAGRKNLQDFAACGIDRMNYDSYLAQTGKSPAGVNLLSFAYDLEAKANSLPPGNLRNSLKRDAQTIKTIHQQRVLPIEQSLSTLYQSVKILQRTGNGLLERVTRILASLDFAQNFITNNTSSVIIEETKKYGRTIIGYFEHYLQWIEFSISEKVASCKPVATALDTAVDVFLCSYIIDPLNLFWFGIGKATVFLLPALIFAVKLAKYYRRMDSEDVYDDVETIPMKNMENGNNGYHKDHVYGIHNPVMTSPSQH

SEQ ID NO: 22500 - protein, 164 aa, Homo sapiens
LRGPAERAPPGLESGTRQERAGDGGGGRRVGRGAPERRPPPPLPAVCEVSGGPLRASFADSVPGVRRRRPPGLGTAGAAAAAGARLQITDPHERRPCLPAILVPSLLHIYACLLHSLASECPLAVSKAFGQEGAWAASQQVYWALPSTRHCNKKWRLNHEETWL

SEQ ID NO: 22501 - protein, 19 aa, Homo sapiens
MMMMTTMTTIHLFWILSAN

SEQ ID NO: 22502 - protein, 32 aa, Homo sapiens
VPMRGLPEKSLTCLSVALSSLVFSVTPVCGTR

SEQ ID NO: 22503 - protein, 119 aa, Homo sapiens
MSLLSPWPPVVTEPSSPHFPGMIGYGMAKGAVHQLCQSLAGKNSGMPPGAAAIAVLPVTLDTPMNRKSMPEADFSSWTPLEFLVETFHDWITGKNRPSSGSLIQVVTTEGRTELTPAYF

SEQ ID NO: 22504 - protein, 85 aa, Homo sapiens
MSLLSPWPPVVTEPSSPHFPGMIGYGMAKGAVHQLCQSLAGKNSGMPPGAAAIAVLPVTLDTPMNRKSMPEADFSSWTPLEFLVE

SEQ ID NO: 22505 - protein, 235 aa, Homo sapiens [sequence omitted]

SEQ ID NO: 22506 - protein, 34 aa, Homo sapiens
LRNWARLSLLFSSAAVLARLGSLIFISDSGSGTS

SEQ ID NO: 22507 - protein, 1749 aa, Homo sapiens
MDHGYEETSVYLKDCIPSLDSSQSTPTEELSSQGQSNTDKIECQAENYLNALFRKKDLPQNCDPNIPLVAQELMKKMIRQFAIEYISKSGKTQENRNGSIGPSIVCKSIQMNQAENSLQEEQEGPLDLTVNRMQEQNTQQGDGVLDLSTKKTSIKSEESSICDPSSENSVAGSTVDAKSEEATKMEKRKSALNKVLESLCIHHQQQVLAMLKFLVQEQNAASLCCCNTSCVVSSESQKPLIEDDLCGLFCSCEYRLAERGCLQNEKQSPGLEPLPVCIKDLHCLSCQTVTVEHVKPVVNRGIADSYNSHRCCSGLLPNIHSTKSAFRSPLLSKEVCDLSVTLKDACRSRSPSPPPLSPIETEGFEKLKDVISEISALENNKLEANINQPPSLTPAEISSNKSDHQDKILKTKKSSNSYSLLSNDSNNSTTNHEKGETAVIFQDLMDRINEKLKSIETTDMTSLVKLSSSDYNTYNDLKLGDFITSLLHNAKASDYSFMELLSQHDKKVENKIIQTRFRKRQETLFAMRNSSDSPMFRRQSLQIKRELASLDENFTRKKYTEKSSRKLTQNNEISSSDKGEFYHDQGPSLQNSKRLQESFKTTSPEKMSIRKPQEKSADGKQFLQNDRKNPKLGNTQTLLRNDVSGLLSRTKRNIVPPGWYSVYVTNNYVFKKSPKAKKVSESTTKNDPVKNIHIESSHNIDLNKIAMNSNLQVVVKRLEDTISIAKKSWNNQPLSEGYKASKKLIEIDGKDQHADRNMTLTLNRMTCKEQSLSKSVVASGNIINSHCMPTVDLNNKRLENLKKSSILDMGRLISSVENVPAKYEGTESSSVSNYSSPIKLMFLSEVKSSEGVKYTLTSVGTSHSNVVLPSEKPTTHHVTEEKTETNEDISNANSENYHSSHYDTDTFQRELNKFSHAKETAGSSTMFIGDINSDKPQEEPKDNSSSATDPSFKRKPGRPKKIGPQVVKQIKRPIGRPPKPKIDQTNITVCQNEPFSAGRKSPECLISEVKEGIYKKSITVTVIYGRSRRTKRHVSEGRVNISNLMSLNNNAGDFPTEYNSPRNISEDKIDLGERISAVASLTTESEILGSGFEYVRPIKNKSVIPQPSKNIIRPNQKPLAISRKPGRPAKVKISGISVTINRTSPQEREVSISSCLPPLEQDNTSGKNLPEEKYDQQCTQMDKIRHTEADIFKNGSKRMIATVPLRHSIRDRKPSLHFLHSLASSSSLIYRNALLHKSYKLHLQKNKSQKEKHRHSKMKIAYKDTPRNRLSRNAKKCLEDNKLVPISEVSLDPIISSNPLLRWWATSASNDSLLEELNNRFEQITNAWVQVSGDEAENCIHKKREHIENDHFKVASPLETCLLELEVSPVKMLFQKKYDLNELCTWFMQTTETQSLSLVRKANARNPLEVINTRGIKLGTKYSDFNASPFRKHFKKFALSSPSKSAEKLHILHKVANSPLLNVKSNLAIARLKRTEFKRLHHERWKREGKLHNHGTVDWNSKRRNLRFFCQNQFLNKTEGETNADIPLQGKSIVDNQCVLPPEIRGDLQQRVVMPDFKIHASFENKFKSEAKENGTNCSQKDFQKGPRLENVCPNSWRSKTLKDCRIFLRKLNCLEHRNTFKLNTIIYSPESTDSGNTHQTHMEESKRFTLRSHSARQNSFKKQSKEIENANTNNPSADEFADHLGNSKLSKCVNFDKNPDSFEVLSNLNKRKRPPWKITEMSTKRHKRQSCNSGQMANYFSKSLACYK

SEQ ID NO: 22508 - protein, 220 aa, Homo sapiens
VGIVVIICASLKLLHLLGLIDFSEDSVEDELEMATVRHRPEALELLEAQSKFTKKELQILYRGFKNECPSGVVNEETFKEIYSQFFPQGDSTTYAHFLFNAFDTDHNGAVSFEDFIKGLSILLRGTVQEKLNWAFNLYDINKDGYITKEEMLDIMKAIYDMMGKCTYPVLKEDAPRQHVETFFQKMDKNKDGVVTIDEFIESCQKDENIMRSMQLFENVI

SEQ ID NO: 22509 - protein, 218 aa, Homo sapiens
LIVIVLFVKLLEQFGLIEAGLEDSVEDELEMATVRHRPEALELLEAQSKFTKKELQILYRGFKNECPSGVVNEETFKEIYSQFFPQGDSTTYAHFLFNAFDTDHNGAVSFEDFIKGLSILLRGTVQEKLNWAFNLYDINKDGYITKEEMLDIMKAIYDMMGKCTYPVLKEDAPRQHVETFFQKMDKNKDGVVTIDEFIESCQKDENIMRSMQLFENVI

SEQ ID NO: 22510 - protein, 191 aa, Homo sapiens
MQTIKCVVVGDGAVSKTCLLISYTTNKFPSEYVPTVFDNYAVTVMIGGEPYTLGLFDTAGQEDYDRLRPLSYPQTDVFLVCFSVVSPSSFENVKEKWVPEITHHCPKTPFLLVGTQIDLRDDPSTIEKPAKNKQKPITPETAEKLARDLKAVKYVECSALTKKGLKNVFDEAILAALEPPEPKKSRRCVLL

SEQ ID NO: 22511 - protein, 201 aa, Homo sapiens
MLWVNLLSGLFSLFFITIFLIREHSCVGDSWCLLFSPPSTFLDHESVQWCYDNFINYRSLMSADNVRQQLSRIMDRFNLPRRSTDFTSRDYYINIRKALVTGYFMQVAHLERTGHYLTVKDNQVVQLHPSTVLDHKPEWVLYNEFVLTTKNYIRTCTDIKPEWLVKIAPQYYDMSNFPQCEAKRQLDRIIAKLQSKEYSQY

SEQ ID NO: 22512 - protein, 157 aa, Homo sapiens
MQDNTYPEILRSNLGSVVLQLKKLGIDDLVHFDFMDPPAPETLMRALELLNYLAALNDDGDLTELGSMMAEFPLDPQLAKMVIASCDYNCSNEVLSITAMLSGNRGKGTKKSPALQSLGGLHFCFCFLIFSMIVDFIDGFKELILFSKYLVNSFVMT

SEQ ID NO: 22513 - protein, 15 aa, Homo sapiens
LGSLAAGSFPLVAIL

SEQ ID NO: 22514 - protein, 500 aa, Homo sapiens
MQCDDLGSLQPPPPGFTPFACLSLPSSWDYRRPPPHPGKCPENGWDESTLELFLHELAIMDSNNFLGNCGVGEREGRVASALVARRHYRFIHGIGRSGDISAVQPKAAGSSLLNKITNSLVLDIIKLAGVHTVANCFVVPMATGMSLTLCFLTLRHKRPKAKYIIWPRIDQKSCFKSMITAGFEPVVIENVLEGDELRTDLKAVEAKVQELGPDCILCIHSTTSCFAPRVPDRLEELAVICANYDIPHIVNNAYGVQSSKCMHLIQQGARVGRIDAFVQSLDKNFMVPVGGAIIAGFNDSFIQEISKMYPGRASASPSLDVLITLLSLGSNGYKKLLKERKEMFSYLSNQIKKLSEAYNERLLHTPHNPISLAMTLKTLDEHRDKAVTQLGSMLFTRQVSGARVVPLGSMQTVSGYTFRGFMSHTNNYPCAYLNAASAIGMKMQDVDLFIKRLDRCLKAVRKERSKESDDNYDKTEDVDIEEMALKLDNVLLDTYQDASS

SEQ ID NO: 22515 - protein, 141 aa, Homo sapiens [sequence omitted]

SEQ ID NO: 22516 - protein, 84 aa, Homo sapiens
MRGLSSALIKKGDFFMLSILHGVQPVTSPENDGWRRKLCNTINKSACNKRLCTRINISLLKYQKNSGTNYTIRKVFMIQLIFQK

SEQ ID NO: 22517 - protein, 177 aa, Homo sapiens [sequence omitted]

SEQ ID NO: 22518 - protein, 833 aa, Homo sapiens
MNAAGIRAPEAAGADGTRLAPGGSPCLRRRGRPEESPAAVVAPRGAGELQAAGAPLRFHPASPRRLHPASTPGPAWGWLLRRRRWAALLVLGLLVAGAADGCELVPRHLRGRRATGSAATAASSPAAAAGDSPALMTDPCMSLSPPCFTEEDRFSLEALQTIHKQMDDDKDGGIEVEESDEFIREDMKYKDATNKHSHLHREDKHITIEDLWKRWKTSEVHNWTLEDTLQWLIEFVELPQYEKNFRDNNVKGTTLPRIAVHEPSFMISQLKISDRSHRQKLQLKALDVVLFGPLTRPPHNWMKDFILTVSIVIGVGGCWFAYTQNKTSKEHVAKMMKDLESLQTAEQSLMDLQERLEKAQEENRNVAVEKQNLERKMMDEINYAKEEACRLRELREGAECELSRRQYAEQELEQVRMALKKAEKEFELRSSWSVPDALQKWLQLTHEVEVQYYNIKRQNAEMQLAIAKDEAEKIKKKRSTVFGTLHVAHSSSLDEVDHKILEAKKALSELTTCLRERLFRWQQIEKICGFQIAHNSGLPSLTSSLYSDHSWVVMPRVSIPPYPIAGGVDDLDEDTPPIVSQFPGTMAKPPGSLARSSSLCRSRRSIVPSSPQPQRAQLAPHAPHPSHPRHPHHPQHTPHSLPSPDPDILSVSSCPALYRNEEEEEAIYFSAEKQWEVPDTASECDSLNSSIGRKQSPPLSLEIYQTLSPRKISRDEVSLEDSSRGDSPVTVDVSWGSPDCVGLTETKSMIFSPASKVYNGILEKSCSMNQLSSGIPVPKPRHTSCSSAGNDSKPVQEAPSVARISSIPHDLCHNGEKSKKPSKIKSLFKKKSK

SEQ ID NO: 22519 - protein, 20 aa, Homo sapiens
LKMARASLWRAGGTLTLTAL

SEQ ID NO: 22520 - protein, 26 aa, Homo sapiens
LLLLTLWVQTVFMSYNTHREGLQLHS

SEQ ID NO: 22521 - protein, 88 aa, Homo sapiens
LFYLHLKKLLVLPTSKSSQMITFTFANGGVATMRTSGTEPKIKYYAELCAPPGNSDPEQLKKELNELVSAIEEHFFQPQKYNLQPKAD

SEQ ID NO: 22522 - protein, 140 aa, Homo sapiens
MSLKMRGFFFFFGFWKVFEMDIAKQLQAYEVEYHVLQEELIDSSPLSDNQRMDKLEKTNSSLRKQNLDLLEQLQVANGRIQSLEATIEKLLSSESKLKQAMLTLELERSALLQTVEELRRRSAEPSDREPECTQPEPTGD

SEQ ID NO: 22523 - protein, 569 aa, Homo sapiens
LPSDTKMSDDAGDTLATGDKAEVTEMPNSDSLPEDAEVHCDSAAVSHEPTPADPRGEGHENAAVQGAGAAAIGPPVQPQDANALEPPLNGDVTEDTLAECIDSVSLEAEPRSEIPLQEQNYLAVDSPPSGGGWAGWGSWGKSLLSSASATVGHGLTAVKEKAGATLRIHGVNSGSSEGAQPNTENGVPEITDAATDQGPAESPPTSPSSASRGMLSAITNVVQNTGKSVLTGGLDALEFIGKKTMNVLAESDPGFKRTKTLMERTVSLSQMLREAKEKEKQRLAQQLTMERTAHYGMLFDEYQGLSHLEALEILSNESESKVQSFLASLDGEKLELLKNDLISIKDIFAAKELENEENQEEQGLEEKGEEFARMLTELLFELHVAATPDKLNKAMKRAHDWVEEDQTVVSVDVAKVSEEETKKEEKEEKSQDPQEDKKEEKKTKTIEEVYMSSIESLAEVTARCIEQLHKVAELILHGQEEEKPAQDQAKVLIKLTTAMCNEVASLSKKFTNSLTTVGSNKKAEVLNPMISSVLLEGCNSTTYIQDAFQLLLPVLQVSHIQTSCLKAQP

SEQ ID NO: 22524 - protein, 1380 aa, Homo sapiens
LIGRCSRGLLGDGNAVACLVETGCACVLHSSRSGSSVEMKRIFSLLEKTWLGAPIQFAWQKTSGNYLAVTGADYIVKIFDRHGQKRSEINLPGNCVAMDWDKDGDVLAVIAEKSSCIYLWDANTNKTSQLDNGMRDQMSFLLWSKVGSFLAVGTVKGNLLIYNHQTSRKIPVLGKHTKRITCGCWNAENLLALGGEDKMITVSNQEGDTIRQTQVRSEPSNMQFFLMKMDDRTSAAESMISVVLGKKTLFFLNLNEPDNPADLEFQQDFGNIVCYNWYGDGRIMIGFSCGHFVVISTHTGELGQEIFQARNHKDNLTSIAVSQTLNKVATCGDNCIKIQDLVDLKDMYVILNLDEENKGLGTLSWTDDGQLLALSTQRGSLHVFLTKLPILGDACSTRIAYLTSLLEVTVANPVEGELPITVSVDVEPNFVAVGLYHLAVGMNNRAWFYVLGENAVKKLKDMEYLGTVASICLHSDYAAALFEGKVQLHLIESEILDAQEERETRLFPAVDDKCRILCHALTSDFLIYGTDTGVVQYFYIEDWQFVNDYRHPVSVKKIFPDPNGTRLVFIDEKSDGFVYCPVNDATYEIPDFSPTIKGVLWENWPMDKGVFIAYDDDKVYTYVFHKDTIQGAKVILAGSTKVPFAHKPLLLYNGELTCQTQSGKVNNIYLSTHGFLSNLKDTGPDELRPMLAQNLMLKRFSDAWEMCRILNDEAAWNELARACLHHMEVEFAIRVYRRIGNVGIVMSLEQIKGIEDYNLLAGHLAMFTNDYNLAQDLYLASSCPIAALEMRRDLQHWDSALQLAKHLAPDQIPFISKEYAIQLEFAGDYVNALAHYEKGITGDNKEHDEACLAGVAQMSIRMGDIRRGVNQALKHPSRVLKRDCGAILENMKQFSEAAQLYEKGLYYDKAASVYIRSKNWAKVGDLLPHVSSPKIHLQYAKAKEADGRYKEAVVAYENAKQWQSVIRIYLDHLNNPEKAVNIVRETQSLDGAKMVARFFLQLGDYGSAIQFLVMSKCNNEAFTLAQQHNKMEIYADIIGSEDTTNEDYQSIALYFEGEKRYLQAGKFFLLCGQYSRALKHFLKCPSSEDNVAIEMAIETVGQAKDELLTNQLIDHLLGENDGMPKDAKYLFRLYMALKQYREAAQTAIIIAREEQSAGNYRNAHDVLFSMYAELKSQKIKIPSEMATNLMILHSYILVKIHVKNGDHMKGARMLIRVANNISKFPSHIVPILTSTVIECHRAGLKNSAFSFAAMLMRPEYRSKIDAKYKKKIEGMVRRPDISEIEEATTPCPFCKFLLPECELLCPGCKNSIPYCIATGRHMLKDDWTVCPHCDFPALYSELKIMLNTESTCPMCSERLNAAQLKKISDCTQYLRTEEEL

SEQ ID NO: 22525 - protein, 22 aa, Homo sapiens
LRTADTVLLLLSPFLLQTLYPS

SEQ ID NO: 22526 - protein, 40 aa, Homo sapiens
MFLCSWGYWESETICSGKGCGAAPTLGTLSCLSPSSASAI

SEQ ID NO: 22527 - protein, 61 aa, Homo sapiens
MKPPPSQAKAFKYGLRPGTQSVTRGSLREGRAPRGSSDRAGRGWRSCGGAARRKVLSERSG

SEQ ID NO: 22528 - protein, 21 aa, Homo sapiens
MATFSVFVVCGVGVFMELPVS

SEQ ID NO: 22529 - protein, 1392 aa, Homo sapiens
MWNPMIPAFDLFQGNHGFVAPVVTTAAHWRSVNYTFPPSVISHTSPTKVWRNKDGTSAYQVQETPVSQVVRKKTSYVGLVLVLLRGLPGSGKSFLARTLQEDNPSGVILSTDDYFYINGQYQFDVKYLGEAHEWNQNRAKEAFEKKISPIIIDNTNLQAWEMKPYVALSQKHKYKVLFREPDTWWKFKPKELARRNIHGVSKEKITRMLEHYQRFVSVPIIMSSSVPEKIERIELCAYSCEDRSTSPRDDEDIISEKEENILSLSLKHLEFTEEKNLDVTKETMLPENVAYLSNADLNKRRKEISDMNPSIQSALILETPHMYFSDSESKLQATDKSENEQIEMVAVKGYSKTDTDSSMERVSPSTCCSENNQEDCDLANSGPLQNEKSSPGEIVEERATVTKKAFGKQKSKSTLEKFPRHELSNFVGDWPVDKTIGQRTKRNRKTEKTSSVQSDKKYNYPQSHKLVNSVSVNTDCVQQRGSPHESVEDGRKSQCDDASEPLNSYKYDAYKNIDKNSFNIMGDWPSSDSLAQREHRSRMPKTGLSEPNLEIGTNDKMNEISLSTAHEACWGTSSQKLKTLGSSNLGSSEMLLSEMTCESQTCLSKKSHGQHTSLPLTFTNSAPTVSGVVEPQTLAECQEQMPKRDPGKEVGMCTQTEPQDFALLWKIEKNKISISDSIKVLTGRLDGFKPKVFNINTKSDVQEAIPYRVMYDKSTFVEESELTSADESENLNILCKLFGSFSLEALKDLYERCNKDIIWATSLLLDSETKLCEDTEFENFQKSCDGSQIGPFSLGLNLKEIISQRGTLENSNSPVPEFSHGIGISNADSQSTCDAERGNSEQAEMRAVTPENHESMTSIFPSAAVGLKNNNDILPNSQEELLYSSKQSFPGILKATTPKDMSETEKNLVVTETGDNIHSPSHFSDIFNFVSSTSNLELNEEIYFTDSLEIKRNENFPKDYVKFSDEEEFMNEDEKEMKEILMAGSSLSAGVSGEDKTEILNPTPAMAKSLTIDCLELALPPELAFQLNELFGPVGIDSGSLTVEDCVVHIDLNLAKVIHEKWKESVMERQRQEEVSCGKFMQDPSLVGHTGLDNPEQKSSQRTGKKLLKTLTASEMLPLLDHWNTQTKKVSLREIMSEEIALQEKHNLKRETLMFEKDCATKLKEKQLFKIFPAINQNFLVDIFKDHNYSLEHTVQFLNCVLEGDPVKTVVAQEFVHQNENVTSHTGQKSKEKKDFEYPDYDDYRAEAFLHQQKRMECYSKAKEAYRIGKKNVATFYAQQGTLHEQKMKEANHLAAIEIFEKVNASLLPQNVLDLHGLHVDEALEHLMRVLEKKTEEFKQNGGKPYLSVITGRGNHSQGGVARIKPAVIKYLISHSFRFSEIKPGCLKVMLK

SEQ ID NO: 22530 - protein, 17 aa, Homo sapiens
LLISFVTFGLLLLPHTH

SEQ ID NO: 22531 - protein, 405 aa, Homo sapiens
LGGSASCFSSSLGYFCRALREDAAQADGDQPRDAEQSEWRLAPSLAPSPASAEAGAPTGSGCWQGPSRPLRAPETAGLGRGLGAFPGPLHLAGDSTKPVTGRRRGLRPVASERQAELPRAWRGQHRLGCTGFAGATCGPRFVLCHCAGPGGGGRAGLGLLPGSGAGAEGARLLAPPPGRCPRPACPRAPGRLVSSPQVLSRLGVAGQWRFVDVLGLEEESLGSVPAPACALLLLFPLTAQHENFRKKQIEELKGQEVSPKVYFMKQTIGNSCGTIGLIHAVANNQDKLGFEDGSVLKQFLSETEKMSPEDRAKCFEKNEAIQAAHDAVAQEGQCRVDDKVNFHFILFNNVDGHLYELDGRMPFPVNHGASSEDTLLKDAAKVCREFTEREQGEVRFSAVALCKAA

SEQ ID NO: 22532 - protein, 291 aa, Homo sapiens
LRKWLVPLSVWKLFSPCSPSRPPSPPSPRRRSGLRLLNAIKPGLVKKINRLPTPIAGLDNIILFLRGCKELGLKESQLFDPSDLQDTSNRVTVKSLDYSRKLKNVLVTIYWLGKAANSCTSYSGTTLNLKEFEGLLAQMRKDTDDIESPKRSIRDSGYIDCWDSERSDSLSPPRHGRDDSFDSLDSFGSRSRQTPSPDVVLRGSSDGRGSDSESDLPHRKLPDVKKDDMSARRTSHGEPKSAVPFNQYLPNKSNQTAYVPAPLRKKKAEREEYRKSWSTATSPLGGERPFR

SEQ ID NO: 22533 - protein, 16 aa, Homo sapiens
MESSSARQYYLILERL

SEQ ID NO: 22534 - protein, 28 aa, Homo sapiens
MPLPSPRVGWLEFIAEHEDVWGTILSYS

SEQ ID NO: 22535 - protein, 34 aa, Homo sapiens
MWQHVPELFGKTCQMECLSQNSNVNVSKQQYVSL

SEQ ID NO: 22536 - protein, 251 aa, Homo sapiens
LRPAPGRPGSPVAMRALLALCLLLGWLRWGPAGAQQSGEYCHGWVDVQGNYHEGFQCPEDFDTLDATICCGSCALRYCCAAADARLEQGGCTNDRRELEHPGITAQPVYVPFLIVGSIFIAFIILGSVVAIYCCTCLRPKEPSQQPIRFSLRSYQTETLPMILTSTSPRAPSRQSSTATSSSSTGGSIRRFSFARAEPGCLVPSPPPPYTTSHSIHLAQPSGFLVSPQYFAYPLQQEPPLPGKSCPDFSSS

SEQ ID NO: 22537 - protein, 111 aa, Homo sapiens [sequence omitted]

SEQ ID NO: 22538 - protein, 551 aa, Homo sapiens
LPPPHRRSSSLARLSSDGARAPPTPPLPRTLSGAAPVGGTRRPVRGRRAPGARGGLGRGLRERESAALSGHWAGGGGTMALKDTGSGGSTILPISEMVSSSSSPGASAAAAPGPCAPSPFPEVVELNVGGQVYVTKHSTLLSVPDSTLASMFSPSSPRGGARRRGELPRDSRARFFIDRDGFLFRYVLDYLRDKQLALPEHFPEKERLLREAEYFQLTDLVKLLSPKVTKQNSLNDEGCQSDLEDNVSQGSSDALLLRGAAAAVPSGPGAHGGGGGGGAQDKRSGFLTLGYRGSYTTVRDNQADAKFRRVARIMVCGRIALAKEVFGDTLNESRDPDRQPEKYTSRFYLKFTYLEQAFDRLSEAGFHMVACNSSGTAAFVNQYRDDKIWSSYTEYIFFRPPQKIVSPKQEHEDRKHDKVTDKGSESGTSCNELSTSSCDSHSEASTPQDNPSSAQQATAHQPNTLTLDRPSKKAPVQWIPPPDKRRNSELFQTLISKSRETNLSKKKVCEKLSVEEEMKKCIQDFKKIHIPDYFPERKRQWQSELLQKYGL

SEQ ID NO: 22539 - protein, 94 aa, Homo sapiens
VGFALHWSAGVALGWLGVACSRCSSIEEPLGLPVMILITGAHKAFALYKAIEEGVNHMWTVSAFQQHPRTIFVCDEDATLELRVKTVKYFKGEH

SEQ ID NO: 22540 - protein, 502 aa, Homo sapiens
LLQSRSLSLSLSLSLSLSLSLSLSLPSFLSRQDQGKRKKTPNSACRFRAAVMKTKLNIYNMQFLLFVFLVWDPARLVLANIQEDEAKNNITIFTRILDRLLDGYDNRLRPGLGDSITEVFTNIYVTSFGPVSDTDMEYTIDVFFRQKWKDERLKFKGPMNILRLNNLMASKIWTPDTFFHNGKKSVAHNMTMPNKLLRIQDDGTLLYTMRLTVQAECPMHLEDFPMDAHSCPLKFGSYAYTTSEVTYIWTYNASDSVQVAPDGSRLNQYDLLGQSIGKETIKSSTGEYTVMTAHFHLKRKIGYFVIQTYLPCIMTVILSQVSFWLNRESVPARTVFGVTTVLTMTTLSISARNSLPKVAYATAMDWFIAVCYAFVFSALIEFATVNYFTKRGWAWDGKSVVNDKKKEKASVMIQNNAYAVAVANYAPNLSKDPVLSTISKSATTPEPNKKPENKPAEAKKTFNSVSKIDRMSRIVFPVLFGTFNLVYWATYLNREPVLGVSP

SEQ ID NO: 22541 - protein, 562 aa, Homo sapiens
LLQSRSLSLSLSLSLSLSLSLSLSLPSFLSRQDQGKRKKTPNSACRFRAAVMKTKLNIYNMQFLLFVFLVWDPARLVLANIQEDEAKNNITIFTRILDRLLDGYDNRLRPGLGDSITEVFTNIYVTSFGPVSDTDMEYTIDVFFRQKWKDERLKFKGPMNILRLNNLMASKIWTPDTFFHNGKKSVAHNMTMPNKLLRIQDDGTLLYTMRLTVQAECPMHLEDFPMDAHSCPLKFGSYAYTTSEVTYIWTYNASDSVQVAPDGSRLNQYDLLGQSIGKETIKSSTGEYTVMTAHFHLKRKIGYFVIQTYLPCIMTVILSQVSFWLNRESVPARTVFGVTTVLTMTTLSISARNSLPKVAYATAMDWFIAVCYAFVFSALIEFATVNYFTKRGWAWDGKSVVNDKSPSIKAEGITLTYNSVKAILQGAKLIWSKYIAFSWPSLFQEKTLEYLEKWMDCLTFKQSSKKEKASVMIQNNAYAVAVANYAPNLSKDPVLSTISKSATTPEPNKKPENKPAEAKKTFNSVSKIDRMSRIVFPVLFGTFNLVYWATYLNREPVLGVSP

SEQ ID NO: 22542 - protein, 160 aa, Homo sapiens
VMKTKLNIYNMQFLLFVFLVWDPARLVLANIQEDEAKNNITIFTRILDRLLDGYDNRLRPGLGDSITEVFTNIYVTSFGPVSDTDMEYTIDVFFRQKWKDERLKFKGPMNILRLNNLMASKIWTPDTFFHNGKKSVAHNMTMPNKLLRIQDDGTLLYTMR

SEQ ID NO: 22543 - protein, 67 aa, Homo sapiens
VMKTKLNIYNMQFLLFVFLVWDPARLVLANIQEDEAKNNITIFTRILDRLLDGYDNRLRPGLGGIYN

SEQ ID NO: 22544 - protein, 74 aa, Homo sapiens
VMKTKLNIYNMQFLLFVFLVWDPARLVLANIQEDEAKNNITIFTRILDRLLDGYDNRLRPGLGVSRVESPVCVT

SEQ ID NO: 22545 - protein, 175 aa, Homo sapiens
LGLLSFPVMITMVCCAHSTNEPSNMSYVKETVDRLLKGYDIRLRPDFGGPPVDVGMRIDVASIDMVSEVNMVSGLPRGPAVRLTQMGNGQVPLPSAFHWRSPRPWPLRSHSAPAPRSGTHTRSPLVCNFDTHGLLRCSRGNVLGTILGRTSDCCAVDLLGRSLSVTLAGFPCVFG

SEQ ID NO: 22546 - protein, 80 aa, Homo sapiens
LGLLSFPVMITMVCCAHSTNEPSNMSYVKETVDRLLKGYDIRLRPDFGGPPVDVGMRIDVASIDMVSEVNMHVLKKKLGK

SEQ ID NO: 22547 - protein, 78 aa, Homo sapiens
LGLLSFPVMITMVCCAHSTNEPSNMSYVKETVDRLLKGYDIRLRPDFGGLYTHHVFPAVLERQKAFLFWNPTEPHPRQ

SEQ ID NO: 22548 - protein, 599 aa, Homo sapiens
LSLRERAGGGGGGGGGAGMEDVNSNVNADQEVRKLQELVKKLEKQNEQLRSRSGAVQGAGSLGPGSPVRAGASIPSSGAASPRGFPLGLSAKSGGGPGSGPRRTSSEELRDATSLLAAGEGGLLDEVEPLRPDELERLSGWEEEEESWLYSSPKKKLTPMQKSVSPLVWCRQVLDYPSPDVECAKKSLIHKLDQTMSALKRQNLYNNPFNSMSYTSPYSPNASSPYSSGFNSPSSTPVRPPIVKQLILPGNSGNLKSSDRNPPLSPQSSIDSELSASELDEDSIGSNYKLNDVTDVQILARMQEESLRQEYAATTSRRSSGSSCNSTRRGTFSDQELDAQSLDDEDDNMHHAVYPAVNRFSPSPRNSPRPSPKQSPRNSPRSRSPARGIEYSRVSPQPMISRLQQPRLSLQGHPTDLQTSNVKNEEKLRRSLPNLSRTSNTQVDSVKSSRSDSNFQVPNGGIPRMQPQASAIPSPGKFRSPAAPSPLALRQPVKAFSNHGSGSPGSQEITQLTQTTSSPGPPMVQSTVSANPPSNINSATLTRPAGTTAMRSGLPRPSAPSAGGIPVPRSKLAQPVRRSLPAPKTYGSMKDDSWKDGCY

SEQ ID NO: 22549 - protein, 21 aa, Homo sapiens
MDPFQTWCLFYKLCASTTISK

SEQ ID NO: 22550 - protein, 253 aa, Homo sapiens
LLLSSGGKMNGRADFREPNAEVPRPIPHIGPDYIPTEEERRVFAECNDESFWFRSVPLAATSMLITQGLISKGILSSHPKYGSIPKLILACIMGYFAGKLSYVKTCQEKFKKLENSPLGEALRSGQARRSSPPGHYYQKSKYDSSVSGQSSFVTSPAADNIEMLPHYEPIPFSSSMNESAPTGITDHIVQGPDPNLEESPKRKNITYEELRNKNRESYEVSLTQKTDPSVRPMHERVPKKEVKVNKYGDTWDE

SEQ ID NO: 22551 - protein, 123 aa, Homo sapiens
LGLQVVMLVLAWKLDAQNMGYFTLQEWLKGMTSLQCDTTEKLRNTLDYLRSFLNDSTNFKLIYRYAFDFARQSKYKVINKDQWCNVLEFSRTINLDLSNYDEDGAWPVLLDEFVEWYKDKQMS

SEQ ID NO: 22552 - protein, 65 aa, Homo sapiens
LAWRRSSASLSLGVALADTPLLCSGFRAGHACGDRNPTPADLGLQEFVVYVCGGAAASVLSAGRQ

SEQ ID NO: 22553 - protein, 22 aa, Homo sapiens
LLLLLMVMAAAVAATVQTPSPL

SEQ ID NO: 22554 - protein, 684 aa, Homo sapiens
MGTSHPAFLVLGCLLTDPDVAFVPLGMTDYLVIVEDDDSAIIPCRTTDPETPVTLHNSEGVVPASYDSRQGFNGTFTVGPYICEATVKGKKFQTIPFNVYALKATSELDLEMEALKTVYKSGETIVVTCAVFNNEVVDLQWTYPGEVKGKGITMLEEIKVPSIKLVYTLTVPEATVKDSGDYECAARQATREVKEMKKVTISVHEKGFIEIKPTFSQLEAVNLHEVKHFVVEVRAYPPPRISWLKNNLTLIENLTEITTDVEKIQEIRYRSKLKLIRAKEEDSGHYTIVAQNEDAVKSYTFELLTQVPSSILDLVDDHHGSTGGQTVRCTAEGTPLPDIEWMICKDIKKCNNETSWTILANNVSNIITEIHSRDRSTVEGRVTFAKVEETIAVRCLAKNLLGAENRELKLVAPTLRSELTVAAAVLVLLVIVIISLIVLVVIWKQKPRYEIRWRVIESISPDGHEYIYVDPMQLPYDSRWEFPRDGLVLGRVLGSGAFGKVVEGTAYGLSRSQPVMKVAVKMLKPTARSSEKQALMSELKIMTHLGPHLNIVNLLGACTKSGPIYIITEYCFYGDLVNYLHKNRDSFLSHHPEKPKKELDIFGLNPADESTRSYVILSFENNGDYMDMKQADTTQYVPMLERKEVSKYSDIQRSLYDRPASYKKKSMLGKSVYTHSGCWDFPVV

SEQ ID NO: 22555 - protein, 81 aa, Homo sapiens
LAILWIFRPLYLFFFIATSELDLEMEALKTVYKSGETIVVTCAVFNNEVVDLQWTYPGEVVGTLKTCNGLEQSNRAQKTCI

SEQ ID NO: 22556 - protein, 1445 aa, Homo sapiens
VVAAFPLPAPGITCAPQKVRLAAWISSPTGTRRRPCSRGRRPGSLALCAQLSCAAGCREFHLRASFSRQALGERTGSRVLGISPGSRCRMQSKVLLAVALWLCVETRAASVGLPSVSLDLPRLSIQKDILTIKANTTLQITCRGQRDLDWLWPNNQSGSEQRVEVTECSDGLFCKTLTIPKVIGNDTGAYKCFYRETDLASVIYVYVQDYRSPFIASVSDQHGVVYITENKNKTVVIPCLGSISNLNVSLCARYPEKRFVPDGNRISWDSKKGFTIPSYMISYAGMVFCEAKINDESYQSIMYIVVVVGYRIYDVVLSPSHGIELSVGEKLVLNCTARTELNVGIDFNWEYPSSKHQHKKLVNRDLKTQSGSEMKKFLSTLTIDGVTRSDQGLYTCAASSGLMTKKNSTFVRVHEKPFVAFGSGMESLVEATVGERVRIPAKYLGYPPPEIKWYKNGIPLESNHTIKAGHVLTIMEVSERDTGNYTVILTNPISKEKQSHVVSLVVYVPPQIGEKSLISPVDSYQYGTTQTLTCTVYAIPPPHHIHWYWQLEEECANEPSQAVSVTNPYPCEEWRSVEDFQGGNKIEVNKNQFALIEGKNKTVSTLVIQAANVSALYKCEAVNKVGRGERVISFHVTRGPEITLQPDMQPTEQESVSLWCTADRSTFENLTWYKLGPQPLPIHVGELPTPVCKNLDTLWKLNATMFSNSTNDILIMELKNASLQDQGDYVCLAQDRKTKKRHCVVRQLTVLERVAPTITGNLENQTTSIGESIEVSCTASGNPPPQIMWFKDNETLVEDSGIVLKDGNRNLTIRRVRKEDEGLYTCQACSVLGCAKVEAFFIIEGAQEKTNLEIIILVGTAVIAMFFWLLLVIILRTVKRANGGELKTGYLSIVMDPDELPLDEHCERLPYDASKWEFPRDRLKLGKPLGRGAFGQVIEADAFGIDKTATCRTVAVKMLKEGATHSEHRALMSELKILIHIGHHLNVVNLLGACTKPGGPLMVIVEFCKFGNLSTYLRSKRNEFVPYKTKGARFRQGKDYVGAIPVDLKRRLDSITSSQSSASSGFVEEKSLSDVEEEEAPEDLYKDFLTLEHLICYSFQVAKGMEFLASRKCIHRDLAARNILLSEKNVVKICDFGLARDIYKDPDYVRKGDARLPLKWMAPETIFDRVYTIQSDVWSFGVLLWEIFSLGASPYPGVKIDEEFCRRLKEGTRMRAPDYTTPEMYQTMLDCWHGEPSQRPTFSELVEHLGNLLQANAQQDGKDYIVLPISETLSMEEDSGLSLPTSPVSCMEEEEVCDPKFHYDNTAGISQYLQNSKRKSRPVSVKTFEDIPLEEPEVKVIPDDNQTDSGMVLASEELKTLEDRTKLSPSFGGMVPSKSRESVASEGSNQTSGYQSGYHSDDTDTTVYSSEEAELLKLIEIGVQTGSTAQILQPDSGTTLSSPPV

SEQ ID NO: 22557 - protein, 678 aa, Homo sapiens
MQSKVLLAVALWLCVETRAASVGLPSVSLDLPRLSIQKDILTIKANTTLQITCRGQRDLDWLWPNNQSGSEQRVEVTECSDGLFCKTLTIPKVIGNDTGAYKCFYRETDLASVIYVYVQDYRSPFIASVSDQHGVVYITENKNKTVVIPCLGSISNLNVSLCARYPEKRFVPDGNRISWDSKKGFTIPSYMISYAGMVFCEAKINDESYQSIMYIVVVVGYRIYDVVLSPSHGIELSVGEKLVLNCTARTELNVGIDFNWEYPSSKHQHKKLVNRDLKTQSGSEMKKFLSTLTIDGVTRSDQGLYTCAASSGLMTKKNSTFVRVHEKPFVAFGSGMESLVEATVGERVRIPAKYLGYPPPEIKWYKNGIPLESNHTIKAGHVLTIMEVSERDTGNYTVILTNPISKEKQSHVVSLVVYVPPQIGEKSLISPVDSYQYGTTQTLTCTVYAIPPPHHIHWYWQLEEECANEPSQAVSVTNPYPCEEWRSVEDFQGGNKIEVNKNQFALIEGKNKTVSTLVIQAANVSALYKCEAVNKVGRGERVISFHVTRGPEITLQPDMQPTEQESVSLWCTADRSTFENLTWYKLGPQPLPIHVGELPTPVCKNLDTLWKLNATMFSNSTNDILIMELKNASLQDQGDYVCLAQDRKTKKRHCVVRQLTVLGRETILDHCAEAVGMP

SEQ ID NO: 22558 - protein, 73 aa, Homo sapiens
LHFISPIFVQALTLTFLAEWGDRSQLTTIVLAAREDPYGVAVGGTVGHCLCTGLAVIGGRMIAQKISVRTGKS

SEQ ID NO: 22559 - protein, 18 aa, Homo sapiens
MVPRSGIALRLLGAAASL

SEQ ID NO: 22560 - protein, 451 aa, Homo sapiens
MLPPGRQDLSSASLPGAVAALSPLRIMATAEVLNIGKKLYEGKTKEVYELLDSPGKVLLQSKDQITAGNAARKNHLEGKAAISNKITSCIFQLLQEAGIKTAFTRKCGETAFIAPQCEMIPIEWVCRRIATGSFLKRNPGVKEGYKFYPPKVELFFKDDANNDPQWSEEQLIAAKFCFAGLLIGQTEVDIMSHATQAIFEILEKSWLPQNCTLVDMKIEFGVDVTTKEIVLADVIDNDSWRLWPSGDRSQQKDKQSYRDLKEVTPEGLQMVKKNFEWVAERVELLLKSESQCRVVVLMGSTSDLGHCEKIKKACGNFGIPCELRVTSAHKGPDETLRIKAEYEGDGIPTVFVAVAGRSNGLGPVMSGNTAYPVISCPPLTPDWGVQDVWSSLRLPSGLGCSTVLSPEGSAQFAAQIFGLSNHLVWSKLRASILNTWISLKQADKKIRECNL

SEQ ID NO: 22561 - protein, 188 aa, Homo sapiens [sequence omitted]

SEQ ID NO: 22562 - protein, 709 aa, Homo sapiens
LVAPPLWSYFLMLPARLPFRLLSLFLRGSAPTAARHGLREPLLERRCAAASSFQHSSSLGRELPYDPVDTEGFGEGGDMQERFLFPEYILDPEPQPTREKQLQELQQQQEEEERQRQQRREERRQQNLRARSREHPVVGHPDPALPPSGVNCSGCGAELHCQDAGVPGYLPREKFLRTAEADGGLARTVCQRCWLLSHHRRALRLQVSREQYLELVSAALRRPGPSLVLYMVDLLDLPDALLPDLPALVGPKQLIVLGNKVDLLPQDAPGYRQRLRERLWEDCARAGLLLAPGHQGPQRPVKDEPQDGENPNPPNWSRTVVRDVRLISAKTGYGVEELISALQRSWRYRGDVYLVGATNAGKSTLFNTLLESDYCTAKGSEAIDRATISPWPGTTLNLLKFPICNPTPYRMFKRHQRLKKDSTQAEEDLSEQEQNQLNVLKKHGYVVGRVGRTFLYSEEQKDNIPFEFDADSLAFDMENDPVMGTHKSTKQVELTAQDVKDAHWFYDTPGITKENCILNLLTEKEVNIVLPTQSIVPRTFVLKPGMVLFLGAIGRIDFLQGNQSAWFTVVASNILPVHITSLDRADALYQKHAGHTLLQIPMGGKERMAGFPPLVAEDIMLKEGLGASEAVADIKFSSAGWVSVTPNFKDRLHLRGYTPEGTVLTVRPPLLPYIVNIKGQRIKKSVAYKTKKPPSLMYNVRKKKGKINV

SEQ ID NO: 22563 - protein, 161 aa, Homo sapiens
LHVFADWEEGRRRGRIVSGAAFWGCLPVGIFSTPRVKSPSIVTPPKDIWNVTGAQVYLSCEVIGIPTPVLIWNKVKRGHYGVQRTELLPGDRDNLAIQTRGGPEKHEVTGWVLVSPLSKEDAGEYECHASNSQGQASASAKITVVDALHEIPVKKGEGAEL

SEQ ID NO: 22564 - protein, 290 aa, Homo sapiens
LPLPPHPAMERPSLRALLLGAAGLLLLLLPLSSSSSSDTCGPCEPASCPPLPPLGCLLGETRDACGCCPMCARGEGEPCGGGGAGRGYCAPGMECVKSRKRRKGKAGAAAGGPGVSGVCVCKSRYPVCGSDGTTYPSGCQLRAASQRAESRGEKAITQVSKGTCEQGPSIVTPPKDIWNVTGAQVYLSCEVIGIPTPVLIWNKVKRGHYGVQRTELLPGDRDNLAIQTRGGPEKHEVTGWVLVSPLSKEDAGEYECHASNSQGQASASAKITVVDALHEIPVKKGEGAEL

SEQ ID NO: 22565 - protein, 287 aa, Homo sapiens
LPLPPHPAMERPSLRALLLGAAGLLLLLLPLSSSSSSDTCGPCEPASCPPLPPLGCLLGETRDACGCCPMCARGEGEPCGGGGAGRGYCAPGMECVKSRKRRKGKAGAAAGGPGVSGVCVCKSRYPVCGSDGTTYPSGCQLRAASQRAESRGEKAITQVSKGTCEQGPSIVTPPKDIWNVTGAQVYLSCEVIGIPTPVLIWNKVKRGHYGVQRTELLPGDRDNLAIQTRGGPEKHEVTGWVLVSPLSKEDAGEYECHASNSQGQASASAKITVVDALHEIPVKKGTQ

SEQ ID NO: 22566 - protein, 67 aa, Homo sapiens
LRLKVIAWPRPGIPAIRFLLGFLELWSVWASTSDSCAGSAGPEHGCVRSGSSQKWLQKKILSTFQGT

SEQ ID NO: 22567 - protein, 535 aa, Homo sapiens
LHKTRMSLKWMSVFLLMQLSCYFSSGSCGKVLVWPTEYSHWINMKTILEELVQRGHEVIVLTSSASILVNASKSSAIKLEVYPTSLTKNDLEDFFMKMFDRWTYSISKNTFWSYFSQLQELCWEYSDYNIKLCEDAVLNKKLMRKLQESKFDVLLADAVNPCGELLAELLNIPFLYSLRFSVGYTVEKNGGGFLFPPSYVPVVMSELSDQMIFMERIKNMIYMLYFDFWFQAYDLKKWDQFYSEVLGRPTTLFETMGKAEMWLIRTYWDFEFPRPFLPNVDFVGGLHCKPAKPLPKEMEEFVQSSGENGIVVFSLGSMISNMSEESANMIASALAQIPQKVLWRFDGKKPNTLGSNTRLYKWLPQNDLLGHPKTKAFITHGGTNGIYEAIYHGIPMVGIPLFADQHDNIAHMKAKGAALSVDIRTMSSRDLLNALKSVINDPIYKENIMKLSRIHHDQPVKPLDRAVFWIEFVMRHKGAKHLRVAAHNLTWIQYHSLDVIAFLLACVATMIFMITKCCLFCFRKLAKTGKKKKRD

SEQ ID NO: 22568 - protein, 534 aa, Homo sapiens
LHCTRMSVKWTSVILLIQLSFCFSSGNCGKVLVWAAEYSHWMNIKTILDELIQRGHEVTVLASSASILFDPNNSSALKIEIYPTSLTKTELENFIMQQIKRWSDLPKDTFWLYFSQVQEIMSIFGDITRKFCKDVVSNKKFMKKVQESRFDVIFADAIFPCSELLAELFNIPFVYSLSFSPGYTFEKHSGGFIFPPSYVPVVMSELTDQMTFMERVKNMIYVLYFDFWFEIFDMKKWDQFYSEVLGRPTTLSETMGKADVWLIRNSWNFQFPYPLLPNVDFVGGLHCKPAKPLPKEMEDFVQSSGENGVVVFSLGSMVSNMTEERANVIASALAQIPQKVLWRFDGNKPDTLGLNTRLYKWIPQNDLLGHPKTRAFITHGGANGIYEAIYHGIPMVGIPLFADQPDNIAHMKARGAAVRVDFNTMSSTDLLNALKRVINDPSYKENVMKLSRIQHDQPVKPLDRAVFWIEFVMRHKGAKHLRVAAHDLTWFQYHSLDVIGFLLVCVATVIFIVTKCCLFCFWKFARKAKKGKND

SEQ ID NO: 22569 - protein, 170 aa, Homo sapiens
LLQFFRRSEVKMKNHLLFWGVLAVFIKAVHVKAQEDERIVLVDNKCKCARITSRIIRSSEDPNEDIVERNIRIIVPLNNRENISDPTSPLRTRFVYHLSDLCKKCDPTEVELDNQIVTATQSNICDEDSATETCYTYDRNKCYTAVVPLVYGGETKMVETALTPDACYPD

SEQ ID NO: 22570 - protein, 11 aa, Homo sapiens
MLGAGRKRKFQ

SEQ ID NO: 22571 - protein, 47 aa, Homo sapiens
MIYLLYVYRIFLPLSTISSWRVLYGCVDICICYAVPKKRHKSLLTQW

SEQ ID NO: 22572 - protein, 1164 aa, Homo sapiens
LAPRSLRARRRQLPAARPRRVPGSRLQGFRGPPASNPGGAPGSASVAAAAAVAAKAAAAAAVAVAAAAPHSAAKLEERRKPDPRRMEDEAVLDRGASFLKHVCDEEEVEGHHTIYIGVHVPKSYRRRRRHKRKTGHKEKKEKERISENYSDKSDIENADESSSSILKPLISPAAERIRFILGEEDDSPAPPQLFTELDELLAVDGQEMEWKETARWIKFEEKVEQGGERWSKPHVATLSLHSLFELRTCMEKGSIMLDREASSLPQLVEMIVDHQIETGLLKPELKDKVTYTLLRKHRHQTKKSNLRSLADIGKTVSSASRMFTNPDNGSPAMTHRNLTSSSLNDISDKPEKDQLKNKFMKKLPRDAEASNVLVGEVDFLDTPFIAFVRLQQAVMLGALTEVPVPTRFLFILLGPKGKAKSYHEIGRAIATLMSDEVFHDIAYKAKDRHDLIAGIDEFLDEVIVLPPGEWDPAIRIEPPKSLPSSDKRKNMYSGGENVQMNGDTPHDGGHGGGGHGDCEELQRTGRFCGGLIKDIKRKAPFFASDFYDALNIQALSAILFIYLATVTNAITFGGLLGDATDNMQGVLESFLGTAVSGAIFCLFAGQPLTILSSTGPVLVFERLLFNFSKDNNFDYLEFRLWIGLWSAFLCLILVATDASFLVQYFTRFTEEGFSSLISFIFIYDAFKKMIKLADYYPINSNFKVGYNTLFSCTCVPPDPANISISNDTTLAPEYLPTMSSTDMYHNTTFDWAFLSKKECSKYGGNLVGNNCNFVPDITLMSFILFLGTYTSSMALKKFKTSPYFPTTARKLISDFAIILSILIFCVIDALVGVDTPKLIVPSEFKPTSPNRGWFVPPFGENPWWVCLAAAIPALLVTILIFMDQQITAVIVNRKEHKLKKGAGYHLDLFWVAILMVICSLMALPWYVAATVISIAHIDSLKMETETSAPGEQPKFLGVREQRVTGTLVFILTGLSVFMAPILKFIPMPVLYGVFLYMGVASLNGVQFMDRLKLLLMPLKHQPDFIYLRHVPLRRVHLFTFLQVLCLALLWILKSTVAAIIFPVMILALVAVRKGMDYLFSQHDLSFLDDVIPEKDKKKKEDEKKKKKKKGSLDSDNDDSDCPYSEKVPSIKIPMDIMEQQPFLSDSKPSDRERSPTFLERHTSC

SEQ ID NO: 22573 - protein, 1128 aa, Homo sapiens
VAAKAAAAAAVAVAAAAPHSAAKLEERRKPDPRRMEDEAVLDRGASFLKHVCDEEEVEGHHTIYIGVHVPKSYRRRRRHKRKTGHKEKKEKERISENYSDKSDIENADESSSSILKPLISPAAERIRFILGEEDDSPAPPQLFTELDELLAVDGQEMEWKETARWIKFEEKVEQGGERWSKPHVATLSLHSLFELRTCMEKGSIMLDREASSLPQLVEMIVDHQIETGLLKPELKDKVTYTLLRKHRHQTKKSNLRSLADIGKTVSSASRMFTNPDNGSPAMTHRNLTSSSLNDISDKPEKDQLKNKFMKKLPRDAEASNVLVGEVDFLDTPFIAFVRLQQAVMLGALTEVPVPTRFLFILLGPKGKAKSYHEIGRAIATLMSDEVFHDIAYKAKDRHDLIAGIDEFLDEVIVLPPGEWDPAIRIEPPKSLPSSDKRKNMYSGGENVQMNGDTPHDGGHGGGGHGDCEELQRTGRFCGGLIKDIKRKAPFFASDFYDALNIQALSAILFIYLATVTNAITFGGLLGDATDNMQGVLESFLGTAVSGAIFCLFAGQPLTILSSTGPVLVFERLLFNFSKDNNFDYLEFRLWIGLWSAFLCLILVATDASFLVQYFTRFTEEGFSSLISFIFIYDAFKKMIKLADYYPINSNFKVGYNTLFSCTCVPPDPANISISNDTTLAPEYLPTMSSTDMYHNTTFDWAFLSKKECSKYGGNLVGNNCNFVPDITLMSFILFLGTYTSSMALKKFKTSPYFPTTARKLISDFAIILSILIFCVIDALVGVDTPKLIVPSEFKPTSPNRGWFVPPFGENPWWVCLAAAIPALLVTILIFMDQQITAVIVNRKEHKLKKGAGYHLDLFWVAILMVICSLMALPWYVAATVISIAHIDSLKMETETSAPGEQPKFLGVREQRVTGTLVFILTGLSVFMAPILKFIPMPVLYGVFLYMGVASLNGVQFMDRLKLLLMPLKHQPDFIYLRHVPLRRVHLFTFLQVLCLALLWILKSTVAAIIFPVMILALVAVRKGMDYLFSQHDLSFLDDVIPEKDKKKKEDEKKKKKKKGSLDSDNDDEKDHQHSLNATHHADKIPFLQSLGMPSPPRTPVKVVPQIRIELEPEDNDYFWRSKGTETTL

SEQ ID NO: 22574 - protein, 1019 aa, Homo sapiens
VAVAAAAPHSAAKLEERRKPDPRRMEDEAVLDRGASFLKHVCDEEEVEGHHTIYIGVHVPKSYRRRRRHKRKTGHKEKKEKERISENYSDKSDIENADESSSSILKPLISPAAERIRFILGEEDDSPAPPQLFTELDELLAVDGQEMEWKETARWIKFEEKVEQGGERWSKPHVATLSLHSLFELRTCMEKGSIMLDREASSLPQLVEMIVDHQIETGLLKPELKDKVTYTLLRKHRHQTKKSNLRSLADIGKTVSSASRMFTNPDNGSPAMTHRNLTSSSLNDISDKPEKDQLKNKFMKKLPRDAEASNVLVGEVDFLDTPFIAFVRLQQAVMLGALTEVPVPTRFLFILLGPKGKAKSYHEIGRAIATLMSDEVFHDIAYKAKDRHDLIAGIDEFLDEVIVLPPGEWDPAIRIEPPKSLPSSDKRKNMYSGGENVQMNGDTPHDGGHGGGGHGDCEELQRTGRFCGGLIKDIKRKAPFFASDFYDALNIQALSAILFIYLATVTNAITFGGLLGDATDNMQGVLESFLGTAVSGAIFCLFAGQPLTILSSTGPVLVFERLLFNFSKDNNFDYLEFRLWIGLWSAFLCLILVATDASFLVQYFTRFTEEGFSSLISFIFIYDAFKKMIKLADYYPINSNFKVGYNTLFSCTCVPPDPANISISNDTTLAPEYLPTMSSTDMYHNTTFDWAFLSKKECSKYGGNLVGNNCNFVPDITLMSFILFLGTYTSSMALKKFKTSPYFPTTARKLISDFAIILSILIFCVIDALVGVDTPKLIVPSEFKPTSPNRGWFVPPFGENPWWVCLAAAIPALLVTILIFMDQQITAVIVNRKEHKLKFIPMPVLYGVFLYMGVASLNGVQFMDRLKLLLMPLKHQPDFIYLRHVPLRRVHLFTFLQVLCLALLWILKSTVAAIIFPVMILALVAVRKGMDYLFSQHDLSFLDDVIPEKDKKKKEDEKKKKKKKGSLDSDNDDSDCPYSEKVPSIKIPMDIMEQQPFLSDSKPSDRERSPTFLERHTSC

SEQ ID NO: 22575 - protein, 1206 aa, Homo sapiens
VMVLLSLWLIAAALVEVRTSADGQAGNEEMVQIDLPIKRYREYELVTPVSTNLEGRYLSHTLSASHKKRSARDVSSNPEQLFFNITAFGKDFHLRLKPNTQLVAPGAVVEWHETSLVPGNITDPINNHQPGSATYRIRRTEPLQTNCAYVGDIVDIPGTSVAISNCDGLAGMIKSDNEEYFIEPLERGKQMEEEKGRIHVVYKRSAVEQAPIDMSKDFHYRESDLEGLDDLGTVYGNIHQQLNETMRRRRHAGENDYNIEVLLGVDDSVVRFHGKEHVQNYLLTLMNIVNEIYHDESLGVHINVVLVRMIMLGYAKSISLIERGNPSRSLENVCRWASQQQRSDLNHSEHHDHAIFLTRQDFGPAGMQGYAPVTGMCHPVRSCTLNHEDGFSSAFVVAHETGHVLGMEHDGQGNRCGDETAMGSVMAPLVQAAFHRYHWSRCSGQELKRYIHSYDCLLDDPFDHDWPKLPELPGINYSMDEQCRFDFGVGYKMCTAFRTFDPCKQLWCSHPDNPYFCKTKKGPPLDGTECAAGKWCYKGHCMWKNANQQKQDGNWGSWTKFGSCSRTCGTGVRFRTRQCNNPMPINGGQDCPGVNFEYQLCNTEECQKHFEDFRAQQCQQRNSHFEYQNTKHHWLPYEHPDPKKRCHLYCQSKETGDVAYMKQLVHDGTHCSYKDPYSICVRGECVKVGCDKEIGSNKVEDKCGVCGGDNSHCRTVKGTFTRTPRKLGYLKMFDIPPGARHVLIQEDEASPHILAIKNQATGHYILNGKGEEAKSRTFIDLGVEWDYNIEDDIESLHTDGPLHDPVIVLIIPQENDTRSSLTYKYIIHEDSVPTINSNNVIQEELDTFEWALKSWSQCSKPCGGGFQYTKYGCRRKSDNKMVHRSFCEANKKPKPIRRMCNIQECTHPLWVAEEWEHCTKTCGSSGYQLRTVRCLQPLLDGTNRSVHSKYCMGDRPESRRPCNRVPCPAQWKTGPWSECSVTCGEGTEVRQVLCRAGDHCDGEKPESVRACQLPPCNDEPCLGDKSIFCQMEVLARYCSIPGYNKLCCESCSKRSSTLPPPYLLEAAETHDDVISNPSDLPRSLVMPTSLVPYHSETPAKKMSLSSISSVGGPNAYAAFRPNSKPDGANLRQRSAQQAGSKTVRLVTVPSSPPTKRVHLSSASQMAAASFFAASDSIGASSQARTSKKDGKIIDNRRPTRSSTLER

SEQ ID NO: 22576 - protein, 1001 aa, Homo sapiens
MVRFLLEAGADQEHKTDEMHTALMEACMDGHVEVARLLLDSGAQVNMPADSFESPLTLAACGGHVELAALLIERGASLEEVNDEGYTPLMEAAREGHEEMVALLLGQGANVHATTATGDTALTYACENGHTDVADVLLQAGADLEHESEGGRTPLMKAARAGHVCTVQFLISKGANVNRTTANNDHTVLSLACAGGHLAVVELLLAHGADPTHRLKDGSTMLIEAAKGGHTSVVCYLLDYPNNLLSAPPPDVTQLTPPSHDLNRAPRVPVQALPMVVPPQEPDKPPANVATTLPIRNKAASKQKSSSHLPANSQDVQGYITNQSPESIVEEAQGKLTELEQRIKEAIEKNAQLQSLELAHADQLTKEKIEELNKTREEQIQKKQKILEELQKVERELQLKTQQQLKKQYLEVKAQRIQLQQQQQQSCQHLGLLTPVGVGEQLSEGDYARLQQVDPVLLKDEPQQTAAQMGFAPIQPLAMPQALPLAAGPLPPGSIANLTELQGVIVGQPVLGQAQLAGLGQGILTETQQGLMVASPAQTLNDTLDDIMAAVSGRASAMSNTPTHSIAASISQPQTPTPSPIISPSAMLPIYPAIDIDAQTESNHDTALTLACAGGHEELVQTLLERGASIEHRDKKGFTPLILAATAGHVGVVEILLDNGADIEAQSERTKDTPLSLACSGGRQEVVELLLARGANKEHRNVSDYTPLSLAASGGYVNIIKILLNAGAEINSRTGSKLGISPLMLAAMNGHTAAVKLLLDMGSDINAQIETNRNTALTLACFQGRTEVVSLLLDRKANVEHRAKTGLTPLMEAASGGYAEVGRVLLDKGADVNAPPVPSSRDTALTIAADKGHYKFCELLIGRGAHIDVRNKKGNTPLWLAANGGHLDVVQLLVQAGADVDAADNRKITPLMAAFRKGHVKVVRYLVKEVNQFPSDSECMRYIATITDKEMLKKCHLCMESIVQAKDRQAAEANKNASILLEELDLEKADYNIIPIYSHGE

SEQ ID NO: 22577 - protein, 71 aa, Homo sapiens
LCVNMTSKLAVALLAAFLISAALCEGAVLPRSAKELRCQCIKTYSKPFHPKFIKELRVIESGPHCANTEIM

SEQ ID NO: 22578 - protein, 99 aa, Homo sapiens
LCVNMTSKLAVALLAAFLISAALCEGAVLPRSAKELRCQCIKTYSKPFHPKFIKELRVIESGPHCANTEIIVKLSDGRELCLDPKENWVQRVVEKFLKR

SEQ ID NO: 22579 - protein, 107 aa, Homo sapiens
LLSPMARAALSAAPSNPRLLRVALLLLLLVAAGRRAAGASVATELRCQCLQTLQGIHPKNIQSVNVKSPGPHCAQTEVIATLKNGRKACLNPASPIVKKIIEKMLNR

SEQ ID NO: 22580 - protein, 111 aa, Homo sapiens
LLSPMARAALSAAPSNPRLLRVALLLLLLVAAGRRAAGASVATELRCQCLQTLQGIHPKNIQSVNVKSPGPHCAQTEVIATLKNGRKACLNPASPIVKKIIEKMLNSDKSN

SEQ ID NO: 22581 - protein, 111 aa, Homo sapiens
LLSPMAHATLSAAPSNPRLLRVALLLLLLVAASRRAAGASVVTELRCQCLQTLQGIHLKNIQSVNVRSPGPHCAQTEVIATLKNGKKACLNPASPMVQKIIEKILNKGSTN

SEQ ID NO: 22582 - protein, 107 aa, Homo sapiens
LLSPMAHATLSAAPSNPRLLRVALLLLLLVAASRRAAGASVVTELRCQCLQTLQGIHLKNIQSVNVRSPGPHCAQTEVIATLKNGKKACLNPASPMVQKIIEKILNK

SEQ ID NO: 22583 - protein, 69 aa, Homo sapiens
LLSPMAHATLSAAPSNPRLLRVALLLLLLVAASRRAAGGSRRPGVPGPDAAGVGAPRRQPRSISESILP

SEQ ID NO: 22584 - protein, 75 aa, Homo sapiens
MARATLSAAPSNPRLLRVALLLLLLVAASRRAAGAPLATELRCQCLQTLQGIHLKNIQSVKVKSPGPHCAQTEVM

SEQ ID NO: 22585 - protein, 19 aa, Homo sapiens
MSFPLKFAVNLFSCLCMRI

SEQ ID NO: 22586 - protein, 43 aa, Homo sapiens
LLWYLRSLQIKMSWVKRHHMSLCPLLFSVRSLIAAHPIWVGRL

SEQ ID NO: 22587 - protein, 119 aa, Homo sapiens
LLSSKIAPLCDATVTIAHRYTPKEQLKIHTQLADIIIVAAGIPKLITSDMVKEGAAVIDVGINYVHDPVTGKTKLVGDVDFEAVKKKAGFITPVPGGVGPMTVAMLLKNTLLAAKKIIY

SEQ ID NO: 22588 - protein, 316 aa, Homo sapiens
VPAPQRSRDSPRRRARRPELPKPSRAAHTPGLHSLFQHPLVLAAARVPETELPQRPRRRRCEGPMRAPLLPPAPVVLSLLILGSGHYAAGLDLNDTYSGKREPFSGDHSADGFEVTSRSEMSSGSEISPVSEMPSSSEPSSGADYDYSEEYDNEPQIPGYIVDDSVRVEQVVKPPQNKTESENTSDKPKRKKKGGKNGKNRRNRKKKNPCNAEFQNFCIHGECKYIEHLEAVTCKCQQEYFGERCGEKSMKTHSMIDSSLSKIALAAIAAFMSAVILTAVAVITVQLRRQYVRKYEGEAEERKKLRQENGNVHAIA

SEQ ID NO: 22589 - protein, 179 aa, Homo sapiens
LMDRAARCSGASSLPLLLALALGLVILHCVVADGNSTRSPETNGLLCGDPEENCAATTTQSKRKGHFSRCPKQYKHYCIKGRCRFVVAEQTPSCVCDEGYIGARCERVDLFYLRGDRGQILVICLIAVMVVFIILVIGVCTCCHPLRKRRKRKKKEEEMETLGKDITPINEDIEETNIA

SEQ ID NO: 22590 - protein, 124 aa, Homo sapiens
MRTADREARPGLPSLLLLLLAGAGLSAASPPAAPRFNVSLDSVPELRWLPVLRHYDLDLVRAAMAQVIGDRVPKWVHVLIGKVVLELERFLPQPFTGEIRGMCDFMNLSLADCLLVNLAYESSV

SEQ ID NO: 22591 - protein, 11 aa, Homo sapiens
VLALSWLLHVG

SEQ ID NO: 22592 - protein, 14 aa, Homo sapiens
LKQLGYVCLLYFLF

SEQ ID NO: 22593 - protein, 368 aa, Homo sapiens
MKTGHFEIVTMLLATMILVDIFQVKAEVLDMADNAFDDEYLKCTDRMEIKYVPQLLKEEKASHQQLDTVWENAKAKWAARKTQIFLPMNFKDNHGIALMAYISEAQEQTPFYHLFSEAVKMAGQSREDYIYGFQFKAFHFYLTRALQLLRKPCEASSKTVVYRTSQGTSFTFGGLNQARFGHFTLAYSAKPQAANDQLTVLSIYTCLGVDIENFLDKESERITLIPLNEVFQVSQEGAGNNLILQSINKTCSHYECAFLGGLKTENCIENLEYFQPIYVYNPGEYVLIFKNNLGWAWWLTPVIPALWKAEVSGSLEPRSLRPAWATWRNPISTKNTKLSQAWWCAPVVPATWEAEAGGSLESGRQRLQ

SEQ ID NO: 22594 - protein, 46 aa, Homo sapiens [sequence omitted]

SEQ ID NO: 22595 - protein, 515 aa, Homo sapiens
LSLLLLVTSVTLLVARVFQKAVDQSIEKKIVLRNGTEAFDSWEKPPLPVYTQFYFFNVTNPEEILRGETPRVEEVGPYTYRELRNKANIQFGDNGTTISAVSNKAYVFERDQSVGDPKIDLIRTLNIPVLTGSCSVAQAGVQSVAPSQLTEASTSWAPGILLCRPGTPGVNHCSWAGPTVIEWSQVHFLREIIEAMLKAYQQKLFVTHTVDELLWGYKDEILSLIHVFRPDISPYFGLFYEKNGTNDGDYVFLTGEDSYLNFTKIVEWNGKTSLDWWITDKCNMINGTDGDSFHPLITKDEVLYVFPSDFCRSVYITFSDYESVQGLPAFRYKVPAEILANTSDNAGFCIPEGNCLGSGVLNVSICKNGAPIIMSFPHFYQADERFVSAIEGMHPNQEDHETFVDINPLTGIILKAAKRFQINIYVKKLDDFVETGDIRTMVFPVMYLNESVHIDKETASRLKSMINTTLIITNIPYIIMALGVFFGLVFTWLACKGQGSMDEGTADERAPLIRT

SEQ ID NO: 22596 - protein, 225 aa, Homo sapiens
MIIFTYFQKNGTNDGDYVFLTGEDSYLNFTKIVEWNGKTSLDWWITDKCNMINGTDGDSFHPLITKDEVLYVFPSDFCRSVYITFSDYESVQGLPAFRYKVPAEILANTSDNAGFCIPEGNCLGSGVLNVSICKNGKNSERGHDRGVKNAEGLEFNKEYVAGRSGAHLQSQLLRMLRWDDHLSPGVLKSILGNMARPLSLKNKTNKKEYIVSPIERSVSFKNNVS

SEQ ID NO: 22597 - protein, 273 aa, Homo sapiens
VHFLREIIEAMLKAYQQKLFVTHTVDELLWGYKDEILSLIHVFRPDISPYFGLFYEKNGTNDGDYVFLTGEDSYLNFTKIVEWNGKTSLDWWITDKCNMINGTDGDSFHPLITKDEVLYVFPSDFCRSVYITFSDYESVQGLPAFRYKVPAEILANTSDNAGFCIPEGNCLGSGVLNVSICKNGKNSERGHDRGVKNAEGLEFNKEYVAGRSGAHLQSQLLRMLRWDDHLSPGVLKSILGNMARPLSLKNKTNKKEYIVSPIERSVSFKNNVS

SEQ ID NO: 22598 - protein, 143 aa, Homo sapiens
LLLLVTSVTLLVARVFQKAVDQSIEKKIVLRNGTEAFDSWEKPPLPVYTQFYFFNVTNPEEILRGETPRVEEVGPYTYRELRNKANIQFGDNGTTISAVSNKAYVFERDQSVGDPKIDLIRTLNIPVLSGPRCTSSGRSSRPC

SEQ ID NO: 22599 - protein, 49 aa, Homo sapiens
LESSPGGSPGLQPRGGERGGAGKVEYWSLRAGLRRSARRRNRKRLERAG

SEQ ID NO: 22600 - protein, 113 aa, Homo sapiens
LTSVSLDLNVDPSLQVDIPDVLSERDKVKFTVHTKTTLPMFQSPEFSVTRQHEDFVWLHDTLIETTDYAGLIIPPAAMKPDFNGPREKMQKPGEGEGSMTKEEFAKMKQELEA

SEQ ID NO: 22601 - protein, 88 aa, Homo sapiens
LDTAGNKLVVDFSATWCGPCKMIKSFFHSLSEKYSNMVFLEVDVDDCQDVALEYEVKCMPTFQFFKKGQKVGEFSGANKEKLEATIMN

SEQ ID NO: 22602 - protein, 62 aa, Homo sapiens
LIWSEPEKKNKTLIICVANYNSALFKHIKTKKKKKKSKRSKLFLNLKNLFVVCQLHFFSAIM

SEQ ID NO: 22603 - protein, 93 aa, Homo sapiens
MKFISTSLLLMLLVSSLSPVQGVLEVYYTSLRCRCVQESSVFIPRRFIDRIQILPRGNGCPRKEIIVWKKNKSIVCVDPQAEWIQRMMEVLRK

SEQ ID NO: 22604 - protein, 43 aa, Homo sapiens
MGRGKARGCLAGEMALAPSLWLQQSARRILLWVLKMPRAVSGL

SEQ ID NO: 22605 - protein, 1987 aa, Homo sapiens
LGSSIVGAEAAMGVLKVWLGLALALAEFAVLPHHSEGACVYQDSLLADATIWKPDSCQSCRCHGDIVICKPAVCRNPQCAFEKGEVLQIAANQCCPECVLRTPGSCHHEKKIHEHGTEWASSPCSVCSCNHGEVRCTPQPCPPLSCGHQELAFIPEGSCCPVCVGLGKPCSYEGHVFQDGEDWRLSRCAKCLCRNGVAQCFTAQCQPLFCNQDETVVRVPGKCCPQCSARSCSAAGQVYEHGEQWSENACTTCICDRGEVRCHKQACLPLRCGKGQSRARRHGQCCEECVSPAGSCSYDGVVRYQDEMWKGSACEFCMCDHGQVTCQTGECAKVECARDEELIHLDGKCCPECISRNGYCVYEETGEFMSSNASEVKRIPEGEKWEDGPCKVCECRGAQVTCYEPSCPPCPVGTLALEVKGQCCPDCTSVHCHPDCLTCSQSPDHCDLCQDPTKLLQNGWCVHSCGLGFYQAGSLCLACQPQCSTCTSGLECSSCQPPLLMRHGQCVPTCGDGFYQDRHSCAVCHESCAGCWGPTEKHCLACRDPLHVLRDGGCESSCGKGFYNRQGTCSACDQSCDSCGPSSPRCLTCTEKTVLHDGKCMSECPGGYYADATGRCKVCHNSCASCSGPTPSHCTACSPPKALRQGHCLPRCGEGFYSDHGVCKACHSSCLACMGPAPSHCTGCKKPEEGLQVEQLSDVGIPSGECLAQCRAHFYLESTGICEACHQSCFRCAGKSPHNCTDCGPSHVLLDGQCLSQCPDGYFHQEGSCTECHPTCRQCHGPLESDCISCYPHISLTNGNCRTSCREEQFLNLVGYCADCHHLCQHCAADLHNTGSICLRCQNAHYLLLGDHCVPDCPSGYYAERGACKKCHSSCRTCQGRGPFSCSSCDTNLVLSHTGTCSTTCFPGHYLDDNHVCQPCNTHCGSCDSQASCTSCRDPNKVLLFGECQYESCAPQYYLDFSTNTCKECDWSCSACSGPLKTDCLQCMDGYVLQDGACVEQCLSSFYQDSGLCKNCDSYCLQCQGPHECTRCKGPFLLLEAQCVQECGKGYFADHAKHKCTACPQGCLQCSHRDRCHLCDHGFFLKSGLCVYNCVPGFSVHTSNETCSGKIHTPSLHVNGSLILPIGSIKPLDFSLLNVQDQEGRVEDLLFHVVSTPTNGQLVLSRNGKEVQLDKAGRFSWKDVNEKKVRFVHSKEKLRKGYLFLKISDQQFFSEPQLINIQAFSTQAPYVLRNEVLHISRGERATITTQMLDIRDDDNPQDVVIEIIDPPLHGQLLQTLQSPATPIYQFQLDELSRGLLHYAHDGSDSTSDVAVLQANDGHSFHNILFQVKTVPQNDRGLQLVANSMVWVPEGGMLQITNRILQAEAPGASAEEIIYKITQDYPQFGEVVLLVNMPADSPADEGQHLPDGRTATPTSTFTQQDINEGIVWYRHSGAPAQSDSFRFEVSSASNAQTRLESHMFNIAILPQTPEAPKVSLEASLHMTAREDGLTVIQPHSLSFINSEKPSGKIVYNITLPLHPNQGIIEHRDHPHSPIRYFTQEDINQGKVMYRPPPAAPHLQELMAFSFAGLPESVKFHFTVSDGEHTSPEMVLTIHLLPSDQQLPVFQVTAPRLAVSPGGSTSVGLQVVVRDAETAPKELFFELRRPPQHGVLLKHTAEFRRPMATGDTFTYEDVEKNALQYIHDGSSTREDSMEISVTDGLTVTMLEVRVEVSLSEDRGPRLAAGSSLSITVASKSTAIITRSHLAYVDDSSPDPEIWIQLNYLPSYGTLLRISGSEVEELSEVSNFTMEDINNKKIRYSAVFETDGHLVTDSFYFSVSDMDHNHLDNQIFTIMITPAENPPPVIAFADLITVDEGGRAPLSFHHFFATDDDDNLQRDAIIKLSALPKYGCIENTGTGDRFGPETASDLEASFPIQDVLENYIYYFQSVHESIEPTHDIFSFYVSDGTSRSEIHSINITIEVKTLEVGKVEPLTTIFHTIRELSL

SEQ ID NO: 22606 - protein, 4023 aa, Homo sapiens
LGSSIVGAEAAMGVLKVWLGLALALAEFAVLPHHSEGACVYQDSLLADATIWKPDSCQSCRCHGDIVICKPAVCRNPQCAFEKGEVLQIAANQCCPECVLRTPGSCHHEKKIHEHGTEWASSPCSVCSCNHGEVRCTPQPCPPLSCGHQELAFIPEGSCCPVCVGLGKPCSYEGHVFQDGEDWRLSRCAKCLCRNGVAQCFTAQCQPLFCNQDETVVRVPGKCCPQCSARSCSAAGQVYEHGEQWSENACTTCICDRGEVRCHKQACLPLRCGKGQSRARRHGQCCEECVSPAGSCSYDGVVRYQDEMWKGSACEFCMCDHGQVTCQTGECAKVECARDEELIHLDGKCCPECISRNGYCVYEETGEFMSSNASEVKRIPEGEKWEDGPCKVCECRGAQVTCYEPSCPPCPVGTLALEVKGQCCPDCTSVHCHPDCLTCSQSPDHCDLCQDPTKLLQNGWCVHSCGLGFYQAGSLCLACQPQCSTCTSGLECSSCQPPLLMRHGQCVPTCGDGFYQDRHSCAVCHESCAGCWGPTEKHCLACRDPLHVLRDGGCESSCGKGFYNRQGTCSACDQSCDSCGPSSPRCLTCTEKTVLHDGKCMSECPGGYYADATGRCKVCHNSCASCSGPTPSHCTACSPPKALRQGHCLPRCGEGFYSDHGVCKACHSSCLACMGPAPSHCTGCKKPEEGLQVEQLSDVGIPSGECLAQCRAHFYLESTGICEACHQSCFRCAGKSPHNCTDCGPSHVLLDGQCLSQCPDGYFHQEGSCTECHPTCRQCHGPLESDCISCYPHISLTNGNCRTSCREEQFLNLVGYCADCHHLCQHCAADLHNTGSICLRCQNAHYLLLGDHCVPDCPSGYYAERGACKKCHSSCRTCQGRGPFSCSSCDTNLVLSHTGTCSTTCFPGHYLDDNHVCQPCNTHCGSCDSQASCTSCRDPNKVLLFGECQYESCAPQYYLDFSTNTCKECDWSCSACSGPLKTDCLQCMDGYVLQDGACVEQCLSSFYQDSGLCKNCDSYCLQCQGPHECTRCKGPFLLLEAQCVQECGKGYFADHAKHKCTACPQGCLQCSHRDRCHLCDHGFFLKSGLCVYNCVPGFSVHTSNETCSGKIHTPSLHVNGSLILPIGSIKPLDFSLLNVQDQEGRVEDLLFHVVSTPTNGQLVLSRNGKEVQLDKAGRFSWKDVNEKKVRFVHSKEKLRKGYLFLKISDQQFFSEPQLINIQAFSTQAPYVLRNEVLHISRGERATITTQMLDIRDDDNPQDVVIEIIDPPLHGQLLQTLQSPATPIYQFQLDELSRGLLHYAHDGSDSTSDVAVLQANDGHSFHNILFQVKTVPQNDRGLQLVANSMVWVPEGGMLQITNRILQAEAPGASAEEIIYKITQDYPQFGEVVLLVNMPADSPADEGQHLPDGRTATPTSTFTQQDINEGIVWYRHSGAPAQSDSFRFEVSSASNAQTRLESHMFNIAILPQTPEAPKVSLEASLHMTAREDGLTVIQPHSLSFINSEKPSGKIVYNITLPLHPNQGIIEHRDHPHSPIRYFTQEDINQGKVMYRPPPAAPHLQELMAFSFAGLPESVKFHFTVSDGEHTSPEMVLTIHLLPSDQQLPVFQVTAPRLAVSPGGSTSVGLQVVVRDAETAPKELFFELRRPPQHGVLLKHTAEFRRPMATGDTFTYEDVEKNALQYIHDGSSTREDSMEISVTDGLTVTMLEVRVEVSLSEDRGPRLAAGSSLSITVASKSTAIITRSHLAYVDDSSPDPEIWIQLNYLPSYGTLLRISGSEVEELSEVSNFTMEDINNKKIRYSAVFETDGHLVTDSFYFSVSDMDHNHLDNQIFTIMITPAENPPPVIAFADLITVDEGGRAPLSFHHFFATDDDDNLQRDAIIKLSALPKYGCIENTGTGDRFGPETASDLEASFPIQDVLENYIYYFQSVHESIEPTHDIFSFYVSDGTSRSEIHSINITIERKNDEPPRMTLQPLRVQLSSGVVISNSSLSLQDLDTPDNELIFVLTKKPDHGHVLWRQTASEPLENGRVLVQGSTFTYQDILAGLVGYVPSVPGMVVDEFQFSLTDGLHVDTGRMKIYTELPASDTPHLAINQGLQLSAGSVARITEQHLKVTDIDSDDHQVMYIMKEDPGAGRLQMMKHGNLEQISIKGPIRSFTQADISQGHVEYSHGTGEPGGSFAFKFDVVDGEGNRLIDKSFSISILEDKSPPVITTNKGLVLDENSVKKITTLQLSATDQDSGPTELIYRITRQPQLGHLEHAASPGIQISSFTQADLTSRNVQYVHSSEAEKHSDAFSFTLSDGVSEVTQTFHITLHPVDDSLPVVQNLGMRVQEGMRKTITEFELKAVDADTEAESVTFTIVQPPRHGTIERTSNGQHFHLTSTFTMKDIYQNRVSYSHDGSNSLKDRFTFTVSDGTNPFFIIEEGGKEIMTAAPQPFRVDILPVDDGTPRIVTNLGLQWLEYMDGKATNLITKKELLTMDPDTEDAQLVYEITTGPKHGFVENKLQPGRAAATFTQEDVNLGLIRYVLHKEKIREMMDSFQFLVKDSKPNVVSDNVFHIQWSLISFKYTSYNVSEKAGSVSVTVQRTGNLNQYAIVLCRTEQGTASSSSRVSSQPGQQDYVEYAGQVQFDEREDTKSCTIVINDDDVFENVESFTVELSMPAYALLGEFTQAKVIINDTEDEPTLEFDKKIYWVNESAGFLFAPIERKGDASSIVSAICYTVPKSAMGSSLYALESGSDFKSRGMSAASRVIFGPGVTMSTCDVMLIDDSEYEEEEEFEIALADASDNARIGRVATAKVLISGPNDASTVSLGNTAFTVSEDAGTVKIPVIRHGTDLSTFASVWCATRPSDPASATPGVDYVPSSRKVEFGPGVIEQYCTLTILDDTQYPVIEGLETFVVFLSSAQGAELTKPFQAVIAINDTFQDVPSMQFAKDLLLVKEKEGVLHVPITRSGDLSYESSVRCYTQSHSAQVMEDFEERQNADSSRITFLKGDKVKNCTVYIHDDSMFEPEEQFRVYLGLPLGNHWSGARIGKNNMATITISNDEDAPTIEFEEAAYQVREPAGPDAIAILNIKVIRRGDQNRTSKVRCSTRDGSAQSGVDYYPKSRVLKFSPGVDHIFFKVEILSNEDREWHESFSLVLGPDDPVEAVLGDVTTATVTILDQEAAGSLILPAPPIVVTLADYDHVEEVTKEGVKKSPSPGYPLVCVTPCDPHFPRYAVMKERCSEAGINQTSVQFSWEVAAPTDGNGARSPFETITDNTPFTSVNHMVLDSIYFSRRFHVRCVAKAVDKVGHVGTPLRSNIVTIGTDSAICHTPVVAGTSRGFQAQSFIATLKYLDVKHKEHPNRIHISVQIPHQDGMLPLISTMPLHNLHFLLSESIYRHQHVCSNLVTTYDLRGISEAGFLDDVVYDSTALGPGYDRPFQFDPSVREPKTIQLYKHLNLKSCVWTFDAYYDMTELIDVCGGSVTADFQVRDSAQSFLTVHVPLYVSYIYVTAPRGWASLEHHTEMEFSFFYDTVLWRTGIQTDSVLSARLQIIRIYIREDGRLVIEFKTHAKFRGQFVMEHHTLPEVKSFVLTPDHLGGIEFDLQLLWSAQTFDSPHQLWRATSSYNRKDYSGEYTIYLIPCTVQPTQPWVDPGEKPLACTAHAPERFLIPIAFQQTNRPVPVVYSLNTEFQLCNNEKVFLMDPNTSDMSLAEMDYKGAFSKGQILYGRVLWNPEQNLNSAYKLQLEKVYLCTGKDGYVPFFDPTGTIYNEGPQYGCIQPNKHLKHRFLLLDRNQPEVTDKYFHDVPFEAHFASELPDFHVVSNMPGVDGFTLKVDALYKVEAGHQWYLQVIYIIGPDTISGPRVQRSLTAPLRRNRRDLVEPDGQLILDDSLIYDNEGDQVKNGTNMKSLNLEMQELAVAASLSQTGASIGSALAAIMLLLLVFLVACFINRKCQKQRKKKPAEDILEEYPLNTKVEVPKRHPDRVEKNVNRHYCTVRNVNILSEPEAAYTFKGAKVKRLNLEVRVHNNLQDGTEV

SEQ ID NO: 22607 - protein, 115 aa, Homo sapiens [sequence omitted]

SEQ ID NO: 22608 - protein, 41 aa, Homo sapiens
LCVLFSSVFLRLLFLGMARGSSDFTNQLCRARHFNKEQNAE

SEQ ID NO: 22609 - protein, 28 aa, Homo sapiens
LCNTDTPLRYVDIAIPCNNKGADSVGLM

SEQ ID NO: 22610 - protein, 129 aa, Homo sapiens
MSLSFLLLLFFSHLILSAWAHGEKRLAPKGQPGPAATDRNPRGSSSRQSSSSAMSSSSASSSPAASLGSQGSGLEQSSFQWSPSGRRTGSLYCRVGIGFHLQIYPDGKVNGSHEANMLSSRGAWTPPAV

SEQ ID NO: 22611 - protein, 16 aa, Homo sapiens
LFVPASGNFIAGPVSR

SEQ ID NO: 22612 - protein, 23 aa, Homo sapiens
VVRGGAIKARRRRERPPLVLILF

SEQ ID NO: 22613 - protein, 443 aa, Homo sapiens
LILLFSQARVPSRVASLLAGRAAMEVPPRLSHVPPPLFPSAPATLASRSLSHWRPRPPRQLAPLLPSLAPSSARQGARRAQRHVTAQQPSRLAGGAAIKGGRRRRPDLFRRHFKSSSIQRSAAAAAATRTARQHPPADSSVTMEDMNEYSNIEEFAEGSKINASKNQQDDGKMFIGGLSWDTSKKDLTEYLSRFGEVVDCTIKTDPVTGRSRGFGFVLFKDAASVDKVLELKEHKLDGKLIDPKRAKALKGKEPPKKVFVGGLSPDTSEEQIKEYFGAFGEIENIELPMDTKTNERRGFCFITYTDEEPVKKLLESRYHQIGSGKCEIKVAQPKEVYRQQQQQQKGGRGAAAGGRGGTRGRGRGQGQNWNQGFNNYYDQGYGNYNSAYGGDQNYSGYGGYDYTGYNYGNYGYGQGYADYSGQQSTYGKASRGGGNHQNNYQPY

SEQ ID NO: 22614 - protein, 386 aa, Homo sapiens
LILLFSQARVPSRVASLLAGRAAMEVPPRLSHVPPPLFPSAPATLASRSLSHWRPRPPRQLAPLLPSLAPSSARQGARRAQRHVTAQQPSRLAGGAAIKGGRRRRPDLFRRHFKSSSIQRSAAAAAATRTARQHPPADSSVTMEDMNEYSNIEEFAEGSKINASKNQQDDGKMFIGGLSWDTSKKDLTEYLSRFGEVVDCTIKTDPVTGRSRGFGFVLFKDAASVDKVLELKEHKLDGKLIDPKRAKALKGKEPPKKVFVGGLSPDTSEEQIKEYFGAFGEIENIELPMDTKTNERRGFCFITYTDEEPVKKLLESRYHQIGSGKCEIKVAQPKEVYRQQQQQQKGGRGAAAGGRGGTRGRGRGQQSTYGKASRGGGNHQNNYQPY

SEQ ID NO: 22615 - protein, 349 aa, Homo sapiens
LSERERPGARAERSPASGAPGISIQRSAAAAAATRTARQHPPADSSVTMEDMNEYSNIEEFAEGSKINASKNQQDDGKMFIGGLSWDTSKKDLTEYLSRFGEVVDCTIKTDPVTGRSRGFGFVLFKDAASVDKVLELKEHKLDGKLIDPKRAKALKGKEPPKKVFVGGLSPDTSEEQIKEYFGAFGEIENIELPMDTKTNERRGFCFITYTDEEPVKKLLESRYHQIGSGKCEIKVAQPKEVYRQQQQQQKGGRGAAAGGRGGTRGRGRGQGQNWNQGFNNYYDQGYGNYNSAYGGDQNYSGYGGYDYTGYNYGNYGYGQGYADYSGQQSTYGKASRGGGNHQNNYQPY

SEQ ID NO: 22616 - protein, 43 aa, Homo sapiens
LPLQPRFMALVTIALLYIGSWEGAEGGEGTSQCGLGMFLFISK

SEQ ID NO: 22617 - protein, 300 aa, Homo sapiens
LEGGDWTCGEFPPKRQKPPPPPSSSARAERLPACRCCGRPPRPAMPGPATDAGKIPFCDAKEEIRAGLESSEGGGGPERPGARGQRQNIVWRNVVLMSLLHLGAVYSLVLIPKAKPLTLLWAYFCFLLAALGVTAGAHRLWSHRSYRAKLPLRIFLAVANSMAFQNDIFEWSRDHRAHHKYSETDADPHNARRGFFFSHIGWLFVRKHRDVIEKGRKLDVTDLLADPVVRIQRNTQHIQKEGRALNQEAACEMLREWHQGHILKVTLPGLHILALLHTHCNHSEKCCLMLRALSVSLEVF

SEQ ID NO: 22618 - protein, 152 aa, Homo sapiens
LPKVLASRMKLKEVDRTAMQAWSPAQNHPIYLATGTSAQQLDATFSTNASLEIFELDLSDPSLDMKSCATFSSSHRYHKLIWGPYKMDSKGDVSGVLIAGGENGNIILYDPSKIIAGDKEVVIAQNDKHTGPVRALDVNIFQRLILYEIIRN

SEQ ID NO: 22619 - protein, 568 aa, Homo sapiens
LCLGGAAAAAAAGSPGSAARPGGGGAAGFVPDQLSSGRTIMEVVPAEIAKKPRTPTSGPVITKLIFAKPINSKAVTGQTTQVSPPVIAGRVLSQSTPGTPSKTITISESGVIGSTLNSTTQTPNKIAISPLKSPNKAVKSTVQTITVGGVSTSQFKTIIPLATAPNVQQIQVPGSKFHYVRLVTATSASSSTQPVSQNPSTNTQPLQQAKPVVVNTTPVRMSVPIVSAQAVKQVVPKPINPTSQIVTTSQPQQRLIMPATPLPQIQPNLTNLPPGTVLAPAPGTGNVGYAVLPAQYVTQLQQSSYVSIASNSTFTGTSGIQTQARLPFNGIIPSESASRPRKPCNCTKSLCLKLYCDCFANGEFCNNCNCTNCYNNLEHENERQKAIKACLDRNPEAFKPKIGKGKEGESDRRHSKGCNCKRSGCLKNYCECYEAKIMCSSICKCIGCKNFEESPERKTLMHLADAAEVRVQQQTAAKTKLSSQISDLLTRPTPALNSGGGKLPFTFVTKEVAEATCNCLLAQAEQADKKGKSKAAAERMILEEFGRCLMSVINSAGKAKSDPCAMNC

SEQ ID NO: 22620 - protein, 789 aa, Homo sapiens
LCLGGAAAAAAAGSPGSAARPGGGGAAGFVPDQLSSGRTIMEVVPAEVNSLLPEEIMDTGITLVDDDSIEAVIVSSPIPMETELEEIVNINSTGDSTATPISTEPITVYSNHTNQVAVNTTITKADSNTTVKPAFPSGLQKLGAQTPVTISANQIILNKVSQTSDLKLGNQTLKPDGQKLILTTLGKSGSPIVLALPHSQLPQAQKVTTQAQSGDAKLPPQQIKVVTIGGRPEVKPVIGVSALTPGSQLINTTTQPSVLQTQQLKTVQIAKKPRTPTSGPVITKLIFAKPINSKAVTGQTTQVSPPVIAGRVLSQSTPGTPSKTITISESGVIGSTLNSTTQTPNKIAISPLKSPNKAVKSTVQTITVGGVSTSQFKTIIPLATAPNVQQIQVPGSKFHYVRLVTATSASSSTQPVSQNPSTNTQPLQQAKPVVVNTTPVRMSVPIVSAQAVKQVVPKPINPTSQIVTTSQPQQRLIMPATPLPQIQPNLTNLPPGTVLAPAPGTGNVGYAVLPAQYVTQLQQSSYVSIASNSTFTGTSGIQTQARLPFNGIIPSESASRPRKPCNCTKSLCLKLYCDCFANGEFCNNCNCTNCYNNLEHENERQKAIKACLDRNPEAFKPKIGKGKEGESDRRHSKGCNCKRSGCLKNYCECYEAKIMCSSICKCIGCKNFEESPERKTLMHLADAAEVRVQQQTAAKTKLSSQISDLLTRPTPALNSGGGKLPFTFVTKEVAEATCNCLLAQAEQADKKGKSKAAAERMILEEFGRCLMSVINSAGKAKSDPCAMNC

SEQ ID NO: 22621 - protein, 54 aa, Homo sapiens
LCLGGAAAAAAAGSPGSAARPGGGGAAGFVPDQLSSGRTIMEVVPAENWKKLST

SEQ ID NO: 22622 - protein, 60 aa, Homo sapiens
LIPLSIVSLGFIHVMAAREALPTWDKQIQSLCFQVNNLLEKISQTAPEWTAQAMEAQMAQ

SEQ ID NO: 22623 - protein, 286 aa, Homo sapiens
MALPGAIATPRTLPEKVQEQHLLNFLKAGGEVIDSVTWHHYYLNGRTATKEDFLNPDVLDIFISSVQKVFQVVESTRPGKKVWLGETSSAYGGGAPLLSDTFAAGFMWLDKLGLSARMGIEVVMRQVFFGAGNYHLVDENFDPLPDYWLSLLFKKLVGTKVLMASVQGSKRRKLRVYLHCTNTDNPRYKEGDLTLYAINLHNVTKYLRLPYPFSNKQVDKYLLRPLGPHGLLSKSVQLNGLTLKMVDDQTLPPLMEKPLRPGSSLGLPAFSYSFFVIRNAKVAACI

SEQ ID NO: 22624 - protein, 65 aa, Homo sapiens
VLSGFVLGALAFQHLNTDSDTEGFLLGEVKGEAKNSITDSQMDDVEVVYTIDGVSFCRPDWSEVA

SEQ ID NO: 22625 - protein, 50 aa, Homo sapiens
MVWSQEMKRASNVFGILTTVTCSLGLLQWQLNGEVRNTNSRIRQSLNPCH

SEQ ID NO: 22626 - protein, 795 aa, Homo sapiens
MNMVKRIMGRPRQEECSPQDNALGLMHLRRLFTELCHPPRHMTQKEQEEKLYMMLPVFNRVFGNAPPNTMTEKFSDLLQFTTQVSRLMVTEIRRRASNKSTEAASRAIVQFLEINQSEEASRGWMLLTTINLLASSGQKTVDCMTTMSVPSTLVKCLYLFFDLPHVPEAVGGAQNELPLAERRGLLQKVFVQILVKLCSFVSPAEELAQKDDLQLLFSAITSWCPPYNLPWRKSAGEVLMTISRHGLSVNVVKYIHEKECLSTCVQNMQQSDDLSPLEIVEMFAGLSCFLKDSSDVSQTLLDDFRIWQGYNFLCDLLLRLEQAKEAESKDALKDLVNLITSLTTYGVSELKPAGITTGAPFLLPGFAVPQPAGKGHSVRNVQAFAVLQNAFLKAKTSFLAQIILDAITNIYMADNANYFILESQHTLSQFAEKISKLPEVQNKYFEMLEFVVFSLNYIPCKELISVSILLKSSSSYHCSIIAMKTLLKFTRHDYIFKDVFREVGLLEVMVNLLHKYAALLKDPTQALNEQGDSRNNSSVEDQKHLALLVMETLTVLLQGSNTNAGIFREFGGARCAHNIVKYPQCRQHALMTIQQLVLSPNGDDDMGTLLGLMHSAPPTELQLKTDILRALLSVLRESHRSRTVFRKVGGFVYITSLLVAMERSLSCPPKNGWEKVNQNQVFELLHTVFCTLTAAMRYEPANSHFFKTEIQYEKLADAVRFLGCFSDLRKISAMNVFPSNTQPFQRLLEEDVISIESVSPTLRHCSKLFIYLYKVATDSFDRYGSALSSELKGVY

SEQ ID NO: 22627 - protein, 95 aa, Homo sapiens
LGLFAQLLGFLKCMWQHSPAPGGNQQGSGGARRPGELSRLRRGPERSLAGVAGWLGESPQLPIAGAALSAAYFLRNPRCGAAQCIEFNTSPCCGK

SEQ ID NO: 22628 - protein, 333 aa, Homo sapiens
VAGGIPPTSHRRRSSLGRLFPPKPALRSSPVHRVQHFPLLWKVKEPHYHLFFFAFSYCWSWEPFPSEQQPCPASVLSSQQGKSISLIMEENNDSTENPQQGQGRQNAIKCGWLRKQGGFVKTWHTRWFVLKGDQLYYFKDEDETKPLGTIFLPGNKVSEHPCNEENPGKFLFEVVPGGDRDRMTANHESYLLMASTQNDMEDWVKSIRRVIWGPFGGGIFGQKLEDTVRYEKRYGNRLAPMLVEQCVDFIRQRGLKEEGLFRLPGQANLVKELQDAFDCGEKPSFDSNTDVHTVASLLKLYLRELPEPVIPYAKYEDFLSCAKLLSKEEEAVS

SEQ ID NO: 22629 - protein, 10 aa, Homo sapiens
LGTAVRRPDQ

SEQ ID NO: 22630 - protein, 406 aa, Homo sapiens
VDSDTWSPPPRGAAFSHTHTSAAYDAVLDRNVAIKKLSRPFQNQTHAKRAYRELVLMKCVNHKNIISLLNVFTPQKTLEEFQDVYLVMELMDANLCQVIQMELDHERMSYLLYQMLCGIKHLHSAGIIHRDLKPSNIVVKSDCTLKILDFGLARTAGTSFMMTPYVVTRYYRAPEVILGMGYKENVDIWSVGCIMGEMVRHKILFPGRDYIDQWNKVIEQLGTPCPEFMKKLQPTVRNYVENRPKYAGLTFPKLFPDSLFPADSEHNKLKASQARDLLSKMLVIDPAKRISVDDALQHPYINVWYDPAEVEAPPPQIYDKQLDEREHTIEEWKELIYKEVMNSEEKTKNGVVKGQPSPSGAAVNSSESLPPSSSVNDISSMSTDQTLASDTDSSLEASAGPLGCCR

SEQ ID NO: 22631 - protein, 31 aa, Homo sapiens
MLTAPGDRRAGEPCSVAPRSASAAVRVAYRS

SEQ ID NO: 22632 - protein, 37 aa, Homo sapiens
MAYGVPRKNTVKTILRGSCYNVNLGILHCLQRPGPQT

SEQ ID NO: 22633 - protein, 50 aa, Homo sapiens
VVCVRLFLQFLLQTVLWLSLSQRSGPSCLGESQRMTAVVISEHKTLMCDS

SEQ ID NO: 22634 - protein, 52 aa, Homo sapiens
LFLSQLSLLFWVPLRINGCKVFSCAFILCHSIGRRCNGRIASCWGFSFKHCK

SEQ ID NO: 22635 - protein, 43 aa, Homo sapiens
MAGRLLGKALAAVSLSLALASVTIRSSRCRGIQAFSRDRVSPC

SEQ ID NO: 22636 - protein, 39 aa, Homo sapiens
MAGRLLGKALAAVSLSLALASVTIRSSRCRGIQAFRFKS

SEQ ID NO: 22637 - protein, 670 aa, Homo sapiens
LPNLESMKTGLFFLCLLGTAAAIPTNARLLSDHSKPTAETVAPDNTAIPSLRAEAEENEKETAVSTEDDSHHKAEKSSVLKSKEESHEQSAEQGKSSSQELGLKDQEDSDGHLSVNLEYAPTEGTLDIKEDMSEPQEKKLSENTDFLAPGVSSFTDSNQQESITKREENQEQPRNYSHHQLNRSSKHSQGLRDQGNQEQDPNISNGEEEEEKEPGEVGTHNDNQERKTELPREHANSKQEEDNTQSDDILEESDQPTQVSKMQEDEFDQGNQEQEDNSNAEMEEENASNVNKHIQETEWQSQEGKTGLEAISNHKETEEKTVSEALLMEPTDDGNTTPRNHGVDDDGDDDGDDGGTDGPRHSASDDYFIPSQAFLEAERAQSIAYHLKIEEQREKVHENENIGTTEPGEHQEAKKAENSSNEEETSSEGNMRVHAVDSCMSFQCKRGHICKADQQGKPHCVCQDPVTCPPTKPLDQVCGTDNQTYASSCHLFATKCRLEGTKKGHQLQLDYFGACKSIPTCTDFEVIQFPLRMRDWLKNILMQLYEANSEHAGYLNEKQRNKVKKIYLDEKRLLAGDHPIDLLLRDFKKNYHMYVYPVHWQFSELDQHPMDRVLTHSELAPLRASLVPMEHCITRFFEECDPNKDKHITLKEWGHCFGIKEEDIDENLLF

SEQ ID NO: 22638 - protein, 25 aa, Homo sapiens
LESMKTGLFFLCLLGTAAAIPVKRR

SEQ ID NO: 22639 - protein, 249 aa, Homo sapiens [sequence omitted]

SEQ ID NO: 22640 - protein, 302 aa, Homo sapiens
LQPSQPNADQGKLTTMRIAVICFCLLGITCAIPVKQADSGSSEEKQNAVSSEETNDFKQETLPSKSNESHDHMDDMDDEDDDDHVDSQDSIDSNDSDDVDDTDDSHQSDESHHSDESDELVTDFPTDLPATEVFTPVVPTVDTYDGRGDSVVYGLRSKSKKFRRPDIQYPDATDEDITSHMESEELNGAYKAIPVAQDLNAPSDWDSRGKDSYETSQLDDQSAETHSHKQSRLYKRKANDESNEHSDVIDSQELSKVSREFHSHEFHSHEDMLVVDPKSKEEDKHLKFRISHELDSASSEVN

SEQ ID NO: 22641 - protein, 64 aa, Homo sapiens
MRIAVICFCLLGITCAIPVKQADSGSSEEKQLYNKYPDAVATWLNPDPSQKQNLLAPQVFLNFS

SEQ ID NO: 22642 - protein, 971 aa, Homo sapiens
VTAMVNSSRVQPQQPGDAKRPPAPRAPDPGRLMAGCAAVGASLAAPGGLCEQRGLEIEMQRIRQAAARDPPAGAAASPSPPLSSCSRQAWSRDNPGFEAEEEEEEVEGEEGGMVVEMDVEWRPGSRRSAASSAVSSVGARSRGLGGYHGAGHPSGRRRRREDQGPPCPSPVGGGDPLHRHLPLEGQPPRVAWAERLVRGLRGLWGTRLMEESSTNREKYLKSVLRELVTYLLFLIVLCILTYGMMSSNVYYYTRMMSQLFLDTPVSKTEKTNFKTLSSMEDFWKFTEGSLLDGLYWKMQPSNQTEADNRSFIFYENLLLGVPRIRQLRVRNGSCSIPQDLRDEIKECYDVYSVSSEDRAPFGPRNGTAWIYTSEKDLNGSSHWGIIATYSGAGYYLDLSRTREETAAQVASLKKNVWLDRGTRATFIDFSVYNANINLFCVVRLLVEFPATGGVIPSWQFQPLKLIRYVTTFDFFLAACEIIFCFFIFYYVVEEILEIRIHKLHYFRSFWNCLDVVIVVLSVVAIGINIYRTSNVEVLLQFLEDQNTFPNFEHLAYWQIQFNNIAAVTVFFVWIKLFKFINFNRTMSQLSTTMSRCAKDLFGFAIMFFIIFLAYAQLAYLVFGTQVDDFSTFQECIFTQFRIILGDINFAEIEEANRVLGPIYFTTFVFFMFFILLNMFLAIINDTYSEVKSDLAQQKAEMELSDLIRKGYHKALVKLKLKKNTVDDISESLRQGGGKLNFDELRQDLKGKGHTDAEIEAIFTKYDQDGDQELTEHEHQQMRDDLEKEREDLDLDHSSLPRPMSSRSFPRSLDDSEEDDDEDSGHSSRRRGSISSGVSYEEFQVLVRRVDRMEHSIGSIVSKIDAVIVKLEIMERAKLKRREVLGRLLDGVAEDERLGRDSEIHREQMERLVREELERWESDDAASQISHGLGTPVGLNGQPRPRSSRPSSSQSTEGMEGAGGNGSSNVHV

SEQ ID NO: 22643 - protein, 112 aa, Homo sapiens
LRSALAVHSPKRGLGSSCQRCLSSSPGCPGLPRRPPAGSHRDLQPQRLPRRPPREGSARARRVWLGEGVVPRAGCVLCPLKRFRARRREEAVPATPTEIERRGKEAACGGTG

SEQ ID NO: 22644 - protein, 493 aa, Homo sapiens
LQVLQTCFLYFYFYFFGNGVSLCCPGWSPVITTCLKDNLLKRLPFHSPPQEALEIFFLLPECPMMHISNNWESLVVPFAKVVCKMSDQSSLVLEEYWATLQESTFSKLVQMFKTAVICQLDYWDESAEENGNVQALLEMLKKLHRVNQVKCQLPESIFQVDELLHRLNFFVEVCRRYLWKMTVDASENVQCCVIFSHFPFIFNNLSKIKLLHTDTLLKIESKKHKAYLRSAAIEEERESEFALRPTFDLTVRRNHLIEDVLNQLSQFENEDLRKELWVSFSGEIGYDLGGVKKEFFYCLFAEMIQPEYGMFMYPEGASCMWFPVKPKFEKKRYFFFGVLCGLSLFNCNVANLPFPLALFKKLLDQMPSLEDLKELSPDLGKNLQTLLDDEGDNFEEVFYIHFNVHWDRNDTNLIPNGSSITVNQTNKRDYVSKYINYIFNDSVKAVYEEFRRGFYKMCDEDIIKLFHPEELKDVIVGNTDYDWKTFEKVHHQV

SEQ ID NO: 22645 - protein, 12 aa, Homo sapiens
LLLFTVMRAILL

SEQ ID NO: 22646 - protein, 20 aa, Homo sapiens
VRGGILRTHFLVALYSNLSC

SEQ ID NO: 22647 - protein, 41 aa, Homo sapiens
LGDFLFILKITSPDPTPFYPNHQYKPPVSVYTVADRSIVML

SEQ ID NO: 22648 - protein, 14 aa, Homo sapiens
LAVWTELSWMFFLS

SEQ ID NO: 22649 - protein, 325 aa, Homo sapiens
MEVFPFLLVLSVWWSRTWDSANADSIIHIGAIFDESAKKDDEVFRTAVGDLNQNEEILQTEKITFSVTFVDGNNPFQAVQEACELMNQGILALVSSIGCTSAGSLQSLADAMHIPHLFIQRSTAGTPRSGCGLTRSNRNDDYTLSVRPPVYLHDVILRVVTEYAWQKFIIFYDSEYDIRGIQEFLDKVSQQGMDVALQKVENNINKMITTLFDTMRIEELNRYRDTLRRAILVMNPATAKSFITEVVETNLVAFDCHWIIINEEINDVDVQELVRRSIGRLTIIRQTFPVPQNISQRCFRGNHRISSTLCDPKDPFAQNMEVYYK

SEQ ID NO: 22650 - protein, 977 aa, Homo sapiens
VKPDPPRAPGENEDSSVPETPDNERKASISYFKNQRGIQYIDLSSDSEDVVSPNCSNTVQEKTFNKDTVIIVSEPSEDEESQGLPTMARRNDDISELEDLSELEDLKDAKLQTLKELFPQRSDNDLLKLIESTSTMDGAIAAALLMFGDAGGGPRKRKLSSSSEPYEEDEFNDDQSIKKTRLDHGEESNESAESSSNWEKQESIVLKLQKEFPNFDKQELREVLKEHEWMYTEALESLKVFAEDQDMQYVSQSEVPNGKEVSSRSQNYPKNATKTKLKQKFSMKAQNGFNKKRKKNVFNPKRVVEDSEYDSGSDVGSSLDEDYSSGEEVMEDGYKGKILHFLQDASIGELTLIPQCSQKKAQKITELRPFNSWEALFTKMSKTNGLSEDLIWHCKTLIQERDVVIRLMNKCEDISNKLTKQVTMLTGNGGGWNIEQPSILNQSLSLKPYQKVGLNWLALVHKHGLNGILADEMGLGKTIQAIAFLAYLYQEGNNGPHLIVVPASTIDNWLREVNLWCPTLKVLCYYGSQEERKQIRFNIHSRYEDYNVIVTTYNCAISSSDDRSLFRRLKLNYAIFDEGHMLKNMGSIRYQHLMTINANNRLLLTGTPVQNNLLELMSLLNFVMPHMFSSSTSEIRRMFSSKTKSADEQSIYEKERIAHAKQIIKPFILRRVKEEVLKQLPPKKDRIELCAMSEKQEQLYLGLFNRLKKSINNLVTEKNTEMCNVMMQLRKMANHPLLHRQYYTAEKLKEMSQLMLKEPTHCEANPDLIFEDMEVMTDFELHVLCKQYRHINNFQLDMDLILDSGKFRVLGCILSELKQKGDRVVLFSQFTMMLDILEVLLKHHQHRYLRLDGKTQISERIHLIDEFNTDMDIFVFLLSTKAGGLGINLTSANVVILHDIDCNPYNDKQAEDRCHRVGQTKEVLVIKLISQGTIEESMLKINQQKLKLEQDMTTVDEGDEGSMPADIATLLKTSMGL

SEQ ID NO: 22651 - protein, 173 aa, Homo sapiens
MDNLSDTLKKLKITAVDKTEDSLEGCLDCLLQALAQNNTETSEKIQASGILQLFASLLTPQSSCKAKVANIIAEVAKNEFMRIPCVDAGLISPLVQLLNSKDQEVLLQTGRALGNICYDSHEGRSAVDQAGGAQIVIDHLRSLCSITDPANEKLLTVFCGMLMNYSNENGKQN

SEQ ID NO: 22652 - protein, 29 aa, Homo sapiens
MEKTRALSSWHHLSFLLIASFSSELHLAN

SEQ ID NO: 22653 - protein, 15 aa, Homo sapiens
LGVCMALHVCVFVSV

SEQ ID NO: 22654 - protein, 37 aa, Homo sapiens
LYPCLLSFAFSGMPYIRNHTVCSLSFNFAVKLKLLRK

SEQ ID NO: 22655 - protein, 40 aa, Homo sapiens
MLWEDWPSASHLAVPFLLLMCGSGMGRWPNSGQQAMRRIC

SEQ ID NO: 22656 - protein, 39 aa, Homo sapiens [sequence omitted]

SEQ ID NO: 22657 - protein, 21 aa, Homo sapiens
LIKEQILAISDKVNQDPSLLL

SEQ ID NO: 22658 - protein, 155 aa, Homo sapiens
LLVNMILLAVLFLCFISSYSASVKGHTTGLSLNNDRLYKLTYSTEVLLDRGKGKLQDSVGYRISSNVDVALLWRNPDGDDDQLIQITMKDVNVENVNQQRGEKSIFKGKSPSKIMGKENLEALQRPTLLHLIHGKVKGRLDSTTFSPTSYFSSLQ

SEQ ID NO: 22659 - protein, 898 aa, Homo sapiens
LLVNMILLAVLFLCFISSYSASVKGHTTGLSLNNDRLYKLTYSTEVLLDRGKGKLQDSVGYRISSNVDVALLWRNPDGDDDQLIQITMKDVNVENVNQQRGEKSIFKGKSPSKIMGKENLEALQRPTLLHLIHGKVKEFYSYQNEAVAIENIKRGLASLFQTQLSSGTTNEVDISGNCKVTYQAHQDKVIKIKALDSCKIARSGFTTPNQVLGVSSKATSVTTYKIEDSFVIAVLAEETHNFGLNFLQTIKGKIVSKQKLELKTTEAGPRLMSGKQAAAIIKAVDSKYTAIPIVGQVFQSHCKGCPSLSELWRSTRKYLQPDNLSKAEAVRNFLAFIQHLRTAKKEEILQILKMENKEVLPQLVDAVTSAQTSDSLEAILDFLDFKSDSSIILQERFLYACGFASHPNEELLRALISKFKGSIGSSDIRETVMIITGTLVRKLCQNEGCKLKAVVEAKKLILGGLEKAEKKEDTRMYLLALKNALLPEGIPSLLKYAEAGEGPISHLATTALQRYDLPFITDEVKKTLNRIYHQNRKVHEKTVRTAAAAIILNNNPSYMDVKNILLSIGELPQEMNKYMLAIVQDILRFEMPASKIVRRVLKEMVAHNYDRFSRSGSSSAYTGYIERSPRSASTYSLDILYSGSGILRRSNLNIFQYIGKAGLHGSQVVIEAQGLEALIAATPDEGEENLDSYAGMSAILFDVQLRPVTFFNGYSDLMSKMLSASGDPISVVKGLILLIDHSQELQLQSGLKANIEVQGGLAIDISGAMEFSLWYRESKTRVKNRVTVVITTDITVDSSFVKAGLETSTETEAGLEFISTVQFSQYPFLVCMQMDKDEAPFRQFEKKYERLSTGRGYVSQKRKESVLAGCEFPLHQENSEMCKVVFAPQPDSTSSGWF

SEQ ID NO: 22660 - protein, 228 aa, Homo sapiens
VGGGVLSAASGAASDLAAGGDGWVARAAPLGAGGRRRAAVASARRGANGRGRPCGAPRAGDPGRVRGRARGGTRRGGGWARRLGNSIFSVPPPLAGVCAPQAGGKAGKDSGKAKTKAVSRSQRAGLQFPVGRIHRHLKSRTTSHGRVGATAAVYSAAILEYLTAEVLELAGNASKDLKVKRITPRHLQLAIRGDEELDSLIKATIAGGGVIPHIHKSLIGKKGQQKTV

SEQ ID NO: 22661 - protein, 20 aa, Homo sapiens
VAAIGGMSNPSSRMREHSAV

SEQ ID NO: 22662 - protein, 29 aa, Homo sapiens
LLQVTILFLLPSICSSNSTGFEIPQPNWL

SEQ ID NO: 22663 - protein, 456 aa, Homo sapiens
LEMSEPKAIDPKLSTTDRVVKVCGDIHGQFFDLMKLFEVGGSPANTRYLFLGDYVDRGYFSIECVLYLWALKILYPKTLFLLRGNHECRHLTEYFTFKQECKIKYSERVYDACMDAFDCLPLAALMNQQFLCVHGGLSPEINTLDDIRKLDRFKEPPAYGPMCDILWSDPLEDFGNEKTQEHFTHNTVRGCSYFYSYPAVCEFLQHNNLLSILRAHEAQDAGYRMYRKSQTTGFPSLITIFSAPNYLDVYNNKAAVLKYENNVMNIRQFNCSPHPYWLPNFMDVFTWSLPFVGEKVTEMLVNVLNICSDDELGSEEDGFDGATAAARKEVIRNKIRAIGKMARVFSVLREESESVLTLKGLTPTGMLPSGVLSGGKQTLQSATVEAIEADEAIKGFSPQHKITSFEEAKGLDRINERMPPRRDAMPSDANLNSINKALTSETNGTDSNGSNSSNIQ

SEQ ID NO: 22664 - protein, 24 aa, Homo sapiens
LQRMHTSGRGWGTTCLLVLLASDE

SEQ ID NO: 22665 - protein, 26 aa, Homo sapiens
LLLRHPMWKFFFSLSSNEIKILLSSQ

SEQ ID NO: 22666 - protein, 828 aa, Homo sapiens
VARDLKMRLHLLLLLALCGAGTTAAELSYSLRGNWSICNGNGSLELPGAVPGCVHSALFQQGLIQDSYYRFNDLNYRWVSLDNWTYSKEFKIPFEISKWQKVNLILEGVDTVSKILFNEVTIGETDNMFNRYEQCSFSWDWGPSFPTQGIWKDVRIEAYNICHLNYFTFSPIYDKSAQEWNLEIESTFDVVSSKPVGGQVIVAIPKLQTQQTYSIELQPGKRIVELFVNISKNITVETWWPHGHGNQTGYNMTVLFELDGGLNIEKSAKVYFRTVELIEEPIKGSPGLSFYFKINGFPIFLKGSNWIPADSFQDRVTSELLRLLLQSVVDANMNTLRVWGGGIYEQDEFYELCDELGIMVWQDFMFACALYPTDQGFLDSVTAEVAYQIKRLKSHPSIIIWSGNNENEEALMMNWYHISFTDRPIYIKDYVTLYVKNIRELVLAGDKSRPFITSSPTNGAETVAEAWVSQNPNSNYFGDVHFYDYISDCWNWKVFPKARFASEYGYQSWPSFSTLEKVSSTEDWSFNSKFSLHRQHHEGGNKQMLYQAGLHFKLPQSTDPLRTFKDTIYLTQVMQAQCVKTETEFYRRSRSEIVDQQGHTMGALYWQLNDIWQAPSWASLEYGGKWKMLHYFAQNFFAPLLPVGFENENTFYIYGVSDLHSDYSMTLSVRVHTWSSLEPVCSRVTERFVMKGGEAVCLYEEPVSELLRRCGNCTRESCVVSFYLSADHELLSPTNYHFLSSPKEAVGLCKAQITAIISQQGDIFVFDLETSAVAPFVWLDVGSIPGRFSDNGFLMTEKTRTILFYPWEPTSKNELEQSFHVTSLTDIY

SEQ ID NO: 22667 - protein, 231 aa, Homo sapiens
VARDLKMRLHLLLLLALCGAGTTAAELSYSLRGNWSICNGNGSLELPGAVPGCVHSALFQQGLIQDSYYRFNDLNYRWVSLDNWTYSKEFKIPFEISKWQKVNLILEGVDTVSKILFNEVTIGETDNMFNRYSFDITNVVRDVNSIELRFQSAVLYAAQQSKAHTRYQVPPDCPPLVQKGECHVNFVRKEQCSFSWDWGPSFPTQGIWKDVRIEAYNICHLNYFTFSPIYE

SEQ ID NO: 22668 - protein, 81 aa, Homo sapiens
MFNRYSFDITNVVRDVNSIELRFQSAVLYAAQQSKAHTRYQVPPDCPPLVQKGECHVNFVRKVMVSQTGRVLFLRTGCAGI

SEQ ID NO: 22669 - protein, 16 aa, Homo sapiens
MLETSRKDTVCDEISM

SEQ ID NO: 22670 - protein, 109 aa, Homo sapiens [sequence omitted]

SEQ ID NO: 22671 - protein, 119 aa, Homo sapiens
MATDDEKLRLPMLRVVNRCVYSTTKAAVIGLTKSVAADFIQQGIRCNCVCPGTVDTPSLQERIQARGNPEEARNDFLKRQKTGRFATAEEIAMLCVYLASDESAYVTGNPVIIDGGWSL

SEQ ID NO: 22672 - protein, 173 aa, Homo sapiens
MGRLDGKVIILTAAAQGIGQAAALAFAREGAKVIATDINESKLQELEKYPGIQTRVLDVTKKKQIDQFANEVERLDVLFNVAGFVHHGTVLDCEEKDWDFSMNLNVRSMYLMIKAFLPKMLAQKSGNIINMSSVASSVKGGSVSFRGLRCSYTHIIKSSAFGNRHSRDYNFKY

SEQ ID NO: 22673 - protein, 39 aa, Homo sapiens
LRAGKHSAAHPLKIVYLPLLLLSYNAWKQEMGSAAANRT

SEQ ID NO: 22674 - protein, 38 aa, Homo sapiens
LAGKHSAAHPLKIVYLPLLLLSYNAWKQEMGSAAANRT

SEQ ID NO: 22675 - protein, 287 aa, Homo sapiens
VPQPLRACGWGPVQGPGRAVLWPCTTLRSAASPARRITASSLNLFNMIVEIPRWTNAKMEIATKEPMNPIKQYVKDGKLRYVANIFPYKGYIWNYGTLPQTWEDPHEKDKSTNCFGDNDPIDVCEIGSKILSCGEVIHVKILGILALIDEGETDWKLIAINANDPEASKFHDIDDVKKFKPGYLEATLNWFRLYKVPDGKPENQFAFNGEFKNKAFALEVIKSTHQCWKALLMKKCNGGAINCTNVQISDSPFRCTQEEARSLVESVSSSPNKESNEEEQVWHFLGK

SEQ ID NO: 22676 - protein, 154 aa, Homo sapiens
MSALLRLLRTGAPAAACLRLGTSAGTGSRRAMALYHTEERGQPCSQNYRLFFKNVTGHYISPFHDIPLKVNSKEENGIPMKKARNDEYENLFNMIVEIPRWTNAKMEIATKEPMNPIKQYVKDGKLRYVANIFPYKGYIWNYGTLPQVTFLLQW

SEQ ID NO: 22677 - protein, 68 aa, Homo sapiens
MNDGRREYFPHKVAVVFLLASVEASGLRAAAPRGSLGIPARTGREGAGGPGRRHAHAPSLPGRASATR

SEQ ID NO: 22678 - protein, 64 aa, Homo sapiens
LEFLFLDICFAAFYVLRQRIARIRCQLKAVCQPRCKHGECIGPNKCKCHPGYAGKTCNQGRKTV

SEQ ID NO: 22679 - protein, 188 aa, Homo sapiens
MAALMRSKDSSCCLLLLAAVLMVESSQIGSSRAKLNSIKSSLGGETPGQAANRSAGMYQGLAFGGSKKGKNLGQAYPCSSDKECEVGRYCHSPHQGSSACMVCRRKKKRCHRDGMCCPSTRCNNGICIPVTESILTPHIPALDGTRHRDRNHGHYSNHDLGWQNLGRPHTKMSHIKGRDICSSGVFLK

SEQ ID NO: 22680 - protein, 20 aa, Homo sapiens
MLILEIEGLKKAKFPQRTRT

SEQ ID NO: 22681 - protein, 236 aa, Homo sapiens
LKNMCRTALGVTTLQDLGVCWRKEHDPAEMLRVGRAELGGWKPSWEAIVKEVAAATGHTVVLVDQTEDILAKSKKGIEESLRKVAKKKFAENLKAGDEFVEKTLSTIATSTDAASVVHSTDLVVEAIVENLKVKNELFKRLDKFAAEHTIFASNTSSLQITSIANATTRQDRFAGLHFFNPVPVMKLVEVIKTPMTSQKTFESLVDFSKALGKHPVSCKVRVWVAWEGGSSFLLGP

SEQ ID NO: 22682 - protein, 321 aa, Homo sapiens
LKNMCRTALGVTTLQDLGVCWRKEHDPAEMLRVGRAELGGWKPSWEAIVKEVAAATGHTVVLVDQTEDILAKSKKGIEESLRKVAKKKFAENLKAGDEFVEKTLSTIATSTDAASVVHSTDLVVEAIVENLKVKNELFKRLDKFAAEHTIFASNTSSLQITSIANATTRQDRFAGLHFFNPVPVMKLVEVIKTPMTSQKTFESLVDFSKALGKHPVSCKDTPGFIVNRLLVPYLMEAIRLYERGDASKEDIDTAMKLGAGYPMGPFELLDYVGLDTTKFIVDGWHEMDAENPLHQPSPSLNKLVAENKFGKKTGEGFYKYK

SEQ ID NO: 22683 - protein, 124 aa, Homo sapiens
LLRWTPAAKESRLVCPAPPRPWDTPGFIVNRLLVPYLMEAIRLYERGDASKEDIDTAMKLGAGYPMGPFELLDYVGLDTTKFIVDGWHEMDAENPLHQPSPSLNKLVAENKFGKKTGEGFYKYK

SEQ ID NO: 22684 - protein, 41 aa, Homo sapiens
LFFCLPKQDTPGFIVNRLLVPYLMEAIRLYERGPPGFPVGL

SEQ ID NO: 22685 - protein, 110 aa, Homo sapiens
LFFCLPKQDTPGFIVNRLLVPYLMEAIRLYERGDASKEDIDTAMKLGAGYPMGPFELLDYVGLDTTKFIVDGWHEMDAENPLHQPSPSLNKLVAENKFGKKTGEGFYKYK

SEQ ID NO: 22686 - protein, 572 aa, Homo sapiens
LHLLLGQTGPFCPDPLSFLGKQTTKSASGVTTVERVSAETRRRTLLCTLGRRAPSRTGVLRAQIPATRGRGVAAGAASSSARRADAPGVASYRSPRRPVPFGLGGGRLRRSPRSGKARRPPGFGRRGSCSGCRPAAPRSPAPLPPAVLLHEPFQLSFPPPPLSYPSVFPAVARVLPQRSGDYRAAGMPQLSGGGGGGGGDPELCATDEMIPFKDEGDPQKEKIFAEISHPEEEGDLADIKSSLVNESEIIPASNGHEVARQAQTSQEPYHDKAREHPDDGKHPDGGLYNKGPSYSSYSGYIMMPNMNNDPYMSNGSLSPPIPRTSNKVPVVQPSHAVHPLTPLITYSDEHFSPGSHPSHIPSDVNSKQGMSRHPPAPDIPTFYPLSPGGVGQITPPLGWFSHHMIPGPPGPHTTGIPHPAIVTPQVKQEHPHTDSDLMHVKPQHEQRKEQEPKRPHIKKPLNAFMLYMKEMRANVVAECTLKESAAINQILGRRWHALSREEQAKYYELARKERQLHMQLYPGWSARDNYGKKKKRKREKLQESASGGKRSSFPTCKAKAATPGPLLEMEAC

SEQ ID NO: 22687 - protein, 585 aa, Homo sapiens
LHLLLGQTGPFCPDPLSFLGKQTTKSASGVTTVERVSAETRRRTLLCTLGRRAPSRTGVLRAQIPATRGRGVAAGAASSSARRADAPGVASYRSPRRPVPFGLGGGRLRRSPRSGKARRPPGFGRRGSCSGCRPAAPRSPAPLPPAVLLHEPFQLSFPPPPLSYPSVFPAVARVLPQRSGDYRAAGMPQLSGGGGGGGGDPELCATDEMIPFKDEGDPQKEKIFAEISHPEEEGDLADIKSSLVNESEIIPASNGHEVARQAQTSQEPYHDKAREHPDDGKHPDGGLYNKGPSYSSYSGYIMMPNMNNDPYMSNGSLSPPIPRTSNKVPVVQPSHAVHPLTPLITYSDEHFSPGSHPSHIPSDVNSKQGMSRHPPAPDIPTFYPLSPGGVGQITPPLGWQGQPVYPITGGFRQPYPSSLSVDTSMSRFSHHMIPGPPGPHTTGIPHPAIVTPQVKQEHPHTDSDLMHVKPQHEQRKEQEPKRPHIKKPLNAFMLYMKEMRANVVAECTLKESAAINQILGRRWHALSREEQAKYYELARKERQLHMQLYPGWSARDNYGKKKKRKREKLQESASGTGPRMTAAYI

SEQ ID NO: 22688 - protein, 23 aa, Homo sapiens
LVVRKFLTLIFGNPLFLVAPPKP

SEQ ID NO: 22689 - protein, 121 aa, Homo sapiens
LAPRSGAGGGAAEEGPRAGPGPGACGFRKRRARCLAARLAAMSSASGLRRGHPAGGEENMTETDAFYKREMFDPAEKYKMDHRRRGIALIFNHERFFWHLTLPERRGTCADRDNLTRSVNC

SEQ ID NO: 22690 - protein, 20 aa, Homo sapiens
MGKRVWLWMVISCWQVVKLI

SEQ ID NO: 22691 - protein, 23 aa, Homo sapiens
MDTKLEPIEKTKMKETQGVYLER

SEQ ID NO: 22692 - protein, 170 aa, Homo sapiens
LSAAGAADPRAAFGRRRCLVRRGVVLRRLSGAVGVGCGMCSAGELLRGGDGGERDEDGDALAEREAAGTGWDPGASPRRRGQRPKESEQDVEDSQNHTGEPVGDDYKKMGTLFGELNKNLINMGFTRMYFGERIVEPVIVIFFWVMLWFLGLQALGLVAVLCLVIIYVQQ

SEQ ID NO: 22693 - protein, 64 aa, Homo sapiens [sequence omitted]

SEQ ID NO: 22694 - protein, 927 aa, Homo sapiens
MESQEFIVLYTHQKMKKSKVWQDGILKITHLGNKAILYDDKGACLESLFLKCLEVKPGDDLESDRYLITVEEVKVAGAIGIVKQNVNKEAPELNSRTFISSGRSLGCQPSGLKRKFTGFQGPRQVPKKMVIMESGESAASHEAKKTGPTIFSPFCSMPPLFPTVGKKDVNNILADPENIVTYKNRERNAMDFSSVFSPSFQINPEVLCEENYFCSPVNSGNKLSDSLLTNEPVKRDSLASHYSGVSQNIRSKAQILALLKSESSSSCEELNSEMTEHFPQKQPQGSLKIATKPKYLIQQEECAEMKSTENLYYQHQSENTMRNKSRWAMYLSSQSSPIHSSTVDGNDTERKPKAQEDDVNSNLKDLSLQKIIQFVETYAEERKKYNVDQSVGNNDPSWNQEVKLEIPSFNESSSLQVTCSSAENDGILSESDIQEDNKIPFNQNDKGCIKGSVLIKENAQEVNTCGTLEKEYEQSESSLPELKHLQIESSNNSRISDDITDMISESKMDNESLNSIHESLSNVTQPFLEVTFNLNNFETSDTEEESQESNKISQDSESWVKDILVNDGNSCFQKRSENTNCEEIEGEHLPFLTSVSDKPTVTFPVKETLPSQFCDKTYVGFDMGICKTENTGKEIEEYSDTLSNFESFKWTDAVYGDNKEDANKPIQEVRINYDFALPPNKSKGINMNLHIPHIQNQIAENSNLFSEDAQPQPFILGSDLDKNDEHVLPSTSSSDNSVQLLNTNQNHYECIALDKSNTHISNSLFYPLGKKHLISKDTEAHISEPEDLGKIRSPPPDHVEVETAREGKQYWNPRNSSELSGLVNTISILKSLCEHSTALDSLEILKKKNTVFQQGTQQTYEPDSPPEVRKPFITVVSPKSPHLHKDSQQILKEDEVELSEPLQSVQTGSYSVTQTRVQWHSHSSLQP

SEQ ID NO: 22695 - protein, 20 aa, Homo sapiens
MYRLSNLLLLYHFPFQMSGL

SEQ ID NO: 22696 - protein, 35 aa, Homo sapiens
MTTLNWFVFGWMTISCSLLLEIGSNISDWIMVLVE

SEQ ID NO: 22697 - protein, 52 aa, Homo sapiens
MIIGPKLTALPKRQRSQDIGRSGAALETLKFTSMRGLECSLGRRASTCSPGP

SEQ ID NO: 22698 - protein, 196 aa, Homo sapiens
MLDEVRCTGNELSIEQCPKSSWGEHNCGHKEDAGVSCTPLTDGVIRLAGGKGSHEGRLEVYYRGQWGTVCDDGWTELNTYVVCRQLGFKYGKQASANHFEESTGPIWLDDVSCSGKETRFLQCSRRQWGRHDCSHREDVSIACYPGGEGHRLSLGEDWLQLSSFHHSVAIAPLTTGLEYEVFLIFGFFWGLFPITV

SEQ ID NO: 22699 - protein, 102 aa, Homo sapiens
LKLEDKLRFGYDTNLFTVVQGEMRVPEEALKHEKFTIQLQLSQKSSESELSKSASAKSIDSKVADAATEVQHKTTEALKSEEKAMDISAMPRGTPLYGQPSW

SEQ ID NO: 22700 - protein, 603 aa, Homo sapiens
VDEKRAFKTNGKPEEKNHEAGTSGCSIDAKQVEEQSAAANEEVLFPFCREPSYFEIPTKEFQQPSQITESTIHEIPTKDTPSSHITGAGHASFTIEFDDSTPGKVTIRDHVTKFTSDQRHKSKKSSPGTQDLLGIQTGMMAPENKAADWLAQNNPPQMLWKRTEEDSKSIKSDVPVYLKRLKGNKHDDGTQSDSENAGAHRRCSKCATLEEHLRHHHSEHKKLQKVQATEKHQDQAVTSSVHHRGGHGVPHGKLLKQKSEEPSVSIPFLQTALLRGSGSLGHRPSQEMDKMLKNQATSATSEKDNDDDQSDKGTYTIELENPNSEEVEARKMIHKVFGVDDNQDYNRPVINKKHKDLIKDWALSSAAAVMEERKPLTTSGFHHSEEGTSSSGSKRWVSQWASLAANHTRHDQEERIMEFSAPLPLENETEISESGMTVRSTGSATSLASQGERRRRTLPQLPNEEKSLESHRAKVVTQRSEIGEKQDTELQEKEAPKQVYQKDKQDADRPLSKMNRAVNGETLKTGGDNKTLLHLGSSAPGKEKSETDKETSLVKQTLAKLQQEQREEAQWTPTKLSSKNVSGQTDKCREETFKQESQPPEKN

SEQ ID NO: 22701 - protein, 793 aa, Homo sapiens
VAQSESKRRKAEEILKSQTPKGGDKKESSKSLVRQGSFTIEKPSPNIPIELIPHINKQTSSTPSSLALTSASRIRERSESLDPDSSMDTTLILKDTEAVMAFLEAKLREDNKTDEGPDTPSYKRDNSISPESDVDTASTISLVTGETERKSTQKRKSFTSLYKDRCSTGSPSKDVTKSSSSGAREKMEKKTKSRSTDVGSRADGHKFVQSSGRIRQPSVDLTDDDQTSSVPHSAISDIMSSDQETYSCKPHGRTPLTSADEHVHSKLEGSKVTKSKTSPVVSGSSSKSTTLPRPRPTRTSLLRRARRGEASDSELADADKASVASEVSTTSSTSKPPTGRRNISRIDLLAQPRRTRLGSLSARSDSEATISRSSASSRTAEAIIRSGARLVPSDKFSPRIRANSISRLSDSKVKSMTSAHGSASVNSRWRRFPTGYASTSEDEFGSDHNSPKHTRLCTSPALKTTRLQSAGSAMPTSSSFKHRIKEQEDYIRDWTAHREEIARISQDLALIAREINDVAGEIDSVTSSGTAPSTTVSTAATTPGSAIDTREEVGDLHGEMHKLVDRVFDESLNFQKIPPLVHSKTPEGNNGRSGDPRPQAAEPPDHLTITRRRTWSRDEVMGDNLLLSSVFQFSKKIRQSIDKTAGKIRILFKDKDRNWDDIESKLRAESEVPIVKTSSMEISSILQELKRVEKQLQAINAMIDPDGTLEALNNMGFPSAMLPSPPKQKSSPVNNHHSPGQTPTLGQPEARALHPAAVSAAAEFENAESEADFSIHFNRVNPDGEEEDVTVHK

SEQ ID NO: 22702 - protein, 238 aa, Homo sapiens
MPIVPATQEAEARGSLEPRSLRMQRAMIVPPYSSLDDKLILPDSMKVLPVYMNCLLKNCVLLSRPEISTDERAYQRQLVMTMGVADSQLFFYPQLLPIHTLDVKSTMLPAAVRCSESRLSEEGIFLLANGLHMFLWLGVSSPPELIQGIFNVPSFAHINTDMTLLPEVGNPYSQQLRMIMGIIQQKRPYSMKLTIVKQREQPEMVFRQFLVEDKGLYGGSSYVDFLCCVHKEICQLLN

SEQ ID NO: 22703 - protein, 872 aa, Homo sapiens
LPALGAEPPALGSPRGAGAGTDFFCRIILWNDIFIMSQQGYVATPPYSQPQPGIGLSPPHYGHYGDPSHTASPTGMMKPAGPLGATATRGMLPPGPPPPGPHQFGQNGAHATGHPPQRFPGPPPVNNVASSHAPYQPSAQSSYPGPISTSSVTQLGSQLSAMQINSYGSGMAPPSQGPPGPLSATSLQTPPRPPQPSILQPGSQVLPPPPTTLNGPGASPLPLPMYRPDGLSGPPPPNAQYQPPPLPGQTLGAGYPPQQANSGPQMAGAQLSYPGGFPGGPAQMAGPPQPQKKLDPDSIPSPIQVIENDRASRGGQVYATNTRGQIPPLVTTDCMIQDQGNASPRFIRCTTYCFPCTSDMAKQAQIPLAAVIKPFATIPSNESPLYLVNHGESGPVRCNRCKAYMCPFMQFIEGGRRYQCGFCNCVNDVPPFYFQHLDHIGRRLDHYEKPELSLGSYEYVATLDYCRKSKPPNPPAFIFMIDVSYSNIKNGLVKLICEELKTMLEKIPKEEQEETSAIRVGFITYNKVLHFFNVKSNLAQPQMMVVTDVGEVFVPLLDGFLVNYQESQSVIHNLLDQIPDMFADSNENETVFAPVIQAGMEALKAADCPGKLFIFHSSLPTAEAPGKLKNRDDKKLVNTDKEKILFQPQTNVYDSLAKDCVAHGCSVTLFLFPSQYVDVASLGLVPQLTGGTLYKYNNFQMHLDRQQFLNDLRNDIEKKIGFDAIMRVRTSTGFRATDFFGGILMNNTTDVEMAAIDCDKAVTVEFKHDDKLSEDSGALIQCAVLYTTISGQRRLRIHNLGLNCSSQLADLYKSCETDALINFFAKSAFKAVLHQPLKVIREILVNQTAHMLACYRKNCASPSAASQFTCEK

SEQ ID NO: 22704 - protein, 84 aa, Homo sapiens
LPANIRCFTVSQLLLIPFIFSKGVLKSYSLFRVLVEYQVFRQNFPDCYHDLSSSHCPSNPSIMKLNTITLFKTVFQQLFGLRNP

SEQ ID NO: 22705 - protein, 16 aa, Homo sapiens
LIWGRLGFPCMLFYMV

SEQ ID NO: 22706 - protein, 21 aa, Homo sapiens
MESPFITSPGKERENFLVKKT

SEQ ID NO: 22707 - protein, 50 aa, Homo sapiens [sequence omitted]

SEQ ID NO: 22708 - protein, 54 aa, Homo sapiens
LVNSLYIFLPFKIVLRVSQVWNIIADYKVSNYAFKVLSHQPKENHLWKVWLKHL

SEQ ID NO: 22709 - protein, 37 aa, Homo sapiens
VSYDPITAFQPARLRTQRPTSHHSHQSQNPLMLGNGK

SEQ ID NO: 22710 - protein, 34 aa, Homo sapiens
LQKESVPRCRLLWAAAVGQRVLAVLAGRVTHARQ

SEQ ID NO: 22711 - protein, 63 aa, Homo sapiens
LTYHGVNIMNLLHIVQKEPGGFFVNIVMYIPLKIVTVDGKTCAIKLDAFLNQMFWSSSLTQYR

SEQ ID NO: 22712 - protein, 113 aa, Homo sapiens
VLLEPLWLLSAEWKRVLLFVSLAMALQLSREQGITLRGSAEIVAEFFSFGINSILYQRGIYPSETFTRVQKYGLTLLVTTDLELIKYLNNVVEQLKGILIIGNNLSLADFLAS

SEQ ID NO: 22713 - protein, 24 aa, Homo sapiens
VLCLQFFLQFSIEVLCLSYEMAVI

SEQ ID NO: 22714 - protein, 123 aa, Homo sapiens
LRKVFDKYMTISGFQIEETIDRETSGNLEQLLLAVVKSIRSIPAYLAETLYYAMKGAGTDDHTLIRVMVSRSEIDLFNIRKEFRKNFATSLYSMIKVVEPFFKLRLGIQSRLVCCMKDKDKRT

SEQ ID NO: 22715 - protein, 72 aa, Homo sapiens
LLLSFLNLLSVSTPVLWTPGTAQIGEGVENSWGDLEDSEKEDDEGGGDQAIILDGIKMDTGVEVSDIGSQGR

SEQ ID NO: 22716 - protein, 19 aa, Homo sapiens
LAFYLVLFLVLHWWSVFCE

SEQ ID NO: 22717 - protein, 151 aa, Homo sapiens [sequence omitted]

SEQ ID NO: 22718 - protein, 20 aa, Homo sapiens
LGRRPAGPKPLSLLFLSGAA

SEQ ID NO: 22719 - protein, 81 aa, Homo sapiens
LGSLALAFLVLLSQPESRLAGGKPGTPAPCRRGERSEIMIHGDGLQSRKQKKTHGTSTTFIIRGNRKNFPRPTKIIQIYYR

SEQ ID NO: 22720 - protein, 318 aa, Homo sapiens
VEMRQPLSWGRWRAMLARTYGPGPSAGYRWASGAQGYVRNPPVGACDLQGELDRFGGISVRLARLDALDRLDAAAFQKGLQAAVQQWRSEGRTAVWLHIPILQSRFIAPAASLGFCFHHAESDSSTLTLWLREGPSRLPGYASHQVGVAGAVFDESTRKILVVQDRNKLKNMWKFPGGLSEPEEDIGDTAVREVFEETGIKSEFRSVLSIRQQHTNPGAFGKSDMYIICRLKPYSFTINFCQEECLRCEWMDLNDLAKTENTTPITSRVARLLLYGYREGFDKIDLTVEELPAVYTGLFYKLYHKELPENYKTMKGID

SEQ ID NO: 22721 - protein, 11 aa, Homo sapiens
LGTVGAGKLVF

SEQ ID NO: 22722 - protein, 27 aa, Homo sapiens
MELCDSLKFRKSVAELWNQAFLPQFNN

SEQ ID NO: 22723 - protein, 28 aa, Homo sapiens
LYKLKDWVFSLVFHMYCLISVLETSTIT

SEQ ID NO: 22724 - protein, 8 aa, Homo sapiens
MHIMNALN

SEQ ID NO: 22725 - protein, 11 aa, Homo sapiens
MAALASYSCEI

SEQ ID NO: 22726 - protein, 26 aa, Homo sapiens
MYLLLKCTDLLKKHQGTPVSHTVFLF

SEQ ID NO: 22727 - protein, 60 aa, Homo sapiens
LSDNSVEFGRMEEKLKWRDGEREEKMKKDACKNTAVGPEMRILGGLKWMPLTAPFEFLFI

SEQ ID NO: 22728 - protein, 27 aa, Homo sapiens
LMVLLLCSGVLGSNLMPKAACCFPGRS

SEQ ID NO: 22729 - protein, 49 aa, Homo sapiens
LEGKRDRLEGKRLGKKTAEKKLLITLTERQVTVEMRTEGTKTLKDKKYK

SEQ ID NO: 22730 - protein, 8 aa, Homo sapiens
LLIAVLCY

SEQ ID NO: 22731 - protein, 220 aa, Homo sapiens
LLPGISPEPAPREKEPGSIRPHCPDSRLDSVPSAPAGLRSSGARGAVVAAAPGMFHSPRRLCSALLQRDAPGLRRLPAPGLRRPLSPPAAVPRPASPRLLAAASAASGAARSCSRTVCSMGTGTSRLYSALAKTLNSSAASQHPEYLVSPDPEHLEPIDPKELLEECRAVLHTRPPRFQRDFVDLRTDCPSTHPPIRVMQWNILAQGMLDAFVPLQSSLL

SEQ ID NO: 22732 - protein, 484 aa, Homo sapiens
LLPGISPEPAPREKEPGSIRPHCPDSRLDSVPSAPAGLRSSGARGAVVAAAPGMFHSPRRLCSALLQRDAPGLRRLPAPGLRRPLSPPAAVPRPASPRLLAAASAASGAARSCSRTVCSMGTGTSRLYSALAKTLNSSAASQHPEYLVSPDPEHLEPIDPKELLEECRAVLHTRPPRFQRDFVDLRTDCPSTHPPIRVMQWNILAQALGEGKDNFVQCPVEALKWEERKCLILEEILAYQPDILCLQEVDHYFDTFQPLLSRLGYQGTFFPKPWSPCLDVEHNNGPDGCALFFLQNRFKLVNSANIRLTAMTLKTNQVAIAQTLECKESGRQFCIAVTHLKARTGWERFRSAQGCDLLQNLQNITQGAKIPLIVCGDFNAEPTEEVYKHFASSSLNLNSAYKLLSADGQSEPPYTTWKIRTSGECRHTLDYIWYSKHALNVRSALDLLTEEQIGPNRLPSFNYPSDHLSLVCDFSFTEESDGLS

SEQ ID NO: 22733 - protein, 127 aa, Homo sapiens
VAAQDHASTFRAPPGTAGEGPGGADDEGPVRRQGKVTVKYDRKELRKRLNLEEWILEQLTRLYDCQEEEIPELEIDVDELLDMESDDARAATVKELLVDCYKPTEAFISGLLDKIRGMQKLSTPQKK

SEQ ID NO: 22734 - protein, 30 aa, Homo sapiens
MLRLLNIQTAFWLIIFRRLDFWISTPLHLY

SEQ ID NO: 22735 - protein, 14 aa, Homo sapiens
LTDEMGLAVVSVIW

SEQ ID NO: 22736 - protein, 877 aa, Homo sapiens
VVAGAAGAAGTMPAVSLPPKENALFKRILRCYEHKQYRNGLKFCKQILSNPKFAEHGETLAMKGLTLNCLGKKEEAYELVRRGLRNDLKSHVCWHVYGLLQRSDKKYDEAIKCYRNALKWDKDNLQILRDLSLLQIQMRDLEGYRETRYQLLQLRPAQRASWIGYAIAYHLLEDYEMAAKILEEFRKTQQTSPDKVDYEYSELLLYQNQVLREAGLYREALEHLCTYEKQICDKLAVEETKGELLLQLCRLEDAADVYRGLQERNPENWAYYKGLEKALKPANMLERLKIYEEAWTKYPRGLVPRRLPLNFLSGEKFKECLDKFLRMNFSKGCPPVFNTLRSLYKDKEKVAIIEELVVGYETSLKSCRLFNPNDDGKEEPPTTLLWVQYYLAQHYDKIGQPSIALEYINTAIESTPTLIELFLVKAKIYKHAGNIKEAARWMDEAQALDTADRFINSKCAKYMLKANLIKEAEEMCSKFTREGTSAVENLNEMQCMWFQTECAQAYKAMNKFGEALKKCHEIERHFIEITDDQFDFHTYCMRKITLRSYVDLLKLEDVLRQHPFYFKAARIAIEIYLKLHDNPLTDENKEHEADTANMSDKELKKLRNKQRRAQKKAQIEEEKKNAEKEKQQRNQKKKKDDDDEEIGGPKEELIPEKLAKVETPLEEAIKFLTPLKNLVKNKIETHLFAFEIYFRKEKFLLMLQSVKRAFAIDSSHPWLHECMIRLFNTAVCESKDLSDTVRTVLKQEMNRLFGATNPKNFNETFLKRNSDSLPHRLSAAKMVYYLDPSSQKRAIELATTLDESLTNRNLQTCMEVLEALYDGSLGDCKEAAEIYRANCHKLFPYALAFMPPGYEEDMKITVNGDSSAEAEELANEI

SEQ ID NO: 22737 - protein, 876 aa, Homo sapiens
VVAGAAGAAGTMPAVSLPPKENALFKRILRCYEHKQYRNGLKFCKQILSNPKFAEHGETLAMKGLTLNCLGKKEEAYELVRRGLRNDLKSHVCWHVYGLLQRSDKKYDEAIKCYRNALKWDKDNLQILRDLSLLQIQMRDLEGYRETRYQLLQLRPAQRASWIGYAIAYHLLEDYEMAAKILEEFRKTQQTSPDKVDYEYSELLLYQNQVLREAGLYREALEHLCTYEKQICDKLAVEETKGELLLQLCRLEDAADVYRGLQERNPENWAYYKGLEKALKPANMLERLKIYEEAWTKYPRGLVPRRLPLNFLSGEKFKECLDKFLRMNFSKGCPPVFNTLRSLYKDKEKVAIIEELVVGYETSLKSCRLFNPNDDGKEEPPTTLLWVQYYLAQHYDKIGQPSIALEYINTAIESTPTLIELFLVKAKIYKHAGNIKEAARWMDEAQALDTADRFINSKCAKYMLKANLIKEAEEMCSKFTREGTSAVENLNEMQCMWFQTECAQAYKAMNKFGEALKKCHEIERHFIEITDDQFDFHTYCMRKITLRSYVDLLKLEDVLRQHPFYFKAARIAIEIYLKLHDNPLTDENKEHEADTANMSDKELKKLRNKQRRAQKKAQIEEEKKNAEKEKQQRNQKKKKDDDDEEIGGPKEELIPEKLAKVETPLEEAIKFLTPLKNLVKNKIETHLFAFEIYFRKEKFLLMLQSVKRAFAIDSSHPWLHECMIRLFNTVCESKDLSDTVRTVLKQEMNRLFGATNPKNFNETFLKRNSDSLPHRLSAAKMVYYLDPSSQKRAIELATTLDESLTNRNLQTCMEVLEALYDGSLGDCKEAAEIYRANCHKLFPYALAFMPPGYEEDMKITVNGDSSAEAEELANEI

SEQ ID NO: 22738 - protein, 371 aa, Homo sapiens
VSPAAMDSDDEMVEEAVEGHLDDDGLPHGFCTVTYSSTDRFEGNFVHGEKNGRGKFFFFDGSTLEGYYVDDALQGQGVYTYEDGGVLQGTYVDGELNGPAQEYDTDGRLIFKGQYKDNIRHGVCWIYYPDGGSLVGEVNEDGEMTGEKIAYVYPDERTALYGKFIDGEMIEGKLATLMSTEEGRPHFELMPGNSVYHFDKSTSSCISTNALLPDPYESERVYVAESLISSAGEGLFSKVAVGPNTVMSFYNGVRITHQEVDSRDWALNGNTLSLDEETVIDVPEPYNHVSKYCASLGHKANHSFTPNCIYDMFVHPRFGPIKCIRTLRAVEADEELTVAYGYDHSPPGKSGPEAPEWYQVELKAFQATQQK

SEQ ID NO: 22739 - protein, 56 aa, Homo sapiens
VRKMAGNSILLAAVSILSACQQSYFALQVGKARLKYKVTPPAVTGSPEFERVFRAQ

SEQ ID NO: 22740 - protein, 19 aa, Homo sapiens
LTPFCFMELLLIIFSLKLG

SEQ ID NO: 22741 - protein, 129 aa, Homo sapiens
MAYICLIIFLKLFRYFSENYTSEAHQILSRSNHPKLGYSYAIVGINLTEMAYSLLKSEALKFHLYNLVPGIPTMEHFHQFYCYLVYEFDKFWFEEEPESIMYFNLYREKFHEKIKGLLLDCNVALTLKV

SEQ ID NO: 22742 - protein, 44 aa, Homo sapiens [sequence omitted]

SEQ ID NO: 22743 - protein, 146 aa, Homo sapiens
MRHVSISYDIPPTPGNTYQIPRTFPEGTLGQTSKLDTIPDIPPPRPPKPHPAHDRSPVETCSIPRTASDTDSSYCIPTAGMSPSRSNTISTVDLNKLRKDASSQDCYDIPRAFPSDRSSSLEGFHNHFVSIIDLGIIKCISLSKSS

SEQ ID NO: 22744 - protein, 100 aa, Homo sapiens
MYGKIIFVLLLSEIVSISALSTTEVAMHTSTSSSVTKSYISSQTNDTHKRDTYAATPRAHEVSEISVRTVYPPEEETGMFLVLNSCSGVIVVIELYLHEL

SEQ ID NO: 22745 - protein, 211 aa, Homo sapiens
LAKPAAGGAENLSFGKQPGLETNILKMTTPNKTPPGADPKQLERTGTVREIGSQAVWSLSSCKPGFGVDQLRDDNLETYWQSDGSQPHLVNIQFRRKTTVKTLCIYADYKSDESYTPSKISVRVGNNFHNLQEIRQLELVEPSGWIHVPLTDNHKKPTRTFMIQIAVLANHQNGRDTHMRQIKIYTPVEESSIGKFPRCTTIDFMMYRSIR

SEQ ID NO: 22746 - protein, 624 aa, Homo sapiens
LIWPLCSPPQGDRFLQKSWIFFRPVMADKLTRIAIVNHDKCKPKKCRQECKKSCPVVRMGKLCIEVTPQSKIAWISETLCIGCGICIKKCPFGALSIVNLPSNLEKETTHRYCANAFKLHRLPIPRPGEVLGLVGTNGIGKSTALKILAGKQKPNLGKYDDPPDWQEILTYFRGSELQNYFTKILEDDLKAIIKPQYVDQIPKAAKGTVGSILDRKDETKTQAIVCQQLDLTHLKERNVEDLSGGELQRFACAVVCIQKADIFMFDEPSSYLDVKQRLKAAITIRSLINPDRYIIVVEHDLSVLDYLSDFICCLYGVPSAYGVVTMPFSVREGINIFLDGYVPTENLRFRDASLVFKVAETANEEEVKKMCMYKYPGMKKKMGEFELAIVAGEFTDSEIMVMLGENGTGKTTFIRMLAGRLKPDEGGEVPVLNVSYKPQKISPKSTGSVRQLLHEKIRDAYTHPQFVTDVMKPLQIENIIDQEVQTLSGGELQRVALALCLGKPADVYLIDEPSAYLDSEQRLMAARVVKRFILHAKKTAFVVEHDFIMATYLADRVIVFDGVPSKNTVANSPQTLLAGMNKFLSQLEITFRRDPNNYRPRINKLNSIKDVEQKKSGNYFFLDD

SEQ ID NO: 22747 - protein, 236 aa, Homo sapiens
MAEPSAATQSPSISSSSSGAETSASGGSGSPGACPALGTKSCSSSCAVHDLLFWRDVKKTGFVFATTLIMLLSLAAFSVISVVSYLILALLSVTISFRIYKSVIQAVQKSEEGHPIKAYLDVDITLSSEAFHNYMNAAVVHINRALKLIILLFLVEDLVDSLKQAVFMWLMTYVGAFFNGITLLILAELLIFSVPIVYEKYKTQIDHYVGIARHQTKSIVEKIQAKLPGIAKKKAE

SEQ ID NO: 22748 - protein, 45 aa, Homo sapiens
LPDLTATVAELLFILKSMQFLNTRCKITSKGAFLLKIEAGLRTIS

SEQ ID NO: 22749 - protein, 13 aa, Homo sapiens
MVISTLLDFKLRS

SEQ ID NO: 22750 - protein, 32 aa, Homo sapiens
MHTLIYCVILFFYDCDMPLPYQLSRGHRSNRC

SEQ ID NO: 22751 - protein, 70 aa, Homo sapiens
VRLSCHWLLLLPTLLKAAGATPRSLLYNRQFDLLCCMSGGTKESVETLQGLGDRSLKRKKAKQINKTHPP

SEQ ID NO: 22752 - protein, 42 aa, Homo sapiens
MRGGEERMLPALLANSTLRGYICRSSSSRRHSAGPGGGSSCS

SEQ ID NO: 22753 - protein, 8 aa, Homo sapiens
LLIGLAFP

SEQ ID NO: 22754 - protein, 368 aa, Homo sapiens
LMIKVLIIFFLFACSLDVKTCNEVDLENSADWEVKTITSALKQYLRSLPEPLMTYELHGDFIVPAKSGSPESRVNAIHFLVHKLPEKNKEMLDILVKHLTNVSNHSKQNLMTVANLGVVFGPTLMRPQEETVAALMDLKFQNIVVEILIENHEKIFRTPPDTTFPEPTCLSASPPNAPPRQSKRQGQRTKRPVAVYNLCLELEDGDNPYPSKEDTPTSSLDSLSSPSPVTTAVPGPPGPDKNHLLADGGSFGDWASTIPGQTRSSMVQWLNPQSPTTTSSNSAVTPLSPGSSPFPFSPPATVADKPPESIRSRKARAVYPCEAEHSSELSFEIGAIFEDVQTSREPGWLEGTLNGKRGLIPQNYVKLL

SEQ ID NO: 22755 - protein, 65 aa, Homo sapiens
LGARALLPRALPLQGERHSLAWMWLDLGGLRSRGFVAVASAATGRRRETDPGRGSDGDQRLPQSP

SEQ ID NO: 22756 - protein, 30 aa, Homo sapiens
LSRKPQCYKMSSAKTKIKKQPQTNTQRFSH

SEQ ID NO: 22757 - protein, 21 aa, Homo sapiens
MLLLLQGTLLLLQLRLTFQKK

SEQ ID NO: 22758 - protein, 7 aa, Homo sapiens
MMFWTEF

SEQ ID NO: 22759 - protein, 65 aa, Homo sapiens
LEGGGSIHLLNKYILSAFCMLGTLLGVEDTAESTNNNSSPRGAYLFHVGKTDGKCIRTIYGLLYD

SEQ ID NO: 22760 - protein, 533 aa, Homo sapiens
LLMLFFKCISLLLIWLIPGQSTTGLVPCSATPTTFGDLRAANGQGQQRRRITSVQPPTGLQEWLKMFQSWSGPEKLLALDELIDSCEPTQVKHMMQVIEPQFQRDFISLLPKELALYVLSFLEPKDLLQAAQTCRYWRILAEDNLLWREKCKEEGIDEPLHIKRRKVIKPGFIHSPWKSAYIRQHRIDTNWRRGELKSPKVLKGHDDHVITCLQFCGNRIVSGSDDNTLKVWSAVTGKCLRTLVGHTGGVWSSQMRDNIIISGSTDRTLKVWNAETGECIHTLYGHTSTVRCMHLHEKRVVSGSRDATLRVWDIETGQCLHVLMGHVAAVRCVQYDGRRVVSGAYDFMVKVWDPETETCLHTLQGHTNRVYSLQFDGIHVVSGSLDTSIRVWDVETGNCIHTLTGHQSLTSGMELKDNILVSGNADSTVKIWDIKTGQCLQTLQGPNKHQSAVTCLQFNKNFVITSSDDGTVKLWDLKTGEFIRNLVTLESGGSGGVVWRIRASNTKLVCAVGSRNGTEETKLLVLDFDVDMK

SEQ ID NO: 22761 - protein, 23 aa, Homo sapiens
MKAITSWLCLTTAITLSWDCIEL

SEQ ID NO: 22762 - protein, 12 aa, Homo sapiens
MTFYVIFLTSLC

SEQ ID NO: 22763 - protein, 789 aa, Homo sapiens
LKHWTMPHTLWMVWVLGVIISLSKEESSNQASLSCDRNGICKGSSGSLNSIPSGLTEAVKSLDLSNNRITYISNSDLQRCVNLQALVLTSNGINTIEEDSFSSLGSLEHLDLSYNYLSNLSSSWFKPLSSLTFLNLLGNPYKTLGETSLFSHLTKLQILRVGNMDTFTKIQRKDFAGLTFLEELEIDASDLQSYEPKSLKSIQNVSHLILHMKQHILLLEIFVDVTSSVECLELRDTDLDTFHFSELSTGETNSLIKKFTFRNVKITDESLFQVMKLLNQISGLLELEFDDCTLNGVGNFRASDNDRVIDPGKVETLTIRRLHIPRFYLFYDLSTLYSLTERVKRITVENSKVFLVPCLLSQHLKSLEYLDLSENLMVEEYLKNSACEDAWPSLQTLILRQNHLASLEKTGETLLTLKNLTNIDISKNSFHSMPETCQWPEKMKYLNLSSTRIHSVTGCIPKTLEILDVSNNNLNLFSLNLPQLKELYISRNKLMTLPDASLLPMLLVLKISRNAITTFSKEQLDSFHTLKTLEAGGNNFICSCEFLSFTQEQQALAKVLIDWPANYLCDSPSHVRGQQVQDVRLSVSECHRTALVSGMCCALFLLILLTGVLCHRFHGLWYMKMMWAWLQAKRKPRKAPSRNICYDAFVSYSERDAYWVENLMVQELENFNPPFKLCLHKRDFIPGKWIIDNIIDSIEKSHKTVFVLSENFVKSEWCKYELDFSHFRLFDENNDAAILILLEPIEKKAIPQRFCKLRKIMNTKTYLEWPMDEAQREGFWVNLRAAIKS

SEQ ID NO: 22764 - protein, 304 aa, Homo sapiens
LPPRGRAPTMLQGPGSLLLLFLASHCCLGSARGLFLFGQPDFSYKRSNCKPIPANLQLCHGIEYQNMRLPNLLGHETMKEVLEQAGAWIPLVMKQCHPDTKKFLCSLFAPVCLDDLDETIQPCHSLCVQVKDRCAPVMSAFGFPWPDMLECDRFPQDNDLCIPLASSDHLLPATEEAPKVCEACKNKNDDDNDIMETLCKNDFALKIKVKEITYINRDTKIILETKSKTIYKLNGVSERDLKKSVLWLKDSLQCTCEEMNDINAPYLVMGQKQGGELVITSVKRWQKGQREFKRISRSIRKLQC

SEQ ID NO: 22765 - protein, 2916 aa, Homo sapiens
MRLDEITKSENEDGEKKMFTQQFESTDACVYEVYVKINSIVKSQSQCGLKRGSPETELWGAIVFRSQEENAKPVKETEVTASDADSGLYGFIEYSLYDGFLSYEAPQAFRIDPHDGQICVSQDIDRERDPATYDLLVEAKDGDEQRMTHLALVKGGLSAQAFVRVDLEDVNDNHPVFNPSTYVTSISDETQPGTEIINVLATDQDSGIYGTVAYELIPGNVSSLFTIDSTTGLYSPEVEILSAVNFSADKEVMNSLEMFLPLLRHFKKVERDEEAAEKKFEASRGWFMRFKGRRHLHYLKVQDEAASADGEAAARYVANLAKILGEGIIYLTLPLSHLESTTLSLMVSAQDGGGLTAVINADVTIHIFQTTLAPAEFERPKYTFLVYEDVPEDSPIGTVKAREPLNSSEPIFYRISSGDLGGKFSIHPRLGTIRTRKPLDHETQPVVVLTVQAQLGSAPACSSTEVNITVMDVNDNHPAFLRTSDEIRISQTTPPGTALYLARAEDRDSGRNGLIRYSIASPQPGVFAIDRALGVLFLNGSLGAGEQRELTLTLRAEDQGVHPQAALLVLTVVIEKREHSPSWTFEHLVYQVEVSESLSPMTQMLQTQAHPLGPQRAASPLRYSLEPSVDSAMFGIRPYTGWIYLRRQFDYESTQTYNFRVFAWIPEDGFLQNVSTTVIVRVWDENDNSPTFLHDVLFLKVEESPVPQGVIGKITAIDMDSGKNGQLLYFLLSDGKFFKMNPNTGPAGTIYVITWADGAAAFSGTDFAFSSDELQAFVLKSLFCELGEGELINWVALDREHRGHHEMTVLVTDRGSPPRNATMAVYVSVTDINDNRPFFPQCLPGKELHVKVLEGQPVNMLVTTVFAKDPDEGNNAEVTYSVSSEDSSDHFKIDANNGEIRTTTILSYDYRPSYRMSVIATDQGVPPLQGQAVVNIQVIPLSKGRAIMSQNIRHLIIPENLKPTKIMSLIKSSDHLQQHYNGKLHFSIVADDKDGHFEIDSSTGDLFLSKELDYETTSHYLFRVITTDHSKNLSLSSTVFLSIDVEDQNDHSPSFQDELIVISVEENVPIGTLVYVFNAKDDDGSFLNSRIQYYIESHNPGTNPFLIHPSFGTLVTVSRLDRESIPTVILTVTASDQAVNVTDRRLRSLTAQIVILDVNDHNPTFISFPNAHVKEDVTVGSLVHHITAHDPDEGRNGKVTYSILSGNENMTFMLDESSGLLTTTCPLDYEMKTQHILTVLALDDGTPALSSSQTLTVTVLDVNDEAPVFKQHLYEASVKENQNPGEFVTRVEALDRDSGVNSKLQFEIMPGASFELFEINSDTGEVVTTTILDREIQEVFTLRVLVRDGGFPSLSSTTTILCTVEDENDHAPEFIVSSYDIEVLENQEPEVVYTVLASDMDAGNNRAVEYHIIDGNTDECFTINEMSGELSTTRALDREQISNFTLVILCSDLGDPPRSSVIHLQVRVLDANDHSPSFPTLYYQSSVREDAEVGTVVLVLSAVDKDEGLNGQTEYFLTDEASGAFTIDPMSGTLKTSNTLDREARSQHTFSAVARDCSIQGSRSTTVIIKVYVTDVNDNDPVLEQNPFDVFLSPESPTNQTTVIVRADDLDLGPNGTVVFSFAETQSMFSIDKYTGEIQFQQNPSSEYFPIWLQLKVTDQGIPARTTTGLLVIHMEGEDVKISFSHHLYKGLVTENCEAGTSIVTVKAFAPDSIQDSMKYSIFSGNEDGVLSLCSKSGQLTVKEPKFLDFEVRNEVQLIVLAESSGHRAYCKVAVLIQDENDNSPCFEQSIYQASVSESQLYNAHVIQVFATDLDSGLNGLIEYSILSGNQEEAFQIDALSGVITTKAILDYELTSSYSLIVQATDKGMPRLSNTTVIKVQVTDINDNAPAFLPSEAVEITEDSLPGVIVTHVSVHDVDLNSAFIFSFAKESNPGTKFAIDQNTGVVVLVKTLDFEEMTEYELLIQISDSVHYTEGALVVRVLDVNDNPPVFSQDFYQVTVPESIPVGYSVLTLSATDLESNENISYRILSSSKEFSIDPKNGTIFTISPVLLLDTISTTQFLVEASDGGNPDLRALTLVEIGIEDMNNYAPEFTVKSYNLSLSEDALVGSTLVTFSNIDHDWTRENTYVEYSIISGNSQNNFHVETKFFHSEYPYKQVGYLVLLHSLDREASASHELVILASDSGCPPLSSTAVISIQVLDVNDNPPNFSSLSYHTHVKESTPLGSHITVVSANDRDTGSHAEIIYNIISGNEKGHFYLEENTGVLYLIKPLDYEKMTKFTLTVQASDAEKKHFSFAVVFVSVLDDNDHAPQFMFSSFSCIVPENLPISSTICSINALDFDAGPYGELTYSIVSPCFLTHGMSYDHDLFLIDPLTGDIHAKQILDYENGNKYCLTVQAKDKGDATASLVVWVDIEGIDEFEPIFTQDQYFFTLPEKNKDRQLIGRVEASDADAGIDGVILYSLGTSSPFFSVNKTNGNIYLIRALPLIKSQLNKEDTLEMKIIAHSPKSDSKFASCTVFVNVSFSSEGTPLAVFASSFSISLVVSFLVFLILICILIVMILRHKQKDTINNYEEKKTSSLDADLRVTRDASVLKAFQKTDDCSNEVVPVDATPEWLSLISIMEKDIVNLYRHSNSSGHCSVEGETAEDKEIQRINEHPYRKCSDSALSDHESRVPDSGIPRDSDQLSCLSGETDVMVTAETAEASQTFGEGDQGEGCSTTCAQNNVLPQTVQKREAKESILADVRKESVFISGDQEVRCAALSTQTTSDHDGKDNYHWNYLLSWEPKFQPLASVFNDIAKLKDEHLHMPGIPKEKKSFVFPPPLITAVAQPGIKAVPPRMPAVNLGQVPPKHPRSPIPYHLGSLPEGMTPNFSPSLSLLTMQPPALSPLLREGELLGTHISGTCHELKAEDEVQI

SEQ ID NO: 22766 - protein, 16 aa, Homo sapiens
LAFMRISSHFVLWLGI

SEQ ID NO: 22767 - protein, 104 aa, Homo sapiens
MNSIVMETGNTKNSALMAKKAPTMPKPQWHPPWKLYRVISGHLGWVRCIAVEPGNQWFVTGSADRTIKVIMKEEKINMTLCLSCKFNQLLFPVAGIAIAVPLLF

SEQ ID NO: 22768 - protein, 8 aa, Homo sapiens
MYFILVWC

SEQ ID NO: 22769 - protein, 57 aa, Homo sapiens
MSLFGLLLLTSALAGQRQGTQAESNLSSKFQFSSNKEQNDENAYCGMIKFWDGASEL

SEQ ID NO: 22770 - protein, 23 aa, Homo sapiens
MHHISRSQLQTLNSVQHVDAAEK

SEQ ID NO: 22771 - protein, 24 aa, Homo sapiens
LYLMLLLVFCVVCQRLSQLILYHI

SEQ ID NO: 22772 - protein, 38 aa, Homo sapiens
LGLGVPYLSLVWYMTRKPRLAVASSMAPAQSEKEVGTP

SEQ ID NO: 22773 - protein, 88 aa, Homo sapiens
MGLLLPFFLSPLHVKYCEEIALALFRLCCLKCTVQQSSSSHCCCLPHHTVSFQIPRSSQQDDSLWLHFSMPGRIFFNLPFRFQSSPST

SEQ ID NO: 22774 - protein, 18 aa, Homo sapiens
LLGVSSPKNIFLALSHYK

SEQ ID NO: 22775 - protein, 193 aa, Homo sapiens
LTKDIHLLGTFDLTGIPPAPRGVPQIEVTFEIDVNGILRVTAEDKGTGNKNKITITNDQNHLTPEEIKRMVNDAEKFAEEDTKLKECIDTTNELESYGYSLKNQIGDKEKLGGKLSSEDKETMEKAVEEKIEWLESHQAADIEDFEANKKELEEIVQPLISKLYGSASPLPATKRIRQKKMSCRHRSATAVIL

SEQ ID NO: 22776 - protein, 36 aa, Homo sapiens
MPIQKDDEVQVVRGHYKGQQLGKVVQVYRKEICHLH

SEQ ID NO: 22777 - protein, 48 aa, Homo sapiens
VPASAAGMVLAVLVGACVLKPERSHNGDAAAASRMHKAGSSEASRFKR

SEQ ID NO: 22778 - protein, 116 aa, Homo sapiens [sequence omitted]

SEQ ID NO: 22779 - protein, 31 aa, Homo sapiens
MKSKSVQFLLLCKFPLLRFDLLFWTMKMETP

SEQ ID NO: 22780 - protein, 399 aa, Homo sapiens
VLAHNKMLKVSAVLCVCAAAWCSQSLAAAAAVAAAGGRSDGGNFLDDKQWLTTISQYDKEVGQWNKFRDDDYFRTWSPGKPFDQALDPAKDPCLKMKCSRHKVCIAQDSQTAVCISHRRLTHRMKEAGVDHRQWRGPILSTCKQCPVVYPSPVCGSDGHTYSFQCKLEYQACVLGKQISVKCEGHCPCPSDKPTSTSRNVKRGFDTSILPICKDSLGWMFNRLDTNYDLLLDQSELRSIYLDKNEQCTKAFFNSCDTYKDSLISNNEWCYCFQRQQDPPCQTELSNIQKRQGVKKLLGQYIPLCDEDGYYKPTQCHGSVGQCWCVDRYGNEVMGSRINGVADCAIDFEISGDFASGDFHEWTDDEDDEDDIMNDEDEIEDDDEDEGDDDDGGDDHDVYI

SEQ ID NO: 22781 - protein, 344 aa, Homo sapiens
VLAHNKMLKVSAVLCVCAAAWCSQSLAAAAAVAAAGGRSDGGNFLDDKQWLTTISQYDKEVGQWNKFRDCKLEYQACVLGKQISVKCEGHCPCPSDKPTSTSRNVKRACSDLEFREVANRLRDWFKALHESGSQNKKTKTLLRPERSRFDTSILPICKDSLGWMFNRLDTNYDLLLDQSELRSIYLDKNEQCTKAFFNSCDTYKDSLISNNEWCYCFQRQQDPPCQTELSNIQKRQGVKKLLGQYIPLCDEDGYYKPTQCHGSVGQCWCVDRYGNEVMGSRINGVADCAIDFEISGDFASGDFHEWTDDEDDEDDIMNDEDEIEDDDEDEGDDDDGGDDHDVYI

SEQ ID NO: 22782 - protein, 440 aa, Homo sapiens
LGSSERKMLKVSAVLCVCAAAWCSQSLAAAAAVAAAGGRSDGGNFLDDKQWLTTISQYDKEVGQWNKFRDDDYFRTWSPGKPFDQALDPAKDPCLKMKCSRHKVCIAQDSQTAVCISHRRLTHRMKEAGVDHRQWRGPILSTCKQCPVVYPSPVCGSDGHTYSFQCKLEYQACVLGKQISVKCEGHCPCPSDKPTSTSRNVKRACSDLEFREVANRLRDWFKALHESGSQNKKTKTLLRPERSRFDTSILPICKDSLGWMFNRLDTNYDLLLDQSELRSIYLDKNEQCTKAFFNSCDTYKDSLISNNEWCYCFQRQQDPPCQTELSNIQKRQGVKKLLGQYIPLCDEDGYYKPTQCHGSVGQCWCVDRYGNEVMGSRINGVADCAIDFEISGDFASGDFHEWTDDEDDEDDIMNDEDEIEDDDEDEGDDDDGGDDHDVYI

SEQ ID NO: 22783 - protein, 443 aa, Homo sapiens
LGSSERKMLKVSAVLCVCAAAWCSQSLAAAAAVAAAGGRSDGGNFLDDKQWLTTISQYDKEVGQWNKFRDEVEDDYFRTWSPGKPFDQALDPAKDPCLKMKCSRHKVCIAQDSQTAVCISHRRLTHRMKEAGVDHRQWRGPILSTCKQCPVVYPSPVCGSDGHTYSFQCKLEYQACVLGKQISVKCEGHCPCPSDKPTSTSRNVKRACSDLEFREVANRLRDWFKALHESGSQNKKTKTLLRPERSRFDTSILPICKDSLGWMFNRLDTNYDLLLDQSELRSIYLDKNEQCTKAFFNSCDTYKDSLISNNEWCYCFQRQQDPPCQTELSNIQKRQGVKKLLGQYIPLCDEDGYYKPTQCHGSVGQCWCVDRYGNEVMGSRINGVADCAIDFEISGDFASGDFHEWTDDEDDEDDIMNDEDEIEDDDEDEGDDDDGGDDHDVYI

SEQ ID NO: 22784 - protein, 77 aa, Homo sapiens
VLAHNKMLKVSAVLCVCAAAWCSQSLAAAAAVAAAGGRSDGGNFLDDKQWLTTISQYDKEVGQWNKFRDDERSRSRP

SEQ ID NO: 22785 - protein, 81 aa, Homo sapiens
VCMLKVSAVLCVCAAAWCSQSLAAAAAVAAAGGRSDGGNFLDDKQWLTTISQYDKEVGQWNKFRDDDYFRTWSPGKPFDQG

SEQ ID NO: 22786 - protein, 95 aa, Homo sapiens
VLAHNKMLKVSAVLCVCAAAWCSQSLAAAAAVAAAGGRSDGGNFLDDKQWLTTISQYDKEVGQWNKFRDDDYFRTWSPGKPFDQALSFHDLGIFV

SEQ ID NO: 22787 - protein, 97 aa, Homo sapiens
MGSKDHAVFFREMTQLILNEMPKAGYSSILNDFVESNFFVIDGDSLLVTCLGVKSFKWGQNLHFFYLVECYLVDLLSNGGQFTIVFFKMEFRSFCTG

SEQ ID NO: 22788 - protein, 32 aa, Homo sapiens
LKQMQNPKAAQKTATDFAMSLSCEIIRQLNGV

SEQ ID NO: 22789 - protein, 69 aa, Homo sapiens
LLPSTQYRTICTVPLIDVINGNTYEIIPQGGGDEDGYARGAWDWSMLWKRVPLTPQEKRLRKTKTEPYR

SEQ ID NO: 22790 - protein, 25 aa, Homo sapiens
LGFTVFSLALSVSREFGLCLAAGIS

SEQ ID NO: 22791 - protein, 100 aa, Homo sapiens
MDEGPKAKMKLMVLVFTIGLTLLLGVQAMPANRLSCYRKILKDHNCHNLPEGVADLTQIDVNVQDHFWDGKGCEMICYCNFSELLCCPKCHHIFILLRNL

SEQ ID NO: 22792 - protein, 106 aa, Homo sapiens
MTRQGEPQVQFKLVLVGDGGTGKTTFVKHHLTGEFEKCIATLGVEVHPLVFHTNRGPIKFNVWDTASREKFGRLRDGYYIQAQCAIIMFDVTSRVTYMCLSGIEIR

SEQ ID NO: 22793 - protein, 822 aa, Homo sapiens
LNMKMLLLLHCLGVFLSCSGHIQDEHPQYHSPPDVVIPVRITGTTRGMTPPGWLSYILPFGGQKHIIHIKVKKLLFSKHLPVFTYTDQGAILEDQPFVQNNCYYHGYVEGDPESLVSLSTCFGGFQGILQINDFAYEIKPLAFSTTFEHLVYKMDSEEKQFSTMRSGFMQNEITCRMEFEEIDNSTQKQSSYVGWWIHFRIVEIVVVIDNYLYIRYERNDSKLLEDLYVIVNIVDSILDVIGVKVLLFGLEIWTNKNLIVVDDVRKSVHLYCKWKSENITPRMQHDTSHLFTTLGLRGLSGIGAFRGMCTPHRSCAIVTFMNKTLGTFSIAVAHHLGHNLGMNHDEDTCRCSQPRCIMHEGNPPITKFSNCSYGDFWEYTVERTKCLLETVHTKDIFNVKRCGNGVVEEGEECDCGPLKHCAKDPCCLSNCTLTDGSTCAFGLCCKDCKFLPSGKVCRKEVNECDLPEWCNGTSHKCPDDFYVEDGIPCKERGYCYEKSCHDRNEQCRRIFGAGANTASETCYKELNTLGDRVGHCGIKNATYIKCNISDVQCGRIQCENVTEIPNMSDHTTVHWARFNDIMCWSTDYHLGMKGPDIGEVKDGTECGIDHICIHRHCVHITILNSNCSPAFCNKRGICNNKHHCHCNYLWDPPNCLIKGYGGSVDSGPPPKRKKKKKFCYLCILLLIVLFILLCCLYRLCKKSKPIKKQQDVQTPSAKEEEKIQRRPHELPPQSQPWVMPSQSQPPVTPSQSHPQVMPSQSQPPVTPSQSQPRVMPSQSQPPVMPSQSHPQLTPSQSQPPVTPSQRQPQLMPSQSQPPVTPS

SEQ ID NO: 22794 - protein, 21 aa, Homo sapiens
MENCVATVELSVNRETLVGPC

SEQ ID NO: 22795 - protein, 494 aa, Homo sapiens
LTPAAFPRHWLGGRPAKLGTRSPGPAPAASGSPRGGRREEPGGEGPGGARGLAGAPAPPPLPPPADRSPTPGPSTMHLLGFFSVACSLLAAALLPGPREAPAAAAAFESGLDLSDAEPDAGEATAYASKDLEEQLRSVSSVDELMTVLYPEYWKMYKCQLRKGGWQHNREQANLNSRTEETIKFAAAHYNTEILKSIDNEWRKTQCMPREVCIDVGKEFGVATNTFFKPPCVSVYRCGGCCNSEGLQCMNTSTSYLSKTLFEITVPLSQGPKPVTISFANHTSCRCMSKLDVYRQVHSIIRRSLPATLPQCQAANKTCPTNYMWNNHICRCLAQEDFMFSSDAGDDSTDGFHDICGPNKELDEETCQCVCRAGLRPASCGPHKELDRNSCQCVCKNKLFPSQCGANREFDENTCQCVCKRTCPRNQPLNPGKCACECTESPQKCLLKGKKFHHQTCSCYRRPCTNRQKACEPGFSYSEEVCRCVPSYWKRPQMS

SEQ ID NO: 22796 - protein, 209 aa, Homo sapiens [sequence omitted]

SEQ ID NO: 22797 - protein, 105 aa, Homo sapiens
MARKSNLPVLLVPFLLCQALVRCSSPLPLVVNTWPFKNATEAAWRALASGGSALDAVESGCAMCEREQCDGSVGFGGSPDELGETTLDAMIMDGHHICSKYGVYQ

SEQ ID NO: 22798 - protein, 94 aa, Homo sapiens
MARKSNLPVLLVPFLLCQALVRCSSPLPLVVNTWPFKNATEAAWRALASGGSALDAVESGCAMCEREQCDGSVGFGGSPDELGETTLDAMIMDG

SEQ ID NO: 22799 - protein, 121 aa, Homo sapiens
LPQLRLTVLVMMYTWQLTVKSYEGLKHKVCIKGQNSHKPAQIRKEGTEMEPLHGRKKQGLALLPWLECNGMIIAHSSLELLGPSHPPTSATRVAGITGECHHTWNWKNECNLTYVLSLVGF

SEQ ID NO: 22800 - protein, 148 aa, Homo sapiens
MGDLSRTALWLGGRRDPSGSFRVRDGAAAEVGRACLGLPSECGSLVRARASPRPLLGPAVCPWRARSPRPGLPRPSPTCPWKRGGDWCALSLVAPAASRHPPLSASEQRIPPTSTCTCTRPLGNPLAFLTTVQNQKQIEHWENKDDAS

SEQ ID NO: 22801 - protein, 65 aa, Homo sapiens
LFAVGGKKKVCCSSQDTGHFLLTEVPTAALAPGSLAPAPCLQESPPPELPKLLEVPEFCSSEWAT

SEQ ID NO: 22802 - protein, 31 aa, Homo sapiens
MITARSSSPRDWALPRSAPGEAHERPMRLEP

SEQ ID NO: 22803 - protein, 17 aa, Homo sapiens
MRSAGYPHRSPTVPARH

SEQ ID NO: 22804 - protein, 51 aa, Homo sapiens
LVHRARTRVPPLLVSWLAGMLVALQRSISCLSSAAIRQPLFTATCAGRTNK

SEQ ID NO: 22805 - protein, 70 aa, Homo sapiens
VARGAGCRAGAWGRGRWGRLGRAQPLDRRMRAGWGRSGSPQSLQGRFLGGRRGLCEAGPLGVPREVVLGV

SEQ ID NO: 22806 - protein, 149 aa, Homo sapiens
LSPGAAVFAACRPNMAQEVSEYLSQNPRVAAWVEALRCDGETDKHWRHRRDFLLRNAGDLAPAGGAASASTDEAADAESGTRNRQLQQLISFSMAWANHVFLGCRYPQKVMDKILSMAEGIKVTDAPTYTTRDELVAKVKKRGISSSNG

SEQ ID NO: 22807 - protein, 140 aa, Homo sapiens
LSPGAAVFAACRPNMAQEVSEYLSQNPRVAAWVEALRCDGETDKHWRHRRDFLLRNAGDLAPAGGAASASTDEAADAESGTRNRQLQQLISFSMAWANHVFLGCRYPQKVMDKILSMAEGIKVTDAPTYTTRDELVAKKG

SEQ ID NO: 22808 - protein, 594 aa, Homo sapiens
LSPGAAVFAACRPNMAQEVSEYLSQNPRVAAWVEALRCDGETDKHWRHRRDFLLRNAGDLAPAGGAASASTDEAADAESGTRNRQLQQLISFSMAWANHVFLGCRYPQKVMDKILSMAEGIKVTDAPTYTTRDELVAKVKKRGISSSNEGVEEPSKKRVIEGKNSSAVEQDHAKTSAKTERASAQQENSSTCIGSAIKSESGNSARSSGISSQNSSTSDGDRSVSSQSSSSVSSQVTTAGSGKASEAEAPDKHGSASFVSLLKSSVNSHMTQSTDSRQQSGSPKKSALEGSSASASQSSSEIEVPLLGSSGSSEVELPLLSSKPSSETASSGLTSKTSSEASVSSSVAKNSSSSGTSLLTPKSSSSTNTSLLTSKSTSQVAASLLASKSSSQTSGSLVSKSTSLASVSQLASKSSSQTSTSQLPSKSTSQSSESSVKFSCKLTNEDVKQKQPFFNRLYKTVAWKLVAVGGFSPNVNHGELLNAAIEALKATLDVFFVPLKELADLPQNKSSQESIVCELRCKSVYLGTGCGKSKENAKAVASREALKLFLKKKVVVKICKRKYRGSEIEDLVLLDEESRPVNLPPALKHPQELL

SEQ ID NO: 22809 - protein, 48 aa, Homo sapiens
LILSLSFLHSLVSIGLSCRYTDASLDFTVMEYWYISKNSGLCDLEKVI

SEQ ID NO: 22810 - protein, 81 aa, Homo sapiens
LLPLCPEVGLKSAGLANGCAVGESRRELHLQGGDGTPVDGLKLMSSTSASQASNTPALMMKMTCRGAGALHHGIAHKPKIQ

SEQ ID NO: 22811 - protein, 42 aa, Homo sapiens
LASAEEPMKVENGGRRTPCWRSDGDLKPWKMAAREMPEMRQC

SEQ ID NO: 22812 - protein, 304 aa, Homo sapiens
LLTLGALVFGGCALHLPLPPFSLIKVSMENTENSVDSKSIKNLEPKIIHGSESMDSGISLDNSYKMDYPEMGLCIIINNKNFHKSTGMTSRSGTDVDAANLRETFRNLKYEVRNKNDLTREEIVELMRDVSKEDHSKRSSFVCVLLSHGEEGIIFGTNGPVDLKKITNFFRGDRCRSLTGKPKLFIIQACRGTELDCGIETDSGVDDDMACHKIPVEADFLYAYSTAPGYYSWRNSKDGSWFIQSLCAMLKQYADKLEFMHILTRVNRKVATEFESFSFDATFHAKKQIPCIVSMLTKELYFYH

SEQ ID NO: 22813 - protein, 191 aa, Homo sapiens
MSDALIKVSMENTENSVDSKSIKNLEPKIIHGSESMDSGISLDNSYKMDYPEMGLCIIINNKNFHKSTGMTSRSGTDVDAANLRETFRNLKYEVRNKNDLTREEIVELMRDVSKEDHSKRSSFVCVLLSHGEEGIIFGTNGPVDLKKITNFFRGDRCRSLTGKPKLFIIQVIILGEIQRMAPGSSSRFVPC

SEQ ID NO: 22814 - protein, 209 aa, Homo sapiens
LLTLGALVFGGCALHLPLPPFSLIKVSMENTENSVDSKSIKNLEPKIIHGSESMDSGISLDNSYKMDYPEMGLCIIINNKNFHKSTGMTSRSGTDVDAANLRETFRNLKYEVRNKNDLTREEIVELMRDVSKEDHSKRSSFVCVLLSHGEEGIIFGTNGPVDLKKITNFFRGDRCRSLTGKPKLFIIQVIILGEIQRMAPGSSSRFVPC

SEQ ID NO: 22815 - protein, 29 aa, Homo sapiens
LLTLGALVFGGCALHLPLPPFSMRSPSSE

SEQ ID NO: 22816 - protein, 109 aa, Homo sapiens
LSVLKAFLIAIVVPDVETLCSWAQKRGFEGSFEELCRNKDVKKAILEDMVRLGKDSGLKPFEQVKGITLHPELFSIDNGLLTPTMKAKRPELRNYFRSQIDDLYSTIKV

SEQ ID NO: 22817 - protein, 768 aa, Homo sapiens
LKPQDGHGRDAEALRTAEALRTAQQVAAVVQRAVGPQLPCTGASCGRCPRQALQTPDRKEFSLENYQHRTMQAHELFRYFRMPELVDFRQYVRTLPTNTLMGFGAFAALTTFWYATRPKPLKPPCDLSMQSVEVAGSGGARRSALLDSDEPLVYFYDDVTTLYEGFQRGIQVSNNGPCLGSRKPDQPYEWLSYKQVAELSECIGSALIQKGFKTAPDQFIGIFAQNRPEWVIIEQGCFAYSMVIVPLYDTLGNEAITYIVNKAELSLVFVDKPEKAKLLLEGVENKLIPGLKIIVVMDAYGSELVERGQRCGVEVTSMKAMEDLGRANRRKPKPPAPEDLAVICFTSGTTGNPKGAMVTHRNIVSDCSAFVKATENTVNPCPDDTLISFLPLAHMFERVVECVMLCHGAKIGFFQGDIRLLMDDLKVLQPTVFPVVPRLLNRMFDRIFGQANTTLKRWLLDFASKRKEAELRSGIIRNNSLWDRLIFHKVQSSLGGRVRLMVTGAAPVSATVLTFLRAALGCQFYEGYGQTECTAGCCLTMPGDWTAGHVGAPMPCNLIKLVDVEEMNYMAAEGEGEVCVKGPNVFQGYLKDPAKTAEALDKDGWLHTGDIGKWLPNGTLKIIDRKKHIFKLAQGEYIAPEKIENIYMRSEPVAQVFVHGESLQAFLIAIVVPDVETLCSWAQKRGFEGSFEELCRNKDVKKAILEDMVRLGKDSGLKPFEQVKGITLHPELFSIDNGLLTPTMKAKRPELRNYFRSQIDDLYSTIKV

SEQ ID NO: 22818 - protein, 102 aa, Homo sapiens
LSTGMLPDPKNVHIFVSWMIAQSVTAVAGLVSYPFDTVRRRMMMQSGRKGADIMYTGTVDCWRKIAKDEGAKAFFKGAWSNVLRGMGGAFVLVLYDEIKKYV

SEQ ID NO: 22819 - protein, 543 aa, Homo sapiens
VAAALRYIFAIMDQFGDILEGEVDHSFFDSDFEEGKKCETNSVFDKQNDDPKERIDKDTKNVNSNTGMQTTENYLTEKGNERNVKFPPEHPVENDVTQTVSSFSLPASSRSKKLCDVTTGLKIHVSIPNRIPKIVKEGEDDYYTDGEESSDDGKKYHVKSKSAKPSTNVKKSIRKKYCKVSSSSSSSLSSSSSGSGTDCLDAGSDSHLSDSSPSSKSSKKHVSGITLLSPKHKYKSGIKSTETQPSSTTPKCGHYPEESEDTVTDVSPLSTPDISPLQSFELGIANDQKVKIKKQENVSQEIYEDVEDLKNNSKYLKAAKKGKEKHEPDVSSKSSSVLDSSLDHRHKQKVLHDTMDLNHLLKAFLQLDKKGPQKHHFDQPSVAPGKNYSFTREEVRQIDRENQRLLKELSRQAEKPGSKSTIPRSADHPPKLYHSALNRQKEQQRIERENLALLKRLEAVKPTVGMKRSEQLMDYHRNMGYLNSSPLSRRARSTLGQYSPLRASRTSSATSGLSCRSERSAVDPSSGHPRRRPKPPNVRTAWL

SEQ ID NO: 22820 - protein, 80 aa, Homo sapiens [sequence omitted]

SEQ ID NO: 22821 - protein, 52 aa, Homo sapiens
LGCAFIMRKVFILRDPCHLQFTDHEFNMLESPRPNFSLIPLILTSSLTKKKF

SEQ ID NO: 22822 - protein, 79 aa, Homo sapiens
VGTPRLFLAPVSSFLSFWCGAGTSLEWGSSDPQSNKNWTEVTSGRPETRVLHHRGKTLMTRPQGSSGTGGLGAWDVFSG

SEQ ID NO: 22823 - protein, 145 aa, Homo sapiens
VVVSNQLVTSPCCIVSSTYGWTANMERIMKAQALRDNSTTGYMAAKKHLEINPDHSFIDTLRQKAETDKNDKSVKDLVILLYETALLSSDFGLEGPQTHANRIYRMNKLGLGTDEDDPTADDTSAAVTEEMPPLEGDDDTSRMEK

SEQ ID NO: 22824 - protein, 310 aa, Homo sapiens
LGEDGGGFYRDVGCQGVFISRPLLFLRAPVLPRLTYSSRTGLSLSAQKFPGAMAEYSYVKSTKLVLKGTKTKSKKKKSKDKKRKREEDEETQLDIVGIWWTVTNFGEISGTIAIEMDKGTYIHALDNGLFTLGAPHKEVDEGPSPPEQFTAVKLSDSRIALKSGYGKYLGINSDGLVVGRSDAIGPREQWEPVFQNGKMALLASNSCFIRCNEAGDIEAKSKTAGEEEMIKIRSCAERETKKKDDIPEEDKGNVKQCEINYVKKFQSFQDHKLKISKEDSKILKKARKDGFLHETLLDRRAKLKADRYCK

SEQ ID NO: 22825 - protein, 15 aa, Homo sapiens
LGFLFLPYLSVFFSE

SEQ ID NO: 22826 - protein, 538 aa, Homo sapiens
VRRRSLRRDWRDCAAATADMSGVRGLSRLLSARRLALAKAWPTVLQTGTRGFHFTVDGNKRASAKVSDSISAQYPVVDHEFDAVVVGAGGAGLRAAFGLSEAGFNTACVTKLFPTRSHTVAAQGGINAALGNMEEDNWRWHFYDTVTGDGTAMITRAGLPCQDLEFVQFHPTGIYGAGCLITEGCRGEGGILINSQGERFMERYAPVAKDLASRDVVSRSMTLEIREGRGCGPEKDHVYLQLHHLPPEQLATRLPGISETAMIFAGVDVTKEPIPVLPTVHYNMGGIPTNYKGQVLRHVNGQDQIVPGLYACGEAACASVHGANRLGANSLLDLVVFGRACALSIEESCRPGDKVPPIKPNAGEESVMNLDKLRFADGSIRTSELRLSMQKSMQNHAAVFRVGSVLQEGCGKISKLYGDLKHLKTFDRGMVWNTDLVETLELQNLMLCALQTIYGAEARKESRGAHAREDYKVRIDEYDYSKPIQGQQKKPFEEHWRKHTLSYVDVGTGKVTLEYRPVIDKTLNEADCATVPPAIRSY

SEQ ID NO: 22827 - protein, 683 aa, Homo sapiens
VRRRSLRRDWRDCAAATADMSGVRGLSRLLSARRLALAKAWPTVLQTGTRGFHFTVDGNKRASAKVSDSISAQYPVVDHEFDAVVVGAGGAGLRAAFGLSEAGFNTACVTKLFPTRSHTVAAQGGINAALGNMEEDNWRWHFYDTVKGSDWLGDQDAIHYMTEQAPAAVVELENYGMPFSRTEDGKIYQRAFGGQSLKFGKGGQAHRCCCVADRTGHSLLHTLYGRSLRYDTSYFVEYFALDLLMENGECRGVIALCIEDGSIHRIRAKNTVVATGGYGRTYFSCTSAHTSTGDGTAMITRAGLPCQDLEFVQFHPTGIYGAGCLITEGCRGEGGILINSQGERFMERYAPVAKDLASRDVVSRSMTLEIREGRGCGPEKDHVYLQLHHLPPEQLATRLPGISETAMIFAGVDVTKEPIPVLPTVHYNMGGIPTNYKGQVLRHVNGQDQIVPGLYACGEAACASVHGANRLGANSLLDLVVFGRACALSIEESCRPGDKVPPIKPNAGEESVMNLDKLRFADGSIRTSELRLSMQKSMQNHAAVFRVGSVLQEGCGKISKLYGDLKHLKTFDRGMVWNTDLVETLELQNLMLCALQTIYGAEARKESRGAHAREDYKVRIDEYDYSKPIQGQQKKPFEEHWRKHTLSYVDVGTGKVTLEYRPVIDKTLNEADCATVPPAIRSY

SEQ ID NO: 22828 - protein, 177 aa, Homo sapiens
LRRDWRDCAAATADMSGVRGLSRLLSARRLALAKAWPTVLQTGTRGFHFTVDGNKRASAKVSDSISAQYPVVDHEFDAVVVGAGGAGLRAAFGLSEAGFNTACVTKLFPTRSHTVAAQVRERCPTVLPLRAGPAQPRTFYLGSPLPPPPAPATWPLAVPYSAHPLRGLSLEPLPWGL

SEQ ID NO: 22829 - protein, 597 aa, Homo sapiens
LRRDWRDCAAATADMSGVRGLSRLLSARRLALAKAWPTVLQTGTRGFHFTVDGNKRASAKVSDSISAQYPVVDHEFDAVVVGAGGAGLRAAFGLSEAGFNTACVTKLFPTRSHTVAAQGGINAALGNMEEDNWRWHFYDTVKGSDWLGDQDAIHYMTEQAPAAVVELENYGMPFSRTEDGKIYQRAFGGQSLKFGKGGQAHRCCCVADRTGHSLLHTLYGRSLRYDTSYFVEYFALDLLMENGECRGVIALCIEDGSIHRIRAKNTVVATGGYGRTYFSCTSAHTSTGDGTAMITRAGLPCQDLEFVQFHPTGIYGAGCLITEGCRGEGGILINSQGERFMERYAPVAKDLASRDVVSRSMTLEIREGRGCGPEKDHVYLQLHHLPPEQLATRLPGISETAMIFAGVDVTKEPIPVLPTVHYNMGGIPTNYKGQVLRHVNGQDQIVPGLYACGEAACASVHGANRLGANSLLDLVVFGRACALSIEESCRPGDKVPPIKPNAGEESVMNLDKLRFADGSIRTSELRLSMQKVRIDEYDYSKPIQGQQKKPFEEHWRKHTLSYVDVGTGKVTLEYRPVIDKTLNEADCATVPPAIRSY

SEQ ID NO: 22830 - protein, 445 aa, Homo sapiens
LSRLLSARRLALAKAWPTVLQTGTRGFHFTVDGNKRASAKVSDSISAQYPVVDHEFDAVVVGAGGAGLRAAFGLSEAGFNTACVTKLFPTRSHTVAAQGGINAALGNMEEDNWRWHFYDTVKGSDWLGDQDAIHYMTEQAPAAVVELENYGMPFSRTEDGKIYQRAFGGQSLKFGKGGQAHRCCCVADRTGHSLLHTLYGRSLRYDTSYFVEYFALDLLMENGECRGVIALCIEDGSIHRIRAKNTVVATGGYGRTYFSCTSAHTSTGDGTAMITRAGLPCQDLEFVQFHPTGIYGAGCLITEGCRGEGGILINSQGERFMERYAPVAKDLASRDVVSRSMTLEIREGRGCGPEKDHVYLQLHHLPPEQLATRLPGISETAMIFAGVDVTKEPIPVLPTVHYNMGGIPTNYKGQVMVLAPPPQLERRLGRRGPPRSCLFRSYRKR

SEQ ID NO: 22831 - protein, 190 aa, Homo sapiens
VWRGSAAWLAVELYGTWCLTGSLLGVLDPGCILLERMCVGLRCSMQNHAAVFRVGSVLQEGCGKISKLYGDLKHLKTFDRGMVWNTDLVETLELQNLMLCALQTIYGAEARKESRGAHAREDYKVRIDEYDYSKPIQGQQKKPFEEHWRKHTLSYVDVGTGKVTLEYRPVIDKTLNEADCATVPPAIRSY

SEQ ID NO: 22832 - protein, 122 aa, Homo sapiens
MPGPAPGRGGSGVGLRGLSSLQAPQPSRVPWPMAAYSYRPGPGAGPGPAAGAALPDQSFLWNVFQRVDKDRSGVISDTELQQALSNGEWASGNWVSGPRSREPALFTVDNFLKLFFQGQRNH

SEQ ID NO: 22833 - protein, 71 aa, Homo sapiens
MPGPAPGRGGSGVGLRGLSSLQAPQPSRVPWPMAAYSYRPGPGAGPGPAAGAALPDQSFLWNVFQRHVDSL

SEQ ID NO: 22834 - protein, 191 aa, Homo sapiens
MPGPAPGRGGSGVGLRGLSSLQAPQPSRVPWPMAAYSYRPGPGAGPGPAAGAALPDQSFLWNVFQRVDKDRSGVISDTELQQALSNGTWTPFNPVTVRSIICKYRQTDQPGLLCIRPAWVPACVSFVCGSVSLCSLLEFHLDERRPFHPSPSVSVPFHISPCMFALFLILFIFNVRCNLSFQFLILKMTYI

SEQ ID NO: 22835 - protein, 223 aa, Homo sapiens
MPGPAPGRGGSGVGLRGLSSLQAPQPSRVPWPMAAYSYRPGPGAGPGPAAGAALPDQSFLWNVFQRVDKDRSGVISDTELQQALSNGTWTPFNPVTVRSIISMFDRENKAGVNFSEFTGVWKYITDWQNVFRTYDRDNSGMIDKNELKQALSGFGYRLSDQFHDILIRKFDRQGRGQIAFDDFIQGCIVLQRLTDIFRRYDTDQDGWIQVSYEQYLSMVFSIV

SEQ ID NO: 22836 - protein, 155 aa, Homo sapiens
MPGPAPGRGGSGVGLRGLSSLQAPQPSRVPWPMAAYSYRPGPGAGPGPAAGAALPDQSFLWNVFQRVDKDRSGVISDTELQQALSNGYRLSDQFHDILIRKFDRQGRGQIAFDDFIQGCIVLQRLTDIFRRYDTDQDGWIQVSYEQYLSMVFSIV

SEQ ID NO: 22837 - protein, 73 aa, Homo sapiens
LRGLSSLQAPQPSRVPWPMAAYSYRPGPGAGPGPAAGAALPDQSFLWNVFQRVDKDRSGVISDTELQQALSNG

SEQ ID NO: 22838 - protein, 87 aa, Homo sapiens
LRGLSSLQAPQPSRVPWPMAAYSYRPGPGAGPGPAAGAALPDQSFLWNVFQRVDKDRSGVISDTELQQALSNGTWTPFNPVTVRSII

SEQ ID NO: 22839 - protein, 207 aa, Homo sapiens
LRGLSSLQAPQPSRVPWPMAAYSYRPGPGAGPGPAAGAALPDQSFLWNVFQRVDKDRSGVISDTELQQALSNGTWTPFNPVTVRSIISMFDRENKAGVNFSEFTGVWKYITDWQNVFRTYDRDNSGMIDKNELKQALSGYRLSDQFHDILIRKFDRQGRGQIAFDDFIQGCIVLQRLTDIFRRYDTDQDGWIQVSYEQYLSMVFSIV

SEQ ID NO: 22840 - protein, 85 aa, Homo sapiens
LQAPQPSRVPWPMAAYSYRPGPGAGPGPAAGAALPDQSFLWNVFQRVDKDRSGVISDTELQQALSNGTWTPFNPVTVRSIICRGR

SEQ ID NO: 22841 - protein, 169 aa, Homo sapiens
LGPALGLLQARRCRTRASCGTFSRGTWTPFNPVTVRSIISMFDRENKAGVNFSEFTGVWKYITDWQNVFRTYDRDNSGMIDKNELKQALSGFGYRLSDQFHDILIRKFDRQGRGQIAFDDFIQGCIVLQVTEWLHVGLWWWWEGLACQRDAPDLQSKELGMCRISFWSL

SEQ ID NO: 22842 - protein, 161 aa, Homo sapiens
LGPALGLLQARRCRTRASCGTFSRGTWTPFNPVTVRSIISMFDRENKAGVNFSEFTGVWKYITDWQNVFRTYDRDNSGMIDKNELKQALSGFGYRLSDQFHDILIRKFDRQGRGQIAFDDFIQGCIVLQRLTDIFRRYDTDQDGWIQVSYEQYLSMVFSIV

SEQ ID NO: 22843 - protein, 67 aa, Homo sapiens
LLLPLDHRSIFLFSDMHLFPHRGGSRFHSSLSLLGCELREGRFIVVLYVQAHKICPWINTYPLPSSL

SEQ ID NO: 22844 - protein, 31 aa, Homo sapiens
MAWFLTSVKFVLLSACILGETTLRRYLWPIH

SEQ ID NO: 22845 - protein, 95 aa, Homo sapiens
LRETSPRFRAPPTEPRARGLTRGPTQGPPERQDSGPDLQRLQAQRPQAAWAERRFQALARSLNCRKIFQHCFYKSLFRPNQRGDRGELKTPFFHV

SEQ ID NO: 22846 - protein, 95 aa, Homo sapiens
MAGRSRPFPPLPGNRGSPQTDLRETSPRFRAPPTEPRARGLTRGPTQGPPERQDSGPDLQRLQAQRPQAAWAERRFQALARSLNCREASATQKPA

SEQ ID NO: 22847 - protein, 104 aa, Homo sapiens
MAGRSRPFPPLPGNRGSPQTDLRETSPRFRAPPTEPRARGLTRGPTQGPPERQDSGPDLQRLQAQRPQAAWAERRFQALARSLNCRSSVDSHQSGGVLKEFYVD

SEQ ID NO: 22848 - protein, 138 aa, Homo sapiens
LVEPQLGRLEGLQALPHGPVEDFPVLFLVLRGRELVSAVQMLVLRDQARRSQLCPPPDILALLPQELSTDPPWSQEGTRKPPHGVPAGSSSPQPAVPTSCRGLYRPGATTALSVTLSSRGWALPQGSCMTMATYRRRP

SEQ ID NO: 22849 - protein, 178 aa, Homo sapiens
LGCVSWSQAAFLLSVRGQPSPHSHGQATQNEHDSRGPRPGAEPGAGSGRREGRVGVRGSSHRTAGTEARQALIRSVGTRDTEERCWAPGRCLLVPGWPQTSTASRKEPSASGAHQKPALSTRRASARPGHHPTSQGAGPVTDGSPRPHGQHRLTTALPRPGWSGRSGGAHGSHLGPWR

SEQ ID NO: 22850 - protein, 301 aa, Homo sapiens
LLVGLHFICAALPLLRDRRSGSASFQMGYLKRNGDGSLLYSVVNTAEPDADEEETHPVDLSSLSSKLLPGFTTLGFKDERRNKVTFLSSATTALSMQNNSVFGDLKSDEMELLYSAYGDETGVQCALSLQEFVKDAGSYSKKVVDDLLDQITGGDHSRTLFQLKQRRNVPMKPPDEAKVGDTLGDSSSSVLEFMSMKSYPDVSVDISMLSSLGKVKKELDPDDSHLNLDETTKLLQDLHEAQAERGGSRPSSNLSSLSNASERDQHHLGSPSRLSVGEQPDVTHDPYEFLQSPEPAASAKT

SEQ ID NO: 22851 - protein, 154 aa, Homo sapiens
VPAVPSPRLGPAAGAAMGKKHKKHKAEWRSSYEDYADKPLEKPLKLVLKVGGSEVTELSGSGHDSSYYDDRSDHERERHKEKKKKKKKKSEKEKHLDDEERRKRKEEKKRKREREHCDTEGEADDFDPGKKVEVEPPPDRPVRACRTQPVLGGT

SEQ ID NO: 22852 - protein, 532 aa, Homo sapiens
LAPGRTLAATAPWPWLAARARCAEVAELAGPRRKRGEAGPRQEVALPGPSASGSGGGAPRAADSKLGRGPRAEAAAVAATLGVRWRRPRPGWVPTALGGAMDEAVGDLKQALPCVAESPTVHVEVHQRGSSTAKKEDINLSVRKLLNRHNIVFGDYTWTEFDEPFLTRNVQSVSIIDTELKVKDSQPIDLSACTVALHIFQLNEDGPSSENLEEETENIIAANHWVLPAAEFHGLWDSLVYDVEVKSHLLDYVMTTLLFSDKNVNSNLITWNRVVLLHGPPGTGKTSLCKALAQKLTIRLSSRYRYGQLIEINSHSLFSKWFSESGKLVTKMFQKIQDLIDDKDALVFVLIDEVESLTAARNACRAGTEPSDAIRVVNAVLTQIDQIKRHSNVVILTTSNITEKIDVAFVDRADIKQYIGPPSAAAIFKIYLSCLEELMKCQIIYPRQQLLTLRELEMIGFIENNVSKLSLLLNDISRKSEGLSGRVLRKLPFLAHALYVQAPTVTIEGFLQALSLAVDKQFEERKKLAAYI

SEQ ID NO: 22853 - protein, 309 aa, Homo sapiens
LGVRWRRPRPGWVPTALGGAMDEAVGDLKQALPCVAESPTVHVEVHQRGSSTAKKEDINLSVRKLLNRHNIVFGDYTWTEFDEPFLTRNVQSVSIIDTELKVKDSQPIDLSACTVALHIFQLNEDGPSSENLEEETENIIAANHWVLPAAEFHGLWDSLVYDVEVKSHLLDYVMTTLLFSDKNVNSNLITWNRVVLLHGPPGTGKTSLCKALAQKLTIRLSSRYRYGQLIEINSHSLFSKWFSESGKLVTKMFQKIQDLIDDKDALVFVLIDEVESLTAARNACRAGTEPSDAIRVVNAVLTQIDQIKR

SEQ ID NO: 22854 - protein, 54 aa, Homo sapiens
VPSPPRCSREGGHGPDVGGPQAAVAPGVRSVWLSPGRPLPWPVPCMEAAVALKR

SEQ ID NO: 22855 - protein, 33 aa, Homo sapiens
VRLRMLGRCSVSAAWLLLNGMTAFTAPCACLSI

SEQ ID NO: 22856 - protein, 146 aa, Homo sapiens
VDITAMSLFASDLWAPLLTPAVQALSSARVPGASGAVCILFLCEVCCRTDAYCARIGGRARGSPAWPGPRGVRFPAGRGAPVPPRVLPRGPGFESLSQPLPAAACTGRASVHTQHTPATQRALACHSGTKPVCLCGSTAWQSRAVT

SEQ ID NO: 22857 - protein, 74 aa, Homo sapiens
VLLLPLDHRSIFLFSDMRLFPHRGGSCFRNSLSLLDCELCEGRFIVELYVQAHKICPWIDTYQSTSFSSLNFFI

SEQ ID NO: 22858 - protein, 1072 aa, Homo sapiens
MKPRARGWRGLAALWMLLAQVAEQAPACAMGPAAAAPGSPSVPRPPPPAERPGWMEKGEYDLVSAYEVDHRGDYVSHEIMHHQRRRRAVPVSEVESLHLRLKGSRHDFHMDLRTSSSLVAPGFIVQTLGKTGTKSVQTLPPEDFCFYQGSLRSHRNSSVALSTCQGLSGMIRTEEADYFLRPLPSHLSWKLGRAAQGSSPSHVLYKRSTEPHAPGASEVLVTSRTWELAHQPLHSSDLRLGLPQKQHFCGRRKKYMPQPPKEDLFILPDEYKSCLRHKRSLLRSHRNEELNVETLVVVDKKMMQNHGHENITTYVLTILNMVSALFKDGTIGGNINIAIVGLILLEDEQPGLVISHHADHTLSSFCQWQSGLMGKDGTRHDHAILLTGLDICSWKNEPCDTLGFAPISGMCSKYRSCTINEDTGLGLAFTIAHESGHNFGMIHDGEGNMCKKSEGNIMSPTLAGRNGVFSWSPCSRQYLHKFLSTAQAICLADQPKPVKEYKYPEKLPGELYDANTQCKWQFGEKAKLCMLDFKKDICKALWCHRIGRKCETKFMPAAEGTICGHDMWCRGGQCVKYGDEGPKPTHGHWSDWSSWSPCSRTCGGGVSHRSRLCTNPKPSHGGKFCEGSTRTLKLCNSQKCPRDSVDFRAAQCAEHNSRRFRGRHYKWKPYTQVEDQDLCKLYCIAEGFDFFFSLSNKVKDGTPCSEDSRNVCIDGICERVGCDNVLGSDAVEDVCGVCNGNNSACTIHRGLYTKHHHTNQYYHMVTIPSGARSIRIYEMNVSTSYISVRNALRRYYLNGHWTVDWPGRYKFSGTTFDYRRSYNEPENLIATGPTNETLIVELLFQGRNPGVAWEYSMPRLGTEKQPPAQPSYTWAIVRSECSVSCGGGQMTVREGCYRDLKFQVNMSFCNPKTRPVTGLVPCKVSACPPSWSVGNWSACSRTCGGGAQSRPVQCTRRVHYDSEPVPASLCPQPAPSSRQACNSQSCPPAWSAGPWAECSHTCGKGWRKRAVACKSTNPSARAQLLPDAVCTSEPKPRMHEACLLQRCHKPKKLQWLVSAWSQVGALVSRERG

SEQ ID NO: 22859 - protein, 47 aa, Homo sapiens
LSTATTEVLRKGVCTGWLALLVASVLQPNIHASHEDSGKALAPKVRN

SEQ ID NO: 22860 - protein, 83 aa, Homo sapiens
LSTATTEVLRKGVCTGWLALLVASVLQPNIHASHEDSGKALAPKIVDTLHLDSVTSFYVLIRHSAEFRDHVCRQQFKVVHKNG

SEQ ID NO: 22861 - protein, 158 aa, Homo sapiens
MEGGGGIPLETLKEESQSRHVLPASFEVNSLQKSNWGFLLTGLVGGTLVAVYAVATPFVTPALRKVCLPFVPATTKQIENVVKMLRCRRGSLVDIGSGDGRIVIAAAKKGFTAVGYELNPWLVWYSRYRAWREGYFFAVLERCYFRCASDDAAVGEET

SEQ ID NO: 22862 - protein, 173 aa, Homo sapiens
MEGGGGIPLETLKEESQSRHVLPASFEVNSLQKSNWGFLLTGLVGGTLVAVYAVATPFVTPALRKVCLPFVPATTKQIENVVKMLRCRRGSLVDIGSGDGRIVIAAAKKGFTAVGYELNPWLVWYSRYRAWREGVHGSAKFYISDLWKVCKAENGPREIQGKILLFKISMTEN

SEQ ID NO: 22863 - protein, 283 aa, Homo sapiens
MNMGALSSSSRIRTASPVLWDLRPSRVNSCHRQMAEIAVNAVLTVADMERRDVDFELIKVEGKVGGRLEDTKLIKGVIVDKDFSHPQMPKKVEDAKIAILTCPFEPPKPKTKHKLDVTSVEDYKALQKYEKEKFEEMIQQIKETGANLAICQWGFDDEANHLLLQNNLPAVRWVGGPEIELIAIATGGRIVPRFSELTAEKLGFAGLVQEISFGTTKDKMLVIEQCKNSRAVTIFIRGGNKMVRIQLFVLYCCLFCFMVWLFCLCVFNRDTVTIRKIIVVLKQ

SEQ ID NO: 22864 - protein, 111 aa, Homo sapiens
LWGAFCSCFLILFGVGTEGTSRPPVRLRECRRPGREAQMMGKQSHLEGVSWGQCQGDLTGQFILKQHYSVRFFWVRNSSWEVWSSGRRGGQKHPLVFLSHLEALSSSPRYW

SEQ ID NO: 22865 - protein, 30 aa, Homo sapiens
LPPASIPCPAAALRQQKRKMLQLGKVRTLP

SEQ ID NO: 22866 - protein, 126 aa, Homo sapiens
LCLRFLAVGFICLTILSCCFLQQTKERVKLLIQLADGFCEKGHAHAAEIKKCVTAVDKRYRDFSLRMEKYRTSLEKALGISSDSNKSSKSLQLDIIPASIPGSEVKLRDAAHELNEEKRKSARRKE

SEQ ID NO: 22867 - protein, 303 aa, Homo sapiens
MPNGLKPVDTLDSLSSVSSAYCSGGQPGTCKYWILDLDSLSVSSNDASPPASVASLQPHMIGAQSSPGPKRPGNTLRKWLTSPVRRLSSGKADGHVKKLAHKHKKSREVRKSADAGSQKDSDDSAATPQDETVEERGRNEGLSSGTLSKSSSSGMQSCGEEEGEEGADAVPLPPPMAIQQHSLLQPDSQDDKASSRLLVRPTSSETPSAAELVSAIEELVKSKMVRPPRESLTFGSCSVLLLADGFALVFVLLWAAECGCGLWHISGVPMTTLGFTDLKDSENSGKPLFPHLQCIPMKGHRSK

SEQ ID NO: 22868 - protein, 115 aa, Homo sapiens
VTVVTVAIKSLSETKASISAWKELGPFLQDYRPRKGKLIWIIFMLNINMVYKWTEKHSLTYSATYGLECSVEQPEVYTMSLHLKLMECVGGDSSSMWEQCGPRASMEEGCVSRLL

SEQ ID NO: 22869 - protein, 329 aa, Homo sapiens
VINKEYKIWKKNTPFLYNLVMTHALEWPSLTAQWLPDVTRPEGKDFSLHRLVLGTHTSDEQNHLVIASVQLPDDDAQFDASHYDREKGEFGGFGSVSGKIEIEIKINHEGKVNRARYMPQNPCIITTKTPSSDILVFDYTKHPSKPDPSGECNPDLRLRGHQKEGYGLSWNLNLSGHLLSASDDHTICLWDISAVPKEGKVVDAKTIFTGHTAIVEDVSWHLLCESLFGSVADDQKLMIWDTRSNNTSKPSHSVDTHTAEVNCLSFSPYSEFILATGSADKTVALWDLRNLKLKLHSFESHKDEIFQVQWSPHNETILASSGTDHRPNV

SEQ ID NO: 22870 - protein, 104 aa, Homo sapiens
MCKAGFAGGAVFPSIIWCPRHQHVKGGMSQKDSYVNDKAQSKHGILTLRYPIEHGIVTNWDDMEKIWHHTFYKELCMALEEHMLLLTEAPLNPKANREDDSDHV

SEQ ID NO: 22871 - protein, 74 aa, Homo sapiens
MPEGEDFGPGKSWEVINSKPDERPRLSHCIAESWMNFSIFLQEMSLFKQQSPGKASFPVKEYVLKCSVTWKQMN

SEQ ID NO: 22872 - protein, 10 aa, Homo sapiens
LLLFLKGRNA

SEQ ID NO: 22873 - protein, 35 aa, Homo sapiens
MVNVPKTGRTFCKKCGKHQPHKVTQYKKGKDSLYA

SEQ ID NO: 22874 - protein, 17 aa, Homo sapiens
MLDSNLTVEEALKVLKV

SEQ ID NO: 22875 - protein, 796 aa, Homo sapiens
LPMLTRNCLSLLLWVLFDGGLLTPLQPQPQQTLATEPRENVIHLPGQRSHFQRVKRGWVWNQFFVLEEYVGSEPQYVGKLHSDLDKGEGTVKYTLSGDGAGTVFTIDETTGDIHAIRSLDREEKPFYTLRAQAVDIETRKPLEPESEFIIKVQDINDNEPKFLDGPYVATVPEMSPVGAYVLQVKATDADDPTYGNSARVVYSILQGQPYFSIDPKTGVIRTALPNMDREVKEQYQVLIQAKDMGGQLGGLAGTTIVNITLTDVNDNPPRFPKSIFHLKVPESSPIGSAIGRIRAVDPDFGQNAEIEYNIVPGDGGNLFDIVTDEDTQEGVIKLKKPLDFETKKAYTFKVEASNLHLDHRFHSAGPFKDTATVKISVLDVDEPPVFSKPLYTMEVYEDTPVGTIIGAVTAQDLDVGSSAVRYFIDWKSDGDSYFTIDGNEGTIATNELLDRESTAQYNFSIIASKVSNPLLTSKVNILINVLDVNEFPPEISVPYETAVCENAKPGQIIQIVSAADRDLSPAGQQFSFRLSPEAAIKPNFTVRDFRNNTAGIETRRNGYSRRQQELYFLPVVIEDSSYPVQSSTNTMTIRVCRCDSDGTILSCNVEAIFLPVGLSTGALIAILLCIVILLAIVVLYVALRRQKKKDTLMTSKEDIRDNVIHYDDEGGGEEDTQAFDIGALRNPKVIEENKIRRDIKPDSLCLPRQRPPMEDNTDIRDFIHQRLQENDVDPTAPPYDSLATYAYEGSGSVAESLSSIDSLTTEADQDYDYLTDWGPRFKVLADMFGEEESYNPDKVT

SEQ ID NO: 22876 - protein, 756 aa, Homo sapiens
LPMLTRNCLSLLLWVLFDGGLLTPLQPQPQQTLATEPRENVIHLPGQRSHFQRVKRGWVWNQFFVLEEYVGSEPQYVGKLHSDLDKGEGTVKYTLSGDGAGTVFTIDETTGDIHAIRSLDREEKPFYTLRAQAVDIETRKPLEPESEFIIKVQDINDNEPKFLDGPYVATVPEMSPVGVIRTALPNMDREVKEQYQVLIQAKDMGGQLGGLAGTTIVNITLTDVNDNPPRFPKSIFHLKVPESSPIGSAIGRIRAVDPDFGQNAEIEYNIVPGDGGNLFDIVTDEDTQEGVIKLKKPLDFETKKAYTFKVEASNLHLDHRFHSAGPFKDTATVKISVLDVDEPPVFSKPLYTMEVYEDTPVGTIIGAVTAQDLDVGSSAVRYFIDWKSDGDSYFTIDGNEGTIATNELLDRESTAQYNFSIIASKVSNPLLTSKVNILINVLDVNEFPPEISVPYETAVCENAKPGQIIQIVSAADRDLSPAGQQFSFRLSPEAAIKPNFTVRDFRNNTAGIETRRNGYSRRQQELYFLPVVIEDSSYPVQSSTNTMTIRVCRCDSDGTILSCNVEAIFLPVGLSTGALIAILLCIVILLAIVVLYVALRRQKKKDTLMTSKEDIRDNVIHYDDEGGGEEDTQAFDIGALRNPKVIEENKIRRDIKPDSLCLPRQRPPMEDNTDIRDFIHQRLQENDVDPTAPPYDSLATYAYEGSGSVAESLSSIDSLTTEADQDYDYLTDWGPRFKVLADMFGEEESYNPDKVT

SEQ ID NO: 22877 - protein, 41 aa, Homo sapiens
LLRPSVLLLLQLPFLPSALLPNSLALLGNIDKLEPRSSWEF

SEQ ID NO: 22878 - protein, 333 aa, Homo sapiens
LKYDVGGGERFDSLTDLEEHYKKNSMVETLGTVLQLKHPLNTTHINAAEIKSRVRELSKLAETTDKLKQGFWEKFETLQQQECKLLYSRKEGQRQENKNKNRYKNILPFDHTRVVLHDGDPDEPVSDYISANTIMPEFETRCNNSKPKTCYIATQGCQQNTVNDFWQMKFQENSRVIVMTTKEVDRGKSKCVKYWPDEYALKEYGVMRVRNVKESAAHDYTLRELELSKIGPGNMERPVGQYHFRTWPDHGVPSDPGVVLDFLEEVYHKQGSITDAGPVVVHCSAGIGLTGTFIVIDILTDIVREKGVDCNIDVPKTIQMMRSQRSGMVQTEA

SEQ ID NO: 22879 - protein, 293 aa, Homo sapiens
LMRYIFLFLQLIQTISAVDKDDPLGGQKFFFSLAAVNPNFTVQDNEDNTARILTRKNGFNRHEISTYLLPVVISDNDYPIQSSTGTLTIRVCACDSQGNMQSCSAEALLLPAGLSTGALIAILLCIIILLVIVVLFAALKRQRKKEPLILSKEDIRDNIVSYNDEGGGEEDTQAFDIGTLRNPAAIEEKKLRRDIIPETLFIPRRTPTAPDNTDVRDFINERLKEHDLDPTAPPYDSLATYAYEGNDSIAESLSSLESGTTEGDQNYDYLREWGPRFNKLAEMYGGGESDKDS

SEQ ID NO: 22880 - protein, 133 aa, Homo sapiens
LALEMAELTAQISQLELARQKKESEAMEWQQKAQMVQEDLEKTRAELKTAMSTSHVAEPAENEQDEQDENGAEASADLRADAMAKDRSEEECTTEAEKNERVQKHLKALTSELASARDESKKTANDMIHAENM

SEQ ID NO: 22881 - protein, 663 aa, Homo sapiens
MRTYRYFLLLFWVGQPYPTLSTPLSKRTSGFPAKKRALELSGNSKNELNRSKRSWMWNQFFLLEEYTGSDYQYVGKLHSDQDRGDGSLKYILSGDGAGDLFIINENTGDIQATKRLDREEKPVYILRAQAINRRTGRPVEPESEFIIKIHDINDNEPIFTKEVYTATVPEMSDVGTFVVQVTATDADDPTYGNSAKVVYSILQGQPYFSVESETGIIKTALLNMDRENREQYQVVIQAKDMGGQMGGLSGTTTVNITLTDVNDNPPRFPQSTYQFKTPESSPPGTPIGRIKASDADVGENAEIEYSITDGEGLDMFDVITDQETQEGIITVKKLLDFEKKKVYTLKVEASNPYVEPRFLYLGPFKDSATVRIVVEDVDEPPVFSKLAYILQIREDAQINTTIGSVTAQDPDAARNPVKYSVDRHTDMDRIFNIDSGNGSIFTSKLLDRETLLWHNITVIATEINNPKQSSRVPLYIKVLDVNDNAPEFAEFYETFVCEKAKADQLIQTLHAVDKDDPYSGHQFSFSLAPEAASGSNFTIQDNKDNTAGILTRKNGYNRHEMSTYLLPVVISDNDYPVQSSTGTVTVRVCACDHHGNMQSCHAEALIHPTGLSTGALVAILLCIVILLGKLVLPASYLPMVRGSHCYCDTLDLSASPIKAYSLI

SEQ ID NO: 22882 - protein, 12 aa, Homo sapiens
MCASVALCILIF

SEQ ID NO: 22883 - protein, 217 aa, Homo sapiens
VHQKGPFGKWHLARKLTQNKSLTAQRWWRGISETVSRAGPCNCLQELPHSHFDVDSLQSFRCFKTACRSQRHYIRKILQRYSTPSHSLYRMPKSKELVSSSSSGSDSDSEVDKKLKRKKQVAPEKPVKKQKTGETSRALSSSKQSSSSRDDNMFQIGKMRYVSVRDFKGKVLIDIREYWMDPEGEMKPGRKGISLNPEQWSQLKEQISDIDDAVRKL

SEQ ID NO: 22884 - protein, 133 aa, Homo sapiens
LVHSLGMPKSKELVSSSSSGSDSDSEVDKKLKRKKQVAPEKPVKKQKTGETSRALSSSKQSSSSRDDNMFQIGKMRYVSVRDFKGKVLIDIREYWMDPEGEMKPGRKGISLNPEQWSQLKEQISDIDDAVRKL

SEQ ID NO: 22885 - protein, 91 aa, Homo sapiens
LLEPSEAMPKSKELVSSSSSGSDSDSEVDKKLKRKKQVAPEKPVKKQKTGETSRALSSSKQSSSSRDDNMFQELFITFITGVPPAQEVSGV

SEQ ID NO: 22886 - protein, 67 aa, Homo sapiens
LFLLQIGKMRYVSVRDFKGKVLIDIREYWMDPEGEMKPGRKGISLNPEQWSQLKEQISDIDDAVRKL

SEQ ID NO: 22887 - protein, 86 aa, Homo sapiens
MMLALFRHHHWSRAALVYSDDKLERNCYFTLEGVHEVFQEEGLHTSIYSFDETKDLDLEDIVRNIQASERVLGLICWNPSGRKFSS

SEQ ID NO: 22888 - protein, 74 aa, Homo sapiens [sequence omitted]

SEQ ID NO: 22889 - protein, 658 aa, Homo sapiens
LRRRPAVLQGRWEARRSRLVLVKRSKRKEAKRRTKKDLEMEVELSQGLADNTVIAKVNNVVWDLDRPLEEDCTLELLKFEDEEAQAVYWHSSAHIMGEAMERVYGGCLCYGPPIENGFYYDMYLEEGGVSSNDFSSLEALCKKIIKEKQAFERLEVKKETLLAMFKYNKFKCRILNEKVNTPTTTVYRCGPLIDLCRGPHVRHTGKIKALKIHKNSSTYWEGKADMETLQRIYGISFPDPKMLKEWEKFQEEAKNRDHRKIGRDQELYFFHELSPGSCFFLPKGAYIYNALIEFIRSEYRKRGFQEVVTPNIFNSRLWMTSGHWQHYSENMFSFEVEKELFALKPMNCPGHCLMFDHRPRSWRELPLRLADFGVLHRNELSGALTGLTRVRRFQQDDAHIFCAMEQIEDEIKGCLDFLRTVYSVFGFSFKLNLSTRPEKFLGDIEVWDQAEKQLENSLNEFGEKWELNSGDGAFYGPKIDIQIKDAIGRYHQCATIQLDFQLPIRFNLTYVSHDGDDKKRPVIVHRAILGSVERMIAILTENYGGKWPFWLSPRQVMVVPVGPTCDEYAQKVRQQFHDAKFMADIDLDPGCTLNKKIRNAQLAQYNFILVVGEKEKISGTVNIRTRDNKVHGERTISETIERLQQLKEFRSKQAEEEF

SEQ ID NO: 22890 - protein, 602 aa, Homo sapiens
MIPFWQKRQKKIASQLKSLCLMVNRLMRNLGKLHHIKLPVELAMERVYGGCLCYGPPIENGFYYDMYLEEGGVSSNDFSSLEALCKKIIKEKQAFERLEVKKETLLAMFKYNKFKCRILNEKVNTPTTTVYRCGPLIDLCRGPHVRHTGKIKALKIHKNSSTYWEGKADMETLQRIYGISFPDPKMLKEWEKFQEEAKNRDHRKIGRDQELYFFHELSPGSCFFLPKGAYIYNALIEFIRSEYRKRGFQEVVTPNIFNSRLWMTSGHWQHYSENMFSFEVEKELFALKPMNCPGHCLMFDHRPRSWRELPLRLADFGVLHRNELSGALTGLTRVRRFQQDDAHIFCAMEQIEDEIKGCLDFLRTVYSVFGFSFKLNLSTRPEKFLGDIEVWDQAEKQLENSLNEFGEKWELNSGDGAFYGPKIDIQIKDAIGRYHQCATIQLDFQLPIRFNLTYVSHDGDDKKRPVIVHRAILGSVERMIAILTENYGGKWPFWLSPRQVMVVPVGPTCDEYAQKVRQQFHDAKFMADIDLDPGCTLNKKIRNAQLAQYNFILVVGEKEKISGTVNIRTRDNKVHGERTISETIERLQQLKEFRSKQAEEEF

SEQ ID NO: 22891 - protein, 94 aa, Homo sapiens
MDIYLLFSGVYFFTFSMMKHEDVEEVYVYLMHNGNTVFSMYSYEMKGKSDTSSNHAVLKLAKGDEVWLRMGNGALHGDHQRFSTFAGFLLFETK

SEQ ID NO: 22892 - protein, 177 aa, Homo sapiens
MAATKRKRRGGFAVQAKKPKRNEIDAEPPAKRHATAEEVEEEERDRIPGPVCKGKWKNKERILIFSSRGINFRTRHLMQDLRMLMPHSKADTKMDRKDKLFVINEVCEMKNCNKCIYFEAKKKQDLYMWLSNSPHGPSAKFLVQNIHTLAELKMTGNCLKGSRPLLSFDPVSFSFSV

SEQ ID NO: 22893 - protein, 19 aa, Homo sapiens
LFVTKTVILLLLPPNCIRP

SEQ ID NO: 22894 - protein, 396 aa, Homo sapiens
LLLVAFLLSGVLLSEAAKILTISTLDIKEEEKSYQVIRWFSPEDHQKRIKKHFDSYIETALDGRKESEALVKLMEIFGTQCSYLLSRKDIMDSLKNENYDLVFVEAFDFCSFLIAEKLVKPFVAILPTTFGSLDFGLPSPLSYVPVFPSLLTDHMDFWGRVKNFLMFFSFSRSQWDMQSTFDNTIKEHFPEGSRPVLSHLLLKAELWFVNSDFAFDFARPLLPNTVYIGGLMEKPIKPVPQDLDNFIANFGDAGFVLVAFGSMLNTHQSQEVLKKMHNAFAHLPQGVIWTCQSSHWPRDVHLATNVKIVDWLPQSDLLAHPSIRLFVTHGGQNSVMEAIRHGVPMVGLPVNGDQHGNMVRVVAKNYGVSIRLNQVTADTLTLTMKQVIEDKRYVAL

SEQ ID NO: 22895 - protein, 100 aa, Homo sapiens
MLVVILCIATYFSLGTRCLNLLGFQQFMGDDDMTSDLVNEGKELIRKEKRKRQRQEEGENRRREWKERYGHNREDSTRNRNIHTDPKESNFSDVNTNRCK

SEQ ID NO: 22896 - protein, 65 aa, Homo sapiens
MTKSNGEEPKMGGRMERFQQGVRKRTLLAKKKVQNITKEDVKSYLFRNAFVLLTVTAVIVGESFD

SEQ ID NO: 22897 - protein, 45 aa, Homo sapiens
MGILPGTKDAKLKTTIKAFFPKKHRRRFNHQMRGLTHLCILALIL

SEQ ID NO: 22898 - protein, 56 aa, Homo sapiens
LDSKILSLSLLTGIPISLVARCTYTSSTAVRTDRRQSFHVALSKSHLTSRPQCPHL

SEQ ID NO: 22899 - protein, 40 aa, Homo sapiens
MGILPGTKDAKMSSKMDCLISSTRLLQASSSSSSGDTLCS

SEQ ID NO: 22900 - protein, 139 aa, Homo sapiens
LKAKKNPKFLLIMIFFLGMNSSDELCESVSVHPLQMTGLTDIADIIDDLIIKDGVSSEELGLTEQAMGTSRIQHYSGRHSQRTDKERREIQAWMKRKRKERMAKYLNELAEKRGQEHDPFCPRSNPANDGYSILTRGGG

SEQ ID NO: 22901 - protein, 71 aa, Homo sapiens
LKAKKNPKFLLIMIFFLGMNSSDELCESVSVHPLQMTGLTDIADIIDDLIIKDGVSSEELGLTEQAMGTSR

SEQ ID NO: 22902 - protein, 1005 aa, Homo sapiens [sequence omitted]

SEQ ID NO: 22903 - protein, 1342 aa, Homo sapiens
LVFDFFWTLVSTISEMPSSLLGAAMPASTSAAALQEALENAGRLIDRQLQEDRMYPDLSELLMVSAPNNPTVSGMSDMDYPLQGPGLLSVPNLPEISSIRRVPLPPELVEQFGHMQCNCMMGVFPPISRAWLTIDSDIFMWNYEDGGDLAYFDGLSETILAVGLVKPKAGIFQPHVRHLLVLATPVDIVILGLSYANLQTGSGVLNDSLSGGMQLLPDPLYSLPTDNTYLLTITSTDNGRIFLAGKDGCLYEVAYQAEAGWFSQRCRKINHSKSSLSFLVPSLLQFTFSEDDPILQIAIDNSRNILYTRSEKGVIQVYDLGQDGQGMSRVASVSQNAIVSAAGNIARTIDRSVFKPIVQIAVIENSESLDCQLLAVTHAGVRLYFSTCPFRQPLARPNTLTLVHVRLPPGFSASSTVEKPSKVHRALYSKGILLMAASENEDNDILWCVNHDTFPFQKPMMETQMTAGVDGHSWALSAIDELKVDKIITPLNKDHIPITDSPVVVQQHMLPPKKFVLLSAQGSLMFHKLRPVDQLRHLLVSNVGGDGEEIERFFKLHQEDQACATCLILACSTAACDREVSAWATRAFFRYGGEAQMRFPTTLPPPSNVGPILGSPVYSSSPVPSGSPYPNPSFLGTPSHGIQPPAMSTPVCALGNPATQATNMSCVTGPEIVYSGKHNGICIYFSRIMGNIWDASLVVERIFKSGNREITAIESSVPCQLLESVLQELKGLQEFLDRNSQFAGGPLGNPNTTAKVQQRLIGFMRPENGNPQQMQQELQRKFHEAQLSEKISLQAIQQLVRKSYQALALWKLLCEHQFTIIVAELQKANELLQRSRQVQNKTEKERMLRESLKEYQKISNQVDLSNVCAQYRQVRFYEGVVELSLTAAEKKDPQGLGLHFYKHGEPEEDIVGLQAFQERLNSYKCITDTLQELVNQSKAAPQSPSVPKKPGPPVLSSDPNMLSNEEAGHHFEQMLKLSQRSKDELFSIALYNWLIQVDLADKLLQVASPFLEPHLVRMAKVDQNRVRYMDLLWRYYEKNRSFSNAARVLSRLADMHSTEISLQQRLEYIARAILSAKSSTAISSIAADGEFLHELEEKMEVARIQLQIQETLQRQYSHHSSVQDAVSQLDSELMDITKLYGEFADPFKLAECKLAIIHCAGYSDPILVQTLWQDIIEKELSDSVTLSSSDRMHALSLKIVLLGKIYAGTPRFFPLDFIVQFLEQQVCTLNWDVGFVIQTMNEIGVPLPRLLEVYDQLFKSRDPFWNRMKKPLHLLDCIHVLLIRYVENPSQVLNCERRRFTNLCLDAVCGYLVELQSMSSSVAVQAITGNFKSLQAKLERLH

SEQ ID NO: 22904 - protein, 10 aa, Homo sapiens
LDLFLFLLGF

SEQ ID NO: 22905 - protein, 16 aa, Homo sapiens
MSGRGMGQVWVFFLCS

SEQ ID NO: 22906 - protein, 195 aa, Homo sapiens
LGAAAGRDFKMKLWDVVAVCLVLLHTASAFPLPAANMPEDYPDQFDDVMDFIQATIKRLKRSPDKQMAVLPRRERNRQAAAANPENSRGKGRRGQRGKNRGCVLTAIHLNVTDLGLGYETKEELIFRYCSGSCDAAETTYDKILKNLSRNRRLVSDKVGQACCRPIAFDDDLSFLDDNLVYHILRKHSAKRCGCI

SEQ ID NO: 22907 - protein, 99 aa, Homo sapiens
MPGFLFFFVLVFCRDGQSGKITVDDYGARTGKSPGMMRQLNINGALYVGGMKEIALHTNRQYMRGLVGCISHFTLSTDYHISLVEDAVDGKNINTCGAK

SEQ ID NO: 22908 - protein, 980 aa, Homo sapiens
LMALFAVFQTTFFLTLLSLRTYQSEVLAERLPLTPVSLKVSTNSTRQSLHLQWTVHNLPYHQELKMVFQIQISRIETSNVIWVGNYSTTVKWNQVLHWSWESELPLECATHFVRIKSLVDDAKFPEPNFWSNWSSWEEVSVQDSTGQDILFVFPKDKLVEEGTNVTICYVSRNIQNNVSCYLEGKQIHGEQLDPHVTAFNLNSVPFIRNKGTNIYCEASQGNVSEGMKGIVLFVSKVLEEPKDFSCETEDFKTLHCTWDPGTDTALGWSKQPSQSYTLFESFSGEKKLCTHKNWCNWQITQDSQETYNFTLIAENYLRKRSVNILFNLTHRVYLMNPFSVNFENVNATNAIMTWKVHSIRNNFTYLCQIELHGEGKMMQYNVSIKVNGEYFLSELEPATEYMARVRCADASHFWKWSEWSGQNFTTLEAAPSEAPDVWRIVSLEPGNHTVTLFWKPLSKLHANGKILFYNVVVENLDKPSSSELHSIPAPANSTKLILDRCSYQICVIANNSVGASPASVIVISADPENKEVEEERIAGTEGGFSLSWKPQPGDVIGYVVDWCDHTQDVLGDFQWKNVGPNTTSTVISTDAFRPGVRYDFRIYGLSTKRIACLLEKKTGYSQELAPSDNPHVLVDTLTSHSFTLSWKDYSTESQPGFIQGYHVYLKSKARQCHPRFEKAVLSDGSECCKYKIDNPEEKALIVDNLKPESFYEFFITPFTSAGEGPSATFTKVTTPDEHSSMLIHILLPMVFCVLLIMVMCYLKSQWIKETCYPDIPDPYKSSILSLIKFKENPHLIIMNVSDCIPDAIEVVSKPEGTKIQFLGTRKSLTETELTKPNYLYLLPTEKNHSGPGPCICFENLTYNQAASDSGSCGHVPVSPKAPSMLGLMTSPENVLKALEKNYMNSLGEIPAGETSLNYVSQLASPMFGDKDSLPTNPVEAPHCSEYKMQMAVSLRLALPPPTENSSLSSITLLDPGEHYC

SEQ ID NO: 22909 - protein, 21 aa, Homo sapiens
MDCPQPSLSSGIENGISDPDQ

SEQ ID NO: 22910 - protein, 1713 aa, Homo sapiens
LKPVNMAAIGRGRSLKNLRVRGRNDSGEENVPLDLTREPSDNLREILQNVARLQGVSNMRKLGHLNNFTKLLCDIGHSEEKLGFHYEDIIICLRLALLNEAKEVRAAGLRALRYLIQDSSILQKVLKLKVDYLIARCIDIQQSNEVERTQALRLVRKMITVNASLFPSSVTNSLIAVGNDGLQERDRMVRACIAIICELALQNPEVVALRGGLNTILKNVIDCQLSRINEALITTILHLLNHPKTRQYVRADVELERILAPYTDFHYRHSPDTAEGQLKEDREARFLASKMGIIATFRSWAGIINLCKPGNSGIQSLIGVLCIPNMEIRRGLLEVLYDIFRLPLPVVTEEFIEALLSVDPGRFQDSWRLSDGFVAAEAKTILPHRARSRPDLMDNYLALILSAFIRNGLLEGLVEVITNSDDHISVRATILLGELLHMANTILPHSHSHHLHCLPTLMNMAASFDIPKEKRLRASAALNCLKRFHEMKKRGPKPYSLHLDHIIQKAIATHQKRDQYLRVQKDIFILKDTEEALLINLRDSQVLQHKENLEWNWNLIGTILKWPNVNLRNYKDEQLHRFVRRLLYFYKPSSKLYANLDLDFAKAKQLTVVGCQFTEFLLESEEDGQGYLEDLVKDIVQWLNASSGMKPERSLQNNGLLTTLSQHYFLFIGTLSCHPHGVKMLEKCSVFQCLLNLCSLKNQDHLLKLTVSSLDYSRDGLARVILSKILTAATDACRLYATKHLRVLLRANVEFFNNWGIELLVTQLHDKNKTISSEALDILDEACEDKANLHALIQMKPALSHLGDKGLLLLLRFLSIPKGFSYLNERGYVAKQLEKWHREYNSKYVDLIEEQLNEALTTYRKPVDGDNYVRRSNQRLQRPHVYLPIHLYGQLVHHKTGCHLLEVQNIITELCRNVRTPDLDKWEEIKKLKASLWALGNIGSSNWGLNLLQEENVIPDILKLAKQCEVLSIRGTCVYVLGLIAKTKQGCDILKCHNWDAVRHSRKHLWPVVPDDVEQLCNELSSIPSTLSLNSESTSSRHNSESESVPSSMFILEDDRFGSSSTSTFFLDINEDTEPTFYDRSGPIKDKNSFPFFASSKLVKNRILNSLTLPNKKHRSSSDPKGGKLSSESKTSNRRIRTLTEPSVDFNHSDDFTPISTVQKTLQLETSFMGNKHIEDTGSTPSIGENDLKFTKNFGTENHRENTSRERLVVESSTSSHMKIRSQSFNTDTTTSGISSMSSSPSRETVGVDATTMDTDCGSMSTVVSTKTIKTSHYLTPQSNHLSLSKSNSVSLVPPGSSHTLPRRAQSLKAPSIATIKSLADCNFSYTSSRDAFGYATLKRLQQQRMHPSLSHSEALASPAKDVLFTDTITMKANSFESRLTPSRFMKALSYASLDKEDLLSPINQNTLQRSSSVRSMVSSATYGGSDDYIGLALPVDINDIFQVKDIPYFQTKNIPPHDDRGARAFAHDAGGLPSGTGGLVKNSFHLLRQQMSLTEIMNSIHSDASLFLESTEDTGLQEHTDDNCLYCVCIEILGFQPSNQLSAICSHSDFQDIPYSDWCEQTIHNPLEVVPSKFSGISGCSDGVSQEGSASSTKSTELLLGVKTIPDDTPMCRILLRKEVLRLVINLSSSVSTKCHETGLLTIKEKYPQTFDDICLYSEVSHLLSHCTFRLPCRRFIQELFQDVQFLQMHEEAEAVLATPPKQPIVDTSAES

SEQ ID NO: 22911 - protein, 1737 aa, Homo sapiens
LKPVNMAAIGRGRSLKNLRVRGRNDSGEENVPLDLTREPSDNLREILQNVARLQGVSNMRKLGHLNNFTKLLCDIGHSEEKLGFHYEDIIICLRLALLNEAKEVRAAGLRALRYLIQDSSILQKVLKLKVDYLIARCIDIQQSNEVERTQALRLVRKMITVNASLFPSSVTNSLIAVGNDGLQERDRMVRACIAIICELALQNPEVVALRGGLNTILKNVIDCQLSRINEALITTILHLLNHPKTRQYVRADVELERILAPYTDFHYRHSPDTAEGQLKEDREARFLASKMGIIATFRSWAGIINLCKPGNSGIQSLIGVLCIPNMEIRRGLLEVLYDIFRLPLPVVTEEFIEALLSVDPGRFQDSWRLSDGFVAAEAKTILPHRARSRPDLMDNYLALILSAFIRNGLLEGLVEVITNSDDHISVRATILLGELLHMANTILPHSHSHHLHCLPTLMNMAASFDIPKEKRLRASAALNCLKRFHEMKKRGPKPYSLHLDHIIQKAIATHQKRDQYLRVQKDIFILKDTEEALLINLRDSQVLQHKENLEWNWNLIGTILKWPNVNLRNYKDEQLHRFVRRLLYFYKPSSKLYANLDLDFAKAKQLTVVGCQFTEFLLESEEDGQGYLEDLVKDIVQWLNASSGMKPERSLQNNGLLTTLSQHYFLFIGTLSCHPHGVKMLEKCSVFQCLLNLCSLKNQDHLLKLTVSSLDYSRDGLARVILSKILTAATDACRLYATKHLRVLLRANVEFFNNWGIELLVTQLHDKNKTISSEALDILDEACEDKANLHALIQMKPALSHLGDKGLLLLLRFLSIPKGFSYLNERGYVAKQLEKWHREYNSKYVDLIEEQLNEALTTYRKPVDGDNYVRRSNQRLQRPHVYLPIHLYGQLVHHKTGCHLLEVQNIITELCRNVRTPDLDKWEEIKKLKASLWALGNIGSSNWGLNLLQEENVIPDILKLAKQCEVLSIRGTCVYVLGLIAKTKQGCDILKCHNWDAVRHSRKHLWPVVPDDVEQLCNELSSIPSTLSLNSESTSSRHNSESESVPSSMFILEDDRFGSSSTSTFFLDINEDTEPTFYDRSGPIKDKNSFPFFASSKLVKNRILNSLTLPNKKHRSSSDPKGGKLSSESKTSNRRIRTLTEPSVDFNHSDDFTPISTVQKTLQLETSFMGNKHIEDTGSTPSIGENDLKFTKNFGTENHRENTSRERLVVESSTSSHMKIRSQSFNTDTTTSGISSMSSSPSRETVGVDATTMDTDCGSMSTVVSTKTIKTSHYLTPQSNHLSLSKSNSVSLVPPGSSHTLPRRAQSLKAPSIATIKSLADCNFSYTSSRDAFGYATLKRLQQQRMHPSLSHSEALASPAKDVLFTDTITMKANSFESRLTPSRIDFKKKHVGGIRSLRPTITNNLFRFMKALSYASLDKEDLLSPINQNTLQRSSSVRSMVSSATYGGSDDYIGLALPVDINDIFQVKDIPYFQTKNIPPHDDRGARAFAHDAGGLPSGTGGLVKNSFHLLRQQMSLTEIMNSIHSDASLFLESTEDTGLQEHTDDNCLYCVCIEILGFQPSNQLSAICSHSDFQDIPYSDWCEQTIHNPLEVVPSKFSGISGCSDGVSQEGSASSTKSTELLLGVKTIPDDTPMCRILLRKEVLRLVINLSSSVSTKCHETGLLTIKEKYPQTFDDICLYSEVSHLLSHCTFRLPCRRFIQELFQDVQFLQMHEEAEAVLATPPKQPIVDTSAES

SEQ ID NO: 22912 - protein, 760 aa, Homo sapiens
LVLRFAACLLAMSNEVETSATNGQPDQQAAPKAPSKKEKKKGPEKTDEYLLARFKGDGVKYKAKLIGIDDVPDARGDKMSQDSMMKLKGMAAAGRSQGQHKQRIWVNISLSGIKIIDEKTGVIEHEHPVNKISFIARDVTDNRAFGYVCGGEGQHQFFAIKTGQQAEPLVVDLKDLFQVIYNVKKKEEEKKKIEEASKAVENGSEALMILDDQTNKLKSESKDILLVDLNSEIDTNQNSLRENPFLTNGITSCSLPRPTPQASFLPENAFSANLNFFPTPNPDPFRDDPFTQPDQSTPSSFDSLKSPDQKKENSSSSSTPLSNGPLNGDVDYFGQQFDQISNRTGKQEAQAGPWPFSSSQTQPAVRTQNGVSEREQNGFSVKSSPNPFVGSPPKGLSIQNGVKQDLESSVQSSPHDSIAIIPPPQSTKPGRGRRTAKSSANDLLASDIFAPPVSEPSGQASPTGQPTALQPNPLDLFKTSAPAPVGPLVGLGGVTVTLPQAGPWNTASLVFNQSPSMAPGAMMGGQPSGFSQPVIFGTSPAVSGWNQPSPFAASTPPPVPVVWGPSASVAPNAWSTTSPLGNPFQSNIFPAPAVSTQPPSMHSSLLVTPPQPPPRAGPPKDISSDAFTALDPLGDKEIKDVKEMFKDFQLRQPPAVPARKGEQTSSGTLSAFASYFNSKVGIPQENADHDDFDANQLLNKINEPPKPAPRQVSLPVTKSTDNAFENPFFKDSFGSSQASVASSQPVSSEMYRDPFGNPFA

SEQ ID NO: 22913 - protein, 563 aa, Homo sapiens
LVLRFAACLLAMSNEVETSATNGQPDQQAAPKAPSKKEKKKGPEKTDEYLLARFKGDGVKYKAKLIGIDDVPDARGDKMSQDSMMKLKGMAAAGRSQGQHKQRIWVNISLSGIKIIDEKTGVIEHEHPVNKISFIARDVTDNRAFGYVCGGEGQHQFFAIKTGQQAEPLVVDLKDLFQVIYNVKKKEEEKKKIEEASKAVENGSEALMILDDQTNKLKSGVDQMDLFGDMSTPPDLNSPTSSANDLLASDIFAPPVSEPSGQASPTGQPTALQPNPLDLFKTSAPAPVGPLVGLGGVTVTLPQAGPWNTASLVFNQSPSMAPGAMMGGQPSGFSQPVIFGTSPAVSGWNQPSPFAASTPPPVPVVWGPSASVAPNAWSTTSPLGNPFQSNIFPAPAVSTQPPSMHSSLLVTPPQPPPRAGPPKDISSDAFTALDPLGDKEIKDVKEMFKDFQLRQPPAVPARKGEQTSSGTLSAFASYFNSKVGIPQENADHDDFDANQLLNKINEPPKPAPRQVSLPVTKSTDNAFENPFFKDSFGSSQASVASSQPVSSEMYRDPFGNPFA

SEQ ID NO: 22914 - protein, 781 aa, Homo sapiens
LVLRFAACLLAMSNEVETSATNGQPDQQAAPKAPSKKEKKKGPEKTDEYLLARFKGDGVKYKAKLIGIDDVPDARGDKMSQDSMMKLKGMAAAGRSQGQHKQRIWVNISLSGIKIIDEKTGVIEHEHPVNKISFIARDVTDNRAFGYVCGGEGQHQFFAIKTGQQAEPLVVDLKDLFQVIYNVKKKEEEKKKIEEASKAVENGSEALMILDDQTNKLKSGVDQMDLFGDMSTPPDLNSPTESKDILLVDLNSEIDTNQNSLRENPFLTNGITSCSLPRPTPQASFLPENAFSANLNFFPTPNPDPFRDDPFTQPDQSTPSSFDSLKSPDQKKENSSSSSTPLSNGPLNGDVDYFGQQFDQISNRTGKQEAQAGPWPFSSSQTQPAVRTQNGVSEREQNGFSVKSSPNPFVGSPPKGLSIQNGVKQDLESSVQSSPHDSIAIIPPPQSTKPGRGRRTAKSSANDLLASDIFAPPVSEPSGQASPTGQPTALQPNPLDLFKTSAPAPVGPLVGLGGVTVTLPQAGPWNTASLVFNQSPSMAPGAMMGGQPSGFSQPVIFGTSPAVSGWNQPSPFAASTPPPVPVVWGPSASVAPNAWSTTSPLGNPFQSNIFPAPAVSTQPPSMHSSLLVTPPQPPPRAGPPKDISSDAFTALDPLGDKEIKDVKEMFKDFQLRQPPAVPARKGEQTSSGTLSAFASYFNSKVGIPQENADHDDFDANQLLNKINEPPKPAPRQVSLPVTKSTDNAFENPFFKDSFGSSQASVASSQPVSSEMYRDPFGNPFA

SEQ ID NO: 22915 - protein, 127 aa, Homo sapiens
LVLRFAACLLAMSNEVETSATNGQPDQQAAPKAPSKKEKKKGPEKTDEYLLARFKGDGVKYKAKLIGIDDVPDARGDKMSQDSMMKLKGMAAAGRSQGQHKQRIWVNISLSGIKIIDEKTGVRIHIC

SEQ ID NO: 22916 - protein, 7 aa, Homo sapiens
MLASRRQ

SEQ ID NO: 22917 - protein, 38 aa, Homo sapiens
LFLDPYKILCNRHIHVTFSCAQKGYHHPTTHIREHPGF

SEQ ID NO: 22918 - protein, 44 aa, Homo sapiens
LYCYIIPVKTNTFFSLFYKALKTLETTYFLLVSFHLMTGNYFSR

SEQ ID NO: 22919 - protein, 38 aa, Homo sapiens
LEAFYLLLFLRQGFTMLPRLECSGTITAQCSLSLPSLR

SEQ ID NO: 22920 - protein, 645 aa, Homo sapiens
LGKGPTGMDLWQLLLTLALAGSSDAFSGSEATAAILSRAPWSLQSVNPGLKTNSSKEPKFTKCRSPERETFSCHWTDEVHHGTKNLGPIQLFYTRRNTQEWTQEWKECPDYVSAGENSCYFNSSFTSIWIPYCIKLTSNGGTVDEKCFSVDEIVQPDPPIALNWTLLNVSLTGIHADIQVRWEAPRNADIQKGWMVLEYELQYKEVNETKWKMMDPILTTSVPVYSLKVDKEYEVRVRSKQRNSGNYGEFSEVLYVTLPQMSQFTCEEDFYFPWLLIIIFGIFGLTVMLFVFLFSKQQRIKMLILPPVPVPKIKGIDPDLLKEGKLEEVNTILAIHDSYKPEFHSDDSWVEFIELDIDEPDEKTEESDTDRLLSSDHEKSHSNLGVKDGDSGRTSCCEPDILETDFNANDIHEGTSEVAQPQRLKGEADLLCLDQKNQNNSPYHDACPATQQPSVIQAEKNKPQPLPTEGAESTHQAAHIQLSNPSSLSNIDFYAQVSDITPAGSVVLSPGQKNKAGMSQCDMHPEMVSLCQENFLMDNAYFCEADAKKCIPVAPHIKVESHIQPSLNQEDIYITTESLTTAAGRPGTGEHVPGSEMPVPDYTSIHIVQSPQGLILNATALPLPDKEFLSSCGYVSTDQLNKIMP

SEQ ID NO: 22921 - protein, 70 aa, Homo sapiens
VTGFLFYRTTPAMWRSLGLALALCLLPSGGTESQDQSSLCKQPPAWSIRDQDPMLNSNGSVTVVALLQAS

SEQ ID NO: 22922 - protein, 94 aa, Homo sapiens
MTRERGHRGWGETSDLPSGATSVPHKIQSPFRTTPAMWRSLGLALALCLLPSGGTESQDQSSLCKQPPAWSIRDQDPMLNSNGSVTVVALLQAS

SEQ ID NO: 22923 - protein, 84 aa, Homo sapiens
LVFVLSGYLLGLRNHILAIPRLEPGDRNRSHRLGAAAHAVILAVWEAEAGRLLRLGVRDQPGQYDETPPLVKIQKLSGRGGERL

SEQ ID NO: 22924 - protein, 75 aa, Homo sapiens
LFCFVLFCFVLTGTSSVTWVGMQWHDPGSLQPPSPRHKRSCHLSLLSSWDCRCVPPCLANFCIFCRDSVSSHCQG

SEQ ID NO: 22925 - protein, 28 aa, Homo sapiens
LLLALLLLSPLKSVASGLRKPVFFLAVP

SEQ ID NO: 22926 - protein, 16 aa, Homo sapiens
MVVMIRNPRPLETRSC

SEQ ID NO: 22927 - protein, 14 aa, Homo sapiens
MTIVYLGKSLCSIC

SEQ ID NO: 22928 - protein, 574 aa, Homo sapiens
LWEPPSRLPATLGGAGVGWVGGYKAGGEGEAPRTVLSWLTPFPLLPLGHACSFTMPGSLPLNAEACWPKDVGIVALEIYFPSQYVDQAELEKYDGVDAGKYTIGLGQAKMGFCTDREDINSLCMTVVQNLMERNNLSYDCIGRLEVGTETIIDKSKSVKTNLMQLFEESGNTDIEGIDTTNACYGGTAAVFNAVNWIESSSWDGRYALVVAGDIAVYATGNARPTGGVGAVALLIGPNAPLIFERGLRGTHMQHAYDFYKPDMLSEYPIVDGKLSIQCYLSALDRCYSVYCKKIHAQWQKEGNDKDFTLNDFGFMIFHSPYCKLVQKSLARMLLNDFLNDQNRDKNSIYSGLEAFGDVKLEDTYFDRDVEKAFMKASSELFSQKTKASLLVSNQNGNMYTSSVYGSLASVLAQYSPQQLAGKRIGVFSYGSGLAATLYSLKVTQDATPGSALDKITASLCDLKSRLDSRTGVAPDVFAENMKLREDTHHLVNYIPQGSIDSLFEGTWYLVRVDEKHRRTYARRPTPNDDTLDEGVGLVHSNIATEHIPSPAKKVPRLPATAAEPEAAVISNGEH

SEQ ID NO: 22929 - protein, 175 aa, Homo sapiens
LLPLGHACSFTMPGSLPLNAEACWPKDVGIVALEIYFPSQYVDQAELEKYDGVDAGKYTIGLGQAKMGFCTDREDINSLCMTVVQNLMERNNLSYDCIGRLEVGTETIIDKSKSVKTNLMQLFEESGNTDIEGIDTTNACYGGTAAVFNAVNWIESSSWDGMLHAYSPPSPKIFF

SEQ ID NO: 22930 - protein, 201 aa, Homo sapiens
VAHSLSSAAARSRLCPKEETVTDLETAVLYPSHSSFTMPGSLPLNAEACWPKDVGIVALEIYFPSQYVDQAELEKYDGVDAGKYTIGLGQAKMGFCTDREDINSLCMTVVQNLMERNNLSYDCIGRLEVGTETIIDKSKSVKTNLMQLFEESGNTDIEGIDTTNACYGGTAAVFNAVNWIESSSWDGMLHAYSPPSPKIFF

SEQ ID NO: 22931 - protein, 137 aa, Homo sapiens
LLSVPVGQAGMQQRGLAIVALAVCAALHASEAILPIASSCCTEVSHHISRRLLERVNMCRIQRADGDCDLAAVILHVKRRRICVSPHNHTVKQWMKVQAAKKNGKGNVCHRKKHHGKRNSNRAHQGKHETYGHKTPY

SEQ ID NO: 22932 - protein, 74 aa, Homo sapiens
LLSVPVGQAGMQQRGLAIVALAVCAALHASEAILPIASSCCTEVSHHISRRLLERVNMCRIQRADGDCDLAAVM

SEQ ID NO: 22933 - protein, 76 aa, Homo sapiens
MNQHFIHLMVFLSLQLIQITKRNTKNYLKERTFFQIMKKMEQIYPGYLDDIDDEMDPEIEEAYEKFCLESERKRKQ

SEQ ID NO: 22934 - protein, 41 aa, Homo sapiens
LFITKEFMKKKAFAICLRKLFFKKKSYLLLVSMEVYVTIFM

SEQ ID NO: 22935 - protein, 387 aa, Homo sapiens
LAMKLVRKNIEKDNAGQVTLVPEEPEDMWHTYNLVQVGDSLRASTIRKVQTESSTGSVGSNRVRTTLTLCVEAIDFDSQACQLRVKGTNIQENEYVKMGAYHTIELEPNRQFTLAKKQWDSVVLERIEQACDPAWSADVAAVVMQEGLAHICLVTPSMTLTRAKVEVNIPRKRKGNCSQHDRALERFYEQVVQAIQRHIHFDVVKCILVASPGFVREQFCDYLFQQAVKTDNKLLLENRSKFLQVHASSGHKYSLKEALCDPTVASRLSDTKAAGEVKALDDFYKMLQHEPDRAFYGLKQVEKANEAMAIDTLLISDELFRHQDVATRSRYVRLVDSVKENAGTVRIFSSLHVSGEQLSQLTGVAAILRFPVPELSDQEGDSSSEED

SEQ ID NO: 22936 - protein, 32 aa, Homo sapiens
LKLKIETILCFLNCYSTFLSILVTESCKNGTF

SEQ ID NO: 22937 - protein, 238 aa, Homo sapiens
LLCFIFLLINFLSSASEYHISIAANETVPEVINSTEDIGNEINIFYLIRKSGSFPMPELKLSISFPNMTSNGYPVLYPTGLSSSENANCRPHIFEDPFSINSGKKMTTSTDHLKRGTILDCNTCKFATITCNLTSSDISQVNVSLILWKPTFIKSYFSSLNLTIRGELRSENASLVLSSSNQKRELAIQISKDGLPGRVPLWVILLSAFAGLLLLMLLILALWKIGFFKRPLKKKMEK

SEQ ID NO: 22938 - protein, 119 aa, Homo sapiens
VLLSHLGTTRNNFEGKKVISLEYEAYLPMAENEVRKICSDIRQKWPVKHIAVFHRLGLVPVSEASIIIAVSSAHRAASLEAVSYAIDTLKAKVPIWKKEIYEESSTWKGNKECFWASNS

SEQ ID NO: 22939 - protein, 115 aa, Homo sapiens
MSVVLRQTLWRRRAVAVAALSVSRVPTRSLRTSTWRLAQDQTQDTQLITVDEKLDITTLTGVPEEHIKTRKVRIFVPARNNMQSGVNNTKKWKMEFDTRERWENPLMGWASTMEL

SEQ ID NO: 22940 - protein, 207 aa, Homo sapiens
LLSFFGIGCLWGSFSRSRLCFRALCCKGPPPARPEYDLVCIGLTGSGKTSLLSKLCSESPDNVVSTTGFSIKAVPFQNAILNVKELGGADNIRKYWSRYYQGSQGVIFVLDSASSEDDLEAARNELHSALQHPQLCTLPFLILANHQDKPAARSVQEIKKYFELEPLARGKRWILQPCSLDDMDALKDSFSQLINLLEEKDHEAVRM

SEQ ID NO: 22941 - protein, 159 aa, Homo sapiens
LFKAVFAFTMAKIILRHLIEIPVRYQEEFEARGLEDCRLDHALYALPGPTIVDLRKTRAAQSPPVDSAAETPPREGKSHFQILLDVVQFLPEDIIIQTFEGWLLIKAQHGTRMDEHGFISRSFTRQYKLPDGVEIKDLSAVLCHDGILVVEVKDPVGTK

SEQ ID NO: 22942 - protein, 54 aa, Homo sapiens [sequence omitted]

SEQ ID NO: 22943 - protein, 420 aa, Homo sapiens
LASEPAGTEGSAGCGSLPQPGPPPPSSRHPEAGGTMQACGGGAAGRRAFDSICPNRMLALPGRALLCKPGKPERKFAPPRKFFPGCTGGSPVSVYEDPPDAEPTALPALTTIDLQDLADCSSLLGSDAPPGGDLAASQNHSHQTEADFNLQDFRDTVDDLISDSSSMMSPTLASGDFPFSPCDISPFGPCLSPPLDPRALQSPPLRPPDVPPPEQYWKEVADQNQRALGDALVENNQLHVTLTQKQEEIASLKERNVQLKELASRTRHLASVLDKLMITQSRDCGAAAEPFLLKAKAKRSLEELVSAAGQDCAEVDAILREISERCDEALQSRDPKRPRLLPEPANTDTRPGNLHGAFRGLRTDCSRSALNLSHSELEEGGSFSTRIRSHSTIRTLAFPQGNAFTIRTANGGYKFRWVPS

SEQ ID NO: 22944 - protein, 214 aa, Homo sapiens
LASEPAGTEGSAGCGSLPQPGPPPPSSRHPEAGGTMQACGGGAAGRRAFDSICPNRMLALPGRALLCKPGKPERKFAPPRKFFPGCTGGSPVSVYEDPPDAEPTALPALTTIDLQDLADCSSLLGSDAPPGGDLAASQNHSHQTEADFNLQDFRDTVDDLISGKLILYDVAYPGQRRLPLLSLRHITIRALPLPATGPTGPAVTTAAPSRRAPA

SEQ ID NO: 22945 - protein, 1387 aa, Homo sapiens
VVPSGPGPRRIFCHSCNMGGKNKKHKAPAAAVVRAAVSASRAKSAEAGIAGEAQSKKPVSRPATAAAAAAGSREPRVKQGPKIYSFNSTNDSSGPANLDKSILKVVINNKLEQRIIGVINEHKKQNNDKGMISGRLTAKKLQDLYMALQAFSFKTKDIEDAMTNTLLYGGDLHSALDWLCLNLSDDALPEGFSQEFEEQQPKSRPKFQSPQIQATISPPLQPKTKTYEEDPKSKPKKEEKNMEVNMKEWILRYAEQQNEEEKNENSKSLEEEEKFDPNERYLHLAAKLLDAKEQAATFKLEKNKQGQKEAQEKIRKFQREMETLEDHPVFNPAMKISHQQNERKKPPVATEGESALNFNLFEKSAAATEEEKGKKKEPHDVRNFDYTARSWTGKSPKQFLIDWVRKNLPKSPNPSFEKVPVGRYWKCRVRVIKSEDDVLVVCPTILTEDGMQAQHLGATLALYRLVKGQSVHQLLPPTYRDVWLEWSDAEKKREELNKMETNKPRDLFIAKLLNKLKQQQQQQQQHSENKRENSEDPEESWENLVSDEDFSALSLESANVEDLEPVRNLFRKLQSTPKYQKLLKERQQLPVFKHRDSIVETLKRHRVVVVAGETGSGKSTQVPHFLLEDLLLNEWEASKCNIVCTQPRRISAVSLANRVCDELGCENGPGGRNSLCGYQIRMESRACESTRLLYCTTGVLLRKLQEDGLLSNVSHVIVDEVHERSVQSDFLLIILKEILQKRSDLHLILMSATVDSEKFSTYFTHCPILRISGRSYPVEVFHLEDIIEETGFVLEKDSEYCQKFLEEEEEVTINVTSKAGGIKKYQEYIPVQTGAHADLNPFYQKYSSRTQHAILYMNPHKINLDLILELLAYLDKSPQFRNIEGAVLIFLPGLAHIQQLYDLLSNDRRFYSERYKVIALHSILSTQDQAAAFTLPPPGVRKIVLATNIAETGITIPDVVFVIDTGRTKENKYHESSQMSSLVETFVSKASALQRQGRAGRVRDGFCFRMYTRERFEGFMDYSVPEILRVPLEELCLHIMKCNLGSPEDFLSKALDPPQLQVISNAMNLLRKIGACELNEPKLTPLGQHLAALPVNVKIGKMLIFGAIFGCLDPVATLAAVMTEKSPFTTPIGRKDEADLAKSALAMADSDHLTIYNAYLGWKKARQEGGYRSEITYCRRNFLNRTSLLTLEDVKQELIKLVKAAGFSSSTTSTSWEGNRASQTLSFQEIALLKAVLVAGLYDNVGKIIYTKSVDVTEKLACIVETAQGKAQVHPSSVNRDLQTHGWLLYQEKIRYARVYLRETTLITPFPVLLFGGDIEVQHRERLLSIDGWIYFQAPVKIAVIFKQLRVLIDSVLRKKLENPKMSLENDKILQIITELIKTENNN

SEQ ID NO: 22946 - protein, 733 aa, Homo sapiens
MMVTLLTFAFVIQMECVPYNSLCGYQIRMESRACESTRLLYCTTGVLLRKLQEDGLLSNVSHVIVDEVHERSVQSDFLLIILKEILQKRSDLHLILMSATVDSEKFSTYFTHCPILRISGRSYPVEVFHLEDIIEETGFVLEKDSEYCQKFLEEEEEVTINVTSKAGGIKKYQEYIPVQTGAHADLNPFYQKYSSRTQHAILYMNPHKINLDLILELLAYLDKSPQFRNIEGAVLIFLPGLAHIQQLYDLLSNDRRFYSERYKVIALHSILSTQDQAAAFTLPPPGVRKIVLATNIAETGITIPDVVFVIDTGRTKENKYHESSQMSSLVETFVSKASALQRQGRAGRVRDGFCFRMYTRERFEGFMDYSVPEILRVPLEELCLHIMKCNLGSPEDFLSKALDPPQLQVISNAMNLLRKIGACELNEPKLTPLGQHLAALPVNVKIGKMLIFGAIFGCLDPVATLAAVMTEKSPFTTPIGRKDEADLAKSALAMADSDHLTIYNAYLGWKKARQEGGYRSEITYCRRNFLNRTSLLTLEDVKQELIKLVKAAGFSSSTTSTSWEGNRASQTLSFQEIALLKAVLVAGLYDNVGKIIYTKSVDVTEKLACIVETAQGKAQVHPSSVNRDLQTHGWLLYQEKIRYARVYLRETTLITPFPVLLFGGDIEVQHRERLLSIDGWIYFQAPVKIAVIFKQLRVLIDSVLRKKLENPKMSLENDKILQIITELIKTENN

SEQ ID NO: 22947 - protein, 1386 aa, Homo sapiens
VVPSGPGPRRIFCHSCNMGGKNKKHKAPAAAVVRAAVSASRAKSAEAGIAGEAQSKKPVSRPATAAAAAAGSREPRVKQGPKIYSFNSTNDSSGPANLDKSILKVVINNKLEQRIIGVINEHKKQNNDKGMISGRLTAKKLQDLYMALQAFSFKTKDIEDAMTNTLLYGGDLHSALDWLCLNLSDDALPEGFSQEFEEQQPKSRPKFQSPQIQATISPPLQPKTKTYEEDPKSKPKKEEKNMEVNMKEWILRYAEQQNEEEKNENSKSLEEEEKFDPNERYLHLAAKLLDAKEQAATFKLEKNKQGQKEAQEKIRKFQREMETLEDHPVFNPAMKISHQQNERKKPPVATEGESALNFNLFEKSAAATEEEKDKKKEPHDVRNFDYTARSWTGKSPKQFLIDWVRKNLPKSPNPSFEKVPVGRYWKCRVRVIKSEDDVLVVCPTILTEDGMQAQHLGATLALYRLVKGQSVHQLLPPTYRDVWLEWSDAEKKREELNKMETNKPRDLFIAKLLNKLKQQQQQQQQHSENKRENSEDPEESWENLVSDEDFSALSLESANVEDLEPVRNLFRKLQSTPKYQKLLKERQQLPVFKHRDSIVETLKRHRVVVVAGETGSGKSTQVPHFLLEDLLLNEWEASKCNIVCTQPRRISAVSLANRVCDELGCENGPGGRNSLCGYQIRMESRACESTRLLYCTTGVLLRKLQEDGLLSNVSHVIVDEVHERSVQSDFLLIILKEILQKRSDLHLILMSATVDSEKFSTYFTHCPILRISGRSYPVEVFHLEDIIEETGFVLEKDSEYCQKFLEEEEEVTINVTSKAGGIKKYQEYIPVQTGAHADLNPFYQKYSSRTQHAILYMNPHKINLDLILELLAYLDKSPQFRNIEGAVLIFLPGLAHIQQLYDLLSNDRRFYSERYKVIALHSILSTQDQAAAFTLPPPGVRKIVLATNIAETGITIPDVVFVIDTGRTKENKYHESSQMSSLVETFVSKASALQRQGRAGRVRDGFCFRMYTRERFEGFMDYSVPEILRVPLEELCLHIMKCNLGSPEDFLSKALDPPQLQVISNAMNLLRKIGACELNEPKLTPLGQHLAALPVNVKIGKMLIFGAIFGCLDPVATLAAVMTEKSPFTTPIGRKDEADLAKSALAMADSDHLTIYNAYLGWKKARQEGGYRSEITYCRRNFLNRTSLLTLEDVKQELIKLVKAAGFSSSTTSTSWEGNRASQTLSFQEIALLKAVLVAGLYDNVGKIIYTKSVDVTEKLACIVETAQGKAQVHPSSVNRDLQTHGWLLYQEKIRYARVYLRETTLITPFPVLLFGGDIEVQHRERLLSIDGWIYFQAPVKIAVIFKQLRVLIDSVLRKKLENPKMSLENDKILQIITELIKTENN

SEQ ID NO: 22948 - protein, 681 aa, Homo sapiens
VVPSGPGPRRIFCHSCNMGGKNKKHKAPAAAVVRAAVSASRAKSAEAGIAGEAQSKKPVSRPATAAAAAAGSREPRVKQGPKIYSFNSTNDSSGPANLDKSILKVVINNKLEQRIIGVINEHKKQNNDKGMISGRLTAKKLQDLYMALQAFSFKTKDIEDAMTNTLLYGGDLHSALDWLCLNLSDDALPEGFSQEFEEQQPKSRPKFQSPQIQATISPPLQPKTKTYEEDPKSKPKKEEKNMEVNMKEWILRYAEQQNEEEKNENSKSLEEEEKFDPNERYLHLAAKLLDAKEQAATFKLEKNKQGQKEAQEKIRKFQREMETLEDHPVFNPAMKISHQQNERKKPPVATEGESALNFNLFEKSAAATEEEKDKKKEPHDVRNFDYTARSWTGKSPKQFLIDWVRKNLPKSPNPSFEKVPVGRYWKCRVRVIKSEDDVLVVCPTILTEDGMQAQHLGATLALYRLVKGQSVHQLLPPTYRDVWLEWSDAEKKREELNKMETNKPRDLFIAKLLNKLKQQQQQQQQHSENKRENSEDPEESWENLVSDEDFSALSLESANVEDLEPVRNLFRKLQSTPKYQKLLKERQQLPVFKHRDSIVETLKRHRVVVVAGETGSGKSTQVPHFLLEDLLLNEWEASKCNIVCTQPRRISAVSLANRVCDELGCENGPGGRVSCHSTPPQ

SEQ ID NO: 22949 - protein, 941 aa, Homo sapiens
MEGASRVCRQGRVALPAEEDYLPLKPRVGKAAKEYPFILDAFQREAIQCVDNNQSVLVSAHTSAGKTVCAEYAIALALREKQRVIFTSPIKALSNQKYREMYEEFQDVGLMTGDVTINPTASCLVMTTEILRSMLYRGSEVMREVAWVIFDEIHYMRDSERGVVWEETIILLPDNVHYVFLSATIPNARQFAEWICHLHKQPCHVIYTDYRPTPLQHYIFPAGGDGLHLVVDENGDFREDNFNTAMQVLRDAGDLAKGDQKGRKGGTKGPSNVFKIVKMIMERNFQPVIIFSFSKKDCEAYALQMTKLDFNTDEEKKMVEEVFSNAIDCLSDEDKKLPQVEHVLPLLKRGIGIHHGGLLPILKETIEILFSEGLIKALFATETFAMGINMPARTVLFTNARKFDGKDFRWISSGEYIQMSGRAGRRGMDDRGIVILMVDEKMSPTIGKQLLKGSADPLNSAFHLTYNMVLNLLRVEEINPEYMLEKSFYQFQHYRAIPGVVEKVKNSEEQYNKIVIPNEESVVIYYKIRQQLAKLGKEIEEYIHKPKYCLPFLQPGRLVKVKNEGDDFGWGVVVNFSKKSNVKPNSGELDPLYVVEVLLRCSKESLKNSATEAAKPAKPDEKGEMQVVPVLVHLLSAISSVRLYIPKDLRPVDNRQSVLKSIQEVQKRFPDGIPLLDPIDDMGIQDQGLKKVIQKVEAFEHRMYSHPLHNDPNLETVYTLCEKKAQIAIDIKSAKRELKKARTVLQMDELKCRKRVLRRLGFATSSDVIEMKGRVACEISSADELLLTEMMFNGLFNDLSAEQATALLSCFVFQENSSEMPKLTEQLAGPLRQMQECAKRIAKVSAEAKLEIDEETYLSSFKPHLMDVVYTWATGATFAHICKMTDVFEGSIIRCMRRLEELLRQMCQAAKAIGNTELENKFAEGITKIKRDIVFAASLYL

SEQ ID NO: 22950 - protein, 371 aa, Homo sapiens
LPRLAHERLGTNRVFAGAVRGGPRAPLLAVGAPPGLSPPSAALLLRLGGAVARGRRQPRPGLENQGPRPPSRSSVHRPCRAARAETMFDKTRLPYVALDVLCVLLASMPMAVLKLGQIYPFQRGFFCKDNSINYPYHDSTVTSTVLILVGVGLPISSIILGETLSVYCNLLHSNSFIRNNYIATIYKAIGTFLFGAAASQSLTDIAKYSIGRLRPHFLDVCDPDWSKINCSDGYIEYYICRGNAERVKEGRLSFYSGHSSFSMYCMLFVALYLQARMKGDWARLLRPTLQFGLVAVSIYVGLSRVSDYKHHWSDVLTGLIQGALVAILVAVYVSDFFKERTSFKERKEEDSHTTLHETPTTGNHYPSNHQP

SEQ ID NO: 22951 - protein, 370 aa, Homo sapiens
LPRLAHERLGTNRVFAGAVRGGPRAPLLAVGAPPGLSPPSAALLLRLGGAVARGRRQPRPGLENQGPRPPSRSSVHRPCRAARAETMFDKTRLPYVALDVLCVLLAGLPFAILTSRHTPFQRGVFCNDESIKYPYKEDTIPYALLGGIIIPFSIIVIILGETLSVYCNLLHSNSFIRNNYIATIYKAIGTFLFGAAASQSLTDIAKYSIGRLRPHFLDVCDPDWSKINCSDGYIEYYICRGNAERVKEGRLSFYSGHSSFSMYCMLFVALYLQARMKGDWARLLRPTLQFGLVAVSIYVGLSRVSDYKHHWSDVLTGLIQGALVAILVAVYVSDFFKERTSFKERKEEDSHTTLHETPTTGNHYPSNHQP

SEQ ID NO: 22952 - protein, 326 aa, Homo sapiens
LGMMWTWALWMLPSLCKFSLAALPAKPENISCVYYYRKNLTCTWSPGKETSYTQYTVKRTYAFGEKHDNCTTNSSTSENRASCSFFLPRITIPDNYTIEVEAENGDGVIKSHMTYWRLENIAKTEPPKIFRVKPVLGIKRMIQIEWIKPELAPVSSDLKYTLRFRTVNSTSWMEVNFAKNRKDKNQTYNLTGLQPFTEYVIALRCAVKESKFWSDWSQEKMGMTEEEAPCGLELWRVLKPAEADGRRPVRLLWKKARGAPVLEKTLGYNIWYYPESNTNLTETMNTTNQQLELHLGGESFWVSMISYNSLGKSPVATLRIPAIQEK

SEQ ID NO: 22953 - protein, 928 aa, Homo sapiens
MCLLQKYPRKMLTLQTWLVQALFIFLTTESTGELLDPCGYISPESPVVQLHSNFTAVCVLKEKCMDYFHVNANYIVWKTNHFTIPKEQYTIINRTASSVTFTDIASLNIQLTCNILTFGQLEQNVYGITIISGLPPEKPKNLSCIVNEGKKMRCEWDGGRETHLETNFTLKSEWATHKFADCKAKRDTPTSCTVDYSTVYFVNIEVWVEAENALGKVTSDHINFDPVYKVKPNPPHNLSVINSEELSSILKLTWTNPSIKSVIILKYNIQYRTKDASTWSQIPPEDTASTRSSFTVQDLKPFTEYVFRIRCMKEDGKGYWSDWSEEASGITYEDRPSKAPSFWYKIDPSHTQGYRTVQLVWKTLPPFEANGKILDYEVTLTRWKSHLQNYTVNATKLTVNLTNDRYLATLTVRNLVGKSDAAVLTIPACDFQATHPVMDLKAFPKDNMLWVEWTTPRESVKKYILEWCVLSDKAPCITDWQQEDGTVHRTYLRGNLAESKCYLITVTPVYADGPGSPESIKAYLKQAPPSKGPTVRTKKVGKNEAVLEWDQLPVDVQNGFIRNYTIFYRTIIGNETAVNVDSSHTEYTLSSLTSDTLYMVRMAAYTDEGGKDGPEFTFTTPKFAQGEIEAIVVPVCLAFLLTTLLGVLFCFNKRDLIKKHIWPNVPDPSKSHIAQWSPHTPPRHNFNSKDQMYSDGNFTDVSVVEIEANDKKPFPEDLKSLDLFKKEKINTEGHSSGIGGSSCMSSSRPSISSSDENESSQNTSSTVQYSTVVHSGYRHQVPSVQVFSRSESTQPLLDSEERPEDLQLVDHVDGGDGILPRQQYFKQNCSQHESSPDISHFERSKQVSSVNEEDFVRLKQQISDHISQSCGSGQMKMFQEVSAADAFGPGTEGQVERFETVGMEAATDEGMPKSYLPQTVRQGGYMPQ

SEQ ID NO: 22954 - protein, 339 aa, Homo sapiens
MCLLQKYPRKMLTLQTWLVQALFIFLTTESTGELLDPCGYISPESPVVQLHSNFTAVCVLKEKCMDYFHVNANYIVWKTNHFTIPKEQYTIINRTASSVTFTDIASLNIQLTCNILTFGQLEQNVYGITIISGLPPEKPKNLSCIVNEGKKMRCEWDGGRETHLETNFTLKSEWATHKFADCKAKRDTPTSCTVDYSTVYFVNIEVWVEAENALGKVTSDHINFDPVYKVKPNPPHNLSVINSEELSSILKLTWTNPSIKSVIILKYNIQYRTKDASTWSQIPPEDTASTRSSFTVQDLKPFTEYVFRIRCMKEDGKGYWSDWSEEASGITYEDNIASF

SEQ ID NO: 22955 - protein, 10 aa, Homo sapiens
LLVSLSLLWL

SEQ ID NO: 22956 - protein, 44 aa, Homo sapiens
MKFNPFVTSDRSKNRKRHFNAPSHIRRKTMSSPLSKELRQKYNV

SEQ ID NO: 22957 - protein, 16 aa, Homo sapiens
MEPETYDARCLDKASR

SEQ ID NO: 22958 - protein, 12 aa, Homo sapiens
MLQFSGSMVVLR

SEQ ID NO: 22959 - protein, 28 aa, Homo sapiens
MSNSRRLSIFKELRYYFRGYKIKIQTGK

SEQ ID NO: 22960 - protein, 400 aa, Homo sapiens
LFTFSYSLSIHLSCSLVWKISASTMTDNELSALVVDNGSGMCKAGFGGDDAPRAVFPSMIGRPRHQGVMVGMGQKDCYVGDEAQSKRGVLTLKYPIEHGVVTNWDDMEKIWYHTFYNELRVAPDEHPILLTEAPLNPKINREKMTQIMFEAFNTPAMYVAIQAVLSLYASGRTTGIVMDSGDGVTHIVPIYEGYALPHAILRLDLAGRDLTDYLMKILTERGYNFTTTAEREIVRDVKEKLCYVALDFEQEMVRAAASSSPERSYELPDGQVITIGNERFRCPEAIFQPSFLGIESSGIHETTFNSIMKCDVDIRKDLYANTVLSGGSTMYPGIADRMQKEIITLAPSTMKIKIIAPPERKYSVWIGGSILASLSTFQQMWISKQEYDEAGPPIVHRKCF

SEQ ID NO: 22961 - protein, 52 aa, Homo sapiens
VTGFWMADHSTFFFLSFLLCCHLPLISASFCDSLTEKEVEWNKIPQYSTIIH

SEQ ID NO: 22962 - protein, 40 aa, Homo sapiens
MWFTPASLVVCSFLVSSIIPRTSFSATCQKHQHQPGGTLP

SEQ ID NO: 22963 - protein, 230 aa, Homo sapiens
LPTMRHEAPMQMASAQDARYGQKDSSDQNFDYMFKLLIIGNSSVGKTSFLFRYADDSFTSAFVSTVGIDFKVKTVFKNEKRIKLQIWDTAGQERYRTITTAYYRGAMGFILMYDITNEESFNAVQDWSTQIKTYSWDNAQVILVGNKCDMEDERVISTERGQHLGEQLGFEFFETSAKDNINVKQTFERLVDIICDKMSESLETDPAITAAKQNTRLKETPPPPQPNCAC

SEQ ID NO: 22964 - protein, 110 aa, Homo sapiens
LPPTPARSTQIKTYSWDNAQVILVGNKCDMEDERVISTERGQHLGEQLGFEFFETSAKDNINVKQTFERLVDIICDKMSESLETDPAITAAKQNTRLKETPPPPQPNCAC

SEQ ID NO: 22965 - protein, 303 aa, Homo sapiens
VEANVFVGLLTADVFNFEETVYSHHMSPVSTKHCLVAVGTRGPKVQLCDLKSGSCSHILQGHRQEILAVSWSPRYDYILATASADSRVKLWDVRRASGCLITLDQHNGKKSQAVESANTAHNGKVNGLCFTSDGLHLLTVGTDNRMRLWNSSNGENTLIPAGSIGREQADSNLSAFKLIMMMKLRNKNEKPGKVSKGCKKPAKQNGKKATSKVPSAPQFVHSNDHANREAEIKKRVEEMREKQQAAQEQERQKRRSIKSYCEDILRRQEEFQCKEEVLQELNMFPQLDDEATMKAYYKESVRW

SEQ ID NO: 22966 - protein, 28 aa, Homo sapiens
MCTVELKKTDYQGSSEVVIGSLITPGQS

SEQ ID NO: 22967 - protein, 49 aa, Homo sapiens
LVAAAAVVFSWCPAETAAAQGVAGPTQDLPGPSALRDKGPALAKADGQE

SEQ ID NO: 22968 - protein, 98 aa, Homo sapiens
LPVGLGKRGPLVAQSGGSWEILGWPSHTLRRRRFCWTPGENHGSCSHQLPLHSPTGSDPTPHSPPDRKQEGGSRGLCVPPTGDPSRQPGVTSPSSSST

SEQ ID NO: 22969 - protein, 24 aa, Homo sapiens
LYTFTASKKIIEMALKTKQNTSIL

SEQ ID NO: 22970 - protein, 384 aa, Homo sapiens
LTKMSNIYIQEPPTNGKVLLKTTAGDIDIELWSKEAPKACRNFIQLCLEAYYDNTIFHRVVPGFIVQGGDPTGTGSGGESIYGAPFKDEFHSRLRFNRRGLVAMANAGSHDNGSQFFFTLGRADELNNKHTIFGKVTGDTVYNMLRLSEVDIDDDERPHNPHKIKSCEVLFNPFDDIIPREIKRLKKEKPEEEVKKLKPKGTKNFSLLSFGEEAEEEEEEVNRVSQSMKGKSKSSHDLLKDDPHLSSVPVVESEKGDAPDLVDDGEDESAEHDEYIDGDEKNLMRERIAKKLKKDTSANVKSAGEGEVEKKSVSRSPPSLCLYLDYWIQLSRITQAYTSWYYYGFLDSSLSCVSSASLLLTRHNVYFTLQTHSTDHLAACFFMK

SEQ ID NO: 22971 - protein, 475 aa, Homo sapiens
LTKMSNIYIQEPPTNGKVLLKTTAGDIDIELWSKEAPKACRNFIQLCLEAYYDNTIFHRVVPGFIVQGGDPTGTGSGGESIYGAPFKDEFHSRLRFNRRGLVAMANAGSHDNGSQFFFTLGRADELNNKHTIFGKVTGDTVYNMLRLSEVDIDDDERPHNPHKIKSCEVLFNPFDDIIPREIKRLKKEKPEEEVKKLKPKGTKNFSLLSFGEEAEEEEEEVNRVSQSMKGKSKSSHDLLKDDPHLSSVPVVESEKGDAPDLVDDGEDESAEHDEYIDGDEKNLMRERIAKKLKKDTSANVKSAGEGEVEKKSVSRSEELRKEARQLKRELLAAKQKKVENAAKQAEKRSEEEEAPPDGAVAEYRREKQKYEALRKQQSKKGTSREDQTLALLNQFKSKLTQAIAETPENDIPETEVEDDEGWMSHVLQFEDKSRKVKDASMQDSDTFEIYDPRNPVNKRRREESKKLMREKKERR

SEQ ID NO: 22972 - protein, 509 aa, Homo sapiens
MEILWKTLTWILSLIMASSEFHSDHRLSYSSQEEFLTYLEHYQLTIPIRVDQNGAFLSFTVKNDKHSRRRRSMDPIDPQQAVSKLFFKLSAYGKHFHLNLTLNTDFVSKHFTVEYWGKDGPQWKHDFLDNCHYTGYLQDQRSTTKVALSNCVGLHGVIATEDEEYFIEPLKNTTEDSKHFSYENGHPHVIYKKSALQQRHLYDHSHCGVSDFTRSGKPWWLNDTSTVSYSLPINNTHIHHRQKRSVSIERFVETLVVADKMMVGYHGRKDIEHYILSVMNIVAKLYRDSSLGNVVNIIVARLIVLTEDQPNLEINHHADKSLDSFCKWQKSILSHQSDGNTIPENGIAHHDNAVLITRYDICTYKNKPCGTLGLASVAGMCEPERSCSINEDIGLGSAFTIAHEIGHNFGMNHDGIGNSCGTKGHEAAKLMAAHITANTNPFSWSACSRDYITSFLEKCVESSGVSAKATAVSPTVFQQLRGHCVKLGILKKGGVIREIVFLLALGPRA

SEQ ID NO: 22973 - protein, 24 aa, Homo sapiens
LLPFLLLLSSFLLIPFDALHMLFA

SEQ ID NO: 22974 - protein, 630 aa, Homo sapiens
LPPASPPHAEGPRARRRQPLSAPMIARCLLAVRSLRRVGGSRILLRMTLGREVMSPLQAMSSYTVAGRNVLRWDLSPEQIKTRTEELIVQTKQVYDAVGMLGIEEVTYENCLQALADVEVKYIVERTMLDFPQHVSSDKEVRAASTEADKRLSRFDIEMSMRGDIFERIVHLQETCDLGKIKPEARRYLEKSIKMGKRNGLHLPEQVQNEIKSMKKRMSELCIDFNKNLNEDDTFLVFSKAELGALPDDFIDSLEKTDDDKYKITLKYPHYFPVMKKCCIPETRRRMEMAFNTRCKEENTIILQQLLPLRTKVAKLLGYSTHADFVLEMNTAKSTSRVTAFLDDLSQKLKPLGEAEREFILNLKKKECKDRGFEYDGKINAWDLYYYMTQTEELKYSIDQEFLKEYFPIEVVTEGLLNTYQELLGLSFEQMTDAHVWNKSVTLYTVKDKATGEVLGQFYLDLYPREGKYNHAACFGLQPGCLLPDGSRMMAVAALVVNFSQPVAGRPSLLRHDEVRTYFHEFGHVMHQICAQVSFFFPPVNLPISFFRKLLDCCQVSAPNRFFQKLNVFKNFIGLLQNQNFPYPVLFHNIFLLGGSSTSERCLLNNSLWKKNKTICKERLQILCFFLLIL

SEQ ID NO: 22975 - protein, 10 aa, Homo sapiens
VLAFAMCILN

SEQ ID NO: 22976 - protein, 108 aa, Homo sapiens
MNSGGGFGLGLGFGLTPTSVIQVTNLSSAVTSEQMRTLFSFLGEIEELRLYPPDNAPLAFSSKVCYVKFRDPSSVGVAQHLTNTVFIDRALIVVPCAEGWYLAFFPLI

SEQ ID NO: 22977 - protein, 21 aa, Homo sapiens
MLQVVLEITVPITFSLEGVSR

SEQ ID NO: 22978 - protein, 1676 aa, Homo sapiens
METEEEDDTNDEDFNVEIRQFSSCSHRFSKVFSSIDRITQNSAEEKEDSVDKTKSTTLPSTETLSWSSEYSEMQQLSTSNSSDTESNRHKLSSGLLPKLAISTEGEQDEAASCPGDPHEEPGKPALPPEECAQEEPEVTTPASTISSSTLSDMFAVSPLGSPMSPHSLSSDPSSSRDSSPSRDSSAASASPHQPIVIHSSGKNYGFTIRAIRVYVGDSDIYTVHHIVWNVEEGSPACQAGLKAGDLITHINGEPVHGLVHTEVIELLLKSGNKVSITTTPFENTSIKTGPARRNSYKSRMVRRSKKSKKKESLERRRSLFKKLAKQPSPLLHTSRSFSCLNRSLSSGESLPGSPTHSLSPRSPTPSYRSTPDFPSGTNSSQSSSPSSSAPNSPAGSGHIRPSTLHGLAPKLGGQRYRSGRRKSAGNIPLSPLARTPSPTPQPTSPQRSPSPLLGHSLGNSKIAQAFPSKMHSPPTIVRHIVRPKSAEPPRSPLLKRVQSEEKLSPSYGSDKKHLCSRKHSLEVTQEEVQREQSQREAPLQSLDENVCDVPPLSRARPVEQGCLKRPVSRKVGRQESVDDLDRDKLKAKVVVKKADGFPEKQESHQKSHGPGSDLENFALFKLEEREKKVYPKAVERSSTFENKASMQEAPPLGSLLKDALHKQASVRASEGAMSDGRVPAEHRQGGGDFRRAPAPGTLQDGLCHSLDRGISGKGEGTEKSSQAKELLRCEKLDSKLANIDYLRKKMSLEDKEDNLCPVLKPKMTAGSHECLPGNPVRPTGGQQEPPPASESRAFVSSTHAAQMSAVSFVPLKALTGRVDSGTEKPGLVAPESPVRKSPSEYKLEGRSVSCLKPIEGTLDIALLSGPQASKTELPSPESAQSPSPSGDVRASVPPVLPSSSGKKNDTTSARELSPSSLKMNKSYLLEPWFLPPSRGLQNSPAVSLPDPEFKRDRKGPHPTARSPGTVMESNPQQREGSSPKHQDHTTDPKLLTCLGQNLHSPDLARPRCPLPPEASPSREKPGLRESSERGPPTARSERSAARADTCREPSMELCFPETAKTSDNSKNLLSVGRTHPDFYTQTQAMEKAWAPGGKTNHKDGPGEARPPPRDNSSLHSAGIPCEKELGKVRRGVEPKPEALLARRSLQPPGIESEKSEKLSSFPSLQKDGAKEPERKEQPLQRHPSSIPPPPLTAKDLSSPAARQHCSSPSHASGREPGAKPSTAEPSSSPQDPPKPVAAHSESSSHKPRPGPDPGPPKTKHPDRSLSSQKPSVGATKGKEPATQSLGGSSREGKGHSKSGPDVFPATPGSQNKASDGIGQGEGGPSVPLHTDRAPLDAKPQPTSGGRPLEVLEKPVHLPRPGHPGPSEPADQKLSAVGEKQTLSPKHPKPSTVKDCPTLCKQTDNRQTDKSPSQPAANTDRRAEGKKCTEALYAPAEGDKLEAGLSFVHSENRLKGAERPAAGVGKGFPEARGKGPGPQKPPTEADKPNGMKRSPSATGQSSFRSTALPEKSLSCSSSFPETRAGVREASAASSDTSSAKAAGGMLELPAPSNRDHRKAQPAGEGRTHMTKSDSLPSFRVSTLPLESHHPDPNTMGGASHRDRALSVTATVGETKGKDPAPAQPPPARKQNVGRDVTKPSPAPNTDRPISLSNEKDFVVRQRRGKESLRSSPHKKAL

SEQ ID NO: 22979 - protein, 192 aa, Homo sapiens
MGFGDLKSPAGLQVLNDYLVDKSYIEGYVPSQADVAIFEAVSGPQPAGLCHALRWYNHVKSYEKEKASLPGVKKALGKYGPANVEDATGSGGTDSKDDDDIDLFGSDDEEESEEAKRLREESLAQYESKLAKNPALVAKSSILLNVKPWDKETDLAKLEECVRSIQADGLVWGSSKLVPVGYRIKKPNTVCS

SEQ ID NO: 22980 - protein, 50 aa, Homo sapiens
MENRILSFFFFFLFLRKSLAPSPRLQCSDTILSHCNLCLPGSSDSPASAS

SEQ ID NO: 22981 - protein, 13 aa, Homo sapiens
LWFFGLTLCGPLR

SEQ ID NO: 22982 - protein, 55 aa, Homo sapiens
VSRFGLRTNAAFLAAACSPCLACGSLPSGRGPQERFGEEGGRGLTKRAPRWAQAW

SEQ ID NO: 22983 - protein, 20 aa, Homo sapiens
LYILLLHLLLIKLVAPFTFL

SEQ ID NO: 22984 - protein, 59 aa, Homo sapiens
MRCIPFVWRRNQWLLKIRDGPQVRGIADISNPDFQPGDIHTLPVSCTGTSFCHYDCHHS

SEQ ID NO: 22985 - protein, 125 aa, Homo sapiens
LPGTPVIAAARSRPGNCPFSGVMMGSKMASASRVVQVVKPHTPLIRFPDRRDNPKPNVSEALRSAGLPSHSSVISQHSKGSKSPDLLMYQGPPDTAEIIKTLPQKYRRKLVSQEEMEFIQRGGPE

SEQ ID NO: 22986 - protein, 128 aa, Homo sapiens
VTAPAGVCEDGTLSLLDRAVRWVRRRGFEPCGNRAASWQVVKPHTPLIRFPDRRDNPKPNVSEALRSAGLPSHSSVISQHSKGSKSPDLLMYQGPPDTAEIIKTLPQKYRRKLVSQEEMEFIQRGGPE

SEQ ID NO: 22987 - protein, 76 aa, Homo sapiens
VLSWELALFGWSRALRRRMALDVKSRAKRYEKLDFLGEGQFATVYKARDKNTNQIVAIKKESLLVATTAVNVLCHT

SEQ ID NO: 22988 - protein, 61 aa, Homo sapiens
VLSWELALFGWSRALRRRMALDVKSRAKRYEKLDFLGEGQFATVYKARDKNTNQIVAIKKV

SEQ ID NO: 22989 - protein, 95 aa, Homo sapiens
VLSWELALFGWSRALRRRMALDVKSRAKRYEKLDFLGEGQFATVYKARDKNTNQIVAIKKIKLGHRSEAKDGINRTALREIKLLQELSHPNIIAP

SEQ ID NO: 22990 - protein, 73 aa, Homo sapiens
VLSWELALFGWSRALRRRMALDVKSRAKRYEKLDFLGEGQFATVYKARDKNTNQIVAIKKIKLGHRSEAKDAP

SEQ ID NO: 22991 - protein, 172 aa, Homo sapiens
VLSWELALFGWSRALRRRMALDVKSRAKRYEKLDFLGEGQFATVYKARDKNTNQIVAIKKIKLGHRSEAKDGINRTALREIKLLQELSHPNIIGLLDAFGHKSNISLVFDFMETDLEVRLRFLEKFLCPSLSNKNLNICFLPKKILVVKEKKLNFVEIWMYSEAKGSLVIFF

SEQ ID NO: 22992 - protein, 76 aa, Homo sapiens
VLSWELALFGWSRALRRRMALDVKSRAKRYEKLDFLGEGQFATVYKARDKNTNQIVAIKKIKLGHRSEAKDGYNKG

SEQ ID NO: 22993 - protein, 87 aa, Homo sapiens
VLSWELALFGWSRALRRRMALDVKSRAKRYEKLDFLGEGQFATVYKARDKNTNQIVAIKKIKLGHRSEAKDGGIGPPSYYLELGCMV

SEQ ID NO: 22994 - protein, 327 aa, Homo sapiens
VLSWELALFGWSRALRRRMALDVKSRAKRYEKLDFLGEGQFATVYKARDKNTNQIVAIKKIKLGHRSEAKDGINRTALREIKLLQELSHPNIIGLLDAFGHKSNISLVFDFMETDLEDLKPNNLLLDENGVLKLADFGLAKSFGSPNRAYTHQVVTRWYRAPELLFGARMYGVGVDMWAVGCILAELLLRVPFLPGDSDLDQLTRIFETLGTPTEEQWPDMCSLPDYVTFKSFPGIPLHHIFSAAGDDLLDLIQGLFLFNPCARITATQALKMKYFSNRPGPTPGCQLPRPNCPVETLKEQSNPALAIKRKRTEALEQGGLPKKLIF

SEQ ID NO: 22995 - protein, 27 aa, Homo sapiens
LTSHFSNLASSGTVICFLKETCNCNLK

SEQ ID NO: 22996 - protein, 206 aa, Homo sapiens
LKKMDEEPERTKRWEGGYERTWEILKEDESGSLKATIEDILFKAKRKRVFEHHGQVRLGMMRHLYVVVDGSRTMEDQDLKPNRLTCTLKLLEYFVEEYFDQNPISQIGIIVTKSKRAEKLTELSGNPRKHITSLKEAVDMTCHGEPSLYNSLSMAMQTLKHMPGHTSREVLIIFSSLTTCDPSNIYDLIKVDQKIKTKVITVKRIL

SEQ ID NO: 22997 - protein, 398 aa, Homo sapiens
LKKMDEEPERTKRWEGGYERTWEILKEDESGSLKATIEDILFKAKRKRVFEHHGQVRLGMMRHLYVVVDGSRTMEDQDLKPNRLTCTLKLLEYFVEEYFDQNPISQIGIIVTKSKRAEKLTELSGNPRKHITSLKEAVDMTCHGEPSLYNSLSMAMQTLKHMPGHTSREVLIIFSSLTTCDPSNIYDLIKTLKAAKIRVSVIGLSAEVRVCTVLARETGGTYHVILDESHYKELLTHHLSPPPASSSSECSLIRMGFPQHTIASLSDQDAKPSFSMAHLDGNTEPGLTLGGYFCPQCRAKYCELPVECKICGLTLVSAPHLARSYHHLFPLDAFQEIPLEEYNGERFCYGCQGELKDQHVYVCAVCQNVFCVDCDVFVHDSLHCCPGCIHKIPAPSGV

SEQ ID NO: 22998 - protein, 49 aa, Homo sapiens
LKKMDEEPERTKRWEGGYERTWEILKEDESGSLKATIEDILFKAKRKSI

SEQ ID NO: 22999 - protein, 398 aa, Homo sapiens
LKKMDEEPERTKRWEGGYERTWEILKEDESGSLKATIEDILFKAKRKRVFEHHGQVRLGMMRHLYVVVDGSRTMEDQDLKPNRLTCTLKLLEYFVEEYFDQNPISQIGIIVTKSKRAEKLTELSGNPRKHITSLKKAVDMTCHGEPSLYNSLSMAMQTLKHMPGHTSREVLIIFSSLTTCDPSNIYDLIKTLKAAKIRVSVTGLSAEVRVCTVLARETGGTYHVILDESHYKELLTHHVSPPPASSSSECSLIRMGFPQHTIASLSDQDAKPSFSMAHLDGNTEPGLTLGGYFCPQCRAKYCELPVECKICGLTLVSAPHLARSYHHLFPLDAFQEIPLEEYNGERFCYGCQGELKDQHVYVCAVCQNVFCVDCDVFVHDSLHCCPGCIHKIPAPSGV

SEQ ID NO: 23000 - protein, 248 aa, Homo sapiens
LKKMDEEPERTKRWEGGYERTWEILKEDESGSLKATIEDILFKAKRKRVFEHHGQVRLGMMRHLYVVVDGSRTMEDQDLKPNRLTCTLKLLEYFVEEYFDQNPISQIGIIVTKSKRAEKLTELSGNPRKHITSLKKAVDMTCHGEPSLYNSLSIAMQTLKHMPGHTSREVLIIFSSLTTCDPSNIYDLIKTLKAAKIRVSVIGLSAEVRVCTVLARETGGIYIIYLIFAYNYCVGNNLLIKLGCFNLF

SEQ ID NO: 23001 - protein, 206 aa, Homo sapiens
LKKMDEEPERTKRWEGGYERTWEILKEDESGSLKATIEDILFKAKRKRVFEHHGQVRLGMMRHLYVVVDGSRTMEDQDLKPNRLTCTLKLLEYFVEEYFDQNPISQIGIIVTKSKRAEKLTELSGNPRKHITSLKKAVDMTCHGEPSLYNSLSIAMQTLKHMPGHTSREVLIIFSSLTTCDPSNIYDLIKVDQKIKTKVITVKRIL

SEQ ID NO: 23002 - protein, 2549 aa, Homo sapiens
LPSLHIKAAPPPRPLSLPAPLRRALSAALGEGGGGGGARRQRRGDAGGGAETVPSEIILSPAAVERSGRSETLRRGTAAGRMATVVVEATEPEPSGSIANPAASTSPSLSHRFLDSKFYLLVVVGEIVTEEHLRRAIGNIELGIRSWDTNLIECNLDQELKLFVSRHSARFSPEVPGQKILHHRSDVLETVVLINPSDEAVSTEVRLMITDAARHKLLVLTGQCFENTGELILQSGSFSFQNFIEIFTDQEIGELLSTTHPANKASLTLFCPEEGDWKNSNLDRHNLQDFINIKLNSASILPEMEGLSEFTEYLSESVEVPSPFDILEPPTSGGFLKLSKPCCYIFPGGRGDSALFAVNGFNMLINGGSERKSCFWKLIRHLDRVDSILLTHIGDDNLPGINSMLQRKIAELEEEQSQGSTTNSDWMKNLISPDLGVVFLNVPENLKNPEPNIKMKRSIEEACFTLQYLNKLSMKPEPLFRSVGNTIDPVILFQKMGVGKLEMYVLNPVKSSKEMQYFMQQWTGTNKDKAEFILPNGQEVDLPISYLTSVSSLIVWHPANPAEKIIRVLFPGNSTQYNILEGLEKLKHLDFLKQPLATQKDLTGQVPTPVVKQTKLKQRADSRESLKPAAKPLPSKSVRKESKEETPEVTKVNHVEKPPKVESKEKVMVKKDKPIKTETKPSVTEKEVPSKEEPSPVKAEVAEKQATDVKPKAAKEKTVKKETKVKPEDKKEEKEKPKKEVAKKEDKTPIKKEEKPKKEEVKKEVKKEIKKEEKKEPKKEVKKETPPKEVKKEVKKEEKKEVKKEEKEPKKEIKKLPKDAKKSSTPLSEAKKPAALKPKVPKKEESVKKDSVAAGKPKEKGKIKVIKKEGKAAEAVAAAVGTGATTAAVMAAAGIAAIGPAKELEAERSLMSSPEDLTKDFEELKAEEVDVTKDIKPQLELIEDEEKLKETEPVEAYVIQKEREVTKGPAESPDEGITTTEGEGECEQTPEELEPVEKQGVDDIEKFEDEGAGFEESSETGDYEEKAETEEAEEPEEDGEEHVCVSASKHSPTEDEESAKAEADAYIREKRESVASGDDRAEEDMDEAIEKGEAEQSEEEADEEDKAEDAREEEYEPEKMEAEDYVMAVVDKAAEAGGAEEQYGFLTTPTKQLGAQSPGREPASSIHDETLPGGSESEATASDEENREDQPEEFTATSGYTQSTIEISSEPTPMDEMSTPRDVMSDETNNEETESPSQEFVNITKYESSLYSQEYSKPADVTPLNGFSEGSKTDATDGKDYNASASTISPPSSMEEDKFSRSALRDAYCSEVKASTTLDIKDSISAVSSEKVSPSKSPSLSPSPPSPLEKTPLGERSVNFSLTPNEIKVSAEAEVAPVSPEVTQEVVEEHCASPEDKTLEVVSPSQSVTGSAGHTPYYQSPTDEKSSHLPTEVIEKPPAVPVSFEFSDAKDENERASVSPMDEPVPDSESPIEKVLSPLRSPPLIGSESAYESFLSADDKASGRGAESPFEEKSGKQGSPDQVSPVSEMTSTSLYQDKQEGKSTDFAPIKEDFGQEKKTDDVEAMSSQPALALDERKLGDVSPTQIDVSQFGSFKEDTKMSISEGTVSDKSATPVDEGVAEDTYSHMEGVASVSTASVATSSFPEPTTDDVSPSLHAEVGSPHSTEVDDSLSVSVVQTPTTFQETEMSPSKEECPRPMSISPPDFSPKTAKSRTPVQDHRSEQSSMSIEFGQESPEQSLAMDFSRQSPDHPTVGAGVLHITENGPTEVDYSPSDMQDSSLSHKIPPMEEPSYTQDNDLSELISVSQVEASPSTSSAHTPSQIASPLQEDTLSDVAPPRDMSLYASLTSEKVQSLEGEKLSPKSDISPLTPRESSPLYSPTFSDSTSAVKEKTATCHSSSSPPIDAASAEPYGFRASVLFDTMQHHLALNRDLSTPGLEKDSGGKTPGDFSYAYQKPEETTRSPDEEDYDYESYEKTTRTSDVGGYYYEKIERTTKSPSDSGYSYETIGKTTKTPEDGDYSYEIIEKTTRTPEEGGYSYDISEKTTSPPEVSGYSYEKTERSRRLLDDISNGYDDSEDGGHTLGDPSYSYETTEKITSFPESEGYSYETSTKTTRTPDTSTYCYETAEKITRTPQASTYSYETSDLCYTAEKKSPSEARQDVDLCLVSSCEYKHPKTELSPSFINPNPLEWFASEEPTEESEKPLTQSGGAPPPPGGKQQGRQCDETPPTSVSESAPSQTDSDVPPETEECPSITADANIDSEDESETIPTDKTVTYKHMDPPPAPVQDRSPSPRHPDVSMVDPEALAIEQNLGKALKKDLKEKTKTKKPGTKTKSSSPVKKSDGKSKPLAASPKPAGLKESSDKVSRVASPKKKESVEKAAKPTTTPEVKAARGEEKDKETKNAANASASKSAKTATAGPGTTKTTKSSAVPPGLPVYLDLCYIPNHSNSKNVDVEFFKRVRSSYYVVSGNDPAAEEPSRAVLDALLEGKAQWGSNMQVTLIPTHDSEVMREWYQETHEKQQDLNIMVLASSSTVVMQDESFPACKIEL

SEQ ID NO: 23003 - protein, 14 aa, Homo sapiens
VVSYILLSRSSTMR

SEQ ID NO: 23004 - protein, 69 aa, Homo sapiens
LLRWIMIQYILLQWEEERNFGASLLLPGLKQKNSVGFSSQLYGYALLGKLNDPYKYCSSWLELLHSSSS

SEQ ID NO: 23005 - protein, 221 aa, Homo sapiens
VSLGTMWNWLKMSFTGALQVLIEMKNQDVKFTKDTYVLAFAICYKLNSPESFKICTTLREEALLKGEILSRRASCFAVALALNQNEMAKAVSIFSQIMNPESIACINLNIIIHIQSNMLENLIKTLKNAAEGNLSKFVKRHVFSEEVLAKVREKVKDVPALVAKFDEIYGTLHITGQVTTDSLDAVLCHTPRDRKSHTLLLNKRMVSRRTFQPLSQSLLAE

SEQ ID NO: 23006 - protein, 1708 aa, Homo sapiens
LASARPPPGVGIAGESLPDSGRRLAGGAFRGALRQGAGAEPRLGSGGCGAIAPDAKAMELSCSEAPLYGQMMIYAKFDKNVYLPEDAEFYFTYDGSHQRHVMIAERIEDNVLQSSVPGHGLQETVTVSVCLCSEGYSPVTMGSGSVTYVDNMACRLARLLVTQANRLTACSHQTLLTPFALTAGALPALDEELVLALTHLELPLEWTVLGSSSLEVSSHRESLLHLAMRWGLAKLSQFFLCLPGGVQALALPNEEGATPLDLALREGHSKLVEDVTNFQGRWSPSFSRVQLSEEASLHYIHSSETLTLTLNHTAEHLLEADIKLFRKYFWDRAFLVKAFEPEARPEERTAMPSSGAETEEEIKNSVSSRSAAEKEDIKRVKSLVVQHNEHEDQHSLDLDRSFDILKKSKPPSTLLAAGRLSDMLNGGDEVYANCMVIDQVGDLDISYINIEGITATTSPESRGCTLWPQSSKHTLPTETSPSVYPLSENVEGTAHTEAQQSFMSPSSSCASNLNLSFGWHGFEKEQSHLKKRSSSLDALDADSEGEGHSEPSHICYTPGSQSSSRTGIPSGDELDSFETNTEPDFNISRAESLPLSSNLQSKESLLSGVRSRSYSCSSPKISLGKTRLVRELTVCSSSEEQRAYSLSEPPRENRIQEEEWDKYIIPAKSESEKYKVSRTFSFLMNRMTSPRNKSKTKSKDAKDKEKLNRHQFAPGTFSGVLQCLVCDKTLLGKESLQCSNCNANVHKGCKDAAPACTKKFQEKYNKNKPQTILGNSSFRDIPQPGLSLHPSSSVPVGLPTGRRETVGQVHPLSRSVPGTTLESFRRSATSLESESDHNSCRSRSHSDELLQSMGSSPSTESFIMEDVVDSSLWSDLSSDAQEFEAESWSLVVDPSFCNRQEKDVIKRQDVIFELMQTEMHHIQTLFIMSEIFRKGMKEELQLDHSTVDKIFPCLDELLEIHRHFFYSMKERRQESCAGSDRNFVIDRIGDILVQQFSEENASKMKKIYGEFCCHHKEAVNLFKELQQNKKFQNFIKLRNSNLLARRRGIPECILLVTQRITKYPVLVERILQYTKERTEEHKDLRKALCLIKDMIATVDLKVNEYEKNQKWLEILNKIENKTYTKLKNGHVFRKQALMSEERTLLYDGLVYWKTATGRFKDILALLLTDVLLFLQEKDQKYIFAAVDQKPSVISLQKLIAREVANEERGMFLISASSAGPEMYEIHTNSKEERNNWMRRIQQAVESCPEEKGGRTSESDEDKRKAEARVAKIQQCQEILTNQDQQICAYLEEKLHIYAELGELSGFEDVHLEPHLLIKPDPGEPPQAASLLAAALKEAESLQVAVKASQMGAVSQSCEDSCGDSVLADTLSSHDVPGSPTASLVTGGREGRGCSDVDPGIQGVVTDLAVSDAGEKVECRNFPGSSQSEIIQAIQNLTRLLYSLQAALTIQDSHIEIHRLVLQQQEGLSLGHSILRGGPLQDQKSRDADRQHEELANVHQLQHQLQQEQRRWLRRCEQQQRAQATRESWLQERERECQSQEELLLRSRGELDLQLQEYQHSLERLREGQRLVEREQARMRAQQSLLGHWKHGRQRSLPAVLLPGGPEVMELNRSESLCHENSFFINEALVQMSFNTFNKLNPSVIHQDATYPTTQSHSDLVRTSEHQVDLKVDPSQPSNVSHKLWTAAGSGHQILPFHESSKDSCKNGN

SEQ ID NO: 23007 - protein, 1788 aa, Homo sapiens
LASARPPPGVGIAGESLPDSGRRLAGGAFRGALRQGAGAEPRLGSGGCGAIAPDAKAMELSCSEAPLYGQMMIYAKFDKNVYLPEDAEFYFTYDGSHQRHVMIAERIEDNVLQSSVPGHGLQETVTVSVCLCSEGYSPVTMGSGSVTYVDNMACRLARLLVTQANRLTACSHQTLLTPFALTAGALPALDEELVLALTHLELPLEWTVLGSSSLEVSSHRESLLHLAMRWGLAKLSQFFLCLPGGVQALALPNEEGATPLDLALREGHSKLVEDVTNFQGRWSPSFSRVQLSEEASLHYIHSSETLTLTLNHTAEHLLEADIKLFRKYFWDRAFLVKAFEPEARPEERTAMPSSGAETEEEIKNSVSSRSAAEKEDIKRVKSLVVQHNEHEDQHSLDLDRSFDILKKSKPPSTLLAAGRLSDMLNGGDEVYANCMVIDQVGDLDISYINIEGITATTSPESRGCTLWPQSSKHTLPTETSPSVYPLSENVEGTAHTEAQQSFMSPSSSCASNLNLSFGWHGFEKEQSHLKKRSSSLDALDADSEGEGHSEPSHICYTPGSQSSSRTGIPSGDELDSFETNTEPDFNISRAESLPLSSNLQSKESLLSGVRSRSYSCSSPKISLGKTRLVRELTVCSSSEEQRAYSLSEPPRENRIQEEEWDKYIIPAKSESEKYKVSRTFSFLMNRMTSPRNKSKTKSKDAKDKEKLNRHQFAPGTFSGVLQCLVCDKTLLGKESLQCSNCNANVHKGCKDAAPACTKKFQEKYNKNKPQTILGNSSFRDIPQPGLSLHPSSSVPVGLPTGRRETVGQVHPLSRSVPGTTLESFRRSATSLESESDHNSCRSRSHSDELLQSMGSSPSTESFIMEDVVDSSLWSDLSSDAQEFEAESWSLVVDPSFCNRQEKDVIKRQDVIFELMQTEMHHIQTLFIMSEIFRKGMKEELQLDHSTVDKIFPCLDELLEIHRHFFYSMKERRQESCAGSDRNFVIDRIGDILVQQFSEENASKMKKIYGEFCCHHKEAVNLFKELQQNKKFQNFIKLRNSNLLARRRGIPECILLVTQRITKYPVLVERILQYTKERTEEHKDLRKALCLIKDMIATVDLKVNEYEKNQKWLEILNKIENKTYTKLKNGHVFRKQALMSEERTLLYDGLVYWKTATGRFKDILALLLTDVLLFLQEKDQKYIFAAVDQKPSVISLQKLIAREVANEERGMFLISASSAGPEMYEIHTNSKEERNNWMRRIQQAVESCPEEKGGRTSESDEDKRKAEARVAKIQQCQEILTNQDQQICAYLEEKLHIYAELGELSGFEDVHLEPHLLIKPDPGEPPQAASLLAAALKEAESLQVAVKASQMGAVSQSCEDSCGDSVLADTLSSHDVPGSPTASLVTGGREGRGCSDVDPGIQGVVTDLAVSDAGEKVECRNFPGSSQSEIIQAIQNLTRLLYSLQAALTIQDSHIEIHRLVLQQQEGLSLGHSILRGGPLQDQKSRDADRQHEELANVHQLQHQLQQEQRRWLRRCEQQQRAQATRESWLQERERECQSQEELLLRSRGELDLQLQEYQHSLERLREGQRLVEREQARMRAQQSLLGHWKHGRQRSLPAVLLPGGPEVMELNRSESLCHENSFFINEALVQMSFNTFNKLNPSVIHQDATYPTTQSHSDLVRTSEHQVDLKVDPSQPSNVSHKLWTAAGSGHQILPFHESSKDSCKNGSSMTKCSCTLTSPPGLWTGTTSTLKDLDTSHTESPTPHDSNSHRPQLQAFITEAKLNLPTRTMTRQDGETGDGAKENIVYL

SEQ ID NO: 23008 - protein, 1762 aa, Homo sapiens
LASARPPPGVGIAGESLPDSGRRLAGGAFRGALRQGAGAEPRLGSGGCGAIAPDAKAMELSCSEAPLYGQMMIYAKFDKNVYLPEDAEFYFTYDGSHQRHVMIAERIEDNVLQSSVPGHGLQETVTVSVCLCSEGYSPVTMGSGSVTYVDNMACRLARLLVTQANRLTACSHQTLLTPFALTAGALPALDEELVLALTHLELPLEWTVLGSSSLEVSSHRESLLHLAMRWGLAKLSQFFLCLPGGVQALALPNEEGATPLDLALREGHSKLVEDVTNFQGRWSPSFSRVQLSEEASLHYIHSSETLTLTLNHTAEHLLEADIKLFRKYFWDRAFLVKAFEPEARPEERTAMPSSGAETEEEIKNSVSSRSAAEKEDIKRVKSLVVQHNEHEDQHSLDLDRSFDILKKSKPPSTLLAAGRLSDMLNGGDEVYANCMVIDQVGDLDISYINIEGITATTSPESRGCTLWPQSSKHTLPTETSPSVYPLSENVEGTAHTEAQQSFMSPSSSCASNLNLSFGWHGFEKEQSHLKKRSSSLDALDADSEGEGHSEPSHICYTPGSQSSSRTGIPSGDELDSFETNTEPDFNISRAESLPLSSNLQSKESLLSGVRSRSYSCSSPKISLGKTRLVRELTVCSSSEEQRAYSLSEPPRENRIQEEEWDKYIIPAKSESEKYKVSRTFSFLMNRMTSPRNKSKTKSKDAKDKEKLNRHQFAPGTFSGVLQCLVCDKTLLGKESLQCSNCNANVHKGCKDAAPACTKKFQEKYNKNKPQTILGNSSFRDIPQPGLSLHPSSSVPVGLPTGRRETVGQVHPLSRSVPGTTLESFRRSATSLESESDHNSCRSRSHSDELLQSMGSSPSTESFIMEDVVDSSLWSDLSSDAQEFEAESWSLVVDPSFCNRQEKDVIKRQDVIFELMQTEMHHIQTLFIMSEIFRKGMKEELQLDHSTVDKIFPCLDELLEIHRHFFYSMKERRQESCAGSDRNFVIDRIGDILVQQFSEENASKMKKIYGEFCCHHKEAVNLFKELQQNKKFQNFIKLRNSNLLARRRGIPECILLVTQRITKYPVLVERILQYTKERTEEHKDLRKALCLIKDMIATVDLKVNEYEKNQKWLEILNKIENKTYTKLKNGHVFRKQALMSEERTLLYDGLVYWKTATGRFKDILALLLTDVLLFLQEKDQKYIFAAVDQKPSVISLQKLIAREVANEERGMFLISASSAGPEMYEIHTNSKEERNNWMRRIQQAVESCPEEKGGRTSESDEDKRKAEARVAKIQQCQEILTNQDQQICAYLEEKLHIYAELGELSGFEDVHLEPHLLIKPDPGEPPQAASLLAAALKEAESLQVAVKASQMGAVSQSCEDSCGDSVLADTLSSHDVPGSPTASLVTGGREGRGCSDVDPGIQGVVTDLAVSDAGEKVECRNFPGSSQSEIIQAIQNLTRLLYSLQAALTIQDSHIEIHRLVLQQQEGLSLGHSILRGGPLQDQKSRDADRQHEELANVHQLQHQLQQEQRRWLRRCEQQQRAQATRESWLQERERECQSQEELLLRSRGELDLQLQEYQHSLERLREGQRLVEREQARMRAQQSLLGHWKHGRQRSLPAVLLPGGPEVMELNRSESLCHENSFFINEALVQMSFNTFNKLNPSVIHQDATYPTTQSHSDLVRTSEHQVDLKVDPSQPSNVSHKLWTAAGSGHQILPFHESSKDSCKNDLDTSHTESPTPHDSNSHRPQLQAFITEAKLNLPTRTMTRQDGETGDGAKENIVYL

SEQ ID NO: 23009 - protein, 1595 aa, Homo sapiens
LASEGSRGGRAPGGPPETRRMPHEELPSLQRPRYGSIVDDERLSAEEMDERRRQNIAYEYLCHLEEAKRWMEVCLVEELPPTTELEEGLRNGVYLAKLAKFFAPKMVSEKKIYDVEQTRYKKSGLHFRHTDNTVQWLRAMESIGLPKIFYPETTDVYDRKNIPRMIYCIHALSLYLFKLGIAPQIQDLLGKVDFTEEEISNMRKELEKYGIQMPSFSKIGGILANELSVDEAALHAAVIAINEAVEKGIAEQTVVTLRNPNAVLTLVDDNLAPEYQKELWDAKKKKEENARLKNSCISEEERDAYEELLTQAEIQGNINKVNRQAAVDHINAVIPEGDPENTLLALKKPEAQLPAVYPFAAAMYQNELFNLQKQNTMNYLAHEELLIAVEMLSAVALLNQALESNDLVSVQNQLRSPAIGLNNLDKAYVERYANTLLSVKLEVLSQGQDNLSWNEIQNCIDMVNAQIQEENDRVVAVGYINEAIDEGNPLRTLETLLLPTANISDVDPAHAQHYQDVLYHAKSQKLGDSESVSKVLWLDEIQQAVDDANVDKDRAKQWVTLVVDVNQCLEGKKSSDILSVLKSSTSNANDIIPECADKYYDALVKAKELKSERVSSDGSWLKLNLHKKYDYYYNTDSKESSWVTPESCLYKESWLTGKEIEDIIEEVTVGYIRENIWSASEELLLRFQATSSGPILREEFEARKSFLHEQEENVVKIQAFWKGYKQRKEYMHRRQTFIDNTDSIVKIQSWFRMATARKSYLSRLQYFRDHNNEIVKIQSLLRANKARDDYKTLVGSENPPLTVIRKFVYLLDQSDLDFQEELEVARLREEVVTKIRANQQLEKDLNLMDIKIGLLVKNRITLEDVISHSKKLNKKKGGEMEILNNTDNQGIKSLSKERRKTLETYQQLFYLLQTNPLYLAKLIFQMPQNKSTKFMDTVIFTLYNYASNQREEYLLLKLFKTALEEEIKSKVDQVQDIVTGNPTVIKMVVSFNRGARGQNTLRQLLAPVVKEIIDDKSLIINTNPVEVYKAWVNQLETQTGEASKLPYDVTTEQALTYPEVKNKLEASIENLRRVTDKVLNSIISSLDLLPYGLRYIAKVLKNSIHEKFPDATEDELLKIVGNLLYYRYMNPAIVAPDGFDIIDMTAGGQINSDQRRNLGSVAKVLQHAASNKLFEGENEHLSSMNNYLSETYQEFRKYFKEACNVPEPEEKFNMDKYTDLVTVSKPVIYISIEEIISTHSLLLEHQDAIAPEKNDLLSELLGSLGEVPTVESFLGEGAVDPNDPNKANTLSQLSKTEISLVLTSKYDIEDGEAIDSRSLMIKTKKLIIDVIRNQPGNTLTEILETPATAQQEVDHATDMVSRAMIDSRTPEEMKHSQSMIEDAQLPLEQKKRKIQRNLRTLEQTGHVSSENKYQDILNEIAKDIRNQRIYRKLRKAELAKLQQTLNALNKKAAFYEEQINYYDTYIKTCLDNLKRKNTRRSIKLDGKGEPKGAKRAKPVKYTAAKLHEKGVLLDIDDLQTNQFKNVTFDIIATEDVGIFDVRSKFLGVEMEKVQLNIQDLLQMQYEGVAVMKMFDKVKVNVNLLIYLLNKKFYGK

SEQ ID NO: 23010 - protein, 294 aa, Homo sapiens
LNFVLYVFGGISALVEIPKNCVVAAVGKELIIFRLVAPTEGSLEWDILEVKRLLDHQDNILSLINVNDLSFVTGSHVGELIIWDALDWTMQAYERNFWDPSPQLDTQQEIKLCQKSNDISIHHFTCDEENVFAAVGRGLYVYSLQMKRVIACQKTAHDSNVLHVARLPNRQLISCSEDGSVRIWELREKQQLAAEPVPTGFFNMWGFGRVSKQASQPVKKQQENATSCSLELIGDLIGHSSSVEMFLYFEDHGLVTCSADHLIILWKNGERESGLRSLRLFQKLEENGDLYLAV

SEQ ID NO: 23011 - protein, 248 aa, Homo sapiens
MEGVEEKKKEVPAVPETLKKKRRNFVELKIKRLRKKFAQKMLRKARRKLIYEKAKHYHKEYRQMYRTEIRVARMARKAGNFYVPAEPKLAFVIRIRGISAVSPKVRKVLQLLRLRQIFNGTFVKLNKASINMLRIVEPYIAWGYPNLKSVNELIYKRGYGKINKKRIALTDNALIARSLGKYGIICMEDLIHEIYTVGKRFKEANNFLWPFKLSSPRGGMKKKTTHFVEGRDAGNREDQINRLTRRMN

SEQ ID NO: 23012 - protein, 197 aa, Homo sapiens
MQNLSQHGRKNNWPPLPSNFPVGPCFYQDFSVDIPVEFQKTVKLMYYLWMFHAVTLFLNIFGCLAWFCVDSARAVDFGLSILWFLLFTPCSFVCWYRPLYGAFSGWISSLTGLNQNIPVGIMMIIIAALFTASAVISLVMFKKVHGLYRTTGASFEKAQQEFATGVMSNKTVQTAAANAASTAASSAAQNAFKGNQI

SEQ ID NO: 23013 - protein, 55 aa, Homo sapiens
MRGHIQLRKVTGHAVCSAHYKEWNMKIVYNPRPGVAKFCQTPSPPGSMKDNNLNH

SEQ ID NO: 23014 - protein, 116 aa, Homo sapiens
LLGGAQEEAPRCSVSSSEFSKKCSERCKTMSAKEKVRFEDMSKMDKTHYEREMKTYVLPKWETKKKFEDPNVPKRPPLAFFLFYSECRPKIKAEHPGLPLVSCKEIGRDVEGHCRR

SEQ ID NO: 23015 - protein, 14 aa, Homo sapiens
MFLLHPPNPRAGCR

SEQ ID NO: 23016 - protein, 622 aa, Homo sapiens
LVPSKRQLSFQEAGQRAPAGSSLAPPPPQQPGARVGGGGGRAPGLASPRPAGGAVPRRGGAGPGSPVPHSISGTRGWWRHRRWDRGRTRMGPRGAASLPRGPGPRRLLLPVVLPLLLLLLLAPPGSGAGASRPPHLVFLLADDLGWNDVGFHGSRIRTPHLDALAAGGVLLDNYYTQPLCTPSRSQLLTGRYQIRTGLQHQIIWPCQPSCVPLDEKLLPQLLKEAGYTTHMVGKWHLGMYRKECLPTRRGFDTYFGYLLGSEDYYSHERCTLIDALNVTRCALDFRDGEEVATGYKNMYSTNIFTKRAIALITNHPPEKPLFLYLALQSVHEPLQVPEEYLKPYDFIQDKNRHHYAGMVSLMDEAVGNVTAALKSSGLWNNTVFIFSTDNGGQTLAGGNNWPLRGRKWSLWEGGVRGVGFVASPLLKQKGVKNRELIHISDWLPTLVKLARGHTNGTKPLDGFDVWKTISEGSPSPRIELLHNIDPNFVDSSPCPRNSMAPAKDDSSLPEYSAFNTSVHAAIRHGNWKLLTGYPGCGYWFPPPSQYNVSEIPSSDPPTKTLWLFDIDRDPEERHDLSREYPHIVTKLLSRLQFYHKHSVPVYFPAQDPRCDPKATGVWGPWM

SEQ ID NO: 23017 - protein, 502 aa, Homo sapiens
LVPSKRQLSFQEAGQRAPAGSSLAPPPPQQPGARVGGGGGRAPGLASPRPAGGAVPRRGGAGPGSPVPHSISGTRGWWRHRRWDRGRTRMGPRGAASLPRGPGPRRLLLPVVLPLLLLLLLAPPGSGAGASRPPHLVFLLADDLGWNDVGFHGSRIRTPHLDALAAGGVLLDNYYTQPLCTPSRSQLLTGRYQIRTGLQHQIIWPCQPSCVPLDEKLLPQLLKEAGYTTHMVGKWHLGMYRKECLPTRRGFDTYFGYLLGSEDYYSHERCTLIDALNVTRCALDFRDGEEVATGYKNMYSTNIFTKRAIALITNHPPEKPLFLYLALQSVHEPLQVPEEYLKPYDFIQDKNRHHYAGMVSLMDEAVGNVTAALKSSGLWNNTVFIFSTDNGGQTLAGGNNWPLRGRKWSLWEGGVRGVGFVASPLLKQKGVKNRELIHISDWLPTLVKLARGHTNGTKPLDGFDVWKTISEGSPSPRIELLHNIDPNFVDSSPYWPECSLLL

SEQ ID NO: 23018 - protein, 35 aa, Homo sapiens
LSSRVEEYMFTSSEQEHVPKLNFGSPTLHSKSSTT

SEQ ID NO: 23019 - protein, 12 aa, Homo sapiens
VFFVLVWSWEMM

SEQ ID NO: 23020 - protein, 74 aa, Homo sapiens [sequence omitted]

SEQ ID NO: 23021 - protein, 310 aa, Homo sapiens [sequence omitted]

SEQ ID NO: 23022 - protein, 12 aa, Homo sapiens
MFSGVCVLVFFL

SEQ ID NO: 23023 - protein, 637 aa, Homo sapiens
LVLILSLIILMNVLLSSLLRRTKHPVYLHQQLCQSQHLNNQVLKDYVPKNRREYGLQMVYCPMVKLQIQQNYHLEVKDVLKTLVLSHLMCLCISDYRLLCDINKYVCNKISLLPNDEDSLPPLLVASGEKGSVPVVEEHPSHEQIILLLEGESFHPVTFVLNANLLVNVKFIFYSSDKYWYFSTNGLHGLGQAEIIILLLCLPNEDTIPKDIFRLFITIYKDALKGKYIENLDNITFTESFLSSKDHGGFLFITPTFQKLDDLSLPSNPFLCGILIQKLEIPWAKVFPMRLMLRLGAEYKAYPAPLTSIRGRKPLFGEIGHTIMNLLVDLRNYQYTLHNIDQLLIHMEMGKSCIKIPRKKYSDVMKVLNSSNEHVISIGASFSTEADSHLVCIQNDGIYETQANSATGHPRKVTGASFVVFNGALKTSSGFLAKSSIVEDGLMVQITPETMNGLRLALREQKDFKITCGKVDAVDLREYVDICWVDAEEKGNKGVISSVDGISLQGFPSEKIKLEADFETDEKIVKCTEVFYFLKDQDLSILSTSYQFAKEIAMACSAALCPHLKTLKSNGMNKIGLRVSIDTDMVEFQAGSEGQLLPQHYLNDLDSALIPVIHGGTSNSSLPLEIELVFFIIEHLF

SEQ ID NO: 23024 - protein, 24 aa, Homo sapiens
VQVVAKRSSERFRKLVVALKITLR

SEQ ID NO: 23025 - protein, 64 aa, Homo sapiens
MSLNKILLLSLGIAARRMPRVYLASPGFNRTDTMEYFISPRCDMDYFSLGHKCLQQLVFDRLNV

SEQ ID NO: 23026 - protein, 162 aa, Homo sapiens
LWLLPAVLLSFAQARGADRMGKCRGLRTARKLRSHRRDQKWHDKQYKKAHLGTALKANPFGGASHAKGIVLEKVGVEAKQPNSAIRKCVRVQLIKNGKKITAFVPNDGCLNFIEENDEVLVAGFGRKGHAVGDIPGVRFKVVKVANVSLLALYKGKKERPRS

SEQ ID NO: 23027 - protein, 104 aa, Homo sapiens
LWLLPAVLLSFAQARGADRMGKCRGLRTARKLRSHRRDQKWHDKQYKKAHLGTALKANPFGGASHAKGIVLEKVGVEAKQPNSAIRKCVRVQLIKNGKKERPRS

SEQ ID NO: 23028 - protein, 9 aa, Homo sapiens
MMMGVTTRI

SEQ ID NO: 23029 - protein, 172 aa, Homo sapiens
LQGAHLTSILSHEEQMFVNRVGHDYQWIGLNDKMFEHDFRWTDGSTLQYENWRPNQPDSFFSAGEDCVVIIWHENGQWNDVPCNYHLTYTCKKGTVACGQPPVVENAKTFGKMKPRYEINSLIRYHCKDGFIQRHLPTIRCLGNGRWAIPKITCMNRKWSFRKNGLPCYNNY

SEQ ID NO: 23030 - protein, 363 aa, Homo sapiens
VKKILWAIKMKSLLLLVLISICWADHLSDNYTLDHDRAIHIQAENGPHLLVEAEQAKVFSHRGGNVTLPCKFYRDPTAFGSGIHKIRIKWTKLTSDYLKEVDVFVSMGYHKKTYGGYQGRVFLKGGSDSDASLVITDLTLEDYGRYKCEVIEGLEDDTVVVALDLQGVVFPYFPRLGRYNLNFHEAQQACLDQDAVIASFDQLYDAWRGGLDWCNAGWLSDGSVQYPITKPREPCGGQNTVPGVRNYGFWDKDKSRYDVFCFTSNFNGRFYYLIHPTKLTYDEAVQACLNDGAQIAKVGQIFAAWKILGYDRCDAGWLADGSVRYPISRPRRRCSPTEAAVRFVGFPDKKHKLYGVYCFRAYN

SEQ ID NO: 23031 - protein, 171 aa, Homo sapiens
MLKKILWAIKMKSLLLLVLISICWADHLSDNYTLDHDRAIHIQAENGPHLLVEAEQAKVFSHRGGNVTLPCKFYRDPTAFGSGIHKIRIKWTKLTSDYLKEVDVFVSMGYHKKTYGGYQGRVFLKGGSDSDASLVITDLTLEDYGRYKCEVIEGLEDDTVVVALDLQGMYL

SEQ ID NO: 23032 - protein, 509 aa, Homo sapiens
LLLPCAATSATLPSATTPDQPGSRPGDGIMKRSVAVWLLVGLSLGVPQFGKGDICDPNPCENGGICLPGLADGSFSCECPDGFTDPNCSSVVEVASDEEEPTSAGPCTPNPCHNGGTCEISEAYRGDTFIGYVCKCPRGFNGIHCQHNINECEVEPCKNGGICTDLVANYSCECPGEFMGRNCQYKCSGPLGIEGGIISNQQITASSTHRALFGLQKWYPYYARLNKKGLINAWTAAENDRWPWIQINLQRKMRVTGVITQGAKRIGSPEYIKSYKIAYSNDGKTWAMYKVKGTNEDMVFRGNIDNNTPYANSFTPPIKAQYVRLYPQVCRRHCTLRMELLGCELSGCSEPLGMKSGHIQDYQITASSIFRTLNMDMFTWEPRKARLDKQGKVNAWTSGHNDQSQWLQVDLLVPTKVTGIITQGAKDFGHVQFVGSYKLAYSNDGEHWTVYQDEKQRKDKVFQGNFDNDTHRKNVIDPPIYARHIRILPWSWYGRITLRSELLGCTEEE

SEQ ID NO: 23033 - protein, 21 aa, Homo sapiens
MSPLKSLWKELGHEKSPHEWD

SEQ ID NO: 23034 - protein, 15 aa, Homo sapiens
VVAALARTLSLNLIL

SEQ ID NO: 23035 - protein, 9 aa, Homo sapiens
MKDCAALKL

SEQ ID NO: 23036 - protein, 23 aa, Homo sapiens
MKTGLLILTFPSQSLALFKLLGN

SEQ ID NO: 23037 - protein, 44 aa, Homo sapiens
LSMLSLLLLESPARIEGLTLPPRLDAMQRYVDLGSLQPQPPELM

SEQ ID NO: 23038 - protein, 16 aa, Homo sapiens
VFVPFRICPLIWYNWF

SEQ ID NO: 23039 - protein, 45 aa, Homo sapiens
LTPFFEFVALHVCLCVCLHVCTHVLVCNVKVTAESLHLVYLKFWS

SEQ ID NO: 23040 - protein, 43 aa, Homo sapiens
LLSHVLYMLLMKLLKGLNVTDVFGRMRLSVPVQLCPNAVLISQ

SEQ ID NO: 23041 - protein, 417 aa, Homo sapiens
LMSISLSSLILLPIWINMAQIQQGGPDEKEKTTALKDLLSRIDLDELMKKDEPPLDFPDTLEGFEYAFNEKGQLRHIKTGEPFVFNYREDLHRWNQKRYEALGEIITKYVYELLEKDCNLKKVSIPVDATESEPKSFIFMSEDALTNPQKLMVLIHGSGVVRAGQWARRLIINEDLDSGTQIPFIKRAVAEGYGVIVLNPNENYIEVEKPKIHVQSSSDSSDEPAEKRERKDKVSKETKKRRDFYEKYRNPQREKEMMQLYIRENGSPEEHAIYVWDHFIAQAAAENVFFVAHSYGGLAFVELMIQREADVKNKVTAVALTDSVHNVWHQEAGKTIREWMRENCCNWVSSSEPLDTSVESMLPDCPRVSAGTDRHELTSWKSFPSIFKFFTEASEAKTSSLKPAVTRRSHRIKHEEL

SEQ ID NO: 23042 - protein, 359 aa, Homo sapiens
LVGARIPRGKVITTARGSSTGELEGHASSRLPPQPCGWGQSSDLLSRIDLDELMKKDEPPLDFPDTLEGFEYAFNEKGQLRHIKTGEPFVFNYREDLHRWNQKRYEALGEIITKYVYELLEKDCNLKKVSIPEGYGVIVLNPNENYIEVEKPKIHVQSSSDSSDEPAEKRERKDKVSKETKKRRDFYEKYRNPQREKEMMQLYIRENGSPEEHAIYVWDHFIAQAAAENVFFVAHSYGGLAFVELMIQREADVKNKVTAVALTDSVHNVWHQEAGKTIREWMRENCCNWVSSSEPLDTSVESMLPDCPRVSAGTDRHELTSWKSFPSIFKFFTEASEAKTSSLKPAVTRRSHRIKHEEL

SEQ ID NO: 23043 - protein, 423 aa, Homo sapiens
LVGARIPRGKVITTARGSSTGELEGHASSRLPPQPCGWGQSSDLLSRIDLDELMKKDEPPLDFPDTLEGFEYAFNEKGQLRHIKTGEPFVFNYREDLHRWNQKRYEALGEIITKYVYELLEKDCNLKKVSIPVDATESEPKSFIFMSEDALTNPQKLMVLIHGSGVVRAGQWARRLIINEDLDSGTQIPFIKRAVAEGYGVIVLNPNENYIEVEKPKIHVQSSSDSSDEPAEKRERKDKVSKETKKRRDFYEKYRNPQREKEMMQLYIRENGSPEEHAIYVWDHFIAQAAAENVFFVAHSYGGLAFVELMIQREADVKNKVTAVALTDSVHNVWHQEAGKTIREWMRENCCNWVSSSEPLDTSVESMLPDCPRVSAGTDRHELTSWKSFPSIFKFFTEASEAKTSSLKPAVTRRSHRIKHEEL

SEQ ID NO: 23044 - protein, 293 aa, Homo sapiens
LMSISLSSLILLPIWINMAQIQQGGPDEKEKTTALKDLLSRIDLDELMKKDEPPLDFPDTLEGFEYAFNEKGQLRHIKTGEPFVFNYREDLHRWNQKRYEALGEIITKYVYELLEKDCNLKKVSIPVDATESEPKSFIFMSEDALTNPQKLMVLIHGSGVVRAGQWARRLIINEDLDSGTQIPFIKRAVAEGYGVIVLNPNENYIEVEKPKIHVQSSSDSSDEPAEKRERKDKVSKETKKRRDFYEKYRNPQREKEMMQLYIRVSEITTFLYYFLYLVYILLYVDCFVFLQEY

SEQ ID NO: 23045 - protein, 237 aa, Homo sapiens
LMSISLSSLILLPIWINMAQIQQGGPDEKEKTTALKDLLSRIDLDELMKKDEPPLDFPDTLEGFEYAFNEKGQLRHIKTGEPFVFNYREDLHRWNQKRYEALGEIITKYVYELLEKDCNLKKVSIPVDATESEPKSFIFMSEDALTNPQKLMVLIHGSGVVRAGQWARRLIINEDLDSGTQIPFIKRAVAMFKKKLNTYDSEAIRIFSPVTIAVRKLQYKCLLECIAYEIMCFFPVV

SEQ ID NO: 23046 - protein, 101 aa, Homo sapiens
VKQLSAAAAVVAPAAAATEGSIPDTGKMEDGTPKHIIQMTGFKMEEKEALVKLLLKLDCTFIKSEKYKNCTHLIAERLCKSEKFLAACAAAFSAVIDLTYH

SEQ ID NO: 23047 - protein, 206 aa, Homo sapiens
VKQLSAAAAVVAPAAAATEGSIPDTGKMEDGTPKHIIQMTGFKMEEKEALVKLLLKLDCTFIKSEKYKNCTHLIAERLCKSEKFLAACAAGKWILTKDYIIHSAKSGRWLDETTYEWGYKIEKDSRYSPQMQSAPKRWREELKRTGAPGAFHRWKVVLLVRTDKRSDSLIRKKFRMMKIPKPILFGLNIAMKKQTKISGKMQDFLK

SEQ ID NO: 23048 - protein, 1085 aa, Homo sapiens
VKQLSAAAAVVAPAAAATEGSIPDTGKMEDGTPKHIIQMTGFKMEEKEALVKLLLKLDCTFIKSEKYKNCTHLIAERLCKSEKFLAACAAGKWILTKDYIIHSAKSGRWLDETTYEWGYKIEKDSRYSPQMQSAPKRWREELKRTGAPGAFHRWKVVLLVRTDKRSDSLIRVLEAGKANVILPKSSPSGITHVIASNARIKAEKEKDNFKAPFYPIQYLGDFLLEKEIQNDEDSQTNSVWTEHSNEETNKDFRKDAGFLEMKGALRETMYRTQKEMQNHEDVNVGSILIQHHKKEKFSGSSKDLKFVKMRNTFGSHTYENQKEIKKKDEDIQRSYTLRRKRKKGKESNCKKGVEHEKIKSTLRRHIYNRDQKEMKNSIFAEYAKESKAMAIKTDVDVVEIKNTLRKHIYRAQAVRYNCIRIDKQPVYNVEVKNAEFPRGVLNLIESLIEGHFFKEAIEELSTLQAHYIPPVCVLHALLENVLQDNIDTFSGRYFHILSALLHLHPPWKSPAMSRYYLELFQCPTCMKGAWSLVEVLIRSCLFNESFCHQISENIGSKVLHLTLLKFFFNLIESEVQHLSQKLYDWSDSQNLKITGKAMLLEIFWSGSETSGLLTKPVNMLLEWTIYSHKEKFKSNDVFKHELAYLLAGILGAAIDYWIFLGLKMGRNVMRHMSDDLGSYVSLSCDDFSSQELEIFICSFSSSWLQMFVAEAVFKKLCLQSSGSVSSEPLSLQKMVYSYLPALGKTGVLGSGKIQVSKKIGQRPCFDSQRTLLMLNGTKQKQVEGLPELLDLNLAKCSSSLKKLKKKSEGELSCSKENCPSVVKKMNFHKTNLKGETALHRACINNQVEKLILLLSLPGIDINVKDNAGWTPLHEACNYGNTVCVQEILQRCPEVDLLTQVDGVTPLHDALSNGHVEIGKLLLQHGGPVLLQQRNAKGELPLDYVVSPQIKEELFAITKIEDTVENFHAQAEKHFHYQQLEFGSFLLSRMLLNFCSIFDLSSEFILASKGLTHLNELLMACKSHKETTSVHTDWLLDLYAGNIKTLQKLPHILKELPENLKVCPGVHTEALMITLEMMCRSVMEFS

SEQ ID NO: 23049 - protein, 669 aa, Homo sapiens
LAGAAPAPLCVGPAAVEAREGDAAGDERIAGELAARGPREAVSRCFSPSRRPALGFEIMSIHIVALGNEGDTFHQDNRPSGLIRTYLGRSPLVSGDESSLLLNAASTVARPVFTEYQASAFGNVKLVVHDCPVWDIFDSDWYTSRNLIGGADIIVIKYNVNDKFSFHEVKDNYIPVIKRALNSVPVIIAAVGTRQNEELPCTCPLCTSDRGSCVSTTEGIQLAKELGATYLELHSLDDFYIGKYFGGVLEYFMIQALNQKTSEKMKKRKMSNSFHGIRPPQLEQPEKMPVLKAEASHYNSDLNNLLFCCQCVDVVFYNPNLKKVVEAHKIVLCAVSHVFMLLFNVKSPTDIQDSSIIRTTQDLFAINRDTAFPGASHESSGNPPLRVIVKDALFCSCLSDILRFIYSGAFQWEELEEDIRKKLKDSGDVSNVIEKVKCILKTPGKINCLRNCKTYQARKPLWFYNTSLKFFLNKPMLADVVFEIQGTTVPAHRAILVARCEVMAAMFNGNYMEAKSVLIPVYGVSKETFLSFLEYLYTDSCCPAGIFQAMCLLICAEMYQVSRLQHICELFIITQLQSMPSRELASMNLDIVDLLKKAKFHHSDCLSTWLLHFIATNYLIFSQKPEFQDLSVEERSFVEKHRWPSNMYLKQLAEYRKYIHSRKCRCLVM

SEQ ID NO: 23050 - protein, 14 aa, Homo sapiens
LVFFWMCSLVFRRL

SEQ ID NO: 23051 - protein, 667 aa, Homo sapiens
LQKPKQPRPQWRLEPERRRRRHPGEFKMAAGGTGGLREEQRYGLSCGRLGQDNITVLHVKLTETAIRALETYQSHKNLIPFRPSIQFQGLHGLVKIPKNDPLNEVHNFNFYLSNVGKDNPQGSFDCIQQTFSSSGASQLNCLGFIQDKITVCATNDSYQMTRERMTQAEEESRNRSTKVIKPGGPYVGKRVQIRKAPQAVSDTVPERKRSTPMNPANTIRKTHSSSTISQRPYRDRVIHLLALKAYKKPELLARLQKDGVNQKDKNSLGAILQQVANLNSKDLSYTLKDYVFKELQRDWPGYSEIDRRSLESVLSRKLNPSQNAAGTSRSESPVCSSRDAVSSPQKRLLDSEFIDPLMNKKARISHLTNRVPPTLNGHLNPTSEKSAAGLPLPPAAAAIPTPPPLPSTYLPISHPPQIVNSNSNSPSTPEGRGTQDLPVDSFSQNDSIYEDQQDKYTSRTSLETLPPGSVLLKCPKPMEENHSMSHKKSKKKSKKHKEKDQIKKHDIETIEEKEEDLKREEEIAKLNNSSPNSSGGVKEDCTASMEPSAIELPDYLIKYIAIVSYEQRQNYKDDFNAEYDEYRALHARMETVARRFIKLDAQRKRLSPGSKEYQNVHEEVLQEYQKIKQSSPNYHEEKYRCEYLHNKLAHIKRLIGEFDQQQAESWS

SEQ ID NO: 23052 - protein, 467 aa, Homo sapiens
LWDSHEEVHHQRAAWRVFLKAGIRMLDGIVTDAIEASSIGFNPGHVDIYSASWGPNDDGKTVEGPGRLAQKAFEYGVKQTSADLHNDCTETHTGTSASAPLAAGIFALALEANPNLTWRDMQHLVVWTSEYDPLANNPGWKKNGAGLMVNSRFGFGLLNAKALVDLADPRTWRSVPEKKECVVKDNDFEPRALKANGEVIIEIPTRACEGQENAIKSLEHVQFEATIEYSRRGDLHVTLTSAAGTSTVLLAERERDTSPNGFKNWDFMSVHTWGENPIGTWTLRITDMSGRIQNEGRIVNWKLILHGTSSQPEHMKQPRVYTSYNTVQNDRRGVEKMVDPGEEQPTQENPKENTLVSKSPSSSSVGGRRDELEEGAPSQAMLRLLQSAFSKNSPPKQSPKKSPSAKLNIPYENFYEALEKLNKPSQLKDSEDSLYNDYVDVFYNTKPYKHRDDRLLQALVDILNEEN

SEQ ID NO: 23053 - protein, 769 aa, Homo sapiens
LTNRDQSSAGAGAGHRHVSEKTSESPSKPGEKKGSDEKKAASLGSSQSSRTYAGGTASATKVSASSGATSKSSSMNPTETKAIPVSQQMEGPHLPNKKKHKKQAVKTEPEKKSQSTKLSVVHEKKSQEGKPKEHTEPKSLPKQASDTGSNDAHNKKAVSRSAEQQPSEKSTEPKTKPQDMISAGGESVAGITAISGKPGDKKKEKKSLTPAVPVESKPDKPSGKSGMDAALDDLIDTLGGPEETEEENTTYTGPEVSDPMSSTYIEELGKREVTIPPKYRELLAKPIGPDDAIDALSSDFTCGSPTAAGKKTEKEESTEVLKAQSAGTVRSAAPPQEKKRKVEKDTMSDQALEALSASLGTRQAEPELDLRSIKEVDEAKAKEEKLEKCGEDDETIPSEYRLKPATDKDGKPLLPEPEEKPKPRSESELIDELSEDFDRSECKEKPSKPTEKTEESKAAAPAPVSEAVCRTSMCSIQSAPPEPATLKGTVPDDAVEALADSLGKKEADPEDGKPVMDKVKEKAKEEDREKLGEKEETIPPDYRLEEVKDKDGKPLLPKESKEQLPPMSEDFLLDALSEDFSGPQNASSLKFEDAKLAAAISEVVSQTPASTTQAGAPPRDTSQSDKDLDDALDKLSDSLGQRQPDPDENKPMEDKVKEKAKAEHRDKLGERDDTIPPEYRHLLDDNGQDKPVKPPTKKSEDSKKPADDQDPIDALSGDLDSCPSTTETSQNTAKDKCKKAASSSKAPKNGGKAKDSAKTTEETSKPKDD

SEQ ID NO: 23054 - protein, 799 aa, Homo sapiens
VGSEKLFHRPLPGPPLPPSLPLSLAGLPARPPRHSPRRIPGGSGRSGLAMSQPGQKPAASPRPRRAAAARRTHEHVSEKTSESPSKPGEKKGSDEKKAASLGSSQSSRTYAGGTASATKVSASSGATSKSSSMNPTETKAVKTEPEKKSQSTKPKSLPKQASDTGSNDAHNKKAVSRSAEQQPSEKSTEPKTKPQDMISAGGESVAGITAISGKPGDKKKEKKSLTPAVPVESKPDKPSGKSGMDAALDDLIDTLGGPEETEEENTTYTGPEVSDPMSSTYIEELGKREVTIPPKYRELLAKKEGITGPPADSSKPIGPDDAIDALSSDFTCGSPTAAGKKTEKEESTEVLKAQSAGTVRSAAPPQEKKRKVEKDTMSDQALEALSASLGTRQAEPELDLRSIKEVDEAKAKEEKLEKCGEDDETIPSEYRLKPATDKDGKPLLPEPEEKPKPRSESELIDELSEDFDRSECKEKPSKPTEKTEESKAAAPAPVSEAVCRTSMCSIQSAPPEPATLKGTVPDDAVEALADSLGKKEADPEDGKPVMDKVKEKAKEEDREKLGEKEETIPPDYRLEEVKDKDGKPLLPKESKEQLPPMSEDFLLDALSEDFSGPQNASSLKFEDAKLAAAISEVVSQTPASTTQAGAPPRDTSQSDKDLDDALDKLSDSLGQRQPDPDENKPMEDKVKEKAKAEHRDKLGERDDTIPPEYRHLLDDNGQDKPVKPPTKKSEDSKKPADDQDPIDALSGDLDSCPSTTETSQNTAKDKCKKAASSSKAPKNGGKAKDSAKTTEETSKPKDD

SEQ ID NO: 23055 - protein, 92 aa, Homo sapiens
MSQPGQKPAASPRPRRAAAARRTHEHVSEKTSESPSKPGEKKGSDEKKAASLGSSQSSRTYAGGTASATKVSASSGATSKSSSMNPTETKIK

SEQ ID NO: 23056 - protein, 15 aa, Homo sapiens
LLSLITNILLSVFSN

SEQ ID NO: 23057 - protein, 150 aa, Homo sapiens
VRAAPEPQSTEASPKRSDGTPFPWNKIRLPEYVIPVHYDLLIHANLTTLTFWGTTKVEITASQPTSTIILHSHHLQISRATLRKGAGERLSEEPLQVLEHPRQEQIALLAPEPLLVGLPYTVVIHYAGNLSETFHGFYKSTYRTKEGELR

SEQ ID NO: 23058 - protein, 74 aa, Homo sapiens
LTVLFPLASLALSAAATKTRNGGAAPPLAAPPWQPLEAALGMLSQLGRLSSRSRKLGRSGCKEPRRGENGALHQ

SEQ ID NO: 23059 - protein, 24 aa, Homo sapiens
LLVVVIVVLSLSTQFFVWSCRNQM

SEQ ID NO: 23060 - protein, 295 aa, Homo sapiens [sequence omitted]

SEQ ID NO: 23061 - protein, 564 aa, Homo sapiens
LESENWESGPRGGASLPPRVALPPTWGRGAGAALPSLRASAAWLAAYFPSWQASRCRQGNACGPACSEVQGPPDPAEPPPGAKGLRMIRKKRKRSAPPGPCRSHGPRPATAPAPPPSPEPTRPAWTGMGLRAAPSSAAAAAAEVEQRRSPGLCPPPLELLLLLLFSLGLLHAGDCQQPAQCRIQKCTTDFVSLTSHLNSAVDGFDSEFCKALRAYAGCTQRTSKACRGNLVYHSAVLGISDLMSQRNCSKDGPTSSTNPEVTHDPCNYHSHAGAREHRRGDQNPPSYLFCGLFGDPHLRTFKDNFQTCKVEGAWPLIDNNYLSVQVTNVPVVPGSSATATNKITIIFKAHHECTDQKVYQAVTDDLPAAFVDGTTSGGDSDAKSLRIVERESGHYVEMHARYIGTTVFVRQVGRYLTLAIRMPEDLAMSYEESQDLQLCVNGCPLSERIDDGQGQVSAILGHSLPRTSLVQAWPGYTLETANTQCHEKMPVKDIYFQSCVFDLLTTGDANFTAAAHSALEDVEALHPRKERWHIFPSSGNGTPRGGSDLSVSLGLTCLILIVFL

SEQ ID NO: 23062 - protein, 26 aa, Homo sapiens
MIYEGEGPGLIREDPIGAGALYDYGR

SEQ ID NO: 23063 - protein, 145 aa, Homo sapiens [sequence omitted]

SEQ ID NO: 23064 - protein, 243 aa, Homo sapiens
LAELAQTGREVAGQRSRTRGSSATEDPSDLIPGSRLQALLAFYRFHPRDYLPKTEPLYQEKVRELGQPGLSRAPKMRSIRKRWTICTISLLLIFYKTKEIARTEEHQETQLIGDGELSLSRSLVNSSDKIIRKAGSSIFQHNVEGWKINSSLVLEIRKNILRFLDAERDVSVVKSSFKPGDVIHYVLDRRRTLNISHDLHSLLPEVSPMKNRRFKTCAVVGNSGILLDSECGKEIDSHNFVIR

SEQ ID NO: 23065 - protein, 875 aa, Homo sapiens
MDTVHHMLLFGCNMPSSTGSYWFCDEGTCTDKANILYAWARNAPPTRLPKGVGFRVGGETGSKYFVLQVHYGDISAFRDNNKDCSGVSLHLTRLPQPLIAGMYLMMSVDTVIPAGEKVVNSDISCHYKNYPMHVFAYRVHTHHLGKVVSGYRVRNGQWTLIGRQSPQLPQAFYPVGHPVDVSFGDLLAARCVFTGEGRTEATHIGGTSSDEMCNLYIMYYMEAKHAVSFMTCTQNVAPDMFRTIPPEANIPIPVKSDMVMMHEHHKETEYKDKIPLLQQPKREEEEVLDQGDFYSLLSKLLGEREDVVHVHKYNPTEKAESESDLVAEIANVVQKKDLGRSDAREGAEHERGNAILVRDRIHKFHRLVSTLRPPESRVFSLQQPPPGEGTWEPEHTGDFHMEEALDWPGVYLLPGQVSGVALDPKNNLVIFHRGDHVWDGNSFDSKFVYQQIGLGPIEEDTILVIDPNNAAVLQSSGKNLFYLPHGLSIDKDGNYWVTDVALHQVFKLDPNNKEGPVLILGRSMQPGSDQNHFCQPTDVAVDPGTGAIYVSDGYCNSRIVQFSPSGKFITQWGEESSGSSPLPGQFTVPHSLALVPLLGQLCVADRENGRIQCFKTDTKEFVREIKHSSFGRNVFAISYIPGLLFAVNGKPHFGDQEPVQGFVMNFSNGEIIDIFKPVRKHFDMPHDIVASEDGTVYIGDAHTNTVWKFTLTEKLEHRSVKKAGIEVQEIKAEAVVETKMENKPTSSELQKMQEKQKLIKEPGSGVPVVLITTLLVIPVVVLLAIAIFIRWKKSRAFGDSEHKLETSSGRVLGRFRGKGSGGLNLGNFFASRKGYSRKGFDRLSTEGSDQEKEDDGSESEEEYSAPLPALAPSSS

SEQ ID NO: 23066 - protein, 7 aa, Homo sapiens
MWPYSCY

SEQ ID NO: 23067 - protein, 57 aa, Homo sapiens
LKSLDKHLTPASGMKGGNLDLNGLDHLTTARVTTAFVAGKKIAVSTQESSNFTVFVF

SEQ ID NO: 23068 - protein, 49 aa, Homo sapiens
LMSWPLCTLLFSWDCILAVKTSRLKFDSQGYILGTFKVSFQRDFINRLD

SEQ ID NO: 23069 - protein, 13 aa, Homo sapiens
MSVFPWDSLEIVQ

SEQ ID NO: 23070 - protein, 26 aa, Homo sapiens
LFCYSVKLFSTVLTLQLTVQLHSSWT

SEQ ID NO: 23071 - protein, 202 aa, Homo sapiens
VMLHVEMLTLVFLVLWMCVFSQDPGSKAVADRYAVYWNSSNPRFQRGDYHIDVCINDYLDVFCPHYEDSVPEDKTERYVLYMVNFDGYSACDHTSKGFKRWECNRPHSPNGPLKFSEKFQLFTPFSLGFEFRPGREYFYISSAIPDNGRRSCLKLKVFVRPTNDTVHESAEPSRGENAAQTPRIPSRLLAILLFLLAMLLTL

SEQ ID NO: 23072 - protein, 53 aa, Homo sapiens
LVGASFLSRPLSFLFIHIYLAPALSLSLCLPPSLRIPALSPEWRVGGSAAGQA

SEQ ID NO: 23073 - protein, 156 aa, Homo sapiens
VSCVRFLPNSSNPITVSCSWDKLVKVWNLANCKLKTNHIGHTGYLNTVTMSPNGSLCASGGKDGQAMLWDLNEGKHLYMPDGGGIINTLCFSPNCYWLCAAMGPSIKIWDLGVNIIVDELKQEVISTGSKAEPPQCTSLAWSVGGHLFAGYTDNLV

SEQ ID NO: 23074 - protein, 38 aa, Homo sapiens
VVVQILLALCYGFLRVFSWFCLASSGKCPKRLEHCIKS

SEQ ID NO: 23075 - protein, 128 aa, Homo sapiens
LRAQIFANTVDNARIILQVNNDCLAAADFRVKYETQLAMRQSAESDIRGLHKVIDDTNVTRLQLETEIEALKEELLFMKKNHEEEVKGLQAQTASSGLTMEVDAPKSQDLAKIVADIWPQYDDLARKN

SEQ ID NO: 23076 - protein, 107 aa, Homo sapiens
LTQRLLRRRCLLLLVAGGAGAPSGAGEPALPFAASAAISAFVGRERGRGLAAAAGAGFSPGTVLSSLLSFSFFPRCRRPPPAPPRGAWVREGEGRGGGGRESLASGR

SEQ ID NO: 23077 - protein, 1251 aa, Homo sapiens
LPRAPCRRSALSLRSSLWGPPFPVAGESRLERGARPRGGRQARAKAKGVWWRRRLGAEQGGDSHPHPRARRSRSPGEGSLRRLLPRVHSALSPLAEESVLAPSLSRKMKLSRQFTVFGSAIFCVVIFSLYLMLDRGHLDYPRNPRREGSFPQGQLSMLQEKIDHLERLLAENNEIISNIRDSVINLSESVEDGPKSSQSNFSQGAGSHLLPSQLSLSVDTADCLFASQSGSHNSDVQMLDVYSLISFDNPDGGVWKQGFDITYESNEWDTEPLQVFVVPHSHNDPGWLKTFNDYFRDKTQYIFNNMVLKLKEDSRRKFIWSEISYLSKWWDIIDIQKKDAVKSLIENGQLEIVTGGWVMPDEATPHYFALIDQLIEGHQWLENNIGVKPRSGWAIDPFGHSPTMAYLLNRAGLSHMLIQRVHYAVKKHFALHKTLEFFWRQNWDLGSVTDILCHMMPFYSYDIPHTCGPDPKICCQFDFKRLPGGRFGCPWGVPPETIHPGNVQSRARMLLDQYRKKSKLFRTKVLLAPLGDDFRYCEYTEWDLQFKNYQQLFDYMNSQSKFKVKIQFGTLSDFFDALDKADETQRDKGQSMFPVLSGDFFTYADRDDHYWSGYFTSRPFYKRMDRIMESHLRAAEILYYFALRQAHKYKINKFLSSSLYTALTEARRNLGLFQHHDAITGTAKDWVVVDYGTRLFHSLMVLEKIIGNSAFLLILKDKLTYDSYSPDTFLEMDLKQKSQDSLPQKNIIRLSAEPRYLVVYNPLEQDRISLVSVYVSSPTVQVFSASGKPVEVQVSAVWDTANTISETAYEISFRAHIPPLGLKVYKILESASSNSHLADYVLYKNKVEDSGIFTIKNMINTEEGITLENSFVLLRFDQTGLMKQMMTKEDGKHHEVNVQFSWYGTTIKRDKSGAYLFLPDGNAKPYVYTTPPFVRVTHGRIYSEVTCFFDHVTHRVRLYHIQGIEGQSVEVSNIVDIRKVYNREIAMKISSDIKSQNRFYTDLNGYQIQPRMTLSKLPLQANVYPMTTMAYIQDAKHRLTLLSAQSLGVSSLNSGQIEVIMDRRLMQDDNRGLEQGIQDNKITANLFRILLEKRSAVNTEEEKKSVSYPSLLSHITSSLMNHPVIPMANKFSSPTLELQGEFSPLQSSLPCDIHLVNLRTIQSKVGNGHSNEAALILHRKGFDCRFSSKGTGLFCSTTQGKILVQKLLNKFIVESLTPSSLSLMHSPPGTQNISEINLSPMEISTFRIQLR

SEQ ID NO: 23078 - protein, 141 aa, Homo sapiens
LVFLRLFIFFLHGHLESFKQHLLRLQPYLYALSFSGASYHKYPNIFSNVQFILKASEIIGKRELRSESIFRPVEDKKRYENTDSDMGGYEINHLLWHCVAAWSCVQNNSPQLNNVLEHLVFHKTQLQKKCWSLLRQILCFT

SEQ ID NO: 23079 - protein, 31 aa, Homo sapiens
LFYLSLFLCFREVLHKWSPKQIGEHLLLKSL

SEQ ID NO: 23080 - protein, 158 aa, Homo sapiens
LKTKSQEELKDTFEHDPSESIDEFSNSSATSGDIWPGLTAYNNSPRSPHSPSHIATPPSQSSSCSDAPMLSTVHSAKNTPSQHSKSIQHSPERSGSGSVGNGSSPYSPSQNSPVHHIPSRRSPAKTIAPQNAPRDESRGRSSFYPDNGDQETAKTGKF

SEQ ID NO: 23081 - protein, 247 aa, Homo sapiens
LLSPAHRRAGRLSSTVESGVRCLVARRSCFHVLASPQVKREVMEGLSDVASFATKLKNTLIQYHSIEEDKWRVAKKTKDVTVWRKPSEEFNGYLYKAQGVIDDLVYSIIDHIRPGPCRLDWDSLMTSLDILENFEENCCVMRYTTAGQLWNIISPREFVDFSYTVGYKEGLLSCGISLDWDEKRPEFVRGYNHPCGWFCVPLKDNPNQSLLTGYIQTDLRGMIPQSAVDTAMASTLTNFYGDLRKAL

SEQ ID NO: 23082 - protein, 201 aa, Homo sapiens
LLSPAHRRAGRLSSTVESGVRCLVARRSCFHVLASPQVKREVMEGLSDVASFATKLKNTLIQYHSIEEDKWRVAKKTKDVTVWRKPSEEFNGYLYKAQGVIDDLVYSIIDHIRPGPCRLDWDSLMTSLDILENFEENCCVMRYTTAGQLWNIISPREFVDFSYTVGYKEGLLSCGNNLNMLCFFSVWFKYLCFLGWMSLSL

SEQ ID NO: 23083 - protein, 93 aa, Homo sapiens
MLPFFNHICVSGVERRESEQGAGLLSVYYPELFVWVSQEPFPNKDMEGRLPKGRLPVPKEVNRKKNDETNAASLTPLGSSELRSPRISYLHFF

SEQ ID NO: 23084 - protein, 33 aa, Homo sapiens
MLFIKRNIGQSEWAAELCPELSGQLPARSFFVL

SEQ ID NO: 23085 - protein, 53 aa, Homo sapiens
MCCKFLCLLLLSIYIGSTLNLMQWAVSTFLENVFCLWVGKDVCCYPAGNINLK

SEQ ID NO: 23086 - protein, 105 aa, Homo sapiens
LQLSSCIPSSVKQRKGCLAFFFRLVLNIYIAPQCGFLLWCMAPSPSNGAELLYKRIIRPFFLKHESQMDSVVKDLKDKAKETADAITKEAKKATVNLLGEEKKST

SEQ ID NO: 23087 - protein, 13 aa, Homo sapiens
VPSILVMGGGEAP

SEQ ID NO: 23088 - protein, 16 aa, Homo sapiens
VPSRVSARAGKCPPSW

SEQ ID NO: 23089 - protein, 752 aa, Homo sapiens
LAAPVRRDHLFRAMSRPSSVSPRQPAPGGGGGGGPSPCGPGGGGRAKGLKDIRIDEEVKIAVNIALERFRYGDQREMEFPSSLTSTERAFIHRLSQSLGLVSKSKGKGANRYLTVKKKDGSETAHAMMTCNLTHNTKHAVRSLIQRFPVTNKERTELLPKTERGNVFAVEAENREMSKTSGRLNNGIPQIPVKRGESEFDSFRQSLPVFEKQEEIVKIIKENKVVLIVGETGSGKTTQIPQFLLDDCFKNGIPCRIFCTQPRRLAAIAVAERVAAERRERIGQTIGYQIRLESRVSPKTLLTFCTNGVLLRTLMAGDSTLSTVTHVIVDEVHERDRFSDFLLTKLRDLLQKHPTLKLILSSAALDVNLFIRYFGSCPVIYIQGRPFEVKEMFLEDILRTTGYTNKEMLKYKKEKQQEEKQQTTLTEWYSAQENSFKPESQRQRTVLNVTDEYDLLDDGGDAVFSQLTEKDVNCLEPWLIKEMDACLSDIWLHKDIDAFAQVFHLILTENVSVDYRHSETSATALMVAAGRGFASQVEQLISMGANVHSKASNGWMALDWAKHFGQTEIVDLLESYSATLEFGNLDESSLVQTNGSDLSAEDRELLKAYHHSFDDEKVDLDLIMHLLYNICHSCDAGAVLIFLPGYDEIVGLRDRILFDDKRFADSTHRYQVFMLHSNMQTSDQKKVLKNPPAGVRKIILSTNIAETSITVNDVVFVIDSGKVKEKSFDALNFVTMLKMVWISKASAIQRKGR

SEQ ID NO: 23090 - protein, 88 aa, Homo sapiens
MAATEDERLAGSGEGERLDFLRDRHVRFFQRCLQVLPERYSSLETSRLTIAFFALSGLDMLDSLDVVNKDDIIEWIYSLQVLPTEDSE

SEQ ID NO: 23091 - protein, 509 aa, Homo sapiens
VAAAARVARRVNMAALTTVVVAAAATAVAGAVAGAGAATGTGVGATPAPQQSDGCFSTSGGIRPFHLQNWKQKVNQTKKAEFVRTAEKFKNQVINMEKDKHSHFYNQKSDFRIEHSMLEELENKLIHSRKTERAKIQQQLAKIHNNVKKLQHQLKDVKPTPDFVEKLREMMEEIENAINTFKEEQRLIYEELIKEEKTTNNELSAISRKIDTWALGNSETEKAFRAISSKVPVDKVTPSTLPEEVLDFEKFLQQTGGRQGAWDDYDHQNFVKVRNKHKGKPTFMEEVLEHLPGKTQDEVQQHEKWYQKFLALEERKKESIQIWKTKKQQKREEIFKLKEKADNTPVLFHNKQEDNQKQKEEQRKKQKLAVEAWKKQKSIEMSMKCASQLKEEEEKEKKHQKERQRQFKLKLLLESYTQQKKEQEEFLRLEKEIREKAEKAEKRKNAADEISRFQERVENNVSRDPSRLYKPTKGWEERTKKIGPTGSGPLLHIPHRAIPTWRQGIQRRV

SEQ ID NO: 23092 - protein, 53 aa, Homo sapiens
VAAAARVARRVNMAALTTVVVAAAATAVAGAVAGAGAATGTGVGATPAPQQSN

SEQ ID NO: 23093 - protein, 57 aa, Homo sapiens
LFVFFFTFFTSEVSFSNPLKLLCAKFGKQIYSNSLTQLKFRSVILIYHAVKGRIFLK

SEQ ID NO: 23094 - protein, 39 aa, Homo sapiens
MVMIVHPLLLLVTIIAADLPPRLKRRLRLYKHLHCQFSK

SEQ ID NO: 23095 - protein, 218 aa, Homo sapiens
LGSAQLTDGGSARKPKMAVPAALILRESPSMKKAVSLINAIDTGRFPRLLTRILQKLHLKAESSFSEEEEEKLQAAFSLEKQDLHLVLETISFILEQAVYHNVKPAALQQQLENIHLRQDKAEAFVNTWSSMGQETVEKFRQRILAPCKLETVGWQLNLQMAHSAQAKLKSPQAVLQLGVNNEDSKSLEKVLVEFSHKELFDFYNKLETIQAQLDSLT

SEQ ID NO: 23096 - protein, 304 aa, Homo sapiens
LTGVSAMESQKEARTLQEPVARPSGASSSQTPNDKERREGGAVPAAAALGAEADDDSADGLWELPVEPAERRPECTRCSRPQKVCLCPFLPAHPLHISTHLYIIQHPAEENKVLRTVPLLAACLPQDKCKVKIGRRFSEERDPELSTVCRKSGTLILYPGAEAANLEEFILDSPVYPSTIIIIDGTWSQAKDIFYKNSLFRHPKQVQLKTSISSQYVIRMQPTNRCLSTLECAAVALSILEKNNYIQETLLRPLQALCSFQLQHGAQIRLSKEHLLKNGLYPKPMPKNKRKLRKMELLMNSVKI

SEQ ID NO: 23097 - protein, 208 aa, Homo sapiens
LTGVSAMESQKEARTLQEPVARPSGASSSQTPNDKERREGGAVPAAAALGAEADDDSADGLWELPVEPAERRPECTRCSRPQKVCLCPFLPAHPLHISTHLYIIQHPAEVQLKTSISSQYVIRMQPTNRCLSTLECAAVALSILEKNNYIQETLLRPLQALCSFQLQHGAQIRLSKEHLLKNGLYPKPMPKNKRKLRKMELLMNSVKI

SEQ ID NO: 23098 - protein, 143 aa, Homo sapiens
LTGVSAMESQKEARTLQEPVARPSGASSSQTPNDKERREGGAVPAAAALGAEADDDSADGLWELPVEPAERRPECTRCSRPQKVCLCPFLPAHPLHISTHLYIIQHPAEENKVLRTVPLLAACLPQDKCKVKIGRRFSEERCN

SEQ ID NO: 23099 - protein, 273 aa, Homo sapiens
LFVCVSLQALFMGSPLRFDGRVVLVTGAGAGLGRAYALAFAERGALVVVNDLGGDFKGVGKGSLAADKVVEEIRRRGGKAVANYDSVEEGEKVVKTALDAFGRIDVVVNNAGILRDRSFARISDEDWDIIHRVHLRGSFQVTRAAWEHMKKQKYGRIIMTSSASGIYGNFGQANYSAAKLGLLGLANSLAIEGRKSNIHCNTIAPNAGSRMTQTVMPEDLVEALKPEYVAPLVLWLCHESCEENGGLFEVGAGWIGKCKSLSVFGLYRLFPYL

SEQ ID NO: 23100 - protein, 511 aa, Homo sapiens
LFVCVSLQALFMGSPLRFDGRVVLVTGAGAGLGRAYALAFAERGALVVVNDLGGDFKGVGKGSLAADKVVEEIRRRGGKAVANYDSVEEGEKVVKTALDAFGRIDVVVNNAGILRDRSFARISDEDWDIIHRVHLRGSFQVTRAAWEHMKKQKYGRIIMTSSASGIYGNFGQANYSAAKLGLLGLANSLAIEGRKSNIHCNTIAPNAGSRMTQTVMPEDLVEALKPEYVAPLVLWLCHESCEENGGLFEVGAGWIGKLRWERTLGAIVRQKNHPMTPEAVKANWKKICDFENASKPQSIQESTGSIIEVLSKIDSEGGVSANHTSRATSTATSGFAGAIGQKLPPFSYAYTELEAIMYALGVGASIKDPKDLKFIYEGSSDFSCLPTFGVIIGQKSMMGGGLAEIPGLSINFAKVLHGEQYLELYKPLPRAGKLKCEAVVADVLDKGSGVVIIMDVYSYSEKELICHNQFSLFLVGSGGFGGKRTSDKVKPTQCEDDEDEDLYDDLLPLTE

SEQ ID NO: 23101 - protein, 729 aa, Homo sapiens
LFVCVSLQALFMGSPLRFDGRVVLVTGAGAVNDLGGDFKGVGKGSLAADKVVEEIRRRGGKAVANYDSVEEGEKVVKTALDAFGRIDVVVNNAGILRDRSFARISDEDWDIIHRVHLRGSFQVTRAAWEHMKKQKYGRIIMTSSASGIYGNFGQANYSAAKLGLLGLANSLAIEGRKSNIHCNTIAPNAGSRMTQTVMPEDLVEALKPEYVAPLVLWLCHESCEENGGLFEVGAGWIGKLRWERTLGAIVRQKNHPMTPEAVKANWKKICDFENASKPQSIQESTGSIIEVLSKIDSEGGVSANHTSRATSTATSGFAGAIGQKLPPFSYAYTELEAIMYALGVGASIKDPKDLKFIYEGSSDFSCLPTFGVIIGQKSMMGGGLAEIPGLSINFAKVLHGEQYLELYKPLPRAGKLKCEAVVADVLDKGSGVVIIMDVYSYSEKELICHNQFSLFLVGSGGFGGKRTSDKVKVAVAIPNRPPDAVLTDTTSLNQAALYRLSGDWNPLHIDPNFASLAGFDKPILHGLCTFGFSARRVLQQFADNDVSRFKAIKARFAKPVYPGQTLQTEMWKEGNRIHFQTKVQETGDIVISNAYVDLAPTSGTSAKTPSEGGKLQSTFVFEEIGRRLKDIGPEVVKKVNAVFEWHITKGGNIGAKWTIDLKSGSGKVYQGPAKGAADTTIILSDEDFMEVVLGKLDPQKAFFSGRLKARGNIMLSQKLQMILKDYAKL

SEQ ID NO: 23102 - protein, 32 aa, Homo sapiens
LHKIIFLYLTAMSRALGVKKATALNLFTQKLP

SEQ ID NO: 23103 - protein, 76 aa, Homo sapiens
LLTTESAMKNIEDNNMLVFIVDVKANKHQIKQAVKKLYDIDVAKVNTLIRPEGEKAYVQLAPDYDALDVANKIGFM

SEQ ID NO: 23104 - protein, 422 aa, Homo sapiens
LAKGVMRFAWTVLLLGPLQLCALVHCAPPAAGQQQPPREPPAAPGAWRQQIQWENNGQVFSLLSLGSQYQPQRRRDPGAAVPGAANASAQQPRTPILLIRDNRTAAARTRTAGSSGVTAGRPRPTARHWFQAGYSTSRAREAGASRAENQTAPGEVPALSNLRPPSRVDGMVGDDPYNPYKYSDDNPYYNYYDTYERPRPGGRYRPGYGTGYFQYGLPDLVADPYYIQASTYVQKMSMYNLRCAAEENCLASTAYRADVRDYDHRVLLRFPQRVKNQGTSDFLPSRPRYSWEWHSCHQHYHSMDEFSHYDLLDANTQRRVAEGHKASFCLEDTSCDYGYHRRFACTAHTQGLSPGCYDTYGADIDCQWIDITDVKPGNYILKVSVNPSYLVPESDYTNNVVRCDIRYTGHHAYASGCTISPY

SEQ ID NO: 23105 - protein, 527 aa, Homo sapiens
LNTLIWMKLTLVMTYLIQSHHSRRSQNCAEDVIRKTKTDQEKILLWLLQFMQEQGISLDEVDQDGNSAVHVASQHGYLGCIQTLVEYGANVTMQNHAGEKPSQSAERQGHTLCSRYLVVVETCMSLASQVVKLTKQLKEQTVERVTLQNQLQQFLEAQKSEGKSLPSSPSSPSSPASRKSQWKSPDADDDSVAKSKPGVQEGIQVLGSLSASSRARPKAKDEDSDKILRQLLGKEISENVCTQEKLSLEFQDAQASSRNSKKIPLEKRELKLARLRQLMQRSLSESDTDSNNSEDPKTTPVRKADRPRPQPIVESVESMDSAESLHLMIKKHTLASGGRRFPFSIKASKSLDGHSPSPTSESSEPDLESQYPGSGSIPPNQPSGDPQQPSPDSTAAQKVATSPKSALKSPSSKRRTSQNLKLRVTFEEPVVQMEQPSLELNGEKDKDKGRTLQRTSTSNESGDQLKRPFGAFRSIMETLSGNQNNNNNYQAANQLKTSTLPLTSLGRKTDAKGNPASSASKGKNKAA

SEQ ID NO: 23106 - protein, 565 aa, Homo sapiens
LNTLIWMKLTLVMTYLIQSHHSRRSQNCAEDVIRKTKTDQNGQLECVRWMVSETEAIAELSCSKDFPSLIHYAGCYGQEKILLWLLQFMQEQGISLDEVDQDGNSAVHVASQHGYLGCIQTLVEYGANVTMQNHAGEKPSQSAERQGHTLCSRYLVVVETCMSLASQVVKLTKQLKEQTVERVTLQNQLQQFLEAQKSEGKSLPSSPSSPSSPASRKSQWKSPDADDDSVAKSKPGVQEGIQVLGSLSASSRARPKAKDEDSDKILRQLLGKEISENVCTQEKLSLEFQDAQASSRNSKKIPLEKRELKLARLRQLMQRSLSESDTDSNNSEDPKTTPVRKADRPRPQPIVESVESMDSAESLHLMIKKHTLASGGRRFPFSIKASKSLDGHSPSPTSESSEPDLESQYPGSGSIPPNQPSGDPQQPSPDSTAAQKVATSPKSALKSPSSKRRTSQNLKLRVTFEEPVVQMEQPSLELNGEKDKDKGRTLQRTSTSNESGDQLKRPFGAFRSIMETLSGNQNNNNNYQAANQLKTSTLPLTSLGRKTDAKGNPASSASKGKNKAA

SEQ ID NO: 23107 - protein, 625 aa, Homo sapiens
LNTLIWMKLTLVMTYLIQSHHSRRSQNCAEDVIRKTKTDQPHLAADNLDKIHDENGNNLLHIAASQGHAECLQHLTSLMGEDCLNERNTEKLTPAGLAIKNGQLECVRWMVSETEAIAELSCSKDFPSLIHYAGCYGQEKILLWLLQFMQEQGISLDEVDQDGNSAVHVASQHGYLGCIQTLVEYGANVTMQNHAGEKPSQSAERQGHTLCSRYLVVVETCMSLASQVVKLTKQLKEQTVERVTLQNQLQQFLEAQKSEGKSLPSSPSSPSSPASRKSQWKSPDADDDSVAKSKPGVQEGIQVLGSLSASSRARPKAKDEDSDKILRQLLGKEISENVCTQEKLSLEFQDAQASSRNSKKIPLEKRELKLARLRQLMQRSLSESDTDSNNSEDPKTTPVRKADRPRPQPIVESVESMDSAESLHLMIKKHTLASGGRRFPFSIKASKSLDGHSPSPTSESSEPDLESQYPGSGSIPPNQPSGDPQQPSPDSTAAQKVATSPKSALKSPSSKRRTSQNLKLRVTFEEPVVQMEQPSLELNGEKDKDKGRTLQRTSTSNESGDQLKRPFGAFRSIMETLSGNQNNNNNYQAANQLKTSTLPLTSLGRKTDAKGNPASSASKGKNKAA

SEQ ID NO: 23108 - protein, 615 aa, Homo sapiens
LNTLIWMKLTLVMTYLIQSHHSRRSQNCAEDVIRKTKTDQNGQLECVRWMVSETEAIAELSCSKDFPSLIHYAGCYGQEKILLWLLQFMQEQGISLDEVDQDGNSAVHVASQHGYLGCIQTLVEYGANVTMQNHAGEKPSQSAERQGHTLCSRYLVVVETCMSLASQVVKLTKQLKEQTVERVTLQNQLQQFLEAQKSEGKSLPSSPSSPSSPASRKSQWKSPDADDDSVAKSKPGVQEGIQVLGSLSASSRARPKAKDEDSDKILRQLLGKEISENVCTQEKLSLEFQDAQASSRNSKKIPLEKRELKLARLRQLMQRSLSESDTDSNNSEDPKTTPVRKADRPRPQPIVESVESMDSAESLHLMIKKHTLASGGRRFPFSIKASKSLDGHSPSPTSESSEPDLESQYPGSGSIPPNQPSGDPQQPSPDSTAAQKVATSPKSALKSPSSKRRTSQNLKLRVTFEEPVVQMEQPSLELNGEKDKDKGRTLQRTSTSNESGDQLKRPFGAFRSIMETLSGNQNNNNNYQAANQLKTSTLPLTSLGRKTDAKGNPASSASKGKNKAEMYSSCINLSSNMLIEEHLCNDTRHNDINRKMKKSYSIKHIAEPESKELFL

SEQ ID NO: 23109 - protein, 227 aa, Homo sapiens
VPVAPVPVAPLPPLTMGPGPRLLLPLVLCVGLGALVFSSGAEGFRKRGPSVTAKVFFDVRIGDKDVGRIVIGLFGKVVPKTVENFVALATGEKGYGYKGSKFHRVIKDFMIQGGDITTGDGTGGVSIYGETFPDENFKLKHYGIGWVSMANAGPDTNGSQFFITLTKPTWLDGKHVVFGKVIDGMTVVHSIELQATDGHDRPLTNCSIINSGKIDVKTPFVVEIADW

SEQ ID NO: 23110 - protein, 20 aa, Homo sapiens
MDNMFKSYINNLRRQLETLG

SEQ ID NO: 23111 - protein, 22 aa, Homo sapiens
MCSLPGPASIRMPEAEGCLTSG

SEQ ID NO: 23112 - protein, 86 aa, Homo sapiens
LFVFNFLFIALTMPPFLHRPKGSDCGIVNVNIPTSGAEIGGAFGGEKHTGGGRESGSDAWKQYMRRSTCTINYSKDLPLAQGIKFQ

SEQ ID NO: 23113 - protein, 509 aa, Homo sapiens
LRTGFSAFLHCPGLNTAPDTHYCSKQCFIEYNGKVITTYCPANNEPIARVRQASVADYEETVKKAREAWKIWADIPAPKRGEIVRQIGDALREKIQVLGSLVSLEMGKILVEGVGEVQEYVDICDYAVGLSRMIGGPILPSERSGHALIEQWNPVGLVGIITAFNFPVAVYGWNNAIAMICGNVCLWKGAPTTSLISVAVTKIIAKVLEDNKLPGAICSLTCGGADIGTAMAKDERVNLLSFTGSTQVGKQVGLMVQERFGRSLLELGGNNAIIAFEDADLSLVVPSALFAAVGTAGQRCTTARRLFIHESIHDEVVNRLKKAYAQIRVGNPWDPNVLYGPLHTKQAVSMFLGAVEEAKKEGGTVVYGGKVMDRPGNYVEPTIVTGLGHDASIAHTETFAPILYVFKFKNEEEVFAWNNEVKQGLSSSIFTKDLGRIFRWLGPKGSDCGIVNVNIPTSGAEIGGAFGGEKHTGGGRESGSDAWKQYMRRSTCTINYSKDLPLAQGIKFQ

SEQ ID NO: 23114 - protein, 599 aa, Homo sapiens
LFQAGFSRRLLRKTRGRRGGGGVVPSGRGRVCPMGSPGRGAGLYFSSSQGLGLIPSPGLSMWRLPRALCVHAAKTSKLSGPWSRPAAFMSTLLINQPQYAWLKELGLREENEGVYNGSWGGRGEVITTYCPANNEPIARVRQASVADYEETVKKAREAWKIWADIPAPKRGEIVRQIGDALREKIQVLGSLVSLEMGKILVEGVGEVQEYVDICDYAVGLSRMIGGPILPSERSGHALIEQWNPVGLVGIITAFNFPVAVYGWNNAIAMICGNVCLWKGAPTTSLISVAVTKIIAKVLEDNKLPGAICSLTCGGADIGTAMAKDERVNLLSFTGSTQVGKQVGLMVQERFGRSLLELGGNNAIIAFEDADLSLVVPSALFAAVGTAGQRCTTARRLFIHESIHDEVVNRLKKAYAQIRVGNPWDPNVLYGPLHTKQAVSMFLGAVEEAKKEGGTVVYGGKVMDRPGNYVEPTIVTGLGHDASIAHTETFAPILYVFKFKNEEEVFAWNNEVKQGLSSSIFTKDLGRIFRWLGPKGSDCGIVNVNIPTSGAEIGGAFGGEKHTGGGRESGSDAWKQYMRRSTCTINYSKDLPLAQGIKFQ

SEQ ID NO: 23115 - protein, 62 aa, Homo sapiens
LGGRPCLFPCSTAMAKDERVNLLSFTGSTQVGKQVGLMVQERFGKCWLSNEDFNSLKYGGEI

SEQ ID NO: 23116 - protein, 189 aa, Homo sapiens
LREKIQVLGSLVSLEMGKILVEGVGEVQEYVDICDYAVGLSRMIGGPILPSERSGHALIEQWNPVGLVGIITAFNFPVAVYGWNNAIAMICGNVCLWKGAPTTSLISVAVTKIIAKVLEDNKLPGAICSLTCGGADIGTAMAKDERVNLLSFTGSTQVGKQVGLMVQERFGKCWLSNEDFNSLKYGGEI

SEQ ID NO: 23117 - protein, 469 aa, Homo sapiens
VRVYAKKESDLNGAQIKLREYEAALNSKDAALATALGDKKSLEGDLEDLKDQIAQLEASLAAAKKQLADETLLKVDLENRCQSLTEDLEFRKSMYEEEINETRRKHETRLVEVDSGRQIEYEYKLAQALHEMREQHDAQVRLYKEELEQTYHAKLENARLSSEMNTSTVNSAREELMESRMRIESLSSQLSNLQKESRACLERIQELEDLLAKEKDNSRRMLTDKEREMAEIRDQMQQQLNDYEQLLDVKLALDMEISAYRKLLEGEEERLKLSPSPSSRVTVSRASSSRSVRTTRGKRKRVDVEESEASSSVSISHSASATGNVCIEEIDVDGKFIRLKNTSEQDQPMGGWEMIRKIGDTSVSYKYTSRYVLKAGQTVTIWAANAGVTASPPTDLIWKNQNSWGTGEDVKVILKNSQGEEVAQRSTVFKTTIPEEEEEEEEAAGVVVEEELFHQQGTPRASNRSCAIM

SEQ ID NO: 23118 - protein, 8 aa, Homo sapiens
LTMLCFFF

SEQ ID NO: 23119 - protein, 53 aa, Homo sapiens
LVSWFGWVLFELVCFSVSRMDSLGYFGSLSGLFHLFRVHYSRRQHNRCRTSHI

SEQ ID NO: 23120 - protein, 75 aa, Homo sapiens
LQLFRRGEIIWIRIKMLWFQGNSMQLARSSFGLFLRNCSASKTTLPVLTLFTKVQSEKVKLLGEESCTFKKKGQS

SEQ ID NO: 23121 - protein, 98 aa, Homo sapiens [sequence omitted]

SEQ ID NO: 23122 - protein, 33 aa, Homo sapiens
MLKYSSCYIGQVSDDPENSHQKVELEPGIHSLA

SEQ ID NO: 23123 - protein, 43 aa, Homo sapiens
MLGAFRSGPQPLPEPRARCKRSSLSSLWPVKFSRRDLWQPHSQ

SEQ ID NO: 23124 - protein, 12 aa, Homo sapiens
VGVYTLLMTPLF

SEQ ID NO: 23125 - protein, 84 aa, Homo sapiens
MLGAFRSGPQPLPEPRARCVPQPGLLWALTRRRESPLVTPGLNLEEGGFPLCSFRAVDSPCQADLDWHNQRSVPVVMQWVSTHF

SEQ ID NO: 23126 - protein, 1202 aa, Homo sapiens
LWPSRLAAARRRRGERLSHLVLRLWPPPARGVEGVLPETSAGLCSSAGGRAAMEPRPTAPSSGAPGLAGVGETPSAAALAAARVELPGTAVPSVPEDAAPASRDGGGVRDEGPAAAGDGLGRPLGPTPSQSRFQVDLVSENAGRAAAAAAAAAAAAAAAGAGAGAKQTPADGEASGESEPAKGSEEAKGRFRVNFVDPAASSSAEDSLSDAAGVGVDGPNVSFQNGGDTVLSEGSSLHSGGGGGSGHHQHYYYDTHTNTYYLRTFGHNTMDAVPRIDHYRHTAAQLGEKLLRPSLAELHDELEKEPFEDGFANGEESTPTRDAVVTYTAESKGVVKFGWIKGVLVRCMLNIWGVMLFIRLSWIVGQAGIGLSVLVIMMATVVTTITGLSTSAIATNGFVRGGGAYYLISRSLGPEFGGAIGLIFAFANAVAVAMYVVGFAETVVELLKEHSILMIDEINDIRIIGAITVVILLGISVAGMEWEAKAQIVLLVILLLAIGDFVIGTFIPLESKKPKGFFGYKSEIFNENFGPDFREEETFFSVFAIFFPAATGILAGANISGDLADPQSAIPKGTLLAILITTLVYVGIAVSVGSCVVRDATGNVNDTIVTELTNCTSAACKLNFDFSSCESSPCSYGLMNNFQVMSMVSGFTPLISAGIFSATLSSALASLVSAPKIFQALCKDNIYPAFQMFAKGYGKNNEPLRGYILTFLIALGFILIAELNVIAPIISNFFLASYALINFSVFHASLAKSPGWRPAFKYYNMWISLLGAILCCIVMFVINWWAALLTYVIVLGLYIYVTYKKPDVNWGSSTQALTYLNALQHSIRLSGVEDHVKNFRPQCLVMTGAPNSRPALLHLVHDFTKNVGLMICGHVHMGPRRQAMKEMSIDQAKYQRWLIKNKMKAFYAPVHADDLREGAQYLMQAAGLGRMKPNTLVLGFKKDWLQADMRDVDMYINLFHDAFDIQYGVVVIRLKEGLDISHLQGQEELLSSQEKSPGTKDVVVSVEYSKKSDLDTSKPLSEKPITHKVEEEDGKTATQPLLKKESKGPIVPLNVADQKLLEASTQFQKKQGKNTIDVWWLFDDGGLTLLIPYLLTTKKKWKDCKIRVFIGGKINRIDHDRRAMATLLSKFRIDFSDIMVLGDINTKPKKENIIAFEEIIEPYRLHEDDKEQDIADKMKEDEPWRITDNELELYKTKFYEPC

SEQ ID NO: 23127 - protein, 1264 aa, Homo sapiens
LWPSRLAAARRRRGERLSHLVLRLWPPPARGVEGVLPETSAGLCSSAGGRAAMEPRPTAPSSGAPGLAGVGETPSAAALAAARVELPGTAVPSVPEDAAPASRDGGGVRDEGPAAAGDGLGRPLGPTPSQSRFQVDLVSENAGRAAAAAAAAAAAAAAAGAGAGAKQTPADGEASGESEPAKGSEEAKGRFRVNFVDPAASSSAEDSLSDAAGVGVDGPNVSFQNGGDTVLSEGSSLHSGGGGGSGHHQHYYYDTHTNTYYLRTFGHNTMDAVPRIDHYRHTAAQLGEKLLRPSLAELHDELEKEPFEDGFANGEESTPTRDAVVTYTAESKGVVKFGWIKGVLVRCMLNIWGVMLFIRLSWIVGQAGIGLSVLVIMMATVVTTITGLSTSAIATNGFVRGGGAYYLISRSLGPEFGGAIGLIFAFANAVAVAMYVVGFAETVVELLKEHSILMIDEINDIRIIGAITVVILLGISVAGMEWEAKAQIVLLVILLLAIGDFVIGTFIPLESKKPKGFFGYKSEIFNENFGPDFREEETFFSVFAIFFPAATGILAGANISGDLADPQSAIPKGTLLAILITTLVYVGIAVSVGSCVVRDATGNVNDTIVTELTNCTSAACKLNFDFSSCESSPCSYGLMNNFQVMSMVSGFTPLISAGIFSATLSSALASLVSAPKIFQALCKDNIYPAFQMFAKGYGKNNEPLRGYILTFLIALGFILIAELNVIAPIISNFFLASYALINFSVFHASLAKSPGWRPAFKYYNMWISLLGAILCCIVMFVINWWAALLTYVIVLGLYIYVTYKKPDVNWGSSTQALTYLNALQHSIRLSGVEDHVKNFRPQCLVMTGAPNSRPALLHLVHDFTKNVGLMICGHVHMGPRRQAMKEMSIDQAKYQRWLIKNKMKAFYAPVHADDLREGAQYLMQAAGLGRMKPNTLVLGFKKDWLQADMRDVDMYINLFHDAFDIQYGVVVIRLKEGLDISHLQGQEELLSSQEKSPGTKDVVVSVEYSKKSDLDTSKPLSEKPITHKVEEEDGKTATQPLLKKESKGPIVPLNVADQKLLEASTQFQKKQGKNTIDVWWLFDDGGLTLLIPYLLTTKKKWKDCKIRVFIGGKINRIDHDRRAMATLLSKFRIDFSDIMVLGDINTKPKKENIIAFEEIIEPYRLHEDDKEQDIADKMKEDEPWRITDNELELYKTKTYRQIRLNELLKEHSSTANIIVMSLPVARKGAVSSALYMAWLEALSKDLPPILLVRGNHQSVLTFYS

SEQ ID NO: 23128 - protein, 1229 aa, Homo sapiens
LVLRLWPPPARGVEGVLPETSAGLCSSAGGRAAMEPRPTAPSSGAPGLAGVGETPSAAALAAARVELPGTAVPSVPEDAAPASRDGGGVRDEGPAAAGDGLGRPLGPTPSQSRFQVDLVSENAGRAAAAAAAAAAAAAAAGAGAGAKQTPADGEASGESEPAKGSEEAKGRFRVNFVDPAASSSAEDSLSDAAGVGVDGPNVSFQNGGDTVLSEGSSLHSGGGGGSGHHQHYYYDTHTNTYYLRTFGHNTMDAVPRIDHYRHTAAQLGEKLLRPSLAELHDELEKEPFEDGFANGEESTPTRDAVVTYTAESKGVVKFGWIKGVLVRCMLNIWGVMLFIRLSWIVGQAGIGLSVLVIMMATVVTTITGLSTSAIATNGFVRGGGAYYLISRSLGPEFGGAIGLIFAFANAVAVAMYVVGFAETVVELLKEHSILMIDEINDIRIIGAITVVILLGISVAGMEWEAKAQIVLLVILLLAIGDFVIGTFIPLESKKPKGFFGYKSEIFNENFGPDFREEETFFSVFAIFFPAATGILAGANISGDLADPQSAIPKGTLLAILITTLVYVGIAVSVGSCVVRDATGNVNDTIVTELTNCTSAACKLNFDFSSCESSPCSYGLMNNFQVMSMVSGFTPLISAGIFSATLSSALASLVSAPKIFQALCKDNIYPAFQMFAKGYGKNNEPLRGYILTFLIALGFILIAELNVIAPIISNFFLASYALINFSVFHASLAKSPGWRPAFKYYNMWISLLGAILCCIVMFVINWWAALLTYVIVLGLYIYVTYKKPDVNWGSSTQALTYLNALQHSIRLSGVEDHVKNFRPQCLVMTGAPNSRPALLHLVHDFTKNVGLMICGHVHMGPRRQAMKEMSIDQAKYQRWLIKNKMKAFYAPVHADDLREGAQYLMQAAGLGRMKPNTLVLGFKKDWLQADMRDVDMYINLFHDAFDIQYGVVVIRLKEGLDISHLQGQEELLSSQEKSPGTKDVVVSVEYSKKSDLDTSKPLSEKPITHKESKGPIVPLNVADQKLLEASTQFQKKQGKNTIDVWWLFDDGGLTLLIPYLLTTKKKWKDCKIRVFIGGKINRIDHDRRAMATLLSKFRIDFSDIMVLGDINTKPKKENIIAFEEIIEPYRLHEDDKEQDIADKMKEDEPWRITDNELELYKTKTYRQIRLNELLKEHSSTANIIVMSLPVARKGAVSSALYMAWLEALSKDLPPILLVRGNHQSVLTFYS

SEQ ID NO: 23129 - protein, 2911 aa, Homo sapiens
MGRRRRLCLQLYFLWLGCVVLWAQGTAGQPQPPPPKPPRPQPPPQQVRSATAGSEGGFLAPEYREEGAAVASRVRRRGQQDVLRGPNVCGSRFHSYCCPGWKTLPGGNQCIVPICRNSCGDGFCSRPNMCTCSSGQISSTCGSKSIQQCSVRCMNGGTCADDHCQCQKGYIGTYCGQPVCENGCQNGGRCITQPCACVYGFTGPQCERDYRTGPCFTQVNNQMCQGQLTGIVCTKTLCCATIGRAWGHPCEMCPAQPQPCRRGFIPNIRTGACQDVDECQAIPGICQGGNCINTVGSFECRCPAGHKQSETTQKCEDIDECSIIPGICETGECSNTVGSYFCVCPRGYVTSTDGSRCIDQRTGMCFSGLVNGRCAQELPGRMTKMQCCCEPGRCWGIGTIPEACPVRGSEEYRRLCMDGLPMGGIPGSAGSRPGGTGGNGFAPSGNGNGYGPGGTGFIPIPGGNGFSPGVGGAGVGAGGQGPIITGLTILNQTIDICKHHANLCLNGRCIPTVSSYRCECNMGYKQDANGDCIDVDECTSNPCTNGDCVNTPGSYYCKCHAGFQRTPTKQACIDIDECIQNGVLCKNGRCVNTDGSFQCICNAGFELTTDGKNCVDHDECTTTNMCLNGMCINEDGSFKCICKPGFVLAPNGRYCTDVDECQTPGICMNGHCINSEGSFRCDCPPGLAVGMDGRVCVDTHMRSTCYGGIKKGVCVRPFPGAVTKSECCCANPDYGFGEPCQPCPAKNSAEFHGLCSSGVGITVDGRDINECALDPDICANGICENLRGSYRCNCNSGYEPDASGRNCIDIDECLVNRLLCDNGLCRNTPGSYSCTCPPGYVFRTETETCEDINECESNPCVNGACRNNLGSFNCECSPGSKLSSTGLICIDSLKGTCWLNIQDSRCEVNINGATLKSECCATLGAAWGSPCERCELDTACPRGLARIKGVTCEDVNECEVFPGVCPNGRCVNSKGSFHCECPEGLTLDGTGRVCLDIRMEQCYLKWDEDECIHPVPGKFRMDACCCAVGAAWGTECEECPKPGTKEYETLCPRGAGFANRGDVLTGRPFYKDINECKAFPGMCTYGKCRNTIGSFKCRCNSGFALDMEERNCTDIDECRISPDLCGSGICVNTPGSFECECFEGYESGFMMMKNCMDIDECERNPLLCRGGTCVNTEGSFQCDCPLGHELSPSREDCVDINECSLSDNLCRNGKCVNMIGTYQCSCNPGYQATPDRQGCTDIDECMIMNGGCDTQCTNSEGSYECSCSEGYALMPDGRSCADIDECENNPDICDGGQCTNIPGEYRCLCYDGFMASMDMKTCIDVNECDLNSNICMFGECENTKGSFICHCQLGYSVKKGTTGCTDVDECEIGAHNCDMHASCLNIPGSFKCSCREGWIGNGIKCIDLDECSNGTHQCSINAQCVNTPGSYRCACSEGFTGDGFTCSDVDECAENINLCENGQCLNVPGAYRCECEMGFTPASDSRSCQDIDECSFQNICVFGTCNNLPGMFHCICDDGYELDRTGGNCTDIDECADPINCVNGLCVNTPGRYECNCPPDFQLNPTGVGCVDNRVGNCYLKFGPRGDGSLSCNTEIGVGVSRSSCCCSLGKAWGNPCETCPPVNSTEYYTLCPGGEGFRPNPITIILEDIDECQELPGLCQGGNCINTFGSFQCECPQGYYLSEDTRICEDIDECFAHPGVCGPGTCYNTLGNYTCICPPEYMQVNGGHNCMDMRKSFCYRSYNGTTCENELPFNVTKRMCCCTYNVGKAWNKPCEPCPTPGTADFKTICGNIPGFTFDIHTGKAVDIDECKEIPGICANGVCINQIGSFRCECPTGFSYNDLLLVCEDIDECSNGDNLCQRNADCINSPGSYRCECAAGFKLSPNGACVDRNECLEIPNVCSHGLCVDLQGSYQCICHNGFKASQDQTMCMDVDECERHPCGNGTCKNTVGSYNCLCYPGFELTHNNDCLDIDECSSFFGQVCRNGRCFNEIGSFKCLCNEGYELTPDGKNCIDTNECVALPGSCSPGTCQNLEGSFRCICPPGYEVKSENCIDINECDEDPNICLFGSCTNTPGGFQCLCPPGFVLSDNGRRCFDTRQSFCFTNFENGKCSVPKAFNTTKAKCCCSKMPGEGWGDPCELCPKDDEVAFQDLCPYGHGTVPSLHDTREDVNECLESPGICSNGQCINTDGSFRCECPMGYNLDYTGVRCVDTDECSIGNPCGNGTCTNVIGSFECNCNEGFEPGPMMNCEDINECAQNPLLCAFRCMNTFGSYECTCPIGYALREDQKMCKDLDECAEGLHDCESRGMMCKNLIGTFMCICPPGMARRPDGEGCVDENECRTKPGICENGRCVNIIGSYRCECNEGFQSSSSGTECLDNRQGLCFAEVLQTICQMASSSRNLVTKSECCCDGGRGWGHQCELCPLPGTAQYKKICPHGPGYTTDGRDIDECKVMPNLCTNGQCINTMGSFRCFCKVGYTTDISGTSCIDLDECSQSPKPCNYICKNTEGSYQCSCPRGYVLQEDGKTCKDLDECQTKQHNCQFLCVNTLGGFTCKCPPGFTQHHTACIDNNECGSQPSLCGAKGICQNTPGSFSCECQRGFSLDATGLNCEDVDECDGNHRCQHGCQNILGGYRCGCPQGYIQHYQWNQCVDENECSNPNACGSASCYNTLGSYKCACPSGFSFDQFSSACHDVNECSSSKNPCNYGCSNTEGGYLCGCPPGYYRVGQGHCVSGMGFNKGQYLSLDTEVDEENALSPEACYECKINGYSKKDSRQKRSIHEPDPTAVEQISLESVDMDSPVNMKFNLSHLGSKEHILELRPAIQPLNNHIRYVISQGNDDSVFRIHQRNGLSYLHTAKKKLMPGTYTLEITSIPLYKKKELKKLEESNEDDYLLGELGEALRMRLQIQLY

SEQ ID NO: 23130 - protein, 2931 aa, Homo sapiens
LSLITPSPRVYGRALSAPAMGRRRRLCLQLYFLWLGCVVLWAQGTAGQPQPPPPKPPRPQPPPQQVRSATAGSEGGFLAPEYREEGAAVASRVRRRGQQDVLRGPNVCGSRFHSYCCPGWKTLPGGNQCIVPICRNSCGDGFCSRPNMCTCSSGQISSTCGSKSIQQCSVRCMNGGTCADDHCQCQKGYIGTYCGQPVCENGCQNGGRCIGPNRCACVYGFTGPQCERDYRTGPCFTQVNNQMCQGQLTGIVCTKTLCCATIGRAWGHPCEMCPAQPQPCRRGFIPNIRTGACQDVDECQAIPGICQGGNCINTVGSFECRCPAGHKQSETTQKCEDIDECSIIPGICETGECSNTVGSYFCVCPRGYVTSTDGSRCIDQRTGMCFSGLVNGRCAQELPGRMTKMQCCCEPGRCWGIGTIPEACPVRGSEEYRRLCMDGLPMGGIPGSAGSRPGGTGGNGFAPSGNGNGYGPGGTGFIPIPGGNGFSPGVGGAGVGAGGQGPIITGLTILNQTIDICKHHANLCLNGRCIPTVSSYRCECNMGYKQDANGDCIDVDECTSNPCTNGDCVNTPGSYYCKCHAGFQRTPTKQACIDIDECIQNGVLCKNGRCVNTDGSFQCICNAGFELTTDGKNCVDHDECTTTNMCLNGMCINEDGSFKCICKPGFVLAPNGRYCTDVDECQTPGICMNGHCINSEGSFRCDCPPGLAVGMDGRVCVDTHMRSTCYGGIKKGVCVRPFPGAVTKSECCCANPDYGFGEPCQPCPAKNSAEFHGLCSSGVGITVDGRDINECALDPDICANGICENLRGSYRCNCNSGYEPDASGRNCIDIDECLVNRLLCDNGLCRNTPGSYSCTCPPGYVFRTETETCEDINECESNPCVNGACRNNLGSFNCECSPGSKLSSTGLICIDSLKGTCWLNIQDSRCEVNINGATLKSECCATLGAAWGSPCERCELDTACPRGLARIKGVTCEDVNECEVFPGVCPNGRCVNSKGSFHCECPEGLTLDGTGRVCLDIRMEQCYLKWDEDECIHPVPGKFRMDACCCAVGAAWGTECEECPKPGTKEYETLCPRGAGFANRGDVLTGRPFYKDINECKAFPGMCTYGKCRNTIGSFKCRCNSGFALDMEERNCTDIDECRISPDLCGSGICVNTPGSFECECFEGYESGFMMMKNCMDIDECERNPLLCRGGTCVNTEGSFQCDCPLGHELSPSREDCVDINECSLSDNLCRNGKCVNMIGTYQCSCNPGYQATPDRQGCTDIDECMIMNGGCDTQCTNSEGSYECSCSEGYALMPDGRSCADIDECENNPDICDGGQCTNIPGEYRCLCYDGFMASMDMKTCIDVNECDLNSNICMFGECENTKGSFICHCQLGYSVKKGTTGCTDVDECEIGAHNCDMHASCLNIPGSFKCSCREGWIGNGIKCIDLDECSNGTHQCSINAQCVNTPGSYRCACSEGFTGDGFTCSDVDECAENINLCENGQCLNVPGAYRCECEMGFTPASDSRSCQDIDECSFQNICVFGTCNNLPGMFHCICDDGYELDRTGGNCTDIDECADPINCVNGLCVNTPGRYECNCPPDFQLNPTGVGCVDNRVGNCYLKFGPRGDGSLSCNTEIGVGVSRSSCCCSLGKAWGNPCETCPPVNSTEYYTLCPGGEGFRPNPITIILEDIDECQELPGLCQGGNCINTFGSFQCECPQGYYLSEDTRICEDIDECFAHPGVCGPGTCYNTLGNYTCICPPEYMQVNGGHNCMDMRKSFCYRSYNGTTCENELPFNVTKRMCCCTYNVGKAWNKPCEPCPTPGTADFKTICGNIPGFTFDIHTGKAVDIDECKEIPGICANGVCINQIGSFRCECPTGFSYNDLLLVCEDIDECSNGDNLCQRNADCINSPGSYRCECAAGFKLSPNGACVDRNECLEIPNVCSHGLCVDLQGSYQCICHNGFKASQDQTMCMDVDECERHPCGNGTCKNTVGSYNCLCYPGFELTHNNDCLDIDECSSFFGQVCRNGRCFNEIGSFKCLCNEGYELTPDGKNCIDTNECVALPGSCSPGTCQNLEGSFRCICPPGYEVKSENCIDINECDEDPNICLFGSCTNTPGGFQCLCPPGFVLSDNGRRCFDTRQSFCFTNFENGKCSVPKAFNTTKAKCCCSKMPGEGWGDPCELCPKDDEVAFQDLCPYGHGTVPSLHDTREDVNECLESPGICSNGQCINTDGSFRCECPMGYNLDYTGVRCVDTDECSIGNPCGNGTCTNVIGSFECNCNEGFEPGPMMNCEDINECAQNPLLCAFRCMNTFGSYECTCPIGYALREDQKMCKDLDECAEGLHDCESRGMMCKNLIGTFMCICPPGMARRPDGEGCVDENECRTKPGICENGRCVNIIGSYRCECNEGFQSSSSGTECLDNRQGLCFAEVLQTICQMASSSRNLVTKSECCCDGGRGWGHQCELCPLPGTAQYKKICPHGPGYTTDGRDIDECKVMPNLCTNGQCINTMGSFRCFCKVGYTTDISGTSCIDLDECSQSPKPCNYICKNTEGSYQCSCPRGYVLQEDGKTCKDLDECQTKQHNCQFLCVNTLGGFTCKCPPGFTQHHTACIDNNECGSQPSLCGAKGICQNTPGSFSCECQRGFSLDATGLNCEDVDECDGNHRCQHGCQNILGGYRCGCPQGYIQHYQWNQCVDENECSNPNACGSASCYNTLGSYKCACPSGFSFDQFSSACHDVNECSSSKNPCNYGCSNTEGGYLCGCPPGYYRVGQGHCVSGMGFNKGQYLSLDTEVDEENALSPEACYECKINGYSKKDSRQKRSIHEPDPTAVEQISLESVDMDSPVNMKFNLSHLGSKEHILELRPAIQPLNNHIRYVISQGNDDSVFRIHQRNGLSYLHTAKKKLMPGTYTLEITSIPLYKKKELKKLEESNEDDYLLGELGEALRMRLQIQLY

SEQ ID NO: 23131 - protein, 1492 aa, Homo sapiens
LSLITPSPRVYGRALSAPAMGRRRRLCLQLYFLWLGCVVLWAQGTAGQPQPPPPKPPRPQPPPQQVRSATAGSEGGFLAPEYREEGAAVASRVRRRGQQDVLRGPNVCGSRFHSYCCPGWKTLPGGNQCIVLQQCSVRCMNGGTCADDHCQCQKGYIGTYCGQPVCENGCQNGGRCIGPNRCACVYGFTGPQCERDYRTGPCFTQVNNQMCQGQLTGIVCTKTLCCATIGRAWGHPCEMCPAQPQPCRRGFIPNIRTGACQDVDECQAIPGICQGGNCINTVGSFECRCPAGHKQSETTQKCEDIDECSIIPGICETGECSNTVGSYFCVCPRGYVTSTDGSRCIDQRTGMCFSGLVNGRCAQELPGRMTKMQCCCEPGRCWGIGTIPEACPVRGSEEYRRLCMDGLPMGGIPGSAGSRPGGTGGNGFAPSGNGNGYGPGGTGFIPIPGGNGFSPGVGGAGVGAGGQGPIITGLTILNQTIDICKHHANLCLNGRCIPTVSSYRCECNMGYKQDANGDCIDVDECTSNPCTNGDCVNTPGSYYCKCHAGFQRTPTKQACIDIDECIQNGVLCKNGRCVNTDGSFQCICNAGFELTTDGKNCVDHDECTTTNMCLNGMCINEDGSFKCICKPGFVLAPNGRYCTDVDECQTPGICMNGHCINSEGSFRCDCPPGLAVGMDGRVCVDTHMRSTCYGGIKKGVCVRPFPGAVTKSECCCANPDYGFGEPCQPCPAKNSAEFHGLCSSGVGITVDGRDINECALDPDICANGICENLRGSYRCNCNSGYEPDASGRNCIDIDECLVNRLLCDNGLCRNTPGSYSCTCPPGYVFRTETETCEDINECESNPCVNGACRNNLGSFNCECSPGSKLSSTGLICIDSLKGTCWLNIQDSRCEVNINGATLKSECCATLGAAWGSPCERCELDTACPRGLARIKGVTCEDVNECEVFPGVCPNGRCVNSKGSFHCECPEGLTLDGTGRVCLDIRMEQCYLKWDEDECIHPVPGKFRMDACCCAVGAAWGTECEECPKPGTKEYETLCPRGAGFANRGDVLTGRPFYKDINECKAFPGMCTYGKCRNTIGSFKCRCNSGFALDMEERNCTDIDECRISPDLCGSGICVNTPGSFECECFEGYESGFMMMKNCMDIDECERNPLLCRGGTCVNTEGSFQCDCPLGHELSPSREDCVDINECSLSDNLCRNGKCVNMIGTYQCSCNPGYQATPDRQGCTDIDECMIMNGGCDTQCTNSEGSYECSCSEGYALMPDGRSCADIDECENNPDICDGGQCTNIPGEYRCLCYDGFMASMDMKTCIDVNECDLNSNICMFGECENTKGSFICHCQLGYSVKKGTTGCTDVDECEIGAHNCDMHASCLNIPGSFKCSCREGWIGNGIKCIDLDECSNGTHQCSINAQCVNTPGSYRCACSEGFTGDGFTCSDVDECAENINLCENGQCLNVPGAYRCECEMGFTPASDSRSCQGGSPGFQLIFKLDQPQ

SEQ ID NO: 23132 - protein, 360 aa, Homo sapiens
LSLITPSPRVYGRALSAPAMGRRRRLCLQLYFLWLGCVVLWAQGTAGQPQPPPPKPPRPQPPPQQVRSATAGSEGGFLAPEYREEGAAVASRVRRRGQQDVLRGPNVCGSRFHSYCCPGWKTLPGGNQCIVPICRNSCGDGFCSRPNMCTCSSGQISSTCGSKSIQQCSVRCMNGGTCADDHCQCQKGYIGTYCGQPVCENGCQNGGRCIGPNRCACVYGFTGPQCERDYRTGPCFTQVNNQMCQGQLTGIVCTKTLCCATIGRAWGHPCEMCPAQPQPCRRGFIPNIRTGACQDVDECQAIPGICQGGNCINTVGSFECRCPAGHKQSETTQKCEVHVDKAQAGARCPCVILPSRLYLR

SEQ ID NO: 23133 - protein, 346 aa, Homo sapiens
LSLITPSPRVYGRALSAPAMGRRRRLCLQLYFLWLGCVVLWAQGTAGQPQPPPPKPPRPQPPPQQVRSATAGSEGGFLAPEYREEGAAVASRVRRRGQQDVLRGPNVCGSRFHSYCCPGWKTLPGGNQCIVPICRNSCGDGFCSRPNMCTCSSGQISSTCGSKSIQQCSVRCMNGGTCADDHCQCQKGYIGTYCGQPVCENGCQNGGRCIGPNRCACVYGFTGPQCERDYRTGPCFTQVNNQMCQGQLTGIVCTKTLCCATIGRAWGHPCEMCPAQPQPCRRGFIPNIRTGACQDVDECQAIPGICQGGNCINTVGSFECRCPAGHKQSETTQKCEGESLYFGKHA

SEQ ID NO: 23134 - protein, 54 aa, Homo sapiens
MFVFMAFLSIVALPKNKMSLPEALKSLTWSIFKTGSFYQVHHFLCITFMQAESG

SEQ ID NO: 23135 - protein, 53 aa, Homo sapiens [sequence omitted]

SEQ ID NO: 23136 - protein, 148 aa, Homo sapiens
LPHIVTANRHLLMGLTSQLLPPLFFLLACAGNFVHGHKCDITLQEIIKTLNSLTEQKTLCTELTVTDIFAASKQHACLPTSRHTGTICRPPSARVPSTSTRLQSPERTQLRRKPSAGLRLCSGSSTATMRRTLAAWVRLHSSSTGTSS

SEQ ID NO: 23137 - protein, 165 aa, Homo sapiens
LPHIVTANRHLLMGLTSQLLPPLFFLLACAGNFVHGHKCDITLQEIIKTLNSLTEQKTLCTELTVTDIFAASKNTTEKETFCRAATVLRQFYSHHEKDTRCLGATAQQFHRHKQLIRFLKRLDRNLWGLAGLNSCPVKEANQSTLENFLERLKTIMREKYSKCSS

SEQ ID NO: 23138 - protein, 503 aa, Homo sapiens
LVPVAAPALVPAHPPGAELAMAATDLERFSNAEPEPRSLSLGGHVGFDSLPDQLVSKSVTQGFSFNILCVGETGIGKSTLMNTLFNTTFETEEASHHEACVRLRPQTYDLQESNVQLKLTIVDAVGFGDQINKDESYRPIVDYIDAQFENYLQEELKIRRSLFDYHDTRIHVCLYFITPTGHSLKSLDLVTMKKLDSKVNIIPIIAKADTISKSELHKFKIKIMGELVSNGVQIYQFPTDDEAVAEINAVMNAHLPFAVVGSTEEVKVGNKLVRARQYPWGVVQVENENHCDFVKLREMLIRVNMEDLREQTHSRHYELYRRCKLEEMGFQDSDGDSQPFSLQETYEAKRKEFLSELQRKEEEMRQMFVNKVKETELELKEKERELHEKFEHLKRVHQEEKRKVEEKRRELEEETNAFNRRKAAVEALQSQALHATSQQPLRKDKDKKNRSDIGAHQPGMSLSSSKVMMTKASVEPLNCSSWWPAIQCCSCLVRDATWREGFL

SEQ ID NO: 23139 - protein, 480 aa, Homo sapiens
LVPVAAPALVPAHPPGAELAMAATDLERFSNAEPEPRSLSLGGHVGFDSLPDQLVSKSVTQGFSFNILCVGETGIGKSTLMNTLFNTTFETEEASHHEACVRLRPQTYDLQESNVQLKLTIVDAVGFGDQINKDERPIVDYIDAQFENYLQEELKIRRSLFDYHDTRIHVCLYFITPTGHSLKSLDLVTMKKLDSKVNIIPIIAKADTISKSELHKFKIKIMGELVSNGVQIYQFPTDDEAVAEINAVMNAHLPFAVVGSTEEVKVGNKLVRARQYPWGVVQVENENHCDFVKLREMLIRVNMEDLREQTHSRHYELYRRCKLEEMGFQDSDGDSQPFSLQETYEAKRKEFLSELQRKEEEMRQMFVNKVKETELELKEKERELHEKFEHLKRVHQEEKRKVEEKRRELEEETNAFNRRKAAVEALQSQALHATSQQPLRKDKDKKKGLSWISSQNPAHIHSHLVKQQMSSSSSPKAWDA

SEQ ID NO: 23140 - protein, 460 aa, Homo sapiens
LVPVAAPALVPAHPPGAELAMAATDLERFSNAEPEPRSLSLGGHVGFDSLPDQLVSKSVTQGFSFNILCVGETGIGKSTLMNTLFNTTFETEEASHHEACVRLRPQTYDLQESNVQLKLTIVDAVGFGDQINKDERPIVDYIDAQFENYLQEELKIRRSLFDYHDTRIHVCLYFITPTGHSLKSLDLVTMKKLDSKVNIIPIIAKADTISKSELHKFKIKIMGELVSNGVQIYQFPTDDEAVAEINAVMNAHLPFAVVGSTEEVKVGNKLVRARQYPWGVVQVENENHCDFVKLREMLIRVNMEDLREQTHSRHYELYRRCKLEEMGFQDSDGDSQPFSLQETYEAKRKEFLSELQRKEEEMRQMFVNKVKETELELKEKERELHEKFEHLKRVHQEEKRKVEEKRRELEEETNAFNRRKAAVEALQSQALHATSQQPLRKDKDKKKASGWSSIYSVTIP

SEQ ID NO: 23141 - protein, 462 aa, Homo sapiens
LVPVAAPALVPAHPPGAELAMAATDLERFSNAEPEPRSLSLGGHVGFDSLPDQLVSKSVTQGFSFNILCVGETGIGKSTLMNTLFNTTFETEEASHHEACVRLRPQTYDLQESNVQLKLTIVDAVGFGDQINKDESYRPIVDYIDAQFENYLQEELKIRRSLFDYHDTRIHVCLYFITPTGHSLKSLDLVTMKKLDSKVNIIPIIAKADTISKSELHKFKIKIMGELVSNGVQIYQFPTDDEAVAEINAVMNAHLPFAVVGSTEEVKVGNKLVRARQYPWGVVQVENENHCDFVKLREMLIRVNMEDLREQTHSRHYELYRRCKLEEMGFQDSDGDSQPFSLQETYEAKRKEFLSELQRKEEEMRQMFVNKVKETELELKEKERELHEKFEHLKRVHQEEKRKVEEKRRELEEETNAFNRRKAAVEALQSQALHATSQQPLRKDKDKKKASGWSSIYSVTIP

SEQ ID NO: 23142 - protein, 449 aa, Homo sapiens
LVPVAAPALVPAHPPGAELAMAATDLERFSNAEPEPRSLSLGGHVGFDSLPDQLVSKSVTQGFSFNILCVGETGIGKSTLMNTLFNTTFETEEASHHEACVRLRPQTYDLQESNVQLKLTIVDAVGFGDQINKDESYRPIVDYIDAQFENYLQEELKIRRSLFDYHDTRIHVCLYFITPTGHSLKSLDLVTMKKLDSKVNIIPIIAKADTISKSELHKFKIKIMGELVSNGVQIYQFPTDDEAVAEINAVMNAHLPFAVVGSTEEVKVGNKLVRARQYPWGVVQVENENHCDFVKLREMLIRVNMEDLREQTHSRHYELYRRCKLEEMGFQDSDGDSQPFSLQETYEAKRKEFLSELQRKEEEMRQMFVNKVKETELELKEKERELHEKFEHLKRVHQEEKRKVEEKRRELEEETNAFNRRKAAVEALQSQALHATSQQPLRKDKDKKN

SEQ ID NO: 23143 - protein, 446 aa, Homo sapiens
LVPVAAPALVPAHPPGAELAMAATDLERFSNAEPEPRSLSLGGHVGFDSLPDQLVSKSVTQGFSFNILCVGETGIGKSTLMNTLFNTTFETEEASHHEACVRLRPQTYDLQESNVQLKLTIVDAVSGEGVSCLYRPIVDYIDAQFENYLQEELKIRRSLFDYHDTRIHVCLYFITPTGHSLKSLDLVTMKKLDSKVNIIPIIAKADTISKSELHKFKIKIMGELVSNGVQIYQFPTDDEAVAEINAVMNAHLPFAVVGSTEEVKVGNKLVRARQYPWGVVQVENENHCDFVKLREMLIRVNMEDLREQTHSRHYELYRRCKLEEMGFQDSDGDSQPFSLQETYEAKRKEFLSELQRKEEEMRQMFVNKVKETELELKEKERELHEKFEHLKRVHQEEKRKVEEKRRELEEETNAFNRRKAAVEALQSQALHATSQQPLRKDKDKKN

SEQ ID NO: 23144 - protein, 450 aa, Homo sapiens
LVPVAAPALVPAHPPGAELAMAATDLERFSNAEPEPRSLSLGGHVGFDSLPDQLVSKSVTQGFSFNILCVGETGIGKSTLMNTLFNTTFETEEASHHEACVRLRPQTYDLQESNVQLKLTIVDAVGFGDQINKDESYRPIVDYIDAQFENYLQEELKIRRSLFDYHDTRIHVCLYFITPTGHSLKSLDLVTMKKLDSKVNIIPIIAKADTISKSELHKFKIKIMGELVSNGVQIYQFPTDDEAVAEINAVMNAHLPFAVVGSTEEVKVGNKLVRARQYPWGVVQVENENHCDFVKLREMLIRVNMEDLREQTHSRHYELYRRCKLEEMGFQDSDGDSQPFSLQETYEAKRKEFLSELQRKEEEMRQMFVNKVKETELELKEKERELHEKFEHLKRVHQEEKRKVEEKRRELEEETNAFNRRKAAVEALQSQALHATSQQPLRKDKDKKKS

SEQ ID NO: 23145 - protein, 156 aa, Homo sapiens
LVPVAAPALVPAHPPGAELAMAATDLERFSNAEPEPRSLSLGGHVGFDSLPDQLVSKSVTQGFSFNILCVGETGIGKSTLMNTLFNTTFETEEASHHEACVRLRPQTYDLQESNVQLKLTIVDAVGFGDQINKDERQEAGRAAPPSLLPPHLHWPL

SEQ ID NO: 23146 - protein, 39 aa, Homo sapiens
LFTLLIFKEFVVFYLIYTWGTEEFERSKRKNPAAYENDK

SEQ ID NO: 23147 - protein, 8 aa, Homo sapiens
MPNHSWRN

SEQ ID NO: 23148 - protein, 30 aa, Homo sapiens
VTLYAVSTSDKLTATAAEEWRRLTTIYLIL

SEQ ID NO: 23149 - protein, 17 aa, Homo sapiens
MIQLLRIAACVSLIDYL

SEQ ID NO: 23150 - protein, 365 aa, Homo sapiens
MNREDRNVLRMKERERRNQEIQQGEDAFPPSSPLFAEPYKVTSKEDKLSSRIQSMLGNYDEMKDFIGDRSIPKLVAIPKPTVPPSADEKSNPNFFEQRHGGSHQSSKWTPVGPAPSTSQSQKRSSGLQSGHSSQRTSAGSSSGTNSSGQRHDRESYNNSGSSSRKKGQHGSEHSKSRSSSPGKPQAVSSLNSSHSRSHGNDHHSKEHQRSKSPRDPDANWDSPSRVPFSSGQHSTQSFPPSLMSKSNSMLQKPTAYVRPMDGQESMEPKLSSEHYSSQSHGNSMTELKPSSKAHLTKLKIPSQPLDASASGDVSCVDEILKEMTHSWPPPLTAIHTPCKTEPSKFPFPTKESQQSNFGTGEQRLK

SEQ ID NO: 23151 - protein, 491 aa, Homo sapiens [sequence omitted]

SEQ ID NO: 23152 - protein, 17 aa, Homo sapiens
MLYVWDASIAKYVSPPG

SEQ ID NO: 23153 - protein, 343 aa, Homo sapiens
LPLGPRFPARTRVSLRTHTRCTRQSGASPCPDSRRSSRAPATRPQAPVSAAGAAGPGRQKMAVPPTYADLGKSARDVFTKGYGFGLIKLDLKTKSENGLEFTSSGSANTETTKVTGSLETKYRWTEYGLTFTEKWNTDNTLGTEITVEDQLARGLKLTFDSSFSPNTGKKNAKIKTGYKREHINLGCDMDFDIAGPSIRGALVLGYEGWLAGYQMNFETAKSRVTQSNFAVGYKTDEFQLHTNVNDGTEFGGSIYQKVNKKLETAVNLAWTAGNSNTRFGIAAKYQIDPDACFSAKVNNSSLIGLGYTQTLKPGIKLTLSALLDGKNVNAGGHKLGLGLEFQA

SEQ ID NO: 23154 - protein, 186 aa, Homo sapiens
LVGGRGVGGQVGATSGRPALQVLPLKLGTADTPSPFLPKSGTCRGPLGNSFSLKSRQPSVPAAARAGVSDPAVVFPGLKAPECTSGMYKETVYSAFNLLMHYPPPSGAGQHPQPQPPLVSGPRSQCRPVLAASLTSTRPISPPTVSPNSLSTNISTAHIPPLHLRTSARSKFTGLCRPLTSLASTP

SEQ ID NO: 23155 - protein, 128 aa, Homo sapiens
LGKVLGASGRGTGHCDLSGTPFAEACGFGHHFSLTAGLPVYPHPSVFLPQDSPHSPTLLLIFQHKANQPPHGVPQLSLYEHFNSPHPTPAPADISQKQVHRPLQTPDLSGFYSLTSGSMGQLPHTVSW

SEQ ID NO: 23156 - protein, 41 aa, Homo sapiens
MSWFVKQHVSMVTSTKLKMTALLRKWRSSVYKNKNKTSCYS

SEQ ID NO: 23157 - protein, 201 aa, Homo sapiens
LPRPRLSEASSGRASSRRSININEHILMYSLDLNSSSQMPSIKLQSSDGEIFEVDVEIAKQSVTIKTMLEDLGMDDEGDDDPVPLPNVNAAILKKVIQWCTHHKDDPPPPEDDENKEKRTDDIPVWDQEFLKVDQGTLFELILAANYLDIKGLLDVTCKTVANMIKGKTPEEIRKTFNIKNDFTEEEEAQVRKENQWCEEK

SEQ ID NO: 23158 - protein, 91 aa, Homo sapiens
LRRCSGFVFGFSLPSLTPPGSRQPPAGRLLNTEHHINEHILMYSLDLNSSSQMPSIKLQSSDGEIFEVDVEIAKQSVTIKTMLEGHPFCIV

SEQ ID NO: 23159 - protein, 329 aa, Homo sapiens
VCGRRRGSSAERQPAGAGGIMDEKVFTKELDQWIEQLNECKQLSESQVKSLCEKAKEILTKESNVQEVRCPVTVCGDVHGQFHDLMELFRIGGKSPDTNYLFMGDYVDRGYYSVETVTLLVALKVRYRERITILRGNHESRQITQVYGFYDECLRKYGNANVWKYFTDLFDYLPLTALVDGQIFCLHGGLSPSIDTLDHIRALDRLQEVPHEGPMCDLLWSDPDDRGGWGISPRGAGYTFGQDISETFNHANGLTLVSRAHQLVMEGYNWCHDRNVVTIFSAPNYCYRCGNQAAIMELDDTLKYSFLQFDPAPRRGEPHVTRRTPDYFL

SEQ ID NO: 23160 - protein, 474 aa, Homo sapiens
LGCMIIEMATGNPYLPSSSDLDLLHKIVLKVGNLSPHLQNIFSKSPIFAGVVLPQVQHPKNARKKYPKLNGLLADIVHACLQIDPADRISSSDLLHHEYFTRDGFIEKFMPELKAKLLQEAKVNSLIKPKESSKENELRKDERKTVYTNTLLSSSVLGKEIEKEKKPKEIKVRVIKVKGGRGDISEPKKKEYEGGLGQQDANENVHPMSPDTKLVTIEPPNPINPSTNCNGLKENPHCGGSVTMPPINLTNSNLMAANLSSNLFHPSVRLTERAKKRRTSSQSIGQVMPNSRQEDPGPIQSQMEKGIFNERTGHSDQMANENKRKLNFSRSDRKEFHFPELPVTIQSKDTKGMEVKQIKMLKRESKKTESSKIPTLLNVDQNQEKQEAKEILTKESNVQEVRCPVTVCGDVHGQFHDLMELFRIGGKSPDTNYLFMGDYVDRGYYSVETVTLLVALKVISILCWGMLKWVRQSS

SEQ ID NO: 23161 - protein, 20 aa, Homo sapiens
VIRPPRRGVGGLRGTFFFSD

SEQ ID NO: 23162 - protein, 130 aa, Homo sapiens
MRDFKRLQEDPPVGVSGAPSENNIMQWNAVIFGPEGTPFEDGTFKLVIEFSEEYPNKPPTVRFLSKMFHPNVYADGSICLDILQNRWSPTYDVSSILTSIQCLALLPRLECNGTILAHRNLCLPGSISAG

SEQ ID NO: 23163 - protein, 21 aa, Homo sapiens
LLIFFIIVVYNLPLIRKANKF

SEQ ID NO: 23164 - protein, 38 aa, Homo sapiens
MSRELMRLVLLLGSTLKNFLINEESKTINICQKFMPQY

SEQ ID NO: 23165 - protein, 850 aa, Homo sapiens
MVPTAAIAVGGYFLGGMEEKRRKYSISSDNSDTTDSHATSTSASRCSKLPSSTKSGWPRQNEKKPSEVFRTDLITAMKIPDSYQLSPDDYYILADPWRQEWEKGVQVPAGAEAIPEPVVRILPPLEGPPAQASPSSTMLGEGSQPDWPGGSRYDLDEIDAYWLELINSELKEMERPELDELTLERVLEELETLCHQNMARAIETQEGLGIEYDEDVVCDVCRSPEGEDGNEMVFCDKCNVCVHQACYGILKVPTGSWLCRTCALGVQPKCLLCPKRGGALKPTRSGTKWVHVSCALWIPEVSIGCPEKMEPITKISHIPASRWALSCSLCKECTGTCIQCSMPSCVTAFHVTCAFDHGLEMRTILADNDEVKFKSFCQEHSDGGPRNEPTSEPTEPSQAGEDLEKVTLRKQRLQQLEEDFYELVEPAEVAERLDLAEALVDFIYQYWKLKRKANANQPLLTPKTDEVDNLAQQEQDVLYRRLKLFTHLRQDLERVRNLCYMVTRRERTKHAICKLQEQIFHLQMKLIEQDLCRERSGRRAKGKKSDSKRKGCEGSKGSTEKKEKVKAGPDSVLGQLAGLSTSFPIDGTFFNSWLAQSVQITAENMAMSEWPLNNGHREDPAPGLLSEELLQDEETLLSFMRDPSLRPGDPARKARGRTRLPAKKKPPPPPPQDGPGSRTTPDKAPKKTWGQDAGSGKGGQGPPTRKPPRRTSSHLPSSPAAGDCPILATPESPPPLAPETPDEAASVAADSDVQVPGPAASPKPLGRLRPPRESKVTRRLPGARPDAGMGPPSAVAERPKVSLHFDTETDGYFSDGEMSDSDVEAEDGGVQRGPREAGAEEVVRMGVLAS

SEQ ID NO: 23166 - protein, 848 aa, Homo sapiens
LLARSLSLLLAACSRKPARRGGGCTAQGREIAHVGQSCFKEYSAGRLRGAHATTTFGRMEEKRRKYSISSDNSDTTDSHATSTSASRCSKLPSSTKSGWPRQNEKKPSEVFRTDLITAMKIPDSYQLSPDDYYILADPWRQEWEKGVQVPAGAEAIPEPVVRILPPLEGPPAQASPSSTMLGEGSQPDWPGGSRYDLDEIDAYWLELINSELKEMERPELDELTLERVLEELETLCHQNMARAIETQEGLGIEYDEDVVCDVCRSPEGEDGNEMVFCDKCNVCVHQACYGILKVPTGSWLCRTCALGVQPKCLLCPKRGGALKPTRSGTKWVHVSCALWIPEVSIGCPEKMEPITKISHIPASRWALSCSLCKECTGTCIQCSMPSCVTAFHVTCAFDHGLEMRTILADNDEVKFKSFCQEHSDGGPRNEPTSEPTEPSQAGEDLEKVTLRKQRLQQLEEDFYELVEPAEVAERLDLAEALVDFIYQYWKLKRKANANQPLLTPKTDEVDNLAQQEQDVLYRRLKLFTHLRQDLERVRNLCYMVTRRERTKHAICKLQEQIFHLQMKLIEQDLCRGLSTSFPIDGTFFNSWLAQSVQITAENMAMSEWPLNNGHREDPAPGLLSEELLQDEETLLSFMRDPSLRPGDPARKARGRTRLPAKKKPPPPPPQDGPGSRTTPDKAPKKTWGQDAGSGKGGQGPPTRKPPRRTSSHLPSSPAAGDCPILATPESPPPLAPETPDEAASVAADSDVQVPGPAASPKPLGRLRPPRESKVTRRLPGARPDAGMGPPSAVAERPKVSLHFDTETDGYFSDGEMSDSDVEAEDGGVQRGPREAGAEEVVRMGVLAS

SEQ ID NO: 23167 - protein, 175 aa, Homo sapiens
LSPRLECSGTISTHCNLRLPSSHHSPASASRVAGTTASEELTIAGMTFTTFDLGGHVQARRVWKNYLPAINGIVFLVDCADHERLLESKEELDSLMTDETIANVPILILGNKIDRPEAISEERLREMFGLYGQTTGKGSISLKELNARPLEVFMCSVLKRQGYGEGFRWMAQYID

SEQ ID NO: 23168 - protein, 29 aa, Homo sapiens
LGFPNLFSCLVFFLLLLKNCHMLTDALRA

SEQ ID NO: 23169 - protein, 194 aa, Homo sapiens
LPVDDRPASCGSSAGGKYCCGCWDFPSAAWRDLMDFLNPNGSDCTLVLFYTPWCRFSASLAPHFNSLPRAFPALHFLALDASQHSSLSTRFGTVAVPNILLFQGAKPMARFNHTDRTLETLKIFIFNQTGIEAKKNVVVTQADQIGPLPSTLIKSVDWLLVFSLFFLISFIMYATIRTESIRWLIPGQEQEHVE

SEQ ID NO: 23170 - protein, 155 aa, Homo sapiens
LGVVGSGAAVGGRQAARGAALGRRPMAAVLGALGATRRLLAALRGQSLGLAAMSSGTHRLTAEERNQAILDLKAAGWSELSERDAIYKEFSFHNFNQAFGFMSRVALQAEKMNHHPEWFNVYNKVQITLTSHDCGELTKKDVKLAKFIEKAAASV

SEQ ID NO: 23171 - protein, 38 aa, Homo sapiens
LEGSGIPERREAPKPPPAQVHPNNISQGLYSSPQAASG

SEQ ID NO: 23172 - protein, 125 aa, Homo sapiens
MALFVRLLALALALALGPAATLAGPAKSPYQLVLQHSRLRGRQHGPNVCAVQKVIGTNRKYFTNCKQWYQRKICGKSTVISYECCPGYEKVPGEKGCPAESSFGICGGLILGPILGCHILRCSSP

SEQ ID NO: 23173 - protein, 155 aa, Homo sapiens
MALFVRLLALALALALGPAATLAGPAKSPYQLVLQHSRLRGRQHGPNVCAVQKVIGTNRKYFTNCKQWYQRKICGKSTVISYECCPGYEKVPGEKGCPAALPLSNLYETLGVVGSTTTQLYTDRTEKLRPEMEGPGSFTIFAPSNEAWASLPAVR

SEQ ID NO: 23174 - protein, 427 aa, Homo sapiens
LAAVAASGLNTMLEGNGQYTLLAPTNEAFEKIPSETLNRILGDPEALRDLLNNHILKSAMCAEAIVAGLSVETLEGTTLEVGCSGDMLTINGKAIISNKDILATNGVIHYIDELLIPDSAKTLFELAAESDVSTAIDLFRQAGLGNHLSGSERLTLLAPLNSVFKDGTPPIDAHTRNLLRNHIIKDQLASKYLYHGQTLETLGGKKLRVFVYRNSLCIENSCIAAHDKRGRYGTLFTMDRVLTPPMGTVMDVLKGDNRFSMLVAAIQSAGLTETLNREGVYTVFAPTNEAFRALPPRERSRLLGDAKELANILKYHIGDEILVSGGIGALVRLKSLQGDKLEVSLKNNVVSVNKEPVAEPDIMATNGVVHVITNVLQPPANRPQERGDELADSALEIFKQASAFSRASQRSVRLAPVYQKLLERMKH

SEQ ID NO: 23175 - protein, 84 aa, Homo sapiens
LLRNHIIKDQLASKYLYHGQTLETLGGKKLRVFVYRNSLCIENSCIAAHDKRGRYGTLFTMDRVLTPPMGTVMDVLKGDNRFRA

SEQ ID NO: 23176 - protein, 28 aa, Homo sapiens
LIVPIKVLYFCDREHLMYQFRSISLYFF

SEQ ID NO: 23177 - protein, 9 aa, Homo sapiens
LSVSLLSLL

SEQ ID NO: 23178 - protein, 20 aa, Homo sapiens
VAAAAVAVALVVFQSPRLAL

SEQ ID NO: 23179 - protein, 1417 aa, Homo sapiens
MGAMEINRNIRFATYTKENGRTLVVQDEPVGGDTPASFTPYSTATGQTPLAPEVGGAENKEAGKTLEQVGQGIVASAAVVTTASSTPNTVRISDTGLAAGTVPEKQKGSRSQASGENSRNSILASSGFGAPLPSSSQPLTFGSGRSQSNGVLATENKPLGFSFGCSSAQEAQKDTDLSKNLFFQCMSQTLPTSNYFTTVSESLADDSSSRDSFKQSLESLSSGLCKGRSVLGTDTKPGSKAGSSVDRKVPAESMPTLTPAFPRSLLNARTPENHENLFLQPPKLSREEPSNPFLAFVEKVEHSPFSSFASQASGSSSSATTVTSKVAPSWPESHSSADSASLAKKKPLFITTDSSKLVSGVLGSALTSGGPSLSAMGNGRSSSPTSSLTQPIEMPTLSSSPTEERPTVGPGQQDNPLLKTFSNVFGRHSGGFLSSPADFSQENKAPFEAVKRFSLDERSLACRQDSDSSTNSDLSDLSDSEEQLQAKTGLKGIPEHLMGKLGPNGERSAELLLGKSKGKQAPKGRPRTAPLKVGQSVLKDVSKVKKLKQSGEPFLQDGSCINVAPHLHKCRECRLERYRKFKEQEQDDSTVACRFFHFRRLIFTRKGVLRVEGFLSPQQSDPDAMNLWIPSSSLAEGIDLETSKYILANVGDQFCQLVMSEKEAMMMVEPHQKVAWKRAVRGVREMCDVCETTLFNIHWVCRKCGFGVCLDCYRLRKSRPRSETEEMGDEEVFSWLKCAKGQSHEPENLMPTQIIPGTALYNIGDMVHAARGKWGIKANCPCISRQNKSVLRPAVTNGMSQLPSINPSASSGNETTFSGGGGPAPVTTPEPDHVPKADSTDIRSEEPLKTDSSASNSNSELKAIRPPCPDTAPPSSALHWLADLATQKAKEETKEAGSLRSVLNKESHSPFGLDSFNSTAKVSPLTPKLFNSLLLGPTASNNKTEGSSLRDLLHSGPGKLPQTPLDTGIPFPPVFSTSSAGVKSKASLPNFLDHIIASVVENKKTSDASKRACNLTDTQKEVKEMVMGLNVLDPHTSHSWLCDGRLLCLHDPSNKNNWKIFRECWKQGQPVLVSGVHKKLKSELWKPEAFSQEFGDQDVDLVNCRNCAIISDVKVRDFWDGFEIICKRLRSEDGQPMVLKLKDWPPGEDFRDMMPTRFEDLMENLPLPEYTKRDGRLNLASRLPSYFVRPDLGPKMYNAYGLITAEDRRVGTTNLHLDVSDAVNVMVYVGIPIGEGAHDEEVLKTIDEGDADEVTKQRIHDGKEKPGALWHIYAAKDAEKIRELLRKVGEEQGQENPPDHDPIHDQSWYLDQTLRKRLYEEYGVQGWAIVQFLGDAVFIPAGAPHQVHNLYSCIKVAEDFVSPEHVKHCFRLTQEFRHLSNTHTNHEDKLQVKNIIYHAVKDAVGTLKAHESKLARS

SEQ ID NO: 23180 - protein, 630 aa, Homo sapiens
LGSRRRHPPPQPASAAAGPAPAPASAAAARPRPPAPRASRGRRLHASQCSPRPACNPARPPQLCPLQLQPRAAPPRPDTSSPACSSRMAAAKAEMQLMSPLQISDPFGSFPHSPTMDNYPKLEEMMLLSNGAPQFLGAAGAPEGSGSNSSSSSSGGGGGGGGGSNSSSSSSTFNPQADTGEQPYEHLTAESFPDISLNNEKVLVETSYPSQTTRLPPITYTGRFSLEPAPNSGNTLWPEPLFSLVSGLVSMTNPPASSSSAPSPAASSASASQSPPLSCAVPSNDSSPIYSAAPTFPTPNTDIFPEPQSQAFPGSAGTALQYPPPAYPAAKGGFQVPMIPDYLFPQQQGDLGLGTPDQKPFQGLESRTQQPSLTPLSTIKAFATQSGSQDLKALNTSYQSQLIKPSRMRKYPNRPSKTPPHERPYACPVESCDRRFSRSDELTRHIRIHTGQKPFQCRICMRNFSRSDHLTTHIRTHTGEKPFACDICGRKFARSDERKRHTKIHLRQKDKKADKSVVASSATSSLSSYPSPVATSYPSPVTTSYPSPATTSYPSPVPTSFSSPGSSTYPSPVHSGFPSPSVATTYSSVPPAFPAQVSSFPSSAVTNSFSASTGLSDMTATFSPRTIEIC

SEQ ID NO: 23181 - protein, 7 aa, Homo sapiens
VFPAPRM

SEQ ID NO: 23182 - protein, 542 aa, Homo sapiens
LERGSRCPTSEPPPPRSRRRGGAAAAAQDWALREEEARRWRTTPVLPTGTWRSGRSRSSLRAWRRPAGERRVRHPPCPLGSRTPQDGRPRAAWPDEENQALANSRLLDLWVVAPDPGARVGAVGPRRGPFPAWGNGTSMISLIIPPKDQISRVAKMLADEFGTASNIKSRVNRLSVLGAITSVQQRLKLYNKVPPNGLVVYCGTIVTEEGKEKKVNIDFEPFKPINTSLYLCDNKFHTEALTALLSDDSKFGFIVIDGSGALFGTLQGNTREVLHKFTVDLPKKHGRGGQSALRFARLRMEKRHNYVRKVAETAVQLFISGDKVNVAGLVLAGSADFKTELSQSDMFDQRLQSKVLKLVDISYGGENGFNQAIELSTEVLSNVKFIQEKKLIGRYFDEISQDTGKYCFGVEDTLKALEMGAVEILIVYENLDIMRYVLHCQGTEEEKILYLTPEQEKDKSHFTDKETGQEHELIESMPLLEWFANNYKKFGATLEIVTDKSQEGSQFVKGFGGIGGILRYRVDFQGMEYQGGDDEFFDLDDY

SEQ ID NO: 23183 - protein, 30 aa, Homo sapiens
MADDPSAADRNVEIWKIKKLIKSLEAARGR

SEQ ID NO: 23184 - protein, 721 aa, Homo sapiens
VTNPRPSPHVVGGFQKRCRHRIAQLFAVGALVCCLVLLHLSAMISASRAAAARLVGAAASRGPTAARHQDSWNGLSHEAFRLVSRRDYASEAIKGAVVGIDLGTTNSCVAVMEGKQAKVLENAEGARTTPSVVAFTADGERLVGMPAKRQAVTNPNNTFYATKRLIGRRYDDPEVQKDIKNVPFKIVRASNGDAWVEAHGKLYSPSQIGAFVLMKMKETAENYLGHTAKNAVITVPAYFNDSQRQATKDAGQISGLNVLRVINEPTAAALAYGLDKSEDKVIAVYDLGGGTFDISILEIQKGVFEVKSTNGDTFLGGEDFDQALLRHIVKEFKRETGVDLTKDNMALQRVREAAEKAKCELSSSVQTDINLPYLTMDSSGPKHLNMKLTRAQFEGIVTDLIRRTIAPCQKAMQDAEVSKSDIGEVILVGGMTRMPKVQQTVQDLFGRAPSKAVNPDEAVAIGAAIQGGVLAGDVTDVLLLDVTPLSLGIETLGGVFTKLINRNTTIPTKKSQVFSTAADGQTQVEIKVCQGEREMAGDNKLLGQFTLIGIPPAPRGVPQIEVTFDIDANGIVHVSAKDKGTGREQQIVIQSSGGLSKDDIENMVKNAEKYAEEDRRKKERVEAVNMAEGIIHDTETKMEEFKDQLPADECNKLKEEISKMRELLARKDSETGENIRQAASSLQQASLKLFEMAYKKMASEREGSGSSGTGEQKEDQKEEKQ

SEQ ID NO: 23185 - protein, 23 aa, Homo sapiens
LFVTQMNLLNTTLILDSTGKWAD

SEQ ID NO: 23186 - protein, 46 aa, Homo sapiens
MLGAQWRRNQPSRAAESCLLVLSLKKILQSLLILFLGVTIFEAKLT

SEQ ID NO: 23187 - protein, 572 aa, Homo sapiens
MDLFIMIYILCLHFTRGDPFMLQQSTNPAPGILGPPPPSFHLGGPAVGPRGNLGAGNGNLQGPRHMQKGRVETSRVVHIMDFQRGKNLRYQLLQLVEPFGVISNHLILNKINEAFIEMATTEDAQAAVDYYTTTPALVFGKPVRVHLSQKYKRIKKPEGKPDQKFDQKQELGRVIHLSNLPHSGYSDSAVLKLAEPYGKIKNYILMRMKSQAFIEMETREDAMAMVDHCLKKALWFQGRCVKVDLSEKYKKLVLRIPNRGIDLLKKDKSRKRSYSPDGKESPSDKKSKTDGSQKTESSTEGKEQEEKSGEDGEKDTKDDQTEQEPNMLLESEDELLVDEEEAAALLESGSSVGDETDLANLGDVASDGKKEPSDKAVKKDGSASAAAKKKLKKRRFPGSMEGFVTLDEVGDEEDSELQKLRKSGMAFKSGDKNDDGLVEIKVDKIEELDQENEAALENGIKNEENTEPGAESSENADDPNKDTSENADGQSDENKDDYTIPDEYRIGPYQPNVPVGIDYVIPKTGFYCKLCSLFYTNEEVAKNTHCSSLPHYQKLKKFLNKLAEERRQKKET

SEQ ID NO: 23188 - protein, 194 aa, Homo sapiens
LAPGAMRLSLPLLLLLLGAWAIPGGLGDRAPLTATAPQLDDEEMYSAHMPAHLRCDACRAVAYQMWQNLAKAETKLHTSNSGGRRELSELVYTDVLDRSCSRNWQDYGVREVDQVKRLTGPGLSEGPEPSISVMVTGGPWPTRLSRTCLHYLGEFGEDQIYEAHQQGRGALEALLCGGPQGACSEKVSATREEL

SEQ ID NO: 23189 - protein, 81 aa, Homo sapiens
LAPGAMRLSLPLLLLLLGAWAIPGGLGDRAPLTATAPQLDDEEMYSAHMPAHLRCDACRAVAYQLRSSRSGPSETSHRPRT

SEQ ID NO: 23190 - protein, 80 aa, Homo sapiens
LAPGAMRLSLPLLLLLLGAWAIPGGLGDRAPLTATAPQLDDEEMYSAHMPAHLRCDACRAVAYQRLCSYPPHLPLTEQQS

SEQ ID NO: 23191 - protein, 67 aa, Homo sapiens
LAPGAMRLSLPLLLLLLGAWAIPGGLGDRAPLTATAPQLDDEEMYSAHMPAHLRCDACRAVAYQAHP

SEQ ID NO: 23192 - protein, 122 aa, Homo sapiens
LAPGAMRLSLPLLLLLLGAWAIPGGLGDRAPLTATAPQLDDEEMYSAHMPAHLRCDACRAVAYQVSPSPLSPCPAHTPSQARPLHPPHIPPPAFDPQSLPLGIKPQMQPFIYSMPQFTHLPA

SEQ ID NO: 23193 - protein, 244 aa, Homo sapiens
LGLPLHLRAIVGPGWRGWGRGGRWGVGRPLRQRSKGLLAPFLFPPPTPALAPSTKPPELGLTEEAVLPDPQVYPEFTYLLGGSTHRSTLLVQKLLRVGSSEEKKKELNDLARDPPAQCSAGPVGDDMFHWQATIMGPNDSPYQGGVFFLTIHFPTDYPFKPPKVAFTTRIYHPNINSNGSICLDILRSQWSPALTISKVLLSICSLLCDPNPDDPLVPEIARIYKTDREKYNRIAREWTQKYAM

SEQ ID NO: 23194 - protein, 154 aa, Homo sapiens
VISCFLLFFNLGRGEGEEGQVLQAPPPPRLGPAAAARLGLRTRALLAAGAERTAAVVPRAERSSLPRPSPSASRRRRRWRLGRLGEPSEDISTWTPDHVPALSSEAHQASLLWAAGPGPGLWTLGSWQAPSAVGSGPRPHHVEPRRWLPGCRRQ

SEQ ID NO: 23195 - protein, 334 aa, Homo sapiens
MRRDPAPGFSMLLFGVSLACYSPSLKSVQDQAYKAPVVVEGKVQGLVPAGGSSSNSTREPPASGRVALVKVLDKWPLRSGGLQREQVISVGSCVPLERNQRYIFFLEPTEQPLVFKTAFAPLDTNGKNLKKEVGKILCTDCATRPKLKKMKSQTGQVGEKQSLKCEAAAGNPQPSYRWFKDGKELNRSRDIRIKYGNGRKNSRLQFNKVKVEDAGEYVCEAENILGKDTVRGRLYVNSVSTTLSSWSGHARKCNETAKSYCVNGGVCYYIEGINQLSCKCPNGFFGQRCLEKLPLRLYMPDPKQSVLWDTPGTGVSSSQWSTSPKPRSCTRRGS

SEQ ID NO: 23196 - protein, 13 aa, Homo sapiens
LMAEKNRRGLEKV

SEQ ID NO: 23197 - protein, 58 aa, Homo sapiens
LQNCELHLFINDPSQVFCYNTTKWTKTSIYPKEIKMLRHKEELLTPDDQLLSSYGPSR

SEQ ID NO: 23198 - protein, 12 aa, Homo sapiens
MISLLTAACMFQ

SEQ ID NO: 23199 - protein, 49 aa, Homo sapiens
LRETCAQGIGWGLLPLRRHKVISDCRGERLPSSHKDSFVPSCRLGLGLP

SEQ ID NO: 23200 - protein, 72 aa, Homo sapiens
LTRVWAALLPGLFQVVEETTMAEFFGRTCSGPALCHSRQGLFTKLIFLRYHRRGGYDVENEEKVKLGMTNSH

SEQ ID NO: 23201 - protein, 608 aa, Homo sapiens
MESFSAVPPTKEKVSTQDQPMANLCTPSSTANSCSSSASNTPGAPETHPSSSPTPTSSNTQEEAQPSSVSDLSPMSMPFASNSEPAPLTLTSPRMVAADNQDTSNLPQLAVPAPRVSHRMQPRGSFYSMVPNATIHQDPQSIFVTNPVTLTPPQGPPAAVQLSSAVNIMNGSQMHINPANKSLPPTFGPATLFNHFSSLFDSSQVPANQGWGDGPLSSRVATDASFTVQSAFLGNSVLGHLENMHPDNSKAPGFRPPSQRVSTSPVGLPSIDPSGSSPSSSSAPLASFSGIPGTRVFLQGPAPVGTPSFNRQHFSPHPWTSASNSCDSPIPSVSSGSSSPLSATSAPPTLGQPKGVSASQDRKIPPPIGTERLARIRQGGSVAQAPAGTSFVAPVGHSGIWSFGVNAVSEGLSGWSQSVMGNHPMHQQLSDPSTFSQHQPMERDDSGMVAPSNIFHQPMGLPISMYGGTIIPSHPQLADVPGGPLFNGLHNPDPAWNPMIKVIQNSTECTDAQQASLLPSVPALKGEIPSPQLTRPKKRIGRPMVASPNQRHQDHLRPKVPAGVQELTHCPDTPLLPPSDSRGHNSSNSPSLQAGGAEGAGDRGRDTR

SEQ ID NO: 23202 - protein, 589 aa, Homo sapiens
LGGGVSGFAGVRGPPPDPHTETRNHSGIQTPVYTHHPWAGCAAQALPRDRPVSRPVSRPVFVRRQLAPQPAAQRGWACRRSSSRGRAGLRVRAGRGWRGAAGVMLGKDYMLAIILVNCDDDLWGDHSLEVEAGLPPGWRKIHDAAGTYYWHVPSGSTQWQRPTWELGDAEDPGTGTEGIWGLRPPKGRSFSSLESSLDRSNSLSWYGGESYIQSMEPGAKCFAVRSLGWVEVPEEDLAPGKSSIAVNNCIQQLAQTRSRSQPPDGAWGEGQNMLMILKKDAMSLVNPLDHSLIHCQPLVHIRVWGVGSSKGRDRDFAFVASDKDSCMLKCHVFCCDVPAKAIASALHGLCAQILSERVEVSGDASCCSPDPISPEDLPRQVELLDAVSQAAQKYEALYMGTLPVTKAMGMDVLNEAIGTLTARGDRNAWVPTMLSVSDSLMTAHPIQAEASTEEEPLWQCPVRLVTFIGVGRDPHTFGLIADLGRQSFQCAAFWCQPHAGGLSEAVQAACMVQYQKCLVASAARGKAWGAQARARLRLKRTSSMDSPGGPLPLPLLKGGVGGAGATPRKRGVFSFLDAFRLKPSLLHMP

SEQ ID NO: 23203 - protein, 442 aa, Homo sapiens
LGGGVSGFAGVRGPPPDPHTETRNHSGIQTPVYTHHPWAGCAAQALPRDRPVSRPVSRPVFVRRQLAPQPAAQRGWACRRSSSRGRAGLRVRAGRGWRGAAGVMLGKDYMLAIILVNCDDDLWGDHSLEVEAGLPPGWRKIHDAAGTYYWHVPSGSTQWQRPTWELGDAEDPGTGTEGIWGLRPPKGRSFSSLESSLDRSNSLSWYGGESYIQSMEPGAKCFAVRSLGWVEVPEEDLAPGKSSIAVNNCIQQLAQTRSRSQPPDGAWGEGQNMLMILKKDAMSLVNPLDHSLIHCQPLVHIRVWGVGSSKGRDRDFAFVASDKDSCMLKCHVFCCDVPAKAIASALHGLCAQILSERVEVSGDASCCSPDPISPEDLPRQVELLDAVSQAAQKYEALYMGTLPVTKAMGRGQYRGGAIVAVPCAPCDIYWCWPRPTHLWPHR

SEQ ID NO: 23204 - protein, 13 aa, Homo sapiens
MVCTEGPGGKTRS

SEQ ID NO: 23205 - protein, 410 aa, Homo sapiens
VPGYSSRSVGGSEADYPAAARLAVLLSMDRTCEERPAEDGSDEEDPDSMEAPTRIRDTPEDIVLEAPASGLAFHPARDLLAAGDVDGDVFVFSYSCQEGETKELWSSGHHLKACRAVAFSEDGQKLITVSKDKAIHVLDVEQGQLERRVSKAHGAPINSLLLVDENVLATGDDTGGICLWDQRKEGPLMDMRQHEEYIADMALDPAKKLLLTASGDGCLGIFNIKRRRFELLSEPQSGDLTSVTLMKWGKKVACGSSEGTIYLFNWNGFGATSDRFALRAESIDCMVPVTESLLCTGSTDGVIRAVNILPNRVVGSVGQHTGEPVEELALSHCGRFLASSGHDQRLKFWDMAQLRAVVVDDYRRRKKKGGPLRALSSKTWSTDDFFAGLREEGEDSMAQEEKEETGDDSD

SEQ ID NO: 23206 - protein, 64 aa, Homo sapiens
VGLALFEVKTNCICTSIALHFSVSAEDLKSGQNRAFDFYYGYFIDYYWQKRPGTTPFSYKAQEA

SEQ ID NO: 23207 - protein, 552 aa, Homo sapiens
VRCANARVFPGARVPPLQCPPPFLVSDPPPSQAFCSCPGKPASCRAMPLLGLLPRRAWASLLSQLLRPPCASCTGAVRCQSQVAEAVLTSQLKAHQEKPNFIIKTPKGTRDLSPQHMVVREKILDLVISCFKRHGAKGMDTPAFELKETLTEKYGEDSGLMYDLKDQGGELLSLRYDLTVPFARYLAMNKVKKMKRYHVGKVWRRESPTIVQGRYREFCQCDFDIAGQFDPMIPDAECLKIMCEILSGLQLGDFLIKVNDRRIVDGMFAVCGVPESKFRAICSSIDKLDKMAWKDVRHEMVVKKGLAPEVADRIGDYVQCHGGVSLVEQMFQDPRLSQNKQALEGLGDLKLLFEYLTLFGIADKISFDLSLARGLDYYTGVIYEAVLLQTPTQAGEEPLNVGSVAAGGRYDGLVGMFDPKGHKVPCVGLSIGVERIFYIVEQRMKTKGEKVRTTETQVFVATPQKNFLQERLKLIAELWDSGIKAEMLYKNNPKLLTQLHYCESTGIPLVVIIGEQELKEGVIKIRSVASREEVAIKRENFVAEIQKRLSES

SEQ ID NO: 23208 - protein, 826 aa, Homo sapiens
LVMASSIRRGRGAWTRLLSLLLLAAWEVGSGQLRYSVPEEAKHGTFVGRIAQDLGLELEELVPRLFRVASKRHGDLLEVNLQNGILFVNSRIDREELCGRSAECSIHVEVIVDRPLQVFHVEVEVKDINDNPPIFPMTVKTIRFPESRLLDSRFPLEGASDADIGVNALLSYKLSSSEFFFLDIQANDELSESLSLVLGKSLDREETAEVNLLLVATDGGKPELTGTVQILIKVLDVNDNEPTFAQSVYKVKLLENTANGTLVVKLNASDADEGPNSEIVYSLGSDVSSTIQTKFTIDPISGEIRTKGKLDYEEAKSYEIQVTATDKGTPSMSGHCKISLKLVDINDNTPEVSITSLSLPISENASLGTVIALITVSDRDSGTNGHVTCSLTPHVPFKLVSTFKNYYSLVLDSALDRESVSAYELVVTARDGGSPSLWATTSVSIEVADVNDNAPAFAQPEYTVFVKENNPPGCHIFTVSAWDADAQENALVSYSLVERRVGERALSSYVSVHAESGKVYALQPLDHEEVELLQFQVSARDAGVPPLGSNVTLQVFVLDENDNAPALLAPRAGTAAGAVSELVPWSVGAGHVVAKVRAVDADSGYNAWLSYELQLGTGSARIPFRVGLYTGEISTTRALDEADSPRHRLLVLVKDHGEPALTATATVLVSLVESGQAPKASSRAWVGAAGSEATLVDVNVYLIIAICAVSSLLVLTVLLYTALRCSVPPTEGARAPGKPTLVCSSAVGSWSYSQQRRQRVCSGEDPPKTDLMAFSPSLSQGPDSAEEKQLSESEYVGKVSLLLFLANSKIVLFKKFYMISTSYLDS

SEQ ID NO: 23209 - protein, 810 aa, Homo sapiens
LVMASSIRRGRGAWTRLLSLLLLAAWEVGSGQLRYSVPEEAKHGTFVGRIAQDLGLELEELVPRLFRVASKRHGDLLEVNLQNGILFVNSRIDREELCGRSAECSIHVEVIVDRPLQVFHVEVEVKDINDNPPIFPMTVKTIRFPESRLLDSRFPLEGASDADIGVNALLSYKLSSSEFFFLDIQANDELSESLSLVLGKSLDREETAEVNLLLVATDGGKPELTGTVQILIKVLDVNDNEPTFAQSVYKVKLLENTANGTLVVKLNASDADEGPNSEIVYSLGSDVSSTIQTKFTIDPISGEIRTKGKLDYEEAKSYEIQVTATDKGTPSMSGHCKISLKLVDINDNTPEVSITSLSLPISENASLGTVIALITVSDRDSGTNGHVTCSLTPHVPFKLVSTFKNYYSLVLDSALDRESVSAYELVVTARDGGSPSLWATTSVSIEVADVNDNAPAFAQPEYTVFVKENNPPGCHIFTVSAWDADAQENALVSYSLVERRVGERALSSYVSVHAESGKVYALQPLDHEEVELLQFQVSARDAGVPPLGSNVTLQVFVLDENDNAPALLAPRAGTAAGAVSELVPWSVGAGHVVAKVRAVDADSGYNAWLSYELQLGTGSARIPFRVGLYTGEISTTRALDEADSPRHRLLVLVKDHGEPALTATATVLVSLVESGQAPKASSRAWVGAAGSEATLVDVNVYLIIAICAVSSLLVLTVLLYTALRCSVPPTEGARAPGKPTLVCSSAVGSWSYSQQRRQRVCSGEDPPKTDLMAFSPSLSQGPDSAEEKQLSESEYVGKIWNFNLQIQLAS

SEQ ID NO: 23210 - protein, 807 aa, Homo sapiens
LNSARTMEASGKLICRQRQVLFSFLLLGLSLAGAAEPRSYSVVEETEGSSFVTNLAKDLGLEQREFSRRGVRVVSRGNKLHLQLNQETADLLLNEKLDREDLCGHTEPCVLRFQVLLESPFEFFQAELQVIDINDHSPVFLDKQMLVKVSESSPPGTAFPLKNAEDLDIGQNNIENYIISPNSYFRVLTRKRSDGRKYPELVLDKALDREEEAELRLTLTALDGGSPPRSGTAQVYIEVVDVNDNAPEFEQPFYRVQISEDSPISFLVVKVSATDVDTGVNGEISYSLFQASDEISKTFKVDFLTGEIRLKKQLDFEKFQSYEVNIEARDAGGFSGKCTVLIQVIDVNDHAPEVTMSAFTSPIPENAPETVVALFSVSDLDSGENGKISCSIQEDLPFLLKSSVGNFYTLLTETPLDRESRAEYNVTITVTDLGTPRLTTHLNMTVLVSDVNDNAPAFTQTSYTLFVRENNSPALHIGSVSATDRDSGTNAQVTYSLLPPQDPHLPLASLVSINTDNGHLFALRSLDYEALQAFEFRVGASDRGSPALSSEALVRVLVLDANDNSPFVLYPLQNGSAPCTELVPRAAEPGYLVTKVVAVDGDSGQNAWLSYQLLKATEPGLFGVWAHNGEVRTARLLSERDAAKQRLVVLVKDNGEPPCSATATLHVLLVDGFSQPYLPLPEAAPAQGQADSLTVYLVVALASVSSLFLFSVLLFVAVLLCRRSRAASVGRCSVPEGPFPGHLVDVRGTGSLSQNYQYEVCLAGGSGTNEFQLLKPVLPNIQGHSFGPEMEQNSNFRNGFGFSLQLK

SEQ ID NO: 23211 - protein, 530 aa, Homo sapiens
MEIGWMHNRRQRQVLVFFVLLSLSGAGAELGSYSVVEETERGSFVANLGKDLGLGLTEMSTRKARIISQGNKQHLQLKAQTGDLLINEKLDREELCGPTEPCILHFQVLMENPLEIFQAELRVIDINDHSPMFTEKEMILKIPENSPLGTEFPLNHALDLDVGSNNVQNYKISPSSHFRVLIHEFRDGRKYPELVLDKELDREEEPQLRLTLTALDGGSPPRSGTAQVRIEVVDINDNAPEFEQPIYKVQIPENSPLGSLVATVSARDLDGGANGKISYTLFQPSEDISKTLEVNPMTGEVRLRKQVDFEMVTSYEVRIKATDGGGLSGKCTLLLQVVDVNDNPPQVTMSALTSPIPENSPEIVVAVFSVSDPDSGNNGKTISSIQEDLPFLLKPSVKNFYTLVTERALDREARAEYNITLTVTDMGTPRLKTEHNITVQISDVNDNAPTFTQTSYTLFVRENNSPALHIGSVSATDRDSAPTPRSPTRCCRPKTRTCPSPPWSPSTRTTATCSPSGRWTTRPCRLSSSA

SEQ ID NO: 23212 - protein, 804 aa, Homo sapiens
LNPARTMEASGKLICRQRQVLFSFLLLGLSLAGAAEPRSYSVVEETEGSSFVTNLAKDLGLEQREFSRRGVRVVSRGNKLHLQLNQETADLLLNEKLDREDLCGHTEPCVLRFQVLLESPFEFFQAELQVIDINDHSPVFLDKQMLVKVSESSPPGTTFPLKNAEDLDVGQNNIENYIISPNSYFRVLTRKRSDGRKYPELVLDKALDREEEAELRLTLTALDGGSPPRSGTAQVYIEVLDVNDNAPEFEQPFYRVQISEDSPVGFLVVKVSATDVDTGVNGEISYSLFQASEEIGKTFKINPLTGEIELKKQLDFEKLQSYEVNIEARDAGTFSGKCTVLIQVIDVNDHAPEVTMSAFTSPIPENAPETVVALFSVSDLDSGENGKISCSIQEDLPFLLKSAENFYTLLTERPLDRESRAEYNITITVTDLGTPMLITQLNMTVLIADVNDNAPAFTQTSYTLFVRENNSPALHIRSVSATDRDSGTNAQVTYSLLPPQDPHLPLTSLVSINADNGHLFALRSLDYEALQGFQFRVGASDHGSPALSSEALVRVVVLDANDNSPFVLYPLQNGSAPCTELVPRAAEPGYLVTKVVAVDGDSGQNAWLSYQLLKATELGLFGVWAHNGEVRTARLLSERDAAKHRLVVLVKDNGEPPRSATATLHVLLVDGFSQPYLPLPEAAPTQAQADLLTVYLVVALASVSSLFLFSVLLFVAVRLCRRSRAASVGRCLVPEGPLPGHLVDMSGTRTLSQSYQYEVCLAGGSGTNEFKFLKPIIPNFPPQCPGKEIQGNSTFPNNFGFNIQ

SEQ ID NO: 23213 - protein, 834 aa, Homo sapiens
LLEDTLSRGFLLKTRASASKITAELQFFHKRLPKGTMEIRGALDLRKRQVLIFLVLLGLSRAGTESAHYSVAEETEIGSFVANLARDLGLGVEELSSREARVVSDDNKKYLHLDLLTGNLLLNEKLDRDELCGSTEPCVLHFQVVLENPLQFFRFELCVKDINDHSPTFLDKEILIKISEGTTVGATFLMESAQDLDVGSNSLQNYTISPNSHFYIKIPDSSDRKIYPELVLDRALDYEQEAELRLTLTAVDGGSPPKSGTTLVLIKVLDINDNAPEFPQSLYEVQVPEDRPLGSWIATISAKDLDAGNYGKISYTFFHASEDIRKTFEINPISGEVNLRSPLDFEVIQSYTINIQATDGGGLSGKCTLLVKVMDINDNPPEVTISSITKRIPENASETLVALFSILDQDSGDNGRMICSIQDNLPFFLKPTFKNFFTLVSEKALDRESQAEYNITITVTDLGTPRLKTEYNITVLLSDVNDNAPTFTQTSYTLFVRENNSPALHIGSVSATDRDSGTNAQVNYSLLPPQDRHLPLASLVSINADNGHLFALRSLDYEALQEFEFRVGATDRGSPALSSEALVRVLVLDANDNSPFVLYPLQNGSAPCTELVPRAAEPGYLVTKVVAVDGDSGQNAWLSYQLLKATEPGLFGVWAHNGEVRTARLLSERDAAKHRLVVLVKDNGEPPRSATATLHVLLVDGFSQPYLPLPEAAPAQAQADSLTVYLVVALASVSSLFLFSVLLFVAVRLCRRSRAASVGRCSVPEGPFPGHLVDVSGTGTLSQSYQYEVCLTGGSGTNEFKFLKPIIPNFQVHDTGRNMGEIENFRNSFGLNIQ

SEQ ID NO: 23214 - protein, 20 aa, Homo sapiens
LELELKPVRRSKNLQYRGYL

SEQ ID NO: 23215 - protein, 15 aa, Homo sapiens
LPWTEGTHQEVPPLT

SEQ ID NO: 23216 - protein, 17 aa, Homo sapiens
LCFSFVVSLALRIAWGL

SEQ ID NO: 23217 - protein, 1290 aa, Homo sapiens
LPGGSGVGAGSPASVNRDMEPPGGSLGPGRGTRDKKKGRSPDELPSAGGDGGKSKKFTLKRLMADELERFTSMRIKKEKEKPNSAHRNSSASYGDDPTAQSLQDVSDEQVLVLFEQMLLDMNLNEEKQQPLREKDIIIKREMVSQYLYTSKAGMSQKESSKSAMMYIQELRSGLRDMPLLSCLESLRVSLNNNPVSWVQTFGAEGLASLLDILKRLHDEKEETAGSYDSRNKHEIIRCLKAFMNNKFGIKTMLETEEGILLLVRAMDPAVPNMMIDAAKLLSALCILPQPEDMNERVLEAMTERAEMDEVERFQPLLDGLKSGTTIALKVGCLQLINALITPAEELDFRVHIRSELMRLGLHQVLQDLREIENEDMRVQLNVFDEQGEEDSYDLKGRLDDIRMEMDDFNEVFQILLNTVKDSKAEPHFLSILQHLLLVRNDYEARPQYYKLIEECISQIVLHKNGADPDFKCRHLQIEIEGLIDQMIDKTKVEKSEAKAAELEKKLDSELTARHELQVEMKKMESDFEQKLQDLQGEKDALHSEKQQIATEKQDLEAEVSQLTGEVAKLTKELEDAKKEMASLSAAAITVPPSVPSRAPVPPAPPLPGDSGTIIPPPPAPGDSTTPPPPPPPPPPPPPLPGGVCISSPPSLPGGTAISPPPPLSGDATIPPPPPLPEGVGIPSPSSLPGGTAIPPPPPLPGSARIPPPPPPLPGSAGIPPPPPPLPGEAGMPPPPPPLPGGPGIPPPPPFPGGPGIPPPPPGMGMPPPPPFGFGVPAAPVLPFGLTPKKLYKPEVQLRRPNWSKLVAEDLSQDCFWTKVKEDRFENNELFAKLTLTFSAQTKTSKAKKDQEGGEEKKSVQKKKVKELKVLDSKTAQNLSIFLGSFRMPYQEIKNVILEVNEAVLTESMIQNLIKQMPEPEQLKMLSELKDEYDDLAESEQFGVVMGTVPRLRPRLNAILFKLQFSEQVENIKPEIVSVTAACEELRKSESFSNLLEITLLVGNYMNAGSRNAGAFGFNISFLCKLRDTKSTDQKMTLLHFLAELCENDYPDVLKFPDELAHVEKASRVSAENLQKNLDQMKKQISDVERDVQNFPAATDEKDKFVEKMTSFVKDAQEQYNKLRMMHSNMETLYKELGEYFLFDPKKLSVEEFFMDLHNFRNMFLQAVKENQKRRETEEKMRRAKLAKEKAEKERLEKQQKREQLIDMNAEGDETGVMDSLLEALQSGAAFRRKRGPRQANRKAGCAVTSLLASELTKDDAMAAVPAKVSKNSETFPTILEEAKELVGRAS

SEQ ID NO: 23218 - protein, 1290 aa, Homo sapiens
LPGGSGVGAGSPASVNRDMEPPGGSLGPGRGTRDKKKGRSPDELPSAGGDGGKSKKFTLKRLMADELERFTSMRIKKEKEKPNSAHRNSSASYGDDPTAQSLQDVSDEQVLVLFEQMLLDMNLNEEKQQPLREKDIIIKREMVSQYLYTSKAGMSQKESSKSAMMYIQELRSGLRDMPLLSCLESLRVSLNNNPVSWVQTFGAEGLASLLDILKRLHDEKEETAGSYDSRNKHEIIRCLKAFMNNKFGIKTMLETEEGILLLVRAMDPAVPNMMIDAAKLLSALCILPQPEDMNERVLEAMTERAEMDEVERFQPLLDGLKSGTTIALKVGCLQLINALITPAEELDFRVHIRSELMRLGLHQVLQDLREIENEDMRVQLNVFDEQGEEDSYDLKGRLDDIRMEMDDFNEVFQILLNTVKDSKAEPHFLSILQHLLLVRNDYEARPQYYKLIEECISQIVLHKNGADPDFKCRHLQIEIEGLIDQMIDKTKVEKSEAKAAELEKKLDSELTARHELQVEMKKMESDFEQKLQDLQGEKDALHSEKQQIATEKQDLEAEVSQLTGEVAKLTKELEDAKKEMASLSAAAITVPPSVPSRAPVPPAPPLPGDSGTIIPPPPAPGDSTTPPPPPPPPPPPPPLPGGVCISSPPSLPGGTAISPPPPLSGDATIPPPPPLPEGVGIPSPSSLPGGTAIPPPPPLPGSARIPPPPPPLPGSAGIPPPPPPLPGEAGMPPPPPPLPGGPGIPPPPPFPGGPGIPPPPPGMGMPPPPPFGFGVPAAPVLPFGLTPKKLYKPEVQLRRPNWSKLVAEDLSQDCFWTKVKEDRFENNELFAKLTLTFSAQTKNSQAKKDQEGGEEKKSVQKKKVKELKVLDSKTAQNLSIFLGSFRMPYQEIKNVILEVNEAVLTESMIQNLIKQMPEPEQLKMLSELKDEYDDLAESEQFGVVMGTVPRLRPRLNAILFKLQFSEQVENIKPEIVSVTAACEELRKSESFSNLLEITLLVGNYMNAGSRNAGAFGFNISFLCKLRDTKSTDQKMTLLHFLAELCENDYPDVLKFPDELAHVEKASRVSAENLQKNLDQMKKQISDVERDVQNFPAATDEKDKFVEKMTIFVKDAQEQYNKLRMMHSNMETLYKELGEYFLFDPKKLSVEEFFMDLHNFRNMFLQAVKENQKRRETEEKMRRAKLAKEKAEKERLEKQQKREQLIDMNAEGDETGVMDSLLEALQSGAAFRRKRGPRQANRKAGCAVTSLLASELTKDDAMAAVPAKVSKNSETFPTILEEAKELVGRAS

SEQ ID NO: 23219 - protein, 1281 aa, Homo sapiens
LPGGSGVGAGSPASVNRDMEPPGGSLGPGRGTRDKKKGRSPDELPSAGGDGGKSKKFLERFTSMRIKKEKEKPNSAHRNSSASYGDDPTAQSLQDVSDEQVLVLFEQMLLDMNLNEEKQQPLREKDIIIKREMVSQYLYTSKAGMSQKESSKSAMMYIQELRSGLRDMPLLSCLESLRVSLNNNPVSWVQTFGAEGLASLLDILKRLHDEKEETAGSYDSRNKHEIIRCLKAFMNNKFGIKTMLETEEGILLLVRAMDPAVPNMMIDAAKLLSALCILPQPEDMNERVLEAMTERAEMDEVERFQPLLDGLKSGTTIALKVGCLQLINALITPAEELDFRVHIRSELMRLGLHQVLQDLREIENEDMRVQLNVFDEQGEEDSYDLKGRLDDIRMEMDDFNEVFQILLNTVKDSKAEPHFLSILQHLLLVRNDYEARPQYYKLIEECISQIVLHKNGADPDFKCRHLQIEIEGLIDQMIDKTKVEKSEAKAAELEKKLDSELTARHELQVEMKKMESDFEQKLQDLQGEKDALHSEKQQIATEKQDLEAEVSQLTGEVAKLTKELEDAKKEMASLSAAAITVPPSVPSRAPVPPAPPLPGDSGTIIPPPPAPGDSTTPPPPPPPPPPPPPLPGGVCISSPPSLPGGTAISPPPPLSGDATIPPPPPLPEGVGIPSPSSLPGGTAIPPPPPLPGSARIPPPPPPLPGSAGIPPPPPPLPGEAGMPPPPPPLPGGPGIPPPPPFPGGPGIPPPPPGMGMPPPPPFGFGVPAAPVLPFGLTPKKLYKPEVQLRRPNWSKLVAEDLSQDCFWTKVKEDRFENNELFAKLTLTFSAQTKTLLAKKDQEGGEEKKSVQKKKVKELKVLDSKTAQNLSIFLGSFRMPYQEIKNVILEVNEAVLTESMIQNLIKQMPEPEQLKMLSELKDEYDDLAESEQFGVVMGTVPRLRPRLNAILFKLQFSEQVENIKPEIVSVTAACEELRKSESFSNLLEITLLVGNYMNAGSRNAGAFGFNISFLCKLRDTKSTDQKMTLLHFLAELCENDYPDVLKFPDELAHVEKASRVSAENLQKNLDQMKKQISDVERDVQNFPAATDEKDKFVEKMTSFVKDAQEQYNKLRMMHSNMETLYKELGEYFLFDPKKLSVEEFFMDLHNFRNMFLQAVKENQKRRETEEKMRRAKLAKEKAEKERLEKQQKREQLIDMNAEGDETGVMDSLLEALQSGAAFRRKRGPRQANRKAGCAVTSLLASELTKDDAMAAVPAKVSKNSETFPTILEEAKELVGRAS

SEQ ID NO: 23220 - protein, 1290 aa, Homo sapiens
LPGGSGVGAGSPASVNRDMEPPGGSLGPGRGTRDKKKGRSPDELPSAGGDGGKSKKFTLKRLMADELERFTSMRIKKEKEKPNSAHRNSSASYGDDPTAQSLQDVSDEQVLVLFEQMLLDMNLNEEKQQPLREKDIIIKREMVSQYLYTSKAGMSQKESSKSAMMYIQELRSGLRDMPLLSCLESLRVSLNNNPVSWVQTFGAEGLASLLDILKRLHDEKEETAGSYDSRNKHEIIRCLKAFMNNKFGIKTMLETEEGILLLVRAMDPAVPNMMIDAAKLLSALCILPQPEDMNERVLEAMTERAEMDEVERFQPLLDGLKSGTTIALKVGCLQLINALITPAEELDFRVHIRSELMRLGLHQVLQDLREIENEDMRVQLNVFDEQGEEDSYDLKGRLDDIRMEMDDFNEVFQILLNTVKDSKAEPHFLSILQHLLLVRNDYEARPQYYKLIEECISQIVLHKNGADPDFKCRHLQIEIEGLIDQMIDKTKVEKSEAKAAELEKKLDSELTARHELQVEMKKMESDFEQKLQDLQGEKDALHSEKQQIATEKQDLEAEVSQLTGEVAKLTKELEDAKKEMASLSAAAITVPPSVPSRAPVPPAPPLPGDSGTIIPPPPAPGDSTTPPPPPPPPPPPPPLPGGVCISSPPSLPGGTAISPPPPLSGDATIPPPPPLPEGVGIPSPSSLPGGTAIPPPPPLPGSARIPPPPPPLPGSAGIPPPPPPLPGEAGMPPPPPPLPGGPGIPPPPPFPGGPGIPPPPPGMGMPPPPPFGFGVPAAPVLPFGLTPKKLYKPEVQLRRPNWSKLVAEDLSQDCFWTKVKEDRFENNELFAKLTLTFSAQTKTLLAKKDQEGGEEKKSVQKKKVKELKVLDSKTAQNLSIFLGSFRMPYQEIKNVILEVNEAVLTESMIQNLIKQMPEPEQLKMLSELKDEYDDLAESEQFGVVMGTVPRLRPRLNAILFKLQFSEQVENIKPEIVSVTAACEELRKSESFSNLLEITLLVGNYMNAGSRNAGAFGFNISFLCKLRDTKSTDQKMTLLHFLAELCENDYPDVLKFPDELAHVEKASRVSAENLQKNLDQMKKQISDVERDVQNFPAATDEKDKFVEKMTSFVKDAQEQYNKLRMMHSNMETLYKELGEYFLFDPKKLSVEEFFMDLHNFRNMFLQAVKENQKRRETEEKMRRAKLAKEKAEKERLEKQQKREQLIDMNAEGDETGVMDSLLEALQSGAAFRRKRGPRQANRKAGCAVTSLLASELTKDDAMAAVPAKVSKNSETFPTILEEAKELVGRAS

SEQ ID NO: 23221 - protein, 219 aa, Homo sapiens
LPGGSGVGAGSPASVNRDMEPPGGSLGPGRGTRDKKKGRSPDELPSAGGDGGKSKKFTLKRLMADELERFTSMRIKKEKEKPNSAHRNSSASYGDDPTAQSLQDVSDEQVLVLFEQMLLDMNLNEEKQQPLREKDIIIKREMVSQYLYTSKAGMSQKESSKSAMMYIQELRSGLRDMPLLSCLESLRVSLNNNPVSWVQTFGAEGLASLLDILKRLHDD

SEQ ID NO: 23222 - protein, 36 aa, Homo sapiens
LVPFNRECVEYVKSFNIPLLVLGGGGYTVRNVARCW

SEQ ID NO: 23223 - protein, 50 aa, Homo sapiens
LKTDLWFLFPDKALDFPGFLDMMAPRLRPMRPPPPPPAKAPDPGHPDPLT

SEQ ID NO: 23224 - protein, 1193 aa, Homo sapiens
LNLAHLAVSMMQLLQLLLGLLGPGGYLFLLGDCQEVTTLTVKYQVSEEVPSGTVIGKLSQELGREERRRQAGAAFQVLQLPQALPIQVDSEEGLLSTGRRLDREQLCRQWDPCLVSFDVLATGDLALIHVEIQVLDINDHQPRFPKGEQELEISESASLRTRIPLDRALDPDTGPNTLHTYTLSPSEHFALDVIVGPDETKHAELIVVKELDREIHSFFDLVLTAYDNGNPPKSGTSLVKVNVLDSNDNSPAFAESSLALEIQEDAAPGTLLIKLTATDPDQGPNGEVEFFLSKHMPPEVLDTFSIDAKTGQVILRRPLDYEKNPAYEVDVQARDLGPNPIPAHCKVLIKVLDVNDNIPSIHVTWASQPSLVSEALPKDSFIALVMADDLDSGHNGLVHCWLSQELGHFRLKRTNGNTYMLLTNATLDREQWPKYTLTLLAQDQGLQPLSAKKQLSIQISDINDNAPVFEKSRYEVSTRENNLPSLHLITIKAHDADLGINGKVSYRIQDSPVAHLVAIDSNTGEVTAQRSLNYEEMAGFEFQVIAEDSGQPMLASSVSVWVSLLDANDNAPEVVQPVLSDGKASLSVLVNASTGHLLVPIETPNGLGPAGTDTPPLATHSSRPFLLTTIVARDADSGANGEPLYSIRSGNEAHLFILNPHTGQLFVNVTNASSLIGSEWELEIVVEDQGSPPLQTRALLRVMFVTSVDHLRDSARKPGALSMSMLTVICLAVLLGIFGLILALFMSICRTEKKDNRAYNCREAESTYRQQPKRPQKHIQKADIHLVPVLRGQAGEPCEVGQSHKDVDKEAMMEAGWDPCLQAPFHLTPTLYRTLRNQGNQGAPAESREVLQDTVNLLFNHPRQRNASRENLNLPEPQPATGQPRSRPLKVAGSPTGRLAGDQGSEEAPQRPPASSATLRRQRHLNGKVSPEKESGPRQILRSLVRLSVAAFAERNPVEELTVDSPPVQQISQLLSLLHQGQFQPKPNHRGNKYLAKPGGSRSAIPDTDGPSARAGGQTDPEQEEGPLDPEEDLSVKQLLEEELSSLLDPSTGLALDRLSAPDPAWMARLSLPLTTNYRDNVISPDAAATEEPRTFQTFGKAEAPELSPTGTRLASTFVSEMSSLLEMLLEQRSSMPVEAASEALRRLSVCGRTLSLDLATSAASGMKVQGDPGGKTGTEGKSRGSSSSSRCL

SEQ ID NO: 23225 - protein, 315 aa, Homo sapiens
LSQFLHRRKRLRENLGPLTEVLQVDKMKLIILEHYSQASEWAAKYIRNRIIQFNPGPEKYFTLGLPTGSTPLGCYKKLIEYYKNGDLSFKYVKTFNMDEYVGLPRDHPESYHSFMWNNFFKHIDIHPENTHILDGNAVDLQAECDAFEEKIKAAGGIELFVGGIGPDGHIAFNEPGSSLVSRTRVKTLAMDTILANARFFDGELTKVPTMALTVGVGTVMDAREVMILITGAHKAFALYKAIEEGVNHMWTVSAFQQHPRTVFVCDEDATLELKVKTVKYFKGLMLVHNKLVDPLYSIKEKETEKSQSSKKPYSD

SEQ ID NO: 23226 - protein, 51 aa, Homo sapiens
LHLHFPRLIRVATLATVVTDVWMFLNISEGVVEKNTHSANHLYELNVSEVY

SEQ ID NO: 23227 - protein, 23 aa, Homo sapiens
LPRLQDLHRRGAMLVTLQLLKGP

SEQ ID NO: 23228 - protein, 62 aa, Homo sapiens
LLRCRILCYATALQLTFSCLASVRPEAPRPPCTSLSSGTELCQAPEPPGRARAAVGVEGAFT

SEQ ID NO: 23229 - protein, 109 aa, Homo sapiens
LSLAFLWAYQFQLQLSAESVGEVYIKSTETGQYLAMDTDGLLYGSQTPNEECLFLERLEENHYNTYISKKHAEKNWFVGLKKNGSCKRGPRTHYGQKAILFLPLPVSSD

SEQ ID NO: 23230 - protein, 41 aa, Homo sapiens
LIPGPNKFFFPFFGCPREMVFAKLFLKNKLLLFPRSFWFLR

SEQ ID NO: 23231 - protein, 15 aa, Homo sapiens
LKSPKMPGGLGHREL

SEQ ID NO: 23232 - protein, 608 aa, Homo sapiens
MAERGGDGGESERFNPGELRMAQQQALRFRGPAPPPNAVMRGPPPLMRPPPPFGMMRGPPPPPRPPFGRPPFDPNMPPMPPPGGIPPPMGPPHLQRPPFMPPPMSSMPPPPGMMFPPGMPPVTAPGTPALPPTEEIWVENKTPDGKVYYYNARTRESAWTKPDGVKVIQQSELTPMLAAQAQVQAQAQAQAQAQAQAQAQAQAQAQAQAQAQAQAQAQAQAQAQAQAQAQAQAQAQAQAQAQVQAQVQAQVQAQAVGASTPTTSSPAPAVSTSTSSSTPSSTTSTTTTATSVAQTVSTPTTQDQTPSSAVSVATPTVSVSTPAPTATPVQTVPQPHPQTLPPAVPHSVPQPTTAIPAFPPVMVPPFRVPLPGMPIPLPGVLPGMAPPIVPMIHPQVAIAASPATLAGATAVSEWTEYKTADGKTYYYNNRTLESTWEKPQELKEKEKLEEKIKEPIKEPSEEPLPMETEEEDPKEEPIKEIKEEPKEEEMTEEEKAAQKAKPVATAPIPGTPWCVVWTGDERVFFYNPTTRLSMWDRPDDLIGRADVDKIIQEPPHKKGMEELKKLRHPTPTMLSIQKWQFSMSAIKEEQELMEEINEDEPVKAKKRK

SEQ ID NO: 23233 - protein, 94 aa, Homo sapiens
VRCSFQLTSGRRTSAMKVTGIFLLSALALLSLSGNTGADSLGREAKCYNELNGCTKIYDPVCGTDGNTYPNECVLCFENRKRQTSILIQKSGPC

SEQ ID NO: 23234 - protein, 80 aa, Homo sapiens
VRCSFQLTSGRRTSAMKVTGIFLLSALALLSLSGNTGADSLGREAKCYNELNGCTKIYDPVCGTDGNTYPNECVLCFENR

SEQ ID NO: 23235 - protein, 69 aa, Homo sapiens
LTVVLGLLVLFLTCYADDKPDKPDDKPDDSGKDPKPDFPKFLSLLGTEIIENAVEFILRSMSRSTMEAP

SEQ ID NO: 23236 - protein, 28 aa, Homo sapiens
LAPDTGREVMSEVRRTEDLKSSRGLRIE

SEQ ID NO: 23237 - protein, 141 aa, Homo sapiens [sequence omitted]

SEQ ID NO: 23238 - protein, 377 aa, Homo sapiens
MDRGQVLEQLLPELTGLLSLLDHEYLSDTTLEKKMAVASILQSLQPLPAKEVSYLYVNTADLHSGPSFVESLFEEFDCDLSDLRDMPEDDGEPSKGASPELAKSPRLRNAADLPPPLPNKPPPEDYYEEALPLGPGKSPEYISSHNGCSPSHSIVDGYYEDADSSYPATRVNGELKSSYNDSDAMSSSYESYDEEEEEGKSPQPRHQWPSEEASMHLVRECRICAFLLRKKRFGQWAKQLTVIREDQLLCYKSSKDRQPHLRLALDTCSIIYVPKDSRHKRHELRFTQGATEVLVLALQSREQAEEWLKVIREVSKPVGGAEGVEVPRSPVLLCKLDLDKVYLSPLSLPQARQWPLNTGSTPGELTGWGESQATAKL

SEQ ID NO: 23239 - protein, 18 aa, Homo sapiens
VGKETCEAVGRGKLFLGT

SEQ ID NO: 23240 - protein, 819 aa, Homo sapiens
LALPPASLRRCVLAAPVGPGSRAPPPSESERWAGKGTGRYSSVGAAVSTSVRPRWKTRAAAPGCLQRPGPERKLNHLSPEMSSESKEQHNVSPRDSAEGNDSYPSGIHLELQRESSTDFKQFETNDQCRPYHRILIERQEKSDTNFKEFVIKKLQKNCQCSPAKAKNMILGFLPVLQWLPKYDLKKNILGDVMSGLIVGILLVPQSIAYSLLAGQEPVYGLYTSFFASIIYFLLGTSRHISVGIFGVLCLMIGETVDRELQKAGYDNAHSAPSLGMVSNGSTLLNHTSDRICDKSCYAIMVGSTVTFIAGVYQVAMGFFQVGFVSVYLSDALLSGFVTGASFTILTSQAKYLLGLNLPRTNGVGSLITTWIHVFRNIHKTNLCDLITSLLCLLVLLPTKELNEHFKSKLKAPIPIELVVVVAATLASHFGKLHENYNSSIAGHIPTGFMPPKVPEWNLIPSVAVDAIAISIIGFAITVSLSEMFAKKHGYTVKANQEMYAIGFCNIIPSFFHCFTTSAALAKTLVKESTGCHTQLSGVVTALVLLLVLLVIAPLFYSLQKSVLGVITIVNLRGALRKFRDLPKMWSISRMDTVIWFVTMLSSALLSTEIGLLVGVCFSIFCVILRTQKPKSSLLGLVEESEVFESVSAYKNLQIKPGIKIFRFVAPLYYINKECFKSALYKQTVNPILIKVAWKKAAKRKIKEKVVTLGGIQDEMSVQLSHDPLELHTIVIDCSAIQFLDTAGIHTLKEVRRDYEAIGIQVLLAQCNPTVRDSLTNGEYCKKEEENLLFYSVYEAMAFAEVSKNQKGVCVPNGLSLSSD

SEQ ID NO: 23241 - protein, 44 aa, Homo sapiens
LSLEVIMIHSSSVILIVLNCVSLRIVTDEPYVSLYQCRHDFRYL

SEQ ID NO: 23242 - protein, 343 aa, Homo sapiens
MGPGVLLLLLVATAWHGQGIPVIEPSVPELVVKPGATVTLRCVGNGSVEWDGPPSPHWTLYSDGSSSILSTNNATFQNTGTYRCTEPGDPLGGSAAIHLYVKDPARPWNVLAQEVVVFEDQDALLPCLLTDPVLEAGVSLVRVRGRPLMRHTNYSFSPWHGFTIHRAKFIQSQDYQCSALMGGRKVMSISIRLKVQKVIPGPPALTLVPAELVRIRGEAAQIVCSASSVDVNFDVFLQHNNTKLAIPQQSDFHNNRYQKVLTLNLDQVDFQHAGNYSCVASNVQGKHSTSMFFRVVGKHQGGGGQSVGILQECEQKGFEEEADVREGDLLRISLLEFVYPRPG

SEQ ID NO: 23243 - protein, 248 aa, Homo sapiens
MEGVEEKKKEVPAVPETLKKKRRNFAELKMKRLRKKFAQKMLRKARRKLIYEKAKHYHKEYRQMYRTEIRMARMARKAGNFYVPAEPKLAFVIRIRGINGVSPKVRKVLQLLRLRQIFNGTFVKLNKASINMLRIVEPYIAWGYPNLKSVNELIYKRGYGKINKKRIALTDNALIARSLGKYGIICVEDLIHEIYTVGKRFKEANNFLWPFKLSSPRGGMKKKTTHFVEGGDAGNREDQINRLIRRMN

SEQ ID NO: 23244 - protein, 531 aa, Homo sapiens
VPCSEAPGSSVKPVLCLHSAARAGKWSLGSGAEQQRLSPGPPVPSLTCLPSARMATITCTRFTEEYQLFEELGKGAFSVVRRCVKVLAGQEYAAKIINTKKLSARDHQKLEREARICRLLKHPNIVRLHDSISEEGHHYLIFDLVTGGELFEDIVAREYYSEADASHCIQQILEAVLHCHQMGVVHRDLKPENLLLASKLKGAAVKLADFGLAIEVEGEQQAWFGFAGTPGYLSPEVLRKDPYGKPVDLWACGVILYILLVGYPPFWDEDQHRLYQQIKAGAYDFPSPEWDTVTPEAKDLINKMLTINPSKRITAAEALKHPWISHRSTVASCMHRQETVDCLKKFNARRKLKGAILTTMLATRNFSGGKSGGNKKSDGVKESSESTNTTIEDEDTKVRKQEIIKVTEQLIEAISNGDFESYTKMCDPGMTAFEPEALGNLVEGLDFHRFYFENLWSRNSKPVHTTILNPHIHLMGDESACIAYIRITQYLDAGGIPRTAQSEETRVWHRRDGKWQIVHFHRSGAPSVLPH

SEQ ID NO: 23245 - protein, 571 aa, Homo sapiens
LAMHTLTGFSLVSLLSFGYLSWDWAKPSFVADGPGEAGEQPSAAPPQPPHIIFILTDDQGYHDVGYHGSDIETPTLDRLAAKGVKLENYYIQPICTPSRSQLLTGRYQIHTGLQHSIIRPQQPNCLPLDQVTLPQKLQEAGYSTHMVGKWHLGFYRKECLPTRRGFDTFLGSLTGNVDYYTYDNCDGPGVCGFDLHEGENVAWGLSGQYSTMLYAQRASHILASHSPQRPLFLYVAFQAVHTPLQSPREYLYRYRTMGNVARRKYAAMVTCMDEAVRNITWALKRYGFYNNSVIIFSSDNGGQTFSGGSNWPLRGRKGTYWEGGVRGLGFVHSPLLKRKQRTSRALMHITDWYPTLVGLAGGTTSAADGLDGYDVWPAISEGRASPRTEILHNIDPLYNHAQHGSLEGGFGIWNTAVQAAIRVGEWKLLTGDPGYGDWIPPQTLATFPGSWWNLERMASVRQAVWLFNISADPYEREDLAGQRPDVVRTLLARLAEYNRTAIPVRYPAENPRAHPDFNGGAWGPWASDEEEEEEEGRARSFSRGRRKKKCKICKLRSFFRKLNTRLMSQRI

SEQ ID NO: 23246 - protein, 1499 aa, Homo sapiens
VQVAGRPGVAGMAEARKRRELLPLIYHHLLRAGYVRAAREVKEQSGQKCFLAQPVTLLDIYTHWQQTSELGRKRKAEEDAALQAKKTRVSDPISTSESSEEEEEAEAETAKATPRLASTNSSVLGADLPSSMKEKAKAETEKAGKTGNSMPHPATGKTVANLLSGKSPRKSAEPSANTTLVSETEEEGSVPAFGAAAKPGMVSAGQADSSSEDTSSSSDETDVEGKPSVKPAQVKASSVSTKESPARKAAPAPGKVGDVTPQVKGGALPPAKRAKKPEEESESSEEGSESEEEAPAGTRSQVKASEKILQVRAASAPAKGTPGKGATPAPPGKAGAVASQTKAGKPEEDSESSSEESSDSEEETPAAKALLQAKASGKTSQVGAASAPAKESPRKGAAPAPPGKTGPAVAKAQAGKREEDSQSSSEESDSEEEAPAQAKPSGKAPQVRAASAPAKESPRKGAAPAPPRKTGPAAAQVQVGKQEEDSRSSSEESDSDREALAAMNAAQVKPLGKSPQVKPASTMGMGPLGKGAGPVPPGKVGPATPSAQVGKWEEDSESSSEESSDSSDGEVPTAVAPAQEKSLGNILQAKPTSSPAKGPPQKAGPVAVQVKAEKPMDNSESSEESSDSADSEEAPAAMTAAQAKPALKIPQTKACPKKTNTTASAKVAPVRVGTQAPRKAGTATSPAGSSPAVAGGTQRPAEDSSSSEESDSEEEKTGLAVTVGQAKSVGKGLQVKAASVPVKGSLGQGTAPVLPGKTGPTVTQVKAEKQEDSESSEEESDSEEAAASPAQVKTSVKKTQAKANPAAARAPSAKGTISAPGKVVTAAAQAKQRSPSKVKPPVRNPQNSTVLARGPASVPSVGKAVATAAQAQTGPEEDSGSSEEESDSEEEAETLAQVKPSGKTHQIRAALAPAKESPRKGAAPTPPGKTGPSAAQAGKQDDSGSSSEESDSDGEAPAAVTSAQVIKPPLIFVDPNRSPAGPAATPAQAQAASTPRKARASESTARSSSSESEDEDVIPATQCLTPGIRTNVVTMPTAHPRIAPKASMAGASSSKESSRISDGKKQEGPATQVSKKNPASLPLTQAALKVLAQKASEAQPPVARTQPSSGVDSAVGTLPATSPQSTSVQAKGTNKLRKPKLPEVQQATKAPESSDDSEDSSDSSSGSEEDGEGPQGAKSAHTLGPTPSRTETLVEETAAESSEDDVVAPSQSLLSGYMTPGLTPANSQASKATPKLDSSPSVSSTLAAKDDPDGKQEAKPQQAAGMLSPKTGGKEAASGTTPQKSRKPKKGAGNPQASTLALQSNITQCLLGQPWPLNEAQVQASVVKVLTELLEQERKKVVDTTKESSRKGWESRKRKLSGDQPAARTPRSKKKKKLGAGEGGEASVSPEKTSTTSKGKAKRDKASGDVKEKKGKGSLGSQGAKDEPEEELQKGMGTVEGGDQSNPKSKKEKKKSDKRKKDKEKKEKKKKAKKASTKDSESPSQKKKKKKKKTAEQTV

SEQ ID NO: 23247 - protein, 1423 aa, Homo sapiens
VQVAGRPGVAGMAEARKRRELLPLIYHHLLRAGYVRAAREVKEQSGQKCFLAQPVTLLDIYTHWQQTSELGRKRKAEEDAALQAKKTRVSDPISTSESSEEEEEAEAETAKATPRLASTNSSVLGADLPSSMKEKAKAETEKAGKTGNSMPHPATGKTVANLLSGKSPRKSAEPSANTTLVSETEEEGSVPAFGAAAKPGMVSAGQADSSSEDTSSSSDETDVEVKASEKILQVRAASAPAKGTPGKGATPAPPGKAGAVASQTKAGKPEEDSESSSEESSDSEEETPAAKALLQAKASGKTSQVGAASAPAKESPRKGAAPAPPGKTGPAVAKAQAGKREEDSQSSSEESDSEEEAPAQAKPSGKAPQVRAASAPAKESPRKGAAPAPPRKTGPAAAQVQVGKQEEDSRSSSEESDSDREALAAMNAAQVKPLGKSPQVKPASTMGMGPLGKGAGPVPPGKVGPATPSAQVGKWEEDSESSSEESSDSSDGEVPTAVAPAQEKSLGNILQAKPTSSPAKGPPQKAGPVAVQVKAEKPMDNSESSEESSDSADSEEAPAAMTAAQAKPALKIPQTKACPKKTNTTASAKVAPVRVGTQAPRKAGTATSPAGSSPAVAGGTQRPAEDSSSSEESDSEEEKTGLAVTVGQAKSVGKGLQVKAASVPVKGSLGQGTAPVLPGKTGPTVTQVKAEKQEDSESSEEESDSEEAAASPAQVKTSVKKTQAKANPAAARAPSAKGTISAPGKVVTAAAQAKQRSPSKVKPPVRNPQNSTVLARGPASVPSVGKAVATAAQAQTGPEEDSGSSEEESDSEEEAETLAQVKPSGKTHQIRAALAPAKESPRKGAAPTPPGKTGPSAAQAGKQDDSGSSSEESDSDGEAPAAVTSAQVIKPPLIFVDPNRSPAGPAATPAQAQAASTPRKARASESTARSSSSESEDEDVIPATQCLTPGIRTNVVTMPTAHPRIAPKASMAGASSSKESSRISDGKKQEGPATQVSKKNPASLPLTQAALKVLAQKASEAQPPVARTQPSSGVDSAVGTLPATSPQSTSVQAKGTNKLRKPKLPEVQQATKAPESSDDSEDSSDSSSGSEEDGEGPQGAKSAHTLVGPTPSRTETLVEETAAESSEDDVVAPSQSLLSGYMTPGLTPANSQASKATPKLDSSPSVSSTLAAKDDPDGKQEAKPQQAAGMLSPKTGGKEAASGTTPQKSRKPKKGAGNPQASTLALQSNITQCLLGQPWPLNEAQVQASVVKVLTELLEQERKKVVDTTKESSRKGWESRKRKLSGDQPAARTPRSKKKKKLGAGEGGEASVSPEKTSTTSKGKAKRDKASGDVKEKKGKGSLGSQGAKDEPEEELQKGMGTVEGGDQSNPKSKKEKKKSDKRKKDKEKKEKKKKAKKASTKDSESPSQKKKKKKKKTAEQTV

SEQ ID NO: 23248 - protein, 1422 aa, Homo sapiens
VQVAGRPGVAGMAEARKRRELLPLIYHHLLRAGYVRAAREVKEQSGQKCFLAQPVTLLDIYTHWQQTSELGRKRKAEEDAALQAKKTRVSDPISTSESSEEEEEAEAETAKATPRLASTNSSVLGADLPSSMKEKAKAETEKAGKTGNSMPHPATGKTVANLLSGKSPRKSAEPSANTTLVSETEEEGSVPAFGAAAKPGMVSAGQADSSSEDTSSSSDETDVEVKASEKILQVRAASAPAKGTPGKGATPAPPGKAGAVASQTKAGKPEEDSESSSEESSDSEEETPAAKALLQAKASGKTSQVGAASAPAKESPRKGAAPAPPGKTGPAVAKAQAGKREEDSQSSSEESDSEEEAPAQAKPSGKAPQVRAASAPAKESPRKGAAPAPPRKTGPAAAQVQVGKQEEDSRSSSEESDSDREALAAMNAAQVKPLGKSPQVKPASTMGMGPLGKGAGPVPPGKVGPATPSAQVGKWEEDSESSSEESSDSSDGEVPTAVAPAQEKSLGNILQAKPTSSPAKGPPQKAGPVAVQVKAEKPMDNSESSEESSDSADSEEAPAAMTAAQAKPALKIPQTKACPKKTNTTASAKVAPVRVGTQAPRKAGTATSPAGSSPAVAGGTQRPAEDSSSSEESDSEEEKTGLAVTVGQAKSVGKGLQVKAASVPVKGSLGQGTAPVLPGKTGPTVTQVKAEKQEDSESSEEESDSEEAAASPAQVKTSVKKTQAKANPAAARAPSAKGTISAPGKVVTAAAQAKQRSPSKVKPPVRNPQNSTVLARGPASVPSVGKAVATAAQAQTGPEEDSGSSEEESDSEEEAETLAQVKPSGKTHQIRAALAPAKESPRKGAAPTPPGKTGPSAAQAGKQDDSGSSSEESDSDGEAPAAVTSAQVIKPPLIFVDPNRSPAGPAATPAQAQAASTPRKARASESTARSSSSESEDEDVIPATQCLTPGIRTNVVTMPTAHPRIAPKASMAGASSSKESSRISDGKKQEGPATQVSKKNPASLPLTQAALKVLAQKASEAQPPVARTQPSSGVDSAVGTLPATSPQSTSVQAKGTNKLRKPKLPEVQQATKAPESSDDSEDSSDSSSGSEEDGEGPQGAKSAHTLGPTPSRTETLVEETAAESSEDDVVAPSQSLLSGYMTPGLTPANSQASKATPKLDSSPSVSSTLAAKDDPDGKQEAKPQQAAGMLSPKTGGKEAASGTTPQKSRKPKKGAGNPQASTLALQSNITQCLLGQPWPLNEAQVQASVVKVLTELLEQERKKVVDTTKESSRKGWESRKRKLSGDQPAARTPRSKKKKKLGAGEGGEASVSPEKTSTTSKGKAKRDKASGDVKEKKGKGSLGSQGAKDEPEEELQKGMGTVEGGDQSNPKSKKEKKKSDKRKKDKEKKEKKKKAKKASTKDSESPSQKKKKKKKKTAEQTV

SEQ ID NO: 23249 - protein, 1462 aa, Homo sapiens
VQVAGRPGVAGMAEARKRRELLPLIYHHLLRAGYVRAAREVKEQSGQKCFLAQPVTLLDIYTHWQQTSELGRKRKAEEDAALQAKKTRVSDPISTSESSEEEEEAEAETAKATPRLASTNSSVLGADLPSSMKEKAKAETEKAGKTGNSMPHPATGKTVANLLSGKSPRKSAEPSANTTLVSETEEEGSVPAFGAAAKPGMVSAGQADSSSEDTSSSSDETDVEGKPSVKPAQVKASSVSTKESPARKAAPAPGKVGDVTPQVKGGALPPAKRAKKPEEESESSEEGSESEEEAPAGTRSQVKASEKILQVRAASAPAKGTPGKGATPAPPGKAGAVASQTKAGKPEEDSESSSEESSDSEEETPAAKALLQAKASGKTSQVGAASAPAKESPRKGAAPAPPGKTGPAVAKAQAGKREEDSQSSSEESDSEEEAPAQAKPSGKAPQVRAASAPAKESPRKGAAPAPPRKTGPAAAQVQVGKQEEDSRSSSEESDSDREALAAMNAAQVKPLGKSPQVKPASTMGMGPLGKGAGPVPPGKVGPATPSAQVGKWEEDSESSSEESSDSSDGEVPTAVAPAQEKSLGNILQAKPTSSPAKGPPQKAGPVAVQVKAEKPMDNSESSEESSDSADSEEAPAAMTAAQAKPALKIPQTKACPKKTNTTASAKVAPVRVGTQAPRKAGTATSPAGSSPAVAGGTQRPAEDSSSSEESDSEEEKTGLAVTVGQAKSVGKGLQVKAASVPVKGSLGQGTAPVLPGKTGPTVTQVKAEKQEDSESSEEESDSEEAAASPAQVKTSVKKTQAKANPAAARAPSAKGTISAPGKVVTAAAQAKQRSPSKVKPPVRNPQNSTVLARGPASVPSVGKAVATAAQAQTGPEEDSGSSEEESDSEEEAETLAQVKPSGKTHQIRAALAPAKESPRKGAAPTPPGKTGPSAAQAGKQDDSGSSSEESDSDGEAPAAVTSAQVIKPPLIFVDPNRSPAGPAATPAQAQAASTPRKARASESTARSSSSESEDEDVIPATQCLTPGIRTNVVTMPTAHPRIAPKASMAGASSSKESSRISDGKKQEGPATQVDSAVGTLPATSPQSTSVQAKGTNKLRKPKLPEVQQATKAPESSDDSEDSSDSSSGSEEDGEGPQGAKSAHTLVGPTPSRTETLVEETAAESSEDDVVAPSQSLLSGYMTPGLTPANSQASKATPKLDSSPSVSSTLAAKDDPDGKQEAKPQQAAGMLSPKTGGKEAASGTTPQKSRKPKKGAGNPQASTLALQSNITQCLLGQPWPLNEAQVQASVVKVLTELLEQERKKVVDTTKESSRKGWESRKRKLSGDQPAARTPRSKKKKKLGAGEGGEASVSPEKTSTTSKGKAKRDKASGDVKEKKGKGSLGSQGAKDEPEEELQKGMGTVEGGDQSNPKSKKEKKKSDKRKKDKEKKEKKKKAKKASTKDSESPSQKKKKKKKKTAEQTV

SEQ ID NO: 23250 - protein, 119 aa, Homo sapiens
MKVKADRDESSPYAAMLAAQDVAQRCKELGITALHIKLRATGGNRTKTPGPGAQSALRALARSGMKIGRIGKCPPLANAWVYFEALAPKSTCCAQWMCSGWSGHFWQLSLLREAARGTL

SEQ ID NO: 23251 - protein, 67 aa, Homo sapiens
LEMFCLLTLSFFSFHSEMAPRKGKEKKEEQVISLGPQVAEGENVFGVCHIFASFNDTFVHVTDLSGK

SEQ ID NO: 23252 - protein, 190 aa, Homo sapiens
LGTSFLTPTFIFLCLFPFRNHFYQFGEIRTITVVQRQQCAFIQFATRQAAEVAAEKSFNKLIVNGRRLNVKWGRSQAARGKEKEKDGTTDSGIKLEPVPGLPGALPPPPAAEEEASANYFNLPPSGPPAVVNIALPPPPGIAPPPPPGFGPHMFHPMGPPPPFMRAPGPIHYPSQDPQRMGAHAGKHSSP

SEQ ID NO: 23253 - protein, 163 aa, Homo sapiens
LERSWRTHFRPTLSVYNPERGDPQKPSDMSTATRRVCGNVEGEPETPWSLPSLAGSFLPERSPQGTLEEELSWSCRGPGTGRSGGGPQQPRIPEPAARPGRSCALPPPGARRSRGTFQELPRAEVPGLGVASSCQIPCSPGDPEKHRAIPDPGTFRRLAAIWE

SEQ ID NO: 23254 - protein, 33 aa, Homo sapiens
LGTAKGVGVMGFFLHWSLTSVSFDTQAMLENAG

SEQ ID NO: 23255 - protein, 49 aa, Homo sapiens
VCPHPAMARLLQASCLLSLLLAGFVSQSRGQEKSKAPRQMGNPQVRETS

SEQ ID NO: 23256 - protein, 78 aa, Homo sapiens
VCPHPAMARLLQASCLLSLLLAGFVSQSRGQEKSKMDCHGGISGTIYEYGALTIDGEEYIPFKQYAGKYVLFVNVASY

SEQ ID NO: 23257 - protein, 87 aa, Homo sapiens
VCPHPAMARLLQASCLLSLLLAGFVSQSRGQEKSKAPRQMGNPQMDCHGGISGTIYEYGALTIDGEEYIPFKQYAGKYVLFVNVASY

SEQ ID NO: 23258 - protein, 36 aa, Homo sapiens
VCPHPAMARLLQASCLLSLLLAGFVSQSRGQEKSKN

SEQ ID NO: 23259 - protein, 231 aa, Homo sapiens
VCPHPAMARLLQASCLLSLLLAGFVSQSRGQEKSKMDCHGGISGTIYEYGALTIDGEEYIPFKQYAGKYVLFVNVASYGLTGQYIELNALQEELAPFGLVILGFPCNQFGKQEPGENSEILPTLKYVRPGGGFVPNFQLFEKGDVNGEKEQKFYTFLKNSCPPTSELLGTSDRLFWEPMKVHDIRWNFEKFLVGPDGIPIMRWHHRTTVSNVKMDILSYMRRQAALGVKRK

SEQ ID NO: 23260 - protein, 46 aa, Homo sapiens [sequence omitted]

SEQ ID NO: 23261 - protein, 93 aa, Homo sapiens
LQPIWKTGTRRELRDPSYPQNSCPPTSELLGTSDRLFWEPMKVHDIRWNFEKFLVGPDGIPIMRWHHRTTVSNVKMDILSYMRRQAALGVKRK

SEQ ID NO: 23262 - protein, 50 aa, Homo sapiens
VVSGPLVAMTNLCVCLIFASSSVAGPAPRTPLPLCEELWEVWVCLQNRRE

SEQ ID NO: 23263 - protein, 64 aa, Homo sapiens
VQFLFTLGCWFKLLGARTVSSLGSGQRILQGFSSSVFWRTRALLRGSRDCQAVSARKAKIKSEM

SEQ ID NO: 23264 - protein, 316 aa, Homo sapiens
LPPACLPLRVPSTMRAWIFFLLCLAGRALAAPQQEALPDETEVVEETVAEVTEVSVGANPVQVEVGEFDDGAEETEEEVVAENPCQNHHCKHGKVCELDENNTPMCVCQDPTSCPAPIGEFEKVCSNDNKTFDSSCHFFATKCTLEGTKKGHKLHLDYIGPCKYIPPCLDSELTEFPLRMRDWLKNVLVTLYERDEDNNLLTEKQKLRVKKIHENEKRLEAGDHPVELLARDFEKNYNMYIFPVHWQFGQLDQHPIDGYLSHTELAPLRAPLIPMEHCTTRFFETCDLDNDKYIALDEWAGCFGIKQKDIDKDLVI

SEQ ID NO: 23265 - protein, 108 aa, Homo sapiens
LPPACLPLRVPSTMRAWIFFLLCLAGRALAAPQQEALPDETEVVEETVAEVTEVSVGANPVQVEVGEFDDGAEETEEEVVAESMSLPCNLAHPSCPWLPGPGARGQPT

SEQ ID NO: 23266 - protein, 73 aa, Homo sapiens [sequence omitted]

SEQ ID NO: 23267 - protein, 91 aa, Homo sapiens
VGLSAGTVWGSLYRARVMVPLCLFQKHEFSVDMTCGGCAEAVSRVLNKLGGVKYDIDLPNKKVCIESEHSMDTLLATLKKTGKTVSYLGLE

SEQ ID NO: 23268 - protein, 84 aa, Homo sapiens
LLTPPPHRRHTAAASVMPKHEFSVDMTCGGCAEAVSRVLNKLGGVKYDIDLPNKKVCIESEHSMDTLLATLKKTGKTVSYLGLE

SEQ ID NO: 23269 - protein, 520 aa, Homo sapiens
LTDEETERQTADVLIMSDKDDIETPLLTEAAPILEDGNCEPAKNSESVDQGAKPESKSEPVVSTRKRPETKPSSDLETSKVLPIQDNVSKDVPQTRWGYWGSWGKSILSSASATVATVGQGISNVIEKAETSLGIPGPSEISTEVKYVAGETNAKENENSSPVAGAFGVFSTISTAVQSTGKSVISGGLDALEFIGKKTMDVIAEGDPGFKRTKGLMNRNATLSQVLREAKEKEEIRTSNEVTVETDKKTHYGLLFDEFQGLSHLEALEMLSQESEIKVKSILNSLSGEELETLKVELEQLKETFSLAEFCEEEEEEKKGDEDFTKDITELFSQLHVSSKPEKLARARNTAHEWIRKSLTKPLAENEEGEKQSEAENTEQVNKNSIEDIHAFAIRSLAELTACSIELFHKTAALVLHGRKQEVTAIERSQTLSQMTIVLCKELSSLSKEFTTCLTTAGVKEMADVLNPLITAVFLEASNSASYIQDAFQLLLPVLEISLIENKIESHRHELQGQKPLLEH

SEQ ID NO: 23270 - protein, 8 aa, Homo sapiens
LLFILLMF

SEQ ID NO: 23271 - protein, 376 aa, Homo sapiens
LSSPNLNKILSHFPMKLHCCLFTLVASIIVPAAFVLEDVDFDQMVSLEANRSSYNASFPSSFELSASSHSDDDVIIAKEGTSVSIECLLTASHYEDVHWHNSKGQQLDGRSRGGKWLVSDNFLNITNVAFDDRGLYTCFVTSPIRASYSVTLRVIFTSGDMSVYYMIVCLIAFTITLILNVTRLCMMSSHLRKTEKAINEFFRTEGAEKLQKAFEIAKRIPIITSAKTLELAKVTQFKTMEFARYIEELARSVPLPPLILNCRAFVEEMFEAVRVDDPDDLGERIKERPALNAQGGIYVINPEMGRSNSPGGDSDDGSLNEQGQEIAVQVSVHLQSETKSIDTESQGSSHFSPPDDIGSAESNCNYKDGAYENCQL

SEQ ID NO: 23272 - protein, 54 aa, Homo sapiens
LSQAAPLAISIRVPLISTLDSIQMILHLQEELVLQPRAALSPKWPQMSAKDYQF

SEQ ID NO: 23273 - protein, 94 aa, Homo sapiens [sequence omitted]

SEQ ID NO: 23274 - protein, 48 aa, Homo sapiens
MEFIVLLLTYCNVFGPPFQLVPLLGPKVGSRRQYPRLTRACPLPWAPC

SEQ ID NO: 23275 - protein, 349 aa, Homo sapiens
LTCARTSAAWTQPTAEMKGEAGHMLHNEKSKQEGHIWGSMRRTAFILGSGLLSFVAFWNSVTWHLQRFWGASGYFWQAQWERLLTTFEGKEWILFFIGAIQVPCLFFWSFNGLLLVVDTTGKPNFISRYRIQVGKNEPVDPVKLRQSIRTVLFNQCMISFPMVVFLYPFLKWWRDPCRRELPTFHWFLLELAIFTLIEEVLFYYSHRLLHHPTFYKKIHKKHHEWTAPIGVISLYAHPIEHAVSNMLPVIVGPLVMGSHLSSITMWFSLALIITTISHCGYHLPFLPSPEFHDYHHLKFNQCYGVLGVLDHLHGTDTMFKQTKAYERHVLLLGFTPLSESIPDSPKRME

SEQ ID NO: 23276 - protein, 15 aa, Homo sapiens
LANFTKIKAIPQLQG

SEQ ID NO: 23277 - protein, 23 aa, Homo sapiens
LIPKSKVKKEEKKMYKSSSSSSS

SEQ ID NO: 23278 - protein, 64 aa, Homo sapiens
LLSHLLRSRWWGTAAWVLAWPVMLLASRPQTHSKHSCSISHAEELGWSLLGVRPRDWLVCSTKV

SEQ ID NO: 23279 - protein, 58 aa, Homo sapiens
VLMEMLKASKPLRPALRLQKPSIHSWGAGHARELPIASALLRGPGLDGGWYLPTPFSF

SEQ ID NO: 23280 - protein, 638 aa, Homo sapiens
VRVHRLRKKKISGWRFCFFSFLSFLSFFFFFNFFQGGGDFPQEKVVFMFGIQESIQRSGSSMKEEPLGSGMNAVRTWMQGAGVLDANTAAQSGVGLARAHFEKQPPSNLRKSNFFHFVLALYDRQGQPVEIERTAFVGFVEKEKEANSEKTNNGIHYRLQLLYSNGIRTEQDFYVRLIDSMTKQAIVYEGQDKNPEMCRVLLTHEIMCSRCCDKKSCGNRNETPSDPVIIDRFFLKFFLKCNQNCLKNAGNPRDMRRFQVVVSTTVNVDGHVLAVSDNMFVHNNSKHGRRARRLDPSEGTPSYLEHATPCIKAISPSEGWTTGGATVIIIGDNFFDGLQVIFGTMLVWSELITPHAIRVQTPPRHIPGVVEVTLSYKSKQFCKGTPGRFIYTALNEPTIDYGFQRLQKVIPRHPGDPERLPKEVILKRAADLVEALYGMPHNNQEIILKRAADIAEALYSVPRNHNQLPALANTSVHAGMMGVNSFSGQLAVNVSEASQATNQGFTRNSSSVSPHGYVPSTTPQQTNYNSVTTSMNGYGSAAMSNLGGSPTFLNGSAANSPYAIVPSSPTMASSTSLPSNCSSSSGIFSFSPANMVSAVKQKSAFAPVVRPQTSPPPTCTSTNGNSLQAISGMIVPPM

SEQ ID NO: 23281 - protein, 117 aa, Homo sapiens
VHLSFVFTLITLHFNPPFQLHQEKLKEEKKKKKKKKKKHRKSSSDSDDEEKKHEKLKKALNAEEARLLHVKETMQIDERKRPYNSMYETREPTEEEMEAYRMKRQRPDDPMASFLGQ

SEQ ID NO: 23282 - protein, 65 aa, Homo sapiens
LRPIHGTRALPGQACVFRETVGITMRVSPLWRCLEDLEQSPDCEQGKLLPVPKLTDCISSPEKFT

SEQ ID NO: 23283 - protein, 33 aa, Homo sapiens
MSRRLLIIGYIFTGVMSPQVLRERGRGTEKPLS

SEQ ID NO: 23284 - protein, 529 aa, Homo sapiens
LDLLSSVKPSIPSKTKGMWRVRKRGYFGIWSFPLIIAAVCAQSVNDPSNMSLVKETVDRLLKGYDIRLRPDFGGPPVAVGMNIDIASIDMVSEVNMDYTLTMYFQQAWRDKRLSYNVIPLNLTLDNRVADQLWVPDTYFLNDKKSFVHGVTVKNRMIRLHPDGTVLYGLRITTTAACMMDLRRYPLDEQNCTLEIESYGYTTDDIEFYWRGDDNAVTGVTKIELPQFSIVDYKLITKKVVFSTGSYPRLSLSFKLKRNIGYFILQTYMPSILITILSWVSFWINYDASAARVALGITTVLTMTTINTHLRETLPKIPYVKAIDMYLMGCFVFVFMALLEYALVNYIFFGRGPQRQKKAAEKAASANNEKMRLDVNKIFYKDIKQNGTQYRSLWDPTGNLSPTRRTTNYDFSLYTMDPHENILLSTLEIKNEMATSEAVMGLGDPRSTMLAYDASSIQYRKAGLPRHSFGRNALERHVAQKKSRLRRRASQLKITIPDLTDVNAIDRWSRIFFPVVFSFFNIVYWLYYVN

SEQ ID NO: 23285 - protein, 491 aa, Homo sapiens
LDLLSSVKPSIPSKTKGMWRVRKRGYFGIWSFPLIIAAVCAQSVNDPSNMSLVKETVDRLLKGYDIRLRPDFGGPPVAVGMNIDIASIDMVSEVNMDYTLTMYFQQAWRDKRLSYNVIPLNLTLDNRVADQLWVPDTYFLNDKKSFVHGVTVKNRMIRLHPDGTVLYGLRITTTAACMMDLRRYPLDEQNCTLEIESYGYTTDDIEFYWRGDDNAVTGVTKIELPQFSIVDYKLITKKVVFSTGSYPRLSLSFKLKRNIGYFILQTYMPSILITILSWVSFWINYDASAARVALGITTVLTMTTINTHLRETLPKIPYVKAIDMYLMGCFVFVFMALLEYALVNYIFFGRGPQRQKKAAEKAASANNEKMRLDVNKMDPHENILLSTLEIKNEMATSEAVMGLGDPRSTMLAYDASSIQYRKAGLPRHSFGRNALERHVAQKKSRLRRRASQLKITIPDLTDVNAIDRWSRIFFPVVFSFFNIVYWLYYVN

SEQ ID NO: 23286 - protein, 181 aa, Homo sapiens
LDLLSSVKPSIPSKTKGMWRVRKRGYFGIWSFPLIIAAVCAQSVNDPSNMSLVKETVDRLLKGYDIRLRPDFGGPPVAVGMNIDIASIDMVSEVNMDYTLTMYFQQAWRDKRLSYNVIPLNLTLDNRVADQLWVPDTYFLNDKKSFVHGVTVKNRMIRLHPDGTVLYGLRSVVPNSKYNFS

SEQ ID NO: 23287 - protein, 52 aa, Homo sapiens
LDLLSSVKPSIPSKTKGMWRVRKRGYFGIWSFPLIIAAVCAQRSPRGCGDEH

SEQ ID NO: 23288 - protein, 89 aa, Homo sapiens
MTVWILLLLSLYPGFTSQKSDDDYEDYASNKTWVLTPKVPEGDVTVILNNLLEGYDNKLRPDIGVKPTLIHTDMYVNSIGPVNAINMHH

SEQ ID NO: 23289 - protein, 169 aa, Homo sapiens
MTVWILLLLSLYPGFTSQKSDDDYEDYASNKTWVLTPKVPEGDVTVILNNLLEGYDNKLRPDIGVKPTLIHTDMYVNSIGPVNAINMEYTIDIFFAQTWYDRRLKFNSTIKVLRLNSNMVGKIWIPDTFFRNSKKADAHWITTPNRMLRIWNDGRVLYTLRYSFAKGKE

SEQ ID NO: 23290 - protein, 190 aa, Homo sapiens
MTVWILLLLSLYPGFTSQKSDDDYEDYASNKTWVLTPKVPEGDVTVILNNLLEGYDNKLRPDIGVKPTLIHTDMYVNSIGPVNAINMEYTIDIFFAQTWYDRRLKFNSTIKVLRLNSNMVGKIWIPDTFFRNSKKADAHWITTPNRMLRIWNDGRVLYTLRLTIDAECQLQLHNFPMDEHSCPLEFSSCK

SEQ ID NO: 23291 - protein, 466 aa, Homo sapiens
MTVWILLLLSLYPGFTSQKSDDDYEDYASNKTWVLTPKVPEGDVTVILNNLLEGYDNKLRPDIGVKPTLIHTDMYVNSIGPVNAINMEYTIDIFFAQTWYDRRLKFNSTIKVLRLNSNMVGKIWIPDTFFRNSKKADAHWITTPNRMLRIWNDGRVLYTLRLTIDAECQLQLHNFPMDEHSCPLEFSSYGYPREEIVYQWKRSSVEVGDTRSWRLYQFSFVGLRNTTEVVKTTSEDKLHEILVNLTLGDYVVMSVYFDLSRRMGYFTIQTYIPCTLIVVLSWVSFWINKDAVPARTSLGITTVLTMTTLSTIARKSLPKVSYVTAMDLFVSVCFIFVFSALVEYGTLHYFVSNRKPSKDKDKKKKNPLLRMFSFKAPTIDIRPRSATIQMNNATHLQERDEEYGYECLDGKDCASFFCCFEDCRTGAWRHGRIHIRIAKMDSYARIFFPTAFCLFNLVYWVSYLYL

SEQ ID NO: 23292 - protein, 173 aa, Homo sapiens
VRSAPPGAAAAGRDWIMSAPFEERSGVVPCGTPWGQWYQTLEEVFIEVQVPPGTRAQDIQCGLQSRHVALSVGGREILKGKLFDSTIADEGTWTLEDRKMVRIVLTKTKRDAANCWTSLLESEYAADPWVQDQMQRKLTLERFQKENPGFDFSGAEISGNYTKGGPDFSNLEK

SEQ ID NO: 23293 - protein, 92 aa, Homo sapiens
VKTAGMVGREKELSIHFVPGSCRLVEEEVNIPNRRVLVTGATGLLGRAVHKEFQQNNWHAVGCGFRRARPKFEQVNLLDSNAVHHIIHDFQV

SEQ ID NO: 23294 - protein, 122 aa, Homo sapiens
VKTAGMVGREKELSIHFVPGSCRLVEEEVNIPNRRVLVTGATGLLGRAVHKEFQQNNWHAVGCGFRRARPKFEQVNLLDSNAVHHIIHDFQLLLEHFSSTLAQIMYLMEQIHLTERKTYQLP

SEQ ID NO: 23295 - protein, 264 aa, Homo sapiens
VKTAGMVGREKELSIHFVPGSCRLVEEEVNIPNRRVLVTGATGLLGRAVHKEFQQNNWHAVGCGFRRARPKFEQVNLLDSNAVHHIIHDFQPHVIVHCAAERRPDVVENQPDAASQLNVDASGNLAKEAAAVGAFLIYISSDYVFDGTNPPYREEDIPAPLNLYGKTKLDGEKAVLENNLGAAVLRIPILYGEVEKLEESAVTVMFDKVQFSNKSANMDHWQQRFPTHVKDVATVCRQLAEKRMLVRRIPESCLSEGPLCLFHA

SEQ ID NO: 23296 - protein, 339 aa, Homo sapiens [sequence omitted]

SEQ ID NO: 23297 - protein, 11 aa, Homo sapiens
LITKILLLARV

SEQ ID NO: 23298 - protein, 214 aa, Homo sapiens
MGRRPACCYRYCKNKPYPKSRFCRGVPDAKIRIFDLGRKKAKVDEFPLCGHMVSDEYEQLSSEALEAARICANKYMVKSCGKDGFHIRVRLHSFHVIRINKMLSCAGADRLQTGMRGAFGKPQGTLARVHTGQVIMSIRTKLQNKEHVIEALGRAKFKFPGRQKIHISKKWGFTKFNADEFEDMVAEKRLIPDGCGVKYIPNRGPLDKWRALHS

SEQ ID NO: 23299 - protein, 1526 aa, Homo sapiens
LHTMAPGWAGVGAAVRARLALALALASVLSGPPAVACPTKCTCSAASVDCHGLGLRAVPRGIPRNAERLDLDRNNITRITKMDFAGLKNLRVLHLEDNQVSVIERGAFQDLKQLERLRLNKNKLQVLPELLFQSTPKLTRLDLSENQIQGIPRKAFRGITDVKNLQLDNNHISCIEDGAFRALRDLEILTLNNNNISRILVTSFNHMPKIRTLRLHSNHLYCDCHLAWLSDWLRQRRTVGQFTLCMAPVHLRGFNVADVQKKEYVCPAPHSEPPSCNANSISCPSPCTCSNNIVDCRGKGLMEIPANLPEGIVEIRLEQNSIKAIPAGAFTQYKKLKRIDISKNQISDIAPDAFQGLKSLTSLVLYGNKITEIVKGLFDGLVSLQLLLLNANKINCLRVNTFQDLQNLNLLSLYDNKLQTISKGLFAPLQSIQTLHLAQNPFVCDCHLKWLADYLQDNPIETSGARCSSPRRLANKRISQIKSKKFRCSGSEDYRSRFSSECFMDLVCPEKCRCEGTIVDCSNQKLVRIPSHLPEYVTDLRLNDNEVSVLEATGIFKKLPNLRKINLSNNKIKEVREGAFDGAASVQELMLTGNQLETVHGRVFRGLSGLKTLMLRSNLIGCVSNDTFAGLSSVRLLSLYDNRITTITPGAFTTLVSLSTINLLSNPFNCNCHLAWLGKWLRKRRIVSGNPRCQKPFFLKEIPIQDVAIQDFTCDGNEESSCQLSPRCPEQCTCMETVVRCSNKGLRALPRGMPKDVTELYLEGNHLTAVPRELSALRHLTLIDLSNNSISMLTNYTFSNMSHLSTLILSYNRLRCIPVHAFNGLRSLRVLTLHGNDISSVPEGSFNDLTSLSHLALGTNPLHCDCSLRWLSEWVKAGYKEPGIARCSSPEPMADRLLLTTPTHRFQCKGPVDINIVAKCNACLSSPCKNNGTCTQDPVELYRCACPYSYKGKDCTVPINTCIQNPCQHGGTCHLSDSHKDGFSCSCPLGFEGQRCEINPDDCEDNDCENNATCVDGINNYVCICPPNYTGELCDEVIDHCVPELNLCQHEAKCIPLDKGFSCECVPGYSGKLCETDNDDCVAHKCRHGAQCVDTINGYTCTCPQGFSGPFCEHPPPMVLLQTSPCDQYECQNGAQCIVVQQEPTCRCPPGFAGPRCEKLITVNFVGKDSYVELASAKVRPQANISLQVATDKDNGILLYKGDNDPLALELYQGHVRLVYDSLSSPPTTVYSVETVNDGQFHSVELVTLNQTLNLVVDKGTPKSLGKLQKQPAVGINSPLYLGGIPTSTGLSALRQGTDRPLGGFHGCIHEVRINNELQDFKALPPQSLGVSPGCKSCTVCKHGLCRSVEKDSVVCECRPGWTGPLCDQEARDPCLGHRCHHGKCVATGTSYMCKCAEGYGGDLCDNKNDSANACSAFKCHHGQCHISDQGEPYCLCQPGFSGEHCQQENPCLGQVVREVIRRQKGYASCATASKVPIMECRGGCGPQCCQPTRSKRRKYVFQCTDGSSFVEEVERHLECGCLACS

SEQ ID NO: 23300 - protein, 1533 aa, Homo sapiens
LHTMAPGWAGVGAAVRARLALALALASVLSGPPAVACPTKCTCSAASVDCHGLGLRAVPRGIPRNAERLDLDRNNITRITKMDFAGLKNLRVLHLEDNQVSVIERGAFQDLKQLERLRLNKNKLQVLPELLFQSTPKLTRLDLSENQIQGIPRKAFRGITDVKNLQLDNNHISCIEDGAFRALRDLEILTLNNNNISRILVTSFNHMPKIRTLRLHSNHLYCDCHLAWLSDWLRQRRTVGQFTLCMAPVHLRGFNVADVQKKEYVCPAPHSEPPSCNANSISCPSPCTCSNNIVDCRGKGLMEIPANLPEGIVEIRLEQNSIKAIPAGAFTQYKKLKRIDISKNQISDIAPDAFQGLKSLTSLVLYGNKITEIVKGLFDGLVSLQLLLLNANKINCLRVNTFQDLQNLNLLSLYDNKLQTISKGLFAPLQSIQTLHLAQNPFVCDCHLKWLADYLQDNPIETSGARCSSPRRLANKRISQIKSKKFRCSGSEDYRSRFSSECFMDLVCPEKCRCEGTIVDCSNQKLVRIPSHLPEYVTDLRLNDNEVSVLEATGIFKKLPNLRKINLSNNKIKEVREGAFDGAASVQELMLTGNQLETVHGRVFRGLSGLKTLMLRSNLIGCVSNDTFAGLSSVRLLSLYDNRITTITPGAFTTLVSLSTINLLSNPFNCNCHLAWLGKWLRKRRIVSGNPRCQKPFFLKEIPIQDVAIQDFTCDGNEESSCQLSPRCPEQCTCMETVVRCSNKGLRALPRGMPKDVTELYLEGNHLTAVPRELSALRHLTLIDLSNNSISMLTNYTFSNMSHLSTLILSYNRLRCIPVHAFNGLRSLRVLTLHGNDISSVPEGSFNDLTSLSHLALGTNPLHCDCSLRWLSEWVKAGYKEPGIARCSSPEPMADRLLLTTPTHRFQCKVLWFCCPGPVDINIVAKCNACLSSPCKNNGTCTQDPVELYRCACPYSYKGKDCTVPINTCIQNPCQHGGTCHLSDSHKDGFSCSCPLGFEGQRCEINPDDCEDNDCENNATCVDGINNYVCICPPNYTGELCDEVIDHCVPELNLCQHEAKCIPLDKGFSCECVPGYSGKLCETDNDDCVAHKCRHGAQCVDTINGYTCTCPQGFSGPFCEHPPPMVLLQTSPCDQYECQNGAQCIVVQQEPTCRCPPGFAGPRCEKLITVNFVGKDSYVELASAKVRPQANISLQVATDKDNGILLYKGDNDPLALELYQGHVRLVYDSLSSPPTTVYSVETVNDGQFHSVELVTLNQTLNLVVDKGTPKSLGKLQKQPAVGINSPLYLGGIPTSTGLSALRQGTDRPLGGFHGCIHEVRINNELQDFKALPPQSLGVSPGCKSCTVCKHGLCRSVEKDSVVCECRPGWTGPLCDQEARDPCLGHRCHHGKCVATGTSYMCKCAEGYGGDLCDNKNDSANACSAFKCHHGQCHISDQGEPYCLCQPGFSGEHCQQENPCLGQVVREVIRRQKGYASCATASKVPIMECRGGCGPQCCQPTRSKRRKYVFQCTDGSSFVEEVERHLECGCLACS

SEQ ID NO: 23301 - protein, 500 aa, Homo sapiens
LHTMAPGWAGVGAAVRARLALALALASVLSGPPAVACPTKCTCSAASVDCHGLGLRAVPRGIPRNAERLDLDRNNITRITKMDFAGLKNLRVLHLEDNQVSVIERGAFQDLKQLERLRLNKNKLQVLPELLFQSTPKLTRLDLSENQIQGIPRKAFRGITDVKNLQLDNNHISCIEDGAFRALRDLEILTLNNNNISRILVTSFNHMPKIRTLRLHSNHLYCDCHLAWLSDWLRQRRTVGQFTLCMAPVHLRGFNVADVQKKEYVCPAPHSEPPSCNANSISCPSPCTCSNNIVDCRGKGLMEIPANLPEGIVEIRLEQNSIKAIPAGAFTQYKKLKRIDISKNQISDIAPDAFQGLKSLTSLVLYGNKITEIVKGLFDGLVSLQLLLLNANKINCLRVNTFQDLQNLNLLSLYDNKLQTISKGLFAPLQSIQTLHLAQNPFVCDCHLKWLADYLQDNPIETSGARCSSPRRLANKRISQIKSKKFRCSGNQVTGLGPAF

SEQ ID NO: 23302 - protein, 222 aa, Homo sapiens
LHTMAPGWAGVGAAVRARLALALALASVLSGPPAVACPTKCTCSAASVDCHGLGLRAVPRGIPRNAERLDLDRNNITRITKMDFAGLKNLRVLHLEDNQVSVIERGAFQDLKQLERLRLNKNKLQVLPELLFQSTPKLTRLPSVELCWMALDRNHIPPTGFLQSTCSWSNYYEEDREGLENLVPVAFETCTITLQLSTLTKYQDQLCFLKDQIKSNFKWDKR

SEQ ID NO: 23303 - protein, 1322 aa, Homo sapiens
MSIAPLCTIKSNSHAGWKQSRWLSLLKTCRGSICDSCFDIGHLWNGDSKKMEDASAYLTLPSYRHHVENKGATLSRSSSSVGGLSVSSRDVFSISTLVCSTKLTQNVGLLGLLKWRMKPQLLQENLEKLKIVDGEEVVKFLQDTLDALFNIMMEHSQSDEYDILVFDALIYIIGLIADRKFQHFNTVLEAYIQQHFSATLAYKKLMTVLKTYLDTSSRGEQCEPILRTLKALEYVFKFIVRSRTLFSQLYEGKEQMEFEESMRRLFESINNLMKSQYKTTILLQVAALKYIPSVLHDVEMVFDAKLLSQLLYEFYTCIPPVKLQKQKVQSMNEIVQSNLFKKQECRDILLPVITKELKELLEQKDDMQHQVLERKYCVELLNSILEVLSYQDAAFTYHHIQEIMVQLLRTVNRTVITMGRDHILISHFVACMTAILNQMGDQHYSFYIETFQTSSELVDFLMETFIMFKDLIGKNVYPGDWMAMSMVQNRVFLRAINKFAETMNQKFLEHTNFEFQLWNNYFHLAVAFITQDSLQLEQFSHAKYNKILNKYGDMRRLIGFSIRDMWYKLGQNKICFIPGMVGPILEMTLIPEAELRKATIPIFFDMMLCEYQRSGDFKKFENEIILKLDHEVEGGRGDEQYMQLLESILMECAAEHPTIAKSVENFVNLVKGLLEKLLDYRGVMTDESKDNRMSCTVNLLNFYKDNNREEMYIRYLYKLRDLHLDCDNYTEAAYTLLLHTWLLKWSDEQCASQVMQTGQQHPQTHRQLKETLYETIIGYFDKGKMWEEAISLCKELAEQYEMEIFDYELLSQNLIQQAKFYESIMKILRPKPDYFAVGYYGQGFPSFLRNKVFIYRGKEYERREDFQMQLMTQFPNAEKMNTTSAPGDDVKNAPGQYIQCFTVQPVLDEHPRFKNKPVPDQIINFYKSNYVQRFHYSRPVRRGTVDPENEFASMWIERTSFVTAYKLPGILRWFEVVHMSQTTISPLENAIETMSTANEKILMMINQYQSDETLPINPLSMLLNGIVDPAVMGGFAKYEKAFFTEEYVRDHPEDQDKLTHLKDLIAWQIPFLGAGIKIHEKRVSDNLRPFHDRMEECFKNLKMKVEKEYGVREMPDFDDRRVGRPRSMLRSYRQMSIISLASMNSDCSTPSKPTSESFDLELASPKTPRVEQEEPISPGSTLPEVKLRRSKKRTKRSSVVFADEKAAAESDLKRLSRKHEFMSDTNLSEHAAIPLKASVLSQMSFASQSMPTIPALALSVAGIPGLDEANTSPRLSQTFLQLSDGDKKTLTRKKVNQFFKTMLASKSAEEGKQIPDSLSTDL

SEQ ID NO: 23304 - protein, 69 aa, Homo sapiens [sequence omitted]

SEQ ID NO: 23305 - protein, 61 aa, Homo sapiens
MGEPGRGVSGRGKPCVEHRSLREWETVPISCPYLEETERPIRSQSLNANKPSIPWGCDHGG

SEQ ID NO: 23306 - protein, 82 aa, Homo sapiens
LMYFAVFSLILYFFQVFAKPLNLQDQCQQNLVMQVLKLVLNCLNFDFIGSSADESADDLCTVQIPTTWRTSKKKLWYEGSST

SEQ ID NO: 23307 - protein, 40 aa, Homo sapiens
VLTFFITYFLILAFQVYARMSEVLGITDDNHVLETFMTKI

SEQ ID NO: 23308 - protein, 325 aa, Homo sapiens
LAPKLRKDKDFGDVFSGRTELKNKVPACRHPMEDSMDMDMSPLRPQNYLFGCELKADKDYHFKVDNDENEHQLSLRTVSLGAGAKDELHIVEAEAMNYEGSPIKVTLATLKMSVQPTVSLGGFEITPPVVLRLKCGSGPVHISGQHLVAVEEDAESEDEEEEDVKLLSISGKRSAPGGGSKVPQKKVKLAADEDDDDDDEEDDDEDDDDDDFDDEEAEEKAPVKKSIRDTPAKNAQKSNQNGKDSKPSSTPRSKGQESFKKQEKTPKTPKGPSSVEDIKAKMQASIEKGGSLPKVEAKFINYVKNCFRMTDQEAIQDLWQWRKSL

SEQ ID NO: 23309 - protein, 49 aa, Homo sapiens
LEGGGGEVERSGVEKRLRRTATVRGWEGFGARARRRDLGSAREIFRVYI

SEQ ID NO: 23310 - protein, 373 aa, Homo sapiens
VGLKSACAGRLRYGGGRASEHARGGGTWEALARSSGSIYKRGEPASFPWCDSVLRGCSLEQRSFISVRLLSYLSACRHPMEDSMDMDMSPLRPQNYLFGCELKADKDYHFKVDNDENEHQLSLRTVSLGAGAKDELHIVEAEAMNYEGSPIKVTLATLKMSVQPTVSLGGFEITPPVVLRLKCGSGPVHISGQHLVAVEEDAESEDEEEEDVKLLSISGKRSAPGGGSKVPQKKVKLAADEDDDDDDEEDDDEDDDDDDFDDEEAEEKAPVKKSIRDTPAKNAQKSNQNGKDSKPSSTPRSKGQESFKKQEKTPKTPKGPSSVEDIKAKMQASIEKGGSLPKVEAKFINYVKNCFRMTDQEAIQDLWQWRKSL

SEQ ID NO: 23311 - protein, 285 aa, Homo sapiens
LRGCSLEQRSFISVRLLSYLSACRHPMEDSMDMDMSPLRPQNYLFGCELKADKDYHFKVDNDENEHQLSLRTVSLGAGAKDELHIVEAEAMNYEGSPIKVTLATLKMSVQPTVSLGGFEITPPVVLRLKCGSGPVHISGQHLVAVEEDAESEDEEEEDVKLLSISGKRSAPGGGSKVPQKKVKLAADEDDDDDDEEDDDEDDDDDDFDDEEAEEKAPVKKSIRDTPAKNAQKSNQNGKDSKPSSTPRSKGQESFKKQEKTPKTPKGPSSVEDIKAKMQASIEKAH

SEQ ID NO: 23312 - protein, 291 aa, Homo sapiens
LRGCSLEQRSFISVRLLSYLSACRHPMEDSMDMDMSPLRPQNYLFGCELKADKDYHFKVDNDENEHQLSLRTVSLGAGAKDELHIVEAEAMNYEGSPIKVTLATLKMSVQPTVSLGGFEITPPVVLRLKCGSGPVHISGQHLVAVEEDAESEDEEEEDVKLLSISGKRSAPGGGSKVPQKKVKLAADEDDDDDDEEDDDEDDDDDDFDDEEAEEKAPVKKGQESFKKQEKTPKTPKGPSSVEDIKAKMQASIEKGGSLPKVEAKFINYVKNCFRMTDQEAIQDLWQWRKSL

SEQ ID NO: 23313 - protein, 181 aa, Homo sapiens
LEQRSFISVRLLSYLSACRHPMEDSMDMDMSPLRPQNYLFGCELKADKDYHFKVDNDENEHQLSLRTVSLGAGAKDELHIVEAEAMNYEGSPIKVTLATLKMSVQPTVSLGGFEITPPVVLRLKCGSGPVHISGQHLVAVEEDAESEDEEEEDVKLLSISGKRSAPGGGSKVPQVEMAILL

SEQ ID NO: 23314 - protein, 17 aa, Homo sapiens
LRNFLKVSLSVYFSTYL

SEQ ID NO: 23315 - protein, 58 aa, Homo sapiens
LQSHSIIKSLTAISVPRGARPAAGCSGDGLIPPVLPVCFPLKTKPCLCGGRGPGKEGG

SEQ ID NO: 23316 - protein, 1082 aa, Homo sapiens
VGGRGDGPLERVRGSRRQGWAGQELRGRHKGGGPGDLTGRGRGRARRRLRGSGCSRRGAAQGTLDRGRAAGKGGSGENPERRGVLQLLLLLLAAAEATARARARARAGATAPPAMAFANFRRILRLSTFEKRKSREYEHVRRDLDPNEVWEIVGELGDGAFGKVYKAKNKETGALAAAKVIETKSEEELEDYIVEIEILATCDHPYIVKLLGAYYHDGKLWIMIEFCPGGAVDAIMLELDRGLTEPQIQVVCRQMLEALNFLHSKRIIHRDLKAGNVLMTLEGDIRLADFGVSAKNLKTLQKRDSFIGTPYWMAPEVVMCETMKDTPYDYKADIWSLGITLIEMAQIEPPHHELNPMRVLLKIAKSDPPTLLTPSKWSVEFRDFLKIALDKNPETRPSAAQLLEHPFVSSITSNKALRELVAEAKAEVMEEIEDGRDEGEEEDAVDAASTLENHTQNSSEVSPPSLNADKPLEESPSTPLAPSQSQDSVNEPCSQPSGDRSLQTTSPPVVAPGNENGLAVPVPLRKSRPVSMDARIQVAQEKQVAEQGGDLSPAANRSQKASQSRPNSSALETLGGEKLANGSLEPPAQAAPGPSKRDSDCSSLCTSESMDYGTNLSTDLSLNKEMGSLSIKDPKLYKKTLKRTRKFVVDGVEVSITTSKIISEDEKKDEEMRFLRRQELRELRLLQKEEHRNQTQLSNKHELQLEQMHKRFEQEINAKKKFFDTELENLERQQKQQVEKMEQDHAVRRREEARRIRLEQDRDYTRFQEQLKLMKKEVKNEVEKLPRQQRKESMKQKMEEHTQKKQLLDRDFVAKQKEDLELAMKRLTTDNRREICDKERECLMKKQELLRDREAALWEMEEHQLQERHQLVKQQLKDQYFLQRHELLRKHEKEREQMQRYNQRMIEQLKVRQQQEKARLPKIQRSEGKTRMAMYKKSLHINGGGSAAEQREKIKQFSQQEEKRQKSERLQQQQKHENQMRDMLAQCESNMSELQQLQNEKCHLLVEHETQKLKALDESHNQNLKEWRDKLRPRKKALEEDLNQKKREQEMFFKLSEEAECPNPSTPSKAAKFFPYSSADAS

SEQ ID NO: 23317 - protein, 17 aa, Homo sapiens
MEKRLSYDRWTTTQQEG

SEQ ID NO: 23318 - protein, 17 aa, Homo sapiens
MSGREGGKKKPLKQPKK

SEQ ID NO: 23319 - protein, 159 aa, Homo sapiens
VSTVRKGPGALSHHLPRPRDHHPLKRGPSPLSTPSRDPALGCSRLTAHGVLFWATAARAPGRGQGTPENTPLFMVLCPFIRRLLKNWAVCKANPAPCPSRFSERGVPWDGAAPLTAAPRFQSLDATNQHGLCSGHRVNFSLTPGAGPVPARSSYSVEVC

SEQ ID NO: 23320 - protein, 23 aa, Homo sapiens
MPYSTMQRVFLCLFCTLVNYVPP

SEQ ID NO: 23321 - protein, 150 aa, Homo sapiens
VLLLLSSIVGFFLMQSVTRPGIPMCAQLAHSIIVPRKLLQFIKSSGLGISLNSKRRKEETFPTRCGCDASQGPQGHCPRAHRPPLTATGAWIRSYIVQSFRPLPWSTRTRARISGRAHTHSYTRTQTRGRRQVGNFVRRSQRRSASSCSS

SEQ ID NO: 23322 - protein, 40 aa, Homo sapiens
VAAAAAAAAATAEEEEEEEGKKKKNQEESSTTTAGTAGPG

SEQ ID NO: 23323 - protein, 91 aa, Homo sapiens [sequence omitted]

SEQ ID NO: 23324 - protein, 78 aa, Homo sapiens
VVAQRIPWKNSYMNQMRMPQDHRRYQQALSRHLQKKWGKSPKRQKHSSGRAASQWISRAPQPSGVYEFWRNLFLCICF

SEQ ID NO: 23325 - protein, 50 aa, Homo sapiens
VVAQRIPWKNSYMNQMRMPQDHRRYQQALSRHLQKKWGKSPKRQKQNLVS

SEQ ID NO: 23326 - protein, 44 aa, Homo sapiens
LGFSPLIWRQAAALVLTVPVPMFTEVRGRKEPVSLGRQSTGARC

SEQ ID NO: 23327 - protein, 27 aa, Homo sapiens
MTFTGRLRSESRFSPAAVARTWRLPAL

SEQ ID NO: 23328 - protein, 63 aa, Homo sapiens
LGMWIFKTISFFFWFNRGGYRDQLGPSAQGAEHGHAGRPACMRVPGWAGRPAVVGQGWGSVLS

SEQ ID NO: 23329 - protein, 108 aa, Homo sapiens
LNRCAVHPRRKLLCLRLGLLSHMRVYTHMQAHVCTGSHRLGYIWGGGLSRGLGRAQLRGCRPSGVGGAVWRVPPVPCPPVLGRTFLCVAVWGALPEPLPHTASEHSFL

SEQ ID NO: 23330 - protein, 147 aa, Homo sapiens
MRLLLALLGVLLSVPGPPVLSLEASEEVELEPCLAPSLEQQEQELTVALGQPVRLCCGRAERGGHWYKEGSRLAPAGRVRGWRGRLEIASFLPEDAGRYLCLARGSMIVLQNLTLITGDSLTSSNDDEDPKSHRDPSNRHSYPQQGQ

SEQ ID NO: 23331 - protein, 446 aa, Homo sapiens
MRLLLALLGVLLSVPGPPVLSLEASEEVELEPCLAPSLEQQEQELTVALGQPVRLCCGRAERGGHWYKEGSRLAPAGRVRGWRGRLEIASFLPEDAGRYLCLARGSMIVLQNLTLITGDSLTSSNDDEDPKSHRDPSNRHSYPQQAPYWTHPQRMEKKLHAVPAGNTVKFRCPAAGNPTPTIRWLKDGQAFHGENRIGGIRLRHQHWSLVMESVVPSDRGTYTCLVENAVGSIRYNYLLDVLERSPHRPILQAGLPANTTAVVGSDVELLCKVYSDAQPHIQWLKHIVINGSSFGADGFPYVQVLKTADINSSEVEVLYLRNVSAEDAGEYTCLAGNSIGLSYQSAWLTVLPGEHLKGQEMLRDAPLGQQWGLWPVGWSVSVGLWGLAWGAVCGFVGLSCMTAPLCLSTRGRPCDRLLRCGCLGLGITTASSVCVPTYVGSWEGLS

SEQ ID NO: 23332 - protein, 22 aa, Homo sapiens
MQRMLVSEPTSSTTLSLKRWRL

SEQ ID NO: 23333 - protein, 604 aa, Homo sapiens
MLLAVLLLLPLPSSWFAHGHPLYTRLPPSALQVLSAQGTQALQAAQRSAQWAINRVAMEIQHRSHECRGSGRPRPQALLQDPPEPGPCGERRPSTANVTRAHGRIVGGSAAPPGAWPWLVRLQLGGQPLCGGVLVAASWVLTAAHCFVGAPNELLWTVTLAEGSRGEQAEEVPVNRILPHPKFDPRTFHNDLALVQLWTPVSPGGSARPVCLPQEPQEPPAGTACAIAGWGALFEDGPEAEAVREARVPLLSTDTCRRALGPGLRPSTMLCAGYLAGGVDSCQGDSGGPLTCSEPGPRPREVLFGVTSWGDGCGEPGKPGVYTRVAVFKDWLQEQMSAASSSREPSCRELLAWDPPQELQADAARLCAFYARLCPGSQGACARLAHQQCLQRRRRCELRSLAHTLLGLLRNAQELLGPRPGLRRLAPALALPAPALRESPLHPARELRLHSGSRAAGTRFPKRRPEPRGEANGCPGLEPLRQKLAALQGAHAWILQVPSEHLAMNFHEVLADLGSKTLTGLFRAWVRAGLGGRHVAFSGLVGLEPATLARSLPRLLVQALQAFRVAALAEGEPEGPWMDVGQGPGLERKGHHPLNPQVPPARQP

SEQ ID NO: 23334 - protein, 113 aa, Homo sapiens
LGHVPCGWPVGCHRFILGPADNHDIISMKLFQLMVEHTPDEESIDWTKIEPSVNFLKSPKDNVDDPTGNFRSGPLTGWRVFLLLLCALLGIVVCAVVGAVVFQKRQERNKRFY

SEQ ID NO: 23335 - protein, 205 aa, Homo sapiens
VPDVGRALLPLARGLLARQLPARPGCVGAPRGDGKRAWGPGVPASRSSPPGLALLRLQEDADGSCALLSPYVQPVCLPSGAARPSETTLCQVAGWGHQFEGAEEYASFLQEAQVPFLSLERCSAPDVHGSSILPGMLCAGFLEGGTDACQGDSGGPLVCEDQAAERRLTLQGIISWGSGCGDRNKPGVYTDVAYYLAWIREHTVS

SEQ ID NO: 23336 - protein, 251 aa, Homo sapiens
VPYLLPPHPSFHAPPELPGRKLEHGIGVREQGASPERLWPGLRALPLPYPPRRPAPEDLTVVLGQERRNHSCEPCQTLAVRSYRLHEAFSPVSYQHDLALLRLQEDADGSCALLSPYVQPVCLPSGAARPSETTLCQVAGWGHQFEGAEEYASFLQEAQVPFLSLERCSAPDVHGSSILPGMLCAGFLEGGTDACQGDSGGPLVCEDQAAERRLTLQGIISWGSGCGDRNKPGVYTDVAYYLAWIREHTVS

SEQ ID NO: 23337 - protein, 626 aa, Homo sapiens
LDRQLDQRTDAMRALLLLGFLLVSLESTLSIPPWEAPKEHKYKAEEHTVVLTVTGEPCHFPFQYHRQLYHKCTHKGRPGPQPWCATTPNFDQDQRWGYCLEPKKVKDHCSKHSPCQKGGTCVNMPSGPHCLCPQHLTGNHCQKEKCFEPQLLRFFHKNEIWYRTEQAAVARCQCKGPDAHCQRLASQACRTNPCLHGGRCLEVEGHRLCHCPVGYTGAFCDVDTKASCYDGRGLSYRGLARTTLSGAPCQPWASEATYRNVTAEQARNWGLGGHAFCRNPDNDIRPWCFVLNRDRLSWEYCDLAQCQTPTQAAPPTPVSPRLHVPLMPAQPAPPKPQPTTRTPPQSQTPGALPAKREQPPSLTRNGPLSCGQRLRKSLSSMTRVVGGLVALRGAHPYIAALYWGHSFCAGSLIAPCWVLTAAHCLQDRPAPEDLTVVLGQERRNHSCEPCQTLAVRSYRLHEAFSPVSYQHDLALLRLQEDADGSCALLSPYVQPVCLPSGAARPSETTLCQVAGWGHQFEGAEEYASFLQEAQVPFLSLERCSAPDVHGSSILPGMLCAGFLEGGTDACQGDSGGPLVCEDQAAERRLTLQGIISWGSGCGDRNKPGVYTDVAYYLAWIREHTVS

SEQ ID NO: 23338 - protein, 619 aa, Homo sapiens
VSRTPKLLCQNTCSSTGWAKMCLMPASALVPATWLRWRSSSRCVSGASALGGGDSHQGLRAGVGMAGGWCRLSTAVFLRKGVDVIVNASSVEDIDAGAIGQRLSNGLARLSSPVLHRLRLREDENAEPVGTTYQKTDAAVEMKRINREQFWEQAKKEEELRKEEERKKALDERLRFEQERMEQERQEQEERERRYREREQQIEEHRRKQQTLEAEEAKRRLKEQSIFGDHRDEEEETHMKKSESEVEEAAAIIAQRPDNPREFFKQQERVASASAGSCDVPSPFNHRPGSHLDSHRRMAPTPIPTRSPSDSSTASTPVAEQIERALDEVTSSQPPPLPPPPPPAQETQEPSPILDSEETRAAAPQAWAGPMEEPPQAQAPPRGPGSPAEDLMFMESAEQAVLAAPVEPATADATEIHDAADTIETDTATADTTVANNVPPAATSLIDLWPGNGEGASTLQGEPRAPTPPSGTEVTLAEVPLLDEVAPEPLLPAGEGCATLLNFDELPEPPATFCDPEEVEGESLAAPQTPTLPSALEELEQEQEPEPHLLTNGETTQKEGTQASEGYFSQSQEEEFAQSEELCAKAPPPVFYNKPPEIDITCWDADPVPEEEEGFEGGD

SEQ ID NO: 23339 - protein, 709 aa, Homo sapiens
LVPRPPLPAGRWEQVLLEETEAKRRAGLRDPAWAGLTRTLGGQPGGDSDLGASGGEDEMAGHPWHGTAALASSQAWRDGRERQALVSCRALYTYEDGSDDLKLAASGEGGLQELSGHFENQKVMYGFCSVKDSQAALPKYVLINWVGEDVPDARKCACASHVAKVAEFFQGVDVIVNASSVEDIDAGAIGQRLSNGLARLSSPVLHRLRLREDENAEPVGTTYQKTDAAVEMKRINREQFWEQAKKEEELRKEEERKKALDERLRFEQERMEQERQEQEERERRYREREQQIEEHRRKQQTLEAEEAKRRLKEQSIFGDHRDEEEETHMKKSESEVEEAAAIIAQRPDNPREFFKQQERVASASAGSCDVPSPFNHRPGSHLDSHRRMAPTPIPTRSPSDSSTASTPVAEQIERALDEVTSSQPPPLPPPPPPAQETQEPSPILDSEETRAAAPQAWAGPMEEPPQAQAPPRGPGSPAEDLMFMESAEQAVLAAPVEPATADATEIHDAADTIETDTATADTTVANNVPPAATSLIDLWPGNGEGASTLQGEPRAPTPPSGTEVTLAEVPLLDEVAPEPLLPAGEGCATLLNFDELPEPPATFCDPEEVEGESLAAPQTPTLPSALEELEQEQEPEPHLLTNGETTQKEGTQASEGYFSQSQEEEFAQSEELCAKAPPPVFYNKPPEIDITCWDADPVPEEEEGFEGGD

SEQ ID NO: 23340 - protein, 135 aa, Homo sapiens [sequence omitted]

SEQ ID NO: 23341 - protein, 303 aa, Homo sapiens
LQGPHAPGHPNPLLILCGLCLSCSASPDPMPLSPALCALGRSPPLPQGQRQTLLFSATMPKKIQNFAKSALVKPVTINVGRAGAASLDVIQEVEYVKEEAKMVYLLECLQKTPPPVLIFAEKKADVDAIHEYLLLKGVEAVAIHGGKDQEERTKAIEAFREGKKDVLVATDVASKGLDFPAIQHVINYDMPEEIENYVHRIGRTGRSGNTGIATTFINKACDESVLMDLKALLLEAKQKVPPVLQVLHCGDESMLDIGGERGCAFCGGLGHRITDCPKLEAMQTKQVSNIGRKDYLAHSSMDF

SEQ ID NO: 23342 - protein, 436 aa, Homo sapiens
LVFIAILRGLKKKGIHHPTPIQIQGIPTILSGRDMIGIAFTGSGKTLVFTLPVIMFCLEQEKRLPFSKREGPYGLIICPSRELARQTHGILEYYCRLLQEDSSPLLRCALCIGGMSVKEQMETIRHGVHMMVATPGRLMDLLQKKMVSLDICRYLALDEADRMIDMGFEGDIRTIFSYFKGQRQTLLFSATMPKKIQNFAKSALVKPVTINVGRAGAASLDVIQEVEYVKEEAKMVYLLECLQKTPPPVLIFAEKKADVDAIHEYLLLKGVEAVAIHGGKDQEERTKAIEAFREGKKDVLVATDVASKGLDFPAIQHVINYDMPEEIENYVHRIGRTGRSGNTGIATTFINKACDESVLMDLKALLLEAKQKVPPVLQVLHCGDESMLDIGGERGCAFCGGLGHRITDCPKLEAMQTKQVSNIGRKDYLAHSSMDF

SEQ ID NO: 23343 - protein, 271 aa, Homo sapiens
LVFIAILRGLKKKGIHHPTPIQIQGIPTILSGRDMIGIAFTGSGKTLVFTLPVIMFCLEQEKRLPFSKREGPYGLIICPSRELARQTHGILEYYCRLLQEDSSPLLRCALCIGGMSVKEQMETIRHGVHMMVATPGRLMDLLQKKMVSLDICRYLALDEADRMIDMGFEGDIRTIFSYFKVPPPPGQGTLHRPPLHATSDCRDPMPLATPTHCSYFVGCVSVAQLPQTPCPSAQPCVPLVAAPLFLRASDRPCSSVPPCRRRFRTLLRVPL

SEQ ID NO: 23344 - protein, 122 aa, Homo sapiens
VMRTLLLVLWLATRGSALYFHIGETEKKCFIEEIPDETMVIGNYRTQLYDKQREEYQPATPGLGMFVEVKDPEDKVILARQYGSEGRFTFTSHTPGEHQICLHSNSTKFSLFAGGMLVSGPM

SEQ ID NO: 23345 - protein, 166 aa, Homo sapiens
MAWLCGSLPVVVAATAMETAARQECYPELKPVQSINAHPSNCICIKFDPMGKYFATGSADALVSLWDVDELVCVRCFSRLDWPVRTLSFSHDGKMLASASEDHFIDIAEVETGDKLWEVQCESPTFTVAWHPKRPLLAFACDDKDGKYDSSREAGTVKLFGLPNDS

SEQ ID NO: 23346 - protein, 321 aa, Homo sapiens
MSAAGLLAPAPPGLERPRGGRRAGERQGRRAQLPGRESDEDTEDASETDLAKHDEEDYGEVKEQMYQDKLASLERQLQQLQEGTLQEYQKRMKKLGQQYKERIRNAELFLQLETEQVGRNYMKEKKAAVKEFEDKKVELKENLIAELAEEKKMIENEMLTMELNGDSMQVRPIMTRKLRRRPNDPVPIPDKRRKPAPAQLNYLLTDEQIMEDLRTLNKLKSPKRPASPSSPEHLPATPAESPAQRFEARIEDGKLHYDKRWYHKSQAIYLESKDNQKLSCVISSVGANEIWVRKTSDSTKMRIYLGQLQRGLFVIHRRSAA

SEQ ID NO: 23347 - protein, 112 aa, Homo sapiens
LFLVCSFASGCVALPVLMNIKAVIEQRQCTGVWNHKDELPIEIELGMKCWYHSVFACPILRQQTSDSNPPIKLICGHVISRDALNKLINGGKLKCPYCPMEQNPADGKRIIF

SEQ ID NO: 23348 - protein, 369 aa, Homo sapiens
LGRGLSSASLSAAEPAAPSPAGGDERAPRRHRRRGAAAPRPSMSEAGEEQPMETTGATENGHEAVPEGESPAGAGTGAAAGAGGATAAPPSGNQNGAEGDQINASKNEEDAGKMFVGGLSWDTSKKDLKDYFTKFGEVVDCTIKMDPNTGRSRGFGFILFKDAASVEKVLDQKEHRLDGRVIDPKKAMAMKKDPVKKIFVGGLNPEATEEKIREYFGEFGEIEAIELPMDPKLNKRRGFVFITFKEEEPVKKVLEKKFHTVSGSKCEIKVAQPKEVYQQQQYGSGGRGNRNRGNRGSGGGQSQSWNQGYGNYWNQGYGYQQGYGPGYGGYDYSPYGYYGYGPGYDYSQGSTNYGKSQRRGGHQNNYKPY

SEQ ID NO: 23349 - protein, 327 aa, Homo sapiens
LGRGLSSASLSAAEPAAPSPAGGDERAPRRHRRRGAAAPRPSMSEAGEEQPMETTGATENGHEAVPEGESPAGAGTGAAAGAGGATAAPPSGNQNGAEGDQINASKNEEDAGKMFVGGLSWDTSKKDLKDYFTKFGEVVDCTIKMDPNTGRSRGFGFILFKDAASVEKVLDQKEHRLDGRVIDPKKAMAMKKDPVKKIFVGGLNPEATEEKIREYFGEFGEIEAIELPMDPKLNKRRGFVFITFKEEEPVKKVLEKKFHTVSGSKCEIKVAQPKEVYQQQQYGSGGRGNRNRGNRGSGGGGGGGGQGSTNYGKSQRRGGHQNNYKPY

SEQ ID NO: 23350 - protein, 325 aa, Homo sapiens
LGRGLSSASLSAAEPAAPSPAGGDERAPRRHRRRGAAAPRPSMSEAGEEQPMETTGATENGHEAVPEGESPAGAGTGAAAGAGGATAAPPSGNQNGAEGDQINASKNEEDAGKMFVGGLSWDTSKKDLKDYFTKFGEVVDCTIKMDPNTGRSRGFGFILFKDAASVEKVLDQKEHRLDGRVIDPKKAMAMKKDPVKKIFVGGLNPEATEEKIREYFGEFGEIEAIELPMDPKLNKRRGFVFITFKEEEPVKKVLEKKFHTVSGSKCEIKVAQPKEVYQQQQYGSGGRGNRNRGNRGSGGGGGGQGSTNYGKSQRRGGHQNNYKPY

SEQ ID NO: 23351 - protein, 322 aa, Homo sapiens
LGRGLSSASLSAAEPAAPSPAGGDERAPRRHRRRGAAAPRPSMSEAGEEQPMETTGATENGHEAVPEGESPAGAGTGAAAGAGGATAAPPSGNQNGAEGDQINASKNEEDAGKMFVGGLSWDTSKKDLKDYFTKFGEVVDCTIKMDPNTGRSRGFGFILFKDAASVEKVLDQKEHRLDGRVIDPKKAMAMKKDPVKKIFVGGLNPEATEEKIREYFGEFGEIEAIELPMDPKLNKRRGFVFITFKEEEPVKKVLEKKFHTVSGSKCEIKVAQPKEVYQQQQYGSGGRGNRNRGNRGSGGGQGSTNYGKSQRRGGHQNNYKPY

SEQ ID NO: 23352 - protein, 212 aa, Homo sapiens
LSCSHISSWKARTAHVEPHLLLLRTVRPKGFGASALATGLGTRVAVLLPHPHSGAWPTLPGHLTCSLSLAQFGGSPVSCAVGLAVLNVLEKEQLQDHATSVGSFLMQLLGQQKIKHPIVGDVRGVGLFIGVDLIKDEATRTPATEEAAYLVSRLKENYVLLSTDGPGRNILKFKPPMCFSLDNARQVVAKLDAILTDMEEKVRSCETLRLQP

SEQ ID NO: 23353 - protein, 63 aa, Homo sapiens
VFALLIIFFKTKTFLPQEFMLCHDEEHEKLFDLVRRMLEYDPTQRITLDEALQHPFFDLLKKK

SEQ ID NO: 23354 - protein, 211 aa, Homo sapiens
LLHSNMTSGDILLCYITEIFGALLQEESLLLRQMTSRVAKRQRCAFDDGQPVPLSVDDQGLSVSGLMATAAASTRRPGASSCSAGVTARSTPRFGSLETCNIVDSFEEVEDSLYVPQYNKYGEERVIVFLKTASGHAFQPDLVKRICDAIRVGLSVRHVPSLILETKGIAVEGGVIRAHELHMDPCMKRSGAQSRRAISISQREGRRHHTK

SEQ ID NO: 23355 - protein, 1239 aa, Homo sapiens
LPPDVGWAARGELSRRLRVRGPGCSPAAMDPPAGAARRLLCPALLLLLLLLPPPLLPPPPPPANARLAAAADPPGGPLGHGAERILAVPVRTDAQGRLVSHVVSAATSRAGVRARRAAPVRTPSFPGGNEEEPGSHLFYNVTVFGRDLHLRLRPNARLVAPGATMEWQGEKGTTRVEPLLGSCLYVGDVAGLAEASSVALSNCDGLAGLIRMEEEEFFIEPLEKGLAAQEAEQGRVHVVYRRPPTSPPLGGPQALDTGASLDSLDSLSRALGVLEEHANSSRRRARRHAADDDYNIEVLLGVDDSVVQFHGKEHVQKYLLTLMNIVNEIYHDESLGAHINVVLVRIILLSYGKSMSLIEIGNPSQSLENVCRWAYLQQKPDTGHDEYHDHAIFLTRQDFGPSGMQGYAPVTGMCHPVRSCTLNHEDGFSSAFVVAHETGHVLGMEHDGQGNRCGDEVRLGSIMAPLVQAAFHRFHWSRCSQQELSRYLHSYDCLLDDPFAHDWPALPQLPGLHYSMNEQCRFDFGLGYMMCTAFRTFDPCKQLWCSHPDNPYFCKTKKGPPLDGTMCAPGKHCFKGHCIWLTPDILKRDGSWGAWSPFGSCSRTCGTGVKFRTRQCDNPHPANGGRTCSGLAYDFQLCSRQDCPDSLADFREEQCRQWDLYFEHGDAQHHWLPHEHRDAKERCHLYCESRETGEVVSMKRMVHDGTRCSYKDAFSLCVRGDCRKVGCDGVIGSSKQEDKCGVCGGDNSHCKVVKGTFTRSPKKHGYIKMFEIPAGARHLLIQEVDATSHHLAVKNLETGKFILNEENDVDASSKTFIAMGVEWEYRDEDGRETLQTMGPLHGTITVLVIPVGDTRVSLTYKYMIHEDSLNVDDNNVLEEDSVVYEWALKKWSPCSKPCGGGSQFTKYGCRRRLDHKMVHRGFCAALSKPKAIRRACNPQECSQPVWVTGEWEPCSQTCGRTGMQVRSVRCIQPLHDNTTRSVHAKHCNDARPESRRACSRELCPGRWRAGPWSQCSVTCGNGTQERPVLCRTADDSFGICQEERPETARTCRLGPCPRNISDPSKKSYVVQWLSRPDPDSPIRKISSKGHCQGDKSIFCRMEVLSRYCSIPGYNKLCCKSCNLYNNLTNVEGRIEPPPGKHNDIDVFMPTLPVPTVAMEVRPSPSTPLEVPLNASSTNATEDHPETNAVDEPYKIHGLEDEVQPPNLIPRRPSPYEKTRNQRIQELIDEMRKKEMLGKF

SEQ ID NO: 23356 - protein, 594 aa, Homo sapiens
LPPDVGWAARGELSRRLRVRGPGCSPAAMDPPAGAARRLLCPALLLLLLLLPPPLLPPPPPPANARLAAAADPPGGPLGHGAERILAVPVRTDAQGRLVSHVVSAATSRAGVRARRAAPVRTPSFPGGNEEEPGSHLFYNVTVFGRDLHLRLRPNARLVAPGATMEWQGEKGTTRVEPLLGSCLYVGDVAGLAEASSVALSNCDGLAGLIRMEEEEFFIEPLEKGLAAQEAEQGRVHVVYRRPPTSPPLGGPQALDTGASLDSLDSLSRALGVLEEHANSSRRRARRHAADDDYNIEVLLGVDDSVVQFHGKEHVQKYLLTLMNIVNEIYHDESLGAHINVVLVRIILLSYGKSMSLIEIGNPSQSLENVCRWAYLQQKPDTGHDEYHDHAIFLTRQDFGPSGMQGYAPVTGMCHPVRSCTLNHEDGFSSAFVVAHETGHVLGMEHDGQGNRCGDEVRLGSIMAPLVQAAFHRFHWSRCSQQELSRYLHSYDCLLDDPFAHDWPALPQLPGLHYSMNEQCRFDFGLGYMMCTAFRTFDPCKQLWCSHPDNPYFCKTKKGPPLDGTMCAPGKFRPGAVAHACYPSTLGGQGRWIA

SEQ ID NO: 23357 - protein, 56 aa, Homo sapiens
LTGSLILLLTCQIDLFAGNQGAVNSSYYSSGSRASMGVNGMGGLSSMSSMSGGWGM

SEQ ID NO: 23358 - protein, 230 aa, Homo sapiens [sequence omitted]

SEQ ID NO: 23359 - protein, 85 aa, Homo sapiens
VHANPARRSRWVLLTPVGARVRCNGPFLMADRRTPTPFAGCRLPRQRRARDASQVSAPGTRRVRATGGWVGTPRRHHSNRRGNAC

SEQ ID NO: 23360 - protein, 655 aa, Homo sapiens
VHANPARRSRWVLLTPVGARVRCNGPFLMADRRTPTPFAGCRLPRQRRARDASQVSAPGTRRIMEGKWLLCMLLVLGTAIVEAHDGHDDDVIDIEDDLDDVIEEVEDSKPDTTAPPSSPKVTYKAPVPTGEVYFADSFDRGTLSGWILSKAKKDDTDDEIAKYDGKWEVEEMKESKLPGDKGLVLMSRAKHHAISAKLNKPFLFDTKPLIVQYEVNFQNGIECGGAYVKLLSKTPELNLDQFHDKTPYTIMFGPDKCGEDYKLHFIFRHKNPKTGIYEEKHAKRPDADLKTYFTDKKTHLYTLILNPDNSFEILVDQSVVNSGNLLNDMTPPVNPSREIEDPEDRKPEDWDERPKIPDPEAVKPDDWDEDAPAKIPDEEATKPEGWLDDEPEYVPDPDAEKPEDWDEDMDGEWEAPQIANPRCESAPGCGVWQRPVIDNPNYKGKWKPPMIDNPSYQGIWKPRKIPNPDFFEDLEPFRMTPFSAIGLELWSMTSDIFFDNFIICADRRIVDDWANDGWGLKKAADGAAEPGVVGQMIEAAEERPWLWVVYILTVALPVFLVILFCCSGKKQTSGMEYKKTDAPQPDVKEEEEEKEEEKDKGDEEEEGEEKLEEKQKSDAEEDGGTVSQEEEDRKPKAEEDEILNRSPRNRKPRRE

SEQ ID NO: 23361 - protein, 29 aa, Homo sapiens
VAAATAARRRRQRRAAEAVALGGGTKSSD

SEQ ID NO: 23362 - protein, 796 aa, Homo sapiens
LGSYVCKANNGIQRFRESTEVIVHENPFISVEWLKGPILEATAGDELVKLPVKLAAYPPPEFQWYKDGKALSGRHSPHALVLKEVTEASTGTYTLALWNSAAGLRRNISLELVVNVPPQIHEKEASSPSIYSRHSRQALTCTAYGVPLPLSIQWHWRPWTPCKMFAQRSLRRRQQQDLMPQCRDWRAVTTQDAVNPIESLDTWTEFVEGKNKTVSKLVIQNANVSAMYKCVVSNKVGQDERLIYFYVTTIPDGFTIESKPSEELLEGQPVLLSCQADSYKYEHLRWYRLNLSTLHDAHGNPLLLDCKNVHLFATPLAASLEEVAPGARHATLSLSIPRVAPEHEGHYVCEVQDRRSHDKHCHKKYLSVQALEAPRLTQNLTDLLVNVSDSLEMQCLVAGAHAPSIVWYKDERLLEEKSGVDLADSNQKLSIQRVREEDAGRYLCSVCNAKGCVNSSASVAVEGSEDKGSMEIVILVGTGVIAVFFWVLLLLIFCNMRRPAHADIKTGYLSIIMDPGEVPLEEQCEYLSYDASQWEFPRERLHLGRVLGYGAFGKVVEASAFGIHKGSSCDTVAVKMLKGVGSAGGRGSLAGEEQQLGVGRWDGNSGRETEAGSQSHPRFYREAAGFRAEGPPEPPLPQWGRQDVLGALSNPPPPKSAGWRGTGTCQGRGRCEARVPSRGRHGQRAPRADVGAQDPHSHRQPPQRGQPPRGVHQAAGPPHGDRGVLQVRQPLQLPARQAGRLQPLRGEVSRAARTLPRHGGARQAGSEAAGEQRQGPLRAVLEDRGRSEAGFSRPRS

SEQ ID NO: 23363 - protein, 765 aa, Homo sapiens
MQRGAALCLRLWLCLGLLDGLVSGYSMTPPTLNITEESHVIDTGDSLSISCRGQHPLEWAWPGAQEAPATGDKDSEDTGVVRDCEGTDARPYCKVLLLHEVHANDTGSYVCYYKYIKARIEGTTAASSYVFVRDFEQPFINKPDTLLVNRKDAMWVPCLVSIPGLNVTLRSQSSVLWPDGQEVVWDDRRGMLVSTPLLHDALYLQCETTWGDQDFLSNPFLVHITGNELYDIQLLPRKSLELLVGEKLVLNCTVWAEFNSGVTFDWDYPGKQAERGKWVPERRSQQTHTELSSILTIHNVSQHDLGSYVCKANNGIQRFRESTEVIVHENPFISVEWLKGPILEATAGDELVKLPVKLAAYPPPEFQWYKDGKALSGRHSPHALVLKEVTEASTGTYTLALWNSAAGLRRNISLELVVNVPPQIHEKEASSPSIYSRHSRQALTCTAYGVPLPLSIQWHWRPWTPCKMFAQRSLRRRQQQDLMPQCRDWRAVTTQDAVNPIESLDTWTEFVEGKNKTVSKLVIQNANVSAMYKCVVSNKVGQDERLIYFYVTTIPDGFTIESKPSEELLEGQPVLLSCQADSYKYEHLRWYRLNLSTLHDAHGNPLLLDCKNVHLFATPLAASLEEVAPGARHATLSLSIPRVAPEHEGHYVCEVQDRRSHDKHCHKKYLSVQALEAPRLTQNLTDLLVNVSDSLEMQCLVAGAHAPSIVWYKDERLLEEKSGREGGPGEGQVRRPARPTIPNPGGPAPPPHPLQESTWRTPTRS

SEQ ID NO: 23364 - protein, 55 aa, Homo sapiens
LSKELFAPAGARRGGGQEAAARTGHLITSPALVCFCESPLCSTPTRRLSLPAPSL

SEQ ID NO: 23365 - protein, 16 aa, Homo sapiens
VAPSRSFLVSAMFFFF

SEQ ID NO: 23366 - protein, 19 aa, Homo sapiens
MAGEALFLRRTMFLEETVL

SEQ ID NO: 23367 - protein, 11 aa, Homo sapiens
VMMISSRCRCE

SEQ ID NO: 23368 - protein, 256 aa, Homo sapiens
LLNWGSNQAHTLHLFDFSKYLLSGRGGGKQNLWEAERGGWLGLGAGCWGDSRGKGRQVAKQGRARPCKDCARGLAAWGHFSLSLSAVELTLDPDTANPRLILSLDLKGVRLGERAQDLPNHPCRFDTNTRVLASCGFSSGRHHWEVEVGSKDGWAFGVARESVRRKGLTPFTPEEGVWALQLNGGQYWAVTSPERSPLSCGHLSRVRVALDLEVGAVSFYAVEDMRHLYTFRVNFQERVFPLFSVCSTGTYLRIWP

SEQ ID NO: 23369 - protein, 40 aa, Homo sapiens
MLKKFKEDLRGELEKEEKGRDGAVMASMDCLPHRDPTPCS

SEQ ID NO: 23370 - protein, 186 aa, Homo sapiens
LKSRQGWNGVSERCMKPSWGVREPRLVALQNRPPSSAACWQRPRSGASRGVSGCSRCEEVQLQPPEVWSPDPCQPHSHDFLTDAIVRKMSRMFCQAARVDLTLDPDTAHPALMLSPDRRGVRLAERRQEVADHPKRFSADCCVLGAQGFRSGRHYWEEPKEPSWPPAQPSLTYYVCPTDRPEFSFT

SEQ ID NO: 23371 - protein, 245 aa, Homo sapiens
VWPSPLTTGRLSLDLEIKPSSYGIPWVCANTLSRLECSSAISAHCKLCFPGSRHSPASASRVAGTTGACHQDESHSEWVSCVRFSPNSSNPIIVSCGWDKLVKVWNLANCKLKTNHIGHTGYLNTVTVSPDGSLCASGGKDGQAMLWDLNEGKHLYTLDGGDIINALCFSPNRYWLCAATGPSIKIWDLEGKIIVDELKQEVISTSSKAEPPQCTSLAWSADGQTLFAGYTDNLVRVWQVTIGTR

SEQ ID NO: 23372 - protein, 271 aa, Homo sapiens
MRPTMEFHSVLCGVTPTLLVMWLSPQMASLPSQAPGMEPCASGISQRKGTTTRRFVGHTKDVLSVAFSSDNRQIVSGSRDKTIKLWNTLGVCKYTVQDESHSEWVSCVRFSPNSSNPIIVSCGWDKLVKVWNLANCKLKTNHIGHTGYLNTVTVSPDGSLCASGGKDGQAMLWDLNEGKHLYTLDGGDIINALCFSPNRYWLCAATGPSIKIWDLEGKIIVDELKQEVISTSSKAEPPQCTSLAWSADGQTLFAGYTDNLVRVWQVTIGTR

SEQ ID NO: 23373 - protein, 114 aa, Homo sapiens
LTLAGQPQSSDFPLLFVSLVMCGTISVVKSQVQAHVDADVHMCVTFRVCFHPLQYRQWLKEEYGESPLQDAEEAKNILGKYKEQGRTEPQPGARRWSSFPALAPLTYDNYTTET

SEQ ID NO: 23374 - protein, 67 aa, Homo sapiens
LFQVADASRGGEGVMENVDEAHRVRREMPLEVSVPAPGRVPPRVRHGRPLAQNLQPGRADAGSRPRL

SEQ ID NO: 23375 - protein, 24 aa, Homo sapiens
MSGALLRPASVLLVPRARVSRRGA

SEQ ID NO: 23376 - protein, 679 aa, Homo sapiens
LLRPRRAPGRAAAAMEVSGPEDDPFLSQLHQVQCPVCQQMMPAAHINSHLDRCLLLHPAGHAEPAAGSHRAGERAKGPSPPGAKRRRLSESSALKQPATPTAAESSEGEGEEGDDGGETESRESYDAPPTPSGARLIPDFPVARSSSPGRKGSGKRPAAAAAAGSASPRSWDEAEAQEEEEAVGDGDGDGDADADGEDDPGHWDADAAEAATAFGASGGGRPHPRALAAEEIRQMLQGKPLADTMRPDTLQDYFGQSKAVGQDTLLRSLLETNEIPSLILWGPPGCGKTTLAHIIASNSKKHSIRFVTLSATNAKTNDVRDVIKQAQNEKSFFKRKTILFIDEIHRFNKSQQDTFLPHVECGTITLIGATTENPSFQVNAALLSRCRVIVLEKLPVEAMVTILMRAINSLGIHVLDSSRPTDPLSHSSNSSSEPAMFIEDKAVDTLAYLSDGDARAGLNGLQLAVLARLSSRKMFCKKSGQSYSPSRVLITENDVKEGLQRSHILYDRAGEEHYNCISALHKSMRGSDQNASLYWLARMLEGGEDPLYVARRLVRFASEDIGLADPSALTQAVAAYQGCHFIGMPECEVLLAQCVVYFARAPKSIEVYSAYNNVKACLRNHQGPLPPVPLHLRNAPTRLMKDLGYGKGYKYNPMYSEPVDQEYLPEELRGVDFFKQRRC

SEQ ID NO: 23377 - protein, 654 aa, Homo sapiens
LLRPRRAPGRAAAAMEVSGPEDDPFLSQLHQVQCPVCQQMMPAAHINSHLDRCLLLHPAGHAEPAAGSHRAGERAKGPSPPGAKRRRLSESSALKQPATPTAAESSEGEGEEGDDGGETESRESYDAPPTPSGARLIPDFPVARSSSPGRKGSGKRPAAAAAAGSASPRSWDEAEAQEEEEAVGDGDGDGDADADGEDDPGHWDADAAEAATAFGASGGGRPHPRALAAEEIRQMLQGKPLADTMRPDTLQDYFGQSKAVGQDTLLRSLLETNEIPSLILWGPPGCGKTTLAHIIASNSKKHSIRFVTLSATNAKTNDVRDVIKQAQNEKSFFKRKTILFIDEIHRFNKSQQVNAALLSRCRVIVLEKLPVEAMVTILMRAINSLGIHVLDSSRPTDPLSHSSNSSSEPAMFIEDKAVDTLAYLSDGDARAGLNGLQLAVLARLSSRKMFCKKSGQSYSPSRVLITENDVKEGLQRSHILYDRAGEEHYNCISALHKSMRGSDQNASLYWLARMLEGGEDPLYVARRLVRFASEDIGLADPSALTQAVAAYQGCHFIGMPECEVLLAQCVVYFARAPKSIEVYSAYNNVKACLRNHQGPLPPVPLHLRNAPTRLMKDLGYGKGYKYNPMYSEPVDQEYLPEELRGVDFFKQRRC

SEQ ID NO: 23378 - protein, 384 aa, Homo sapiens
LSVFTMEQLSSANTRFALDLFLALSENNPAGNIFISPFSISSAMAMVFLGTRGNTAAQLSKTFHFNTVEEVHSRFQSLNADINKRGASYILKLANRLYGEKTYNFLPEFLVSTQKTYGADLASVDFQHASEDARKTINQWVKGQTEGKIPELLASGMVDNMTKLVLVNAIYFKGNWKDKFMKEATTNAPFRLNKKDRKTVKMMYQKKKFAYGYIEDLKCRVLELPYQGEELSMVILLPDDIEDESTGLKKIEEQLTLEKLHEWTKPENLDFIEVNVSLPRFKLEESYTLNSDLARLGVQDLFNSSKADLSGMSGARDIFISKIVHKSFVEVNEEGTEAAAATAGIATFCMLMPEENFTADHPFLFFIRHNSSGSILFLGRFSSP

SEQ ID NO: 23379 - protein, 57 aa, Homo sapiens
LSTSSPTLIIFLFLFLKKISYGHLSGCEVVSHCVFYLHFLCNELETKVQTRWDIQSL

SEQ ID NO: 23380 - protein, 408 aa, Homo sapiens
LRQEDHLRPGVGEQPGQGGKNLVSTKKKASAIMDVLAEANGTFALNLLKTLGKDNSKNVFFSPMSMSCALAMVYMGAKGNTAAQMAQILSFNKSGGGGDIHQGFQSLLTEVNKTGTQYLLRMANRLFGEKSCDFLSSFRDSCQKFYQAEMEELDFISAVEKSRKHINTWVAEKTEGKIAELLSPGSVDPLTRLVLVNAVYFRGNWDEQFDKENTEERLFKVSKNEEKPVQMMFKQSTFKKTYIGEIFTQILVLPYVGKELNMIIMLPDETTDLRTVEKELTYEKFVEWTRLDMMDEEEVEVSLPRFKLEESYDMESVLRNLGMTDAFELGKADFSGMSQTDLSLSKVVHKSFVEVNEEGTEAAAATAAIMMMRCARFVPRFCADHPFLFFIQHSKTNGILFCGRFSSP

SEQ ID NO: 23381 - protein, 395 aa, Homo sapiens
LEYVSGLGAARTRWLGSAIMDVLAEANGTFALNLLKTLGKDNSKNVFFSPMSMSCALAMVYMGAKGNTAAQMAQILSFNKSGGGGDIHQGFQSLLTEVNKTGTQYLLRMANRLFGEKSCDFLSSFRDSCQKFYQAEMEELDFISAVEKSRKHINTWVAEKTEGKIAELLSPGSVDPLTRLVLVNAVYFRGNWDEQFDKENTEERLFKVSKNEEKPVQMMFKQSTFKKTYIGEIFTQILVLPYVGKELNMIIMLPDETTDLRTVEKELTYEKFVEWTRLDMMDEEEVEVSLPRFKLEESYDMESVLRNLGMTDAFELGKADFSGMSQTDLSLSKVVHKSFVEVNEEGTEAAAATAAIMMMRCARFVPRFCADHPFLFFIQHSKTNGILFCGRFSSP

SEQ ID NO: 23382 - protein, 452 aa, Homo sapiens
LWSKSRPPGRTRGPSGWRVGLTRTSRPASPFALRTGDGSSRPGTPPASPRVFEVRGGSGASARRSARSLPALESAIMDVLAEANGTFALNLLKTLGKDNSKNVFFSPMSMSCALAMVYMGAKGNTAAQMAQILSFNKSGGGGDIHQGFQSLLTEVNKTGTQYLLRMANRLFGEKSCDFLSSFRDSCQKFYQAEMEELDFISAVEKSRKHINTWVAEKTEGKIAELLSPGSVDPLTRLVLVNAVYFRGNWDEQFDKENTEERLFKVSKNEEKPVQMMFKQSTFKKTYIGEIFTQILVLPYVGKELNMIIMLPDETTDLRTVEKELTYEKFVEWTRLDMMDEEEVEVSLPRFKLEESYDMESVLRNLGMTDAFELGKADFSGMSQTDLSLSKVVHKSFVEVNEEGTEAAAATAAIMMMRCARFVPRFCADHPFLFFIQHSKTNGILFCGRFSSP

SEQ ID NO: 23383 - protein, 271 aa, Homo sapiens
LRLLLGSALVGRLLDSLKRDYAGKPQPPIKSERRNPPSYAMAGKKVLIVYAHQEPKSFNGSLKNVAVDELSRQGCTVTVSDLYAMNLEPRATDKDITGTLSNPEVFNYGVETHEAYKQRSLASDITDEQKKVREADLVIFQFPLYWFSVPAILKGWMDRVLCQGFAFDIPGFYDSGLLQGKLALLSVTTGGTAEMYTKTGVNGDSRYFLWPLQHGTLHFCGFKVLAPQISFAPEIASEEERKGMVAAWSQRLQTIWKEEPIPCTAHWHFGQ

SEQ ID NO: 23384 - protein, 233 aa, Homo sapiens
LRLLLGSALVGRLLDSLKRDYAGKPQPPIKSERRNPPSYAMAGKKVLIVYAHQEPKSFNGSLKNVAVDELSRQGCTVTVSDLYAMNLEPRATDKDITGTLSNPEVFNYGVETHEAYKQRSLASDITDEQKKVREADLVIFQGKLALLSVTTGGTAEMYTKTGVNGDSRYFLWPLQHGTLHFCGFKVLAPQISFAPEIASEEERKGMVAAWSQRLQTIWKEEPIPCTAHWHFGQ

SEQ ID NO: 23385 - protein, 154 aa, Homo sapiens
LEARVREEAAAEGWGLLRRRGSLARACWGRAREPRPGGSPGLSPAASGMFPARCQSAHRALLRGRAVQPSPAALRRPRPDGRALAPQLWVPWSRRAPAAGPPSASSAPGWRAWTVRAASSPCPGPCRGGGPRERRPAARGTSRPGSESRSSLAG

SEQ ID NO: 23386 - protein, 114 aa, Homo sapiens
MREIVHIQAGQCGNQIGAKFWEVISDEHGIDPTGSYHGDSDLQLERINVYYNEAAGNKYVPRAILVDLEPGTMDSVRSGPFGQIFRPDNFVFGKRRVFKREESASLRPVLPSPP

SEQ ID NO: 23387 - protein, 229 aa, Homo sapiens
VTCRMQSHGVVLFSFQFWEVISDEHGIDPTGSYHGDSDLQLERINVYYNEAAGNKYVPWAILVDLEPGTTDSIRSGPFGQIYRPDNFVFGQSGAGNNWAKGHYTEGAELVDSVLDVVRKESESCDCLQGFQLTHSLGGGTGSGMGTLLISKIREEYPDRIMNSFSVMPSPKVSDTVVEPYNATLSVHQLVENTDETYCIDNEALYDICFRTLKLTTPTYGTSTTWCRPP

SEQ ID NO: 23388 - protein, 44 aa, Homo sapiens
MVYFRCALGLWCSSLLPVTFFFLFCNIDDINVTFEIFLNYCCNG

SEQ ID NO: 23389 - protein, 45 aa, Homo sapiens
MLLPPPICRTKQAKLSRGSSALSVPTEAIITQIHNLRGCENTRPY

SEQ ID NO: 23390 - protein, 322 aa, Homo sapiens [sequence omitted]

SEQ ID NO: 23391 - protein, 24 aa, Homo sapiens
LNFPEKTHCCERKKSLVFLQLLSC

SEQ ID NO: 23392 - protein, 167 aa, Homo sapiens
LFTNIIFSLAVLMSLDQEVRQGLKAYSNWPTYPQLYVSGELIGGLDIIKEIHASEELDIICPKAPKLEERLKVLTNEASMMLFMKGNKQEAKCGFSKQILEILNSTGGEYETFDILEDEGDRQGLKAYSNWPTYPQLYVKGELVGGLDIVKELKENGELLPILRGEN

SEQ ID NO: 23393 - protein, 37 aa, Homo sapiens
LFLPLKRIKFGPFKLHCAIINLNKLLIGSFFRRLQTK

SEQ ID NO: 23394 - protein, 384 aa, Homo sapiens
LETGAAFVSEVTSFPVVQLHMNRTAMRASQKDFENSMNQVKLLKKDPGNEVKLKLYALYKQATEGPCNMPKPGVFDLINKAKWDAWNALGSLPKEAARQNYVDLVSSLSPSLESSSQVEPGTDRKSTGFETLVVTSEDGITKIMFNRPKKKNAINTEMYHEIMRALKAASKDDSIITVLTGNGDYYSSGNDLTNFTDIPPGGVEEKAKNNAVLLREFVGCFIDFPKPLIAVVNGPAVGISVTLLGLFDAVYASDRATFHTPFSHLGQSPEGCSSYTFPKIMSPAKATEMLIFGKKLTAGEACAQGLVTEVFPDSTFQKEVWTRLKAFAKLPPNALRISKEVIRKREREKLHAVNAEECNVLQGRWLSDECTNAVVNFLSRKSKL

SEQ ID NO: 23395 - protein, 372 aa, Homo sapiens
VQEARPCPAPGRPREQEAQATQDPTETKCRPPGAGARPDPAPPARNSAAHHGFRGAVRGTSPFMDALTANGTTNIQTSVTGVTASKRKFIDDRRDQPFDKRLRFSVRQTESAYRYRDIVVRKQDGFTHILLSTKSSENNSLNPEVMREVQSALSTAAADDSKLVLLSAVGSVFCCGLDFIYFIRRLTDDRKRESTKMAEAIRNFVNTFIQFKKPIIVAVNGPAIGLGASILPLCDVVWANEKAWFQTPYTTFGQSPDGCSTVMFPKIMGGASANEMLLSGRKLTAQEACGKGLVSQVFWPGTFTQEVMVRIKELASCNPVVLEESKALVRCNMKMELEQANERECEVLKKIWGSAQGMDSMLKYLQRKIDEF

SEQ ID NO: 23396 - protein, 29 aa, Homo sapiens
LLLLMHPSKFTAFIFPPPSCFSCYTHSNT

SEQ ID NO: 23397 - protein, 146 aa, Homo sapiens
LLGKCWETKEGARRKRNKRDEGAYLVQAVRAAGKCDAVFKGFSDCLLKLGDSMANYPQGLDDKTNIKTVCTYWEDFHSCTVTALTDCQEGAKDMWDKLRKESKNLNIQGSLFELCGSGNGAAGSLLPAFPVLLVSLSAALATWLSF

SEQ ID NO: 23398 - protein, 24 aa, Homo sapiens
VLQGGSFLGFVIVGLAFPTLPNPD

SEQ ID NO: 23399 - protein, 88 aa, Homo sapiens
MRLLPRLLLLLLLVFPATVLFRGGPRGLLAVAQDLTEDEETVEDSIIEDEDDEAEVEEDEPTDLKIKRKKMCLVNLKLHRVQIQLYCL

SEQ ID NO: 23400 - protein, 122 aa, Homo sapiens [sequence omitted]

SEQ ID NO: 23401 - protein, 50 aa, Homo sapiens
VLAVSSRSFRFCTPLCVYCGRRRQLAHRLFGLGGRTFLTSPLSGKTPHPQ

SEQ ID NO: 23402 - protein, 20 aa, Homo sapiens
MVCKADIHAKAFGSAVGTSV

SEQ ID NO: 23403 - protein, 389 aa, Homo sapiens
MKQMNILFPNVETQCGTASARFSRDCKQLMTQSVDSNRGNRNEKRCGHCQRLQPTWNDLGDKYNSMEDAKVYVAKVDCTAHSDVCSAQGVRGYPTLKLFKPGQEAVKYQGPRDFQTLENWMLQTLNEEPVTPEPEVEPPSAPELKQGLYELSASNFELHVAQGDHFIKFFAPWCGHCKALAPTWEQLALGLEHSETVKIGKVDCTQHYELCSGNQVRGYPTLLWFRDGKKVDQYKGKRDLESLREYVESQLQRTETGATETVTPSEAPVLAAEPEADKGTVLALTENNFDDTIAEGITFIKFYAPWCGHCKTLAPTWEELSKKEFPGLAGVKIAEVDCTAERNICSKYSVRGYPTLLLFRGGKKVSEHSGGRDLDSLHRFVLSQAKDEL

SEQ ID NO: 23404 - protein, 365 aa, Homo sapiens
MLWKLTDNIKYEDCEDRHDGTSNGTARLPQLGTVGQSPYTSAPPLSHTPNADFQPPYFPPPYQPIYPQSQDPYSHVNDPYSLNPLHAQPQPQHPGWPGQRQSQESGLLHTHRGLPHQLSGLDPRRDYRRHEDLLHGPHALSSGLGDLSIHSLPHAIEEVPHVEDPGINIPDQTVIKKGPVSLSKSNSNAVSAIPINKDNLFGGVVNPNEVFCSVPGRLSLLSSTSKYKVTVAEVQRRLSPPECLNASLLGGVLRRAKSKNGGRSLREKLDKIGLNLPAGRRKAANVTLLTSLVEGKRIHLLTRRNFLLGKWIIFSGQMFGRILCQLGSFIFAENIARCEWNYFMAKRNICMYSYTSILLPSFPLP

SEQ ID NO: 23405 - protein, 13 aa, Homo sapiens
MYNLIGMDSQRRE

SEQ ID NO: 23406 - protein, 10 aa, Homo sapiens
LMLTSILVYC

SEQ ID NO: 23407 - protein, 9 aa, Homo sapiens
MFQLRLMKN

SEQ ID NO: 23408 - protein, 22 aa, Homo sapiens
MYIFLPILTYLKLGCISLLSTR

SEQ ID NO: 23409 - protein, 32 aa, Homo sapiens
LRDLKLFFFVFLWVQFEREVFDPFFSEWIICS

SEQ ID NO: 23410 - protein, 56 aa, Homo sapiens
LGLCEGKRQSVPHRLEAATLETSEYPQVTPRRGWCACQLFWALSEAGETIVEAVLG

SEQ ID NO: 23411 - protein, 14 aa, Homo sapiens
VATMCKEIFSVMGS

SEQ ID NO: 23412 - protein, 10 aa, Homo sapiens
LAFMLLNVCM

SEQ ID NO: 23413 - protein, 45 aa, Homo sapiens
VLLCHRRAIFLTFHLHLTASCLTPSQVSINLSFKTCFIYDHVESH

SEQ ID NO: 23414 - protein, 29 aa, Homo sapiens
VLKRMISMLSLCWCMCEVSELGVLCAKLF

SEQ ID NO: 23415 - protein, 31 aa, Homo sapiens
LVLYSILTTAGALLSDTGLYFVLGLSEVRSA

SEQ ID NO: 23416 - protein, 873 aa, Homo sapiens
MYERELEQLRQQLSPDRQPQSSGPDRLAYSSQTAQQKVTQWAEERDELFRQSLAKLREQLVKANTLVREANFLAEEMSKLTDYQVTLQIPAANLSANRKRGAIVSEPAIQVRRKGKSTQVWTIEKLENKLIDMRDLYQEWKEKVPEAKRLYGKRGDPFYEAQENHNLIGVANVFLECLFCDVKLQYAVPIISQQGEVAGRLHVEVMRVTGAVPERVVEDDSSENSSESGSLEVVDSSGEIIHRVKKLTCRVKIKEATGLPLNLSNFVFCQYTFWDQCESTVAAPVVDPEVPSPQSKDAQYTVTFSHCKDYVVNVTEEFLEFISDGALAIEVWGHRCAGNGSSIWEVDSLHAKTRTLHDRWNEVTRRIEMWISILELNELGEYAAVELHQAKDVNTGGIFQLRQGHSRRVQVTVKPVQHSGTLPLMVEAILSVSIGCVTARSTKLQRGLDSYQRDDEDGDDMDSYQEEDLNCVRERWSDALIKRREYLDEQIKKVSNKTEKTEDDVEREAQLVEQWVGLTEERNAVLVPAPGSGIPGAPADWIPPPGMETHIPVLFLDLNADDLSANEQLVGPHASGVNSILPKEHGSQFFYLPIIKHSDDEVSATASWDSSVHDSVHLNRVTPQNERIYLIVKTTVQLSHPAAMELVLRKRIAANIYNKQSFTQSLKRRISLKNIFYSCGVTYEIVSNIPKATEEIEDRETLALLAARSENEGTSDGETYIEKYTRGVLQVENILSLERLRQAVTVKEALSTKARHIRRSLSTPNVHNVSSSRPDLSGFDEDDKGWPENQLDMSDYSSSYQDVACYGTLPRDSPRRNKEGCTSETPHALTVSPFKAFSPQPPKFFKPLMPVKEEHKKRIALEARPLLSQEVNA

SEQ ID NO: 23417 - protein, 24 aa, Homo sapiens
MTRSHRFEDLIYTIIPAKRMYFLF

SEQ ID NO: 23418 - protein, 70 aa, Homo sapiens
LEELLPLPAPFLQKGGGNIHLFMPVCCMQAFWLPTLQQNNCTNSLVPIPPTESPGATVFFALHCRRGTKC

SEQ ID NO: 23419 - protein, 45 aa, Homo sapiens
LLLLMLLLMAKKKKRLRVCSPLLEETPSPFQRASGLVCTPSKKAS

SEQ ID NO: 23420 - protein, 51 aa, Homo sapiens
LMYLPEKAELEKGGARERVKRKRCRMPGDCLPLAVHSHSREDGIIYNPAHG

SEQ ID NO: 23421 - protein, 556 aa, Homo sapiens
LAVHATVKNLSVYSESCKLLVSPLGGRLGARPLLLFHLWIRQFLVRFRRRSRALGAVRPLGQRRCLPTRSSELRRRPAGKMSGSSARSSHLSQPVVKSVLVYRNGDPFYAGRRVVIHEKKVSSFEVFLKEVTGGVQAPFGAVRNIYTPRTGHRIRKLDQIQSGGNYVAGGQEAFKKLNYLDIGEIKKRPMEVVNTEVKPVIHSRINVSARFRKPLQEPCTIFLIANGDLINPASRLLIPRKTLNQWDHVLQMVTEKITLRSGAVHRLYTLEGKLVESGAELENGQFYVAVGRDKFKKLPYSELLFDKSTMRRPFGQKASSLPPIVGSRKSKGSGNDRHSKSTVGSSDNSSPQPLKRKGKKEDVNSEKLTKLKQNVKLKNSQETIPNSDEGIFKAGAERSETRGAAEVQEDEDTQVEVPVDQRPAEIVDEEEDGEKANKDAEQKEDFSGMNGDLEEEGGREATDAPEQVEEILDHSEQQARPARVNGGTDEENGEELQQVNNELQLVLDKERKSQGAGSGQDEADVDPQRPPRPEVKITSPEENENNQQNKDYAAVA

SEQ ID NO: 23422 - protein, 877 aa, Homo sapiens
VTCLERSGGSAPGFWSPSAAAALSIPTSPEKPVGNEIMSAFRLWPGLLIMLGSLCHRGSPCGLSTHVEIGHRALEFLQLHNGRVNYRELLLEHQDAYQAGIVFPDCFYPSICKGGKFHDVSESTHWTPFLNASVHYIRENYPLPWEKDTEKLVAFLFGITSHMAADVSWHSLGLEQGFLRTMGAIDFHGSYSEAHSAGDFGGDVLSQFEFNFNYLARRWYVPVKDLLGIYEKLYGRKVITENVIVDCSHIQFLEMYGEMLAVSKLYPTYSTKSPFLVEQFQEYFLGGLDDMAFWSTNIYHLTSFMLENGTSDCNLPENPLFIACGGQQNHTQGSKMQKNDFHRNLTTSLTESVDRNINYTERGVFFSVNSWTPDSMSFIYKALERNIRTMFIGGSQLSQKHVSSPLASYFLSFPYARLGWAMTSADLNQDGHGDLVVGAPGYSRPGHIHIGRVYLIYGNDLGLPPVDLDLDKEAHRILEGFQPSGRFGSALAVLDFNVDGVPDLAVGAPSVGSEQLTYKGAVYVYFGSKQGGMSSSPNITISCQDIYCNLGWTLLAADVNGDSEPDLVIGSPFAPGGGKQKGIVAAFYSGPSLSDKEKLNVEAANWTVRGEEDFSWFGYSLHGVTVDNRTLLLVGSPTWKNASRLGHLLHIRDEKKSLGRVYGYFPPNGQSWFTISGDKAMGKLGTSLSSGHVLMNGTLKQVLLVGAPTYDDVSKVAFLTVTLHQGGATRMYALTSDAQPLLLSTFSGDRRFSRFGGVLHLSDLDDDGLDEIIMAAPLRIADVTSGLIGGEDGRVYVYNGKETTLGDMTGKCKSWITPCPEEKAQYVLISPEASSRFGSSLITVRSKAKNQVVIAAGRSSLGARLSGALHVYSLGSD

SEQ ID NO: 23423 - protein, 191 aa, Homo sapiens
LSIPTSPEKPVGNEIMSAFRLWPGLLIMLGSLCHRGSPCGLSTHVEIGHRALEFLQLHNGRVNYRELLLEHQDAYQAGIVFPDCFYPSICKGGKFHDVSESTHWTPFLNASVHYIRENYPLPWEKDTEKLVAFLFGITSHMAADVSWHSLGLEQGFLRTMGAIDFHGSYSEAHSAGDFGTVYLHLLNFLVV

SEQ ID NO: 23424 - protein, 583 aa, Homo sapiens
VALQPSASSHAFPARPRRLLAPLASPRPLRSRARAPACLFPVAVVARAMATCIWLRSCGARRLGSTFPGCRLRPRAGGLVPASGPAPGPAQLRCYAGRLAGLSAALLRTDSFVGGRWLPAAATFPVQDPASGAALGMVADCGVREARAAVRAAYEAFCRWREVSAKERSSLLRKWYNLMIQNKDDLARIITAESGKPLKEAHGEILYSAFFLEWFSEEARRVYGDIIHTPAKDRRALVLKQPIGVAAVITPWNFPSAMITRKVGAALAAGCTVVVKPAEDTPFSALALAELASQAGIPSGVYNVIPCSRKNAKEVGEAICTDPLVSKISFTGSTTTGKILLHHAANSVKRVSMELGGLAPFIVFDSANVDQAVAGAMASKFRNTGQTCVCSNQFLVQRGIHDAFVKAFAEAMKKNLRVGNGFEEGTTQGPLINEKAVEKVEKQVNDAVSKGATVVTGGKRHQLGKNFFEPTLLCNVTQDMLCTHEETFGPLAPVIKFDTEEEAIAIANAADVGLAGYFYSQDPAQIWRVAEQLEVGMVGVNEGLISSVECPFGGVKQSGLGREGSKYGIDEYLELKYVCYGGL

SEQ ID NO: 23425 - protein, 106 aa, Homo sapiens
LVSFPLPLTFFMTYLNFGRFDTEEEAIAIANAADVGLAGYFYSQDPAQIWRVAEQLEVGMVGVNEGLISSVECPFGGVKQSGLGREGSKYGIDEYLELKYVCYGGL

SEQ ID NO: 23426 - protein, 29 aa, Homo sapiens
LGPTAGQRGGLQLLCWRQSCGASGDAAGP

SEQ ID NO: 23427 - protein, 501 aa, Homo sapiens
MDENNGLLLLELNPPNPWDLQPRSPEELAFGEVQITYLTHACMDLKLGDKRMVFDPWLIGPAFARGWWLLHEPPSDWLERLCQADLIYISHLHSDHLSYPTLKKLAGRRPDIPIYVGNTERPVFWNLNQSGVQLTNINVVPFGIWQQVDKNLRFMILMDGVHPEMDTCIIVEYKGHKILNIVDCTRPNGGRLPMKVALMMSDFAGGASGFPMTFSGGKFTEEWKAQFIKTERKKLLNYKARLVKNLQPRIYCPFAGYFVESHPSDKYIKETNTKNDPNELNNLIKKNSDVITWTPRPGATLDLGRMLKDRTDSKGIIEPPEGTKIYKDSWDFEPYLEILNAALGDEIFLHSSWIKEYFTWAGFKDYNLVVRMIETDEDFNPFPGGYDYLVDFLDLSFPKERPQREHPYEEIHSRVDVIRHVVKNGLLWDELYIGFQTRLQRDPDIYHHLFWNHFQIKLPLTPPNWKSFLMCCEQNGPVILQFSTERTNEPNRNKFSVENKA

SEQ ID NO: 23428 - protein, 159 aa, Homo sapiens
LELFNTEELLSTGKCCVTLEKNRVTLQKCVVAMPEVSSKGATISKKGFKKAVVKTQKKEGKKRKRTRKESYSIYIYKVLKQVHPDTGISSKAMSIMNSFVTDIFERIASEASRLAHYSKRSTISSREIQTAVRLLLPGELAKHAVSEGTKAVTKYTSSK

SEQ ID NO: 23429 - protein, 65 aa, Homo sapiens
MHMLCFCLVNLSFVSLLDRATDGEPKMNRKKRFFSPTEGLSPVALVLYTRSLGMLTQTWVIGPSG

SEQ ID NO: 23430 - protein, 38 aa, Homo sapiens
LQMATFLLCLHMAKRELAFWSFLIRDQSHHAHHEDSIC

SEQ ID NO: 23431 - protein, 23 aa, Homo sapiens
MPFFLFRLLGLETILRTSLGAMC

SEQ ID NO: 23432 - protein, 175 aa, Homo sapiens
MGPRARPALLLLMLLQTAVLQGRLLRSHSLHYLFMGASEQDLGLSLFEALGYVDDQLFVFYDHESRRVEPRTPWVSSRISSQMWLQLSQSLKGWDHMFTVDFWTIMENHNHSKGMWRGGLTFLRLSELFIFSCILKETAGSLRSCGSREEGRNLLPEIIWSLGMVEIGTYSFGCS

SEQ ID NO: 23433 - protein, 175 aa, Homo sapiens
MGPRARPALLLLMLLQTAVLQGRLLRSHSLHYLFMGASEQDLGLSLFEALGYVDDQLFVFYDHESRRVEPRTPWVSSRISSQMWLQLSQSLKGWDHMFTVDFWTIMENHNHSKEGSESSSLPGKGKQIPSPHPSSFLSSASFGEGDTSCDLFSDHSTVSGLELLPPEHHHEVAEG

SEQ ID NO: 23434 - protein, 29 aa, Homo sapiens
LFIGILFIILRKRQGSRGAMGHYVLAERF

SEQ ID NO: 23435 - protein, 115 aa, Homo sapiens
LFQFIPSTAIGIMSGRGKGGKGLGKGGAKRHRKVLRDNIQGITKPAIRRLARRGGVKRISGLIYEETRGVLKVFLENVIRDAVTYTEHAKRKTVTAMDVVYALKRQGRTLYGFGG

SEQ ID NO: 23436 - protein, 221 aa, Homo sapiens [sequence omitted]

SEQ ID NO: 23437 - protein, 15 aa, Homo sapiens
LFSRELRPLVLVIFV

SEQ ID NO: 23438 - protein, 133 aa, Homo sapiens
LIAMSGRGKQGGKARAKAKSRSSRAGLQFPVGRVHRLLRKGNYAERVGAGAPVYLAAVLEYLTAEILELAGNAARDNKKTRIIPRHLQLAIRNDEELNKLLGRVTIAQGGVLPNIQAVLLPKKTESHHKAKGK

SEQ ID NO: 23439 - protein, 228 aa, Homo sapiens
LLSLTLAFNMSETAPAAPAAPAPAEKTPVKKKARKSAGAAKRKASGPPVSELITKAVAASKERSGVSLAALKKALAAAGYDVEKNNSRIKLGLKSLVSKGTLVQTKGTGASGSFKLNKKAASGEAKPKAKKAGAAKAKKPAGAAKKPKKATGAATPKKSAKKTPKKAKKPAAAAGAKKAKSPKKAKAAKPKKAPKSPAKAKAVKPKAAKPKTAKPKAAKPKKAAAKKK

SEQ ID NO: 23440 - protein, 133 aa, Homo sapiens
LQNSKDSMPEPAKSAPAPKKGSKKAVTKAQKKDGKKRKRSRKESYSVYVYKVLKQVHPDTGISSKAMGIMNSFVNDIFERIAGEASRLAHYNKRSTITSREIQTAVRLLLPGELAKHAVSEGTKAVTKYTSSK

SEQ ID NO: 23441 - protein, 37 aa, Homo sapiens
LGHGLRETSKKPVTENDLFERASSLSKFTNQNLALKK

SEQ ID NO: 23442 - protein, 119 aa, Homo sapiens
VCSKVAKVKSCCLSSIMSGRGKGGKGLGKGGAKRHRKVLRDNIQGITKPAIRRLARRGGVKRISGLIYEETRGVLKVFLENVIRDAVTYTEHAKRKTVTAMDVVYALKRQGRTLYGFGG

SEQ ID NO: 23443 - protein, 62 aa, Homo sapiens
LAGTLPILLLLLAGASYFLWRQQKEITALSSEIESEQEMKEMGYAATEREISLRGIQRKQRI

SEQ ID NO: 23444 - protein, 61 aa, Homo sapiens
MLCCLVVTVPMGLWSLPALGAHGTSCCSALLPASLPPPPPAPPPSQPVCTGLSPVYCRGAS

SEQ ID NO: 23445 - protein, 332 aa, Homo sapiens
MKMASFLAFLLLNFRVCLLLLQLLMPHSAQFSVLGPSGPILAMVGEDADLPCHLFPTMSAETMELKWVSSSLRQVVNVYADGKEVEDRQSAPYRGRTSILRDGITAGKAALRIHNVTASDSGKYLCYFQDGDFYEKALVELKVAALGSDLHVDVKGYKDGGIHLECRSTGWYPQPQIQWSNNKGENIPTVEAPVVADGVGLYAVAASVIMRGSSGEGVSCTIRSSLLGLEKTASISIADPFFRSAQRWIAALAGTLPVLLLLLGGAGYFLWQQQEEKKTQFRKKKREQELREMAWSTMKQEQSTRVKLLEELSKFPFPQRPRHVFLSLLYAP

SEQ ID NO: 23446 - protein, 38 aa, Homo sapiens
LGLSLLTSMRESHLGQTRDTRLWTQTSSAWPRPCMLRL

SEQ ID NO: 23447 - protein, 208 aa, Homo sapiens
LLWVLMEPAAALHFSRPASLLLLLSLCALVSAQVTVVGPTDPILAMVGENTTLRCCLSPEENAEDMEVRWFQSQFSPAVFVYKGGRERTEEQKEEYRGRTTFVSKDSRGSVALIIHNVTAEDNGIYQCYFQEGRSCNEAILHLVVAGALLHFALLLWHCVTLGKASLLNSSPLQTSTILFPGSPFRRDTLPMKRRFQGKILPPAQGPP

SEQ ID NO: 23448 - protein, 146 aa, Homo sapiens
MEPAAALHFSRPASLLLLLSLCALVSAQVTVVGPTDPILAMVGENTTLRCCLSPEENAEDMEVRWFQSQFSPAVFVYKGGRERTEEQKEEYRGRTTFVSKDSRGSVALIIHNVTAEDNGIYQCYFQEGRSCNEAILHLVVAGTLSL

SEQ ID NO: 23449 - protein, 283 aa, Homo sapiens
MEPAAALHFSRPASLLLLLSLCALVSAQVTVVGPTDPILAMVGENTTLRCCLSPEENAEDMEVRWFQSQFSPAVFVYKGGRERTEEQKEEYRGRTTFVSKDSRGSVALIIHNVTAEDNGIYQCYFQEGRSCNEAILHLVVAGLDSEPVIEMRDHEDGGIQLECISGGWYPKPLTVWRDPYGEVVPALKEVSTPDADSLFMVTTAVIIRDKSVRNVSCSINDTLLGQKKESVIFIPESFMPSRSPCVVILPVIMIILMIPIAICIYWINNLQKEKKDSVRAKGA

SEQ ID NO: 23450 - protein, 13 aa, Homo sapiens
MRDSTIIERMENY

SEQ ID NO: 23451 - protein, 31 aa, Homo sapiens
MKMASSLAFLLLNFHVSLFLVQLLTPCSGRE

SEQ ID NO: 23452 - protein, 35 aa, Homo sapiens
MIMMVLVSIFLWLHLSSLSAVATHSQLLVKWLQEN

SEQ ID NO: 23453 - protein, 17 aa, Homo sapiens
MFSLFIGLLSLLSHPPH

SEQ ID NO: 23454 - protein, 110 aa, Homo sapiens
LFSDHLIMSGRGKGGKGLGKGGAKRHRKVLRDNIQGITKPAIRRLARRGGVKRISGLIYEETRGVLKVFLENVIRDAVTYTEHAKRKTVTAMDVVYALKRQGRTLYGFGG

SEQ ID NO: 23455 - protein, 203 aa, Homo sapiens [sequence omitted]

SEQ ID NO: 23456 - protein, 68 aa, Homo sapiens
LKGSNLAGTLHQFFALCIFALLSASQECRENSWRNSSYHTSVMKAMGQRQLSKKTGAGDILDSSATSG

SEQ ID NO: 23457 - protein, 146 aa, Homo sapiens
LTELPSSCFFPPIFRQLLPVMPEPSKSAPAPKKGSKKAVTKAQKKDGKKRKRSRKESYSVYVYKVLKQVHPDTGISSKAMGIMNSFVNDIFERIAGEASRLAHYNKRSTITSREIQTAVRLLLPGELAKHAVSEGTKAVTKYTSSK

SEQ ID NO: 23458 - protein, 58 aa, Homo sapiens
LGIEIIILAAMLTVDLNVKGLGKGRSRETGWKVGVGRAFLRITQTPKDIKLKRPWRKR

SEQ ID NO: 23459 - protein, 832 aa, Homo sapiens
LNTRSLFLNIDPKLSEALASKLNMYEALPGPAPENEDGLVKVKEEDPTWEQVCNSQEGSSHTQEICRLRFRHFCYQEAHGPQEALAQLRELCHQWLRPEMHTKEQIMELLVLEQFLTILPKELQPCVKTYPLESGEEAVTVLENLETGSGDTGQQASVYIQGQDMHPMVAEYQGVSLECQSLQLLPGITTLKCEPPQRPQGNPQEVSGPVPHGSAHLQEKNPRDKAVVPVFNPVRSQTLVKTEEETAQAVAAEKWSHLSLTRRNLCGNSAQETVMSLSPMTEEIVTKDRLFKAKQETSEEMEQSGEASGKPNRECAPQIPCSTPIATERTVAHLNTLKDRHPGDLWARMHISSLEYAAGDITRKGRKKDKARVSELLQGLSFSGDSDVEKDNEPEIQPAQKKLKVSCFPEKSWTKRDIKPNFPSWSALDSGLLNLKSEKLNPVELFELFFDDETFNLIVNETNNYASQKNVSLEVTVQEMRCVFGVLLLSGFMRHPRREMYWEVSDTDQNLVRDAIRRDRFELIFSNLHFADNGHLDQKDKFTKLRPLIKQMNKNFLLYAPLEEYYCFDKSMCECFDSDQFLNGKPIRIGYKIWCGTTTQGYLVWFEPYQEESTMKVDEDPDLGLGGNLVMNFADVLLERGQYPYHLCFDSFFTSVKLLSALKKKGVRATGTIRENRTEKCPLMNVEHMKKMKRGYFDFRIEENNEIILCRWYGDGIISLCSNAVGIEPVNEVSCCDADNEEIPQISQPSIVKVYDECKEGVAKMDQIISKYRVRIRSKKWYSILVSYMIDVAMNNAWQLHRACNPGASLDPLDFRRFVAHFYLEHNAHLSD

SEQ ID NO: 23460 - protein, 42 aa, Homo sapiens
LTFELSVHFVLDGVTEKETKDLAPKQNKTKSGDAEFCWGECL

SEQ ID NO: 23461 - protein, 178 aa, Homo sapiens
VAAVAVGMLGASYAAVPLYRLYCQTTGLGGSAVSGHASDQIENMVPVKDRIIKINFDADVHASLQWNFRLQQTEIYVVPGDTALGFYRAKNPADKPLIGISTYNVVPFEAGQYFNKIQCFCFEEQRLNPQEEVDMPVFFYIDPEFAKDPRMINVDLITLSYTFFEAKEGHNLPVPGYN

SEQ ID NO: 23462 - protein, 217 aa, Homo sapiens
LLAARAIAAIENLADVSVISSRNTGQRAVLKFAAATGATPIAGCFTPGTFTSQIQAAFREPRLPVVTDPRVDHQPLMEASYVNLPTIALCNTDSPLCYVDIAIPCNNKGAHSVGVMWWMLVPEVRRISCTISREHPWEVMTDPCFYRDPEEIEKEKQAAAEKAVTNEEFQGEWTAPAPQFTATQPEVADRSEGLQVPSVPIQQLPTEDWSAQPDTED

SEQ ID NO: 23463 - protein, 76 aa, Homo sapiens
VVTMQSIGVGAAEMTLTEQRYTVQSLEIDLDSMRNLKASLENSLREVEARYVLQMEQLSGILLHLESELTQTGADG

SEQ ID NO: 23464 - protein, 79 aa, Homo sapiens
LTNQIQRGPVRGISIKLQEEEKERRDNYVPKVSALDQEIIEVDPDTKEMLKLLDFGSLSNLQVTRPTVGMNFKMPRGAV

SEQ ID NO: 23465 - protein, 136 aa, Homo sapiens
LQLLCLCALFLSSRGLPTSALSTPKGPLLFSTVIISFHLTCPSILSHMWLPLNFASFGSSFFSPRLTCSLPLLCALTLSTHASSPLLRVPTEHAHVYTRFSRMLSSCSVTCALGCPAFTATCAPLMVMGLPLSVFG

SEQ ID NO: 23466 - protein, 190 aa, Homo sapiens [sequence omitted]

SEQ ID NO: 23467 - protein, 145 aa, Homo sapiens
LPSCLCSFLLLLLLQVSSSYAGQFRVIGPRHPIRALVGDEVELPCRISPGKNATGMEVGWYRPPFSRVVHLYRNGKDQDGDQAPEYRGRTELLKDAIGEGKVTLRIRNVRFSDEGGFTCFFRDHSYQEEAAMELKVEAPLKQRSR

SEQ ID NO: 23468 - protein, 165 aa, Homo sapiens
LPSCLCSFLLLLLLQVSSSYAGQFRVIGPRHPIRALVGDEVELPCRISPGKNATGMEVGWYRPPFSRVVHLYRNGKDQDGDQAPEYRGRTELLKDAIGEGKVTLRIRNVRFSDEGGFTCFFRDHSYQEEAAMELKVEGLVAVARSWLIAASTSQAQVILLTQPLE

SEQ ID NO: 23469 - protein, 165 aa, Homo sapiens
MEMSLVLLFLIRTALFAPQGAAAEPHSLCYNLTVLSQDGSVQSGFLAEGHLDGQLFLLCDRQKGRAGPRGQWAEAVLGAETWDTETEDLTENGQELRRTLAHIKGQKGGRGDKYMKVLFGTEFNREERDSITHQCWVSSSCNFRTTMNTKRILKSQSCLERGSHL

SEQ ID NO: 23470 - protein, 162 aa, Homo sapiens
MEMSLVLLFLIRTALFAPQGAAAEPHSLCYNLTVLSQDGSVQSGFLAEGHLDGQLFLLCDRQKGRAGPRGQWAEAVLGAETWDTETEDLTENGQELRRTLAHIKGQKGALHSLQEIRVCEIRKPAAPGALGISTHMGSSSSLPTWRLSNGQCPGPPELRLWL

SEQ ID NO: 23471 - protein, 66 aa, Homo sapiens
LSHCEESKVWAMEMSLVLLFLIRTALFAPQGAAADGASLCRQSWSAVARSRLTASSASRIQVIPLP

SEQ ID NO: 23472 - protein, 319 aa, Homo sapiens
MVVMAPRTLFLLLSGALTLTETWAGSHSMRYFSAAVSRPGRGEPRFIAMGYVDDTQFVRFDSDSACPRMEPRAPWVEQEGPEYWEEETRNTKAHAQTDRMNLQTLRGYYNQSEASSHTLQWMIGCDLGSDGRLLRGYEQYAYDGKDYLALNEDLRSWTAADTAAQISKRKCEAANVAEQRRAYLEGTCVEWLHRYLENGKEMLQRADPPKTHVTHHPVFDYEATLRCWALGFYPAEIILTWQRDGEDQTQDVELVETRPAGDGTFQKWAAVVVPSGEEQRYTCHVQHEGLPEPLMLRWSKEGDGGIMSVRESRSLSEDL

SEQ ID NO: 23473 - protein, 221 aa, Homo sapiens
MVLMAPRTLLLLLSGALALTLTQTWARSHSMRYFYTTMSRPGRGEPRFISVGYVDDTQFVRFDSDDASPREEPRAPWMEREGPEYWDRNTQICKAQAQTERENLRIALRYYNQSEGGSHTMQVMYGCDVGPDGRFLRGYEQHAYDGKDYIALNEDLRSWTAADMAAQITKRKWEAARRAEQLRAYLEGEFVEWLRRYLENGKETLQRADPPQDTYDPPPHL

SEQ ID NO: 23474 - protein, 169 aa, Homo sapiens
MGRGRDLRPGPGSLTALALVVVAERDPQVLSFSLCLGLADLCVPVPILWPLPLHPRRPRLLSRTRVVAVEPHELRIVHVADGDEAGLPAAGPGHGGVEIPHGVGAWERGGAETGPTLLPARIPGSCAPAGRAPRSSRPFPCRPCTHAPRSGSGSGPGPLRAAGGGFGAP

SEQ ID NO: 23475 - protein, 150 aa, Homo sapiens
MTHHPISDHEATLRCWALGFYPAEITLTWQRDGEDQTQDTELVETRPAGDGTFQKWAAVVVPSGEEQRYTCHVQHEGLPEPLTLRWEPSSQPNVPIVGIVAGLVLLVAVVTGAVVAAVMWRKKSSDRKGGSYSQAASSNSAQGSDVSLTA

SEQ ID NO: 23476 - protein, 12 aa, Homo sapiens
VRFDSDAATPRM

SEQ ID NO: 23477 - protein, 116 aa, Homo sapiens
MAVMAPRTLLLLLSGALALTQTWAGSHSMRYFFTSVSRPGRGEPRFIAVGYVDDTQFVRFDSDAASQRMEPRAPWIEQEGPEYWDQETRNVKAQSQTDRVDLGTLRGYYNQSEAGE

SEQ ID NO: 23478 - protein, 283 aa, Homo sapiens
MAVMAPRTLLLLLSGALALTQTWAGSHSMRYFFTSVSRPGRGEPRFIAVGYVDDTQFIMYGCDVGSDGRFLRGYRQDAYDGKDYIALNEDLRSWTAADMAAQITKRKWEAAHEAEQLRAYLDGTCVEWLRRYLENGKETLQRTDPPKTHMTHHPISDHEATLRCWALGFYPAEITLTWQRDGEDQTQDTELVETRPAGDGTFQKWAAVVVPSGEEQRYTCHVQHEGLPKPLTLRWELSSQPTIPIVGIIAGLVLLGAVITGAVVAAVMWRRKSSGGEGVKGGV

SEQ ID NO: 23479 - protein, 367 aa, Homo sapiens
LTEWTWGPCAATTTRARPVSDPGRGRRSGPLIPHGRARSPTVSGSEIHPEAAGPRDPCPGRGPGAFTRFHFQFRPKIPPGWSGLGGARGTGLTAGSGPGSHTIQIMYGCDVGSDGRFLRGYRQDAYDGKDYIALNEDLRSWTAADMAAQITKRKWEAAHEAEQLRAYLDGTCVEWLRRYLENGKETLQRTDPPKTHMTHHPISDHEATLRCWALGFYPAEITLTWQRDGEDQTQDTELVETRPAGDGTFQKWAAVVVPSGEEQRYTCHVQHEGLPKPLTLRWELSSQPTIPIVGIIAGLVLLGAVITGAVVAAVMWRRKSSEKEGVTLRLQAVTVPRALMCPSQLVKCETAALCGTERQELFLPFPL

SEQ ID NO: 23480 - protein, 280 aa, Homo sapiens
VRVDSDAVSLRMKTRARWVEQEGPEYWDLQTLGAKAQAQTDRVNLRTLLRYYNQSEAGYHILQGMFGCDLGPDGRLLRGYEQYAYDGKDYIALNEDLRSWTAADTAAQITQRKYEAANVAEQRRAYLEGTCMEWLRRHLENGKETLQRADPPQDTRDPPPSLNMRHNEVLGSGLLPCGDHIDLAAGWGGPDPGHGARGDQAHRGWNLPEVGGCGSAFWRGTEIHMPCAAQGAAQAPHPEMGALSPAHHPHCGYHCWPGSPWSCGHWSCGHCCDVEEEELR

SEQ ID NO: 23481 - protein, 27 aa, Homo sapiens
MGVMAPRTLLLLLLGALALTETWAATP

SEQ ID NO: 23482 - protein, 25 aa, Homo sapiens
MSLDQEKYAELELKEASLSNKRKQS

SEQ ID NO: 23483 - protein, 73 aa, Homo sapiens
MVASMFFRPLLVAATLRTTLRAAAQVLGSSGLFNNHGLQVQQQQQRNLSLHEYMSMELLQETGVSVPKGYVAK

SEQ ID NO: 23484 - protein, 113 aa, Homo sapiens [sequence omitted]

SEQ ID NO: 23485 - protein, 42 aa, Homo sapiens
MFIVAFLVIAPNWIPPTCPSSVEWINKLLCMHAMGLHCNENE

SEQ ID NO: 23486 - protein, 78 aa, Homo sapiens
MPDISTGNQDSKQGEQETKNRSASEEQALSQDGSGEKPMHTAPPQAPAPPAQSWTVGGDILNARFIRNLQERRSTRPW

SEQ ID NO: 23487 - protein, 39 aa, Homo sapiens
LQLMPSHSPPTPVKKLLVGALVALGLSEPEPDLNLCSKP

SEQ ID NO: 23488 - protein, 657 aa, Homo sapiens
LCPTSPPPLPLLPPSVSPPGCLTLWSLSFLFSVPSAPYPHLKTTMATIPDWKLQLLARRRQEEASVRGREKAERERLSQMPAWKRGLLERRRAKLGLSPGEPSPVLGTVEAGPPDPDESAVLLEAIGPVHQNRFIRQERQQQQQQQQRSEELLAERKPGPLEARERRPSPGEMRDQSPKGRESREERLSPRETRERRLGIGGAQELSLRPLEARDWRQSPGEVGDRSSRLSEAWKWRLSPGETPERSLRLAESREQSPRRKEVESRLSPGESAYQKLGLTEAHKWRPDSRESQEQSLVQLEATEWRLRSGEERQDYSEECGRKEEWPVPGVAPKETAELSETLTREAQGNSSAGVEAAEQRPVEDGERGMKPTEGWKWTLNSGKAREWTPRDIEAQTQKPEPPESAEKLLESPGVEAGEGEAEKEEAGAQGRPLRALQNCCSVPSPLPPEDAGTGGLRQQEEEAVELQPPPPAPLSPPPPAPTAPQPPGDPLMSRLFYGVKAGPGVGAPRRSGHTFTVNPRRSVPPATPATPTSPATVDAAVPGAGKKRYPTAEEILVLGGYLRLSRSCLAKGSPERHHKQLKISFSETALETTYQYPSESSVLEELGPEPEVPSAPNPPAAQPDDEEDEEELLLLQPELQGGLRTKALIVDESCRR

SEQ ID NO: 23489 - protein, 60 aa, Homo sapiens
LLLIPAALASFILAFGTGVEFVRFTSLRPLLGGIPESGGPAGDAVLGAHTQRPCVVGGSG

SEQ ID NO: 23490 - protein, 52 aa, Homo sapiens
LRPAEKKNYLFSCPIHTLRRAKKLNFNHEGNRAHPGWSVWQPDRCQVLGGDQ

SEQ ID NO: 23491 - protein, 429 aa, Homo sapiens
LANMFWEVISDEHGIDPTGTYHGDSDLQLDRISVYYNEATGGKYVPRAILVDLEPGTMDSVRSGPFGQIFRPDNFVFGQSGAGNNWAKGHYTEGAELVDSVLDVVRKEAESCDCLQGFQLTHSLGGGTGSGMGTLLISKIREEYPDRIMNTFSVVPSPKVSDTVVEPYNATLSVHQLVENTDETYCIDNEALYDICFRTLKLTTPTYGDLNHLVSATMSGVTTCLRFPGQLNADLRKLAVNMVPFPRLHFFMPGFAPLTSRGSQQYRALTVPELTQQVFDAKNMMAACDPRHGRYLTVAAVFRGRMSMKEVDEQMLNVQNKNSSYFVEWIPNNVKTAVCDIPPRGLKMAVTFIGNSTAIQELFKRISEQFTAMFRRKAFLHWYTGEGMDEMEFTEAESNMNDLVSEYQQYQDATAEEEEDFGEEAEEEA

SEQ ID NO: 23492 - protein, 72 aa, Homo sapiens [sequence omitted]

SEQ ID NO: 23493 - protein, 93 aa, Homo sapiens
LGGLDVWVSGRQSRDNWAQDALNLIRGGSRVPQDSRAWRLQYRALRPVQVRIAFPAAGEGRVVTWVCKEMPFRIVLCGVSFLGLRNRVGIFKL

SEQ ID NO: 23494 - protein, 71 aa, Homo sapiens
MGPEALSSLLLLLLVASGDADMKGHFDPAKCRYALGMQDRTIPDSDISASSSWSDSTAARHSRYLAHLAHL

SEQ ID NO: 23495 - protein, 81 aa, Homo sapiens
LLLLLIIALMLWRLHWRRLLSKAERRVLEEELTVHLSVPGDTILINNRPGPREPPPYQEPRPRGNPPHSAPCVPNGSGAPV

SEQ ID NO: 23496 - protein, 162 aa, Homo sapiens
MPRYVPLLLLLLLLRCSERGGGVNFGEKDAKVPGTWRDGVRVPGEGASWDSDRASPERRYGIVGLSQSISTKHPETSPKDSRIRENDVTADGRTTEDHITADPGTTEDSVTADPGTTEDNVTVDPGTTEGSVTADPATTKDYVSADPGTTKDSVTADPGTTH

SEQ ID NO: 23497 - protein, 251 aa, Homo sapiens
MPRYVPLLLLLLLLRCSERGGGVNFGEKDAKVPGTWRDGVRVPGEGASWDSDRASPERRYGIVGLSQSISTKHPETSPKDSRIRENDVTADGRTTEDHITADPGTTEDSVTADPGTTEDNVTVDPGTTEGSVTADPATTKDYVSADPGTTKDSVTADPGTTENFVTADPGTTKDSITADPRTTEDSVTADPGTTKHSITVDPGTTEDSVTADPGTTKHSITADPGTTEDSVTADPGTTEDETTKHGDTHLL

SEQ ID NO: 23498 - protein, 533 aa, Homo sapiens
VQSEMGSSRAPWMGRVGGHGMMALLLAGLLLPGTLAKSIGTFSDPCKDPTRITSPNDPCLTGKGDSSGFSSYSGSSSSGSSISSARSSGGGSSGSSSGSSIAQGGSAGSFKPGTGYSQVSYSSGSGSSLQGASGSSQLGSSSSHSGNSGSHSGSSSSHSSSSSSFQFSSSSFQVGNGSALPTNDNSYRGILNPSQPGQSSSSSQTFGVSSSGQSVSSNQRPCSSDIPDSPCSGGPIVSHSGPYIPSSHSVSGGQRPVVVVVDQHGSGAPGVVQGPPCSNGGLPGKPCPPITSVDKSYGGYEVVGGSSDSYLVPGMTYSKGKIYPVGYFTKENPVKGSPGVPSFAAGPPISEGKYFSSNPIIPSQSAASSAIAFQPVGTGGVQLCGGGSTGSKGPCSPSSSRVPSSSSISSSSGLPYHPCGSASQSPCSPPGTGSFSSSSSSQSSGKIILQPCGSKSSSSGHPCMSVSSLTLTGGPDGSPHPDPSAGAKPCGSSSAGKIPCRSIRDILAQVKPLGPQLADPEVFLPQGELLNSP

SEQ ID NO: 23499 - protein, 811 aa, Homo sapiens
VWPKRSRGLSRLGNIDGWRQNLEPSNNVEMFPPSGSTGLIPPSHFQARPLSTLPRMAPTWLSDIPLVQPPGHQDVSERRLDTQRPQVTMWERDVSSDRQEPGRRGRSWGLEGSQALSQQAEVIVRQLQELRRLEEEVRLLRETSLQQKMRLEAQAMELEALARAEKAGRAEAEGLRAALAGAEVVRKNLEEGSQRELEEVQRLHQEQLSSLTQAHEEALSSLTSKAEGLEKSLSSLETRRAGEAKELAEAQREAELLRKQLSKTQEDLEAQVTLVENLRKYVGEQVPSEVHSQTWELERQKLLETMQHLQEDRDSLHATAELLQVRVQSLTHILALQEEELTRKVQPSDSLEPEFTRKCQSLLNRWREKVFALMVQLKAQELEHSDSVKQLKGQVASLQEKVTSQSQEQAILQRSLQDKAAEVEVERMGAKGLQLELSRAQEARRRWQQQTASAEEQLRLVVNAVSSSQIWLETTMAKVEGAAAQLPSLNNRLSYAVRKVHTIRGLIARKLALAQLRQESCPLPPPVTDVSLELQQLREERNRLDAELQLSARLIQQEVGRAREQGEAERQQLSKVAQQLEQELQQTQESLASLGLQLEVARQGQQESTEEAASLRQELTQQQELYGQALQEKVAEVETRLREQLSDTERRLNEARREHAKAVVSLRQIQRRAAQEKERSQELRRLQEEARKEEGQRLARRLQELERDKNLMLATLQQEGLLSRYKQQRLLTVLPSLLDKKKSVVSSPRPPECSASAPVAAAVPTRESIKGSLSVLLDDLQDLSEAISKEEAVCQGDNLDRCSSSNPQMSS

SEQ ID NO: 23500 - protein, 181 aa, Homo sapiens
LGFYPAEITLTWQRDGEDQTQDTELVETRPAGDGTFQKWAAVVVPSGQEQRYTCHMQHEGLQEPLTLSWEPSSQPTIPIMGIVAGLAVLVVLAVLGAVVTAMMCRRKSSGREGVKSGVWVFLSHWEFQAPGRSVPRLVTGSTIHTWAIPAWDPVCQHLLFCEAHVTMKDGCITLMIMVLGS

SEQ ID NO: 23501 - protein, 131 aa, Homo sapiens
LGGKRPLRRGARGPPGEGAGPGEPRREVGRAGLSPSSPPGSHSMRYFDTAVSRPGRGEPRFISVGYVDDTQFVRFDSDAASPRGEPRAPWVEQEGPEYWDRETQKYKRQAQADRVSLRNLRGYYNQSEDGE

SEQ ID NO: 23502 - protein, 116 aa, Homo sapiens
MRVMAPRALLLLLSGGLALTETWACSHSMRYFDTAVSRPGRGEPRFISVGYVDDTQFVRFDSDAASPRGEPRAPWVEQEGPEYWDRETQKYKRQAQADRVSLRNLRGYYNQSEDGE

SEQ ID NO: 23503 - protein, 116 aa, Homo sapiens
MLVMAPRTVLLLLSAALALTETWAGSHSMRYFYTSVSRPGRGEPRFISVGYVDDTQFVRFDSDAASPREEPRAPWIEQEGPEYWDRNTQIYKAQAQTDRESLRNLRGYYNQSEAGE

SEQ ID NO: 23504 - protein, 26 aa, Homo sapiens
LRVMESRTLLLLFSGAVALIQTWAGP

SEQ ID NO: 23505 - protein, 39 aa, Homo sapiens
LAIKGVLCVPGMVLLWCPWCDPSPAGNSLREVGPLHQCC

SEQ ID NO: 23506 - protein, 136 aa, Homo sapiens
LVSLFLLFLFLFLFLFLRQSLTLSPRLQFTGVISAHCNLCLPGSSTSRTSDSRIAGITDRHHHTQLIFVFFVETGFRQVDQPSFKLLTSGDLPALASQSAGITRMSHRAWPILLYCNIFYYISHHACPIFLCFNIF

SEQ ID NO: 23507 - protein, 62 aa, Homo sapiens
VLPSVSLQVARAGRFGTKGLAITFVSDENDAKILNDVQDRFEVNISELPDEIDISSYIEQTR

SEQ ID NO: 23508 - protein, 235 aa, Homo sapiens
MWVFLGVGWGFQSSLSSPSPHGVYWRSTSSTPPGLTPPLCPPPVPHPLPPPQPMEIFVDDETKLTLHGLQQYYVKLKDNEKNRKLFDLLDVLEFNQVVIFVKSVQRCIALAQLLVEQNFPAIAIHRGMPQEERLSRYQQFKDFQRRILVATNLFGRGMDIERVNIAFNYDMPEDSDTYLHRVARAGRFGTKGLAITFVSDENDAKILNDVQDRFEVNISELPDEIDISSYIEQTR

SEQ ID NO: 23509 - protein, 461 aa, Homo sapiens
LLFLNPLLFTPCFHLFCENPSRSPFPSSPAGPVMAENDVDNELLDYEDDEVETAAGGDGAEAPAKKDVKGSYVSIHSSGFRDFLLKPELLRAIVDCGFEHPSEVQHECIPQAILGMDVLCQAKSGMGKTAVFVLATLQQLEPVTGQVSVLVMCHTRELAFQISKEYERFSKYMPNVKVAVFFGGLSIKKDEEVLKKNCPHIVVGTPGRILALARNKSLNLKHIKHFILDECDKMLEQLDMRRDVQEIFRMTPHEKQVMMFSATLSKEIRPVCRKFMQDPMEIFVDDETKLTLHGLQQYYVKLKDNEKNRKLFDLLDVLEFNQVVIFVKSVQRCIALAQLLVEQNFPAIAIHRGMPQEERLSRYQQFKDFQRRILVATNLFGRGMDIERVNIAFNYDMPEDSDTYLHRVARAGRFGTKGLAITFVSDENDAKILNDVQDRFEVNISELPDEIDISSYIEQTR

SEQ ID NO: 23510 - protein, 98 aa, Homo sapiens [sequence omitted]

SEQ ID NO: 23511 - protein, 323 aa, Homo sapiens
LLFLNPLLFTPCFHLFCENPSRSPFPSSPAGPVMAENDVDNELLDYEDDEVETAAGGDGAEAPAKKDVKGSYVSIHSSGFRDFLLKPELLRAIVDCGFEHPSEVQHECIPQAILGMDVLCQAKSGMGKTAVFVLATLQQLEPVTGQVSVLVMCHTRELAFQISKEYERFSKYMPNVKVAVFFGGLSIKKDEEVLKKNCPHIVVGTPGRILALARNKSLNLKHIKHFILDECDKMLEQLDMRRDVQEIFRMTPHEKQVMMFSATLSKEIRPVCRKFMQDVNTLLPSLPPLPARCLLPFLALFLRLPCHSSAKKAACAQLGVMTP

SEQ ID NO: 23512 - protein, 92 aa, Homo sapiens
MMIYVSTGAWGWAGSCFWQWSFCPPACVGCIEEHLLSWSQAQGSSEQELHYASLQRLPVPSSEGPDLRGRDKRGTKEDPRADYACIAENKPT

SEQ ID NO: 23513 - protein, 85 aa, Homo sapiens
MMIYVSTGAWGWAGSCFWQWSFCPPACVGCIEEAQGSSEQELHYASLQRLPVPSSEGPDLRGRDKRGTKEDPRADYACIAENKPT

SEQ ID NO: 23514 - protein, 70 aa, Homo sapiens
MMIYVSTGAWGWAGSCFWQWSFCPPACVGCIEERLPVPSSEGPDLRGRDKRGTKEDPRADYACIAENKPT

SEQ ID NO: 23515 - protein, 52 aa, Homo sapiens
LGLGGLLLLAVVLLSACLCWLHRREAGEELGPGLLRAGTPLCISAEAASAQQ

SEQ ID NO: 23516 - protein, 31 aa, Homo sapiens
LLLAVVLLSACLCWLHRREAGEELEAASAQQ

SEQ ID NO: 23517 - protein, 85 aa, Homo sapiens
VSEGDGRSRTRRHPPPSSPAPPPSRPGEPLGPGPGSPRTRPGSGTFWGRCLQDPTYSMSFQRNVRSLGADCQGKGWKEVFLAQPV

SEQ ID NO: 23518 - protein, 1150 aa, Homo sapiens
LCRSAGTPWEGSRRGQSASRDLSAMEPNDSTSTAVEEPDSLEVLVKTLDSQTRTFIVGAQMNVKEFKEHIAASVSIPSEKQRLIYQGRVLQDDKKLQEYNVGGKVIHLVERAPPQTHLPSGASSGTGSASATHGGGSPPGTRGPGASVHDRNANSYVMVGTFNLPSDGSAVDVHINMEQAPIQSEPRVRLVMAQHMIRDIQTLLSRMECRGGPQPQHSQPPPQPPAVTPEPVALSSQTSEPVESEAPPREPMEAEEVEERAPAQNPELTPGPAPAGPTPAPETNAPNHPSPAEYVEVLQELQRLESRLQPFLQRYYEVLGAAATTDYNNNHEGREEDQRLINLVGESLRLLGNTFVALSDLRCNLACTPPRHLHVVRPMSHYTTPMVLQQAAIPIQINVGTTVTMTGNGTRPPPTPNAEAPPPGPGQASSVAPSSTNVESSAEGAPPPGPAPPPATSHPRVIRISHQSVEPVVMMHMNIQDSGTQPGGVPSAPTGPLGPPGHGQTLGQQVPGFPTAPTRVVIARPTPPQARPSHPGGPPVSGTLQGAGLGTNASLAQMVSGLVGQLLMQPVLVAQGTPGMAPPPAPATASASAGTTNTATTAGPAPGGPAQPPPTPQPSMADLQFSQLLGNLLGPAGPGAGGSGVASPTITVAMPGVPAFLQGMTDFLQATQTAPPPPPPPPPPPPAPEQQTMPPPGSPSGGAGSPGGLGLESLSPEFFTSVVQGVLSSLLGSLGARAGSSESIAAFIQRLSGSSNIFEPGADGALGFFGALLSLLCQNFSMVDVVMLLHGHFQPLQRLQPQLRSFFHQHYLGGQEPTPSNIRMATHTLITGLEEYVRESFSLVQVQPGVDIIRTNLEFLQEQFNSIAAHVLHCTDSGFGARLLELCNQGLFECLALNLHCLGGQQMELAAVINGRIRRMSRGVNPSLVSWLTTMMGLRLQVVLEHMPVGPDAILRYVRRVGDPPQPLPEEPMEVQGAERASPEPQRENASPAPGTTAEEAMSRGPPPAPEGGSRDEQDGASAETEPWAAAVPPEWVPIIQQDIQSQRKVKPQPPLSDAYLSGMPAKRRKTMQGEGPQLLLSEAVSRAAKAAGARPLTSPESLSRDLEAPEVQESYRQQLRSDIQKRLQEDPNYSPQRFPNAQRAFADDP

SEQ ID NO: 23519 - protein, 1172 aa, Homo sapiens
LGLRTFSSCPTKVKLGDLGGAGSIASRSPNTIGETEVAVGGRDLSAMEPNDSTSTAVEEPDSLEVLVKTLDSQTRTFIVGAQMNVKEFKEHIAASVSIPSEKQRLIYQGRVLQDDKKLQEYNVGGKVIHLVERAPPQTHLPSGASSGTGSASATHGGGSPPGTRGPGASVHDRNANSYVMVGTFNLPSDGSAVDVHINMEQAPIQSEPRVRLVMAQHMIRDIQTLLSRMECRGGPQPQHSQPPPQPPAVTPEPVALSSQTSEPVESEAPPREPMEAEEVEERAPAQNPELTPGPAPAGPTPAPETNAPNHPSPAEYVEVLQELQRLESRLQPFLQRYYEVLGAAATTDYNNNHEGREEDQRLINLVGESLRLLGNTFVALSDLRCNLACTPPRHLHVVRPMSHYTTPMVLQQAAIPIQINVGTTVTMTGNGTRPPPTPNAEAPPPGPGQASSVAPSSTNVESSAEGAPPPGPAPPPATSHPRVIRISHQSVEPVVMMHMNIQDSGTQPGGVPSAPTGPLGPPGHGQTLGQQVPGFPTAPTRVVIARPTPPQARPSHPGGPPVSGTLQGAGLGTNASLAQMVSGLVGQLLMQPVLVAQGTPGMAPPPAPATASASAGTTNTATTAGPAPGGPAQPPPTPQPSMADLQFSQLLGNLLGPAGPGAGGSGVASPTITVAMPGVPAFLQGMTDFLQATQTAPPPPPPPPPPPPAPEQQTMPPPGSPSGGAGSPGGLGLESLSPEFFTSVVQGVLSSLLGSLGARAGSSESIAAFIQRLSGSSNIFEPGADGALGFFGALLSLLCQNFSMVDVVMLLHGHFQPLQRLQPQLRSFFHQHYLGGQEPTPSNIRMATHTLITGLEEYVRESFSLVQVQPGVDIIRTNLEFLQEQFNSIAAHVLHCTDSGFGARLLELCNQGLFECLALNLHCLGGQQMELAAVINGRIRRMSRGVNPSLVSWLTTMMGLRLQVVLEHMPVGPDAILRYVRRVGDPPQPLPEEPMEVQGAERASPEPQRENASPAPGTTAEEAMSRGPPPAPEGGSRDEQDGASAETEPWAAAVPPEWVPIIQQDIQSQRKVKPQPPLSDAYLSGMPAKRRKTMQGEGPQLLLSEAVSRAAKAAGARPLTSPESLSRDLEAPEVQESYRQQLRSDIQKRLQEDPNYSPQRFPNAQRAFADDP

SEQ ID NO: 23520 - protein, 1123 aa, Homo sapiens
LGLRTFSSCPTKVKLGDLGGAGSIASRSPNTIGETEVAVGGRDLSAMEPNDSTSTAVEEPDSLEVLVKTLDSQTRTFIVGAQMNVKEFKEHIAASVSIPSEKQRLIYQGRVLQDDKKLQEYNVGGKVIHLVERAPPQTHLPSGASSGTGSASATHGGGSPPGTRGPGASVHDRNANSYVMVGTFNLPSDGSAVDVHINMEQAPIQSEPRVRLVMAQHMIRDIQTLLSRMECRGGPQPQHSQPPPQPPAVTPEPVALSSQTSEPVESEAPPREPMEAEEVEERAPAQNPELTPGPAPAGPTPAPETNAPNHPSPAEYVEVLQELQRLESRLQPFLQRYYEVLGAAATTDYNNNHEGREEDQRLINLVGESLRLLGNTFVALSDLRCNLACTPPRHLHVVRPMSHYTTPMVLQQAAIPIQINVGTTVTMTGNGTRPPPTPNAEAPPPGPGQASSVAPSSTNVESSAEGAPPPGPAPPPATSHPRVIRISHQSVEPVVMMHMNIQDSGTQPGGVPSAPTGPLGPPGHGQTLGQQVPGFPTAPTRVVIARPTPPQARPSHPGGPPVSGTLQGAGLGTNASLAQMVSGLVGQLLMQPVLVAQGTPGMAPPPAPATASASAGTTNTATTAGPAPGGPAQPPPTPQPSMADLQFSQLLGNLLGPAGPGAGGSGVASPTITVAMPGVPAFLQGMTDFLQATQTAPPPPPPPPPPPPAPEQQTMPPPGSPSGGAGSPGGLGLESLSPEFFTSVVQGVLSSLLGSLGARAGSSESIAAFIQRLSGSSNIFEPGADGALGFFGALLSLLCQNFSMVDVVMLLHGHFQPLQRLQPQLRSFFHQHYLGGQEPTPSNIRMATHTLITGLEEYVRESFSLVQVQPGVDIIRTNLEFLQEQFNSIAAHVLHCTDSGFGARLLELCNQGLFECLALNLHCLGGQQMELAAVINGRIRRMSRGVNPSLVSWLTTMMGLRLQVVLEHMPVGPDAILRYVRRVGDPPQPLPEEPMEVQGAERASPEPQRENASPAPGTTAEEAMSRGPPPAPEGGSRDEQDGASAETEPWAAAVPPEWVPIIQQDIQSQRKVKPQPPLSDAYLSGMPAKRRKLRSDIQKRLQEDPNYSPQRFPNAQRAFADDP

SEQ ID NO: 23521 - protein, 949 aa, Homo sapiens
LGLRTFSSCPTKVKLGDLGGAGSIASRSPNTIGETEVAVGGRDLSAMEPNDSTSTAVEEPDSLEVLVKTLDSQTRTFIVGAQMNVKEFKEHIAASVSIPSEKQRLIYQGRVLQDDKKLQEYNVGGKVIHLVERAPPQTHLPSGASSGTGSASATHGGGSPPGTRGPGASVHDRNANSYVMVGTFNLPSDGSAVDVHINMEQAPIQSEPRVRLVMAQHMIRDIQTLLSRMECRGGPQPQHSQPPPQPPAVTPEPVALSSQTSEPVESEAPPREPMEAEEVEERAPAQNPELTPGPAPAGPTPAPETNAPNHPSPAEYVEVLQELQRLESRLQPFLQRYYEVLGAAATTDYNNNHEGREEDQRLINLVGESLRLLGNTFVALSDLRCNLACTPPRHLHVVRPMSHYTTPMVLQQAAIPIQINVGTTVTMTGNGTRPPPTPNAEAPPPGPGQASSVAPSSTNVESSAEGAPPPGPAPPPATSHPRVIRISHQSVEPVVMMHMNIQDSGTQPGGVPSAPTGPLGPPGHGQTLGQQVPGFPTAPTRVVIARPTPPQARPSHPGGPPVSGTLGAGLGTNASLAQMVSGLVGQLLMQPVLVAQGTPGSPGGLGLESLSPEFFTSVVQGVLSSLLGSLGARAGSSESIAAFIQRLSGSSNIFEPGADGALGFFGALLSLLCQNFSMVDVVMLLHGHFQPLQRLQPQLRSFFHQHYLGGQEPTPSNIRMATHTLITGLEEYVRESFSLVQVQPGVDIIRTNLEFLQEQFNSIAAHVLHCTDSGFGARLLELCNQGLFECLALNLHCLGGQQMELAAVINGRIRRMSRGVNPSLVSWLTTMMGLRLQVVLEHMPVGPDAILRYVRRVGDPPQPLPEEPMEVQGAERASPEPQEWVPIIQQDIQSQRKVKPQPPLSDAYLSGMPAKRRKLRSDIQKRLQEDPNYSPQRFPNAQRAFADDP

SEQ ID NO: 23522 - protein, 77 aa, Homo sapiens
LILGSLCYLVSQSLVQVQPGVDIIRTNLEFLQEQFNSIAAHVLHCTGQGLARRGQVGPVACAGLPRASIPSLYFAHR

SEQ ID NO: 23523 - protein, 59 aa, Homo sapiens
LPFVFLSLCPGIRRGMGTGVNVCVCRRNFLGIGAGINARESFGYTLVWATAGLPSFVLL

SEQ ID NO: 23524 - protein, 198 aa, Homo sapiens
MLPIGVLVMVGFTVGKVPVPDIRTCHFCLVEDPSVGCISGSEKCTISSSSLCMVITIYYDVKVRFIVRGCGQYISYRCQEKRNTYFAEYWYQAQCCQYDYCNSWSSPQLQSSLPEPHDRPLALPLSDSQIQWFYQALNLSLPLPNFHAGTEPDGLDPMVTLSLNLGLSFAELRRMYLFLNSSGLLVLPQAGLLTPHPS

SEQ ID NO: 23525 - protein, 38 aa, Homo sapiens
LGYLSLSKVVPFSHYAGTLLLLLAGVACLREAACQLQL

SEQ ID NO: 23526 - protein, 167 aa, Homo sapiens
MAVFLQLLPLLLSRAQGNPGASLDGRPGDRVNLSCGGVSHPIRWVWAPSFPACKGLSKGRRPILWASSSGTPTVPPLQPFVGRLRSLDSGIRRLELLLSAGDSGTFFCKGRHEDESRTVLHVLGDRTYCKAPGPTHGSVYPQLLIPLLGAGLVLGLGALGLVWWLHR

SEQ ID NO: 23527 - protein, 225 aa, Homo sapiens
MAVFLQLLPLLLSRAQGNPGASLDGRPGDRVNLSCGGVSHPIRWVWAPSFPACKGLSKGRRPILWASSSGTPTVPPLQPFVGRLRSLDSGIRRLELLLSAGDSGTFFCKGRHEDESRTVLHVLGDRTYCKAPGPTHGSVYPQLLIPLLGAGLVLGLGALGLVWWLHRRLPPQPIRPLPRFGETNSTPFSFSYMPTPHPSIPESEPLLGADTLVTFSPSFSSVPPT

SEQ ID NO: 23528 - protein, 161 aa, Homo sapiens
VDGMGTPGEGLGRCSHALIRGVPESLASGEGAGAGLPALDLAKAQREHGVLGGKLRQRLGLQLLELPPEESLPLGPLLGDTAVIQGDTALITRPWSPARRPEVDGVRKALQDLGLRIVEIGDENATLDGTDVLFTGEAGGRHRSWHREVEFGRLGRLEPCF

SEQ ID NO: 23529 - protein, 508 aa, Homo sapiens
MWPVLLFVFLSQTVYSALGLRDACRSLPQSIQLFRDIAQEFSDDLHHIASLIGKVVDFEGSLAENRFTVLPNIDPEIDEKKRRLMGLPSFLTEVARKELENLDSRIPSCSVIYIPLIGFLLSIPRLPSMVEASDFEINGLDFMFLSEEKLHYRSARTKELDALLGDLHCEIRDQETLLMYQLQCQVLARAAVLTRVLDLASRLDVLLALASAARDYGYSRPRYSPQVLGVRIQNGRHPLMELCARTFVPNSTECGGDKGRVKVITGPNSSGKSIYLKQVGLITFMALVGSFVPAEEAEIGAVDAIFTRIHSCESISLGLSTFMIDLNQVAKAVNNATAQSLVLIDEFGKGTNTVDGLALLAAVLRHWLARGPTCPHIFVATNFLSLVQLQLLPQGPLVQYLTMETCEDGNDLVFFYQVCEGVAKASHASHTAAQAGLPDKLVARGKEVSDLIRSGKPIKPVKDLLKKNQMENCQTLVDKFMKLDLEDPNLDLNVFMSQEVLPAATSIL

SEQ ID NO: 23530 - protein, 16 aa, Homo sapiens
LSLFLLRFFHFVRTFS

SEQ ID NO: 23531 - protein, 709 aa, Homo sapiens
LRSCCDSPLPFSRVTPVVPRLPRANLCGCRHRRVEFPASGRTELFSRIQCSVSSPQSQSGADREQGTGMAKAAAIGIDLGTTYSCVGVFQHGKVEIIANDQGNRTTPSYVAFTDTERLIGDAAKNQVALNPQNTVFDAKRLIGRKFGDPVVQSDMKHWPFQVINDGDKPKVQVSYKGETKAFYPEEISSMVLTKMKEIAEAYLGYPVTNAVITVPAYFNDSQRQATKDAGVIAGLNVLRIINEPTAAAIAYGLDRTGKGERNVLIFDLGGGTFDVSILTIDDGIFEVKATAGDTHLGGEDFDNRLVNHFVEEFKRKHKKDISQNKRAVRRLRTACERAKRTLSSSTQASLEIDSLFEGIDFYTSITRARFEELCSDLFRSTLEPVEKALRDAKLDKAQIHDLVLVGGSTRIPKVQKLLQDFFNGRDLNKSINPDEAVAYGAAVQAAILMGDKSENVQDLLLLDVAPLSLGLETAGGVMTALIKRNSTIPTKQTQIFTTYSDNQPGVLIQVYEGERAMTKDNNLLGRFELSGIPPAPRGVPQIEVTFDIDANGILNVTATDKSTGKANKITITNDKGRLSKEEIERMVQEAEKYKAEDEVQRERVSAKNALESYAFNMKSAVEDEGLKGKISEADKKKVLDKCQEVISWLDANTLAEKDEFEHKRKELEQVCNPIISGLYQGAGGPGPGGFGAQGPKGGSGSGPTIEEVD

SEQ ID NO: 23532 - protein, 18 aa, Homo sapiens
MSFLLQLFAASLLCKVVT

SEQ ID NO: 23533 - protein, 27 aa, Homo sapiens
MNICRVSMVLSMHIFVSVFLMYPCEPG

SEQ ID NO: 23534 - protein, 91 aa, Homo sapiens
LSFLASVLQGPRARHAWAQVWRLCPHLVLAGHCPNPGISLGAVRTGFRFGHGDKVRYRCSSNLVLTGSSERECQGNGVWSGTEPICRHLQL

SEQ ID NO: 23535 - protein, 124 aa, Homo sapiens
LSFLASVLQGPRARHAWAQVWRLCPHLVLAGHCPNPGISLGAVRTGFRFGHGDKVRYRCSSNLVLTGSSERECQGNGVWSGTEPICRQPYSYDFPEDVAPALGTSFSHMLGATNPTQKTKDLQL

SEQ ID NO: 23536 - protein, 344 aa, Homo sapiens
MMNNQMRLLGMETMAWQEIRHAIILLTDGKSNMGGSPKTAVDHIREILNINQKRNDYLDIYAIGVGKLDVDWRELNELGSKKDGERHAFILQDTKALHQVFEHMLDVSKLTDTICGVGNMSANASDQERTPWHVTIKPKSQETCRGALISDQWVLTAAHCFRDGNDHSLWRVNVGDPKSQWGKEFLIEKAVISPGFDVFAKKNQGILEFYGDDIALLKLAQKVKMSTHARPICLPCTMEANLALRRPQGSTCRDHENELLNKQSVPAHFVALNGSKLNINLKMGVEWTSCAEVVSQEKTMFPNLTDVREVVTDQFLCSGTQEDESPCKGGSGELGSLQPLPWLC

SEQ ID NO: 23537 - protein, 65 aa, Homo sapiens
MRVPARVGLVSWGLYNPCLGSADKNSRKRAPRSKVPPPRDFHINLFRMQPWLRQHLGDVLNFLPL

SEQ ID NO: 23538 - protein, 621 aa, Homo sapiens
MGSNLSPQLCLMPFILGLLSGGVTTTPWSLARPQGSCSLEGVEIKGGSFRLLQEGQALEYVCPSGFYPYPVQTRTCRSTGSWSTLKTQDQKTVRKAECRAIHCPRPHDFENGEYWPRSPYYNVSDEISFHCYDGYTLRGSANRTCQVNGRWSGQTAICDNGAGYCSNPGIPIGTRKVGSQYRLEDSVTYHCSRGLTLRGSQRRTCQEGGSWSGTEPSCQDSFMYDTPQEVAEAFLSSLTETIEGVDAEDGHGPGEQQKRKIVLDPSGSMNIYLVLDGSDSIGASNFTGAKKCLVNLIEKVASYGVKPRYGLVTYATYPKIWVKVSEADSSNADWVTKQLNEINYEDHKLKSGTNTKKALQAVYSMMSWPDDVPPEGWNRTRHVIILMTDGLHNMGGDPITVIDEIRDLLYIGKDRKNPREDYLDVYVFGVGPLVNQVNINALASKKDNEQHVFKVKDMENLEDVFYQMIDESQSLSLCGMVWEHRKGTDYHKQPWQAKISVIRPSKGHESCMGAVVSEYFVLTAAHCFTVDDKEHSIKVSVGKDATEGPGLHLCSPGNTSHFLQILHSTHPQCSPIPCTPDQSGMGEDVKLGMTRGQRQEAAHKEVVPTLLLQEGRSGTWR

SEQ ID NO: 23539 - protein, 166 aa, Homo sapiens
LLSTLLTGPQASVLTSMSHTSAAGYCSNPGIPIGTRKVGSQYRLEDSVTYHCSRGLTLRGSQRRTCQEGGSWSGTEPSCQDSFMYDTPQEVAEAFLSSLTETIEGVDAEDGHGPGEQQKRKIVLDPSGSMNIYLVLDGSDSIGASNFTGAKKCLVNLIEKVESSYP

SEQ ID NO: 23540 - protein, 183 aa, Homo sapiens
LAQNLALEGLRGHLLSDKGNGEMTVVGAAEVTQSIRPEEELLPAQDIKALFVSEEEKKLTRKEVYIKNGDKKGSCERDAQYAPGYDKVKDISEVVTPRFLCTGGVSPYADPNTCRGDSGGPLIVHKRSRFIQVGVISWGVVDVCKNQKRQKQVPAHARDFHINLFQVLPWLKEKLQDEDLGFL

SEQ ID NO: 23541 - protein, 61 aa, Homo sapiens [sequence omitted]

SEQ ID NO: 23542 - protein, 80 aa, Homo sapiens [sequence omitted]

SEQ ID NO: 23543 - protein, 435 aa, Homo sapiens
LRCSAGATLAPPPSLPFKPRGCPYPSEGRGVGCHRLSDGVDICPSLNHMVPKGATMLVIPPGLSEEEEALQKKFNKLKKKKKALLALKKQSSSSTTSQGGVKRSLSEQPVMDTATATEQAKQLVKSGAISAIKAETKNSGFKRSRTLEGKLKDPEKGPVPTFQPFQRSISADDDLQESSRRPQRKSLYESFVSSSDRLRELGPDGEEAEGPGAGDGPPRSFDWGYEERSGAHSSASPPRSRSRDRSHERNRDRDRDRERDRDRDRDRDRERDRDRDRDRDRDRERDRDRERDRDRDREGPFRRSDSFPERRAPRKGNTLYVYGEDMTPTLLRGAFSPFGNIIDLSMDPPRNCAFVTYEKMESADQAVAELNGTQVESVQLKVNIARKQPMLDAATGKSVWGSLAVQNSPKGCHRDKRTQIVYSDDVYKENLVDGF

SEQ ID NO: 23544 - protein, 83 aa, Homo sapiens
LRCSAGATLAPPPSLPFKPRGCPYPSEGRGVGCHRLSDGVDICPSLNHMVPKGAGVCDPWRQEGMLDDPDQRELGQQPGLSKG

SEQ ID NO: 23545 - protein, 1255 aa, Homo sapiens
LPGSCCGSRMMETERLVLPPPDPLDLPLRAVELGCTGHWELLNLPGAPESSLPHGLPPCAPDLQQEAEQLFLSSPAWLPLHGVEHSARKWQRKTDPWSLLAVLGAPVPSDLQAQRHPTTGQILGYKEVLLENTNLSATTSLSLRRPPGPASQSLWGNPTQYPFWPGGMDEPTITDLNTREEAEEEIDFEKDLLTIPPGFKKGMDFAPKDCPTPAPGLLSLSCMLEPLDLGGGDEDENEAVGQPGGPRGDTVSASPCSAPLARASSLEDLVLKEASTAVSTPEAPEPPSQEQWAIPVDATSPVGDFYRLIPQPAFQWAFEPDVFQKQAILHLERHDSVFVAAHTSAGKTVVAEYAIALAQKHMTRTIYTSPIKALSNQKFRDFRNTFGDVGLLTGDVQLHPEASCLIMTTEILRSMLYSGSDVIRDLEWVIFDEVHYINDVERGVVWEEVLIMLPDHVSIILLSATVPNALEFADWIGRLKRRQIYVISTVTRPVPLEHYLFTGNSSKTQGELFLLLDSRGAFHTKGYYAAVEAKKERMSKHAQTFGAKQPTHQGGPAQDRGVYLSLLASLRTRAQLPVVVFTFSRGRCDEQASGLTSLDLTTSSEKSEIHLFLQRCLARLRGSDRQLPQVLHMSELLNRGLGVHHSGILPILKEIVEMLFSRGLVKVLFATETFAMGVNMPARTVVFDSMRKHDGSTFRDLLPGEYVQMAGRAGRRGLDPTGTVILLCKGRVPEMADLHRMMMGKPSQLQSQFRLTYTMILNLLRVDALRVEDMMKRSFSEFPSRKDSKAHEQALAELTKRLGALEEPDMTGQLVDLPEYYSWGEELTETQHMIQRRIMESVNGLKSLSAGRVVVVKNQEHHNALGVILQVSSNSTSRVFTTLVLCDKPLSQDPQDRGPATAEVPYPDDLVGFKLFLPEGPCDHTVVKLQPGDMAAITTKVLRVNGEKILEDFSKRQQPKFKKDPPLAAVTTAVQELLRLAQAHPAGPPTLDPVNDLQLKDMSVVEGGLRARKLEELIQGAQCVHSPRFPAQYLKLRERMQIQKEMERLRFLLSDQSLLLLPEYHQRVEVLRTLGYVDEAGTVKLAGRVACAMSSHELLLTELMFDNALSTLRPEEIAALLSGLVCQSPGDAGDQLPNTLKQGIERVRAVAKRIGEVQVACGLNQTVEEFVGELNFGLVEVVYEWARGMPFSELAGLSGTPEGLVVRCIQRLAEMCRSLRGAARLVGEPVLGAKMETAATLLRRDIVFAASLYTQ

SEQ ID NO: 23546 - protein, 56 aa, Homo sapiens
LHLEDLEGGWVKGKERGRMRAWPRWRLRGLNVSRPEPGDQVARLVLNQSSFSRPPL

SEQ ID NO: 23547 - protein, 142 aa, Homo sapiens
MSWKRHHLIPETFGVKRRRKRGPVESDPLRGEPGSARAAVSELMQLFPRGLFEDALPPIVLRSQVYSLVPDRTVADRQLKELQEQGEIRIVQLGFDLDAHGIIFTEDYRTRASGECWSPHRPRCWELVASCAWSWEIHQVLC

SEQ ID NO: 23548 - protein, 100 aa, Homo sapiens
LELRGGGSEGLWSRILFGVSQKELQEQGEIRIVQLGFDLDAHGIIFTEDYRTRVLKACDGRPYAGAVQKFLASVLPACGDLSFQQDQMTQTFGFRDSEIT

SEQ ID NO: 23549 - protein, 196 aa, Homo sapiens
LELRGGGSEGLWSRILFGVSQKELQEQGEIRIVQLGFDLDAHGIIFTEDYRTRVLKACDGRPYAGAVQKFLASVLPACGDLSFQQDQMTQTFGFRDSEITHLVNAGVLTVRDAGSWWLAVPGAGRFIKYFVKGRQAVLSMVRKAKYRELLLSELLGRRAPVVVRLGLTYHVHDLIGAQLVDCISTTSGTLLRLPET

SEQ ID NO: 23550 - protein, 1749 aa, Homo sapiens
LDPPAMRLLWGLIWASSFFTLSLQKPRLLLFSPSVVHLGVPLSVGVQLQDVPRGQVVKGSVFLRNPSRNNVPCSPKVDFTLSSERDFALLSLQVPLKDAKSCGLHQLLRGPEVQLVAHSPWLKDSLSRTTNIQGINLLFSSRRGHLFLQTDQPIYNPGQRVRYRVFALDQKMRPSTDTITVMVENSHGLRVRKKEVYMPSSIFQDDFVIPDISEPGTWKISARFSDGLESNSSTQFEVKKYVLPNFEVKITPGKPYILTVPGHLDEMQLDIQARYIYGKPVQGVAYVRFGLLDEDGKKTFFRGLESQTKLVNGQSHISLSKAEFQDALEKLNMGITDLQGLRLYVAAAIIESPGGEMEEAELTSWYFVSSPFSLDLSKTKRHLVPGAPFLLQALVREMSGSPASGIPVKVSATVSSPGSVPEVQDIQQNTDGSGQVSIPIIIPQTISELQLSVSAGSPHPAIARLTVAAPPSGGPGFLSIERPDSRPPRVGDTLNLNLRAVGSGATFSHYYYMILSRGQIVFMNREPKRTLTSVSVFVDHHLAPSFYFVAFYYHGDHPVANSLRVDVQAGACEGKLELSVDGAKQYRNGESVKLHLETDSLALVALGALDTALYAAGSKSHKPLNMGKVFEAMNSYDLGCGPGGGDSALQVFQAAGLAFSDGDQWTLSRKRLSCPKEKTTRKKRNVNFQKAINEKLGQYASPTAKRCCQDGVTRLPMMRSCEQRAARVQQPDCREPFLSCCQFAESLRKKSRDKGQAGLQRALEILQEEDLIDEDDIPVRSFFPENWLWRVETVDRFQILTLWLPDSLTTWEIHGLSLSKTKGLCVATPVQLRVFREFHLHLRLPMSVRRFEQLELRPVLYNYLDKNLTVSVHVSPVEGLCLAGGGGLAQQVLVPAGSARPVAFSVVPTAAAAVSLKVVARGSFEFPVGDAVSKVLQIEKEGAIHREELVYELNPLDHRGRTLEIPGNSDPNMIPDGDFNSYVRVTASDPLDTLGSEGALSPGGVASLLRLPRGCGEQTMIYLAPTLAASRYLDKTEQWSTLPPETKDHAVDLIQKGYMRIQQFRKADGSYAAWLSRDSSTWLTAFVLKVLSLAQEQVGGSPEKLQETSNWLLSQQQADGSFQDPCPVLDRSMQGGLVGNDETVALTAFVTIALHHGLAVFQDEGAEPLKQRVEASISKANSFLGEKASAGLLGAHAAAITAYALTLTKAPVDLLGVAHNNLMAMAQETGDNLYWGSVTGSQSNAVSPTPAPRNPSDPMPQAPALWIETTAYALLHLLLHEGKAEMADQASAWLTRQGSFQGGFRSTQDTVIALDALSAYWIASHTTEERGLNVTLSSTGRNGFKSHALQLNNRQIRGLEEELQFSLGSKINVKVGGNSKGTLKVLRTYNVLDMKNTTCQDLQIEVTVKGHVEYTMEANEDYEDYEYDELPAKDDPDAPLQPVTPLQLFEGRRNRRRREAPKVVEEQESRVHYTVCIWRNGKVGLSGMAIADVTLLSGFHALRADLEKLTSLSDRYVSHFETEGPHVLLYFDSVPTSRECVGFEAVQEVPVGLVQPASATLYDYYNPERRCSVFYGAPSKSRLLATLCSAEVCQCAEGKCPRQRRALERGLQDEDGYRMKFACYYPRVEYGFQVKVLREDSRAAFRLFETKITQVLHFTKDVKAAANQMRNFLVRASCRLRLEPGKEYLIMGLDGATYDLEGHPQYLLDSNSWIEEMPSERLCRSTRQRAACAQLNDFLQEYGTQGCQV

SEQ ID NO: 23551 - protein, 1703 aa, Homo sapiens
LDPPAMRLLWGLIWASSFFTLSLQKPRLLLFSPSVVHLGVPLSVGVQLQDVPRGQVVKGSVFLRNPSRNNVPCSPKVDFTLSSERDFALLSLQVPLKDAKSCGLHQLLRGPEVQLVAHSPWLKDSLSRTTNIQGINLLFSSRRGHLFLQTDQPIYNPGQRVRYRVFALDQKMRPSTDTITVMVENSHGLRVRKKEVYMPSSIFQDDFVIPDISEPGTWKISARFSDGLESNSSTQFEVKKYVLPNFEVKITPGKPYILTVPGHLDEMQLDIQARYIYGKPVQGVAYVRFGLLDEDGKKTFFRGLESQTKLVNGQSHISLSKAEFQDALEKLNMGITDLQGLRLYVAAAIIESPGGEMEEAELTSWYFVSSPFSLDLSKTKRHLVPGAPFLLQALVREMSGSPASGIPVKVSATVSSPGSVPEVQDIQQNTDGSGQVSIPIIIPQTISELQLSVSAGSPHPAIARLTVAAPPSGGPGFLSIERPDSRPPRVGDTLNLNLRAVGSGATFSHYYYMILSRGQIVFMNREPKRTLTSVSVFVDHHLAPSFYFVAFYYHGDHPVANSLRVDVQAGACEGKLELSVDGAKQYRNGESVKLHLETDSLALVALGALDTALYAAGSKSHKPLNMGKVFEAMNSYDLGCGPGGGDSALQVFQAAGLAFSDGDQWTLSRKRLSCPKEKTTRKKRNVNFQKAINEKLGQYASPTAKRCCQDGVTRLPMMRSCEQRAARVQQPDCREPFLSCCQFAESLRKKSRDKGQAGLQRALEILQEEDLIDEDDIPVRSFFPENWLWRVETVDRFQILTLWLPDSLTTWEIHGLSLSKTKGLCVATPVQLRVFREFHLHLRLPMSVRRFEQLELRPVLYNYLDKNLTVSVHVSPVEGLCLAGGGGLAQQVLVPAGSARPVAFSVVPTAAAAVSLKVVARGSFEFPVGDAVSKVLQIEKEGAIHREELVYELNPLDHRGRTLEIPGNSDPNMIPDGDFNSYVRVTASDPLDTLGSEGALSPGGVASLLRLPRGCGEQTMIYLAPTLAASRYLDKTEQWSTLPPETKDHAVDLIQKGYMRIQQFRKADGSYAAWLSRDSSTWLTAFVLKVLSLAQEQVGGSPEKLQETSNWLLSQQQADGSFQDPCPVLDRSMQGGLVGNDETVALTAFVTIALHHGLAVFQDEGAEPLKQRVEASISKANSFLGEKASAGLLGAHAAAITAYALTLTKAPVDLLGVAHNNLMAMAQETGDNLYWGSVTGSQSNAVSPTPAPRNPSDPMPQAPALWIETTAYALLHLLLHEGKAEMADQASAWLTRQGSFQGGFRSTQDTVIALDALSAYWIASHTTEERGLNVTLSSTGRNGFKSHALQLNNRQIRGLEEELQFSLGSKINVKVGGNSKGTLKVLRTYNVLDMKNTTCQDLQIEVTVKGHVEYTMEANEDYEDYEYDELPAKDDPDAPLQPVTPLQLFEGRRNRRRREAPKLTSLSDRYVSHFETEGPHVLLYFDSVPTSRECVGFEAVQEVPVGLVQPASATLYDYYNPERRCSVFYGAPSKSRLLATLCSAEVCQCAEGKCPRQRRALERGLQDEDGYRMKFACYYPRVEYGFQVKVLREDSRAAFRLFETKITQVLHFTKDVKAAANQMRNFLVRASCRLRLEPGKEYLIMGLDGATYDLEGHPQYLLDSNSWIEEMPSERLCRSTRQRAACAQLNDFLQEYGTQGCQV

SEQ ID NO: 23552 - protein, 67 aa, Homo sapiens
LLFSSRRGHLFLQTDQPIYNPGQRVRYRVFALDQKMRPSTDTITVMVEVSPRPLAFLILATDVTSCL

SEQ ID NO: 23553 - protein, 32 aa, Homo sapiens
LQNSHGLRVRKKEVYMPSSIFQDDFVIPDISE

SEQ ID NO: 23554 - protein, 439 aa, Homo sapiens
LDAPTIPGGQLQSLLPAGGRRGASECAGGRPGPDPETPVPDGPTQLRALNLTEGFAVLHWKPPQNPVDTYDVQVTAPGAPPLQAETPGSAVDYPLHDLVLHTNYTATVRGLRGPNLTSPASITFTTGLEAPRDLEAKEVTPRTALLTWTEPPVRPAGYLLSFHTPGGQNQEILLPGGITSHQLLGLFPSTSYNARLQAMWGQSLLPPVSTSFTTGGLRIPFPRDCGEEMQNGAGASRTSTIFLNGNRERPLNVFWDMETDGGGWLVFQRRMDGQTDFWRDWEDYAHGFGNISGEFWLGNEALHSLTQAGDYSMRVDLRAGDEAVFAQYDSFHVDSAAEYYRLHLEGYHGTAGDSMSYHSGSVFSARDRDPNSLLISCAVSYRGAWWYRNCHYANLNGLYGSTVDHQGVSWYHWKGFEFSVPFTEMKLRPRNFRSPAGGG

SEQ ID NO: 23555 - protein, 263 aa, Homo sapiens
VLTVTDTTPDSMRLSWSVAQGPFDSFVVQYEDTNGQPQALLVDGDQSKILISGLEPSTRYRFLLYGLHEGKRLGPLSAEGTTGLAPAGQTSEESRPRLSQLSVTDVTTSSLRLNWEAPPGAFDSFLLRFGVPSPSTLEPHPRPLLQRELMVPGTRHSAVLRDLRSGTLYSLTLYGLRGPHKADSIQGTARTLSPVLESPRDLQFSEIRETSAKVNWMPPPSRADSFKVSYQLADGGEPQSVQVDGRARTQKLQFLTVPHSCVH

SEQ ID NO: 23556 - protein, 1749 aa, Homo sapiens
LDPPAMRLLWGLIWASSFFTLSLQKPRLLLFSPSVVHLGVPLSVGVQLQDVPRGQVVKGSVFLRNPSRNNVPCSPKVDFTLSSERDFALLSLQVPLKDAKSCGLHQLLRGPEVQLVAHSPWLKDSLSRTTNIQGINLLFSSRRGHLFLQTDQPIYNPGQRVRYRVFALDQKMRPSTDTITVMVENSHGLRVRKKEVYMPSSIFQDDFVIPDISEPGTWKISARFSDGLESNSSTQFEVKKYVLPNFEVKITPGKPYILTVPGHLDEMQLDIQARYIYGKPVQGVAYVRFGLLDEDGKKTFFRGLESQTKLVNGQSHISLSKAEFQDALEKLNMGITDLQGLRLYVAAAIIESPGGEMEEAELTSWYFVSSPFSLDLSKTKRHLVPGAPFLLQALVREMSGSPASGIPVKVSATVSSPGSVPEVQDIQQNTDGSGQVSIPIIIPQTISELQLSVSAGSPHPAIARLTVAAPPSGGPGFLSIERPDSRPPRVGDTLNLNLRAVGSGATFSHYYYMILSRGQIVFMNREPKRTLTSVSVFVDHHLAPSFYFVAFYYHGDHPVANSLRVDVQAGACEGKLELSVDGAKQYRNGESVKLHLETDSLALVALGALDTALYAAGSKSHKPLNMGKVFEAMNSYDLGCGPGGGDSALQVFQAAGLAFSDGDQWTLSRKRLSCPKEKTTRKKRNVNFQKAINEKLGQYASPTAKRCCQDGVTRLPMMRSCEQRAARVQQPDCREPFLSCCQFAESLRKKSRDKGQAGLQRALEILQEEDLIDEDDIPVRSFFPENWLWRVETVDRFQILTLWLPDSLTTWEIHGLSLSKTKGLCVATPVQLRVFREFHLHLRLPMSVRRFEQLELRPVLYNYLDKNLTVSVHVSPVEGLCLAGGGGLAQQVLVPAGSARPVAFSVVPTAATAVSLKVVARGSFEFPVGDAVSKVLQIEKEGAIHREELVYELNPLDHRGRTLEIPGNSDPNMIPDGDFNSYVRVTASDPLDTLGSEGALSPGGVASLLRLPRGCGEQTMIYLAPTLAASRYLDKTEQWSTLPPETKDHAVDLIQKGYMRIQQFRKADGSYAAWLSRGSSTWLTAFVLKVLSLAQEQVGGSPEKLQETSNWLLSQQQADGSFQDLSPVIHRSMQGGLVGNDETVALTAFVTIALHHGLAVFQDEGAEPLKQRVEASISKASSFLGEKASAGLLGAHAAAITAYALTLTKAPADLRGVAHNNLMAMAQETGDNLYWGSVTGSQSNAVSPTPAPRNPSDPMPQAPALWIETTAYALLHLLLHEGKAEMADQAAAWLTRQGSFQGGFRSTQDTVIALDALSAYWIASHTTEERGLNVTLSSTGRNGFKSHALQLNNRQIRGLEEELQFSLGSKINVKVGGNSKGTLKVLRTYNVLDMKNTTCQDLQIEVTVKGHVEYTMEANEDYEDYEYDELPAKDDPDAPLQPVTPLQLFEGRRNRRRREAPKVVEEQESRVHYTVCIWRNGKVGLSGMAIADVTLLSGFHALRADLEKLTSLSDRYVSHFETEGPHVLLYFDSVPTSRECVGFEAVQEVPVGLVQPASATLYDYYNPERRCSVFYGAPSKSRLLATLCSAEVCQCAEGKCPRQRRALERGLQDEDGYRMKFACYYPRVEYGFQVKVLREDSRAAFRLFETKITQVLHFTKDVKAAANQMRNFLVRASCRLRLEPGKEYLIMGLDGATYDLEGHPQYLLDSNSWIEEMPSERLCRSTRQRAACAQLNDFLQEYGTQGCQV

SEQ ID NO: 23557 - protein, 156 aa, Homo sapiens
LKVLRTYNVLDMKNTTCQDLQIEVTVKGHVEYTMEANEDYEDYEYDELPAKDDPDAPLQPVTPLQLFEGRRNRRRREAPKVVEEQESRVHYTVCIWRNGKVGLSGMAIADVTLLSGFHALRADLEKLTSLSDRYVSHFETEGPHVLLYFDSVSGER

SEQ ID NO: 23558 - protein, 155 aa, Homo sapiens
VTVKGHVEYTMEANEDYEDYEYDELPAKDDPDAPLQPVTPLQLFEGRRNRRRREAPKVVEEQESRVHYTVCIWWAPGAALGQGREGRTQAGAGLLEPAQAEPGRQLTRLHRRNGKVGLSGMAIADVTLLSGFHALRADLEKVWSATQGNPLCPRY

SEQ ID NO: 23559 - protein, 228 aa, Homo sapiens
VGPSSLLPTLGQVPTSRECVGFEAVQEVPVGLVQPASATLYDYYNPERRCSVFYGAPSKSRLLATLCSAEVCQCAEGKCPRQRRALERGLQDEDGYRMKFACYYPRVEYGFQVKVLREDSRAAFRLFETKITQVLHFTKDVKAAANQMRNFLVRASCRLRLEPGKEYLIMGLDGATYDLEGHPQYLLDSNSWIEEMPSERLCRSTRQRAACAQLNDFLQEYGTQGCQV

SEQ ID NO: 23560 - protein, 142 aa, Homo sapiens
LGLRRQNGGACALTPLCSPERRCSVFYGAPSKSRLLATLCSAEVCQCAEGKCPRQRRALERGLQDEDGYRMKFACYYPRVEYGQSSHRGPGLTLPRGPAVLVSLGVACSSYRSCTQPVCSDTNFLPSQPQSNSPFPLLLTPS

SEQ ID NO: 23561 - protein, 842 aa, Homo sapiens
LSLGLHWRDHFPEPHTSGRLPGLRQRQHVTKSFPSSLCTAPLEKELPPHLGELTVAEETSSSLRLSWTVAQGPFDSFVVQYRDTDGQPRAVPVAADQRTVTVEDLEPGKKYKFLLYGLLGGKRLGPVSALGMTAPEEDTPAPELAPEAPEPPEEPRLGVLTVTDTTPDSMRLSWSVAQGPFDSFVVQYEDTNGQPQALLVDGDQSKILISGLEPSTPYRFLLYGLHEGKRLGPLSAEGTTGLAPAGQTSEESRPRLSQLSVTDVTTSSLRLNWEAPPGAFDSFLLRFGVPSPSTLEPHPRPLLQRELMVPGTRHSAVLRDLRSGTLYSLTLYGLRGPHKADSIQGTARTLSPVLESPRDLQFSEIRETSAKVNWMPPPSRADSFKVSYQLADGGEPQSVQVDGQARTQKLQGLIPGARYEVTVVSVRGFEESEPLTGFLTTVPDGPTQLRALNLTEGFAVLHWKPPQNPVDTYDVQVTAPGAPPLQAETPGSAVDYPLHDLVLHTNYTATVRGLRGPNLTSPASITFTTGLEAPRDLEAKEVTPRTALLTWTEPPVRPAGYLLSFHTPGGQNQEILLPGGITSHQLLGLFPSTSYNARLQAMWGQSLLPPVSTSFTTGGLRIPFPRDCGEEMQNGAGASRTSTIFLNGNRERPLNVFCDMETDGGGWLVFQRRMDGQTDFWRDWEDYAHGFGNISGEFWLGNEALHSLTQAGDYSMRVDLRAGDEAVFAQYDSFHVDSAAEYYRLHLEGYHGTAGDSMSYHSGSVFSARDRDPNSLLISCAVSYRGAWWYRNCHYANLNGLYGSTVDHQGVSWYHWKGFEFSVPFTEMKLRPRNFRSPAGGG

SEQ ID NO: 23562 - protein, 152 aa, Homo sapiens [sequence omitted]

SEQ ID NO: 23563 - protein, 711 aa, Homo sapiens
LVGGWGGKMAELMLLSEIADPTRFFTDNLLSPEDWGLQNSTLYSGLDEVAEEQTQLFRCPEQDVPFDGSSLDVGMDVSPSEPPWELLPIFPDLQVKSEPSSPCSSSSLSSESSRLSTEPSSEALGVGEVLHVKTESLAPPLCLLGDDPTSSFETVQINVIPTSDDSSDVQTKIEPVSPCSSVNSEASLLSADSSSQAFIGEEVLEVKTESLSPSGCLLWDVPAPSLGAVQISMGPSLDGSSGKALPTRKPPLQPKPVVLTTVPMPSRAVPPSTTVLLQSLVQPPPVSPVVLIQGAIRVQPEGPAPSLPRPERKSIVPAPMPGNSCPPEVDAKLLKRQQRMIKNRESACQSRRKKKEYLQGLEARLQAVLADNQQLRRENAALRRRLEALLAENSELKLGSGNRKVVCIMVFLLFIAFNFGPVSISEPPSAPISPRMNKGEPQPRRHLLGFSEQEPVQGVEPLQGSSQGPKEPQPSPTDQPSFSNLTAFPGGAKELLLRDLDQLFLSSDCRHFNRTESLRLADELSGWVQRHQRGRRKIPQRAQERQKSQPRKKSPPVKAVPIQPPGPPERDSVGQLQLYRHPDRSQPAFLDAIDRREDTFYVVSFRRDHLLLPAISHNKTSRPKMSLVMPAMAPNETLSGRGAPGDYEEMMQIECEVMDTRVIHIKTSTVPPSLRKQPSPTPGNATGGPLPVSAASQAHQASHQPLYLNHP

SEQ ID NO: 23564 - protein, 708 aa, Homo sapiens
LVGGWGGKMAELMLLSEIADPTRFFTDNLLSPEDWDSTLYSGLDEVAEEQTQLFRCPEQDVPFDGSSLDVGMDVSPSEPPWELLPIFPDLQVKSEPSSPCSSSSLSSESSRLSTEPSSEALGVGEVLHVKTESLAPPLCLLGDDPTSSFETVQINVIPTSDDSSDVQTKIEPVSPCSSVNSEASLLSADSSSQAFIGEEVLEVKTESLSPSGCLLWDVPAPSLGAVQISMGPSLDGSSGKALPTRKPPLQPKPVVLTTVPMPSRAVPPSTTVLLQSLVQPPPVSPVVLIQGAIRVQPEGPAPSLPRPERKSIVPAPMPGNSCPPEVDAKLLKRQQRMIKNRESACQSRRKKKEYLQGLEARLQAVLADNQQLRRENAALRRRLEALLAENSELKLGSGNRKVVCIMVFLLFIAFNFGPVSISEPPSAPISPRMNKGEPQPRRHLLGFSEQEPVQGVEPLQGSSQGPKEPQPSPTDQPSFSNLTAFPGGAKELLLRDLDQLFLSSDCRHFNRTESLRLADELSGWVQRHQRGRRKIPQRAQERQKSQPRKKSPPVKAVPIQPPGPPERDSVGQLQLYRHPDRSQPAFLDAIDRREDTFYVVSFRRDHLLLPAISHNKTSRPKMSLVMPAMAPNETLSGRGAPGDYEEMMQIECEVMDTRVIHIKTSTVPPSLRKQPSPTPGNATGGPLPVSAASQAHQASHQPLYLNHP

SEQ ID NO: 23565 - protein, 16 aa, Homo sapiens
LGLVSARASVLLCSLC

SEQ ID NO: 23566 - protein, 100 aa, Homo sapiens
LAYIITTILLLSTLTIAAASLLGFSPPVLPPFSASFSNCCLYPDPHHDDLYLNASSFLALINGERDHPNATVWRKNFLRVGHLVLIGGPDDGVITPWQSR

SEQ ID NO: 23567 - protein, 31 aa, Homo sapiens
LWAWPSLISALALLYRSRRRYSWRRGKERWK

SEQ ID NO: 23568 - protein, 10 aa, Homo sapiens
LWLPQLLFLA

SEQ ID NO: 23569 - protein, 248 aa, Homo sapiens
MILNKALLLGALALTTVMSPCGGEDIVADHVASCGVNLYQFYGPSGQYTHEFDGDEQFYVDLERKETAWRWPEFSKFGGFDPQGALRNMAVAKHNLNIMIKRYNSTAATNEVPEVTVFSKSPVTLGQPNTLICLVDNIFPPVVNITWLSNGQSVTEGVSETSFLSKSDHSFFKISYLTFLPSADEIYDCKVEHWGLDQPLLKHWGKDEFHHFLILSCLSSSELPAFYSYIQKLVFHTSWVSFLSLFFF

SEQ ID NO: 23570 - protein, 155 aa, Homo sapiens
MSWKKALRIPGDLRVATVTLMLAMLSSLLAEGRDSPEDFVFQFKGMCYFTNGTERVRLVTRYIYNREEYARFDSDVGVYRAVTPQGRPDAEYWNSQKEVLEGTRAELDTVCRHNYEVAFRGILQRRGERRRPSVRPTLGRDPEFLCREGRWGRGL

SEQ ID NO: 23571 - protein, 217 aa, Homo sapiens
MGSGWVPWVVALLVNLTRLDSSMTQGTDSPEDFVIQAKADCYFTNGTEKVQFVVRFIFNLEEYVRFDSDVGMFVALTKLGQPDAEQWNSRLDLLERSRQAVDGVCRHNYRLGAPFTVGRKVQPEVTVYPERTPLLHQHNLLHCSVTGFYPGDIKIKWFLNGQEERAGVMSTGPIRNGDWTFQTVVMLEMTPELGHVYTCLVDHSSLLSPVSVEWSEN

SEQ ID NO: 23572 - protein, 238 aa, Homo sapiens
LSQVGNQCPRRRGERCLAGMLRAGAPTGDLPRAGEVHTGTTIMAVEFDGGVVMGSDSRVSAGEAVVNRVFDKLSPLHERIYCALSGSAADAQAVADMAAYQLELHGIELEEPPLVLAAANVVRNISYKYREDLSAHLMVAGWDQREGGQVYGTLGGMLTRQPFAIGGSGSTFIYGYVDAAYKPGMSPEECRRFTTDAIALAMSRDGSSGGVIYLVTITAAGVDHRVILGNELPKFYDE

SEQ ID NO: 23573 - protein, 180 aa, Homo sapiens
LQTTIMAVEFDGGVVMGSDSRVSAGEAVVNRVFDKLSPLHERIYCALSGSAADAQAVADMAAYQLELHGIELEEPPLVLAAANVVRNISYKYREDLSAHLMVAGWDQREGGQVYGTLGGMLTRQPFAIGGSGSTFIYGYVDAAYKPGMSPEECRRFTTDGNQPSGRVPGEGFETWEGSRL

SEQ ID NO: 23574 - protein, 127 aa, Homo sapiens [sequence omitted]

SEQ ID NO: 23575 - protein, 143 aa, Homo sapiens
MITFLPLLLGLSLGCTGAGGFVAHVESTCLLDDAGTPKDFTYCISFNKDLLTCWDPEENKMAPCEFGVLNSLANVLSQHLNQKDTLMQRLRNGLQNCATHTQPFWGSLTNRTREERGVQRGYQEVQLGGQAREDPTVAQGFEI

SEQ ID NO: 23576 - protein, 61 aa, Homo sapiens
LIPAPHLKYFLVLFITLIFPPALVCTLCSFGGPKYLACSRHSELCIECDEFNRYQLIPTEY

SEQ ID NO: 23577 - protein, 133 aa, Homo sapiens
VGTYWKRLMKLLLLTTLFALRLPKKATKTAPPALPTGYDSEEEEESRPMSYDEKRQLSLDINKLPGEKLGRVVHIIQAREPSLRDSNPEEIEIDFETLKPSTLRELERYVLSCLRKKPRKPYSTYEMRFISWF

SEQ ID NO: 23578 - protein, 208 aa, Homo sapiens
VGTYWKRLMKLLLLTTLFALRLPKKATKTAPPALPTGYDSEEEEESRPMSYDEKRQLSLDINKLPGEKLGRVVHIIQAREPSLRDSNPEEIEIDFETLKPSTLRELERYVLSCLRKKPRKPYTIKKPVGKTKEELALEKKRELEKRLQDVSGQLNSTKKPPKKANEKTESSSAQQVAVSRLSASSSSSDSSSSSSSSSSSDTSDSDSG

SEQ ID NO: 23579 - protein, 67 aa, Homo sapiens
MALRAGLVLGFHTLMTLLSPQEAGATKGPAQCQNRTLSPHRTQDGAQAQGLNNHILWMRQTHFFLSP

SEQ ID NO: 23580 - protein, 140 aa, Homo sapiens
MRPEDRMFHIRAVILRALSLAFLLSLRGAGAIKADHVSTYAAFVQTHRPTGEFMFEFDEDEMFYVDLDKKETVWHLEEFGQAFSFEAQGGLANIAILNNNLNTLIQRSNHTQATNGTPYLCLFLCSPTGRDERASLPPSD

SEQ ID NO: 23581 - protein, 136 aa, Homo sapiens
LRGEKTGLERLCDPLRTTELENYLFQGRQECYAFNGTQRFLERYIYNREEFARFDSDVGEFRAVTELGRPAAEYWNSQKDILEEKRAVPDRMCRHNYELGGPMTLQRRGWSAVAPSWLTAASTSWAQVILLPQPPM

SEQ ID NO: 23582 - protein, 171 aa, Homo sapiens
LTAALFILPTFSNSMMILQVSGGPWTVALTALLMVLLISVVQSRATPENSVYQERQECYAFNGTQRVVDGLIYNREEYVHFDSAVGEFLAVMELGRPIGEYFNSQKDFMERKRAEVDKVCRHKYELMEPLIRQRRGDVTITAVRGCWTTILSGYFLLKRGVVSGGCSWGSS

SEQ ID NO: 23583 - protein, 145 aa, Homo sapiens
MMILQVSGGPWTVALTALLMVLLISVVQSRATPENSVYQERQECYAFNGTQRVVDGLIYNREEYVHFDSAVGEFLAVMELGRPIGEYFNSQKDFMERKRAEVDKVCRHKYELMEPLIRQRRVQPRVNISPPRRSPSSTTTCLSTT

SEQ ID NO: 23584 - protein, 1698 aa, Homo sapiens
LSLPAASDLPGTPASEAHSLLPVFCQPQGIQRLRPTWVPGTRRFGFSAMERCSRCHRLLLLLPLVLGLSAAPGWAGAPPVDVLRALRFPSLPDGVRRAKGICPADVAYRVARPAQLSAPTRQLFPGGFPKDFSLLTVVRTRPGLQAPLLTLYSAQGVRQLGLELGRPVRFLYEDQTGRPQPPSQPVFRGLSLADGKWHRVAVAVKGQSVTLIVDCKKRVTRPLPRSARPVLDTHGVIIFGARILDEEVFEGDVQELAIVPGVQAAYESCEQKELECEGGQRERPQNQQPHRAQRSPQQQPSRLHRPQNQEPQSQDPTPGEEEEILESSLLPPLEEAAHGPRGLKGEKGEPAVLEPGMLVEGPPGPEGPAGLIGPPGIQGNPGPVGDPGERGPPGRAGLPGSDGAPGPPGTSLMLPFRFGSGGGDKGPVVAAQEAQAQAILQQARLALRGPPGPMGYTGRPGPLGQPGSPGLKGESGDLGPQGPRGPQGLTGPPGKAGRRGRAGADGARGMPGDPGVKGDRGFDGLPGLPGEKGHRGDTGAQGLPGPPGEDGERGDDGEIGPRGLPGESGPRGLLGPKGPPGIPGPPGVRGMDGPQGPKGSLGPQGEPGPPGQQGTPGTQGLPGPQGAIGPHGEKGPQGKPGLPGMPGSDGPPGHPGKEGPPGTKGNQGPSGPQGPLGYPGPRGVKGVDGIRGLKGHKGEKGEDGFPGFKGDIGVKGDRGEVGVPGSRGEDGPEGPKGRTGPTGDPGPPGLMGEKGKLGVPGLPGYPGRQGPKGSLGFPGFPGASGEKGARGLSGKSGPRGERGPTGPRGQRGPRGATGKSGAKGTSGGDGPHGPPGERGLPGPQGPNGFPGPKGPPGPPGKDGLPGHPGQRGEVGFQGKTGPPGPPGVVGPQGAAGETGPMGERGHPGPPGPPGEQGLPGTAGKEGTKGDPGPPGAPGKDGPAGLRGFPGERGLPGTAGGPGLKGNEGPSGPPGPAGSPGERGAAGSGGPIGPPGRPGPQGPPGAAGEKGVPGEKGPIGPTGRDGVQGPVGLPGPAGPPGVAGEDGDKGEVGDPGQKGTKGNKGEHGPPGPPGPIGPVGQPGAAGADGEPGARGPQGHFGAKGDEGTRGFNGPPGPIGLQGLPGPSGEKGETGDVGPMGPPGPPGPRGPAGPNGADGPQGPPGGVGNLGPPGEKGEPGESGSPGIQGEPGVKGPRGERGEKGESGQPGEPGPPGPKGPTGDDGPKGNPGPVGFPGDPGPPGEGGPRGQDGAKGDRGEDGEPGQPGSPGPTGENGPPGPLGKRGPAGSPGSEGRQGGKGAKGDPGAIGAPGKTGPVGPAGPAGKPGPDGLRGLPGSVGQQGRPGATGQAGPPGPVGPPGLPGLRGDAGAKGEKGHPGLIGLIGPPGEQGEKGDRGLPGPQGSPGQKGEMGIPGASGPIGPGGPPGLPGPAGPKGAKGATGPGGPKGEKGVQGPPGHPGPPGEVIQPLPIQMPKKTRRSVDGSRLMQEDEAIPTGGAPGSPGGLEEIFGSLDSLREEIEQMRRPTGTQDSPARTCQDLKLCHPELPDGEYWVDPNQGCARDAFRVFCNFTAGGETCVTPRDDVTQFSYVDSEGSPVGVVQLTFLRLLSVSAHQDVSYPCSGAARDGPLRLRGANEDELSPETSPYVKEFRDGCQTQQGRTVLEVRTPVLEQLPVLDASFSDLGAPPRRGGVLLGPVCFMG

SEQ ID NO: 23585 - protein, 1784 aa, Homo sapiens
LSLPAASDLPGTPASEAHSLLPVFCQPQGIQRLRPTWVPGTRRFGFSAMERCSRCHRLLLLLPLVLGLSAAPGWAGAPPVDVLRALRFPSLPDGVRRAKGICPADVAYRVARPAQLSAPTRQLFPGGFPKDFSLLTVVRTRPGLQAPLLTLYSAQGVRQLGLELGRPVRFLYEDQTGRPQPPSQPVFRGLSLADGKWHRVAVAVKGQSVTLIVDCKKRVTRPLPRSARPVLDTHGVIIFGARILDEEVFEGDVQELAIVPGVQAAYESCEQKELECEGGQRERPQNQQPHRAQRSPQQQPSRLHRPQNQEPQSQPTESLYYDYEPPYYDVMTTGTTPDYQDPTPGEEEEILESSLLPPLEEEQTDLQVPPTADRFQAEEYGEGGTDPPEGPYDYTYGYGDDYREETELGPALSAETAHSGAAAHGPRGLKGEKGEPAVLEPGMLVEGPPGPEGPAGLIGPPGIQGNPGPVGDPGERGPPGRAGLPGSDGAPGPPGTSLMLPFRFGSGGGDKGPVVAAQEAQAQAILQQARLALRGPPGPMGYTGRPGPLGQPGSPGLKGESGDLGPQGPRGPQGLTGPPGKAGRRGRAGADGARGMPGDPGVKGDRGFDGLPGLPGEKGHRGDTGAQGLPGPPGEDGERGDDGEIGPRGLPGESGPRGLLGPKGPPGIPGPPGVRGMDGPQGPKGSLGPQGEPGPPGQQGTPGTQGLPGPQGAIGPHGEKGPQGKPGLPGMPGSDGPPGHPGKEGPPGTKGNQGPSGPQGPLGYPGPRGVKGVDGIRGLKGHKGEKGEDGFPGFKGDIGVKGDRGEVGVPGSRGEDGPEGPKGRTGPTGDPGPPGLMGEKGKLGVPGLPGYPGRQGPKGSLGFPGFPGASGEKGARGLSGKSGPRGERGPTGPRGQRGPRGATGKSGAKGTSGGDGPHGPPGERGLPGPQGPNGFPGPKGPPGPPGKDGLPGHPGQRGEVGFQGKTGPPGPPGVVGPQGAAGETGPMGERGHPGPPGPPGEQGLPGTAGKEGTKGDPGPPGAPGKDGPAGLRGFPGERGLPGTAGGPGLKGNEGPSGPPGPAGSPGERGAAGSGGPIGPPGRPGPQGPPGAAGEKGVPGEKGPIGPTGRDGVQGPVGLPGPAGPPGVAGEDGDKGEVGDPGQKGTKGNKGEHGPPGPPGPIGPVGQPGAAGADGEPGARGPQGHFGAKGDEGTRGFNGPPGPIGLQGLPGPSGEKGETGDVGPMGPPGPPGPRGPAGPNGADGPQGPPGGVGNLGPPGEKGEPGESGSPGIQGEPGVKGPRGERGEKGESGQPGEPGPPGPKGPTGDDGPKGNPGPVGFPGDPGPPGEGGPRGQDGAKGDRGEDGEPGQPGSPGPTGENGPPGPLGKRGPAGSPGSEGRQGGKGAKGDPGAIGAPGKTGPVGPAGPAGKPGPDGLRGLPGSVGQQGRPGATGQAGPPGPVGPPGLPGLRGDAGAKGEKGHPGLIGLIGPPGEQGEKGDRGLPGPQGSPGQKGEMGIPGASGPIGPGGPPGLPGPAGPKGAKGATGPGGPKGEKGVQGPPGHPGPPGEVIQPLPIQMPKKTRRSVDGSRLMQEDEAIPTGGAPGSPGGLEEIFGSLDSLREEIEQMRRPTGTQDSPARTCQDLKLCHPELPDGEYWVDPNQGCARDAFRVFCNFTAGGETCVTPRDDVTQFSYVDSEGSPVGVVQLTFLRLLSVSAHQDVSYPCSGAARDGPLRLRGANEDELSPETSPYVKEFRDGCQTQQGRTVLEVRTPVLEQLPVLDASFSDLGAPPRRGGVLLGPVCFMG

SEQ ID NO: 23586 - protein, 1677 aa, Homo sapiens
LSLPAASDLPGTPASEAHSLLPVFCQPQGIQRLRPTWVPGTRRFGFSAMERCSRCHRLLLLLPLVLGLSAAPGWAGAPPVDVLRALRFPSLPDGVRRAKGICPADVAYRVARPAQLSAPTRQLFPGGFPKDFSLLTVVRTRPGLQAPLLTLYSAQGVRQLGLELGRPVRFLYEDQTGRPQPPSQPVFRGLSLADGKWHRVAVAVKGQSVTLIVDCKKRVTRPLPRSARPVLDTHGVIIFGARILDEEVFEGDVQELAIVPGVQAAYESCEQKELECEGGQRERPQNQQPHRAQRSPQQQPSRLHRPQNQEPQSQAAHGPRGLKGEKGEPAVLEPGMLVEGPPGPEGPAGLIGPPGIQGNPGPVGDPGERGPPGRAGLPGSDGAPGPPGTSLMLPFRFGSGGGDKGPVVAAQEAQAQAILQQARLALRGPPGPMGYTGRPGPLGQPGSPGLKGESGDLGPQGPRGPQGLTGPPGKAGRRGRAGADGARGMPGDPGVKGDRGFDGLPGLPGEKGHRGDTGAQGLPGPPGEDGERGDDGEIGPRGLPGESGPRGLLGPKGPPGIPGPPGVRGMDGPQGPKGSLGPQGEPGPPGQQGTPGTQGLPGPQGAIGPHGEKGPQGKPGLPGMPGSDGPPGHPGKEGPPGTKGNQGPSGPQGPLGYPGPRGVKGVDGIRGLKGHKGEKGEDGFPGFKGDIGVKGDRGEVGVPGSRGEDGPEGPKGRTGPTGDPGPPGLMGEKGKLGVPGLPGYPGRQGPKGSLGFPGFPGASGEKGARGLSGKSGPRGERGPTGPRGQRGPRGATGKSGAKGTSGGDGPHGPPGERGLPGPQGPNGFPGPKGPPGPPGKDGLPGHPGQRGEVGFQGKTGPPGPPGVVGPQGAAGETGPMGERGHPGPPGPPGEQGLPGTAGKEGTKGDPGPPGAPGKDGPAGLRGFPGERGLPGTAGGPGLKGNEGPSGPPGPAGSPGERGAAGSGGPIGPPGRPGPQGPPGAAGEKGVPGEKGPIGPTGRDGVQGPVGLPGPAGPPGVAGEDGDKGEVGDPGQKGTKGNKGEHGPPGPPGPIGPVGQPGAAGADGEPGARGPQGHFGAKGDEGTRGFNGPPGPIGLQGLPGPSGEKGETGDVGPMGPPGPPGPRGPAGPNGADGPQGPPGGVGNLGPPGEKGEPGESGSPGIQGEPGVKGPRGERGEKGESGQPGEPGPPGPKGPTGDDGPKGNPGPVGFPGDPGPPGEGGPRGQDGAKGDRGEDGEPGQPGSPGPTGENGPPGPLGKRGPAGSPGSEGRQGGKGAKGDPGAIGAPGKTGPVGPAGPAGKPGPDGLRGLPGSVGQQGRPGATGQAGPPGPVGPPGLPGLRGDAGAKGEKGHPGLIGLIGPPGEQGEKGDRGLPGPQGSPGQKGEMGIPGASGPIGPGGPPGLPGPAGPKGAKGATGPGGPKGEKGVQGPPGHPGPPGEVIQPLPIQMPKKTRRSVDGSRLMQEDEAIPTGGAPGSPGGLEEIFGSLDSLREEIEQMRRPTGTQDSPARTCQDLKLCHPELPDGEYWVDPNQGCARDAFRVFCNFTAGGETCVTPRDDVTQFSYVDSEGSPVGVVQLTFLRLLSVSAHQDVSYPCSGAARDGPLRLRGANEDELSPETSPYVKEFRDGCQTQQGRTVLEVRTPVLEQLPVLDASFSDLGAPPRRGGVLLGPVCFMG

SEQ ID NO: 23587 - protein, 246 aa, Homo sapiens [sequence omitted]

SEQ ID NO: 23588 - protein, 489 aa, Homo sapiens
LCRYRVESSGVTASVPLVSVMARGLGAPHWVAVGLLTWATLGLLVAGLGGHDDLHDDLQEDFHGHSHRHSHEDFHHGHSHAHGHGHTHESIWHGHTHDHDHGHSHEDLHHGHSHGYSHESLYHRGHGHDHEHSHGGYGESGAPGIKQDLDAVTLWAYALGATVLISAAPFFVLFLIPVESNSPRHRSLLQILLSFASGGLLGDAFLHLIPHALEPHSHHTLEQPGHGHSHSGQGPILSVGLWVLSGIVAFLVVEKFVRHVKGGHGHSHGHGHAHSHTRGSHGHGRQERSTKEKQSSEEEEKETRGVQKRRGGSTVPKDGPVRPQNAEEEKRGLDLRVSGYLNLAADLAHNFTDGLAIGASFRGGRGLGILTTMTVLLHEVPHEVGDFAILVQSGCSKKQAMRLQLLTAVGALAGTACALLTEGGAVGSEIAGGAGPGWVLPFTAGGFIYVATVSVLPELLREASPLQSLLEVLGLLGGVIMMVLIAHLE

SEQ ID NO: 23589 - protein, 144 aa, Homo sapiens
MSLVIPEKFQHILRVLNTNIDGRRKIAFAITAIKGVGRRYAHVVLRKADIDLTKRAGELTEDEVERVITIMQNPRQYKIPDWFLNRQKDVKDGKYSQVCTEMRAGLEEGWRVLTELGIGGQGIKHPLPPPLNPGPSQWSGQQAP

SEQ ID NO: 23590 - protein, 106 aa, Homo sapiens [sequence omitted]

SEQ ID NO: 23591 - protein, 69 aa, Homo sapiens
LAWAGPSTGCTLLLVPLPLSACHFSLCACVLPVSGPQDKVRQSLQQQHHKEAKAKPTGARPSALDRFVR

SEQ ID NO: 23592 - protein, 412 aa, Homo sapiens
MKSLSLLLAVALGLATAVSAGPAVIECWFVEDASGKGLAKRPGALLLRQGPGEPPPRPDLDPELYLSVHDPAGALQAAFRRYPRGAPAPHCEMSRFVPLPASAKWASGLTPAQNCPRALDGAWLMVSISSPVLSLSSLLRPQPEPQQEPVLITMATVVLTVLTHTPAPRVRLGQDALLDLSFAYMPPTSEAASSLAPGPPPFGLEWRRQHLGKGHLLLAATPGLNGQMPAAQEGAVAFAAWDDDEPWGPWTGNGTFWLPTVQPFQEGTYLATIHLPYLQGQVTLELAVYKPPKVSLMPATLARAAPGEAPPELLCLVSHFYPSGGLEVEWELRGGPGGRSQKAEGQRWLSALRHHSDGSVSLSGHLQPPPVTTEQHGARYACRIHHPSLPASGRSAEVTLEVAGKSWELCGI

SEQ ID NO: 23593 - protein, 299 aa, Homo sapiens
MKSLSLLLAVALGLATAVSAGPAVIECWFVEDASGKGLAKRPGALLLRQGPGEPPPRPDLDPELYLSVHDPAGALQAAFRRYPRGAPAPHCEMSRFVPLPASAKWASGLTPAQNCPRALDGAWLMVSISSPVLSLSSLLRPQPEPQQEPVLITMATVVLTVLTHTPAPRVRLGQDALLDLSFAYMPPTSEAASSLAPGPPPFGLEWRRQHLGKGHLLLAATPGLNGQMPAAQEGAVAFAAWDDDEPWGPWTGNGTFWLPTVQPFQEGTYLATIHLPYLQGQVTLELAVYSELGDRGLQG

SEQ ID NO: 23594 - protein, 12 aa, Homo sapiens
MAALSCMKAETL

SEQ ID NO: 23595 - protein, 142 aa, Homo sapiens
LLLSFVWMPALLPVASRLLLLPRVLLTMASGSPPTQPSPASDSGSGYVPGSVSAAFVTCPNEKVAKEIARAVVEKRLAACVNLIPQITSIYEWKGKIEEDSEVLMMIKTQSSLVPALTDFVRSVHPYEVAESCHDEPCSCSS

SEQ ID NO: 23596 - protein, 622 aa, Homo sapiens
LPLLPLALILLLLLLSPPLCFSLLLSPPLSSSSSSTSSSFSPSFSPSFSLLSPPSPRPLPPGLMSRSRASIHRGSIPAMSYAPFRDVRGPSMHRTQYVHSPYDRPGWNPRFCIISGNQLLMLDEDEIHPLLIRDRRSESSRNKLLRRTVSVPVEGRPHGEHEYHLGRSRRKSVPGGKQYSMEGAPAAPFRPSQGFLSRRLKSSIKRTKSQPKLDRTSSFRQILPRFRSADHDRARLMQSFKESHSHESLLSPSSAAEALELNLDEDSIIKPVHSSILGQEFCFEVTTSSGTKCFACRSAAERDKWIENLQRAVKPNKDNSRRVDNVLKLWIIEARELPPKKRYYCELCLDDMLYARTTSKPRSASGDTVFWGEHFEFNNLPAVRALRLHLYRDSDKKRKKDKAGYVGLVTVPVATLAGRHFTEQWYPVTLPTGSGGSGGMGSGGGGGSGGGSGGKGKGGCPAVRLKARYQTMSILPMELYKEFAEYVTNHYRMLCAVLEPALNVKGKEEVASALVHILQSTGKAKDFLSDMAMSEVDRFMEREHLIFRENTLATKAIEEYMRLIGQKYLKDAIGEFIRALYESEENCEVDPIKCTASSLAEHQANLRMCCELALCKVVNSHW

SEQ ID NO: 23597 - protein, 1406 aa, Homo sapiens
LPLLPLALILLLLLLSPPLCFSLLLSPPLSSSSSSTSSSFSPSFSPSFSLLSPPSPRPLPPGLMSRSRASIHRGSIPAMSYAPFRDVRGPSMHRTQYVHSPYDRPGWNPRFCIISGNQLLMLDEDEIHPLLIRDRRSESSRNKLLRRTVSVPVEGRPHGEHEYHLGRSRRKSVPGGKQYSMEGAPAAPFRPSQGFLSRRLKSSIKRTKSQPKLDRTSSFRQILPRFRSADHDRARLMQSFKESHSHESLLSPSSAAEALELNLDEDSIIKPVHSSILGQEFCFEVTTSSGTKCFACRSAAERDKWIENLQRAVKPNKDNSRRVDNVLKLWIIEARELPPKKRYYCELCLDDMLYARTTSKPRSASGDTVFWGEHFEFNNLPAVRALRLHLYRDSDKKRKKDKAGYVGLVTVPVATLAGRHFTEQWYPVTLPTGSGGSGGMGSGGGGGSGGGSGGKGKGGCPAVRLKARYQTMSILPMELYKEFAEYVTNHYRMLCAVLEPALNVKGKEEVASALVHILQSTGKAKDFLSDMAMSEVDRFMEREHLIFRENTLATKAIEEYMRLIGQKYLKDAIGEFIRALYESEENCEVDPIKCTASSLAEHQANLRMCCELALCKVVNSHCVFPRELKEVFASWRLRCAERGREDIADRLISASLFLRFLCPAIMSPSLFGLMQEYPDEQTSRTLTLIAKVIQNLANFSKFTSKEDFLGFMNEFLELEWGSMQQFLYEISNLDTLTNSSSFEGYIDLGRELSTLHALLWEVLPQLSKEALLKLGPLPRLLNDISTALRNPNIQRQPSRQSERPRPQPVVLRGPSAEMQGYMMRDLNSSIDLQSFMARGLNSSMDMARLPSPTKEKPPPPPPGGGKDLFYVSRPPLARSSPAYCTSSSDITEPEQKMLSVNKSVSMLDLQGDGPGGRLNSSSVSNLAAVGDLLHSSQASLTAALGLRPAPAGRLSQGSGSSITAAGMRLSQMGVTTDGVPAQQLRIPLSFQNPLFHMAADGPGPPGGHGGGGGHGPPSSHHHHHHHHHHRGGEPPGDTFAPFHGYSKSEDLSSGVPKPPAASILHSHSYSDEFGPSGTDFTRRQLSLQDNLQHMLSPPQITIGPQRPAPSGPGGGSGGGSGGGGGGQPPPLQRGKSQQLTVSAAQKPRPSSGNLLQSPEPSYGPARPRQQSLSKEGSIGGSGGSGGGGGGGLKPSITKQHSQTPSTLNPTMPASERTVAWVSNMPHLSADIESAHIEREEYKLKEYSKSMDESRLDRVKEYEEEIHSLKERLHMSNRKLEEYERRLLSQEEQTSKILMQYQARLEQSEKRLRQQQAEKDSQIKSIIGRLMLVEEELRRDHPAMAEPLPEPKKRLLDAQERQLPPLGPTNPRVTLAPPWNGLAPPAPPPPPRLQITENGEFRNTADH

SEQ ID NO: 23598 - protein, 24 aa, Homo sapiens
LLWFLGVGTCMFLNKSPSRLHCGG

SEQ ID NO: 23599 - protein, 191 aa, Homo sapiens
LFEVGLALPLLGAFQHVQSPVSCFRLKGEDQSELVTTVDKVVCLESAHPRMGVGCRLSRALLTAVTNVLIFFWCLAFLWGLLILLKYRWRKLEEEEQAMYEMVKKIIDVVQDHYVDWEQDMERYPYVGILHVRDSLIPPQSRRRMKRVWDRAVEFLASNESRIQTESHRVAGEDMLVWRWTKPSSFSDSER

SEQ ID NO: 23600 - protein, 277 aa, Homo sapiens
LYSFLNPHLISSVFLFLVSVKLLPVDCERKTDEFCQAKQKAALLELLHELYNFLAIQAGNFECGNPENLKSKCIPVMEAQEYIANVTSSSSAKFEAALTWILSSNKDVGIWLKGEDQSELVTTVDKVVCLESAHPRMGVGCRLSRALLTAVTNVLIFFWCLAFLWGLLILLKYRWRKLEEEEQAMYEMVKKIIDVVQDHYVDWEQDMERYPYVGILHVRDSLIPPQSRRRMKRVWDRAVEFLASNESRIQTESHRVAGEDMLVWRWTKPSSFSDSER

SEQ ID NO: 23601 - protein, 905 aa, Homo sapiens
LPSVPLLLKLPCPCPPRPWGQGPARARSGPAVHGSLGISEMPGKRGLGWWWARLPLCLLLSLYGPWMPSSLGKPKGHPHMNSIRIDGDITLGGLFPVHGRGSEGKPCGELKKEKGIHRLEAMLFALDRINNDPDLLPNITLGARILDTCSRDTHALEQSLTFVQALIEKDGTEVRCGSGGPPIITKPERVVGVIGASGSSVSIMVANILRLFKIPQISYASTAPDLSDNSRYDFFSRVVPSDTYQAQAMVDIVRALKWNYVSTVASEGSYGESGVEAFIQKSREDGGVCIAQSVKIPREPKAGEFDKIIRRLLETSNARAVIIFANEDDIRRVLEAARRANQTGHFFWMGSDSWGSKIAPVLHLEEVAEGAVTILPKRMSVRDRERIGQDSAYEQEGKVQFVIDAVYAMGHALHAMHRDLCPGRVGLCPRMDPVDGTQLLKYIRNVNFSGIAGNPVTFNENGDAPGRYDIYQYQLRNDSAEYKVIGSWTDHLHLRIERMHWPGSGQQLPRSICSLPCQPGERKKTVKGMPCCWHCEPCTGYQYQVDRYTCKTCPYDMRPTENRTGCRPIPIIKLEWGSPWAVLPLFLAVVGIAATLFVVITFVRYNDTPIVKASGRELSYVLLAGIFLCYATTFLMIAEPDLGTCSLRRIFLGLGMSISYAALLTKTNRIYRIFEQGKRSVSAPRFISPASQLAITFSLISLQLLGICVWFVVDPSHSVVDFQDQRTLDPRFARGVLKCDISDLSLICLLGYSMLLMVTCTVYAIKTRGVPETFNEAKPIGFTMYTTCIVWLAFIPIFFGTSQSADKLYIQTTTLTVSVSLSASVSLGMLYMPKVYIILFHPEQNVPKRKRSLKAVVTAATMSNKFTQKGNFRPNGEAKSELCENLEAPALATKQTYVTYTNHAI

SEQ ID NO: 23602 - protein, 952 aa, Homo sapiens
LPSVPLLLKLPCPCPPRPWGQGPARARSGPAVHGSLGISEMPGKRGLGWWWARLPLCLLLSLYGPWMPSSLGKPKGHPHMNSIRIDGDITLGGLFPVHGRGSEGKPCGELKKEKGIHRLEAMLFALDRINNDPDLLPNITLGARILDTCSRDTHALEQSLTFVQALIEKDGTEVRCGSGGPPIITKPERVVGVIGASGSSVSIMVANILRLFKIPQISYASTAPDLSDNSRYDFFSRVVPSDTYQAQAMVDIVRALKWNYVSTVASEGSYGESGVEAFIQKSREDGGVCIAQSVKIPREPKAGEFDKIIRRLLETSNARAVIIFANEDDIRRVLEAARRANQTGHFFWMGSDSWGSKIAPVLHLEEVAEGAVTILPKRMSVRGFDRYFSSRTLDNNRRNIWFAEFWEDNFHCKLSRHALKKGSHVKKCTNRERIGQDSAYEQEGKVQFVIDAVYAMGHALHAMHRDLCPGRVGLCPRMDPVDGTQLLKYIRNVNFSGIAGNPVTFNENGDAPGRYDIYQYQLRNDSAEYKVIGSWTDHLHLRIERMHWPGSGQQLPRSICSLPCQPGERKKTVKGMPCCWHCEPCTGYQYQVDRYTCKTCPYDMRPTENRTGCRPIPIIKLEWGSPWAVLPLFLAVVGIAATLFVVITFVRYNDTPIVKASGRELSYVLLAGIFLCYATTFLMIAEPDLGTCSLRRIFLGLGMSISYAALLTKTNRIYRIFEQGKRSVSAPRFISPASQLAITFSLISLQLLGICVWFVVDPSHSVVDFQDQRTLDPRFARGVLKCDISDLSLICLLGYSMLLMVTCTVYAIKTRGVPETFNEAKPIGFTMYTTCIVWLAFIPIFFGTSQSADKLYIQTTTLTVSVSLSASVSLGMLYMPKVYIILFHPEQNVPKRKRSLKAVVTAATMSNKFTQKGNFRPNGEAKSELCENLEAPALATKQTYVTYTNHAI

SEQ ID NO: 23603 - protein, 177 aa, Homo sapiens
LGLRAGAISGAGAAPRRHPHLLPAAAAAEPGRSSAPSTAAPGNPERAPQAGGRARASQPSLFHLLLREGKMSESSSKSSQPLASKQEKDGTEKRGRGRPRKQPPVSPGTALVGSQKEPSEVPTPKRPRGRPKGSKNKGAAKTRKTTTTPGRKPRGRPKKLEKEEEEGISQESSEEEQ

SEQ ID NO: 23604 - protein, 180 aa, Homo sapiens
LGGEHAAAAVSERLCSLPVSDPHLLPAAAAAEPGRSSAPSTAAPGNPERAPQAGGRARASQPSLFHLLLREGKMSESSSKSSQPLASKQEKDGTEKRGRGRPRKQPPVSPGTALVGSQKEPSEVPTPKRPRGRPKGSKNKGAAKTRKTTTTPGRKPRGRPKKLEKEEEEGISQESSEEEQ

SEQ ID NO: 23605 - protein, 20 aa, Homo sapiens
LFLLLLLPFSLHTVLIGGSC

SEQ ID NO: 23606 - protein, 21 aa, Homo sapiens
LLLPRMRAGGLSPTPHTPISE

SEQ ID NO: 23607 - protein, 197 aa, Homo sapiens
VRRSGFLFCLFVLFLSSMNSASVDGHLSGCRLFLFLSPLFRFYCDYCDTYLTHDSPSVRKTHCSGRKHKENVKDYYQKWMEEQAQSLIDKTTAAFQQGKIPPTPFSAPPPAGAMIPPPPSLPGPPRPGMMPAPHMGGPPMMPMMGPPPPGMMPVGPAPGMRPPMGGHMPMMPGPPMMRPPARPMMVPTRPGMTRPDR

SEQ ID NO: 23608 - protein, 21 aa, Homo sapiens
VLYSVLGMHVILTQWLLLTNR

SEQ ID NO: 23609 - protein, 58 aa, Homo sapiens
MSSKVSRDTLYEAVREVLHGNQRKRRKFLETVELQISLKNYDPQKDKRFSGTVRLAPF

SEQ ID NO: 23610 - protein, 225 aa, Homo sapiens
LSALSLLSRSSKVSRDTLYEAVREVLHGNQRKRRKFLETVELQISLKNYDPQKDKRFSGTVRLKSTPRPKFSVCVLGDQQHCDEAKAVDIPHMDIEALKKLNKNKKLVKKLAKKYDAFLASESLIKQIPRILGPGLNKAGKFPSLLTHNENMVAKVDEVKSTIKFQMKKVLCLAVAVGHVKMTDDELVYNIHLAVNFLVSLLKKNWQNVRALYIKSTMGKPQRLY

SEQ ID NO: 23611 - protein, 58 aa, Homo sapiens
MAAALALVAGVLSGAVLPLWSALPQYKKVSRGARPAGRDRRRGWPRRRGTGARRRRAA

SEQ ID NO: 23612 - protein, 321 aa, Homo sapiens
LGKISALGESRELFSREYCGRLPFAGSWNRDHWSLSGRSSWNGSTATQPGVGLVGAKVQGDRGGRSLERRSASLPLAGLAPVAGAHPAAAADSSRARGSLRGRGSRTCAGDQRKVPARLGGQQGPGRGCGCRRGPHRATFLPGGCRWKMSQERPTFYRQELNKTIWEVPERYQNLSPVGSGAYGSVCAAFDTKTGLRVAVKKLSRPFQSIIHAKRTYRELRLLKHMKHENVIGLLDVFTPARSLEEFNDVYLVTHLMGADLNNIVKCQKLTDDHVQFLIYQILRGLKYIHSADIIHRDLKPSNLAVNEDCELKFVCSSSAL

SEQ ID NO: 23613 - protein, 508 aa, Homo sapiens
LGKISALGESRELFSREYCGRLPFAGSWNRDHWSLSGRSSWNGSTATQPGVGLVGAKVQGDRGGRSLERRSASLPLAGLAPVAGAHPAAAADSSRARGSLRGRGSRTCAGDQRKVPARLGGQQGPGRGCGCRRGPHRATFLPGGCRWKMSQERPTFYRQELNKTIWEVPERYQNLSPVGSGAYGSVCAAFDTKTGLRVAVKKLSRPFQSIIHAKRTYRELRLLKHMKHENVIGLLDVFTPARSLEEFNDVYLVTHLMGADLNNIVKCQKLTDDHVQFLIYQILRGLKYIHSADIIHRDLKPSNLAVNEDCELKILDFGLARHTDDEMTGYVATRWYRAPEIMLNWMHYNQTVDIWSVGCIMAELLTGRTLFPGTDHINQLQQIMRLTGTPPAYLINRMPSHEARNYIQSLTQMPKMNFANVFIGANPLAVDLLEKMLVLDSDKRITAAQALAHAYFAQYHDPDDEPVADPYDQSFESRDLLIDEWKSLTYDEVISFVPPPLDQEEMES

SEQ ID NO: 23614 - protein, 8 aa, Homo sapiens
LSTWFLFC

SEQ ID NO: 23615 - protein, 53 aa, Homo sapiens
VEGGVRACACVLVCVHVCVCLCGRVRQYEQTMITVTLQEVVDAPGQPPPCSSF

SEQ ID NO: 23616 - protein, 502 aa, Homo sapiens
LAAAAGASPAFKSRLLAEGASAALRRPQPCLSLGSAAMAMTGSTPCSSMSNHTKERVTMTKVTLENFYSNLIAQHEEREMRQKKLEKVMEEEGLKDEEKRLRRSAHARKETEFLRLKRTRLGLEDFESLKVIGRGAFGEVRLVQKKDTGHVYAMKILRKADMLEKEQVGHIRAERDILVEADSLWVVKMFYSFQDKLNLYLIMEFLPGGDMMTLLMKKDTLTEEETQFYIAETVLAIDSIHQLGFIHRDIKPDNLLLDSKGHVKLSDFGLCTGLKKAHRTEFYRNLNHSLPSDFTFQNMNSKRKAETWKRNRRQLAFSTVGTPDYIAPEVFMQTGYNKLCDWWSLGVIMYEMLIGYPPFCSETPQETYKKVMNWKETLTFPPEVPISEKAKDLILRFCCEWEHRIGAPGVEEIKSNSFFEGVDWEHIRERPAAISIEIKSIDDTSNFDEFPESDILKPTVATSNHPETDYKNKDWVFINYTYKRFEGLTARGAIPSYMKAAK

SEQ ID NO: 23617 - protein, 168 aa, Homo sapiens [sequence omitted]

SEQ ID NO: 23618 - protein, 178 aa, Homo sapiens
LVAILSLGCLFSGAMSEPAGDVRQNPCGSKACRRLFGPVDSEQLSRDCDALMAGCIQEARERWNFDFVTETPLEGDFAWERVRGLGLPKLYLPTGPRRGRDELGGGRRPGTSPALLQGTAEEDHVDLSLSCTLVPRSGEQAEGSPGGPGDSQGRKRRQTSMTDFYHSKRRLIFSKRKP

SEQ ID NO: 23619 - protein, 11 aa, Homo sapiens
MPLPPLQRSTP

SEQ ID NO: 23620 - protein, 11 aa, Homo sapiens
LCVLIIICVLI

SEQ ID NO: 23621 - protein, 59 aa, Homo sapiens
LLLLFALYPMRLGDRSPGFEPCLPPLPNVGTQARPFYLLGLSFHVCTTRGLTRWPQVFL

SEQ ID NO: 23622 - protein, 39 aa, Homo sapiens
LEEGTVLFLVLATQILVSKGLNGPEVCSSDGSPANRRRK

SEQ ID NO: 23623 - protein, 507 aa, Homo sapiens
LCESGWASNTAPTAPPQPGWCLCGKDFKSSCQTPGREKERRLATMHGSCSFLMLLLPLLLLLVATTGPVGALTDEEKRLMVELHNLYRAQVSPTASDMLHMRWDEELAAFAKAYARQCVWGHNKERGRRGENLFAITDEGMDVPLAMEEWHHEREHYNLSAATCSPGQMCGHYTQVVWAKTERIGCGSHFCEKLQGVEETNIELLVCNYEPPGNVKGKRPYQEGTPCSQCPSGYHCKNSLCEPIGSPEDAQDLPYLVTEAPSFRATEASDSRKMGTPSSLATGIPAFLVTEVSGSLATKALPAVETQAPTSLATKDPPSMATEAPPCVTTEVPSILAAHSLPSLDEEPVTFPKSTHVPIPKSADKVTDKTKVPSRSPENSLDPKMSLTGARELLPHAQEEAEAEAELPPSSEVLASVFPAQDKPGELQATLDHTGHTSSKSLPNFPNTSATANATGGRALALQSSLPGAEGPDKPSVVSGLNSGPGHVWGPLLGLLLLPPLVLAGIF

SEQ ID NO: 23624 - protein, 8 aa, Homo sapiens
LKGIPLKG

SEQ ID NO: 23625 - protein, 379 aa, Homo sapiens
VTSPPGAMGASDPEVAPWARGGAAGMAGAGAGAGARGGAAAGVEARARDPPPAHRAHPRHPRPAAQPSARRMDGGSGGLGSGDNAPTTEALFVALGAGVTALSHPLLYVKLLIQVGHEPMPPTLGTNVLGRKVLYLPSFFTYAKYIVQVDGKIGLFRGLSPRLMSNALSTVTRGSMKKVFPPDEIEQVSNKDDMKTSLKKVVKETSYEMMMQCVSRMLAHPLHVISMRCMVQFVGREAKYSGVLSSIGKIFKEEGLLGFFVGLIPHLLGDVVFLWGCNLLAHFINAYLVDDSFSQALAIRSYTKFVMGIAVSMLTYPFLLVGDLMAVNNCGLQAGLPPYSPVFKSWIHCWKYLSVQGQLFRGSSLLFRRVSSGSCFALE

SEQ ID NO: 23626 - protein, 396 aa, Homo sapiens
VTSPPGAMGASDPEVAPWARGGAAGMAGAGAGAGARGGAAAGVEARARDPPPAHRAHPRHPRPAAQPSARRMDGGSGGLGSGDNAPTTEALFVALGAGVTALSHPLLYVKLLIQVGHEPMPPTLGTNVLGRKVLYLPSFFTYAKYIVQVDGKIGLFRGLSPRLMSNALSTVTRGSMKKVFPPDEIEQVSNKDDMKTSLKKVVKETSYEMMMQCVSRMLAHPLHVISMRCMVQFVGREAKYSGVLSSIGKIFKEEGLLGFFVGLIPHLLGDVVFLWGCNLLAHFINAYLVDDSVSDTPGGLGNDQNPGSQFSQALAIRSYTKFVMGIAVSMLTYPFLLVGDLMAVNNCGLQAGLPPYSPVFKSWIHCWKYLSVQGQLFRGSSLLFRRVSSGSCFALE

SEQ ID NO: 23627 - protein, 105 aa, Homo sapiens
LCPSCRTANPRIGDVIQKLAPFLKMYSEYVKNFERAAELLATWTDKSPLFQEVLTRIQVRLGEGWSQHCHSQHAVAQVALSDSGHLPGSAASIGPCLLVRPSGAA

SEQ ID NO: 23628 - protein, 485 aa, Homo sapiens
LCPSCRTANPRIGDVIQKLAPFLKMYSEYVKNFERAAELLATWTDKSPLFQEVLTRIQSSEASGSLTLQHHMLEPVQRIPRYELLLKEYIQKLPAQAPDQADAQKALDMIFSAAQHSNAAITEMERLQDLWEVYQRLGLEDDIVDPSNTLLREGPVLKISFRRNDPMERYLFLFNNMLLYCVPRVIQVGAQFQVRTRIDVAGMKVRELMDAEFPHSFLVSGKQRTLELQARSQEEMISWMQAFQAAIDQIEKRNETFKAAAQGPEGDIQEQELQSEELGLRAPQWVRDKMVTMCMRCQEPFNALTRRRHHCRACGYVVCARCSDYRAELKYDDNRPNRVCLHCYAFLTGNVLPEAKEDKRRGILEKGSSATPDQSLMCSFLQLIGDKWGKSGPRGWCVIPRDDPLVLYVYAAPQDMRAHTSIPLLGYQVTVGPQGDPRVFQLQQSGQLYTFKAETEELKGRWVKAMERAASGWSPSWPNDGDLSD

SEQ ID NO: 23629 - protein, 49 aa, Homo sapiens
LSLSGHSHFLYLGRQHREEGELGSSLGWGWAPVVVFNGKYLSEMFMQAP

SEQ ID NO: 23630 - protein, 957 aa, Homo sapiens
VKMEVTCLLLLALIPFHCRGQGVYAPAQAQIVHAGQACVVKEDNISERVYTIREGDTLMLQCLVTGHPRPQVRWTKTAGSASDKFQETSVFNETLRIERIARTQGGRYYCKAENGVGVPAIKSIRVDVQYLDEPMLTVHQTVSDVRGNFYQEKTVFLRCTVNSNPPARFIWKRGSDTLSHSQDNGVDIYEPLYTQGETKVLKLKNLRPQDYASYTCQVSVRNVCGIPDKAITFRLTNTTAPPALKLSVNETLVVNPGENVTVQCLLTGGDPLPQLQWSHGPGPLPLGALAQGGTLSIPSVQARDSGYYNCTATNNVGNPAKKTVNLLVRSMKNATFQITPDVIKESENIQLGQDLKLSCHVDAVPQEKVTYQWFKNGKPARMSKRLLVTRNDPELPAVTSSLELIDLHFSDYGTYLCMASFPGAPVPDLSVEVNISSETVPPTISVPKGRAVVTVREGSPAELQCEVRGKPRPPVLWSRVDKEAALLPSGLPLEETPDGKLRLERVSRDMSGTYRCQTARYNGFNVRPREAQVQLNVQFPPEVEPSSQDVRQALGRPVLLRCSLLRGSPQRIASAVWRFKGQLLPPPPVVPAAAEAPDHAELRLDAVTRDSSGSYECSVSNDVGSAACLFQVSAKAYSPEFYFDTPNPTRSHKLSKNYSYVLQWTQREPDAVDPVLNYRLSIRQLNQHNAVVKAIPVRRVEKGQLLEYILTDLRVPHSYEVRLTPYTTFGAGDMASRIIHYTEPINSPNLSDNTCHFEDEKICGYTQDLTDNFDWTRQNALTQNPKRSPNTGPPTDISGTPEGYYMFIETSRPRELGDRARLVSPLYNASAKFYCVSFFYHMYGKHIGSLNLLVRSRNKGALDTHAWSLSGNKGNVWQQAHVPISPSGPFQIIFEGVRGPGYLGDIAIDDVTLKKGECPRKQTDPNKVVVMPGSGAPCQSSPQLWGPMAIFLLALQR

SEQ ID NO: 23631 - protein, 107 aa, Homo sapiens
VDSRSTRGRGPGPGAEEALRGGTGAGGAEQPSGQGLGPGSLETLILVRLLPNCSPPHEPQGFMSQEGEGAHLSGIGRGRHQLISLRAFASWCCPGGCSCTTAPDGCC

SEQ ID NO: 23632 - protein, 33 aa, Homo sapiens [sequence omitted]

SEQ ID NO: 23633 - protein, 596 aa, Homo sapiens
VPGQCAPEAGCGSARIRLHGGAATVPDAAAASEVQRPELQLRGSGDPALPRGVRASCLGGQYCMPEEGVPLTPKANLLTTEEILTLARLFVKEGIDKIRLTGGEPLIRPDVVDIVAQLQRLEGLRTIGVTTNGINLARLLPQLQKAGLSAINISLDTLVPAKFEFIVRRKGFHKVMEGIHKAIELGYNPVKVNCVVMRGLNEDELLDFAALTEGLPLDVRFIEYMPFDGNKWNFKKMVSYKEMLDTVRQQWPELEKVPEEESSTAKAFKIPGFQGQISFITSMSEHFCGTCNRLRITADGNLKVCLFGNSEVSLRDHLRAGASEQELLRIIGAAVGRKKRQHAELFLMFPNSPPANPSIFSWDPLHVQGLRPRMSFSSQVATLWKGCRVPQTPPLAQQRLGSGSFQRHYTSRADSDANSKCLSPGSWASAAPSGPQLTSEQLTHVDSEGRAAMVDVGRKPDTERVAVASAVVLLGPVAFKLVQQNQLKKGDALVVAQLAGVQAAKVTSQLIPLCHHVALSHIQVQLELDSTRHAVKIQASCRARGPTGVEMEALTSAAVAALTLYDMCKAVSRDIVLEEIKLISKTGGQRGDFHRA

SEQ ID NO: 23634 - protein, 424 aa, Homo sapiens
LRGSRPPPAPPRPCWDDPGGECPASVLPKRAAVPLVSGFMAARPLSRMLRRLLRSSARSCSSGAPVTQPCPGESARAASEEVSRRRQFLREHAAPFSAFLTDSFGRQHSYLRISLTEKCNLRCQYCMPEEGVPLTPKANLLTTEEILTLARLFVKEGIDKIRLTGGEPLIRPDVVDIVAQLQRLEGLRTIGVTTNGINLARLLPQLQKAGLSAINISLDTLVPAKFEFIVRRKGFHKVMEGIHKAIELGYNPVKVNCVVMRGLNEDELLDFAALTEGLPLDVRFIEYMPFDGNKWNFKKMVSYKEMLDTVRQQWPELEKVPEEESSTAKAFKIPGFQGQISFITSMSEHFCGTCNRLRITADGNLKVCLFGNSEVSLRDHLRAGASEQELLRIIGAAVGRKKRQHAGMFSISQMKNRPMILIGG

SEQ ID NO: 23635 - protein, 214 aa, Homo sapiens
LVGVPVASVLLLAQCLRWHCPRRLLGACWTLNGQEEPVSQPTPQLENEVSRQHLPATLPEMVAFYQELHTPTQGQTMVRQLMHKLLVFSAREVDHRGGCLMLQDTGISLLIPPGAVAVGRQERVSLILVWDLSDAPSLSQAQGLVSPVVACGPHGASFLKPCTLTFKHCAEQPSHARTYSSNTTLLDAKVWRPLGRPGAHASRDECRIHLSHFR

SEQ ID NO: 23636 - protein, 44 aa, Homo sapiens
LLYSSIWIMTVEEGLLKICGCVFLWKSKELGGLIIGRETRLSGL

SEQ ID NO: 23637 - protein, 41 aa, Homo sapiens
MGDIYITWIGCGLDRLQWENVSAMIEEVFEATDIKITVYTL

SEQ ID NO: 23638 - protein, 325 aa, Homo sapiens
VPRQAQELTFLCPAMGLTLLLLLLLGLEGQGIVGSLPEVLQAPVGSSILVQCHYRLQDVKAQKVWCRFLPEGCQPLVSSAVDRRAPAGRRTFLTDLGGGLLQVEMVTLQEEDAGEYGCMVDGARGPQILHRVSLNILPPEEEEETHKIGSLAENAFSDPAGSANPLEPSQDEKSIPLIWGAVLLVGLLVAAVVLFAVMAKRKQGNRLGVCGRFLSSRVSGMNPSSVVHHVSDSGPAAELPLDVPHIRLDSPPSFDNTTYTSLPLDSPSGKPSLPAPSSLPPLPPKVLVCSKPVTYATVIFPGGNKGGGTSCGPAQNPPNNQTPSS

SEQ ID NO: 23639 - protein, 213 aa, Homo sapiens
VPRQAQELTFLCPAMGLTLLLLLLLGLEGQGIVGSLPEVLQAPVGSSILVQCHYRLQDVKAQKVWCRFLPEGCQPLVSSAVDRRAPAGRRTFLTDLGGGLLQVEMVTLQEEDAGEYGCMVDGARGPQILHRVSLNILPPEEEEETHKIGSLAENAFSDPAGSANPLEPSQDEKSIPLIWGAVLLVGLLVAAVVLFAVMAKRKQESLLSGPPRQ

SEQ ID NO: 23640 - protein, 260 aa, Homo sapiens
MPDPLFSAVQGKDEILHKALCFCPWLGKGGMEPLRLLILLFVTELSGAHNTTVFQGVAGQSLQVSCPYDSMKHWGRRKAWCRQLGEKGPCQRVVSTHNLWLLSFLRRWNGSTAITDDTLGGTLTITLRNLQPHDAGLYQCQSLHGSEADTLRKVLVEVLADPLDHRDAGDLWFPGESESFEDAHVEHSISRSLLEGEIPFPPTSILLLLACIFLIKILAASALWAAAWHGQKPGTHPPSELDCGHDPGYQLQTLPGLRDT

SEQ ID NO: 23641 - protein, 227 aa, Homo sapiens
LGKGGMEPLRLLILLFVTELSGAHNTTVFQGVAGQSLQVSCPYDSMKHWGRRKAWCRQLGEKGPCQRVVSTHNLWLLSFLRRWNGSTAITDDTLGGTLTITLRNLQPHDAGLYQCQSLHGSEADTLRKVLVEVLADPLDHRDAGDLWFPGESESFEDAHVEHSISRPSQGSHLPSCLSKEPLGRRNPLPTHFHPSPPGLHLSHQDSSSQRPLGCSLAWTEARDTSTQ

SEQ ID NO: 23642 - protein, 148 aa, Homo sapiens
MRKTRLWGLLWMLFVSELRAATKLTEEKYELKEGQTLDVKCDYTLEKFASSQKAWQIIRDGEMPKTLACTERPSKNSHPVQVGRIILEDYHDHGLLRVRMVNLQVEDSGLYQCVIYQPPKEPHMLFDRIRLVVTKGEWPGTWGERRAR

SEQ ID NO: 23643 - protein, 270 aa, Homo sapiens
VSPPMSAQEKDHMAWRALHPLLLLLLLFPGSQAQSKAQVLQSVAGQTLTVRCQYPPTGSLYEKKGWCKEASALVCIRLVTSSKPRTMAWTSRFTIWDDPDAGFFTVTMTDLREEDSGHYWCRIYRPSDNSVSKSVRFYLVVSPASASTQTSWTPRDLVSSQTQTQSCVPPTAGARQAPESPSTIPVPSQPQNSTLRPGPAAPIALVPVFCGLLVAKSLVLSALLVWWVLRNRHMQHQGRSLLHPAQPRPQAHRHFPLSHRAPGGTYGGKP

SEQ ID NO: 23644 - protein, 288 aa, Homo sapiens
VSPPMSAQEKDHMAWRALHPLLLLLLLFPGSQAQSKAQVLQSVAGQTLTVRCQYPPTGSLYEKKGWCKEASALVCIRLVTSSKPRTMAWTSRFTIWDDPDAGFFTVTMTDLREEDSGHYWCRIYRPSDNSVSKSVRFYLVVSPASASTQTSWTPRDLVSSQTQTQSCVPPTAGARQAPESPSTIPVPSQPQNSTLRPGPAAPIALVPVFCGLLVAKSLVLSALLVWWGDIWWKTMMELRSLDTQKATCHLQQVTDLPWTSVSSPVEREILYHTVARTKISDDDDEHTL

SEQ ID NO: 23645 - protein, 278 aa, Homo sapiens
MSAQEKDHMAWRALHPLLLLLLLFPGSQAQSKAQVLQSVAGQTLTVRCQYPPTGSLYEKKGWCKEASALVCIRLVTSSKPRTMAWTSRFTIWDDPDAGFFTVTMTDLREEDSGHYWCRIYRPSDNSVSKSVRFYLVVSPASASTQTSWTPRDLVSSQTQTQSCVPPTAGARQAPESPSTIPVPSHPSSPLPVPLPSRPQNSTLRPGPAAPIALVPVFCGLLVAKSLVLSALLVWWVLRNRHMQHQGRSLLHPAQPRPQAHRHFPLSHRAPGGTYGGKP

SEQ ID NO: 23646 - protein, 12 aa, Homo sapiens
MGTWGEDVRRQI

SEQ ID NO: 23647 - protein, 404 aa, Homo sapiens
LTFRAREPAPAATMASRIGLRMQLMREQAQQEEQRERMQQQAVMHYMQQQQQQQQQQLGGPPTPAINTPVHFQSPPPVPGEVLKLDDVIDNIMRLDDVLGYINPEMQMPNTLPLSSSHLNVYSSDPQVTASLVGVTSSSCPADLTQKRELTDAESRALAKERQKKDNHNLIERRRRFNINDRIKELGMLIPKANDLDVRWNKGTILKASVDYIRRMQKDLQKSRELENHSRRLEMTNKQLWLRIQELEMQARVHGLPTTSPSGMNMAELAQQVVKQELPSEEGPGEALMLGAEVPDPEPLPALPPQAPLPLPTQPPSPFHHLDFSHSLSFGGREDEGPPGYPEPLAPGHGSPFPSLSKKDLDLMLLDDSLLPLASDPLLSTMSPEASKASSRRSSFSMEEGDVL

SEQ ID NO: 23648 - protein, 568 aa, Homo sapiens
VTAGARAPGAGLGDSGGGGPGGTQGAAAAPTAAGRADGAGLPGGTGPEQAGSRWRAQLAGQAPELATSCRSRGARAADRLTFRAREPAPAATMASRIGLRMQLMREQAQQEEQRERMQQQAVMHYMQQQQQQQQQQLGGPPTPAINTPVHFQSPPPVPGEVLKVQSYLENPTSYHLQQSQHQKVREYLSETYGNKFAAHISPAQGSPKPPPAASPGVRAGHVLSSSAGNSAPNSPMAMLHIGSNPERELDDVIDNIMRLDDVLGYINPEMQMPNTLPLSSSHLNVYSSDPQVTASLVGVTSSSCPADLTQKRELTDAESRALAKERQKKDNHNLIERRRRFNINDRIKELGMLIPKANDLDVRWNKGTILKASVDYIRRMQKDLQKSRELENHSRRLEMTNKQLWLRIQELEMQARVHGLPTTSPSGMNMAELAQQVVKQELPSEEGPGEALMLGAEVPDPEPLPALPPQAPLPLPTQPPSPFHHLDFSHSLSFGGREDEGPPGYPEPLAPGHGSPFPSLSKKDLDLMLLDDSLLPLASDPLLSTMSPEASKASSRRSSFSMEEGDVL

SEQ ID NO: 23649 - protein, 16 aa, Homo sapiens
MGVCRTILGPEELKGD

SEQ ID NO: 23650 - protein, 15 aa, Homo sapiens
MVLWLDVHNQGRQHG

SEQ ID NO: 23651 - protein, 94 aa, Homo sapiens
MDNTNCPQQRARNPLGASSVSSPQIPILKNTISGMLLHQRRFFEIAHLPELANTGVFTFFRKEKLSGEGENDFADFPSPGDQTKAGPSIIPPVG

SEQ ID NO: 23652 - protein, 80 aa, Homo sapiens
MAASAAMVFSAPRAAYGTVKTGAGIAAMSVMRPELIMKSIIPVVTAGIIAIYGLVVTVLIASSPNDDISLYRSCLQLAPA

SEQ ID NO: 23653 - protein, 660 aa, Homo sapiens
LVVRQFCRSSGQLEAQAPLDPGAARRRWRRDAERAECGRAKPEPERGRRRRAGSGRAEMPYKLKKEKEPPKVAKCTAKPSSSGKDGGGENTEEAQPQPQPQPQPQAQSQPPSSNKRPSNSTPPPTQLSKIKYSGGPQIVKKERRQSSSRFNLSKNRELQKLPALKDSPTQEREELFIQKLRQCCVLFDFVSDPLSDLKFKEVKRAGLNEMVEYITHSRDVVTEAIYPEAVTMFSVNLFRTLPPSSNPTGAEFDPEEDEPTLEAAWPHLQLVYEFFLRFLESPDFQPNIAKKYIDQKFVLALLDLFDSEDPRERDFLKTILHRIYGKFLGLRAYIRRQINHIFYRFIYETEHHNGIAELLEILGSIINGFALPLKEEHKMFLIRVLLPLHKVKSLSVYHPQLAYCVVQFLEKESSLTEPVIVGLLKFWPKTHSPKEVMFLNELEEILDVIEPSEFSKVMEPLFRQLAKCVSSPHFQVAERALYYWNNEYIMSLISDNAARVLPIMFPALYRNSKSHWNKTIHGLIYNALKLFMEMNQKLFDDCTQQYKAEKQKGRFRMKEREEMWQKIEELARLNPQYPMFRAPPPLPPVYSMETETPTAEDIQLLKRTVETEAVQMLKDIKKEKVLLRRKSELPQDVYTIKALEAHKRAEEFLTASQEAL

SEQ ID NO: 23654 - protein, 58 aa, Homo sapiens
LPWPSILCSLLAVLGEGSASLATQGRGMWALEAGTPTEWSLFSPKGVHASLWLVQAEH

SEQ ID NO: 23655 - protein, 227 aa, Homo sapiens
VLMALCALTRALRSLNLAPPTVAAPAPSLFPAAQMMNNGLLQQPSALMLLPCRPVLTSVALNANFVSWKSRTKYTITPVKMRKSGGRDHTGRIRVHGIGGGHKQRYRMIDFLRFRPEETKSGPFEEKVIQVRYDPCRSADIALVAGGSRKRWIIATENMQAGDTILNSNHIGRMAVAAREGDAHPLGALPVGTLINNVESEPGRGAQYIRAAGAGNVRSNSRPSIQR

SEQ ID NO: 23656 - protein, 112 aa, Homo sapiens
LAKSKGVVLMALCALTRALRSLNLAPPTVAAPAPSLFPAAQMMNNGLLQQPSALMLLPCRPVLTSVALNANFVSWKSRTKYTITPVKMRKSGGRDHTGAGNVRSNSRPSIQR

SEQ ID NO: 23657 - protein, 231 aa, Homo sapiens
LAKSKGVVLMALCALTRALRSLNLAPPTVAAPAPSLFPAAQMMNNGLLQQPSALMLLPCRPVLTSVALNANFVSWKSRTKYTITPVKMRKSGGRDHTGRIRVHGIGGGHKQRYRMIDFLRFRPEETKSGPFEEKVIQVRYDPCRSADIALVAGGSRKRWIIATENMQAGDTILNSNHIGRMAGERWLPDVWAGGSKSSRANEILSFSCCSGRGCASSWGSACGDPHQQRGK

SEQ ID NO: 23658 - protein, 105 aa, Homo sapiens
LAKSKGVVLMALCALTRALRSLNLAPPTVAAPAPSLFPAAQMMNNGLLQQPSALMLLPCRPVLTSVALNANFVSWKSRTKYTITPVKMRKSGGRDHTGGNKDRGI

SEQ ID NO: 23659 - protein, 103 aa, Homo sapiens
LAKSKGVVLMALCALTRALRSLNLAPPTVAAPAPSLFPAAQVIHLTREEGCFHSGCRRWGLRACEAGVASLVRSHADDEQWPPPTALCLDVAPLPPSSYFCGP

SEQ ID NO: 23660 - protein, 717 aa, Homo sapiens
LPPPPISLSQPWAPGQVDSPRHSSTAFPGPGDPLQRRGSLRPGSRSADLPFFPASSGIVEAPYGDSSQSLFVGDRDRDKTMEVTGFGVTRPGKVPQARMSGLVLGQRDEPAGHRLSQEEILGSTRLVSQGLEALRSEHQAVLQSLSQTIECLQQGGHEEGLVHEKARQLRRSMENIELGLSEAQVMLALASHLSTVESEKQKLRAQVRRLCQENQWLRDELAGTQQRLQRSEQAVAQLEEEKKHLEFLGQLRQYDEDGHTSEEKEGDATKDSLDDLFPNEEEEDPSNGLSRGQGATAAQQGGYEIPARLRTLHNLVIQYAAQGRYEVAVPLCKQALEDLERTSGRGHPDVATMLNILALVYRDQNKYKEAAHLLNDALSIRESTLGPDHPAVAATLNNLAVLYGKRGKYKEAEPLCQRALEIREKVLGTNHPDVAKQLNNLALLCQNQGKYEAVERYYQRALAIYEGQLGPDNPNVARTKNNLASCYLKQGKYAEAETLYKEILTRAHVQEFGSVDDDHKPIWMHAEEREEMSKSRHHEGGTPYAEYGGWYKACKVSSPTVNTTLRNLGALYRRQGKLEAAETLEECALRSRRQGTDPISQTKVAELLGESDGRRTSQEGPGDSVKFEGGEDASVAVEWSGDGSGTLQRSGSLGKIRDVLRRSSELLVRKLQGTEPRPSSSNMKRAASLNYLNQPSAAPLQVSRGLSASTMDLSSSS

SEQ ID NO: 23661 - protein, 643 aa, Homo sapiens
VLWPECHSQGLCSVHRPGKVPQARMSGLVLGQRDEPAGHRLSQEEILGSTRLVSQGLEALRSEHQAVLQSLSQTIECLQQGGHEEGLVHEKARQLRRSMENIELGLSEAQVMLALASHLSTVESEKQKLRAQVRRLCQENQWLRDELAGTQQRLQRSEQAVAQLEEEKKHLEFLGQLRQYDEDGHTSEEKEGDATKDSLDDLFPNEEEEDPSNGLSRGQGATAAQQGGYEIPARLRTLHNLVIQYAAQGRYEVAVPLCKQALEDLERTSGRGHPDVATMLNILALVYRDQNKYKEAAHLLNDALSIRESTLGPDHPAVAATLNNLAVLYGKRGKYKEAEPLCQRALEIREKVLGTNHPDVAKQLNNLALLCQNQGKYEAVERYYQRALAIYEGQLGPDNPNVARTKNNLASCYLKQGKYAEAETLYKEILTRAHVQEFGSVDDDHKPIWMHAEEREEMSKSRHHEGGTPYAEYGGWYKACKVSSPTVNTTLRNLGALYRRQGKLEAAETLEECALRSRRQGTDPISQTKVAELLGESDGRRTSQEGPGDSVKFEGGEDASVAVEWSGDGSGTLQRSGSLGKIRDVLRRSSELLVRKLQGTEPRPSSSNMKRAASLNYLNQPSAAPLQVSRGLSASTMDLSSSS

SEQ ID NO: 23662 - protein, 1141 aa, Homo sapiens
LAAAAAARGDSEVLGARGSGSGRLGTPRGRAPAAAAAAAPALRCAPPPVPAAERSLRARRAPSAPFPEPAAMGAARGSPARPRRLPLLSVLLLPLLGGTQTAIVFIKQPSSQDALQGRRALLRCEVEAPGPVHVYWLLDGAPVQDTERRFAQGSSLSFAAVDRLQDSGTFQCVARDDVTGEEARSANASFNIKWIEAGPVVLKHPASEAEIQPQTQVTLRCHIDGHPRPTYQWFRDGTPLSDGQSNHTVSSKERNLTLRPAGPEHSGLYSCCAHSAFGQACSSQNFTLSIADESFARVVLAPQDVVVARYEEAMFHCQFSAQPPPSLQWLFEDETPITNRSRPPHLRRATVFANGSLLLTQVRPRNAGIYRCIGQGQRGPPIILEATLHLAEIEDMPLFEPRVFTAGSEERVTCLPPKGLPEPSVWWEHAGVRLPTHGRVYQKGHELVLANIAESDAGVYTCHAANLAGQRRQDVNITVATVPSWLKKPQDSQLEEGKPGYLDCLTQATPKPTVVWYRNQMLISEDSRFEVFKNGTLRINSVEVYDGTWYRCMSSTPAGSIEAQARVQVLEKLKFTPPPQPQQCMEFDKEATVPCSATGREKPTIKWERADGSSLPEWVTDNAGTLHFARVTRDDAGNYTCIASNGPQGQIRAHVQLTVAVFITFKVEPERTTVYQGHTALLQCEAQGDPKPLIQWKGKDRILDPTKLGPRMHIFQNGSLVIHDVAPEDSGRYTCIAGNSCNIKHTEAPLYVVDKPVPEESEGPGSPPPYKMIQTIGLSVGAAVAYIIAVLGLMFYCKKRCKAKRLQKQPEGEEPEMECLNGGPLQNGQPSAEIQEEVALTSLGSGPAATNKRHSTSDKMHFPRSSLQPITTLGKSEFGEVFLAKAQGLEEGVAETLVLVKSLQSKDEQQQLDFRRELEMFGKLNHANVVRLLGLCREAEPHYMVLEYVDLGDLKQFLRISKSKDEKLKSQPLSTKQKVALCTQVALGMEHLSNNRFVHKDLAARNCLVSAQRQVKVSALGLSKDVYNSEYYHFRQAWVPLRWMSPEAILEGDFSTKSDVWAFGVLMWEVFTHGEMPHGGQADDEVLADLQAGKARLPQPEGCPSKLYRLMQRCWALSPKDRPSFSEIASALGDSTVDSKP

SEQ ID NO: 23663 - protein, 749 aa, Homo sapiens
LRARRAPSAPFPEPAAMGAARGSPARPRRLPLLSVLLLPLLGGTQTAIVFIKQPSSQDALQGRRALLRCEVEAPGPVHVYWLLDGAPVQDTERRFAQGSSLSFAAVDRLQDSGTFQCVARDDVTGEEARSANASFNIKWIEAGPVVLKHPASEAEIQPQTQVTLRCHIDGHPRPTYQWFRDGTPLSDGQSNHTVSSKERNLTLRPAGPEHSGLYSCCAHSAFGQACSSQNFTLSIADESFARVVLAPQDVVVARYEEAMFHCQFSAQPPPSLQWLFEDETPITNRSRPPHLRRATVFANGSLLLTQVRPRNAGIYRCIGQGQRGPPIILEATLHLAEIEDMPLFEPRVFTAGSEERVTCLPPKGLPEPSVWWEHAGVRLPTHGRVYQKGHELVLANIAESDAGVYTCHAANLAGQRRQDVNITVATVPSWLKKPQDSQLEEGKPGYLDCLTQATPKPTVVWYRNQMLISEDSRFEVFKNGTLRINSVEVYDGTWYRCMSSTPAGSIEAQARVQVLEKLKFTPPPQPQQCMEFDKEATVPCSATGREKPTIKWERADGSSLPEWVTDNAGTLHFARVTRDDAGNYTCIASNGPQGQIRAHVQLTVAVFITFKVEPERTTVYQGHTALLQCEAQGDPKPLIQWKGKDRILDPTKLGPRMHIFQNGSLVIHDVAPEDSGRYTCIAGNSCNIKHTEAPLYVVGMGWGGLCCTGSGGPRRLSPCTQPLCTEHGTEAIFVAAVGIRPSHHAAAQS

SEQ ID NO: 23664 - protein, 1101 aa, Homo sapiens
LSFSGLSREFARELPRVAGSRAQMGSFLSGEKRPSAPTVGSAMEKKEFPTPPGRVGPGTQTAIVFIKQPSSQDALQGRRALLRCEVEAPGPVHVYWLLDGAPVQDTERRFAQGSSLSFAAVDRLQDSGTFQCVARDDVTGEEARSANASFNIKWIEAGPVVLKHPASEAEIQPQTQVTLRCHIDGHPRPTYQWFRDGTPLSDGQSNHTVSSKERNLTLRPAGPEHSGLYSCCAHSAFGQACSSQNFTLSIADESFARVVLAPQDVVVARYEEAMFHCQFSAQPPPSLQWLFEDETPITNRSRPPHLRRATVFANGSLLLTQVRPRNAGIYRCIGQGQRGPPIILEATLHLAEIEDMPLFEPRVFTAGSEERVTCLPPKGLPEPSVWWEHAGVRLPTHGRVYQKGHELVLANIAESDAGVYTCHAANLAGQRRQDVNITVATVPSWLKKPQDSQLEEGKPGYLDCLTQATPKPTVVWYRNQMLISEDSRFEVFKNGTLRINSVEVYDGTWYRCMSSTPAGSIEAQARVQVLEKLKFTPPPQPQQCMEFDKEATVPCSATGREKPTIKWERADGSSLPEWVTDNAGTLHFARVTRDDAGNYTCIASNGPQGQIRAHVQLTVAVFITFKVEPERTTVYQGHTALLQCEAQGDPKPLIQWKGKDRILDPTKLGPRMHIFQNGSLVIHDVAPEDSGRYTCIAGNSCNIKHTEAPLYVVDKPVPEESEGPGSPPPYKMIQTIGLSVGAAVAYIIAVLGLMFYCKKRCKAKRLQKQPEGEEPEMECLNGGPLQNGQPSAEIQEEVALTSLGSGPAATNKRHSTSDKMHFPRSSLQPITTLGKSEFGEVFLAKAQGLEEGVAETLVLVKSLQSKDEQQQLDFRRELEMFGKLNHANVVRLLGLCREAEPHYMVLEYVDLGDLKQFLRISKSKDEKLKSQPLSTKQKVALCTQVALGMEHLSNNRFVHKDLAARNCLVSAQRQVKVSALGLSKDVYNSEYYHFRQAWVPLRWMSPEAILEGDFSTKSDVWAFGVLMWEVFTHGEMPHGGQADDEVLADLQAGKARLPQPEGCPSKLYRLMQRCWALSPKDRPSFSEIASALGDSTVDSKP

SEQ ID NO: 23665 - protein, 236 aa, Homo sapiens [sequence omitted]

SEQ ID NO: 23666 - protein, 30 aa, Homo sapiens
LPFHLLSLPSLLLHSLIHGLLMPFPLPPDE

SEQ ID NO: 23667 - protein, 53 aa, Homo sapiens
LPFPVLSAMIRGAADGSRFQVWDYEEGEVEALLDRYFEADPPGQVAASPDPTT

SEQ ID NO: 23668 - protein, 8 aa, Homo sapiens
LAPLLPEM

SEQ ID NO: 23669 - protein, 383 aa, Homo sapiens
LGPALTMPSGCRCLHLVCLLCILGAPGQPVRADDCSSHCDLAHGCCAPDGSCRCDPGWEGLHCERCVRMPGCQHGTCHQPWQCICHSGWADEHICTTQSPCQNGGQCMYDGGGEYHCVCLPGFHGRDCERKAGPCEQAGSPCRNGGQCQDDQGFALNFTCRCLVGFVGARCEVNVDDCLMRPCANGATCLDGINRFSCLCPEGFAGRFCTINLDDCASRPCQRGARCRDRVHDFDCLCPSGYGGKTCELVLPVPDPPTTVDTPLGPTSAVVVPATGPAPHSAGAGLLRISVKEVVRRQEAGLGEPSLVALVVFGALTAALVLATVLLTLRAWRRGVCPPGPCCYPAPHYAPACQDQECQVSMLPAGLPLPRDLPPEPGKTTAL

SEQ ID NO: 23670 - protein, 389 aa, Homo sapiens
LGPALTMPSGCRCLHLVCLLCILGAPGQPVRADDCSSHCDLAHGCCAPDGSCRCDPGWEGLHCERCVRMPGCQHGTCHQPWQCICHSGWAGKFCDKDEHICTTQSPCQNGGQCMYDGGGEYHCVCLPGFHGRDCERKAGPCEQAGSPCRNGGQCQDDQGFALNFTCRCLVGFVGARCEVNVDDCLMRPCANGATCLDGINRFSCLCPEGFAGRFCTINLDDCASRPCQRGARCRDRVHDFDCLCPSGYGGKTCELVLPVPDPPTTVDTPLGPTSAVVVPATGPAPHSAGAGLLRISVKEVVRRQEAGLGEPSLVALVVFGALTAALVLATVLLTLRAWRRGVCPPGPCCYPAPHYAPACQDQECQVSMLPAGLPLPRDLPPEPGKTTAL

SEQ ID NO: 23671 - protein, 30 aa, Homo sapiens
VLMLWIFFLENGILLFHGLQESVESGGEWL

SEQ ID NO: 23672 - protein, 104 aa, Homo sapiens
VERLKMAASQAVEEMRSRVVLGEFGVRNVHTTDFPGNYSGYDDAWDQDRFEKNFRVDVVHMDENSLEFDMVGIDAAIANAFRRILLAEVLAGMVTRLELLWELH

SEQ ID NO: 23673 - protein, 155 aa, Homo sapiens
VERLKMAASQAVEEMRSRVVLGEFGVRNVHTTDFPGNYSGYDDAWDQDRFEKNFRVDVVHMDENSLEFDMVGIDAAIANAFRRILLAEVPTMAVEKVLVYNNTSIVQDEILAHRLGLIPIHADPRLFEYRNQGEKMKFWEKWTIWVQILVDCDVG

SEQ ID NO: 23674 - protein, 301 aa, Homo sapiens
VERLKMAASQAVEEMRSRVVLGEFGVRNVHTTDFPGNYSGYDDAWDQDRFEKNFRVDVVHMDENSLEFDMVGIDAAIANAFRRILLAEVPTMAVEKVLVYNNTSIVQDEILAHRLGLIPIHADPRLFEYRNQGDEEGTEIDTLQFRLQVRCTRNPHAAKDSSDPNELYVNHKVYTRHMTWIPLGNQADLFPEGTIRPVHDDILIAQLRPGQEIDLLMHCVKGIGKKVARVANPRLDTFSREIFRNEKLKKVVRLARVRDHYIFSVESTGVLPPDVLVSEAIKVLMGKCRRFLDELDAVQMD

SEQ ID NO: 23675 - protein, 347 aa, Homo sapiens
VERLKMAASQAVEEMRSRVVLGEFGVRNVHTTDFPGNYSGYDDAWDQDRFEKNFRVDVVHMDENSLEFDMVGIDAAIANAFRRILLAEVPTMAVEKVLVYNNTSIVQDEILAHRLGLIPIHADPRLFEYRNQGDEEGTEIDTLQFRLQVRCTRNPHAAKDSSDPNELYVNHKVYTRHMTWIPLGNQADLFPEGTIRPVHDDILIAQLRPGQEIDLLMHCVKGIGKDHAKFSPVATASYRLLPDITLLEPVEGEAAEELSRCFSPGVIEVQEVQGKKVARVANPRLDTFSREIFRNEKLKKVVRLARVRDHYICKKDLLAAVAHTCNPSTLGGQGEWITGSRERDHPG

SEQ ID NO: 23676 - protein, 1262 aa, Homo sapiens
VRSAGFFPARVAANAPPPASHPRRPPRPGTNGWSRRGSCRASWSRDCSGVRSRRVALGMAMDQVNALCEQLVKAVTVMMDPNSTQRYRLEALKFCEEFKEKCPICVPCGLRLAEKTQVAIVRHFGLQILEHVVKFRWNGMSRLEKVYLKNSVMELIANGTLNILEEENHIKDALSRIVVEMIKREWPQHWPDMLIELDTLSKQGETQTELVMFILLRLAEDVVTFQTLPPQRRRDIQQTLTQNMERIFSFLLNTLQENVNKYQQVKTDTSQESKAQANCRVGVAALNTLAGYIDWVSMSHITAENCKLLEILCLLLNEQELQLGAAECLLIAVSRKGKLEDRKPLMVLFGDVAMHYILSAAQTADGGGLVEKHYVFLKRLCQVLCALGNQLCALLGADSDVETPSNFGKYLESFLAFTTHPSQFLRSSTQMTWGALFRHEILSRDPLLLAIIPKYLRASMTNLVKMGFPSKTDSPSCEYSRFDFDSDEDFNAFFNSSRAQQGEVMRLACRLDPKTSFQMAGEWLKYQLSTFLDAGSVNSCSAVGTGEGSLCSVFSPSFVQWEAMTLFLESVITQMFRTLNREEIPVNDGIELLQMVLNFDTKDPLILSCVLTNVSALFPFVTYRPEFLPQVFSKLFSSVTFETVEESKAPRTRAVRNVRRHACSSIIKMCRDYPQLVLPNFDMLYNHVKQLLSNELLLTQMEKCALMEALVLISNQFKNYERQKVFLEELMAPVASIWLSQDMHRVLSDVDAFIAYVGTDQKSCDPGLEDPCGLNRARMSFCVYSILGVVKRTCWPTDLEEAKAGGFVVGYTSSGNPIFRNPCTEQILKLLDNLLALIRTHNTLYAPEMLAKMAEPFTKALDMLDAEKSAILGLPQPLLELNDSPVFKTVLERMQRFFSTLYENCFHILGKAGPSMQQDFYTVEDLATQLLSSAFVNLNNIPDYRLRPMLRVFVKPLVLFCPPEHYEALVSPILGPLFTYLHMRLSQKWQVINQRSLLCGEDEAADENPESQEMLEEQLVRMLTREVMDLITVCCVSKKGADHSSAPPADGDDEEMMATEVTPSAMAELTDLGKCLMKHEDVCTALLITAFNSLAWKDTLSCQRTTSQLCWPLLKQVLSGTLLADAVTWLFTSVLKGLQMHGQHDGCMASLVHLAFQIYEALRPRYLEIRAVMEQIPEIQKDSLDQFDCKLLNPSLQKVADKRRKDQFKRLIAGCIGKPLGEQFRKEVHIKNLPSLFKKTKPMLETEVLDNDGGGLATIFEP

SEQ ID NO: 23677 - protein, 81 aa, Homo sapiens
LDPLINSSSPLLRLGMFCWCGLCTSGMVTTGGSPQKHSFFYTSSQGHVSCPSLPGCGQKVICSWPSGGGGGPESEEMAQGQ

SEQ ID NO: 23678 - protein, 143 aa, Homo sapiens
MNFLLSWVHWSLALLLYLHHAKWSQAAPMAEGGGQNHHEVVKFMDVYQRSYCHPIETLVDIFQEYPDEIEYIFKPSCVPLMRCGGCCNDEGLECVPTEESNITMQVGIFGKWGKGGIGRGVTLWEQVVPGRFLARFALSGSCP

SEQ ID NO: 23679 - protein, 141 aa, Homo sapiens
MNFLLSWVHWSLALLLYLHHAKWSQAAPMAEGGGQNHHEVVKFMDVYQRSYCHPIETLVDIFQEYPDEIEYIFKPSCVPLMRCGGCCNDEGLECVPTEESNITMQIMRIKPHQGQHIGEMSFLQHNKCECRPKKDRARQEK

SEQ ID NO: 23680 - protein, 165 aa, Homo sapiens
LVGPAAGFSRAARADLSWDPMAFFTGLWGPFTCVSRVLSHHCFSTTGSLSAIQKMTRVRVVDNSALGNSPYHRAPRCIHVYKKNGVGKVGDQILLAIKGQKKKALIVGHCMPGPRMTPRFDSNNVVLIEDNGNPVGTRIKTPIPTSLRKREGEYSKVLAIAQNFV

SEQ ID NO: 23681 - protein, 62 aa, Homo sapiens
VVWRFFLLTDFCFPRRVLGPDLQALGREPLDGQWGHCGFGAQSRGTGCSLGICLSFSTLGSD

SEQ ID NO: 23682 - protein, 38 aa, Homo sapiens
LLVQASGGSWAWRTRVSLCMCLCVCVRVCQTVCLSWGG

SEQ ID NO: 23683 - protein, 28 aa, Homo sapiens
VLGLSGYRKASLRCSLLRIILFFSRFLF

SEQ ID NO: 23684 - protein, 810 aa, Homo sapiens
LPRHPAAKMPRIMIKGGVWRNTEDEILKAAVMKYGKNQWSRIASLLHRKSAKQCKARWYEWLDPSIKKTEWSREEEEKLLHLAKLMPTQWRTIAPIIGRTAAQCLEHYEFLLDKAAQRDNEEETTDDPRKLKPGEIDPNPETKPARPDPIDMDEDELEMLSEARARLANTQGKKAKRKAREKQLEEARRLAALQKRRELRAAGIEIQKKRKRKRGVDYNAEIPFEKKPALGFYDTSEENYQALDADFRKLRQQDLDGELRSEKEGRDRKKDKQHLKRKKESDLPSAILQTSGVSEFTKKRSKLVLPAPQISDAELQEVVKVGQASEIARQTAEESGITNSASSTLLSEYNVTNNSVALRTPRTPASQDRILQEAQNLMALTNVDTPLKGGLNTPLHESDFSGVTPQRQVVQTPNTVLSTPFRTPSNGAEGLTPRSGTTPKPVINSTPGRTPLRDKLNINPEDGMADYSDPSYVKQMERESREHLRLGLLGLPAPKNDFEIVLPENAEKELEEREIDDTYIEDAADVDARKQAIRDAERVKEMKRMHKAVQKDLPRPSEVNETILRPLNVEPPLTDLQKSEELIKKEMITMLHYDLLHHPYEPSGNKKGKTVGFGTNNSEHITYLEHNPYEKFSKEELKKAQDVLVQEMEVVKQGMSHGELSSEAYNQVWEECYSQVLYLPGQSRYTRANLASKKDRIESLEKRLEINRGHMTTEAKRAAKMEKKMKILLGGYQSRAMGLMKQLNDLWDQIEQAHLELRTFEELKKHEDSAIPRRLECLKEDVQRQQEREKELQHRYADLLLEKETLKSKF

SEQ ID NO: 23685 - protein, 567 aa, Homo sapiens
MLHSPHKQPQNHKCGANFLQEDSKKSLVFKWLISAGHYQPPRPTESFKAASSIYNRGYKFYLKKKGGTMASNSLFSTVTPCQQNFFWDPSTSRRFSPPSSSLQPGKMSDVSPVVAAQQQQQQQQQQQQQQQQQQQQQQQEAAAAAAAAAAAAAAAAAVPRLRPPHDNRTMVEIIADHPAELVRTDSPNFLCSVLPSHWRCNKTLPVAFKVVALGEVPDGTVVTVMAGNDENYSAELRNASAVMKNQVARFNDLRFVGRSGRGKSFTLTITVFTNPPQVATYHRAIKVTVDGPREPRRHRQKLDDSKPSLFSDRLSDLGRIPHPSMRVGVPPQNPRPSLNSAPSPFNPQGQSQITDPRQAQSSPPWSYDQSYPSYLSQMTSPSIHSTTPLSSTRGTGLPAITDVPRRISGASELGPFSDPRQFPSISSLTESRFSNPRMHYPATFTYTPPVTSGMSLGMSATTHYHTYLPPPYPGSSQSQSGPFQTSSTPYLYYGTSSGSYQFPMVPGGDRSPSRMLPPCTTTSNGSTLLNPNLPNQNDGVDADGSHSSSPTVLNSSGRMDESVWRPY

SEQ ID NO: 23686 - protein, 266 aa, Homo sapiens
VAPPRPGTVAPGANGMTDSATANGDDRDPEIELFVKAGIDGESIGNCPFSQRLFMILWLKGVVFNVTTVDLKRKPADLHNLAPGTHPPFLTFNGDVKTDVNKIEEFLEETLTPEKYPKLAAKHRESNTAGIDIFSKFSAYIKNTKQQNNAALERGLTKALKKLDDYLNTPLPEEIDANTCGEDKGSRRKFLDGDELTLADCNLLPKLHVVKIVAKKYRNYDIPAEMTGLWRYLKNAYARDEFTNTCAADSEIELAYADVAKRLSRS

SEQ ID NO: 23687 - protein, 220 aa, Homo sapiens
VAPPRPGTVAPGANGMTDSATANGDDRDPEIELFVKAGIDGESIGNCPFSQRLFMILWLKGVVFNVTTVDLKRKPADLHNLAPGTHPPFLTFNGDVKTDVNKIEEFLEETLTPEKYPKLAAKHRESNTAGIDIFSKFSAYIKNTKQQNNAALERGLTKALKKLDDYLNTPLPEEIDANTCGEDKGSRRKFLDGDELTLADCNLLPKLHVVKEQVPLKGMI

SEQ ID NO: 23688 - protein, 14 aa, Homo sapiens
LFSLCFVSVHLLIR

SEQ ID NO: 23689 - protein, 479 aa, Homo sapiens
LKMTSKFLLVSFILAALSLSTTFSLQPDQQKVLLVSFDGFRWDYLYKVPTPHFHYIMKYGVHVKQVTNVFITKTYPNHYTLVTGLFAENHGIVANDMFDPIRNKSFSLDHMNIYDSKFWEEATPIWITNQRAGHTSGAAMWPGTDVKIHKRFPTHYMPYNESVSFEDRVAKIIEWFTSKEPINLGLLYWEDPDDMGHHLGPDSPLMGPVISDIDKKLGYLIQMLKKAKLWNTLNLIITSDHGMTQCSEERLIELDQYLDKDHYTLIDQSPVAAILPKEGKFDEVYEALTHAHPNLTVYKKEDVPERWHYKYNSRIQPIIAVADEGWHILQNKSDDFLLGNHGYDNALADMHPIFLAHGPAFRKNFSKEAMNSTDLYPLLCHLLNITAMPHNGSFWNVQDLLNSAMPRVVPYTQSTILLPGSVKPAEYDQEGSYPYFIGVSLGSIIVIVFFVIFIKHLIHSQIPALQDMHAEIAQPLLQA

SEQ ID NO: 23690 - protein, 918 aa, Homo sapiens
LLLFSPGKMKVGVLWLISFFTFTDGHGGFLGKNDGIKTKKELIVNKKKHLGPVEEYQLLLQVTYRDSKEKRDLRNFLKLLKPPLLWSHGLIRIIRAKATTDCNSLNGVLQCTCEDSYTWFPPSCLDPQNCYLHTAGALPSCECHLNNLSQSVNFCERTKIWGTFKINERFTNDLLNSSSAIYSKYANGIEIQLKKAYERIQGFESVQVTQFRNGSIVAGYEVVGSSSASELLSAIEHVAEKAKTALHKLFPLEDGSFRVFGKAQCNDIVFGFGSKDDEYTLPCSSGYRGNITAKCESSGWQVIRETCVLSLLEELNKNFSMIVGNATEAAVSSFVQNLSVIIRQNPSTTVGNLASVVSILSNISSLSLASHFRVSNSTMEDVISIADNILNSASVTNWTVLLREEKYASSRLLETLENISTLVPPTALPLNFSRKFIDWKGIPVNKSQLKRGYSYQIKMCPQNTSIPIRGRVLIGSDQFQRSLPETIISMASLTLGNILPVSKNGNAQVNGPVISTVIQNYSINEVFLFFSKIESNLSQPHCVFWDFSHLQWNDAGCHLVNETQDIVTCQCTHLTSFSILMSPFVPSTIFPVVKWITYVGLGISIGSLILCLIIEALFWKQIKKSQTSHTRRICMVNIALSLLIADVWFIVGATVDTTVNPSGVCTAAVFFTHFFYLSLFFWMLMLGILLAYRIILVFHHMAQHLMMAVGFCLGYGCPLIISVITIAVTQPSNTYKRKDVCWLNWSNGSKPLLAFVVPALAIVAVNFVVVLLVLTKLWRPTVGERLSRDDKATIIRVGKSLLILTPLLGLTWGFGIGTIVDSQNLAWHVIFALLNAFQGFFILCFGILLDSKLRQLLFNKLSALSSWKQTEKQNSSDLSAKPKFSKPFNPLQNKGHYAFSHTGDSSDNIMLTQFVSNE

SEQ ID NO: 23691 - protein, 226 aa, Homo sapiens
LLLFSPGKMKVGVLWLISFFTFTDGHGGFLGKNDGIKTKKELIVNKKKHLGPVEEYQLLLQVTYRDSKEKRDLRNFLKLLKPPLLWSHGLIRIIRAKATTDCNSLNGVLQCTCEDSYTWFPPSCLDPQNCYLHTAGALPSCECHLNNLSQSVNFCERTKIWGTFKINERFTNDLLNSSSAIYSKYANGIEIQLKKAYERIQGFESVQVTQFRMSLLSPKLECNGTI

SEQ ID NO: 23692 - protein, 316 aa, Homo sapiens
MPLGSAVDILATDDPNFSQEDQQDTQIYEKHDNLLHGTKKKKEKMVSAAFMKKYIHVAKIIKPVLTQESATYIAEEYSRLRSQDSMSSDTARTSPVTARTLETLIRLATAHAKARMSKTVDLQDAEEAVELVQYAYFKKVLEKEKKRKKRSEDESETEDEEEKSQEDQEQKRKRRKTRQPDAKDGDSYDPYDFSDTEEEMPQVHTPKTADSQETKESQKVELSESRDGISPCCPGWSWTPGLKQSFYLSLPKGWDYRHKPLCLFDLILFNDCRVSMVEGIQGGPLGCVPGSSCAVNRHESPHRIHQPGQRRALLFS

SEQ ID NO: 23693 - protein, 94 aa, Homo sapiens
MLPTSHQWMLFSVFLGWWSCQWSCSHLLSCLWRAAFSEFPLGPEPGEGIGPELCLCFQMEAIELSVDPKSNKRQCLVFVTPQRRGTCEKYSGEI

SEQ ID NO: 23694 - protein, 164 aa, Homo sapiens
LCGGCVLVFLFLLHRYIRFFPDGHVMMLTTPEEPQSIVPRLRTRNTRTDAILLGHYRLSQDTDNQTKVFAVITKKKEEKPLDYKYRYFRRVPVQEADQSFHVGLQLCSSGHQRFNKLIWIHHSCHITYKSTGETAVSAFEIDKMYTPLFFARVRSYTAFSERPL

SEQ ID NO: 23695 - protein, 54 aa, Homo sapiens
LSASREPHVLLVLTSPRAPSSRGVWGSCCLPGSALLIPQPVSAPVVSRCDFFFF

SEQ ID NO: 23696 - protein, 929 aa, Homo sapiens
LCLSVFLSFSFSFNMELEKREKRSLLNKNLEEKLTVSAGGSEAKPLIFTFVPTVRRLPTHTQLADTSKFLVKIPEESSDKSPETVNRSKSNDYLTLNAGSQQERDQAKLTCPSEVSGTILQEREFEANKLQGMQQSDLFKAEYVLIVDSEGEDEAASRKVEQGPPGGIGTAAVRPKSLAISSSLVSDVVRPKTQGTDLKTSSHPEMLHGMAPQQKHGQLTSSPTTSEQLACKPPAFSFVSPTNPNTPPDPVNLEGASVLEEFHTRRLDVGGAVVEESATYFQTTAHSTPFSASKGTSSTLLFPHSTQLSGSNLPSSTAADPKPGLTSEVLKKTTLTSHVLSHGESPRTSSSPPSSSASLKSNSASYIPVRIVTHSLSPSPKPFTSSFHGSSSTICSQMSSSGNLSKSGVKSPVPSRLALLTAILKSNPSHQRPFSPASCPTFSLNSPASSTLTLDQKEKQTPPTPKKSLSSCSLRAGSPDQGELQVSELTQQSFHLPVFTKSTPLSQAPSLSPTKQASSSLASMNVERTPSPTLKSNTMLSLLQTSTSSSVGLPPVPPSSSLSSLKSKQDGDLRGPENPRNIHTYPSTLASSALSSLSPPINQRATFSSSEKCFHPSPALSSLINRSKRASSQLSGQELNPSALPSLPVSSADFASLPNLRSSSLPHANLPTLVPQLSPSALHPHCGSGTLPSRLGKSESTTPNHRSPVSTPSLPISLTRTEELISPCALSMSTGPENKKSKQYKTKSSYKAFAAIPTNTLLLEQKALDEPAKTESVSKDNTLEPPVELYFPAQLRQQTEELCATIDKVLQDSLSMHSSDSPSRSPKTLLGSDTVKTPTTLPRAAGRETKYANLSSPSSTVSESQLTKPGVIRPVPVKSRILLKKEEEVYEPNPFSKYLEDNSDLFSEQAAHSVDSYCNGSDTSGPWLL

SEQ ID NO: 23697 - protein, 472 aa, Homo sapiens
LCLSVFLSFSFSFNMELEKREKRSLLNKNLEEKLTVSAGGSEAKPLIFTFVPTVRRLPTHTQLADTSKFLVKIPEESSDKSPETVNRSKSNDYLTLNAGSQQERDQAKLTCPSEVSGTILQEREFEANKLQGMQQSDLFKAEYVLIVDSEGEDEAASRKVEQGPPGGIGTAAVRPKSLAISSSLVSDVVRPKTQGTDLKTSSHPEMLHGMAPQQKHGQQYKTKSSYKAFAAIPTNTLLLEQKALDEPAKTESVSKDNTLEPPVELYFPAQLRQQTEELCATIDKVLQDSLSMHSSDSPSRSPKTLLGSDTVKTPTTLPRAAGRETKYANLSSPSSTVSESQLTKPGVIRPVPVKSRILLKKEEEVYEPNPFSKYLEDNSDLFSEQDVTVPPKPVSLHPLYQTKLYPPAKSLLHPQTLSHADCLAPGPFSHLSFSLSDEQENSHTLLSHNACNKLSHPMVAIPEHEALDSKEQ

SEQ ID NO: 23698 - protein, 171 aa, Homo sapiens
VYRALDVLQMEEEDVLKFLAAGIHLGGTNLDFQMKQYIYKKKCDGVYIINLKRTWEKLLLAACAIVAIENPADVRVISSRNTGQRAILKFAAATGATPIAGRFTPGIFTNQIQATFQEPQHLFFTDSRADHCLSQRHLMLTYIPLLHVIQILRCAMWTLPSHARRELTQWV

SEQ ID NO: 23699 - protein, 47 aa, Homo sapiens
LGHNSDGKFIFGARRIEYDCELVPPRLAIFIEKTKDGQILPVPNVVV

SEQ ID NO: 23700 - protein, 788 aa, Homo sapiens
VQGGKGSGGGCGSRDSRSSGAVSAAVGDMGDPGSEIIESVPPAGPEASESTTDENEDDIQFVSILFPKMPKRQGDFLHFLNVKKVKTDTENNEVSKNHCRLSKAKEPHFEYIEQPIIEEKPSLSSKKEIDNLVLPDCWNEKQAFMFTEQYKWLEIKEGKLGCKDCSAVRHLGSKAEKHVHVSKEWIAYLVTPNGSNKTTRQASLRKKIREHDVSKAHGKIQDLLKESTNDSICNLVHKQNNKNIDATVKVFNTVYSLVKHNRPLSDIEGARELQEKNGEVNCLNTRYSATRIAEHIAKEMKMKIFKNIIEENAKICIIIDEASTVSKKTTLVIYLQCTIQSAPAPVMLFVALKELVSTIAECIVNTLLTTLNDCGFTNEYLKANLIAFCSDGANTILGRKSGVATKLLENFPEIIIWNCLNHRLQLSLDDSISEIKQINHLKIFIDKIYSIYHQPNKNQTKLLGTVAKELETEIIKIGRVMGPRWAACSLQAATAVWHAYPILYMHFSHSYSGLAKRLANINFLQDLALMIDILEEFSVLSTALQSRSTNIKKAQKLIKRTIRALENLKIGTGKYESQIEDLIKSDKFKDIPFNKNNKFNALPRSILLDNIIQHMNLRLLSDRNHEDIFNYFDLLEPSTWPYEEITSPWIAGEKTLFHLCKILKYEVDLNDFREFVNNNIKSNNVSIPTTIYKAKKIVSTIAINSAEAERGFNLMNIICTRVRNSLTIDHVSDLMTINLLGKELADWDATPFVKSWSNCNHRLATDTRVRQKSTKVFHENQLAIWNLK

SEQ ID NO: 23701 - protein, 815 aa, Homo sapiens
VQGGKGSGGGCGSRDSRSSGAVSAAVGDMGDPGSEIIESVPPAGPEASESTTDENEDDIQFVSEGPSRPVLEYIDLVCGDDENPSAYYSDILFPKMPKRQGDFLHFLNVKKVKTDTENNEVSKNHCRLSKAKEPHFEYIEQPIIEEKPSLSSKKEIDNLVLPDCWNEKQAFMFTEQYKWLEIKEGKLGCKDCSAVRHLGSKAEKHVHVSKEWIAYLVTPNGSNKTTRQASLRKKIREHDVSKAHGKIQDLLKESTNDSICNLVHKQNNKNIDATVKVFNTVYSLVKHNRPLSDIEGARELQEKNGEVNCLNTRYSATRIAEHIAKEMKMKIFKNIIEENAKICIIIDEASTVSKKTTLVIYLQCTIQSAPAPVMLFVALKELVSTIAECIVNTLLTTLNDCGFTNEYLKANLIAFCSDGANTILGRKSGVATKLLENFPEIIIWNCLNHRLQLSLDDSISEIKQINHLKIFIDKIYSIYHQPNKNQTKLLGTVAKELETEIIKIGRVMGPRWAACSLQAATAVWHAYPILYMHFSHSYSGLAKRLANINFLQDLALMIDILEEFSVLSTALQSRSTNIKKAQKLIKRTIRALENLKIGTGKYESQIEDLIKSDKFKDIPFNKNNKFNALPRSILLDNIIQHMNLRLLSDRNHEDIFNYFDLLEPSTWPYEEITSPWIAGEKTLFHLCKILKYEVDLNDFREFVNNNIKSNNVSIPTTIYKAKKIVSTIAINSAEAERGFNLMNIICTRVRNSLTIDHVSDLMTINLLGKELADWDATPFVKSWSNCNHRLATDTRVRQKSTKVFHENQLAIWNLK

SEQ ID NO: 23702 - protein, 103 aa, Homo sapiens
VQGGKGIRGDGGGRDSRSSGAVSAAVGDMGDPGSEIIESVPPAGPEASESTTDENEDDIQFVSEGPLRPVLEYIDLVSSDDEEPSTSYTDVPYTTGFFCSRTT

SEQ ID NO: 23703 - protein, 587 aa, Homo sapiens
VQGGKGIRGDGGGRDSRSSGAVSAAVGDMGDPGSEIIESVPPAGPEASESTTDENEDDIQFVSEGPLRPVLEYIDLVSSDDEEPSTSYTDRMPESKVPSSENHRPEMCSSCNVPLPIGDSSSFSGSCSSSPERIVSQTSSVENPLENQKNDQNNSDTKISETETLKSSQNFQTLPSSPLLVPQESLASSEVKENLRIDSSSASQHGRDAILYLQTQVAEMSRVIRDLQSRSCFRFHHSRPSENSSVPWDISTSKEENLSTVEEETDYKSPSADDKGQPSDPSQSSFTGLLKRMEQRGVIKRVTLQSEAESCEGKPDCVTSKKRLVPPLHPLLRIATTEVFKDPADCHPSSFMGHRVYPVAKDTSPFQPNPPAEGPIVEALEHSKRGNTTSPLDSTSKEMEVMGCRFYHAASIAARAASYMAYMTQYQRKLWEDMEDLVHDPEFDRGKARCIISDGMDAGLWQLCTTRDIMDSVVRVMAMAIDYRRQAWLRLTSLTKKTQEKISHLPFDGTSLFGQDVKAVVAEDNNIKENDYKDHKYYNQHRYFYSHDQKAHYHNRGYSKGDWYKPRNHPYRYRKKGDSPERHGYKN

SEQ ID NO: 23704 - protein, 101 aa, Homo sapiens
VQGGKGIRGDGGGRDSRSSGAVSAAVGDMGDPGSEIIESVPPAGPEASESTTDENEDDIQFVSEGPLRPVLEYIDLVSSDDEEPSTSYTDGSALCLMTLPL

SEQ ID NO: 23705 - protein, 960 aa, Homo sapiens
VQGGKGIRGDGGGRDSRSSGAVSAAVGDMGDPGSEIIESVPPAGPEASESTTDENEDDIQFVSEGPLRPVLEYIDLVSSDDEEPSTSYTDENIKRKDHIDYQKDKVALTLARLARHVEVEKQQKEEKNRAFREKIDFQHAHGLQELEFIRGHSDTEAARLCVDQWLKMPGLKTGTINCGTKSSFRRGGHTWVSGKPILCPIMHCNKEFDNGHLLLGHLKRFDHSPCDPTITLHGPFFSSFACVVCYKKFVTQQQYRDHLFDKEATDDGHNNNLLPQIIQCFACPNCFLLFSRKEECSKHMSGKNHFHQSFKLGDNKGIAHPISFPSFAKKLLISLCKDVPFQVKCVACHKTLRSHMELTAHFRVHCRNAGPVAVAEKSITQVAEKFILRGYCPDCNQVFVDETSTQNHKQNSGHKVRVINSVEESVLLYCHSSEGNKDPSSDLHLLLDQSKFSSLKRTMSIKESSSLECIAIPKKKMNLKDKSHEGVACVQKEKSVVKTWFCECNQRFPSEDAVEKHVFSANTMGYKCVVCGKVCDDSGVIRLHMSRIHGGAHLNNFLFWCRTCKKELTRKDTIMAHVTEFHNGHRYFYEMDEVEGETLPSSSTTLDNLTANKPSSAITVIDHSPANSSPRGKWQCRICEDMFDSQEYVKQHCMSLASHKFHRYSCAHCRKPFHKIETLYRHCQDEHDNEIKIKYFCGLCDLIFNVEEAFLSHYEEHHSIDYVFVSEKTETSIKTEDDFPVIETSNQLTCGCRESYICKVNRKEDYSRCLQIMLDKGKLWFRCSLCSATAQNLTDMNTHIHQVHKEKSDEEEQQYVIKCGTCTKAFHDPESAQQHFHRKHCFLQKPSVAHFGSEKSNLYKFTASASHTERKLKQAINYSKSLDMEKGVENDLSYQNIEEEIVELPDLDYLRTMTHIVFVDFDNWSNFFGHLPGHLNQGTFIWGFQGTVNKKNKRKLFPTS

SEQ ID NO: 23706 - protein, 1089 aa, Homo sapiens
VQGGKGIRGDGGGRDSRSSGAVSAAVGDMGDPGSEIIESVPPAGPEASESTTDENEDDIQFVSEGPLRPVLEYIDLVSSDDEEPSTSYTDENIKRKDHIDYQKDKVALTLARLARHVEVEKQQKEEKNRAFREKIDFQHAHGLQELEFIRGHSDTEAARLCVDQWLKMPGLKTGTINCGTKSSFRRGGHTWVSGKPILCPIMHCNKEFDNGHLLLGHLKRFDHSPCDPTITLHGPFFSSFACVVCYKKFVTQQQYRDHLFDKEATDDGHNNNLLPQIIQCFACPNCFLLFSRKEECSKHMSGKNHFHQSFKLGDNKGIAHPISFPSFAKKLLISLCKDVPFQVKCVACHKTLRSHMELTAHFRVHCRNAGPVAVAEKSITQVAEKFILRGYCPDCNQVFVDETSTQNHKQNSGHKVRVINSVEESVLLYCHSSEGNKDPSSDLHLLLDQSKFSSLKRTMSIKESSSLECIAIPKKKMNLKDKSHEGVACVQKEKSVVKTWFCECNQRFPSEDAVEKHVFSANTMGYKCVVCGKVCDDSGVIRLHMSRIHGGAHLNNFLFWCRTCKKELTRKDTIMAHVTEFHNGHRYFYEMDEVEGETLPSSSTTLDNLTANKPSSAITVIDHSPANSSPRGKWQCRICEDMFDSQEYVKQHCMSLASHKFHRYSCAHCRKPFHKIETLYRHCQDEHDNEIKIKYFCGLCDLIFNVEEAFLSHYEEHHSIDYVFVSEKTETSIKTEDDFPVIETSNQLTCGCRESYICKVNRKEDYSRCLQIMLDKGKLWFRCSLCSATAQNLTDMNTHIHQVHKEKSDEEEQQYVIKCGTCTKAFHDPESAQQHFHRKHCFLQKPSVAHFGSEKSNLYKFTASASHTERKLKQAINYSKSLDMEKGVENDLSYQNIEEEIVELPDLDYLRTMTHIVFVDFDNWSNFFGHLPGHLNQGTFIWGFQGGNTNWKPPLNCKIYNYLNRIGCFFLHPRCSKRKDAADFAICMHAGRLDEQLPKQIPFTILSGDQGFLELENQFKKTQRPAHILNPHHLEGDMMCALLNSISDTTKECDSDDNMGAKNTSIGEEFISTEDVELEEAIRRSLEEM

SEQ ID NO: 23707 - protein, 1041 aa, Homo sapiens
VQGGKGIRGDGGGRDSRSSGAVSAAVGDMGDPGSEIIESVPPAGPEASESTTDENEDDIQFVSEGPLRPVLEYIDLVSSDDEEPSTSYTDENIKRKDHIDYQKDKVALTLARLARHVEVEKQQKEEKNRAFREKIDFQHAHGLQELEFIRGHSDTEAARLCVDQWLKMPGLKTGTINCGTKSSFRRGGHTWVSGKPILCPIMHCNKEFDNGHLLLGHLKRFDHSPCDPTITLHGPFFSSFACVVCYKKFVTQQQYRDHLFDKEATDDGHNNNLLPQIIQCFACPNCFLLFSRKEECSKHMSGKNHFHQSFKLGDNKGIAHPISFPSFAKKLLISLCKDVPFQVKCVACHKTLRSHMELTAHFRVHCRNAGPVAVAEKSITQVAEKFILRGYCPDCNQVFVDETSTQNHKQNSGHKVRVINSVEESVLLYCHSSEGNKDPSSDLHLLLDQSKFSSLKRTMSIKESSSLECIAIPKKKMNLKDKSHEGVACVQKEKSVVKTWFCECNQRFPSEDAVEKHVFSANTMGYKCVVCGKVCDDSGVIRLHMSRIHGGAHLNNFLFWCRTCKKELTRKDTIMAHVTEFHNGHRYFYEMDEVEGETLPSSSTTLDNLTANKPSSAITVIDHSPANSSPRGKWQCRICEDMFDSQEYVKQHCMSLASHKFHRYSCAHCRKPFHKIETLYRHCQDEHDNEIKIKYFCGLCDLIFNVEEAFLSHYEEHHSIDYVFVSEKTETSIKTEDDFPVIETSNQLTCGCRESYICKVNRKEDYSRCLQIMLDKGKLWFRCSLCSATAQNLTDMNTHIHQVHKEKSDEEEQQYVIKCGTCTKAFHDPESAQQHFHRKHCFLQKPSVAHFGSEKSNLYKFTASASHTERKLKQAINYSKSLDMEKGVENDLSYQNIGGNTNWKPPLNCKIYNYLNRIGCFFLHPRCSKRKDAADFAICMHAGRLDEQLPKQIPFTILSGDQGFLELENQFKKTQRPAHILNPHHLEGDMMCALLNSISDTTKECDSDDNMGAKNTSIGEEFISTEDVELEEAIRRSLEEM

SEQ ID NO: 23708 - protein, 22 aa, Homo sapiens
LATNKVRLKIIIILKRAKEGAN

SEQ ID NO: 23709 - protein, 41 aa, Homo sapiens
MWFIPSIISNIESRAYMVICLLTLCLHLPHSYQYTSGLLNH

SEQ ID NO: 23710 - protein, 31 aa, Homo sapiens
VNKQPLLLTLSLFKLSLQLDARITFGAESPG

SEQ ID NO: 23711 - protein, 556 aa, Homo sapiens
LQGLTGPDGSPGSIGSKGQKGEPGVPGSRGFPGRGIPGPPGPPGTAGLPGELGRVGPVGTIGFHDGDPLCPNACPPGRSGYPGLPGMRGHKGAKGEIGEPGRQGHKGEEGDQGELGEVGAQGPPGAQGLRGITGIVGDKGEKGARGLDGEPGPQGLPGAPGDQGQRGPPGEAGPKGDRGAEGARGIPGLPGPKGDTGLPGVDGRDGIPGMPGTKGEPGKPGPPGDAGLQGLPGVPGIPGAKGVAGEKGSTGAPGKPGQMGNSGKPGQQGPPGEVGPRGPQGLPGSRGELGPVGSPGLPGKLGVVGEPGPKGEQGASGEEGEAGERGELGDIGLPGPKGSAGNPGEPGLRGPEGSRGLPGVEGPRGPPGPRGVQGEQGATGLPGVQGPPGRAPTDQHIKQVCMRVIQEHFAEMAASLKRPDSGATGLPGRPGPPGPPGPPGENGFPGQMGIRGLPGIKGPPGALGLRGPKGDLGEKGERGPPGRGPNGLPGAIGLPGDPGPASYGRNGRDGERGPPGVAGIPGVPGPPGPPGLPGFCEPASCTMQAGQRAFNKGPDP

SEQ ID NO: 23712 - protein, 1091 aa, Homo sapiens
LLLLLLPPPPLLLLLPPPLGLRCEGEAGAQLLGVHPKGESQRASRGGGQATKMSSAVGPRGPRPPTVPPPMQELPDLSHLTEEERNIIMAVMDRQKEEEEKEEAMLKCVVRDMAKPAACKTPRNAENQPHQPSPRLHQQFESYKEQVRKIGEEARRYQGEHKDDAPTCGICHKTKFADGCGHLCSYCRTKFCARCGGRVSLRSNNEDKVVMWVCNLCRKQQEILTKSGAWFFGSGPQQTSQDGTLSDTATGAGSEVPREKKARLQERSRSQTPLSTAAASSQDAAPPSAPPDRSKGAEPSQQALGPEQKQASSRSRSEPPRERKKTPGLSEQNGKGALKSERKRVPKTSAQPVEGAVEERERKERRESRRLEKGRSQDYPDTPEKRDEGKAADEEKQRKEEDYQTRYRSDPNLARYPVKPPPEEQQMRMHARVSRARHERRHSDVALPRTEAGAALPEGKAGKRAPAAARASPPDSPRAYSAERTAETRAPGAKQLTNHSPPAPRHGPVPAEAPELKAQEPLRKQSRLDPSSAVLMRKAKREKVETMLRNDSLSSDQSESVRPSPPKPHRSKRGGKKRQMSVSSSEEEGVSTPEYTSCEDVELESESVSEKGDLDYYWLDPATWHSRETSPISSHPVTWQPSKEGDRLIGRVILNKRTTMPKDSGALLGLKVVGGKMTDLGRLGAFITKVKKGSLADVVGHLRAGDEVLEWNGKPLPGATNEEVYNIILESKSEPQVEIIVSRPIGDIPRIPESSHPPLESSSSSFESQKMERPSISVISPTSPGALKDAPQVLPGQLSVKLWYDKVGHQLIVNVLQATDLPARVDGRPRNPYVKMYFLPDRSDKSKRRTKTVKKILEPKWNQTFVYSHVHRRDFRERMLEITVWDQPRVQEEESEFLGEILIELETALLDDEPHWYKLQTHDESSLPLPQPSPFMPRRHIHGESSSKKLQRSQRISDSDISDYEVDDGIGVVPPVGYRSSARESKSTTLTVPEQQRTTHHRSRSVSPHRGNDQGKPRSRLPNVPLQRSLDEIHPTRRSRSPTRHHDASRSPVDHRTRDVDSQYLSEQDSELLMLPRAKRGRSAECLHTTR

SEQ ID NO: 23713 - protein, 1533 aa, Homo sapiens
LLLLLLPPPPLLLLLPPPLGLRCEGEAGAQLLGVHPKGESQRASRGGGQATKMSSAVGPRGPRPPTVPPPMQELPDLSHLTEEERNIIMAVMDRQKEEEEKEEAMLKCVVRDMAKPAACKTPRNAENQPHQPSPRLHQQFESYKEQVRKIGEEARRYQGEHKDDAPTCGICHKTKFADGCGHLCSYCRTKFCARCGGRVSLRSNNEDKVVMWVCNLCRKQQEILTKSGAWFFGSGPQQTSQDGTLSDTATGAGSEVPREKKARLQERSRSQTPLSTAAASSQDAAPPSAPPDRSKGAEPSQQALGPEQKQASSRSRSEPPRERKKTPGLSEQNGKGALKSERKRVPKTSAQPVEGAVEERERKERRESRRLEKGRSQDYPDTPEKRDEGKAADEEKQRKEEDYQTRYRSDPNLARYPVKPPPEEQQMRMHARVSRARHERRHSDVALPRTEAGAALPEGKAGKRAPAAARASPPDSPRAYSAERTAETRAPGAKQLTNHSPPAPRHGPVPAEAPELKAQEPLRKQSRLDPSSAVLMRKAKREKVETMLRNDSLSSDQSESVRPSPPKPHRSKRGGKKRQMSVSSSEEEGVSTPEYTSCEDVELESESVSEKGDLDYYWLDPATWHSRETSPISSHPVTWQPSKEGDRLIGRVILNKRTTMPKDSGALLGLKVVGGKMTDLGRLGAFITKVKKGSLADVVGHLRAGDEVLEWNGKPLPGATNEEVYNIILESKSEPQVEIIVSRPIGDIPRIPESSHPPLESSSSSFESQKMERPSISVISPTSPGALKDAPQVLPGQLSVKLWYDKVGHQLIVNVLQATDLPARVDGRPRNPYVKMYFLPDRSDKSKRRTKTVKKILEPKWNQTFVYSHVHRRDFRERMLEITVWDQPRVQEEESEFLGEILIELETALLDDEPHWYKLQTHDESSLPLPQPSPFMPRRHIHGESSSKKLQRSQRISDSDISDYEVDDGIGVVPPVGYRSSARESKSTTLTVPEQQRTTHHRSRSVSPHRGNDQGKPRSRLPNVPLQRSLDEIHPTRRSRSPTRHHDASRSPVDHRTRDVDSQYLSEQDSELLMLPRAKRGRSAECLHTTSELQPFLDRARSASTNCLRPDTSLHSPERERMHRQRSPTQSPPADTSFSSRRGRQLPQVPVRSGSIEQASLVVEERTRQMKMKVHRFKQTTGSGSSQELDREQYSKYNIHKDQYRSCDNVSAKSSDSDVSDVSAISRTSSASRLSSTSFMSEQSERPRGRISSFTPKMQGRRMGTSGRSIMKSTSVSGEMYTLEHNDGSQSDTAVGTVGAGGKKRRSSLSAKVVAIVSRRSRSTSQLSQTESGHKKLKSTIQRSTETGMAAEMRKMVRQPSRESTDGSINSYSSEGNLIFPGVRLGADSQFSDFLDGLGPAQLVGRQTLATPAMAPYVKVYLLENGACIAKKKTRIARKTLDPLYQQSLVFDESPQGKVLQVIVWGDYGRMDHKCFMGVAQILLEELDLSSMVIGWYKLFPPSSLVDPTLTPLTRRASQSSLESSTGPPCIRS

SEQ ID NO: 23714 - protein, 541 aa, Homo sapiens
MFAGFLQFLLLHTLHSGTGDLDYYWLDPATWHSRETSPISSHPVTWQPSKEGDRLIGRVILNKRTTMPKDSGALLGLKVVGGKMTDLGRLGAFITKVKKGSLADVVGHLRAGDEVLEWNGKPLPGATNEEVYNIILESKSEPQVEIIVSRPIGDIPRIPESSHPPLESSSSSFESQKMERPSISVISPTSPGALKDAPQVLPGQLSVKLWYDKVGHQLIVNVLQATDLPARVDGRPRNPYVKMYFLPDRSDKSKRRTKTVKKILEPKWNQTFVYSHVHRRDFRERMLEITVWDQPRVQEEESEFLGEILIELETALLDDEPHWYKLQTHDESSLPLPQPSPFMPRRHIHGESSSKKLQRSQRISDSDISDYEVDDGIGVVPPVGYRSSARESKSTTLTVPEQQRTTHHRSRSVSPHRGNDQGKPRSRLPNVPLQRSLDEIHPTRRSRSPTRHHDASRSPVDHRTRDVDSQYLSEQDSELLMLPRAKRGRSAECLHTTSELQPFLDRARSASTNCLRPDTSLHSPERERYKIKTFLISYHLY

SEQ ID NO: 23715 - protein, 498 aa, Homo sapiens
MLPRAKRGRSAECLHTTRHSRKSERSSIQKQTRKGTASDAERMHRQRSPTQSPPADTSFSSRRGRQLPQVPVRSGSIEQEQEKYNSSTKASLVVEERTRQMKMKVHRFKQTTGSGSSQELDREQYSKYNIHKDQYRSCDNVSAKSSDSDVSDVSAISRTSSASRLSSTSFMSEQSERPRGRISSFTPKMQGRRMGTSGRSIMKSTSVSGEMYTLEHNDGSQSDTAVGTVGAGGKKRRSSLSAKVVAIVSRRSRSTSQLSQTESGHKKLKSTIQRSTETGMAAEMRKMVRQPSRESTDGSINSYSSEGNLIFPGVRLGADSQFSDFLDGLGPAQLVGRQTLATPAMGDIQIGMEDKKGQLEVEVIRARSLTQKPGSKSTPAPYVKVYLLENGACIAKKKTRIARKTLDPLYQQSLVFDESPQGKVLQVIVWGDYGRMDHKCFMGVAQILLEELDLSSMVIGWYKLFPPSSLVDPTLTPLTRRASQSSLESSTGPPCIRS

SEQ ID NO: 23716 - protein, 39 aa, Homo sapiens
LDRREGNQMAEAVTESIPERPETRNAVGLPEAVPSLICD

SEQ ID NO: 23717 - protein, 17 aa, Homo sapiens
VLGFQQLLLALPLAAFS

SEQ ID NO: 23718 - protein, 91 aa, Homo sapiens
LTLRRLERRIHTTQLFAAGTRRPAGDPALEKRQRRGLASWRGARTTRARLAAPASLPRKQGAPRCARGFPGPAFQSLSGFRPTPAPLRAEM

SEQ ID NO: 23719 - protein, 91 aa, Homo sapiens
LGADLFLTQLLLLVSSPPLFREEDHGQGWAKHQGLTQCFSHANVCENHMKTDSDLAGLERGLGFCFTLADSRPWRLYKWGQFGGNLMSKGN

SEQ ID NO: 23720 - protein, 75 aa, Homo sapiens
VCVCLPNHAIIVMLNRTEPYVPEGGAYLPEREPFIVPVEPERTAEYEDYGADEPAEEPPEPHRRWRRALPHGPGQ

SEQ ID NO: 23721 - protein, 3063 aa, Homo sapiens
MRSRLPPALAALGAALLLSSIEAEVDPPSDLNFKIIDENTVHMSWAKPVDPIVGYRITVDPTTDGPTKEFTLSASTTETLLSELVPETEYVVTITSYDEVEESVPVIGQLTIQTGSSTKPVEKKPGKTEIQKCSVSAWTDLVFLVDGSWSVGRNNFKYILDFIAALVSAFDIGEEKTRVGVVQYSSDTRTEFNLNQYYQRDELLAAIKKIPYKGGNTMTGDAIDYLVKNTFTESAGARVGFPKVAIIITDGKSQDEVEIPARELRNVGVEVFSLGIKAADAKELKQIASTPSLNHVFNVANFDAIVDIQNEIISQVCSGVDEQLGELVSGEEVVEPPSNLIAMEVSSKYVKLNWNPSPSPVTGYKVILTPMTAGSRQHALSVGPQTTTLSVRDLSADTEYQISVSAMKGMTSSEPISIMEKTQPMKVQVECSRGVDIKADIVFLVDGSYSIGIANFVKVRAFLEVLVKSFEISPNRVQISLVQYSRDPHTEFTLKKFTKVEDIIEAINTFPYRGGSTNTGKAMTYVREKIFVPSKGSRSNVPKVMILITDGKSSDAFRDPAIKLRNSDVEIFAVGVKDAVRSELEAIASPPAETHVFTVEDFDAFQRISFELTQSICLRIEQELAAIKKKAYVPPKDLSFSEVTSYGFKTNWSPAGENVFSYHITYKEAAGDDEVTVVEPASSTSVVLSSLKPETLYLVNVTAEYEDGFSIPLAGEETTEEVKGAPRNLKVTDETTDSFKITWTQAPGRVLRYRIIYRPVAGGESREVTTPPNQRRRTLENLIPDTKYEVSVIPEYFSGPGTPLTGNAATEEVRGNPRDLRVSDPTTSTMKLSWSGAPGKVKQYLVTYTPVAGGETQEVTVRGDTTNTVLQGLKEGTQYALSVTALYASGAGDALFGEGTTLEERGSPQDLVTKDITDTSIGAYWTSAPGMVRGYRVSWKSLYDDVDTGEKNLPEDAIHTMIENLQPETKYRISVFATYSSGEGEPLTGDATTELSQDSKTLKVDEETENTMRVTWKPAPGKVVNYRVVYRPHGRGKQMVAKVPPTVTSTVLKRLQPQTTYDITVLPIYKMGEGKLRQGSGTTASRFKSPRNLKTSDPTMSSFRVTWEPAPGEVKGYKVTFHPTGDDRRLGELVVGPYDNTVVLEELRAGTTYKVNVFGMFDGGESSPLVGQEMTTLSDTTVMPILSSGMECLTRAEADIVLLVDGSWSIGRANFRTVRSFISRIVEVFDIGPKRVQIALAQYSGDPRTEWQLNAHRDKKSLLQAVANLPYKGGNTLTGMALNFIRQQNFRTQAGMRPRARKIGVLITDGKSQDDVEAPSKKLKDEGVELFAIGIKNADEVELKMIATDPDDTHAYNVADFESLSRIVDDLTINLCNSVKGPGDLEAPSNLVISERTHRSFRVSWTPPSDSVDRYKVEYYPVSGGKRQEFYVSRMETSTVLKDLKPETEYVVNVYSVVEDEYSEPLKGTEKTLPVPVVSLNIYDVGPTTMHVQWQPVGGATGYILSYKPVKDTEPTRPKEVRLGPTVNDMQLTDLVPNTEYAVTVQAVLHDLTSEPVTVREVTLPLPRPQDLKLRDVTHSTMNVFWEPVPGKVRKYIVRYKTPEEDVKEVEVDRSETSTSLKDLFSQTLYTVSVSAVHDEGESPPVTAQETTRPVPAPTNLKITEVTSEGFRGTWDHGASDVSLYRITWAPFGSSDKMETILNGDENTLVFENLNPNTIYEVSITAIYPDESESDDLIGSERTLPILTTQAPKSGPRNLQVYNATSNSLTVKWDPASGRVQKYRITYQPSTGEGNEQTTTIGGRQNSVVLQKLKPDTPYTITVSSLYPDGEGGRMTGRGKTKPLNTVRNLRVYDPSTSTLNVRWDHAEGNPRQYKLFYAPAAGGPEELVPIPGNTNYAILRNLQPDTSYTVTVVPVYTEGDGGRTSDTGRTLMRGLARNVQVYNPTPNSLDVRWDPAPGPVLQYRVVYSPVDGTRPSESIVVPGNTRMVHLERLIPDTLYSVNLVALYSDGEGNPSPAQGRTLPRSGPRNLRVFGETTNSLSVAWDHADGPVQQYRIIYSPTVGDPIDEYTTVPGRRNNVILQPLQPDTPYKITVIAVYEDGDGGHLTGNGRTVGLLPPQNIHISDEWYTRFRVSWDPSPSPVLGYKIVYKPVGSNEPMEAFVGEMTSYTLHNLNPSTTYDVNVYAQYDSGLSVPLTDQGTTLYLNVTDLKTYQIGWDTFCVKWSPHRAATSYRLKLSPADGTRGQEITVRGSETSHCFTGLSPDTDYGVTVFVQTPNLEGPGVSVKEHTTVKPTEAPTEPPTPPPPPTIPPARDVCKGAKADIVFLTDASWSIGDDNFNKVVKFIFNTVGGFDEISPAGIQVSFVQYSDEVKSEFKLNTYNDKALALGALQNIRYRGGNTRTGKALTFIKEKVLTWESGMRKNVPKVLVVVTDGRSQDEVKKAALVIQHSRFSVFVVGVADVDYNELANIASKPSERHVFIVDDFESFEKIEDNLITFVCETATSSCPLIYLDGYTSPGFKMLEAYNLTEKNFASVQGVSLESGSFPSYSAYRIQKNAFVNQPTADLHPNGLPPSYTIILLFRLLPETPSDPFAIWQITDRDYKPQVGVIADPSSKTLSFFNKDTRGEVQTVTFDTEEVKTLFYGSFHKVHIVVTSKSVKIYIDCYEIIEKDIKEAGNITTDGYEILGKLLKGERKSAAFQIQSFDIVCSPVWTSRDRCCDIPSRRDEGKCPAFPNSCTCTQDSVGPPGPPGPAGGPGAKGPRGERGISGAIGPPGPRGDIGPPGPQGPPGPQGPNGLSIPGEQGRQGMKGDAGEPGLPGRTGTPGLPGPPGPMGPPGDRGFTGKDGAMGPRGPPGPPGSPGSPGVTGPSGKPGKPGDHGRPGPSGLKGEKGDRGDIASQNMMRAVARQVCEQLISGQMNRFNQMLNQIPNDYQSSRNQPGPPGPPGPPGSAGARGEPGPGGRPGFPGTPGMQGPPGERGLPGEKGERGTGSSGPRGLPGPPGPQGESRTGPPGSTGSRGPPGPPGRPGNSGIRGPPGPPGYCDSSQCASIPYNGQGYPGSG

SEQ ID NO: 23722 - protein, 55 aa, Homo sapiens
VTLRVRCRRIFALLAVALVSTHLPATLVIVATAGLDCQTGFSFYLEAFSEGSRSI

SEQ ID NO: 23723 - protein, 115 aa, Homo sapiens
LVRLTFLFGIMTMSVKQKVKQRTGTAGAAAGCCLCLCSCSRAGHDVARPLRPAPPRLPLGALCSPPCCSNEEPRQPAARPHWLRQRSKFHEGTPTSARGTRCCSFHFTEKNLPGD

SEQ ID NO: 23724 - protein, 82 aa, Homo sapiens [sequence omitted]

SEQ ID NO: 23725 - protein, 57 aa, Homo sapiens
LAKVITDNFGIVEGLMTTVHAITATQKTVNGPSRKLWRDSHRALQNIIPATTGLPRL

SEQ ID NO: 23726 - protein, 253 aa, Homo sapiens [sequence omitted]

SEQ ID NO: 23727 - protein, 179 aa, Homo sapiens
LLAAHDARREVHIKRMEERKALSTSPPGDSLASVPFIDEPTSPSIDHDIAHIPASAVISASTSQVPCIATVPPSLTTSVPLICRQLSHDHESVGPHSLNAQPNSKTERSKSYDEGLDDYREDVKLSFKHVSSLKGIKVADSQKSSEDSGSRKDSSSEAFSDAAKEGWLHFRSLVTDNGK

SEQ ID NO: 23728 - protein, 644 aa, Homo sapiens
LFIPQSLQFNFHIRMKKMETEETFEIDGSSVQLVSLSAITLETGNTSRKTKKPLGPNGYHFVKQVKEGGPAFEAGLCTGDQIIKVNGESVIGKTYSQVISLIQNSDTTLELSVMPQYEDILQVAYSQDAYLKGNEAYSGNARNIPEPPPICYPWLPSAPSAMAQPVEIAPPDSSLSKQQTSTPVLTQPGRAYRMEIQVPPSPTDVAKSNTAVCVCNESVRTVIVPSEKVVDLLSNRNNHTGPSHRIEEVRYGVNEQTSLKTVSRTTSPPLSIPTTHLIHQPAGSRSLEPSGILLKSGNYSGHSDGISSSRSQAVEAPSVSVNHYLPNSHQHIDWKNYKTYKEYIDNRRLHIGCRTIQERLDSLRAASQSTMDYNQVVPNRTTLQGRRRSTSHDRVPQSVQIRQRSVSQERLEDSVLMKYCPRSASQGALTSPSVSFSNHRTRSWDYIEGQDETLENVNSGTPIPDSNGEKKQTYKWSGFTEQDDRRGIYERPRQQEIHKSFRGSNFTVAPSVVNSDNRRMSGRGVGSVSQFKKIPPDLKTLQSNRNFQTACGMSLPRGISQDRSPLVKVRSNSLKAPSTHVTKPSFNQKSFVSIKDQRPVNHLHQNSLLNQQTWVRTDSASDQQVETGKSPSIWSLCQACPSVE

SEQ ID NO: 23729 - protein, 243 aa, Homo sapiens
VMLVFFLFLESQNVDFICSVLVVADQLLITRLKEICEVALTEKLTLKNAAMLLEFAAMYSAKQLKLSCLQFIGLNMAALLEARSLDVLSDGVLKDLSEFYRKMIPAMDRRVITPYQDGPDISYLEVEDGDIFLKEEINMEQNHSETMFKKAKTKAKKKPRKRSDSSGGYNLSDIIQSPSSTGLLKSGKTNSVESLPELLTSDSEGSYAGVGSPRDLQSPDFTTGFHSDKIEGRFKTMGKVTNT

SEQ ID NO: 23730 - protein, 12 aa, Homo sapiens
MNFIELFIIFLI

SEQ ID NO: 23731 - protein, 97 aa, Homo sapiens
MCSSLEQALAVLVTTFHKYSCQEGDKFKLSKGEMKELLHKELPSFVGEKVDEEGLKKLMGSLDENSDQQVDFQEYAVFLALITVMCNDFFQGCPDRP

SEQ ID NO: 23732 - protein, 72 aa, Homo sapiens
MLMLMFIICIWTKRSSVLQDRTILKLFRNRNRSPSQTAKSKAPYIEASRLRAERDLGNHLVSLPHFPFRPQG

SEQ ID NO: 23733 - protein, 71 aa, Homo sapiens [sequence omitted]

SEQ ID NO: 23734 - protein, 172 aa, Homo sapiens
MIFWSFVAGVVTFYCSLGPDSLLPNIFFTIKYKPKQLGLQELFPQGHSCAVCGKVKCKRHRPSLLLENYQPWLDLKISSKVDASLSEVLELVLENFVYPWYRDVTDDESFVDELRITLRFFASVLIRRIHKGFTLLPRLECSGVISAHCNLCLPGSSDSPTSASRVAGITGL

SEQ ID NO: 23735 - protein, 14 aa, Homo sapiens
MTIITGLAFVVFCG

SEQ ID NO: 23736 - protein, 39 aa, Homo sapiens
VVGTMALSSVAQWSSSEDAKIHEKTSRTSGRIFNGKSLG

SEQ ID NO: 23737 - protein, 93 aa, Homo sapiens
LPKTLKKKQRSFAELKIKHLRKKFAQKVLVKARRKLICEKLKHFHKKYTQMDRMEIRMARMARKAGNLYIPAESKLAFVIRIRSSNGVHTKVF

SEQ ID NO: 23738 - protein, 64 aa, Homo sapiens
VLSGGTNMYPGITDRMQKEITTLAPSTMKIKIIAPPQCKHSVWIGYSILASTSTFQQMWISKQE

SEQ ID NO: 23739 - protein, 7 aa, Homo sapiens
MKVARRP

SEQ ID NO: 23740 - protein, 9 aa, Homo sapiens
MFRDLLRLS

SEQ ID NO: 23741 - protein, 14 aa, Homo sapiens
MREILHIQAGQCGN

SEQ ID NO: 23742 - protein, 43 aa, Homo sapiens
MSITSYSIPLIEYSVSTYVECIGIEELKRESKTPQVASLKCHS

SEQ ID NO: 23743 - protein, 101 aa, Homo sapiens
LVDMAASRLPPATLTLKQFVRRQQVLLLYRRILQTIRQVPNDSDRKYLKDWAREEFRRNKSATEEASPTTEAQDLKEANGIVTTTGVRSICVREFSLDLGL

SEQ ID NO: 23744 - protein, 80 aa, Homo sapiens
LVDMAASRLPPATLTLKQFVRRQQVLLLYRRILQTIRQVPNDSDRKYLKDWAREEFRRNKSATEEVRTKSWLRPRLKRKT

SEQ ID NO: 23745 - protein, 91 aa, Homo sapiens
LVDMAASRLPPATLTLKQFVRRQQVLLLYRRILQTIRQVPNDSDRKYLKDWAREEFRRNKSATEEDTIRMMITQGNMQLKELEKTLALAKS

SEQ ID NO: 23746 - protein, 75 aa, Homo sapiens
LVDMAASRLPPATLTLKQFVRRQQVLLLYRRILQTIRQVPNDSDRKYLKDWAREEFRRNKSATEEVRTKSWIQSG

SEQ ID NO: 23747 - protein, 1967 aa, Homo sapiens
MAADDDNGDGTSLFDVFSASPLKNNDEGSLDIYAGLDSAVSDSASKSCVPSRNCLDLYEEILTEEGTAKEATYNDLQVEYGKCQLQMKELMKKFKEIQTQNFSLINENQSLKKNISALIKTARVEINRKDEEISNLHQRLSEFPHFRNNHKTARTFDTVKTKDLKSRSPHLDDCSKTDHRAKSDVSKDVHHSTSLPNLEKEGKPHSDKRSTSHLPTSVEKHCTNGVWSRSHYQVGEGSSNEDSRRGRKDIRHSQFNRGTERVRKDLSTGCGDGEPRILEASQRLQGHPEKYGKGEPKTESKSSKFKSNSDSDYKGERINSSWEKETPGERSHSRVDSQSDKKLERQSERSQNINRKEVKSQDKEERKVDQKPKSVVKDQDHWRRSERASLPHSKNEITFSHNSSKYHLEERRGWEDCKRDKSVNSHSFQDGRCPSSLSNSRTHKNIDSKEVDAMHQWENTPLKAERHRTEDKRKREQESKEENRHIRNEKRVPTEHLQKTNKETKKTTTDLKKQNEPKTDKGEVLDNGVSEGADNKELAMKAESGPNETKNKDLKLSFMKKLNLTLSPAKKQPVSQDNQHKITDIPKSSGVCDSESSMQVKTVAYVPSISEHILGEAAVSEHTMGETKSTLLEPKVALLAVTEPRIGISETNKEDENSLLVRSVDNTMHCEEPICGTETSFPSPMEIQQTESLFPSTGMKQTINNGRAAAPVVMDVLQTDVSQNFGLELDTKRNDNSDYCGISEGMEMKVALSTTVSETTESILQPSIEEADILPIMLSEDNNPKFEPSVIVTPLVESKSCHLEPCLPKETLDSSLQQTELMDHRMATGETNSVYHDDDNSVLSIDLNHLRPIPEAISPLNSPVRPVAKVLRNESPPQVPVYNNSHKDVFLPNSAHSTSKSQSDLNKENQKPIYKSDKCTEADTCKNSPLDELEEGEIRSDSETSKPQESFEKNSKRRVSADVRKSKTIPRRGKSTVCLDKDSRKTHVRIHQTNNKWNKRPDKSSRSSKTEKKDKVMSTSSLEKIVPIIAVPSSEQEIMHMLRMIRKHVRKNYMKFKAKFSLIQFHRIIESAILSFTSLIKHLNLHKISKSVTTLQKNLCDIIESKLKQVKKNGIVDRLFEQQLPDMKKKLWKFVDDQLDYLFAKLKKILVCDSKSFGRDSDEGKLEKTSKQNAQYSNSQKRSVDNSNRELLKEKLSKSEDPVHYKSLVGCKKSEENYQDQNNSSINTVKHDIKKNFNICFDNIKNSQSEERSLEVHCPSTPKSEKNEGSSIEDAQTSQHATLKPERSFEILTEQQASSLTFNLVSDAQMGEIFKSLLQGSDLLDSSVNCTEKSEWELKTPEKQLLETLKCESIPACTTEELVSGVASPCPKMISDDNWSLLSSEKGPSLSSGLSLPVHPDVLDESCMFEVSTNLPLSKDNVCSVEKSKPCVSSILLEDLAVSLTVPSPLKSDGHLSFLKPDMSSSSTPEEVISAHFSEDALLEEEDASEQDIHLALESDNSSSKSSCSSSWTSRSVAPGFQYHPNLPMHAVIMEKSNDHFIVKIRRATPSTSSGLKQSMMPDELLTSLPRHGKEADEGPEKEYISCQNTVFKSVEELENSNKNVDGSKSTHEEQSSMIQTQVPDIYEFLKDASDKMGHSDEVADECFKLHQVWETKVPESIEELPSMEEISHSVGEHLPNTYVDLTKDPVTETKNLGEFIEVTVLHIDQLGCSGGNLNQSAQILDNSLQADTVGAFIDLTQDASSEAKSEGNHPALAVEDLGCGVIQVDEDNCKEEKAQVANRPLKCIVEETYIDLTTESPSSCEVKKDELKSEPGSNCDNSELPGTLHNSHKKRRNISDLNHPHKKQRKETDLTNKEKTKKPTQDSCENTEAHQKKASKKKAPPVTKDPSSLKATPGIKDSSAALATSTSLSAKNVIKKKGEIIILWTRNDDREILLECQKRGPSFKTFAYLAAKLDKNPNQISC

SEQ ID NO: 23748 - protein, 29 aa, Homo sapiens
MFAVLTSPLAESLQEVNYPTLQNTYYFGV

SEQ ID NO: 23749 - protein, 40 aa, Homo sapiens
VMADAWEEIRRLAADFQRAQFAEATQRFEDWKQACKRQQT

SEQ ID NO: 23750 - protein, 795 aa, Homo sapiens
VMADAWEEIRRLAADFQRAQFAEATQRLSERNCIEIVNKLIAQKQLEVVHTLDGKEYITPAQISKEMRDELHVRGGRVNIVDLQQVINVDLIHIENRIGDIIKSEKHVQLVLGQLIDENYLDRLAEEVNDKLQESGQVTISELCKTYDLPGNFLTQALTQRLGRIISGHIDLDNRGVIFTEAFVARHKARIRGLFSAITRPTAVNSLISKYGFQEQLLYSVLEELVNSGRLRGTVVGGRQDKAVFVPDIYSRTQSTWVDSFFRQNGYLEFDALSRLGIPDAVSYIKKRYKTTQLLFLKAACVGQGLVDQVEASVEEAISSGTWVDIAPLLPTSLSVEDAAILLQQVMRAFSKQASTVVFSDTVVVSEKFINDCTELFRELMHQKAEKEMKNNPVHLITEEDLKQISTLESVSTSKKDKKDERRRKATEGSGSMRGGGGGNAREYKIKKVKKKGRKDDDSDDESQSSHTGKKKPEISFMFQDEIEDFLRKHIQDAPEEFISELAEYLIKPLNKTYLEVVRSVFMSSTTSASGTGRKRTIKDLQEEVSNLYNNIRLFEKGMKFFADDTQAALTKHLLKSVCTDITNLIFNFLASDLMMAVDDPAAITSEIRKKILSKLSEETKVALTKLHNSLNEKSIEDFISCLDSAAEACDIMVKRGDKKRERQILFQHRQALAEQLKVTEDPALILHLTSVLLFQFSTHSMLHAPGRCVPQIIAFLNSKIPEDQHALLVKYQGLVVKQLVSQSKKTGQGDYPLNNELDKEQEDVASTTRKELQELSSSIKDLVLKSRKSSVTEE

SEQ ID NO: 23751 - protein, 65 aa, Homo sapiens [sequence omitted]

SEQ ID NO: 23752 - protein, 104 aa, Homo sapiens
LIHMFQVKECHMSAFVPEVSMQSSGYLDECQLLHFPCVSCDHSIWEHPSKSSCILLRTPDLLKLHNSHLDVTGLSHVNSSDHVLLYMPSAPSQDSYKRRNDEHP

SEQ ID NO: 23753 - protein, 50 aa, Homo sapiens
LAEFSHANWTIAALFLFCTNKTQNHSDDSIENKQAKNNVSMVPEIHFCFH

SEQ ID NO: 23754 - protein, 495 aa, Homo sapiens
LRGEPAAAAAAQGSGAPPARPAVRGQCPSSSSSSAAASSVAAASSVAAARAARALRAPLSPRRAAPAPSHAGGAGPGRGARSQPRSMHWGVGFASSRPCVVDLSWNQSISFFGWWAGSEEPFSFYGDIIAFPLQDYGGIMAGLGSDPWWKKTLYLTGGALLAAAAYLLHELLVIRKQQEIDSKDAIILHQFARPNNGVPSLSPFCLKMETYLRMADLPYQNYFGGKLSAQGKMPWIEYNHEKVSGTEFIIDFLEEKLGVNLNKNLGPHERAISRAVTKMVEEHFYWTLAYCQWVDNLNETRKMLSLSGGGPFSNLLRWVVCHITKGIVKREMHGHGIGRFSEEEIYMLMEKDMRSLAGLLGDKKYIMGPKLSTLDATVFGHLAQAMWTLPGTRPERLIKGELINLAMYCERIRRKFWPEWHHDDDNTIYESEESSEGSKTHTPLLDFSFYSRTETFEDEGAENSFSRTPDTDFTGHSLFDSDVDMDDYTDHEQCK

SEQ ID NO: 23755 - protein, 101 aa, Homo sapiens [sequence omitted]

SEQ ID NO: 23756 - protein, 182 aa, Homo sapiens
MKLCEEKCETDEIQKGGKCRNLSVRGITNLGNTCFFNAVMQNLAQTYTLTDLMNEIKESSTKLKIFPSSDSQLDPLVVELSRPGPLTSALFLFLHSMKETEKGPLSPKVLFNQLCQKAPRFKDFQQQDSQELLHYLLDAVRTEETKRIQASILKAFNNPTTKTADDETRKKVKDLHGERSIH

SEQ ID NO: 23757 - protein, 38 aa, Homo sapiens
MVLPWLLLETARRAVLGSAEAALCAMKMTDENRKVWLV

SEQ ID NO: 23758 - protein, 52 aa, Homo sapiens
LALNPASISVLIIAWMFRAAIQCEFSKQEFMDGMTELGCDSIEKLKAQIPKM

SEQ ID NO: 23759 - protein, 9 aa, Homo sapiens
LMVLTRGSL

SEQ ID NO: 23760 - protein, 423 aa, Homo sapiens
LRAWGPGPGSGASGPADPPRSARRAPVEQLSPCAPRPAPRSCRSELWSALPRLPARDQPGIFKMNYTESSPLRESTAIGFTPELESIIPVPSNKTTCENWREIHHLVFHVANICFAVGLVIPTTLHLHMIFLRGMLTLGCTLYIVWATLYRCALDIMIWNSVFLGVNILHLSYLLYKKRPVKIEKELSGMYRRLFEPLRVPPDLFRRLTGQFCMIQTLKKGQTYAAEDKTSVDDRLSILLKGKMKVSYRGHFLHNIYPCAFIDSPEFRSTQMHKGEKFQVTIIADDNCRFLCWSRERLTYFLESEPFLYEIFRYLIGKDITNKLYSLNDPTLNDKKAKKLEHQLSLCTQISMLEMRNSIASSSDSDDGLHQFLRGTSSMSSLHVSSPHQRASAKMKPIEEGAEDDDDVFEPASPNTLKVHQLP

SEQ ID NO: 23761 - protein, 750 aa, Homo sapiens
LPPAAPQLPAPQPRLAASPASSGPLPEPAPLHAAPCLSPAMLSLQYPDVYRDETAVQDYHGHKICDPYAWLEDPDSEQTKAFVEAQNKITVPFLEQCPIRGLYKERMTELYDYPKYSCHFKKGKRYFYFYNTGLQNQRVLYVQDSLEGEARVFLDPNILSDDGTVALRGYAFSEDGEYFAYGLSASGSDWVTIKFMKVDGAKELPDVLERVKFSCMAWTHDGKGMFYNSYPQQDGKSDGTETSTNLHQKLYYHVLGTDQSEDILCAEFPDEPKWMGGAELSDDGRYVLLSIREGCDPVNRLWYCDLQQESSGIAGILKWVKLIDNFEGEYDYVTNEGTVFTFKTNRQSPNYRVINIDFRDPEESKWKVLVPEHEKDVLEWIACVRSNFLVLCYLHDVKNILQLHDLTTGALLKTFPLDVGSIVGYSGQKKDTEIFYQFTSFLSPGIIYHCDLTKEELEPRVFREVTVKGIDASDYQTVQIFYPSKDGTKIPMFIVHKKGIKLDGSHPAFLYGYGGFNISITPNYSVSRLIFVRHMGGILAVANIRGGGEYGETWHKGGILANKQNCFDDFQCAAEYLIKEGYTSPKRLTINGGSNGGLLVAACANQRPDLFGCVIAQVGVMDMLKFHKYTIGHAWTTDYGCSDSKQHFEWLVKYSPLHNVKLPEADDIQYPSMLLLTADHDDRVVPLHSLKFIATLQYIVGRSRKQSNPLLIHVDTKAGHGAGKPTAKVIEEVSDMFAFIARCLNVDWIP

SEQ ID NO: 23762 - protein, 46 aa, Homo sapiens
MPPPLPSSCIPRREIPPGKRTQRRPPAVRGRTLHQVLATNRRLSWV

SEQ ID NO: 23763 - protein, 28 aa, Homo sapiens
MMSLLEVVLLSISDLYFRITSGTDVLFT

SEQ ID NO: 23764 - protein, 56 aa, Homo sapiens
LILILTLLLLPLPTSNSPVFAFFSPLQNISRILSLHFKIYPESNHLSPPTATSLVL

SEQ ID NO: 23765 - protein, 180 aa, Homo sapiens
LNAEGAEGARGGGSSYSEMAETVADTRRLITKPQNLNDAYGPPSNFLEIDVSNPQTVGVGRGRFTTYEIRVKTNLPIFKLKESTVRRRYSDFEWLRSELERESKVVVPPLPGKAFLRQLPFRGDDGIFDDNFIEERKQGLEQFINKVAGHPLAQNERCLHMFLQDEIIDKSYTPSKIRHA

SEQ ID NO: 23766 - protein, 158 aa, Homo sapiens
LNAEGAEGARGGGSSYSEMAETVADTRRLITKPQNLNDAYGPPSNFLEIDTNLPIFKLKESTVRRRYSDFEWLRSELERESKVVVPPLPGKAFLRQLPFRGDDGIFDDNFIEERKQGLEQFINKVAGHPLAQNERCLHMFLQDEIIDKSYTPSKIRHA

SEQ ID NO: 23767 - protein, 131 aa, Homo sapiens
LNAEGAEGARGGGSSYSEMAETVADTRRLITKPQNLNDAYGPPSNFLEIDVSNPQTVGVGRGRFTTYEIRVKTNLPIFKLKESTVRRRYSDFEWLRSELERESKPCLRMTSEARSHGRTWCAQNDEKLFCD

SEQ ID NO: 23768 - protein, 54 aa, Homo sapiens
MRSCYVAKAGVQWPFTGMIMVLCSLQLLVSRDPPASASQVAGTTDVCHSTQPQL

SEQ ID NO: 23769 - protein, 187 aa, Homo sapiens
MPFLLLWVKSILTSILFLKTFQWPFFPDDEEVTPARAVSRHFEDTSYGYKDFSRHGMHVPTFRVQDYCWEDHGYSLVNRLYPDVGQLIDEKFHIAYNLTYNTMAMHKDVDTSMLRRAIWNYIHCMFGIRYDDYDYGEINQLLDRSFKVYIKTVVCTPEKVTKRMYDSFWRQFKHSEKVCAYCGLFTL

SEQ ID NO: 23770 - protein, 20 aa, Homo sapiens
LSWMNRLCFFFFSPFLLGFP

SEQ ID NO: 23771 - protein, 127 aa, Homo sapiens
MSRLSRSLLWAATCLGVLCVLSADKNTTQHPNVTTLAPISNVTSAPVTSLPLVTTPAPETCEGRNSCVSCFNVSVVNTTCFWIECKDESYCSHNSTVSDCQVGNTTDFCSVSTATPVPTANSTGNSR

SEQ ID NO: 23772 - protein, 38 aa, Homo sapiens
MIHHGDWFSGKAVGLLVLHLSGMVLNAYVTHVSEAGSA

SEQ ID NO: 23773 - protein, 103 aa, Homo sapiens
LYDVLAKEPVQRNNDKTDTGMPATGEQAFLPRGDQNMYYPARPRWSLQSSCSLRTGAACRSTHCWLVGWLGACWRNGGAAPHRQQLAASLNVSALVFEPPLQP

SEQ ID NO: 23774 - protein, 71 aa, Homo sapiens
MLFVGTMALLSGVLTLKLPETLGKRLATTWEEAAKLESENESKSSKLLLTTNNSGLEKTEAITPRDSGLGE

SEQ ID NO: 23775 - protein, 62 aa, Homo sapiens
LIFCGCWLFASLTVMEAAHFFEGTEKLLEVWFSRQQPDANQGSGDLRTIPRWSSILYGTYEF

SEQ ID NO: 23776 - protein, 348 aa, Homo sapiens
LIFCGCWLFASLTVMEAAHFFEGTEKLLEVWFSRQQPDANQGSGDLRTIPRSEWDILLKDVQCSIISVTKTDKQEAYVLSESSMFVSKRRFILKTCGTTLLLKALVPLLKLARDYSGFDSIQSFFYSRKNFMKPSHQGYPHRNFQEEIEFLNAIFPNGAAYCMGRMNSDCWYLYTLDFPESRVISQPDQTLEILMSELDPAVMDQFYMKDGVTAKDVTRESGIRDLIPGSVIDATMFNPCGYSMNGMKSDGTYWTIHITPEPEFSYVSFETNLSQTSYDDLIRKVVEVFKPGKFVTTLFVNQSSKCRTVLASPQKIEGFKRLDCQSAMFNDYNFVFTSFAKKQQQQQS

SEQ ID NO: 23777 - protein, 228 aa, Homo sapiens
LIFCGCWLFASLTVMEAAHFFEGTEKLLEVWFSRQQPDANQGSGDLRTIPRYLYTLDFPESRVISQPDQTLEILMSELDPAVMDQFYMKDGVTAKDVTRESGIRDLIPGSVIDATMFNPCGYSMNGMKSDGTYWTIHITPEPEFSYVSFETNLSQTSYDDLIRKVVEVFKPGKFVTTLFVNQSSKCRTVLASPQKIEGFKRLDCQSAMFNDYNFVFTSFAKKQQQQQS

SEQ ID NO: 23778 - protein, 319 aa, Homo sapiens
LIFCGCWLFASLTVMEAAHFFEGTEKLLEVWFSRQQPDANQGSGDLRTIPSESSMFVSKRRFILKTCGTTLLLKALVPLLKLARDYSGFDSIQSFFYSRKNFMKPSHQGYPHRNFQEEIEFLNAIFPNGAAYCMGRMNSDCWYLYTLDFPESRVISQPDQTLEILMSELDPAVMDQFYMKDGVTAKDVTRESGIRDLIPGSVIDATMFNPCGYSMNGMKSDGTYWTIHITPEPEFSYVSFETNLSQTSYDDLIRKVVEVFKPGKFVTTLFVNQSSKCRTVLASPQKIEGFKRLDCQSAMFNDYNFVFTSFAKKQQQQQS

SEQ ID NO: 23779 - protein, 165 aa, Homo sapiens
LGLDFPNLPYLIDGAHKITQSKAILGCIAYKHNLCGETEGEKIWEDILENQLVDNHVQLARLCYNPDFKKLKPEYLEALPAMLKLYSQFLGKQLLFLGDKITLVDFIAYGILERNQVFEPKWLDAFPNLKDFISRFEGLEISAYMKSSCFLLRPVFTKMAVWGNK

SEQ ID NO: 23780 - protein, 572 aa, Homo sapiens
LELEVELRGAGPPAAGQRLLQAEAPAENEPEPEVVVVSWQSGGTGSKLRWFTTLMLCASFLGLGLSVAIVGPTFQDLATNVNRNISSLSFIFVGRALGYLSGSVIGGFLVDVMNYFLLLGISMSATTVGLYLVPFCKTAILLTVMMSIFGVSIGILDTGGNVLILAIWGDKGAPHMQALHFSFALGAFLAPLLAKLALGPTASAENHTESDFHPALNQSSDADSEALFGVPNDKNLLWAYAVIGTYMFLVSVIFFCLFLKNSSKQEKARASAETFRRAKYHNALLCLLFLFFFFYVGAEVTYGSYVFSFATTHAGMKESEAAGLNSIFWGTFAACRGLAIFFATCLQPGTMIVLSNIGSLTSSLFLVLFDKNPICLWIATSVYGASMATTFPSGVSWIEQYTTIHGKSAAFFVIGASLGEMAIPAVIGILQGKYPDLPVVLYTSLGASIATGILFPVLYKLATSPLDRQRKEDRKSEDQKALLSSSGLNEYEEENEEEDAEKWNEMDFEMIETNDTMRHSIIETSRSSLTEPTAEVYNQYPSNALVFESSPFNTGSAHVKHLPETRTKGTNV

SEQ ID NO: 23781 - protein, 49 aa, Homo sapiens
VLFFSVLTTKLLCMVLFNFHRVKDVHCLLSEDYEDFYANRIKMYLLISE

SEQ ID NO: 23782 - protein, 71 aa, Homo sapiens
MISRVPDDKIENRFAAERDEYGSYTMSEINIVGRITLNLWRIMRNEVGDLSKMLFRNKIFGQYNDLIIIEY

SEQ ID NO: 23783 - protein, 121 aa, Homo sapiens
VCVLVQRSVGFAEETGELCVPGAMNKRRLLYPSGWLHGPSDMQGLLFSTLLLAGLAQVMAPKPPFAMFEQRHAFLYIFIAEPKAQPGTVRETVSLHASSRRRLNFPLLFAKCAKSPWKNEF

SEQ ID NO: 23784 - protein, 260 aa, Homo sapiens
VCVLVQRSVGFAEETGELCVPGAMNKRRLLYPSGWLHGPSDMQGLLFSTLLLAGLAQFCCRVQGTGPLDTTPEGRPGEVSDAPQRKQFCHWPCKCPQQKPRCPPGVSLVRDGCGCCKICAKQPGEICNEADLCDPHKGLYCDYSVDRPRYETGVCAYLVAVGCEFNQVHYHNGQVFQPNPLFSCLCVSGAIGCTPLFIPKLAGSHCSGAKGGKKSDQSNCSLEPLLQQLSTSYKTMPDVCQASNLLPALRSLNCCLPSSL

SEQ ID NO: 23785 - protein, 395 aa, Homo sapiens
VCVLVQRSVGFAEETGELCVPGAMNKRRLLYPSGWLHGPSDMQGLLFSTLLLAGLAQFCCRVQGTGPLDTTPEGRPGEVSDAPQRKQFCHWPCKCPQQKPRCPPGVSLVRDGCGCCKICAKQPGEICNEADLCDPHKGLYCDYSVDRPRYETGVCAYLVAVGCEFNQVHYHNGQVFQPNPLFSCLCVSGAIGCTPLFIPKLAGSHCSGAKGGKKSDQSNCSLEPLLQQLSTSYKTMPAYRNLPLIWKKKCLVQATKWTPCSRTCGMGISNRVTNENSNCEMRKEKRLCYIQPCDSNILKTIKIPKGKTCQPTFQLSKAEKFVFSGCSSTQSYKPTFCGICLDKRCCIPNKSKMITIQFDCPNEGSFKWKMLWITSCVCQRNCREPGDIFSELKIL

SEQ ID NO: 23786 - protein, 60 aa, Homo sapiens [sequence omitted]

SEQ ID NO: 23787 - protein, 135 aa, Homo sapiens
LDVSGEMALSSAWRSVLPLWLLWSAACSRAASGDDNAFPFDIEGSSAVGRQDPPETSEPRVALGRLPPAAEKCNAGFFHTLSGECVPCDCNGNSNECLDGSGYCVTTDGEDPGFSASALSFILSSQGAREARAPT

SEQ ID NO: 23788 - protein, 126 aa, Homo sapiens
LDVSGEMALSSAWRSVLPLWLLWSAACSRAASGDDNAFPFDIEGSSAVGRQDPPETSEPRVALGRLPPAAEVQCPCHCHPAGAPAPPRAVPHSSFSLSPPLSSPQCLESFTWARSVRKLEIKSFPL

SEQ ID NO: 23789 - protein, 92 aa, Homo sapiens
LREGEKVKEGEGEGERGGEGERERGRERLELSLTLALSLYFLSCWLRSHLGILHTERRENKRGTAAPRGRPTETHSARALEEHYWMSAEKWL

SEQ ID NO: 23790 - protein, 60 aa, Homo sapiens
LSQNLCGKEKNCWLRSHLGILHTERRENKRGTAAPRGRPTETHSARALEEHYWMSAEKWL

SEQ ID NO: 23791 - protein, 64 aa, Homo sapiens
LAGLTPIRLPFDAVLCWLRSHLGILHTERRENKRGTAAPRGRPTETHSARALEEHYWMSAEKWL

SEQ ID NO: 23792 - protein, 90 aa, Homo sapiens
LNILLEPLEGLQTERGGKTAGKGGPQCLKSQLRVGGPGSRSCWLRSHLGILHTERRENKRGTAAPRGRPTETHSARALEEHYWMSAEKWL

SEQ ID NO: 23793 - protein, 13 aa, Homo sapiens
LMPYCKLRPSVGS

SEQ ID NO: 23794 - protein, 106 aa, Homo sapiens
MKKGIAFPTSISVNNCVCHFSPLESGQDYILKEGDLVKIDLGVYVDGFIANVAHTFVVDVAQGTQVTGRKADVIKAAHLCAEAALRLVKPGNQNTQVTEAWNKVAQ

SEQ ID NO: 23795 - protein, 21 aa, Homo sapiens
MKFVDTVMILILAMVSQVRCT

SEQ ID NO: 23796 - protein, 540 aa, Homo sapiens
LAQPPRFLRAGIRGPARLVSCLSPFGRAVRSLEGGRRWGRRRPTPPWWWRRRRGRPILSLLPPTIRGNAGDIGNYYYGQGHPMKPHRIRMTHNLLLNYGLYRKMEIYRPHKATAEEMTKYHSDEYIKFLRSIRPDNMSEYSKQMQRFNVGEDCPVFDGLFEFCQLSTGGSVAGAVKLNRQQTDMAVNWAGGLHHAKKSEASGFCYVNDIVLAILELLKYHQRVLYIDIDIHHGDGVEEAFYTTDRVMTVSFHKYGEYFPGTGDLRDIGAGKGKYYAVNFPMRDGIDDESYGQIFKPIISKVMEMYQPSAVVLQCGADSLSGDRLGCFNLTVKGHAKCVEVVKTFNLPLLMLGGGGYTIRNVARCWTYETAVALDCEIPNELPYNDYFEYFGPDFKLHISPSNMTNQNTPEYMEKIKQRLFENLRMLPHAPGVQMQAIPEDAVHEDSGDEDGEDPDKRISIRASDKRIACDEEFSDSEDEGEGGRRNVADHKKGAKKARIEEDKKETEDKKTDVKEEDKSKDNSGEKTDTKGTKSEQLSNP

SEQ ID NO: 23797 - protein, 18 aa, Homo sapiens
MRLLLAFPKRLYCIFLVF

SEQ ID NO: 23798 - protein, 64 aa, Homo sapiens
LPLGILLHKVSYHLLLDLCLGISNEYAFYCALFLLTFLHPVSFGYSVLSTSRLRRWWVCFSTSI

SEQ ID NO: 23799 - protein, 142 aa, Homo sapiens [sequence omitted]

SEQ ID NO: 23800 - protein, 2348 aa, Homo sapiens
VMKNIYCLIPKLVNFATLGCLWISVVQCTVLNSCLKSCVTNLGQQLDLGTPHNLSEPCIQGCHFWNSVDQKNCALKCRESCEVGCSSAEGAYEEEVLENADLPTAPFASSIGSHNMTLRWKSANFSGVKYIIQWKYAQLLGSWTYTKTVSRPSYVVKPLHPFTEYIFRVVWIFTAQLQLYSPPSPSYRTHPHGVPETAPLIRNIESSSPDTVEVSWDPPQFPGGPILGYNLRLISKNQKLDAGTQRTSFQFYSTLPNTIYRFSIAAVNEVGEGPEAESSITTSSSAVQQEEQWLFLSRKTSLRKRSLKHLVDEAHCLRLDAIYHNITGISVDVHQQIVYFSEGTLIWAKKAANMSDVSDLRIFYRGSGLISSISIDWLYQRMYFIMDELVCVCDLENCSNIEEITPPSISAPQKIVADSYNGYVFYLLRDGIYRADLPVPSGRCAEAVRIVESCTLKDFAIKPQAKRIIYFNDTAQVFMSTFLDGSASHLILPRIPFADVKSFACENNDFLVTDGKVIFQQDALSFNEFIVGCDLSHIEEFGFGNLVIFGSSSQLHPLPGRPQELSVLFGSHQALVQWKPPALAIGANVILISDIIELFELGPSAWQNWTYEVKVSTQDPPEVTHIFLNISGTMLNVPELQSAMKYKVSVRASSPKRPGPWSEPSVGTTLVPASEPPFIMAVKEDGLWSKPLNSFGPGEFLSSDIGNVSDMDWYNNSLYYSDTKGDVFVWLLNGTDISENYHLPSIAGAGALAFEWLGHFLYWAGKTYVIQRQSVLTGHTDIVTHVKLLVNDMVVDSVGGYLYWTTLYSVESTRLNGESSLVLQTQPWFSGKKVIALTLDLSDGLLYWLVQDSQCIHLYTAVLRGQSTGDTTITEFAAWSTSEISQNALMYYSGRLFWINGFRIITTQEIGQKTSVSVLEPARFNQFTIIQTSLKPLPGNFSFTPKVIPDSVQESSFRIEGNASSFQILWNGPPAVDWGVVFYSVEFSAHSKFLASEQHSLPVFTVEGLEPYALFNLSVTPYTYWGKGPKTSLSLRAPETVPSAPENPRIFILPSGKCCNKNEVVVEFRWNKPKHENGVLTKFEIFYNISNQSITNKTCEDWIAVNVTPSVMSFQLEGMSPRCFIAFQVRAFTSKGPGPYADVVKSTTSEINPFPHLITLLGNKIVFLDMDQNQVVWTFSAERVISAVCYTADNEMGYYAEGDSLFLLHLHNRSSSELFQDSLVFDITVITIDWISRHLYFALKESQNGMQVFDVDLEHKVKYPREVKIHNRNSTIISFSVYPLLSRLYWTEVSNFGYQMFYYSIISHTLHRILQPTATNQQNKRNQCSCNVTEFELSGAMAIDTSNLEKPLIYFAKAQEIWAMDLEGCQCWRVITVPAMLAGKTLVSLTVDGDLIYWIITAKDSTQIYQAKKGNGAIVSQVKALRSRHILAYSSVMQPFPDKAFLSLASDTVEPTILNATNTSLTIRLPLAKTNLTWYGITSPTPTYLVYYAEVNDRKNSSDLKYRILEFQDSIALIEDLQPFSTYMIQIAVKNYYSDPLEHLPPGKEIWGKTKNGVPEAVQLINTTVRSDTSLIISWRESHKPNGPKESVRYQLAISHLALIPETPLRQSEFPNGRLTLLVTRLSGGNIYVLKVLACHSEEMWCTESHPVTVEMFNTPEKPYSLVPENTSLQFNWKAPLNVNLIRFWVELQKWKYNEFYHVKTSCSQGPAYVCNITNLQPYTSYNVRVVVVYKTGENSTSLPESFKTKAGVPNKPGIPKLLEGSKNSIQWEKAEDNGCRITYYILEIRKSTSNNLQNQNLRWKMTFNGSCSSVCTWKSKNLKGIFQFRVVAANNLGFGEYSGISENIILVGDDFWIPETSFILTIIVGIFLVVTIPLTFVWHRRLKNQKSAKEGVTVLINEDKELAELRGLAAGVGLANACYAIHTLPTQEEIENLPAFPREKLTLRLLLGSGAFGEVYEGTAVDILGVGSGEIKVAVKTLKKGSTDQEKIEFLKEAHLMSKFNHPNILKQLGVCLLNEPQYIILELMEGGDLLTYLRKARMATFYGPLLTLVDLVDLCVDISKGCVYLERMHFIHRDLAARNCLVSVKDYTSPRIVKIGDFGLARDIYKNDYYRKRGEGLLPVRWMAPESLMDGIFTTQSDVWSFGILIWEILTLGHQPYPAHSNLDVLNYVQTGGRLEPPRNCPDDLWNLMTQCWAQEPDQRPTFHRIQDQLQLFRNFFLNSIYKSRDEANNSGVINESFEGEDGDVICLNSDDIMPVALMETKNREGLNYMVLATECGQGEEKSEGPLGSQESESCGLRKEEKEPHADKDFCQEKQVAYCPSGKPEGLNYACLTHSGYGDGSD

SEQ ID NO: 23801 - protein, 2342 aa, Homo sapiens
VMKNIYCLIPKLVNFATLGCLWISVVQCTVLNSCLKSCVTNLGQQLDLGTPHNLSEPCIQGCHFWNSVDQKNCALKCNDTYATVCERESCEVGCSSAEGAYEEEVLENADLPTAPFASSIGSHNMTLRWKSANFSGVKYIIQWKYAQLLGSWTYTKTVSRPSYVVKPLHPFTEYIFRVVWIFTAQLQLYSPPSPSYRTHPHGVPETAPLIRNIESSSPDTVEVSWDPPQFPGGPILGYNLRLISKNQKLDAGTQRTSFQFYSTLPNTIYRFSIAAVNEVGEGPEAESSITTSSSAVQQEEQWLFLSRKTSLRKRSLKHLVDEAHCLRLDAIYHNITGISVDVHQQIVYFSEGTLIWAKKAANMSDVSDLRIFYRGSGLISSISIDWLYQRMYFIMDELVCVCDLENCSNIEEITPPSISAPQKIVADSYNGYVFYLLRDGIYRADLPVPSGRCAEAVRIVESCTLKDFAIKPQAKRIIYFNDTAQVFMSTFLDGSASHLILPRIPFADVKSFACENNDFLVTDGKVIFQQDALSFNEFIVGCDLSHIEEFGFGNLVIFGSSSQLHPLPGRPQELSVLFGSHQALVQWKPPALAIGASPSAWQNWTYEVKVSTQDPPEVTHIFLNISGTMLNVPELQSAMKYKVSVRASSPKRPGPWSEPSVGTTLVPASEPPFIMAVKEDGLWSKPLNSFGPGEFLSSDIGNVSDMDWYNNSLYYSDTKGDVFVWLLNGTDISENYHLPSIAGAGALAFEWLGHFLYWAGKTYVIQRQSVLTGHTDIVTHVKLLVNDMVVDSVGGYLYWTTLYSVESTRLNGESSLVLQTQPWFSGKKVIALTLDLSDGLLYWLVQDSQCIHLYTAVLRGQSTGDTTITEFAAWSTSEISQNALMYYSGRLFWINGFRIITTQEIGQKTSVSVLEPARFNQFTIIQTSLKPLPGNFSFTPKVIPDSVQESSFRIEGNASSFQILWNGPPAVDWGVVFYSVEFSAHSKFLASEQHSLPVFTVEGLEPYALFNLSVTPYTYWGKGPKTSLSLRAPETVPSAPENPRIFILPSGKCCNKNEVVVEFRWNKPKHENGVLTKFEIFYNISNQSITNKTCEDWIAVNVTPSVMSFQLEGMSPRCFIAFQVRAFTSKGPGPYADVVKSTTSEINPFPHLITLLGNKIVFLDMDQNQVVWTFSAERVISAVCYTADNEMGYYAEGDSLFLLHLHNRSSSELFQDSLVFDITVITIDWISRHLYFALKESQNGMQVFDVDLEHKVKYPREVKIHNRNSTIISFSVYPLLSRLYWTEVSNFGYQMFYYSIISHTLHRILQPTATNQQNKRNQCSCNVTEFELSGAMAIDTSNLEKPLIYFAKAQEIWAMDLEGCQCWRVITVPAMLGKTLVSLTVDGDLIYWIITAKDSTQIYQAKKGNGAIVSQVKALRSRHILAYSSVMQPFPDKAFLSLASDTVEPTILNATNTSLTIRLPLAKTNLTWYGITSPTPTYLVYYAEVNDRKNSSDLKYRILEFQDSIALIEDLQPFSTYMIQIAVKNYYSDPLEHLPPGKEIWGKTKNGVPEAVQLINTTVRSDTSLIISWRESHKPNGPKESVRYQLAISHLALIPETPLRQSEFPNGRLTLLVTRLSGGNIYVLKVLACHSEEMWCTESHPVTVEMFNTPEKPYSLVPENTSLQFNWKAPLNVNLIRFWVELQKWKYNEFYHVKTSCSQGPAYVCNITNLQPYTSYNVRVVVVYKTGENSTSLPESFKTKAGVPNKPGIPKLLEGSKNSIQWEKAEDNGCRITYYILEIRKSTSNNLQNQNLRWKMTFNGSCSSVCTWKSKNLKGIFQFRVVAANNLGFGEYSGISENIILVGDDFWIPETSFILTIIVGIFLVVTIPLTFVWHRRLKNQKSAKEGVTVLINEDKELAELRGLAAGVGLANACYAIHTLPTQEEIENLPAFPREKLTLRLLLGSGAFGEVYEGTAVDILGVGSGEIKVAVKTLKKGSTDQEKIEFLKEAHLMSKFNHPNILKQLGVCLLNEPQYIILELMEGGDLLTYLRKARMATFYGPLLTLVDLVDLCVDISKGCVYLERMHFIHRDLAARNCLVSVKDYTSPRIVKIGDFGLARDIYKNDYYRKRGEGLLPVRWMAPESLMDGIFTTQSDVWSFGILIWEILTLGHQPYPAHSNLDVLNYVQTGGRLEPPRNCPDDLWNLMTQCWAQEPDQRPTFHRIQDQLQLFRNFFLNSIYKSRDEANNSGVINESFEGEDGDVICLNSDDIMPVALMETKNREGLNYMVLATECGQGEEKSEGPLGSQESESCGLRKEEKEPHADKDFCQEKQVAYCPSGKPEGLNYACLTHSGYGDGSD

SEQ ID NO: 23802 - protein, 72 aa, Homo sapiens
LQSFLALVNLLSYPAIYELVRNQDLPNKTEYSLREVPTCVIDIIDRLIILNSEAKIRSLFNYEQSHIFGLRK

SEQ ID NO: 23803 - protein, 402 aa, Homo sapiens
LTVRVELRDSPNLQVSPAALHGAGARTRLLPADCLALPLRPRAARGARRRQESSSGDRDSPPHVPVPELSTDTVINVITNMTTTIQSLFPNLQVFPALGNHDYWPQDQLPVVTSKVYNAVANLWKPWLDEEAISTLRKGGFYSQKVTTNPNLRIISLNTNLYYGPNIMTLNKTDPANQFEWLESTLNNSQQNKEKVYIIAHVPVGYLPSSQNITAMREYYNEKLIDIFQKYSDVIAGQFYGHTHRDSIMVLSDKKGSPVNSLFVAPAVTPVKSVLEKQTNNPGIRLFQYDPRDYKLLDMLQYYLNLTEANLKGESIWKLEYILTQTYDIEDLQPESLYGLAKQFTILDSKQFIKYYNYFFVSYDSSVTCDKTCKAFQICAIMNLDNISYADCLKQLYIKHNY

SEQ ID NO: 23804 - protein, 172 aa, Homo sapiens
MALVRALVCCLLTAWHCRSGLGLPVAPAGGRNPPPAIGQFWHVTDLHLDPTYHITDDHTKVCASSKGANASNPGPFGDVLCDSPYQLILSAFDFIKNSGQEASFMIWTGDSPPHVPVPELSTDTVINVITNMTTTIQSLFPNLQVFPALGNHDYWPQVNLIDFQKCLKNFSY

SEQ ID NO: 23805 - protein, 567 aa, Homo sapiens
MGEEQSTVSGGGGPQESQTLASGTAGHPEPPRPQGDSARAPPLRAASAEPSGGGCGSDWGCADTSAPEPARSLGPPGWSKSRAPAQPAGLALTGPLNPQTLPLQLELEEEEEEAGDRKEGGDEQQEAPPGEELEPRTRVGAADGLVLDVLGQRRPSLAKRQVFCSVYCVESDLPEAPASEQLSPPASPPGAPPVLNPPSTRSSFPSPRLSLPTDSLSPDGGSIELEFYLAPEPFSMPSLLGAPPYSGLGGVGDPYVPLMVLMCRVCLEDKPIKPLPCCKKAVCEECLKVYLSAQVQLGQVEIKCPITECFEFLEETTVVYNLTHEDSIKYKYFLELGRIDSSTKPCPQCKHFTTFKKKGHIPTPSRSESKYKIQCPTCQFVWCFKCHSPWHEGVNCKEYKKGDKLLRHWASEIEHGQRNAQKCPKCKIHIQRTEGCDHMTCSQCNTNFCYRCGERYRQLRFFGDHTSNLSIFGCKYRYLPERPHLRRLVRGSVCAGKLFIAPLIMVLGLALGAIAVVIVEEIKTYWNLISGRTRNQTQHLAPQPVLLSDMLYCLKQVFICISYLLPL

SEQ ID NO: 23806 - protein, 135 aa, Homo sapiens
LPSVLSILPKGLLETEPLQGTDEDAVASADFSSMLSEEEKEELKAELVQLEDEITTLRQVLSAKERHLVEIKQKLGMNLMNELKQNFSKSWHDMQTTTAYKKTHETLSHAGQKATAAFSNVGTAISKKFGDMRRK

SEQ ID NO: 23807 - protein, 44 aa, Homo sapiens [sequence omitted]

SEQ ID NO: 23808 - protein, 177 aa, Homo sapiens
LKLKIVTSVFSSIYRLPLISVALVQGWALGGGAEFTTACDFRLMTPESKIRFVHKEMGIIPSWGGTTRLVEIIGSRQALKVLSGALKLDSKNALNIGMVEEVLQSSDETKSLEEAQEWLKQFIQGPPEVIRALKKSVCSGRELYLEEALQNERDLLGTVWGGPANLEAIAKKGKFNK

SEQ ID NO: 23809 - protein, 142 aa, Homo sapiens
LSKELKLSNEERKLLSVASKNVGAYRSFWSVVSSIEQKTEGAEKKQQMAREYREKIQTELRDICNDVLSLLEKFLIPSASQAESKVFYLKMKGDYYRYLAEVVAGDDKKGIVDQSQQAYQEAFEISKKEMQPTHAIRLDLLL

SEQ ID NO: 23810 - protein, 15 aa, Homo sapiens
LLCGMVGLILHPLFL

SEQ ID NO: 23811 - protein, 1471 aa, Homo sapiens
LLETSPKLGMDTTAAAALPAFVALLLLSPWPLLGSAQGQFSAGGCTFDDGPGACDYHQDLYDDFEWVHVSAQEPHYLPPEMPQGSYMIVDSSDHDPGEKARLQLPTMKENDTHCIDFSYLLYSQKGLNPGTLNILVRVNKGPLANPIWNVTGFTGRDWLRAELAVSTFWPNEYQVIFEAEVSGGRSGYIAIDDIQVLSYPCDKSPHFLRLGDVEVNAGQNATFQCIATGRDAVHNKLWLQRRNGEDIPVAQTKNINHRRFAASFRLQEVTKTDQDLYRCVTQSERGSGVSNFAQLIVREPPRPIAPPQLLGVGPTYLLIQLNANSIIGDGPIILKEVEYRMTSGSWTETHAVNAPTYKLWHLDPDTEYEIRVLLTRPGEGGTGLPGPPLITRTKCAEPMRTPKTLKIAEIQARRIAVDWESLGYNITRCHTFNVTICYHYFRGHNESKADCLDMDPKAPQHVVNHLPPYTNVSLKMILTNPEGRKESEETIIQTDEDVPGPVPVKSLQGTSFENKIFLNWKEPLDPNGIITQYEISYSSIRSFDPAVPVAGPPQTVSNLWNSTHHVFMHLHPGTTYQFFIRASTVKGFGPATAINVTTNISAPTLPDYEGVDASLNETATTITVLLRPAQAKGAPISAYQIVVEELHPHRTKREAGAMECYQVPVTYQNAMSGGAPYYFAAELPPGNLPEPAPFTVGDNRTYQGFWNPPLAPRKGYNIYFQAMSSVEKETKTQCVRIATKAAATEEPEVIPDPAKQTDRVVKIAGISAGILVFILLLLVVILIVKKSKLAKKRKDAMGNTRQEMTHMVNAMDRSYADQSTLHAEDPLSITFMDQHNFSPRLPNDPLVPTAVLVPITDENHSATAESSRLLDVPRYLCEGTESPYQTGQLHPAIRVADLLQHINLMKTSDSYGFKEEYESFFEGQSASWDVAKKDQNRAKNRYGNIIAYDHSRVILQPVEDDPSSDYINANYIDIWLYRDGYQRPSHYIATQGPVHETVYDFWRMIWQEQSACIVMVTNLVEVGRVKCYKYWPDDTEVYGDFKVTCVEMEPLAEYVVRTFTLERRGYNEIREVKQFHFTGWPDHGVPYHATGLLSFIRRVKLSNPPSAGPIVVHCSAGAGRTGCYIVIDIMLDMAEREGVVDIYNCVKALRSRRINMVQTEEQYIFIHDAILEACLCGETAIPVCEFKAAYFDMIRIDSQTNSSHLKDEFQTLNSVTPRLQAEDCSIACLPRNHDKNRFMDMLPPDRCLPFLITIDGESSNYINAALMDSYRQPAAFIVTQYPLPNTVKDFWRLVYDYGCTSIVMLNEVDLSQGCPQYWPEEGMLRYGPIQVECMSCSMDCDVINRIFRICNLTRPQEGYLMVQQFQYLGWASHREVPGSKRSFLKLILQVEKWQEECEEGEGRTIIHCLNGGGRSGMFCAIGIVVEMVKRQNVVDVFHAVKTLRNSKPNMVEAPEQYRFCYDVALEYLESS

SEQ ID NO: 23812 - protein, 743 aa, Homo sapiens
LLETSPKLGMDTTAAAALPAFVALLLLSPWPLLGSAQGQFSAGGCTFDDGPGACDYHQDLYDDFEWVHVSAQEPHYLPPEMPQGSYMIVDSSDHDPGEKARLQLPTMKENDTHCIDFSYLLYSQKGLNPGTLNILVRVNKGPLANPIWNVTGFTGRDWLRAELAVSTFWPNEYQVIFEAEVSGGRSGYIAIDDIQVLSYPCDKSPHFLRLGDVEVNAGQNATFQCIATGRDAVHNKLWLQRRNGEDIPVAQTKNINHRRFAASFRLQEVTKTDQDLYRCVTQSERGSGVSNFAQLIVREPPRPIAPPQLLGVGPTYLLIQLNANSIIGDGPIILKEVEYRMTSGSWTETHAVNAPTYKLWHLDPDTEYEIRVLLTRPGEGGTGLPGPPLITRTKCAEPMRTPKTLKIAEIQARRIAVDWESLGYNITRCHTFNVTICYHYFRGHNESKADCLDMDPKAPQHVVNHLPPYTNVSLKMILTNPEGRKESEETIIQTDEDVPGPVPVKSLQGTSFENKIFLNWKEPLDPNGIITQYEISYSSIRSFDPAVPVAGPPQTVSNLWNSTHHVFMHLHPGTTYQFFIRASTVKGFGPATAINVTTNISAPTLPDYEGVDASLNETATTITVLLRPAQAKGAPISAYQIVVEELHPHRTKREAGAMECYQVPVTYQNAMSGGAPYYFAAELPPGNLPEPAPFTVGDNRTYQGFWNPPLAPRKGYNIYFQAMSSVEKETKTQCVRIATKDLK

SEQ ID NO: 23813 - protein, 3130 aa, Homo sapiens
VDPVAATTMPGAAGVLLLLLLSGGLGGVQAQRPQQQRQSQAHQQRGLFPAVLNLASNALITTNATCGEKGPEMYCKLVEHVPGQPVRNPQCRICNQNSSNPNQRHPITNAIDGKNTWWQSPSIKNGIEYHYVTITLDLQQVFQIAYVIVKAANSPRPGNWILERSLDDVEYKPWQYHAVTDTECLTLYNIYPRTGPPSYAKDDEVICTSFYSKIHPLENGEIHISLINGRPSADDPSPELLEFTSARYIRLRFQRIRTLNADLMMFAHKDPREIDPIVTRRYYYSVKDISVGGMCICYGHARACPLDPATNKSRCECEHNTCGDSCDQCCPGFHQKPWRAGTFLTKTECEACNCHGKAEECYYDENVARRNLSLNIRGKYIGGGVCINCTQNTAGINCETCTDGFFRPKGVSPNYPRPCQPCHCDPIGSLNEVCVKDEKHARRGLAPGSCHCKTGFGGVSCDRCARGYTGYPDCKACNCSGLGSKNEDPCFGPCICKENVEGGDCSRCKSGFFNLQEDNWKGCDECFCSGVSNRCQSSYWTYGKIQDMSGWYLTDLPGRIRVAPQQDDLDSPQQISISNAEARQALPHSYYWSAPAPYLGNKLPAVGGQLTFTISYDLEEEEEDTERVLQLMIILEGNDLSISTAQDEVYLHPSEEHTNVLLLKEESFTIHGTHFPVRRKEFMTVLANLKRVLLQITYSFGMDAIFRLSSVNLESAVSYPTDGSIAAAVEVCQCPPGYTGSSCESCWPRHRRVNGTIFGGICEPCQCFGHAESCDDVTGECLNCKDHTGGPYCDKCLPGFYGEPTKGTSEDCQPCACPLNIPSNNFSPTCHLDRSLGLICDGCPVGYTGPRCERCAEGYFGQPSVPGGSCQPCQCNDNLDFSIPGSCDSLSGSCLICKPGTTGRYCELCADGYFGDAVDAKNCQPCRCNAGGSFSEVCHSQTGQCECRANVQGQRCDKCKAGTFGLQSARGCVPCNCNSFGSKSFDCEESGQCWCQPGVTGKKCDRCAHGYFNFQEGGCTACECSHLGNNCDPKTGRCICPPNTIGEKCSKCAPNTWGHSITTGCKACNCSTVGSLDFQCNVNTGQCNCHPKFSGAKCTECSRGHWNYPRCNLCDCFLPGTDATTCDSETKKCSCSDQTGQCTCKVNVEGIHCDRCRPGKFGLDAKNPLGCSSCYCFGTTTQCSEAKGLIRTWVTLKAEQTILPLVDEALQHTTTKGIVFQHPEIVAHMDLMREDLHLEPFYWKLPEQFEGKKLMAYGGKLKYAIYFEAREETGFSTYNPQVIIRGGTPTHARIIVRHMAAPLIGQLTRHEIEMTEKEWKYYGDDPRVHRTVTREDFLDILYDIHYILIKATYGNFMRQSRISEISMEVAEQGRGTTMTPPADLIEKCDCPLGYSGLSCEACLPGFYRLRSQPGGRTPGPTLGTCVPCQCNGHSSLCDPETSICQNCQHHTAGDFCERCALGYYGIVKGLPNDCQQCACPLISSSNNFSPSCVAEGLDDYRCTACPRGYEGQYCERCAPGYTGSPGNPGGSCQECECDPYGSLPVPCDPVTGFCTCRPGATGRKCDGCKHWHAREGWECVFCGDECTGLLLGDLARLEQMVMSINLTGPLPAPYKMLYGLENMTQELKHLLSPQRAPERLIQLAEGNLNTLVTEMNELLTRATKVTADGEQTGQDAERTNTRAKSLGEFIKELARDAEAVNEKAIKLNETLGTRDEAFERNLEGLQKEIDQMIKELRRKNLETQKEIAEDELVAAEALLKKVKKLFGESRGENEEMEKDLREKLADYKNKVDDAWDLLREATDKIREANRLFAVNQKNMTALEKKKEAVESGKRQIENTLKEGNDILDEANRLADEINSIIDYVEDIQTKLPPMSEELNDKIDDLSQEIKDRKLAEKVSQAESHAAQLNDSSAVLDGILDEAKNISFNATAAFKAYSNIKDYIDEAEKVAKEAKDLAHEATKLATGPRGLLKEDAKGCLQKSFRILNEAKKLANDVKENEDHLNGLKTRIENADARNGDLLRTLNDTLGKLSAIPNDTAAKLQAVKDKARQANDTAKDVLAQITELHQNLDGLKKNYNKLADSVAKTNAVVKDPSKNKIIADADATVKNLEQEADRLIDKLKPIKELEDNLKKNISEIKELINQARKQANSIKVSVSSGGDCIRTYKPEIKKGSYNNIVVNVKTAVADNLLFYLGSAKFIDFLAIEMRKGKVSFLWDVGSGVGRVEYPDLTIDDSYWYRIVASRTGRNGTISVRALDGPKASIVPSTHHSTSPPGYTILDVDANAMLFVGGLTGKLKKADAVRVITFTGCMGETYFDNKPIGLWNFREKEGDCKGCTVSPQVEDSEGTIQFDGEGYALVSRPIRWYPNISTVMFKFRTFSSSALLMYLATRDLRDFMSVELTDGHIKVSYDLGSGMASVVSNQNHNDGKWKSFTLSRIQKQANISIVDIDTNQEENIATSSSGNNFGLDLKADDKIYFGGLPTLRNLSMKARPEVNLKKYSGCLKDIEISRTPYNILSSPDYVGVTKGCSLENVYTVSFPKPGFVELSPVPIDVGTEINLSFSTKNESGIILLGSGGTPAPPRRKRRQTGQAYYAILLNRGRLEVHLSTGARTMRKIVIRPEPNLFHDGREHSVHVERTRGIFTVQVDENRRYMQNLTVEQPIEVKKLFVGGAPPEFQPSPLRNIPPFEGCIWNLVINSVPMDFARPVSFKNADIGRCAHQKLREDEDGAAPAEIVIQPEPVPTPAFPTPTPVLTHGPCAAESEPALLIGSKQFGLSRNSHIAIAFDDTKVKNRLTIELEVRTEAESGLLFYMARINHADFATVQLRNGLPYFSYDLGSGDTHTMIPTKINDGQWHKIKIMRSKQEGILYVDGASNRTISPKKADILDVVGMLYVGGLPINYTTRRIGPVTYSIDGCVRNLHMAEAPADLEQPTSSFHVGTCFANAQRGTYFDGTGFAKAVGGFKVGLDLLVEFEFRTTTTTGVLLGISSQKMDGMGIEMIDEKLMFHVDNGAGRFTAVYDAGVPGHLCDGQWHKVTANKIKHRIELTVDGNQVEAQSPNPASTSADTNDPVFVGGFPDDLKQFGLTTSIPFRGCIRSLKLTKGTGKPLEVNFAKALELRGVQPVSCPAN

SEQ ID NO: 23814 - protein, 63 aa, Homo sapiens [sequence omitted]

SEQ ID NO: 23815 - protein, 104 aa, Homo sapiens
LYFSPNYPKIDGGAGGDSGTLLTAQTITSESVSTTTTTHITKTVKGGISETRIEKRIVITGDGDIDHDQALAQAIREAREQHPDMSVTRVVVHKETELAEEGED

SEQ ID NO: 23816 - protein, 25 aa, Homo sapiens
LWGFLLDADSVFLMCAFGLLCNSSW

SEQ ID NO: 23817 - protein, 129 aa, Homo sapiens
LLVIMSLGLGLGLGLRKLEKQGSCRKKCFDASFRGLENCRCDVACKDRGDCCWDFEDTCVESTRIWMCNKFRCGETRLEASLCSCSDDCLQRKDCCADYKSVCQGLTCHQLSCFLWMDLELNIYTHGIL

SEQ ID NO: 23818 - protein, 258 aa, Homo sapiens
LLVIMSLGLGLGLGLRKLEKQGSCRKKCFDASFRGLENCRCDVACKDRGDCCWDFEDTCVESTRIWMCNKFRCGETRLEASLCSCSDDCLQRKDCCADYKSVCQGETSWLEENCDTAQQSQCPEGFDLPPVILFSMDGFRAEYLYTWDTLMPNINKLKTCGIHSKYMRAMYPTKTFPNHYTIVTGLYPESHGIIDNNMYDVNLNKNFSLSSKEQNNPAWWHGQPVCSILHVATEVTSISQCDRRTLFSLSGASSMSPI

SEQ ID NO: 23819 - protein, 12 aa, Homo sapiens
VRDINSLDWNLN

SEQ ID NO: 23820 - protein, 28 aa, Homo sapiens
VASICLRNILSLREKFPMKYLERKSSID

SEQ ID NO: 23821 - protein, 31 aa, Homo sapiens
LPSKITKDRLFLHMVYLSLMFTGESVVTKNV

SEQ ID NO: 23822 - protein, 19 aa, Homo sapiens
LLFLLGGLGWFLWIKSDIF

SEQ ID NO: 23823 - protein, 517 aa, Homo sapiens
LDFSMTTQLPAYVAILLFYVSRASCQDTFTAAVYEHAAILPNATLTPVSREEALALMNRNLDILEGAITSAADQGAHIIVTPEDAIYGWNFNRDSLYPYLEDIPDPEVNWIPCNNRNRFGQTPVQERLSCLAKNNSIYVVANIGDKKPCDTSDPQCPPDGRYQYNTDVVFDSQGKLVARYHKQNLFMGENQFNVPKEPEIVTFNTTFGSFGIFTCFDILFHDPAVTLVKDFHVDTIVFPTAWMNVLPHLSAVEFHSAWAMGMRVNFLASNIHYPSKKMTGSGIYAPNSSRAFHYDMKTEEGKLLLSQLDSHPSHSAVVNWTSYASSIEALSSGNKEFKGTVFFDEFTFVKLTGVAGNYTVCQKDLCCHLSYKMSENIPNEVYALGAFDGLHTVEGRYYLQICTLLKCKTTNLNTCGDSAETASTRFEMFSLSGTFGTQYVFPEVLLSENQLAPGEFQVSTDGRLFSLKPTSGPVLTVTLFGRLYEKDWASNASSGLTAQARIIMLIVIAPIVCSLSW

SEQ ID NO: 23824 - protein, 115 aa, Homo sapiens [sequence omitted]

SEQ ID NO: 23825 - protein, 286 aa, Homo sapiens
LEAWMNVLPLLTAIEFHSAWAMGMGVNLLVANTHHVSLNMTGSGIYAPNGPKVYHYDMKTELGKLLLSEVDSHPLSSLAYPTAVNWNAYATTIKPFPVQKNTFRGFISRDGFNFTELFENAGNLTVCQKELCCHLSYRMLQKEENEVYVLGAFTGLHGRRRREYWQVCTLLKCKTTNLTTCGRPVETASTRFEMFSLSGTFGTEYVFPEVLLTEIHLSPGKFEVLKDGRLVNKNGSSGPILTVSLFGRWYTKDSLYSSCGTSNSAITYLLIFILLMIIALQNIVML

SEQ ID NO: 23826 - protein, 522 aa, Homo sapiens
LAMVTSSFPISVAVFALITLQVGTQDSFIAAVYEHAVILPNKTETPVSQEDALNLMNENIDILETAIKQAAEQGARIIVTPEDALYGWKFTRETVFPYLEDIPDPQVNWIPCQDPHRFGHTPVQARLSCLAKDNSIYVLANLGDKKPCNSRDSTCPPNGYFQYNTNVVYNTEGKLVARYHKYHLYSEPQFNVPEKPELVTFNTAFGRFGIFTCFDIFFYDPGVTLVKDFHVDTILFPTAWMNVLPLLTAIEFHSAWAMGMGVNLLVANTHHVSLNMTGSGIYAPNGPKVYHYDMKTELGKLLLSEVDSHPLSSLAYPTAVNWNAYATTIKPFPVQKNTFRGFISRDGFNFTELFENAGNLTVCQKELCCHLSYRMLQKEENEVYVLGAFTGLHGRRRREYWQVCTLLKCKTTNLTTCGRPVETASTRFEMFSLSGTFGTEYVFPEVLLTEIHLSPGKFEVLKDGRLVNKNGSSGPILTVSLFGRWYTKDSLYSSCGTSNSAITYLLIFILLMIIALQNIVML

SEQ ID NO: 23827 - protein, 292 aa, Homo sapiens
LAMVTSSFPISVAVFALITLQVGTQDSFIAAVYEHAVILPNKTETPVSQEDALNLMNENIDILETAIKQAAEQGARIIVTPEDALYGWKFTRETVFPYLEDIPDPQVNWIPCQDPHRFGHTPVQARLSCLAKDNSIYVLANLGDKKPCNSRDSTCPPNGYFQYNTNVVYNTEGKLVARYHKYHLYSEPQFNVPEKPELVTFNTAFGRFGIFTCFDIFFYDPGVTLVKDFHVDTILFPTAWMNVLPLLTAIEFHSAWAMGMGVNLLVANTHHVSLNMTVVFMHQMVPKCIIMT

SEQ ID NO: 23828 - protein, 186 aa, Homo sapiens
LAMVTSSFPISVAVFALITLQVGTQDSFIAAVYEHAVILPNKTETPVSQEDALNLMNENIDILETAIKQAAEQGARIIVTPEDALYGWKFTRETVFPYLEDIPDPQVNWIPCQDPHRFGHTPVQARLSCLAKDNSIYVLANLGDKKPCNSRDSTCPPNGYFQYNTNVVYNTEGKLVARYHKVGKSH

SEQ ID NO: 23829 - protein, 483 aa, Homo sapiens
VPVAPWRSSPRTWLEAGSWGAGVHAPGMEALGDLEGPRAPGGDDPAGSAGETPGWLSREQVFVLISAASVNLGSMMCYSILGPFFPKEAEKKGASNTIIGMIFGCFALFELLASLVFGNYLVHIGAKFMFVAGMFVSGGVTILFGVLDRVPDGPVFIAMCFLVRVMDAVSFAAAMTASSSILAKAFPNNVATVLGSLETFSGLGLILGPPVGGFLYQSFGYEVPFIVLGCVVLLMVPLNMYILPNYESDPGEHSFWKLIALPKVGLIAFVINSLSSCFGFLDPTLSLFVLEKFNLPAGYVGLVFLGMALSYAISSPLFGLLSDKRPPLRKWLLVFGNLITAGCYMLLGPVPILHIKSQLWLLVLILVVSGLSAGMSIIPTFPEILSCAHENGFEEGLSTLGLVSGLFSAMWSIGAFMGPTLGGFLYEKIGFEWAAAIQGLWALISGLAMGLFYLLEYSRRKRSKSQNILSTEEERTTLLPNET

SEQ ID NO: 23830 - protein, 77 aa, Homo sapiens
MAEEGIAAGGVMDVNTALQEVLKTALIHDGLARGIREAAKALDKYVYQSQYCGFLQPEQNCHPREEGMEFMVLAQKF

SEQ ID NO: 23831 - protein, 55 aa, Homo sapiens
METGERARLILILVLQLLLRIRRNRQQRCRRVLSHRSLFPRSEVSPGWSPTPDLK

SEQ ID NO: 23832 - protein, 28 aa, Homo sapiens
MPGPNVKAVATAVEQIYPFVFESRKEIL

SEQ ID NO: 23833 - protein, 21 aa, Homo sapiens
MILLLLQKDILFIFAVILMSP

SEQ ID NO: 23834 - protein, 433 aa, Homo sapiens
VVMTVKTEAAKGTLTYSRMRGMVAILIAFMKQRRMGLNDFIQKIANNSYACKHPEVQSILKISQPQEPELMNANPSPPPSPSQQINLGPSSNPHAKPSDFHFLKVIGKGSFGKVLLARHKAEEVFYAVKVLQKKAILKKKEEKHIMSERNVLLKNVKHPFLVGLHFSFQTADKLYFVLDYINGGELFYHLQRERCFLEPRARFYAAEIASALGYLHSLNIVYRDLKPENILLDSQGHIVLTDFGLCKENIEHNSTTSTFCGTPEYLAPEVLHKQPYDRTVDWWCLGAVLYEMLYGLPPFYSRNTAEMYDNILNKPLQLKPNITNSARHLLEGLLQKDRTKRLGAKDDFMEIKSHVFFSLINWDDLINKKITPPFNPNVSGPNDLRHFDPEFTEEPVPNSIGKSPDSVLVTASVKEAAEAFLGFSYAPPTDSFL

SEQ ID NO: 23835 - protein, 50 aa, Homo sapiens
LQPRMTLFCLLQLFYHLQRERCFLEPRARFYAAEIASALGYLHSLNIVYR

SEQ ID NO: 23836 - protein, 118 aa, Homo sapiens
LSMDNSRSPDMDGIITEVKAQYEEITNRSRSEAESMYQIKYEELQMLAGKHGDDLQHTKTEISKMNRNISWLQAETEGLKGQRASLETAIADAEQHGELAVKDANAKLSELEAALQRA

SEQ ID NO: 23837 - protein, 95 aa, Homo sapiens
MMSFGFGFLPKNCKWCLLALLRILPLLQISEKRLECSGAHASHCDTAGEPRATAVGMTALFLLKSDLSKPLSYVWRLLGSWSTQIATANLRNGHE

SEQ ID NO: 23838 - protein, 32 aa, Homo sapiens
MTLLLYTNKYHNSYLVRHQICVHDYVLIHLRQ

SEQ ID NO: 23839 - protein, 19 aa, Homo sapiens
MVFLAFLSREMAAVWLQRR

SEQ ID NO: 23840 - protein, 508 aa, Homo sapiens [sequence omitted]

SEQ ID NO: 23841 - protein, 86 aa, Homo sapiens
VLGWSRRRSGLEPATVGSSMALLFLLPLVMQGVSRAEMGTADLGPSSVPTPTNVTIESYNMNPIVYWEYQIMPQVPVFTVEVKNYG

SEQ ID NO: 23842 - protein, 51 aa, Homo sapiens
VLGWSRRRSGLEPATVGSSMALLFLLPLVMQGVSRAEMGTADLGPSSVAII

SEQ ID NO: 23843 - protein, 113 aa, Homo sapiens
LAVNNIAGIEEVNMIKDDRTVIHFNNPKVQASLSANTFAITGHAEAKPITEMLPGILSQLGADSLTILKKLAEQFPWQVLDSKAPKPEDIDEEEEDVLDPVEKSDKASKNEAK

SEQ ID NO: 23844 - protein, 27 aa, Homo sapiens
MFTPETGEDLLPSAEPNIPHMLLHNAS

SEQ ID NO: 23845 - protein, 167 aa, Homo sapiens
VGSGLQPGREEGPGLRSGDSGPRRGAHTQAGRPGVRGLCAADQAPRASAPPMAEPLQPDPGAAEDAAAQAVETPGWKAPEDAGPQPGSYEIRHYGPAKWVSTSVESMDWDSAIQTGFTKLNSYIQGKNEKEMKIKMTAPVTSYVEPGSGPFSLSMDFLVPKRIKNNF

SEQ ID NO: 23846 - protein, 38 aa, Homo sapiens
LDTKIKLSFVAATITFSVVCITFPPASSHCPTAQEYSM

SEQ ID NO: 23847 - protein, 19 aa, Homo sapiens
LGQRKKPSVLFAGLFFVSS

SEQ ID NO: 23848 - protein, 794 aa, Homo sapiens
LPAQVPGAGPRVVHAGRGGREPEAKMEGLTLSDAEQKYYSDLFSYCDIESTKKVVVNGRVLELFRAAQLPNDVVLQIMELCGATRLGYFGRSQFYIALKLVAVAQSGFPLRVESINTVKDLPLPRFVASKNEQESRHAASYSSDSENQGSYSGVIPPPPGRGQVKKGSVSHDTVQPRTSADAQEPASPVVSPQQSPPTSPHTWRKHSRHPSGGNSERPLAGPGPFWSPFGEAQSGSSAGDAVWSGHSPPPPQENWVSFADTPPTSTLLTMHPASVQDQTTVRTVASATTAIEIRRQSSSYDDPWKITDEQRQYYVNQFKTIQPDLNGFIPGSAAKEFFTKSKLPILELSHIWELSDFDKDGALTLDEFCAAFHLVVARKNGYDLPEKLPESLMPKLIDLEDSADVGDQPGEVGYSGSPAEAPPSKSPSMPSLNQTWPELNQSSEDTAIVHPVPIRMTPSKIHMQEMELKRTGSDHTNPTSPLLVKPSDLLEENKINSSVKFASGNTVADGYSSSDSFTSDPEQIGSNVTRQRSHSGTSPDNTAPPPPPPRPQPSHSRSSSLDMNRTFTVTTGQQQAGVVAHPPAVPPRPQPSQAPGPAVHRPVDADGLITHTSTSPQQIPEQPNFADFSQFEVFAASNVNDEQDDEAEKHPEVLPAEKASDPASSLRVAKTDSKTEEKTAASAPANVSKGTTPLAPPPKPVRRRLKSEDELRPEVDEHTQKTGVLAAVLASQPSIPRSVGKDKKAIQASIRRNKETNTVLARLNSELQQQLKDVLEERISLEVQLEQLRPFSHL

SEQ ID NO: 23849 - protein, 730 aa, Homo sapiens
LPAQVPGAGPRVVHAGRGGREPEAKMEGLTLSDAEQKYYSDLFSYCDIESTKKVVVNGRVLELFRAAQLPNDVVLQIMELCGATRLGYFGRSQFYIALKLVAVAQSGFPLRVESINTVKDLPLPRFVASKNEQESRHAASYSSDSENQGSYSGVIPPPPGRGQVKKGSVSHDTVQPRTSADAQEPASPVVSPQQSPPTSPHTWRKHSRHPSGGNSERPLAGPGPFWSPFGEAQSGSSAGDAVWSGHSPPPPQENWVSFADTPPTSTLLTMHPASVQDQTTVRTVASATTAIEIRRQSSSYDDPWKITDEQRQYYVNQFKTIQPDLNGFIPGSAAKEFFTKSKLPILELSHIWELSDFDKDGALTLDEFCAAFHLVVARKNGYDLPEKLPESLMPKLIDLEDSADVGDQPGEVGYSGSPAEAPPSKSPSMPSLNQTWPELNQSSEDTAIVHPVPIRMTPSKIHMQEMELKRTGSDHTNPTSPLLVKPSDLLEENKINSSVKFASGNTVGQQQAGVVAHPPAVPPRPQPSQAPGPAVHRPVDADGLITHTSTSPQQIPEQPNFADFSQFEVFAASNVNDEQDDEAEKHPEVLPAEKASDPASSLRVAKTDSKTEEKTAASAPANVSKGTTPLAPPPKPVRRRLKSEDELRPEVDEHTQKTGVLAAVLASQPSIPRSVGKDKKAIQASIRRNKETNTVLARLNSELQQQLKDVLEERISLEVQLEQLRPFSHL

SEQ ID NO: 23850 - protein, 820 aa, Homo sapiens
LPAQVPGAGPRVVHAGRGGREPEAKMEGLTLSDAEQKYYSDLFSYCDIESTKKVVVNGRVLELFRAAQLPNDVVLQIMELCGATRLGYFGRSQFYIALKLVAVAQSGFPLRVESINTVKDLPLPRFVASKNEQESRHAASYSSDSENQGSYSGVIPPPPGRGQVKKGSVSHDTVQPRTSADAQEPASPVVSPQQSPPTSPHTWRKHSRHPSGGNSERPLAGPGPFWSPFGEAQSGSSAGDAVWSGHSPPPPQENWVSFADTPPTSTLLTMHPASVQDQTTVRTVASATTAIEIRRQSSSYDDPWKITDEQRQYYVNQFKTIQPDLNGFIPGSAAKEFFTKSKLPILELSHIWELSDFDKDGALTLDEFCAAFHLVVARKNGYDLPEKLPESLMPKLIDLEDSADVGDQPGEVGYSGSPAEAPPSKSPSMPSLNQTWPELNQSSEQWETFSERSSSSQTLTQFDSNIAPADPDTAIVHPVPIRMTPSKIHMQEMELKRTGSDHTNPTSPLLVKPSDLLEENKINSSVKFASGNTVDGYSSSDSFTSDPEQIGSNVTRQRSHSGTSPDNTAPPPPPPRPQPSHSRSSSLDMNRTFTVTTGQQQAGVVAHPPAVPPRPQPSQAPGPAVHRPVDADGLITHTSTSPQQIPEQPNFADFSQFEVFAASNVNDEQDDEAEKHPEVLPAEKASDPASSLRVAKTDSKTEEKTAASAPANVSKGTTPLAPPPKPVRRRLKSEDELRPEVDEHTQKTGVLAAVLASQPSIPRSVGKDKKAIQASIRRNKETNTVLARLNSELQQQLKDVLEERISLEVQLEQLRPFSHL

SEQ ID NO: 23851 - protein, 245 aa, Homo sapiens
LPAQVPGAGPRVVHAGRGGREPEAKMEGLTLSDAEQKYYSDLFSYCDIESTKKVVVNGRVLELFRAAQLPNDVVLQIMELCGATRLGYFGRSQFYIALKLVAVAQSGFPLRVESINTVKDLPLPRFVASKNEQESRHAASYSSDSENQGSYSGVIPPPPGRGQVKKGSVSHDTVQPRTSADAQEPASPVVSPQQSPPTSPHTWRKHSRHPSGGNSERPLAGPGPFWSPFGEAQSGNSQTLIKMVH

SEQ ID NO: 23852 - protein, 143 aa, Homo sapiens
LSAETLTFPPTLLLLLHSRLSLCLSHFLPWPHPPQCTEEGNRVQTHAAPVLRREGKPRREAAMNVDHEVNLLVEEIHRLGSKNADGKLSVKFGVLFRDDKCANLFEALVGTLKAAKRRKIVTYPGELLLQGVHDDVDIILLQD

SEQ ID NO: 23853 - protein, 708 aa, Homo sapiens
LLFPASFLSSLFLLSFLPSDTTPKMEANHSEQLSAERQSTPPGDSSSLPSHNGLEKEDGQDSPTPVQPPEKEASVHPDISEELNRQLEDIINTYGSAASTAGKEGSARASEQPENAESPDNEDGDCEETTEEAGREPVASGEPPTVKEPVSNKEQKLEKKILKGLGKEANLLMQNLNKLQTPEEKFDFLFKKYAELLDEHRTEQKKLKLLQKKQVQIQKEKDQLQGEHSRAILARSKLESLCRELQRHNKTLKEEALQRAREEEEKRKEITSHFQSTLTDIQGQIEQQSERNMKLCQENTELAEKLKSIIDQYELREEHLDKIFKHRELQQKLVDAKLEQAQEMMKEAEERHKREKEYLLNQAAEWKLQAKVLKEQETVLQAQLTLYSGRFEEFQSTLTKSNEVFATFKQEMDKTTKKMKKLEKDTATWKARFENCNKALLDMIEEKALRAKEYECFVMKIGRLENLCRALQEERNELHKKIRDAEISEKDDQSQHNSDEEPESNVSVDQEIDAEEVNSVQTAVKNLATAFMIIHHPESTPHQSKETQPEIGSSQESADAALKEPEQPPLIPSRDSESPLPPLTPQAEAEGGSDAEPPSKASNSPAGLGAETQCEGLPVGAQADQASWKPEAEASGQAPQAPTEASLQKMEADVPAPACAAEEHVAAMVPACEPSRQPPRAAAEELPVGASAGPQPRNVADTNLEGVD

SEQ ID NO: 23854 - protein, 96 aa, Homo sapiens
LRPRGGPKYLGWWPSPASRQRGRGPATRTPAWPGLLSTSPTHTLLPQLLALTLPTSLRGGTCRQPASSSAGPALNAAAPRVHLAPSGKPMNSPETA

SEQ ID NO: 23855 - protein, 403 aa, Homo sapiens
MMFRSDRMWSCHWKWKPSPLLFLFALYIMCVPHSVWGCANCRVVLSNPSGTFTSPCYPNDYPNSQACMWTLRAPTGYIIQITFNDFDIEEAPNCIYDSLSLDNGESQTKFCGATAKGLSFNSSANEMHVSFSSDFSIQKKGFNASYIRVAVSLRNQKVILPQTSDAYQVSVAKSISIPELSAFTLCFEATKVGHEDSDWTAFSYSNASFTQLLSFGKAKSGYFLSISDSKCLLNNALPVKEKEDIFAESFEQLCLVWNNSLGSIGVNFKRNYETVPCDSTISKVIPGNGKLLLGSNQNEIVSLKGDIYNFRLWNFTMNAKILSNLSCNVKGNVVDWQNDFWNIPNLALKAESNLSCGEFVAYSFFFFFLALFYEYDCQQRIIHTHKCTCMYIHTYRHIYICCH

SEQ ID NO: 23856 - protein, 170 aa, Homo sapiens
MFRSDRMWSCHWKWKPSPLLFLFALYIMCVPHSVWGCANCRVVLSNPSGTFTSPCYPNDYPNSQACMWTLRAPTGYIIQITFNDFDIEEAPNCIYDSLSLDNGESQTKFCGATAKGLSFNSSANEMHVSFSSDFSIQKKGFNASYIRVAVSLRNQKVILPQTSDAYQVPT

SEQ ID NO: 23857 - protein, 141 aa, Homo sapiens
MLQINNAVMIFSEQFIFPVKQIDRVMSFFFSDWSKTATNIIKKSSDNLGKSLSSSSIGSNSTYLTSKSKSSSTTYFKRNSHTDSASMDKSLSKLAHADGDQTSIIPVHQVIDKVKGYCNAHSDNFYKNIIMSDTFSHSTKF

SEQ ID NO: 23858 - protein, 83 aa, Homo sapiens
LALGISVTPFTSRARKEGRKERRKEARKEGTVSMEGSGGGALALRVHRLQSGSGRCRLDPGAWRRVEPLNFLKDHSNQIYLKN

SEQ ID NO: 23859 - protein, 32 aa, Homo sapiens
LDSIRPQKEGDFRKEINKRWNNLSDGQRTQVS

SEQ ID NO: 23860 - protein, 169 aa, Homo sapiens
LRRDMRPQELPRLAFPLLLLLLLLLPPPPCPAHSATRFDPTWESLDARQLPAWFDQAKFGIFIHWGVFSVPSFGSEWFWWYWQKEKIPKYVEFMKDNYPPSFKYEDFGPLFTAKFFNANQWADIFQASGAKYIVLTSKHHEATCRDSFMWRKSFDEYWAHTRWHHFCSF

SEQ ID NO: 23861 - protein, 33 aa, Homo sapiens
VRGPGGPLGTGRDMNAWKSGWERTHDRRTKGAA

SEQ ID NO: 23862 - protein, 34 aa, Homo sapiens
VEHTGQGTLLGAPHLWLLTRNFRKTKLFAIFTGR

SEQ ID NO: 23863 - protein, 12 aa, Homo sapiens
MGPLKNSKQVFA

SEQ ID NO: 23864 - protein, 124 aa, Homo sapiens
LGRWEPRGAVRLRPAGTAAGDGALALQEPGLWLGEVELAAEEAAQDGAEPGRVDTFWYKFLKREPGGELSWEGIASRRLPPAQSGSSGPHPQPGPRPRAGPAGPGGARPGLFARVPAHSPGDLG

SEQ ID NO: 23865 - protein, 15 aa, Homo sapiens
MCEALHSMYKNHKII

SEQ ID NO: 23866 - protein, 1751 aa, Homo sapiens
LWFLGLPGDPYTFRQKALVPTSSPCSVGGECVPVICWVCRGAQAWCKQTQEARRTSLEFTVTSQENLKMSSRRKRAPPVRVDEEKRQQLHWNMHEDRRNEPIIISDDDEQPCPGSDTSSAHYIILSDSLKEEVAHRDKKRCSKVVSFSKPIEKEETVGIFSPLSVKLNIVISPYHFDNSWKAFLGELTLQLLPAQSLIENFSERSITLMSSESSNQFLIYVHSKGEDVEKQKKEPMSICDKGILVESSFSGEMLEDLGWLQKKRRIKLYQKPEGNHIIKVGIYLLEAGLAKLDFLSDANSRMKKFNQLMKKVMEKLHNSIIPDVLEEDEDDPESEPEGQDIDELYHFVKQTHQQETQSIQVDVQHPALIPVLRPYQREAVNWMLQQECFRSSPATESALHFLWREIVTSEGLKLYYNPYTGCIIREYPNSGPQLLGGILADEMGLGKTVEVLALILTHTRQDVKQDALTLPEGKVVNYFIPSHYFGGKLKKTEIQNIEFEPKEKVQCPPTRVMILTAVKEMNGKKGVSILSIYKYVSSIYRYDVQRNRSLLKRMLKCLIFEGLVKQIKGHGFSGTFTLGKNYKEEDICDKTKKQAVGSPRKIQKETRKSGNKDTDSEYLPSDTSDDDDDPYYYYYKSRRNRSKLRKKLVPSTKKGKSQPFINPDSQGHCPATSDSGITDVAMSKSTCISEFNQEHETEDCAESLNHADSDVPPSNTMSPFNTSDYRFECICGELDQIDRKPRVQCLKCHLWQHAKCVNYDEKNLKIKPFYCPHCLVAMEPVSTRATLIISPSSICHQWVDEINRHVRSSSLRVLVYQGVKKDGFLQPHFLAEQDIVIITYDVLRSELNYVDIPHSNSEDGRRLRNQKRYMAIPSPLVAVEWWRICLDEAQMVECPTVKAAEMAQRLSGINRWCISGTPVQRGLEDLFGLVVFLGIEPYCVKHWWVRLLYRPYCKKNPQHLYSFIAKILWRSAKKDVIDQIQIPPQTEEIHWLHFSPVERHFYHRQHEVCCQDVVVKLRKISDWALKLSSLDRRTVTSILYPLLRLRQACCHPQAVRGEFLPLQKSTMTMEELLTSLQKKCGTECEEAHRQLVCALNGLAGIHIIKGEYALAAELYREVLRSSEEHKGKLKTDSLQRLHATHNLMELLIARHPGIPPTLRDGRLEEEAKQLREHYMSKCNTEVAEAQQALYPVQQTIHELQRKIHSNSPWWLNVIHRAIEFTIDEELVQRVRNEITSNYKQQTGKLSMSEKFRDCRGLQFLLTTQMEELNKCQKLVREAVKNLEGPPSRNVIESATVCHLRPARLPLNCCVFCKADELFTEYESKLFSNTVKGQTAIFEEMIEDEEGLVDDRAPTTTRGLWAISETERSMKAILSFAKSHRFDVEFVDEGSTSMDLFEAWKKEYKLLHEYWMALRNRVSAVDELAMATERLRVRDPREPKPNPPVLHIIEPHEVEQNRIKLLNDKAVATSQLQKKLGQLLYLTNLEKSQDKTSGGVNPEPCPICARQLGKQWAVLTCGHCFCNECISIIIEQYSVGSHRSSIKCAICRQTTSHKEISYVFTSEKANQEEDIPVKGSHSTKVEAVVRTLMKIQLRDPGAKALVFSTWQDVLDIISKALTDNNMEFAQISRVKTFQENLSAFKRDPQINILLLPLHTGSNGLTIIEATHVLLVEPILNPAHELQAIGRVHRIGQTKPTIVHRFLIKATIEERMQAMLKTAERSHTNSSAKHSEASVLTVADLADLFTKETEELE

SEQ ID NO: 23867 - protein, 1083 aa, Homo sapiens
LNQKKKFNALHILLHLATRVMILTAVKEMNGKKGVSILSIYKYVSSIYRYDVQRNRSLLKRMLKCLIFEGLVKQIKGHGFSGTFTLGKNYKEEDICDKTKKQAVGSPRKIQKETRKSGNKDTDSEYLPSDTSDDDDDPYYYYYKSRRNRSKLRKKLVPSTKKGKSQPFINPDSQGHCPATSDSGITDVAMSKSTCISEFNQEHETEDCAESLNHADSDVPPSNTMSPFNTSDYRFECICGELDQIDRKPRVQCLKCHLWQHAKCVNYDEKNLKIKPFYCPHCLVAMEPVSTRATLIISPSSICHQWVDEINRHVRSSSLRVLVYQGVKKDGFLQPHFLAEQDIVIITYDVLRSELNYVDIPHSNSEDGRRLRNQKRYMAIPSPLVAVEWWRICLDEAQMVECPTVKAAEMAQRLSGINRWCISGTPVQRGLEDLFGLVVFLGIEPYCVKHWWVRLLYRPYCKKNPQHLYSFIAKILWRSAKKDVIDQIQIPPQTEEIHWLHFSPVERHFYHRQHEVCCQDVVVKLRKISDWALKLSSLDRRTVTSILYPLLRLRQACCHPQAVRGEFLPLQKSTMTMEELLTSLQKKCGTECEEAHRQLVCALNGLAGIHIIKGEYALAAELYREVLRSSEEHKGKLKTDSLQRLHATHNLMELLIARHPGIPPTLRDGRLEEEAKQLREHYMSKCNTEVAEAQQALYPVQQTIHELQRKIHSNSPWWLNVIHRAIEFTIDEELVQRVRNEITSNYKQQTGKLSMSEKFRDCRGLQFLLTTQMEELNKCQKLVREAVKNLEGPPSRNVIESATVCHLRPARLPLNCCVFCKADELFTEYESKLFSNTVKGQTAIFEEMIEDEEGLVDDRAPTTTRGLWAISETERSMKAILSFAKSHRFDVEFVDEGSTSMDLFEAWKKEYKLLHEYWMALRNRVSAVDELAMATERLRVRDPREPKPNPPVLHIIEPHEVEQNRIKLLNDKAVATSQLQKKLGQLLYLTNLEKSQDKTSGGVNPEPCPICARQLGKQWAVLTCGHCFCNECISIIIEQYSVGSHRSSIKCAICRQTTSHKEISYVFTSEKANQEEDIPVKVK

SEQ ID NO: 23868 - protein, 7 aa, Homo sapiens
LLQSVSN

SEQ ID NO: 23869 - protein, 61 aa, Homo sapiens [sequence omitted]

SEQ ID NO: 23870 - protein, 62 aa, Homo sapiens
VGRPSEPELRIGERRRRPAVVFDLLQPPAGRPSPTPSPPPQPGAVAAAAAGGSWRRRASGGG

SEQ ID NO: 23871 - protein, 336 aa, Homo sapiens
LPGLSKMEGAPPGSLALRLLLFVALPASGWLTTGAPEPPPLSGAPQDGIRINVTTLKDDGDISKQQVVLNITYESGQVYVNDLPVNSGVTRISCQTLIVKNENLENLEEKEYFGIVSVRILVHEWPMTSGSSLQLIVIQEEVVEIDGKQVQQKDVTEIDILVKNRGVLRHSNYTLPLEESMLYSISRDSDILFTLPNLSKKESVSSLQTTSQYLIRNVETTVDEDVLPGKLPETPLRAEPPSSYKVMCQWMEKFRKDLCRFWSNVFPVFFQFLNIMVVGITGAAVVITILKVFFPVSEYKGILQLDKVDVIPVTAINLYPDGPEKRAENLEDKTCI

SEQ ID NO: 23872 - protein, 922 aa, Homo sapiens
MSTEDPRQVRNPPKFGTHHKALQEIRNSLLPFANETNSSRSTSEVNPQMLQDLQAAGFDEDMVIQALQKTNNRSIEAAIEFISKMSYQDPRREQMAAAAARPINASMKPGNVQQSVNRKQSWKGSKESLVPQRHGPPLGESVAYHSESPNSQTDVGRPLSGSGISAFVQAHPSNGQRVNPPPPPQVRSVTPPPPPRGQTPPPRGTTPPPPSWEPNSQTKRYSGNMEYVISRISPVPPGAWQEGYPPPPLNTSPMNPPNQGQRGISSVPVGRQPIIMQSSSKFNFPSGRPGMQNGTGQTDFMIHQNVVPAGTVNRQPPPPYPLTAANGQSPSALQTGGSAAPSSYTNGSIPQSMMVPNRNSHNMELYNISVPGLQTNWPQSSSAPAQSSPSSGHEIPTWQPNIPVRSNSFNNPLGNRASHSANSQPSATTVTAITPAPIQQPVKSMRVLKPELQTALAPTHPSWIPQPIQTVQPSPFPEGTASNVTVMPPVAEAPNYQGPPPPYPKHLLHQNPSVPPYESISKPSKEDQPSLPKEDESEKSYENVDSGDKEKKQITTSPITVRKNKKDEERRESRIQSYSPQAFKFFMEQHVENVLKSHQQRLHRKKQLENEMMRVGLSQDAQDQMRKMLCQKESNYIRLKRAKMDKSMFVKIKTLGIGAFGEVCLARKVDTKALYATKTLRKKDVLLRNQVAHVKAERDILAEADNEWVVRLYYSFQDKDNLYFVMDYIPGGDMMSLLIRMGIFPESLARFYIAELTCAVESVHKMGFIHRDIKPDNILIDRDGHIKLTDFGLCTGFRWTHDSKYYQSGDHPRQDSMDFSNEWGDPSSCRCGDRLKPLERRAARQHQRCLAHSLVGTPNYIAPEVLLRTGYTQLCDWWSVGVILFEMLVGQPPFLAQTPLETQMKVRYGIYIKRILTKLLHH

SEQ ID NO: 23873 - protein, 133 aa, Homo sapiens
LGRRQVFEETLIKGERYNFFTGCLKAKTGTFILHGGSEQFIEETERSLCDAIMIIRRAIGNESVVAGGRAIEREFSKYLQDSSKTIPGKQQLLIGAYAKALEIVSFQLYNNAGFGATEILNKLQAWHSQGHVI

SEQ ID NO: 23874 - protein, 340 aa, Homo sapiens
LRSNSPMAAAASPAFLLRLPLLLLLSSWCRTGLADPHSLCYDITVIPKFRPGPRWCAVQGQVDEKTFLHYDCGSKTVTPVSPLGKKLNVTTAWKAQNPVLREVVDILTEQLLDIQLENYIPKEPLTLQARMSCEQKAEGHGSGSWQLSFDGQIFLLFDSENRMWTTVHPGARKMKEKWENDKDMTMSFHYISMGDCTGWLEDFLMGMDSTLEPSAGAPPTMSSGTAQPRATATTLILCCLLIMCLLICSRHSLTQSHGHHPQSLQPPPHPPLLHPTWLLRRVLWSDSYQIAKRPLSGGHVTRVTLPIIGDDSHSLPCPLALYTINNGAARYSEPLQVSIS

SEQ ID NO: 23875 - protein, 227 aa, Homo sapiens
LRSNSPMAAAASPAFLLRLPLLLLLSSWCRTGLADPHSLCYDITVIPKFRPGPRWCAVQGQVDEKTFLHYDCGSKTVTPVSPLGKKLNVTTAWKAQNPVLREVVDILTEQLLDIQLENYIPKEPLTLQARMSCEQKAEGHGSGSWQLSFDGQIFLLFDSENRMWTTVHPGARKMKEKWENDKDMTMSFHYISMGDCTGWLEDFLMGMDSTLEPSAGGNRRKRNGDLQ

SEQ ID NO: 23876 - protein, 175 aa, Homo sapiens
MAAAACPAFLLCFPLLLLLSGWSGSGRADTHCLCYDFIITPKFRPEPRWCEVQGLVDERPFLHYDCVNHKAKAFASLRKKVNVTKTWEEQTETLRDFSLLSHTSTLRQTETLRDVGDFLKGQLPDIEMENVIPIEPLILQARMSCEHEAHGHGRGSWQFLFNGQTFLLFDSNNRK

SEQ ID NO: 23877 - protein, 53 aa, Homo sapiens
MLASTVYFLMLSVFMFHSALHMHPPEFGILPNDQLDPGPEESLAAGIGQESIS

SEQ ID NO: 23878 - protein, 43 aa, Homo sapiens
LIGIIQFYVVHIIVLSDSQKLLLHASVLLHDFDVTYRNTPHCT

SEQ ID NO: 23879 - protein, 1061 aa, Homo sapiens
LSGTAYQTKVPKAVTSRPAARRPPPSARHGRRVQCPLGAPGTRRKRQVLPAAAAAAAACSPGTRPAALGSRSSVSPENQPSRAMGTRLPLVLRQLRRPPQPPGPPRRLRVPCRASSGGGGGGGGGREGLLGQRRPQDGQARSSCSPGGRTPAARDSIVREVIQNSKEVLSLLQEKNPAFKPVLAIIQAGDDNLMQEINQNLAEEAGLNITHICLPPDSSEAEIIDEILKINEDTRVHGLALQISENLFSNKVLNALKPEKDVDGVTDINLGKLVRGDAHECFVSPVAKAVIELLEKSGVNLDGKKILVVGAHGSLEAALQCLFQRKGSMTMSIQWKTRQLQSKLHEADIVVLGSPKPEEIPLTWIQPGTTVLNCSHDFLSGKVGCGSPRIHFGGLIEEDDVILLAAALRIQNMVSSGRRWLREQQHRRWRLHCLKLQPLSPVPSDIEISRGQTPKAVDVLAKEIGLLADEIEIYGKSKAKVRLSVLERLKDQADGKYVLVAGITPTPLGEGKSTVTIGLVQALTAHLNVNSFACLRQPSQGPTFGVKGGAAGGGYAQVIPMEEFNLHLTGDIHAITAANNLLAAAIDTRILHENTQTDKALYNRLVPLVNGVREFSEIQLARLKKLGINKTDPSTLTEEEVSKFARLDIDPSTITWQRVLDTNDRFLRKITIGQGNTEKGHYRQAQFDIAVASEIMAVLALTDSLADMKARLGRMVVASDKSGQPVTADDLGVTGALTVLMKDAIKPNLMQTLEGTPVFVHAGPFANIAHGNSSVLADKIALKLVGEEGFVVTEAGFGADIGMEKFFNIKCRASGLVPNVVVLVATVRALKMHGGGPSVTAGVPLKKEYTEENIQLVADGCCNLQKQIQITQLFGVPVVVALNVFKTDTRAEIDLVCELAKRAGAFDAVPCYHWSVGGKGSVDLARAVREAASKRSRFQFLYDVQVPIVDKIRTIAQAVYGAKDIELSPEAQAKIDRYTQQGFGNLPICMAKTHLSLSHQPDKKGVPRDFILPISDVRASIGAGFIYPLVGTMSTMPGLPTRPCFYDIDLDTETEQVKGLF

SEQ ID NO: 23880 - protein, 285 aa, Homo sapiens
VSPENQPSRAMGTRLPLVLRQLRRPPQPPGPPRRLRVPCRASSGGGGGGGGGREGLLGQRRPQDGQARSSCSPGGRTPAARDSIVREVIQNSKEVLSLLQEKNPAFKPVLAIIQAGDDNLMQEINQNLAEEAGLNITHICLPPDSSEAEIIDEILKINEDTRVHGLALQISENLFSNKVLNALKPEKDVDGVTDINLGKLVRGDAHECFVSPVAKAVIELLEKSGVNLDGKKILVVGAHGSLEAALQCLFQRKGSMTMSIQWKTRQLQSKTESRSVTRLECRRVI

SEQ ID NO: 23881 - protein, 921 aa, Homo sapiens
VRSRPPALMQSRRARPRREVIQNSKEVLSLLQEKNPAFKPVLAIIQAGDDNLMQEINQNLAEEAGLNITHICLPPDSSEAEIIDEILKINEDTRVHGLALQISENLFSNKVLNALKPEKDVDGVTDINLGKLVRGDAHECFVSPVAKAVIELLEKSVGVNLDGKKILVVGAHGSLEAALQCLFQRKGSMTMSIQWKTRQLQSKLHEADIVVLGSPKPEEIPLTWIQPGTTVLNCSHDFLSGKVGCGSPRIHFGGLIEEDDVILLAAALRIQNMVSSGRRWLREQQHRRWRLHCLKLQPLSPVPSDIEISRGQTPKAVDVLAKEIGLLADEIEIYGKSKAKVRLSVLERLKDQADGKYVLVAGITPTPLGEGKSTVTIGLVQALTAHLNVNSFACLRQPSQGPTFGVKGGAAGGGYAQVIPMEEFNLHLTGDIHAITAANNLLAAAIDTRILHENTQTDKALYNRLVPLVNGVREFSEIQLARLKKLGINKTDPSTLTEEEVSKFARLDIDPSTITWQRVLDTNDRFLRKITIGQGNTEKGHYRQAQFDIAVASEIMAVLALTDSLADMKARLGRMVVASDKSGQPVTADDLGVTGALTVLMKDAIKPNLMQTLEGTPVFVHAGPFANIAHGNSSVLADKIALKLVGEEGFVVTEAGFGADIGMEKFFNIKCRASGLVPNVVVLVATVRALKMHGGGPSVTAGVPLKKEYTEENIQLVADGCCNLQKQIQITQLFGVPVVVALNVFKTDTRAEIDLVCELAKRAGAFDAVPCYHWSVGGKGSVDLARAVREAASKRSRFQFLYDVQVPIVDKIRTIAQAVYGAKDIELSPEAQAKIDRYTQQGFGNLPICMAKTHLSLSHQPDKKGVPRDFILPISDVRASIGAGFIYPLVGTMSTMPGLPTRPCFYDIDLDTETEQVKGLF

SEQ ID NO: 23882 - protein, 60 aa, Homo sapiens
LSLFHFGCVFITVQLTPLGKDLMHCTAFATADEYHLGNLSQDLASHGYVEVTSLPRGTSS

SEQ ID NO: 23883 - protein, 16 aa, Homo sapiens
MGAMGGMGGGMRGGMF

SEQ ID NO: 23884 - protein, 31 aa, Homo sapiens
VATVFTDYMSMKELDEQMLNVQNKNSSYFVE

SEQ ID NO: 23885 - protein, 217 aa, Homo sapiens
LGPEVAEMRKRQQSQNEGTPAVSQAPGNQRPNNTCCFCWCCCCSCSCLTVRNEERGENAGRPTHTTKMESIQVLEECQNPTAEEVLSWSQNFDKMMKAPAGRNLFREFLRTEYSEENLLFWLACEDLKKEQNKKVIEEKARMIYEDYISILSPKEVSLDSRVREVINRNLLDPNPHMYEDAQLQIYTLMHRDSFPRFLNSQIYKSFVESTAGSSSES

SEQ ID NO: 23886 - protein, 58 aa, Homo sapiens
VIRGWSFDLLLLIAFHVIMIIYSGSTPVTNNVTEMKQIQRKNIFKSFEKKCYSNLRHV

SEQ ID NO: 23887 - protein, 310 aa, Homo sapiens
LLMHYGISDDSVKTLSIFIFVIECYSESEQEDPEIAAETPPPPHASQTQSLTAQQASSSSPSLSGTSYSFSSLENTVKTPSSFPSSLSKERQSLPDTVNSLSAAEDEGQPITFAVQVHSPVPSEAGIHKALENSFVTSESGFLNSLSSDDTSSLSSNHDHLTVPDKPAGSKIMDKEETKVSEDDEMEKLYKSLEQASLSPLGDRRPSTKKELRKSFVKRCKNPSINEKLHKIRTLNSTLKCKEHDLAMINQLLDDPKLTARKYREWKVMNTLLIQDIYQQQRASPAPDDTDDTPQELKKSPSSPSVENSI

SEQ ID NO: 23888 - protein, 31 aa, Homo sapiens
MRLLNPGIRLLLDLLSLYCMSKATELDQENS

SEQ ID NO: 23889 - protein, 13 aa, Homo sapiens
LLLYPDMGKYTTS

SEQ ID NO: 23890 - protein, 2362 aa, Homo sapiens
VDAHRRGRGLKSGGYCLPPPPARPRHAAAIMAARAAAAAAAAAARARARAGSGERRAPPGPRPAPGARDLEAGARGAAAAAAAPGPMLGGGGDGGGGLNSVHHHPLLPRHELNMAHNAGAAAAAGTHSAKSGGSEAALKEGGSAAALSSSSSSSAAAAAASSSSSSGPGSAMETGLLPNHKLKTVGEAPAAPPHQQHHHHHHAHHHHHHAHHLHHHHALQQQLNQFQQQQQQQQQQQQQQQQQQHPISNNNSLGGAGGGAPQPGPDMEQPQHGGAKDSAAGGQADPPGPPLLSKPGDEDDAPPKMGEPAGGRYEHPGLGALGTQQPPVAVPGGGGGPAAVPEFNNYYGSAAPASGGPGGRAGPCFDQHGGQQSPGMGMMHSASAAAAGAPGSMDPLQNSHEGYPNSQCNHYPGYSRPGAGGGGGGGGGGGGGSGGGGGGGGAGAGGAGAGAVAAAAAAAAAAAGGGGGGGYGGSSAGYGVLSSPRQQGGGMMMGPGGGGAASLSKAAAGSAAGGFQRFAGQNQHPSGATPTLNQLLTSPSPMMRSYGGSYPEYSSPSAPPPPPSQPQSQAAAAGAAAGGQQAAAGMGLGKDMGAQYAAASPAWAAAQQRSHPAMSPGTPGPTMGRSQGSPMDPMVMKRPQLYGMGSNPHSQPQQSSPYPGGSYGPPGPQRYPIGIQGRTPGAMAGMQYPQQQDSGDATWKETFWLMPPQYGQQGVSGYCQQGQQPYYSQQPQPPHLPPQAQYLPSQSQQRYQPQQDMSQEGYGTRSQPPLAPGKPNHEDLNLIQQERPSSLPDLSGSIDDLPTGTEATLSSAVSASGSTSSQGDQSNPAQSPFSPHASPHLSSIPGGPSPSPVGSPVGSNQSRSGPISPASIPGSQMPPQPPGSQSESSSHPALSQSPMPQERGFMAGTQRNPQMAQYGPQQTGPSMSPHPSPGGQMHAGISSFQQSNSSGTYGPQMSQYGPQGNYSRPPAYSGVPSASYSGPGPGMGISANNQMHGQGPSQPCGAVPLGRMPSAGMQNRPFPGNMSSMTPSSPGMSQQGGPGMGPPMPTVNRKAQEAAAAVMQAAANSAQSRQGSFPGMNQSGLMASSSPYSQPMNNSSSLMNTQAPPYSMAPAMVNSSAASVGLADMMSPGESKLPLPLKADGKEEGTPQPESKSKKSSSSTTTGEKITKVYELGNEPERKLWVDRYLTFMEERGSPVSSLPAVGKKPLDLFRLYVCVKEIGGLAQVNKNKKWRELATNLNVGTSSSAASSLKKQYIQYLFAFECKIERGEEPPPEVFSTGDTKKQPKLQPPSPANSGSLQGPQTPQSTGSNSMAEVPGDLKPPTPASTPHGQMTPMQGGRSSTISVHDPFSDVSDSSFPKRNSMTPNAPYQQGMSMPDVMGRMPYEPNKDPFGGMRKVPGSSEPFMTQGQMPNSSMQDMYNQSPSGAMSNLGMGQRQQFPYGASYDRRHEPYGQQYPGQGPPSGQPPYGGHQPGLYPQQPNYKRHMDGMYGPPAKRHEGDMYNMQYSSQQQEMYNQYGGSYSGPDRRPIQGQYPYPYSRERMQGPGQIQTHGIPPQMMGGPLQSSSSEGPQQNMWAARNDMPYPYQNRQGPGGPTQAPPYPGMNRTDDMMVPDQRINHESQWPSHVSQRQPYMSSSASMQPITRPPQPSYQTPPSLPNHISRAPSPASFQRSLENRMSPSKSPFLPSMKMQKVMPTVPTSQVTGPPPQPPPIRREITFPPGSVEASQPVLKQRRKITSKDIVTPEAWRVMMSLKSGLLAESTWALDTINILLYDDSTVATFNLSQLSGFLELLVEYFRKCLIDIFGILMEYEVGDPSQKALDHNAARKDDSQSLADDSGKEEEDAECIDDDEEDEEDEEEDSEKTESDEKSSIALTAPDAAADPKEKPKQASKFDKLPIKIVKKNNLFVVDRSDKLGRVQEFNSGLLHWQLGGGDTTEHIQTHFESKMEIPPRRRPPPPLSSAGRKKEQEGKGDSEEQQEKSIIATIDDVLSARPGALPEDANPGPQTESSKFPFGIQQAKSHRNIKLLEDEPRSRDETPLCTIAHWQDSLAKRCICVSNIVRSLSFVPGNDAEMSKHPGLVLILGKLILLHHEHPERKRAPQTYEKEEDEDKGVACSKDEWWWDCLEVLRDNTLVTLANISGQLDLSAYTESICLPILDGLLHWMVCPSAEAQDPFPTVGPNSVLSPQRLVLETLCKLSIQDNNVDLILATPPFSRQEKFYATLVRYVGDRKNPVCREMSMALLSNLAQGDALAARAIAVQKGSIGNLISFLEDGVTMAQYQQSQHNLMHMQPPPLEPPSVDMMCRAAKALLAMARVDENRSEFLLHEGRLLDISISAVLNSLVASVICDVLFQIGQL

SEQ ID NO: 23891 - protein, 46 aa, Homo sapiens
LEAVVCFFSVWSIVGLSGFHTYLISSNQTTNEDDYLPALNTDGEEV

SEQ ID NO: 23892 - protein, 46 aa, Homo sapiens [sequence omitted]

SEQ ID NO: 23893 - protein, 661 aa, Homo sapiens
LSPPAGRMSLAAYCVICCRRIGTSTSPPKSGTHWRDIRNIIKFTGSLILGGSLFLTYEVLALKKAVTLDTQVVEREKMKSYIYVHTVSLDKGENHGIAWQARKELHKAVRKVLATSAKILRNPFADPFSTVDIEDHECAVWLLLRKSKSDDKTTRLEAVREMSETHHWHDYQYRIIAQACDPKTLIGLARSEESDLRFFLLPPPLPSLKEDSSTEEELRQLLASLPQTELDECIQYFTSLALSESSQSLAAQKGGLWCFGGNGLPYAESFGEVPSATVEMFCLEAIVKHSEISTHCDKIEANGGLQLLQRLYRLHKDCPKVQRNIMRVIGNMALNEHLHSSIVRSGWVSIMAEAMKSPHIMESSHAARILANLDRETVQEKYQDGVYVLHPQYRTSQPIKADVLFIHGLMGAAFKTWRQQDSEQAVIEKPMEDEDRYTTCWPKTWLAKDCPALRIISVEYDTSLSDWRARCPMERKSIAFRSNELLRKLRAAGVGDRPVVWISHSMGGLLVKKMLLEASTKPEMSTVINNTRGIIFYSVPHHGSRLAEYSVNIRYLLFPSLEVKELSKDSPALKTLQDDFLEFAKDKNFQVLNFVETLPTYIGSMIKLHVVPVESADLGIGDLIPVDVNHLNICKPKKKDAFLYQRTLQFIREALAKDLEN

SEQ ID NO: 23894 - protein, 49 aa, Homo sapiens
LSPPAGRMSLAAYCVICCRRIGTSTSPPKSGTHWRDIKVLYFLHMKFWP

SEQ ID NO: 23895 - protein, 48 aa, Homo sapiens
LLEAERHGGAAGAAATAARRFVRLQGLPAVNNLMVPEMTGEADASYGS

SEQ ID NO: 23896 - protein, 43 aa, Homo sapiens
MAFLLLSLVHPLTTSHEFSELFSHSLCFVALSQCRGKNQMTAL

SEQ ID NO: 23897 - protein, 92 aa, Homo sapiens
MEDYQAAEETAFVVDEVSNIVKEAIESAIGGNAYQHSKVNQWTTNVVEQTLSQLTKLGKPFKYIGNGVLFLLYLRDGFLTLIRGASSTRNNS

SEQ ID NO: 23898 - protein, 55 aa, Homo sapiens
LLVFVCLQSLSAMALAGCWKAACGGRWFRPLIPSRALLSPSQLRCHVQVDSMPQT

SEQ ID NO: 23899 - protein, 244 aa, Homo sapiens
LWWLRQRLQQIGGISGSTSTSSMLSRAVCGTSRQLAPVLGYLGSRQKHSLPDLPYDYGALEPHINAQIMQLHHSKHHAAYVNNLNVTEEKYQEALAKGDVTAQIALQPALKFNGGGHINHSIFWTNLSPNGGGEPKGELLEAIKRDFGSFDKFKEKLTAASVGVQGSGWGWLGFNKERGHLQIAACPNQDPLQGTTGLIPLLGIDVWEHAYYLQYKNVRPDYLKAIWNVINWENVTERYMACKK

SEQ ID NO: 23900 - protein, 184 aa, Homo sapiens
LWWLRQRLQQIGGISGSTSTSSMLSRAVCGTSRQLAPVLGYLGSRQKHSLPDLPYDYGALEPHINAQIMQLHHSKHHAAYVNNLNVTEEKYQEALAKGDVTAQIALQPALKFNGGGHINHSIFWTNLSPNGGGEPKGLIPLLGIDVWEHAYYLQYKNVRPDYLKAIWNVINWENVTERYMACKK

SEQ ID NO: 23901 - protein, 205 aa, Homo sapiens
LWWLRQRLQQIGGISGSTSTSSMLSRAVCGTSRQLAPVLGYLGSRQKHSLPDLPYDYGALEPHINAQIMQLHHSKHHAAYVNNLNVTEEKYQEALAKGELLEAIKRDFGSFDKFKEKLTAASVGVQGSGWGWLGFNKERGHLQIAACPNQDPLQGTTGLIPLLGIDVWEHAYYLQYKNVRPDYLKAIWNVINWENVTERYMACKK

SEQ ID NO: 23902 - protein, 163 aa, Homo sapiens
LWWLRQRLQQIGGISGSTSTSSMLSRAVCGTSRQLAPVLGYLGSRQKHSLPDLPYDYGALEPHINAQIMQLHHSKHHAAYVNNLNVTEEKYQEALAKGRFQAERREAVPGRGDPREPGPIRTGLSVEENSLRICTGSEFSRRCYSPDSSSACTEVQWWWSYQS

SEQ ID NO: 23903 - protein, 20 aa, Homo sapiens
VLGTMVLVIFLRANGVGTPA

SEQ ID NO: 23904 - protein, 162 aa, Homo sapiens
LWWLRQRLQQIGGISGSTSTSSMLSRAVCGTSRQLAPVLGYLGSRQKHSLPDLPYDYGALEPHINAQIMQLHHSKHHAAYVNNLNVTEEKYQEALAKGRFQAERREAVPGRGDPREPGPIRTGLSVEENSLRICTGSEFSRHDSLSFKHMVYLIVEGVPRWV

SEQ ID NO: 23905 - protein, 31 aa, Homo sapiens
MRLTALFFLVNFMKSPFHSTGTCLKELCRWC

SEQ ID NO: 23906 - protein, 452 aa, Homo sapiens
LRLRTVGCAGRWCAGRWRARGGATSGPARGRPVGCEEELCLACRQRRADGGRRSKMNAGSDPVVIVSAARTIIGSFNGALAAVPVQDLGSTVIKEVLKRATVAPEDVSEVIFGHVLAAGCGQNPVRQASVGAGIPYSVPAWSCQMICGSGLKAVCLAVQSIGIGDSSIVVAGGMENMSKAPHLAYLRTGVKIGEMPLTDSILCDGLTDAFHNCHMGITAENVAKKWQVSREDQDKVAVLSQNRTENAQKAGHFDKEIVPVLVSTRKGLIEVKTDEFPRHGSNIEAMSKLKPYFLTDGTGTVTPANASGINDGAAAVVLMKKSEADKRGLTPLARIVSWSQVGVEPSIMGIGPIPAIKQAVTKAGWSLEDVDIFEINEAFAAVSAAIVKELGLNPEKVNIEGGAIALGHPLGASGCRILVTLLHTLERMGRSRGVAALCIGGGMGIAMCVQRE

SEQ ID NO: 23907 - protein, 192 aa, Homo sapiens
LVFLCLGLIEVKTDEFPRHGSNIEAMSKLKPYFLTDGTGTVTPANASGINDGAAAVVLMKKSEADKRGLTPLARIVSWSQVGVEPSIMGIGPIPAIKQAVTKAGWSLEDVDIFEINEAFAAVSAAIVKELGLNPEKVNIEGGAIALGHPLGASGCRILVTLLHTLERMGRSRGVAALCIGGGMGIAMCVQRE

SEQ ID NO: 23908 - protein, 598 aa, Homo sapiens
LGHRSGTLHAVAATAVVAGRPRGRDTGCPRCKQNSTCIAAVKMEGPLSVFGDRSTGETIRSQNVMAAASIANIVKSSLGPVGLDKMLVDDIGDVTITNDGATILKLLEVEHPAAKVLCELADLQDKEVGDGTTSVVIIAAELLKNADELVKQKIHPTSVISGYRLACKEAVRYINENLIVNTDELGRDCLINAAKTSMSSKIIGINGDFFANMVVDAVLAIKYTDIRGQPRYPVNSVNILKAHGRSQMESMLISGYALNCVVGSQGMPKRIVNAKIACLDFSLQKTKMKLGVQVVITDPEKLDQIRQRESDITKERIQKILATGANVILTTGGIDDMCLKYFVEAGAMAVRRVLKRDLKRIAKASGATILSTLANLEGEETFEAAMLGQAEEVVQERICDDELILIKNTKARTSASIILRGANDFMCDEMERSLHDALCVVKRVLESKSVVPGGGAVEAALSIYLENYATSMGSREQLAIAEFARSLLVIPNTLAVNAAQDSTDLVAKLRAFHNEAQVNPERKNLKWIGLDLSNGKPRDNKQAGVFEPTIVKVKSLKFATEAAITILRIDDLIKLHPESKDDKHGSYEDAVHSGALND

SEQ ID NO: 23909 - protein, 100 aa, Homo sapiens
LLWSPVGRGAAILVARGVSRIRRVSLPSRWRGLCPCSVTAALGKRSAPKTDVTITNDGATILKLLEVEHPAAKVLCELADLQDKEVGDGTTSVGSSALYQ

SEQ ID NO: 23910 - protein, 53 aa, Homo sapiens
VRFRFSVFSLSLLGEREADRPALLQASGVSLAWACTVHWNVRVLFCIRRAGSK

SEQ ID NO: 23911 - protein, 11 aa, Homo sapiens
MAAPGERLSRP

SEQ ID NO: 23912 - protein, 514 aa, Homo sapiens
LLFFAFLAGLDIEFTGLRSNLSGPQQISLFDLPSEWYLKTRQSVQQFTVCQIGLSVFSAIEGEANKYIAHSCNFYLFPTTFGILDSEFSFQASSVQFLNQYGFNYNKFLKNGIPYMNEEQEKKIRHDILTGNWRVRSSPDKDQIKVVIDEVTRWLELAKEGDWMTLPGITGFQAFEVQLVLRQALPNIWTVLKDEGVVVKKVSKQHRWYLQNTSCDRESCWKENILLSARGFSVFFQMLVKAQKPLVGHNMMMDLLHLHEKFFRPLPESYDQFKQNIHSLFPVLIDTKSVTKDIWKEMNFPRVSNLSEVYEVLNSDLNPTKNSGPEIVHASRCEKYVETKCPHEAAYDAFLCGSVLLKVAHLLLQKIYHIDPVPESSFPQYLDVLAPYVNQVNLIRAGVPKINFSGPDYPSIRPPILILSVKRWPGVSEQQVYHKFQNLCKFDVRRLTRSQFLLLTNKFKDARNILKEYRDHPTLCISLYRYWRHSPNVNCLLQVCGIVTAWALLAFILGRSGT

SEQ ID NO: 23913 - protein, 32 aa, Homo sapiens
LGGLSLAAHRSPGARPVAVSKMAAARTAPAAG

SEQ ID NO: 23914 - protein, 309 aa, Homo sapiens
LWGWLSFCTLTAGRTHHQLEVQGPSCWDDVLIPNRMSGECQSPHCPGTSAEFFFKCGAHPTSDKETSVALHLIATNSRNITCITCTDVRSPVLVFQCNSRHVICLDCFHLYCVTRLNDRQFVHDPQLGYSLPCVAGCPNSLIKELHHFRILGEEQYNRYQQYGAEECVLQMGGVLCPRPGCGAGLLPEPDQRKVTCEGGNGLGCGFAFCRECKEAYHEGECSAVFEASGTTTQAYRVDERAAEQARWEAASKETIKKTTKPCPRCHVPVEKNGGCMHMKCPQPQCRLEWCWNCGCEWNRVCMGDHWFDV

SEQ ID NO: 23915 - protein, 163 aa, Homo sapiens
LGGGSGGAGGMGGITAVVVNQRLLSLLNLEVDPNIQAVQEQEKEKEQIRTLNNKFASFIGKVRFLEQQNNMLETKWSLLQQQKMAWSNMGNMFKSYINNPRGQPDTLVQEKLKLEAELGNMQGLVEDFKNKYKDEINKCTEMENEFILIRKDMDDAYVNKVEL

SEQ ID NO: 23916 - protein, 56 aa, Homo sapiens
LPRSRGGGQQAAGARRPGPANGRPARPRPPPAPGPPRAAAPPPAAAAAAAAAGSAA

SEQ ID NO: 23917 - protein, 406 aa, Homo sapiens
VRDAPSRAAESGGGWERVGPGRKVPAGGGRARGAGRPGARRGSQSGSRRGAGRRVPSGPRPGLAPAPPSSPAAAAAAAGGVSCGAWNMVGEMETKEKPKPTPDYLMQLMNDKKLMSSLPNFCGIFNHLERLLDEEISRVRKDMYNDTLNGSTEKRSAELPDAVGPIVQLQEKLYVPVKEYPDFNFVGRILGPRGLTAKQLEAETGCKIMVRGKGSMRDKKKEEQNRGKPNWEHLNEDLHVLITVEDAQNRAEIKLKRAVEEVKKLLVPAAEGEDSLKKMQLMELAILNGTYRDANIKSPALAFSLAATAQAAPRIITGPAPVLPPAALRTPTPAGPTIMPLIRQIQTAVMPNGTPHPTAAIVPPGPEAGLIYTPYEYPYTLAPATSILEYPIEPSGVLGMAFPTKG

SEQ ID NO: 23918 - protein, 428 aa, Homo sapiens
VRDAPSRAAESGGGWERVGPGRKVPAGGGRARGAGRPGARRGSQSGSRRGAGRRVPSGPRPGLAPAPPSSPAAAAAAAGGVSCGAWNMVGEMETKEKPKPTPDYLMQLMNDKKLMSSLPNFCGIFNHLERLLDEEISRVRKDMYNDTLNGSTEKRSAELPDAVGPIVQLQEKLYVPVKEYPDFNFVGRILGPRGLTAKQLEAETGCKIMVRGKGSMRDKKKEEQNRGKPNWEHLNEDLHVLITVEDAQNRAEIKLKRAVEEVKKLLVPAAEGEDSLKKMQLMELAILNGTYRDANIKSPALAFSLAATAQAAPRIITGPAPVLPPAALRTPTPAGPTIMPLIRQIQTAVMPNGTPHPTAAIVPPGPEAGLIYTPYEYPYTLAPATSILEYPIEPSGVLGAVATKVRRHDMRVHPYQRIVTADRAATGN

SEQ ID NO: 23919 - protein, 175 aa, Homo sapiens
VEPTGTFTTMEKTGAHLQGGAKRVIISAPSADASVFIMGVNNEKYDNSLKIISNASCTTNCLAPRAKVLHDNFGIVKGLMTTVHAITATQKTVDGPSRKLWHDGGGTLQNIIPASTGTAKAVGKVIPELNGKLTGMAFCVPTANVSVVDLIYHLEKPTKYHGIKKVVKEASEGSL

SEQ ID NO: 23920 - protein, 11 aa, Homo sapiens
MMLSLLVGVTL

SEQ ID NO: 23921 - protein, 763 aa, Homo sapiens
VPARGPEPRAWDAGDARPPALRLLRAGRGAMDLSMKKFAVRRFFSVYLRRKSRSKSSSLSRLEEEGVVKEIDISHHVKEGFEKADPSQFELLKVLGQGSYGKVFLVRKVKGSDAGQLYAMKVLKKATLKVRDRVRSKMERDILAEVNHPFIVKLHYAFQTEGKLYLILDFLRGGDLFTRLSKEVMFTEEDVKFYLAELALALDHLHSLGIIYRDLKPENILLDEEGHIKITDFGLSKEAIDHDKRAYSFCGTIEYMAPEVVNRRGHTQSADWWSFGVLMFEMLTGSLPFQGKDRKETMALILKAKLGMPQFLSGEAQSLLRALFKRNPCNRLGAGIDGVEEIKRHPFFVTIDWNTLYRKEIKPPFKPAVGRPEDTFHFDPEFTARTPTDSPGVPPSANAHHLFRGFSFVASSLIQEPSQQDLHKVPVHPIVQQLHGNNIHFTDGYEIKEDIGVGSYSVCKRCVHKATDTEYAVKIIDKSKRDPSEEIEILLRYGQHPNIITLKDVYDDGKFVYLVMELMRGGELLDRILRQRYFSEREASDVLCTITKTMDYLHSQGVVHRDLKPSNILYRDESGSPESIRVCDFGFAKQLRAGNGLLMTPCYTANFVAPEVLKRQGYDAACDIWSLGILLYTMLAGFTPFANGPDDTPEEILARIGSGKYALSGGNWDSISDAAKDVVSKMLHVDPHQRLTAMQVLKHPWVVNREYLSPNQLSRQDVHLVKGAMAATYFALNRTPQAPRLEPVLSSNLAQRRGMKRLTSTRL

SEQ ID NO: 23922 - protein, 807 aa, Homo sapiens
LSSPSPPPAGLCVPWLPTSRLAVPLCRSEPLFISFPTINTRPAEKESLKMPIAQLLELWKKIEVEPMEIETTEEDLNLDVEPTTEDTAEEGKSDSAACKTKVAGSVEEEGVVKEIDISHHVKEGFEKADPSQFELLKVLGQGSYGKVFLVRKVKGSDAGQLYAMKVLKKATLKVRDRVRSKMERDILAEVNHPFIVKLHYAFQTEGKLYLILDFLRGGDLFTRLSKEVMFTEEDVKFYLAELALALDHLHSLGIIYRDLKPENILLDEEGHIKITDFGLSKEAIDHDKRAYSFCGTIEYMAPEVVNRRGHTQSADWWSFGVLMFEMLTGSLPFQGKDRKETMALILKAKLGMPQFLSGEAQSLLRALFKRNPCNRLGAGIDGVEEIKRHPFFVTIDWNTLYRKEIKPPFKPAVGRPEDTFHFDPEFTARTPTDSPGVPPSANAHHLFRGFSFVASSLIQEPSQQDLHKVPVHPIVQQLHGNNIHFTDGYEIKEDIGVGSYSVCKRCVHKATDTEYAVKIIDKSKRDPSEEIEILLRYGQHPNIITLKDVYDDGKFVYLVMELMRGGELLDRILRQRYFSEREASDVLCTITKTMDYLHSQGVVHRDLKPSNILYRDESGSPESIRVCDFGFAKQLRAGNGLLMTPCYTANFVAPEVLKRQGYDAACDIWSLGILLYTMLAGFTPFANGPDDTPEEILARIGSGKYALSGGNWDSISDAAKDVVSKMLHVDPHQRLTAMQVLKHPWVVNREYLSPNQLSRQDVHLVKGAMAATYFALNRTPQAPRLEPVLSSNLAQRRGMKRLTSTRL

SEQ ID NO: 23923 - protein, 865 aa, Homo sapiens
LQVQRLLCQSRSTDSEAAAPSPPFLAPARAGSGSSSPEPWLGREGTAPEQPYCSPPGPSSGRRRPRAHDLLWEPDLSSPSPPPAGLCVPWLPTSRLAVPLCRSEPLFISFPTINTRPAEKESLKMPIAQLLELWKKIEVEPMEIETTEEDLNLDVEPTTEDTAEEEEGVVKEIDISHHVKEGFEKADPSQFELLKVLGQGSYGKVFLVRKVKGSDAGQLYAMKVLKKATLKVRDRVRSKMERDILAEVNHPFIVKLHYAFQTEGKLYLILDFLRGGDLFTRLSKEVMFTEEDVKFYLAELALALDHLHSLGIIYRDLKPENILLDEEGHIKITDFGLSKEAIDHDKRAYSFCGTIEYMAPEVVNRRGHTQSADWWSFGVLMFEMLTGSLPFQGKDRKETMALILKAKLGMPQFLSGEAQSLLRALFKRNPCNRLGAGIDGVEEIKRHPFFVTIDWNTLYRKEIKPPFKPAVGRPEDTFHFDPEFTARTPTDSPGVPPSANAHHLFRGFSFVASSLIQEPSQQDLHKVPVHPIVQQLHGNNIHFTDGYEIKEDIGVGSYSVCKRCVHKATDTEYAVKIIDKSKRDPSEEIEILLRYGQHPNIITLKDVYDDGKFVYLVMELMRGGELLDRILRQRYFSEREASDVLCTITKTMDYLHSQGVVHRDLKPSNILYRDESGSPESIRVCDFGFAKQLRAGNGLLMTPCYTANFVAPEVLKRQGYDAACDIWSLGILLYTMLAGFTPFANGPDDTPEEILARIGSGKYALSGGNWDSISDAAKDVVSKMLHVDPHQRLTAMQVLKHPWVVNREYLSPNQLSRQDVHLVKGAMAATYFALNRTPQAPRLEPVLSSNLAQRRGMKRLTSTRL

SEQ ID NO: 23924 - protein, 30 aa, Homo sapiens
LPFVTAARAPRPAPMAAVPGSLATRARPRT

SEQ ID NO: 23925 - protein, 262 aa, Homo sapiens
VTRVGTMRPAALRGALLGCLCLALLCLGGADKRLRDNHEWKKLIMVQHWPETVCEKIQNDCRDPPDYWTIHGLWPDKSEGCNRSWPFNLEEIKDLLPEMRAYWPDVIHSFPNRSRFWKHEWEKHGTCAAQVDALNSQKKYFGRSLELYRELDLNSVLLKLGIKPSINYYQVADFKDALARVYGVIPKIQCLPPSQDEEVQTIGQIELCLTKQDQQLQNCTEPGEQPSPKQEVWLANGAAESRGLRVCEDGPVFYPPPKKTKH

SEQ ID NO: 23926 - protein, 173 aa, Homo sapiens
VTRVGPLLILEPSLGLRSGAPRWREAAGSLGGQAPSAVRSSRAACRAQFLKAGAACGPRACRDLLPEMRAYWPDVIHSFPNRSRFWKHEWEKHGTCAAQVDALNSQKKYFGRSLELYRELDLNRWVRPSPGCTSQWGSLLSPKPDSWIQGSGCRPHCPPAASACALFGYWDHS

SEQ ID NO: 23927 - protein, 405 aa, Homo sapiens
LSWRSKMAATAAAVVAEEDTELRDLLVQTLENSGVLNRIKAELRAAVFLALEEQEKVENKTPLVNESLKKFLNTKDGRLVASLVAEFLQFFNLDFTLAVFQPETSTLQGLEGRENLARDLGIIEAEGTVGGPLLLEVIRRCQQKEKGPTTGEGALDLSDVHSPPKSPEGKTSAQTTPSKIPRYKGQGKKKTSGQKAGDKKANDEANQSDTSVSLSEPKSKSSLHLLSHETKIGSFLSNRTLDGKDKAGLCPDEDDMEGDSFFDDPIPKPEKTYGLRKEPRKQAGSLASLSDAPPLKSGLSSLAGAPSLKDSESKRGNTVLKDLKLISDKIGSLGLGTGEDDDYVDDFNSTSHRSEKSEISIGEEIEEDLSVEIDDINTSDKLDDLTQDLTVSQLSDVADYLEDVA

SEQ ID NO: 23928 - protein, 357 aa, Homo sapiens
LSWRSKMAATAAAVVAEEDTELRDLLVQTLENSGVLNRIKAELRAAVFLALEEQEKVENKTPLVNESLKKFLNTKDGRLVASLVAEFLQFFNLDFTLAVFQPETSTLQGLEGRENLARDLGIIEAEGTVGGPLLLEVIRRCQQKEKGPTTGEKANDEANQSDTSVSLSEPKSKSSLHLLSHETKIGSFLSNRTLDGKDKAGLCPDEDDMEGDSFFDDPIPKPEKTYGLRKEPRKQAGSLASLSDAPPLKSGLSSLAGAPSLKDSESKRGNTVLKDLKLISDKIGSLGLGTGEDDDYVDDFNSTSHRSEKSEISIGEEIEEDLSVEIDDINTSDKTITQLECLLSIGALHFKNTADIF

SEQ ID NO: 23929 - protein, 1612 aa, Homo sapiens
MSAGGRDEERRKLADIIHHWNANRLDLFEISQPTEDLEFHGVMRFYFQDKAAGNFATKCIRVSSTATTQDVIETLAEKFRPDMRMLSSPKYSLYEVHVSGERRLDIDEKPLVVQLNWNKDDREGRFVLKNENDAIPPKAQSNGPEKQEKEGVIQNFKRTLSKKEKKEKKKREKEALRQASDKDDRPFQGEDVENSRLAAEVYKDMPETSFTRTISNPEVVMKRRRQQKLEKRMQEFRSSDGRPDSGGTLRIYADSLKPNIPYKTILLSTTDPADFAVAEALEKYGLEKENPKDYCIARVMLPPGAQHSDEKGAKEIILDDDECPLQIFREWPSDKGILVFQLKRRPPDHIPKKTKKHLEGKTPKGKERADGSGYGSTLPPEKLPYLVELSPDGSDSRDKPKLYRLQLSVTEVGTEKLDDNSIQLFGPGIQPHHCDLTNMDGVVTVTPRSMDAETYVEGQRISETTMLQSGMKVQFGASHVFKFVDPSQDHALAKRSVDGGLMVKGPRHKPGIVQETTFDLGGDIHSGTALPTSKSTTRLDSDRVSSASSTAERGMVKPMIRVEQQPDYRRQESRTQDASGPELILPASIEFRESSEDSFLSAIINYTNSSTVHFKLSPTYVLYMACRYVLSNQYRPDISPTERTHKVIAVVNKMVSMMEGVIQKQKNIAGALAFWMANASELLNFIKQDRDLSRITLDAQDVLAHLVQMAFKYLVHCLQSELNNYMPAFLDDPEENSLQRPKIDDVLHTLTGAMSLLRRCRVNAALTIQLFSQLFHFINMWLFNRLVTDPDSGLCSHYWGAIIRQQLGHIEAWAEKQGLELAADCHLSRIVQATTLLTMDKYAPDDIPNINSTCFKLNSLQLQALLQNYHCAPDEPFIPTDLIENVVTVAENTADELARSDGREVQLEEDPDLQLPFLLPEDGYSCDVVRNIPNGLQEFLDPLCQRGFCRLIPHTRSPGTWTIYFEGADYESHLLRENTELAQPLRKEPEIITVTLKKQNGMGLSIVAAKGAGQDKLGIYVKSVVKGGAADVDGRLAAGDQLLSVDGRSLVGLSQERAAELMTRTSSVVTLEVAKQGAIYHGLATLLNQPSPMMQRISDRRGSGKPRPKSEGFELYNNSTQNGSPESPQLPWAEYSEPKKLPGDDRLMKNRADHRSSPNVANQPPSPGGKSAYASGTTAKITSVSTGNLCTEEQTPPPRPEAYPIPTQTYTREYFTFPASKSQDRMAPPQNQWPNYEEKPHMHTDSNHSSIAIQRVTRSQEELREDKAYQLERHRIEAAMDRKSDSDMWINQSSSLDSSTSSQEHLNHSSKSVTPASTLTKSGPGRWKTPAAIPATPVAVSQPIRTDLPPPPPPPPVHYAGDFDGMSMDLPLPPPPSANQIGLPSAQVAAAERRKREEHQRWYEKEKARLEEERERKRREQERKLGQMRTQSLNPAPFSPLTAQQMKPEKPSTLQRPQETVIRELQPQQQPRTIERRDLQYITVSKEELSSGDSLSPDPWKRDAKEKLEKQQQMHIVDMLSKEIQELQSKPDRSAEESDRLRKLMLEWQFQKRLQESKQKDEDDEEEEDDDVDTMLIMQRLEAERRARVKGGVLWLCPSVVPILASACFPWG

SEQ ID NO: 23930 - protein, 21 aa, Homo sapiens
LTPTPTTRLLCGTFLLCLSSW

SEQ ID NO: 23931 - protein, 22 aa, Homo sapiens
LKFIIHLSMYMHACIFVPEIQL

SEQ ID NO: 23932 - protein, 56 aa, Homo sapiens
LSATLTAVSIWAAVEGFVALLPGQMPAGETDPTPAGVRWGGWPKLRHWQERRFRSH

SEQ ID NO: 23933 - protein, 438 aa, Homo sapiens
LGVQQLRAARGRAWRAAPLQCGDPLARSPAVPAPRVPAQPPPGLGRRASRKEAATLAMASPPACPSEEDESLKGCELYVQLHGIQQVLKDCIVHLCISKPERPMKFLREHFEKLEKEENRQILARQKSNSQSDSHDEEVSPTPPNPVVKARRRRGGVSAEVYTEEDAVSYVRKVIPKDYKTMTALAKAISKNVLFAHLDDNERSDIFDAMFPVTHIAGETVIQQGNEGDNFYVVDQGEVDVYVNGEWVTNISEGGSFGELALIYGTPRAATVKAKTDLKLWGIDRDSYRRILMGSTLRKRKMYEEFLSKVSILESLEKWERLTVADALEPVQFEDGEKIVVQGEPGDDFYIITEGTASVLQRRSPNEEYVEVGRLGPSDYFGEIALLLNRPRAATVVARGPLKCVKLDRPRFERVLGPCSEILKRNIQRYNSFISLTV

SEQ ID NO: 23934 - protein, 394 aa, Homo sapiens
LDPQERKEAATLAMASPPACPSEEDESLKGCELYVQLHGIQQVLKDCIVHLCISKPERPMKFLREHFEKLEKEENRQILARQKSNSQSDSHDEEVSPTPPNPVVKARRRRGGVSAEVYTEEDAVSYVRKVIPKDYKTMTALAKAISKNVLFAHLDDNERSDIFDAMFPVTHIAGETVIQQGNEGDNFYVVDQGEVDVYVNGEWVTNISEGGSFGELALIYGTPRAATVKAKTDLKLWGIDRDSYRRILMGSTLRKRKMYEEFLSKVSILESLEKWERLTVADALEPVQFEDGEKIVVQGEPGDDFYIITEGTASVLQRRSPNEEYVEVGRLGPSDYFGEIALLLNRPRAATVVARGPLKCVKLDRPRFERVLGPCSEILKRNIQRYNSFISLTV

SEQ ID NO: 23935 - protein, 422 aa, Homo sapiens
VACARAAAQLQLSRRTAAKGSSREQRSARRASSRKEAATLAMASPPACPSEEDESLKGCELYVQLHGIQQVLKDCIVHLCISKPERPMKFLREHFEKLEKEENRQILARQKSNSQSDSHDEEVSPTPPNPVVKARRRRGGVSAEVYTEEDAVSYVRKVIPKDYKTMTALAKAISKNVLFAHLDDNERSDIFDAMFPVTHIAGETVIQQGNEGDNFYVVDQGEVDVYVNGEWVTNISEGGSFGELALIYGTPRAATVKAKTDLKLWGIDRDSYRRILMGSTLRKRKMYEEFLSKVSILESLEKWERLTVADALEPVQFEDGEKIVVQGEPGDDFYIITEGTASVLQRRSPNEEYVEVGRLGPSDYFGEIALLLNRPRAATVVARGPLKCVKLDRPRFERVLGPCSEILKRNIQRYNSFISLTV

SEQ ID NO: 23936 - protein, 690 aa, Homo sapiens
MLSERKDVLTAHPAAPGPVSRVYSRDRNQKCGASFYVNRILWLARYTASSFSSFLVQLFQVVLMKLSYESENYKLKTHESKDCESESYKSKSHESKAHASYYGRMNVREVLREDGHLSVNGEALCYFLLQILRRIGAVGQAVSRTAWSALWLAVVAPGKAASGVFWWLGIGWYQFVTLISWLNVFLLTRCLRNICKFLVLLIPLFLLLAGLSLRGQGNFFSFLPVLNWASMHRTQRVDDPQDVFKPTTSRLKQPLQGDSEAFPWHWMSGVEQQVASLSGQCHHHGENLRELTTLLQKLQARVDQMEGGAAGPSASVRDAVGQPPRETDFMAFHQEHEVRMSHLEDILGKLREKSEAIQKELEQTKQKTISAVGEQLLPTVEHLQLELDQLKSELSSWRHVKTGCETVDAVQERVDVQVREMVKLLFSEDQQGGSLEQLLQRFSSQFVSKGDLQTMLRDLQLQILRNVTHHVSVTKQLPTSEAVVSAVSEAGASGITEAQARAIVNSALKLYSQDKTGMVDFALESGGGSILSTRCSETYETKTALMSLFGIPLWYFSQSPRVVIQPDIYPGNCWAFKGSQGYLVVRLSMMIHPAAFTLEHIPKTLSPTGNISSAPKDFAVYGLENEYQEEGQLLGQFTYDQDGESLQMFQALKRPDDTAFQIVELRIFSNWGHPEYTCLYRFRVHGEPVK

SEQ ID NO: 23937 - protein, 623 aa, Homo sapiens [sequence omitted]

SEQ ID NO: 23938 - protein, 59 aa, Homo sapiens
MLRSGVGVGVPPTASRCQCRGSFCLATRSRLRRRTPEFTSLPSAAHLSCLGPRREPGDT

SEQ ID NO: 23939 - protein, 683 aa, Homo sapiens
LDIMFLSSRNFSALKKENIYENNKLAFRVAEEHLGIPALLDAEDMVALKVPDRLSILTYVSQYYNYFHGRSPIGGMAGVKRASEDSEEEPSGKKAPVQAAKLPSPAPARKPPLSPAQTNPVVQRRNEGAGGPPPKTDQALAGSLVSSTCGVCGKHVHLVQRHLADGRLYHRSCFRCKQCSCTLHSGAYKATGEPGTFVCTSHLPAAASASPKLTGLVPRQPGAMGVDSRTSCSPQKAQEANKARPSAWEPAAGNSPARASVPAAPNPAATSATSVHVRSPARPSESRLAPTPTEGKVRPRVTNSSPMGWSSAAPCTAAAASHPAVPPSAPDPRPATPQGGGAPRVAAPQTTLSSSSTSAATVDPPAWTPSASRTQQARNKFFQTSAVPPGTSLSGRGPTPSLVLSKDSSKEQARNFLKQALSALEEAGAPAPGRPSPATAAVPSSQPKTEAPQASPLAKPLQSSSPRVLGLPSRMEPPAPLSTSSTSQASALPPAGRRNLAESSGVGRVGAGSRPKPEAPMAKGKSTTLTQDMSTSLQEGQEDGPAGWRANLKPVDRRSPAERTLKPKEPRALAEPRAGEAPRKVSGSFAGSVHITLTPVRPDRTPRPASPGPSLPGPPPHPAAGDWPSLPASTFVTTGFGRSPLARKPECRAGRRRRRNLTFRANQGDPCPRPMSLLCLARR

SEQ ID NO: 23940 - protein, 227 aa, Homo sapiens
VRWRRAARGHLLFFAKSEPERQAAAAAEGSATVSAGARTARAREEPPRARALRATPATSSRELCPGDRARVMTTNPKPNKALKVKKEAGENAPVLSDDELVSMSVRELNQHLRGLTKEEVTRLKQRRRTLKNRGYAASCRIKRVTQKEELERQRVELQQEVEKLARENSSMRLELDALRSKYEALQTFARTVARGPVAPSKVATTSVITIVKSTELSSTSVPFSAAS

SEQ ID NO: 23941 - protein, 49 aa, Homo sapiens
MISVFLCCPVMAGTRIVWSSDQEDSQERTESQCAVCHGPWMNVCGTGLN

SEQ ID NO: 23942 - protein, 27 aa, Homo sapiens
LIGFAFLFCLGFCPTPGRTSEVSRGWF

SEQ ID NO: 23943 - protein, 896 aa, Homo sapiens
VQVCPRRLPWARLFHTLRREAKALVEARPAQSRGAPDCALAQPSVPSPFRAESPRGGGSGCGRGVPRISRCADSVLYGPIATQVSRERRRKCRDKWAPAERREIRAAAASWLRAAEHSKLAGLWSPGLVPAAPRTENYTIGPLALRPSDLDCVTLPGFQGSNLQTACCGTVSVIAKATMEDLGENTMVLSTLRSLNNFISQRVEGGSGLDISTSAPGSLQMQYQQSMQLEERAEQIRSKSHLIQVEREKMQMELSHKRARVELERAASTSARNYEREVDRNQELLTRIRQLQEREAGAEEKMQEQLERNRQCQQNLDAASKRLREKEDSLAQAGETINALKGRISELQWSVMDQEMRVKRLESEKQELQEQLDLQHKKCQEANQKIQELQASQEARADHEQQIKDLEQKLSLQEQDAAIVKNMKSELVRLPRLERELKQLREESAHLREMRETNGLLQEELEGLQRKLGRQEKMQETLVGLELENERLLAKLQSWERLDQTMGLSIRTPEDLSRFVVELQQRELALKDKNSAVTSSARGLEKARQQLQEELRQVSGQLLEERKKRETHEALARRLQKRVLLLTKERDGMRAILGSYDSELTPAEYSPQLTRRMREAEDMVQKVHSHSAEMEAQLSQALEELGGQKQRADMLEMELKMLKSQSSSAEQSFLFSREEADTLRLKVEELEGERSRLEEEKRMLEAQLERRALQGDYDQSRTKVLHMSLNPTSVARQRLREDHSQLQAECERLRGLLRAMERGGTVPADLEAAAASLPSSKEVAELKKQVESAELKNQRLKEVFQTKIQEFRKACYTLTGYQIDITTENQYRLTSLYAEHPGDCLIFKATSPSGSKMQLLETEFSHTVGELIEVHLRRQDSIPAFLSSLTLELFSRQTVA

SEQ ID NO: 23944 - protein, 20 aa, Homo sapiens
MGAGGAEGDPSGGGKLAASG

SEQ ID NO: 23945 - protein, 304 aa, Homo sapiens
LGAAAARADSGSGWGSARSPSSVLASGLGAERWAPSPHSASATGARPGFRVAVPREEGALRYLKLVCVSFQRQGFHTVGSRCKNRTGAEHLWLTRHLRDPFVKAAKVESYRCRSAFKLLEVNERHQILRPGLRVLDCGAAPGAWSQVAVQKVNAAGTDPSSPVGFVLGVDLLHIFPLEGATFLCPADVTDPRTSQRILEVLPGRRADVILSDMAPNATGFRDLDHDRLISLCLTLLSVTPDILQPGGTFLCKTWAGSQSRRLQRRLTEEFQNVRIIKPEASRKESSEVYFLATQYHGRKGTVKQ

SEQ ID NO: 23946 - protein, 822 aa, Homo sapiens
LRVGSVGPMQDAENVAVPEAAEERAEPGQQQPAAEPPPAEGLLRPAGPGAPEAAGTEASSEEVGIAEAGPESEVRTEPAAEAEAASGPSESPSPPAAEELPGSHAEPPVPAQGEAPGEQARDERSDSRAQAVSEDAGGNEGRAAEAEPRALENGDADEPSFSDPEDFVDDVSEEELLGDVLKDRPQEADGIDSVIVVDNVPQVGPDRLEKLKNVIHKIFSKFGKITNDFYPEEDGKTKGYIFLEYASPAHAVDAVKNADGYKLDKQHTFRVNLFTDFDKYMTISDEWDIPEKQPFKDLGNLRYWLEEAECRDQYSVIFESGDRTSIFWNDVKDPVSIEERARWTETYVRWSPKGTYLATFHQRGIALWGGEKFKQIQRFSHQGVQLIDFSPCERYLVTFSPLMDTQDDPQAIIIWDILTGHKKRGFHCESSAHWPIFKWSHDGKFFARMTLDTLSIYETPSMGLLDKKSLKISGIKDFSWSPGGNIIAFWVPEDKDIPARVTLMQLPTRQEIRVRNLFNVVDCKLHWQKNGDYLCVKVDRTPKGTQGVVTNFEIFRMREKQVPVDVVEMKETIIAFAWEPNGSKFAVLHGEAPRISVSFYHVKNNGKIELIKMFDKQQANTIFWSPQGQFVVLAGLRSMNGALAFVDTSDCTVMNIAEHYMASDVEWDPTGRYVVTSVSWWSHKVDNAYWLWTFQGRLLQKNNKDRFCQLLWRPRPPTLLSQEQIKQIKKDLKKYSKIFEQKDRLSQSKASKELVERRRTMMEDFRKYRKMAQELYMEQKNERLELRGGVDTDELDSNVDDWEEETIEFFVTEEIIPLGNQE

SEQ ID NO: 23947 - protein, 99 aa, Homo sapiens
LQRWTETYVRWSPKGTYLATFHQRGIALWGGEKFKQIQRFSHQGVQLIDFSPCERYLVTFSPLMDTQDDPQAIIIWDILTGHKKRGFHCESSAHWPIFK

SEQ ID NO: 23948 - protein, 143 aa, Homo sapiens
MTLDTLSIYETPSMGLLDKKSLKISGIKDFSWSPGGNIIAFWVPEDKDIPARVTLMQLPTRQEIRVRNLFNVVDCKLHWQKNGDYLCVKVDRTPKGTQGVVTNFEIFRMREKQVPVDVVEMKGKLYFSHFEANGAYVLFYSWL

SEQ ID NO: 23949 - protein, 327 aa, Homo sapiens
LATLAASSLPGHKDPKLRGMDEQTGRLRLDTYCMSAKQIWAWSKCSGRLWDEHMKWMEGWTDRWTDGWMDGWMDEWSPTPALRSYGGGLSQQTFIFTDGEDEALARHTGNVVITNCSAAHSRQALSCKMAVEYDRFIESGRKWFCHVDDDNYVNLRALLRLLASYPHTRDVYVGKPSLDRPIQAMERVSENKVRPVHFWFATGGAGFCISRGLALKMSPWASGGHFMNTAERIRLPDDCTIGYIVEALLGVPLIRSGLFHSHLENLQQVPTSELHEQVTLSYGMFENKRNAVHVKGPFSVEADPSRFRSIHCHLYPDTPWCPRTAIF

SEQ ID NO: 23950 - protein, 22 aa, Homo sapiens
MRCVGAFLFLLTTSSVLGVPVP

SEQ ID NO: 23951 - protein, 168 aa, Homo sapiens
LSQASEELKTPRSPNDLTPCPTRSHRPFPSPLLSPGALPSRAALPRKEFGWILSLWRPRFFKIPNYKSSITLASENSRVMSVPKLVAGALACVGPPGEEEERRVRRQARRSKGQHRLVVGRVASGVWDSPRHPMCAASALPSSMAGLGWAGLGWAGRAEPVEPAAAEA

SEQ ID NO: 23952 - protein, 25 aa, Homo sapiens
LLYIIYIYIISLRLSLLVYPPGLGI

SEQ ID NO: 23953 - protein, 14 aa, Homo sapiens
LIFISLGAFFLGKY

SEQ ID NO: 23954 - protein, 100 aa, Homo sapiens [sequence omitted]

SEQ ID NO: 23955 - protein, 100 aa, Homo sapiens
MAGGKGAKQIFPTFYLANLSFAAVMCQVLGCWGIPSEQSLFSTLEELREKEIDNYCVMRLQTEGLASAHPSWASRGHCSITTRPCTPASPPSPSWAWAPL

SEQ ID NO: 23956 - protein, 38 aa, Homo sapiens
LHFLGLWLVLLLWVWLQGTDFMLDPSSEYPLFLLVQRG

SEQ ID NO: 23957 - protein, 97 aa, Homo sapiens
LSHTFLDKKDWTGNELHECNELGKKLHQNPNLLPSKQQVRTRDLCRKSLMCNLDFTPNAYLARRRFQCDGHGNFSIRNLKLHLQERIHAEVTSVAVL

SEQ ID NO: 23958 - protein, 47 aa, Homo sapiens
LFLILFSLWILEDSEVLSDTKNLSFRQQMNLKGCLDSLEQRKAILFV

SEQ ID NO: 23959 - protein, 277 aa, Homo sapiens
MDDDIAALVVDNGSGMCKAGFAGDDAPRAVFPSIVGRPRHQGVMVGMGQKDSYVGDEAQSKRGILTLKYPIEHGIVTNWDDMEKIWHHTFYNELRVAPEEHPVLLTEAPLNPKANREKMTQIMFETFNTPAMYVAIQAVLSLYASGRTTGIVMDSGDGVTHTVPIYEGYALPHAILRLDLAGRDLTDYLMKILTERGYSFTTTAEREIVRDIKEKLCYVALDFEQEMATAASSSSLEKSYELPDGQVITIGNERFRCPEALFQPSFLGEWRLSPGSA

SEQ ID NO: 23960 - protein, 275 aa, Homo sapiens
LPAFLGALCCFSCVPLWGLGRPPHPVVLPCVCSSVSSGLWSARTRGRGAPVPAQGLLSAGMDLSANQDEETDQETFQLEIDRDTKKCAFRTHTGKYWTLTATGGVQSTASSKNASCYFDIEWRDRRITLRASNGKFVTSKKNGQLAASVETAGDSELFLMKLINRPIIVFRGEHGFIGCRKVTGTLDANRSSYDVFQLEFNDGAYNIKDSTGKYWTVGSDSAVTSSGDTPVDFFFEFCDYNKVAIKVGGRYLKGDHAGVLKASAETVDPASLWEY

SEQ ID NO: 23961 - protein, 92 aa, Homo sapiens
VAAVSGRAVGGSRGGGRGGMAAAAAGAGSGPWAAQEKQFPPALLSFFIYNPRFGPREGQEENKILFYHPNEVEKNEKIRNVGLCEAIVQFTR

SEQ ID NO: 23962 - protein, 501 aa, Homo sapiens
VAAVSGRAVGGSRGGGRGGMAAAAAGAGSGPWAAQEKQFPPALLSFFIYNPRFGPREGQEENKILFYHPNEVEKNEKIRNVGLCEAIVQFTRTFSPSKPAKSLHTQKNRQFFNEPEENFWMVMVVRNPIIEKQSKDGKPVIEYQEEELLDKVYSSVLRQCYSMYKLFNGTFLKAMEDGGVKLLKERLEKFFHRYLQTLHLQSCDLLDIFGGISFFPLDKMTYLKIQSFINRMEESLNIVKYTAFLYNDQLIWSGLEQDDMRILYKYLTTSLFPRHIEPELAGRDSPIRAEMPGNLQHYGRFLTGPLNLNDPDAKCRFPKIFVNTDDTYEELHLIVYKAMSAAVCFMIDASVHPTLDFCRRLDSIVGPQLTVLASDICEQFNINKRMSGSEKEPQFKFIYFNHMNLAEKSTVHMRKTPSVSLTSVHPDLMKILGDINSDFTRVDEDEEIIVKAMSDYWVVGKKSDRRELYVILNQKNANLIEVNEEVKKLCATQFNNIFFLD

SEQ ID NO: 23963 - protein, 340 aa, Homo sapiens
LTVSERWPLARATPFCFGSAMPMYQVKPYHGGGAPLRVELPTCMYRLPNVHGRSYGPAPGAGHVQEESNLSLQALESRQDDILKRLYELKAAVDGLSKMIQTPDADLDVTNIIQADEPTTLTTNALDLNSVLGKDYGALKDIVINANPASPPLSLLVLHRLLCEHFRVLSTVHTHSSVKSVPENLLKCFGEQNKKQPRQDYQLGFTLIWKNVPKTQMKFSIQTMCPIEGEGNIARFLFSLFGQKHNAVNATLIDSWVDIAIFQLKEGSSKEKAAVFRSMNSALGKSPWLAGNELTVADVVLWSVLQQIGGCSVTVPANVQRWMRSCENLAPFNTALKLLK

SEQ ID NO: 23964 - protein, 70 aa, Homo sapiens
LYSAPQMISRQLRSLSCLCPALFPGTSSFIVALSSPANLYIPQRQRSDELVFESQKGSAMELAVITVDGV

SEQ ID NO: 23965 - protein, 43 aa, Homo sapiens
LVQCFVVFSKPLQDLLKMSECPKLPFLPFLPHKLLFLNFLPKY

SEQ ID NO: 23966 - protein, 212 aa, Homo sapiens
MDFLVLFLFYLASVLMGLVLICVCSKTHSLKGLARGGAQIFSCIIPECLQRAVHGLLHYLFHTRNHTFIVLHLVLQGMVYTEYTWEVFGYCQELELSLHYLLLPYLLLGVNLFFFTLTCGTNPGIITKANELLFLHVYEFDEVMFPKNVRCSTCDLRKPARSKHCSECGSRDSSGTSNSTCVGFVCEGMFPESESRASSPPDMVWPLLVELR

SEQ ID NO: 23967 - protein, 49 aa, Homo sapiens [sequence omitted]

SEQ ID NO: 23968 - protein, 712 aa, Homo sapiens
LVRWTGRDLASRRAPATAIPPRPVGSGGAEAAEPQEDLPPLSQSSRFFQEQQKMNKSLGPVSFKDVAVDFTQEEWQQLDPEQKITYRDVMLENYSNLVSVGYHIIKPDVISKLEQGEEPWIVEGEFLLQSYPDEVWQTDDLIERIQEEENKPSRQTVFIETLIEEREYISSDGSYARMKADECSGCGKSLLHIKLEKTHPGDQAYEFNQNGEPYTLNEESLYQKIRILEKPFEYIECQKAFQKDTVFVNHMEEKPYKWNGSEIAFLQMSDLTVHQTSHMEMKPYECSECGKSFCKKSKFIIHQRTHTGEKPYECNQCGKSFCQKGTLTVHQRTHTGEKPYECNECGKNFYQKLHLIQHQRTHSGEKPYECSYCGKSFCQKTHLTQHQRTHSGERPYVCHDCGKTFSQKSALNDHQKIHTGVKLYKCSECGKCFCRKSTLTTHLRTHTGEKPYECNECGKFFSRLSYLTVHYRTHSGEKPYECNECGKTFYLNSALMRHQRVHTGEKPYECNECGKLFSQLSYLTIHHRTHSGVKPYECSECGKTFYQNSALCRHRRIHKGEKPYECYICGKFFSQMSYLTIHHRIHSGEKPYECSECGKTFCQNSALNRHQRTHTGEKAYECYECGKCFSQMSYLTIHHRIHSGEKPFECNECGKAFSRMSYLTVHYRTHSGEKPYECTECGKKFYHKSAFNSHQRIHRRGNMNVIDVGRLL

SEQ ID NO: 23969 - protein, 222 aa, Homo sapiens
VNDVYRVYNRHQYPFVVLNISVDSGNLIKMHAADLEKPMVEKQDQSPSLRTGEEKRDVSISRLREAFSLRHTTENKPHSPKTPEPRRSPLGQKRGMSSSSTSDAISDKGVLRPQKEAVSSSQGPSDPTDRAEVEKDSGHGSTSVDSEGFSIPDTGSHCSSECVASTPGDRGSQEHVDSQEKAPETDDSFSDVDCHSNQEDTGCKFQVLPQPTNLTSPNTKVF

SEQ ID NO: 23970 - protein, 119 aa, Homo sapiens
VTCFHRSEKEPQFKFIYFNHMNLAEKSTVHMRKTPSVSLTSVHPDLMKILGDINSDFTRVDEDEEIIVKAMSDYWVVGKKSDRRELYVILNQKNANLIEVNEEVKKLCATQFNNIFFLD

SEQ ID NO: 23971 - protein, 136 aa, Homo sapiens
VLGGAGVAGLPPRGLQPGRLSRLTPGSAGPVAATPGAPRGWRRGAPAAHLHPLFLGPCASGPATQLDPLCGSRPLGCGQRPEQDWTQQWLAALLGILYEDKERQDFIFTIYHWWQAVAIFTVYLGSSLHMKVRLAG

SEQ ID NO: 23972 - protein, 15 aa, Homo sapiens
LRLMGMFFQLAFWRM

SEQ ID NO: 23973 - protein, 400 aa, Homo sapiens
LRLPREAKVTSPKSSPSPPPRRGEREPQLMSEIHFREMASKSWLNFLTFLCGSAIGFLLCSQLFSILLGEKVDTQPNVLHNDPHARHSDDNGQNHLEGQMNFNADSSQHKDENTDIAENLYQKVRILCWVMTGPQNLEKKAKHVKATWAQRCNKVLFMSSEENKDFPAVGLKTKEGRDQLYWKTIKAFQYVHEHYLEDADWFLKADDDTYVILDNLRWLLSKYDPEEPIYFGRRFKPYVKQGYMSGGAGYVLSKEALKRFVDAFKTDKCTHSSSIEDLALGRCMEIMNVEAGDSRDTIGKETFHPFVPEHHLIKGYLPRTFWYWNYNYYPPVEGPGCCSDLAVSFHYVDSTTMYELEYLVYHLRPYGYLYRYQPTLPERILKEISQANKNEDTKVKLGNP

SEQ ID NO: 23974 - protein, 58 aa, Homo sapiens
MTTTCDFIHVARKILPHFPNRKSGGGIIKLFYDASCGLLLDRMVTFNCNQDEQATLLN

SEQ ID NO: 23975 - protein, 166 aa, Homo sapiens
VLVRRGTAGPASAAAAAAAAAAAAAAAAAMFHFFRKPPESKKPSVPETEADGFVLLGDTTDEQRMTARGKTSDIEANQPLETNKENSSSVTVSDPEMENKAGQTLENSSLMAELLSDVPFTLAPHVLAVQGTITDLPDHLLSYDGSENLSRFWYDFTLENSVLCDS

SEQ ID NO: 23976 - protein, 60 aa, Homo sapiens
LSLPSTLRDSGGRSGGLEDNRFLGDLGVVSNLSLAHLVTRSRRPCQEYSRMSAHKNTFKR

SEQ ID NO: 23977 - protein, 605 aa, Homo sapiens
LIMIVQMTVILKLEMPQDSLILEKSQNWSSQKMDHILICCVCLGDNSEDADEIIQCDNCGITVHEGCYGVDGESDSIMSSASENSTEPWFCDACKCGVSPSCELCPNQDGIFKETDAGRWVHIVCALYVPGVAFGDIDKLRPVTLTEMNYSKYGAKECSFCEDPRFARTGVCISCDAGMCRAYFHVTCAQKEGLLSEAAAEEDIADPFFAYCKQHADRLDRKWKRKNYLALQSYCKMSLQEREKQLSPEAQARINARLQQYRAKAELARSTRPQAWVPREKLPRPLTSSASAIRKLMRKAELMGISTDIFPVDNSDTSSSVDGRRKHKQPALTADFVNYYFERNMRMIQIQENMAEQKNIKDKLENEQEKLHVEYNKLCESLEELQNLNGKLRSEGQGIWALLGRITGQKLNIPAILRAPKERKPSKKEGGTQKTSTLPAVLYSCGICKKNHDQHLLLLCDTCKLHYHLGCLDPPLTRMPRKTKNSYWQCSECDQAGSSDMEADMAMETLPDGTKRSRRQIKEPVKFVPQDVPPEPKKIPIRNTRTRGRKRSFVPEEEKHEERVPRERRQRQSVLQKKPKAEDLRTECATCKGTGDNENLVRYPS

SEQ ID NO: 23978 - protein, 665 aa, Homo sapiens
LIMIVQMTVILKLEMPQDSLILEKSQNWSSQKMDHILICCVCLGDNSEDADEIIQCDNCGITVHEGCYGVDGESDSIMSSASENSTEPWFCDACKCGVSPSCELCPNQDGIFKETDAGRWVHIVCALYVPGVAFGDIDKLRPVTLTEMNYSKYGAKECSFCEDPRFARTGVCISCDAGMCRAYFHVTCAQKEGLLSEAAAEEDIADPFFAYCKQHADRLDRKWKRKNYLALQSYCKMSLQEREKQLSPEAQARINARLQQYRAKAELARSTRPQAWVPREKLPRPLTSSASAIRKLMRKAELMGISTDIFPVDNSDTSSSVDGRRKHKQPALTADFVNYYFERNMRMIQIQENMAEQKNIKDKLENEQEKLHVEYNKLCESLEELQNLNGKLRSEGQGIWALLGRITGQKLNIPAILRAPKERKPSKKEGGTQKTSTLPAVLYSCGICKKNHDQHLLLLCDTCKLHYHLGCLDPPLTRMPRKTKNSYWQCSECDQAGSSDMEADMAMETLPDGTKRSRRQIKEPVKFVPQDVPPEPKKIPIRNTRTRGRKRSFVPEEEKHEERVPRERRQRQSVLQKKPKAEDLRTECATCKGTGDNENLVRCDECRLCYHFGCLDPPLKKSPKQTGYGWICQECDSSSSKEDENEAERKNISQELNMEQKNPKK

SEQ ID NO: 23979 - protein, 69 aa, Homo sapiens
LFFVFFFVFFQRTRGRKRSFVPEEEKHEERVPRERRQRQSVLQKKPKAEDLRTECATCKGTGDNENLVR

SEQ ID NO: 23980 - protein, 132 aa, Homo sapiens
LFFVFFFVFFQRTRGRKRSFVPEEEKHEERVPRERRQRQSVLQKKPKAEDLRTECATCKGTGDNENLVRCDECRLCYHFGCLDPPLKKSPKQTGYGWICQECDSSSSKEDENEAERKNISQELNMEQKNPKK

SEQ ID NO: 23981 - protein, 1687 aa, Homo sapiens
LYSLKRRSKSGEKFPAERATALDPGVAAGGMGLQARRWASGSRGAAGPRRGVLQLLPLPLPLPLLLLLLLRPGAGRAAAQGEAEAPTLYLWKTGPWGRCMGDECGPGGIQTRAVWCAHVEGWTTLHTNCKQAERPNNQQNCFKVCDWHKELYDWRLGPWNQCQPVISKSLEKPLECIKGEEGIQVREIACIQKDKDIPAEDIICEYFEPKPLLEQACLIPCQQDCIVSEFSAWSECSKTCGSGLQHRTRHVVAPPQFGGSGCPNLTEFQVCQSSPCEAEELRYSLHVGPWSTCSMPHSRQVRQARRRGKNKEREKDRSKGVKDPEARELIKKKRNRNRQNRQENKYWDIQIGYQTREVMCINKTGKAADLSFCQQEKLPMTFQSCVITKECQVSEWSEWSPCSKTCHDMVSPAGTRVRTRTIRQFPIGSEKECPEFEEKEPCLSQGDGVVPCATYGWRTTEWTECRVDPLLSQQDKRRGNQTALCGGGIQTREVYCVQANENLLSQLSTHKNKEASKPMDLKLCTGPIPNTTQLCHIPCPTECEVSPWSAWGPCTYENCNDQQGKKGFKLRKRRITNEPTGGSGVTGNCPHLLEAIPCEEPACYDWKAVRLGNCEPDNGKECGPGTQVQEVVCINSDGEEVDRQLCRDAIFPIPVACDAPCPKDCVLSTWSTWSSCSHTCSGKTTEGKQIRARSILAYAGEEGGIRCPNSSALQEVRSCNEHPCTVYHWQTGPWGQCIEDTSVSSFNTTTTWNGEASCSVGMQTRKVICVRVNVGQVGPKKCPESLRPETVRPCLLPCKKDCIVTPYSDWTSCPSSCKEGDSSIRKQSRHRVIIQLPANGGRDCTDPLYEEKACEAPQACQSYRWKTHKWRRCQLVPWSVQQDSPGAQEGCGPGRQARAITCRKQDGGQAGIHECLQYAGPVPALTQACQIPCQDDCQLTSWSKFSSCNGDCGAVRTRKRTLVGKSKKKEKCKNSHLYPLIETQYCPCDKYNAQPVGNWSDCILPEGKVEVLLGMKVQGDIKECGQGYRYQAMACYDQNGRLVETSRCNSHGYIEEACIIPCPSDCKLSEWSNWSRCSKSCGSGVKVRSKWLREKPYNGGRPCPKLDHVNQAQVYEVVPCHSDCNQYLWVTEPWSICKVTFVNMRENCGEGVQTRKVRCMQNTADGPSEHVEDYLCDPEEMPLGSRVCKLPCPEDCVISEWGPWTQCVLPCNQSSFRQRSADPIRQPADEGRSCPNAVEKEPCNLNKNCYHYDYNVTDWSTCQLSEKAVCGNGIKTRMLDCVRSDGKSVDLKYCEALGLEKNWQMNTSCMVECPVNCQLSDWSPWSECSQTCGLTGKMIRRRTVTQPFQGDGRPCPSLMDQSKPCPVKPCYRWQYGQWSPCQVQEAQCGEGTRTRNISCVVSDGSADDFSKVVDEEFCADIELIIDGNKNMVLEESCSQPCPGDCYLKDWSSWSLCQLTCVNGEDLGFGGIQVRSRPVIIQELENQHLCPEQMLETKSCYDGQCYEYKWMASAWKGSSRTVWCQRSDGINVTGGCLVMSQPDADRSCNPPCSQPHSYCSETKTCHCEEGYTEVMSSNSTLEQCTLIPVVVLPTMEDKRGDVKTSRAVHPTQPSSNPAGRGRTWFLQPFGPDGRLKTWVYGVAAGAFVLLIFIVSMIYLACKKPKKPQRRQNNRLKPLTLAYDGDADM

SEQ ID NO: 23982 - protein, 1687 aa, Homo sapiens
LYSLKRRSKSGEKFPAERATALDPGVAAGGMGLQARRWASGSRGAAGPRRGVLQLLPLPLPLPLLLLLLLRPGAGRAAAQGEAEAPTLYLWKTGPWGRCMGDECGPGGIQTRAVWCAHVEGWTTLHTNCKQAERPNNQQNCFKVCDWHKELYDWRLGPWNQCQPVISKSLEKPLECIKGEEGIQVREIACIQKDKDIPAEDIICEYFEPKPLLEQACLIPCQQDCIVSEFSAWSECSKTCGSGLQHRTRHVVAPPQFGGSGCPNLTEFQVCQSSPCEAEELRYSLHVGPWSTCSMPHSRQVRQARRRGKNKEREKDRSKGVKDPEARELIKKKRNRNRQNRQENKYWDIQIGYQTREVMCINKTGKAADLSFCQQEKLPMTFQSCVITKECQVSEWSEWSPCSKTCHDMVSPAGTRVRTRTIRQFPIGSEKECPEFEEKEPCLSQGDGVVPCATYGWRTTEWTECRVDPLLSQQDKRRGNQTALCGGGIQTREVYCVQANENLLSQLSTHKNKEASKPMDLKLCTGPIPNTTQLCHIPCPTECEVSPWSAWGPCTYENCNDQQGKKGFKLRKRRITNEPTGGSGVTGNCPHLLEAIPCEEPACYDWKAVRLGNCEPDNGKECGPGTQVQEVVCINSDGEEVDRQLCRDAIFPIPVACDAPCPKDCVLSTWSTWSSCSHTCSGKTTEGKQIRARSILAYAGEEGGIRCPNSSALQEVRSCNEHPCTVYHWQTGPWGQCIEDTSVSSFNTTTTWNGEASCSVGMQTRKVICVRVNVGQVGPKKCPESLRPETVRPCLLPCKKDCIVTPYSDWTSCPSSCKEGDSSIRKQSRHRVIIQLPANGGRDCTDPLYEEKACEAPQACQSYRWKTHKWRRCQLVPWSVQQDSPGAQEGCGPGRQARAITCRKQDGGQAGIHECLQYAGPVPALTQACQIPCQDDCQLTSWSKFSSCNGDCGAVRTRKRTLVGKSKKKEKCKNSHLYPLIETQYCPCDKYNAQPVGNWSDCILPEGKVEVLLGMKVQGDIKECGQGYRYQAMACYDQNGRLVETSRCNSHGYIEEACIIPCPSDCKLSEWSNWSRCSKSCGSGVKVRSKWLREKPYNGGRPCPKLDHVNQFQVYEVVPCHSDCNQYLWVTEPWSICKVTFVNMRENCGEGVQTRKVRCMQNTADGPSEHVEDYLCDPEEMPLGSRVCKLPCPEDCVISEWGPWTQCVLPCNQSSFRQRSADPIRQPADEGRSCPNAVEKEPCNLNKNCYHYDYNVTDWSTCQLSEKAVCGNGIKTRMLDCVRSDGKSVDLKYCEALGLEKNWQMNTSCMVECPVNCQLSDWSPWSECSQTCGLTGKMIRRRTVTQPFQGDGRPCPSLMDQSKPCPVKPCYRWQYGQWSPCQVQEAQCGEGTRTRNISCVVSDGSADDFSKVVDEEFCADIELIIDGNKNMVLEESCSQPCPGDCYLKDWSSWSLCQLTCVNGEDLGFGGIQVRSRPVIIQELENQHLCPEQMLETKSCYDGQCYEYKWMASAWKGSSRTVWCQRSDGINVTGGCLVMSQPDADRSCNPPCSQPHSYCSETKTCHCEEGYTEVMSSNSTLEQCTLIPVVVLPTMEDKRGDVKTSRAVHPTQPSSNPAGRGRTWFLQPFGPDGRLKTWVYGVAAGAFVLLIFIVSMIYLACKKPKKPQRRQNNRLKPLTLAYDGDADM

SEQ ID NO: 23983 - protein, 300 aa, Homo sapiens
LWTPRPCPRPCPRRSSPGLRSAPRADMGKSLSHLPLHSSKEDAYDGVTSENMRNGLVNSEVHNEDGRNGDVSQFPYVEFTGRDSVTCPTCQGTGRIPRGQENQLVALIPYSDQRLRPRRTKLYVMASVFVCLLLSGLAVFFLFPRSIDVKYIGVKSAYVSYDVQKRTIYLNITNTLNITNNNYYSVEVENITAQVQFSKTVIGKARLNNITIIGPLDMKQIDYTVPTVIAEEMSYMYDFCTLISIKVHNIVLMMQVTVTTTYFGHSEQISQERYQYVDCGRNTTYQLGQSEYLNVLQPQQ

SEQ ID NO: 23984 - protein, 232 aa, Homo sapiens
MAGITTIEAVKRKIQVLQQQADDAEERAERLQREVEGERRAREQAEAEVASLNRRIQLVEEELDRAQERLATALQKLEEAEKAADEEKMELQEIQLKEAKHIAEEADRKYEEVARKLVIIEGDLERTEERAELAESRCREMDEQIRLMDQNLKCLSAAEEKYSQKEDKYEEEIKILTDKLKEAETRAEFAERSVAKLEKTIDDLEDKLKCTKEEHLCTQRMLDQTLLDLNEM

SEQ ID NO: 23985 - protein, 38 aa, Homo sapiens
LNLIDQERERHSRQNQQQEQRDRSRQHHSTPWAASHCE

SEQ ID NO: 23986 - protein, 17 aa, Homo sapiens
LPMLSHLDPDSRSGAVL

SEQ ID NO: 23987 - protein, 16 aa, Homo sapiens
MWSLHMLNIPALVMVT

SEQ ID NO: 23988 - protein, 11 aa, Homo sapiens
MFILSGYLWYS

SEQ ID NO: 23989 - protein, 39 aa, Homo sapiens
LLFAMYVLLLLVLWVPATFMSCNAHPEGVQLHFSSQQGY

SEQ ID NO: 23990 - protein, 345 aa, Homo sapiens
LAGAMVHIKKGELTQEEKELLEVIGKGTVQEAGTLLSSKNVRVNCLDENGMTPLMHAAYKGKLDMCKLLLRHGADVNCHQHEHGYTALMFAALSGNKDITWVMLEAGAETDVVNSVGRTAAQMAAFVGQHDCVTIINNFFPRERLDYYTKPQGLDKEPKLPPKLAGPLHKIITTTNLHPVKIVMLVNENPLLTEEAALNKCYRVMDLICEKCMKQRDMNEVLAMKMHYISCIFQKCINFLKDGENKLDTLIKSLLKGRASDGFPVYQEKIIRESIRKFPYCEATLLQQLVRSIAPVEIGSDPTAFSVLTQAITGQVGFVDVEFCTTCGEKGASKRCSVCKMCREL

SEQ ID NO: 23991 - protein, 209 aa, Homo sapiens
VCLCQCVCPSLLHCLPPLLLLLLLPLLLHESPQPPALRVVATSSDRNFMNKHQKPVLTGQRFKTRKRDEKEKFEPTVFRDTLVQGLNEAGDDLEAVAKFLDSTGSRLDYRRYADTLFDILVAGSMLAPGGTRIDDGDKTKMTNHCVFSANEDHETIRNYAQVFNKLIRRYKYLEKAFEDEMKKALRPHLLSSFSKHGWQKKMPTLLPRL

SEQ ID NO: 23992 - protein, 467 aa, Homo sapiens
VCLCQCVCPSLLHCLPPLLLLLLLPLLLHESPQPPALRVVATSSDRNFMNKHQKPVLTGQRFKTRKRDEKEKFEPTVFRDTLVQGLNEAGDDLEAVAKFLDSTGSRLDYRRYADTLFDILVAGSMLAPGGTRIDDGDKTKMTNHCVFSANEDHETIRNYAQVFNKLIRRYKYLEKAFEDEMKKLLLFLKAFSETEQTKLAMLSGILLGNGTLPATILTSLFTDSLVKEGIAASFAVKLFKAWMAEKDANSVTSSLRKANLDKRLLELFPVNRQSVDHFAKYFTDAGLKELSDFLRVQQSLGTRKELQKELQERLSQECPIKEVVLYVKEEMKRNDLPETAVIGLLWTCIMNAVEWNKKEELVAEQALKHLKQYAPLLAVFSSQGQSELILLQKVQEYCYDNIHFMKAFQKIVVLFYKADVLSEEAILKWYKEAHVAKGKSVFLDQMKKFVEWLQNAEEESESEGEEN

SEQ ID NO: 23993 - protein, 204 aa, Homo sapiens
LPPLLLLLLLPLLLHESPQPPALRVVATSSDRNFMNKHQKPVLTGQRFKTRKRDEKEKFEPTVFRDTLVQGLNEAGDDLEAVAKFLDSTGSRLDYRRYADTLFDILVAGSMLAPGGTRIDDGDKTKMTNHCVFSANEDHETIRNYAQVFNKLIRRYKYLEKAFEDEMKKPFPKQSRQSWRCCRGFCWAMAPCPPPSSPVSSPTA

SEQ ID NO: 23994 - protein, 327 aa, Homo sapiens
LALSPSPRDRSAPPGSRSAERIYLHISTFVPCQRPISARGETKGLGGARAPAPAQLRRPQVPKRVRAAAARAPRTAAPGPGPPPTSALLPRLGQAPKARTKQLSGNLRRSRIYVQLPATTGSKMVCGGFACSKNCLCALNLLYTLVSLLLIGIAAWGIGFGLISSLRVVGVVIAVGIFLFLIALVGLIGAVKHHQVLLFFYMIILLLVFIVQFSVSCACLALNQEQQGQLLEVGWNNTASARNDIQRNLNCCGFRSVNPNDTCLASCVKSDHSCSPCAPIIGEYAGEVLRFVGGIGLFFSFTEILGVWLTYRYRNQKDPRANPSAFL

SEQ ID NO: 23995 - protein, 30 aa, Homo sapiens
VMLALLLFMVPSRRRRLLPGHWRPGPRNPV

SEQ ID NO: 23996 - protein, 26 aa, Homo sapiens
LILMMSSPAQPEMRSYCVAQAGIKLQ

SEQ ID NO: 23997 - protein, 20 aa, Homo sapiens
MFLFLFFSCMHSQEVVPISH

SEQ ID NO: 23998 - protein, 79 aa, Homo sapiens
LWHLWNIVCQKKIRTCHDPLFSLLYLWTYWGHPEFSVPPGSHKENFLPIPTAPCLHVSRVHWDRGLHSLFLAHLSTSQL

SEQ ID NO: 23999 - protein, 13 aa, Homo sapiens
LGSLPQMWKNANH

SEQ ID NO: 24000 - protein, 311 aa, Homo sapiens
MTFLILSIAPVLAVTGMIETAAMTGFANKDKQELKHAGKIATEALENIRTIVSLTREKAFEQMYEEMLQTQHRNTSKKAQIIGSCYAFSHAFIYFAYAAGFRFGAYLIQAGRMTPEGMFIVFTAIAYGAMAIGETLVLAPEYSKAKSGAAHLFALLEKKPNIDSRSQEGKKPDTCEGNLEFREVSFFYPCRPDVFILRGLSLSIERGKTVAFVGSSGCGKSTSVQLLQRLYDPVQGQVLFDGVDAKELNVQWLRSQIAIVPQEPVLFNCSIAENIAYGDNSRVVPLDEIKEAANAANIHSFIEGLPESLEC

SEQ ID NO: 24001 - protein, 56 aa, Homo sapiens
LAVTPYPLAVRCPNSVIRCPDMRPQWTDPGWKGRVRRNQTEEFRRCGNRVDVAEGT

SEQ ID NO: 24002 - protein, 57 aa, Homo sapiens
LEGAQEGASAYRCPNSVIRCPDMRPQWTDPGWKGRVRRNQTEEFRRCGNRVDVAEGT

SEQ ID NO: 24003 - protein, 54 aa, Homo sapiens
LYLLPDPSRCPNSVIRCPDMRPQWTDPGWKGRVRRNQTEEFRRCGNRVDVAEGT

SEQ ID NO: 24004 - protein, 64 aa, Homo sapiens [sequence omitted]

SEQ ID NO: 24005 - protein, 16 aa, Homo sapiens
VVLLLGRKQSSLRRCR

SEQ ID NO: 24006 - protein, 22 aa, Homo sapiens
MPTRFTVILLVEGLASMLIGAD

SEQ ID NO: 24007 - protein, 564 aa, Homo sapiens
MLGGTDCRTFLTSHINLKKTLCDVILMVQERKIPAHRVVLAAASHFFNLMFTTNMLESKSFEVELKDAEPDIIEQLVEFAYTARISVNSNNVQSLLDAANQYQIEPVKKMCVDFLKEQVDASNCLGISVLAECLDCPELKATADDFIHQHFTEVYKTDEFLQLDVKRVTHLLNQDTLTVRAEDQVYDAAVRWLKYDEPNRQPFMVDILAKVRFPLISKNFLSKTVQAEPLIQDNPECLKMVISGMRYHLLSPEDREELVDGTRPRRKKHDYRIALFGGSQPQSCRYFNPKDYSWTDIRCPFEKRRDAACVFWDNVVYILGGSQLFPIKRMDCYNVVKDSWYSKLGPPTPRDSLAACAAEGKIYTSGGSEVGNSALYLFECYDTRTESWHTKPSMLTQRCSHGMVEANGLIYVCGGSLGNNVSGRVLNSCEVYDPATETWTELCPMIEARKNHGLVFVKDKIFAVGGQNGLGGLDNVEYYDIKLNEWKMVSPMPWKGVTVKCAAVGSIVYVLAGFQGVGRLGHILEYNTETDKWVANSKVRAFPVTSCLICVVDTCGANEETLET

SEQ ID NO: 24008 - protein, 21 aa, Homo sapiens
MWSVFIELLRTWVWAWMLVRN

SEQ ID NO: 24009 - protein, 13 aa, Homo sapiens
LLLLVDGPRGIQS

SEQ ID NO: 24010 - protein, 67 aa, Homo sapiens
MECLYYFLGFLLLAARLPLDAAKQVGLKFFRKLSSLAHSSLLLQTVGKAETTAKCLQLHSLLSAHGK

SEQ ID NO: 24011 - protein, 30 aa, Homo sapiens
MECLYYFLGFLLLAARLPLDAAKRDPAAAP

SEQ ID NO: 24012 - protein, 52 aa, Homo sapiens
MECLYYFLGFLLLAARLPLDAAKHLRKRKTLWNSGKNLSLSWESKDVNLDFY

SEQ ID NO: 24013 - protein, 10 aa, Homo sapiens
LLDSEKILLS

SEQ ID NO: 24014 - protein, 598 aa, Homo sapiens
VVLIFRFFSLFFFKQPLFTMNKLYIGNLSENAAPSDLESIFKDAKIPVSGPFLVKTGYAFVDCPDESWALKAIEALSGKIELHGKPIEVEHSVPKRQRIRKLQIRNIPPHLQWEVLDSLLVQYGVVESCEQVNTDSETAVVNVTYSSKDQARQALDKLNGFQLENFTLKVAYIPDEMAAQQNPLQQPRGRRGLGQRGSSRQGSPGSVSKQKPCDLPLRLLVPTQFVGAIIGKEGATIRNITKQTQSKIDVHRKENAGAAEKSITILSTPEGTSAACKSILEIMHKEAQDIKFTEEIPLKILAHNNFVGRLIGKEGRNLKKIEQDTDTKITISPLQELTLYNPERTITVKGNVETCAKAEEEIMKKIRESYENDIASMNLQAHLIPGLNLNALGLFPPTSGMPPPTSGPPSAMTPPYPQFEQSETETVHLFIPALSVGAIIGKQGQHIKQLSRFAGASIKIAPAEAPDAKVRMVIITGPPEAQFKAQGRIYGKIKEENFVSPKEEVKLEAHIRVPSFAAGRVIGKGGKTVNELQNLSSAEVVVPRDQTPDENDQVVVKITGHFYACQVAQRKIQEILTQVKQHQQQKALQSGPPQSRRK

SEQ ID NO: 24015 - protein, 100 aa, Homo sapiens
VVLIFRFFSLFFFKQPLFTMNKLYIGNLSENAAPSDLESIFKDAKIPVSGPFLVKTGYAFVDCPDESWALKAIEALSGKIELHGKPIEVEHSVPKRQSEH

SEQ ID NO: 24016 - protein, 119 aa, Homo sapiens
VVLIFRFFSLFFFKQPLFTMNKLYIGNLSENAAPSDLESIFKDAKIPVSGPFLVKTGYAFVDCPDESWALKAIEALSGKIELHGKPIEVEHSVPKRQRIRKLQIRNIPPHLQWEEMGQP

SEQ ID NO: 24017 - protein, 68 aa, Homo sapiens [sequence omitted]

SEQ ID NO: 24018 - protein, 113 aa, Homo sapiens
MSNRRRHTGSRANPDPNTCLGVFGLSLYTTERDLREVFSRYGPLSGVNVVYDQRTGRSRGFAFVYFERIDDSKEAMERANGMELDGRRIRVDYSITKRAHTPTPGIYMGRPTQ

SEQ ID NO: 24019 - protein, 983 aa, Homo sapiens
MLVNILQCTGQRTAPLCHSTQTHLVPSASSAKATLKFEKMKASLGNMIYGGLFSEDQCWYRCKVLKIISVEKCLVRYIDYGNTEILNRSDIVEIPLELQFSSVAKKYKLWGLHIPSDQEVTQFDQGTTFLGSLIFEKEIKMRIKATSEDGTVIAQAEYGSVDIGEEVLKKGFAEKCRLASRTDICEEKKLDPGQLVLRNLKSPIPLWGHRSNQSTFSRPKGHLSEKMTLDLKDENDAGNLITFPKESLAVGDFNLGSNVSLEKIKQDQKLIEENEKLKTEKDALLESYKALELKVEQIAQELQQEKAAAVDLTNHLEYTLKTYIDTRMKNLAAKMEILKEMRHVDISVRFGKDLSDAIQVLDEGCFTTPASLNGLEIIWAEYSLAQENIKTCEYVSEGNILIAQRNEMQQKLYMSVEDFILEVDESSLNKRLKTLQDLSVSLEAVYGQAKEGANSDEILKKFYDWKCDKREEFTSVRSETDASLHRLVAWFQRTLKVFDLSVEGSLISEDAMDNIDEILEKTESSVCKELEIALVDQGDADKEIISNTYSQVLQKIHSEERLIATVQAKYKDSIEFKKQLIEYLNKSPSVDHLLSIKKTLKSLKALLRWKLVEKSNLEESDDPDGSQIEKIKEEITQLRNNVFQEIYHEREEYEMLTSLAQKWFPELPLLHPEIGLLKYMNSGGLLTMSLERDLLDAEPMKELSSKRPLVRSEVNGQIILLKGYSVDVDTEAKVIERAATYHRAWREAEGDSGLLPLIFLFLCKSDPMAYLMVPYYPRANLNAVQANMPLNSEETLKVMKGVAQGLHTLHKADIIHGSLHQNNVFALNREQGIVGDFDFTKSVSQRASVNMMVGDLSLMSPELKMGKPASPGSDLYAYGCLLLWLSVQNQEFEINKDGIPKVDQFHLDDKVKSLLCSLICYRSSMTAEQVLNAECFLMPKEQSVPNPEKDTEYTLYKKEEEIKTENLDKCMEKTRNGEANFDC

SEQ ID NO: 24020 - protein, 143 aa, Homo sapiens
MLNWRGPHLALSPRASWSLRLRTKLREVFRWSRGAGPDRTAPGARKMLGNKRLGLSGLTLALSLLVCLGALAEAYPSKPDNPGEDAPAEDMARYYSALRHYINLITRQRYGKRSSPETLISDLLMRESTENVPRTRLEDPAMW

SEQ ID NO: 24021 - protein, 54 aa, Homo sapiens
LFMTAYFLVSALAEMPDSAAALLGTCCKLQIIPTLCHLVSNLPGGTLEWIGMGK

SEQ ID NO: 24022 - protein, 311 aa, Homo sapiens
LFFSSRVYVAAFAISAYASSYYRAGSKPFNPVLGETYECIREDKGFQFFSEQVSHHPPISACHAESRNFVFWQDVRWKNKFWGKSMEIVPIGTTHVTLPVFGDHFEWNKVTSCIHNILSGQRWIEHYGEIVIKNLHDDSCYCKVNFIKAKYWSTNAHEIEGTVFDRSGKAVHRLFGKWHESIYCGGGSSSACVWRANPMPKGYEQYYSFTQFALELNEMDPSSKSLLPPTDTRFRPDQRFLEEGNLEEAEIQKQRIEQLQRERRRVLEENHVEHQPRFFRKSDDDSWVSNGTYLELRKDLGFSKLDHPVLW

SEQ ID NO: 24023 - protein, 45 aa, Homo sapiens
LETGLGCFSVALGAWGSSVLWVCASSFSRSLLADCSDVPGWKTCL

SEQ ID NO: 24024 - protein, 144 aa, Homo sapiens
LHLHRYLSADRRVLGLREWGRPASERECSLCQRLKRELNMGDVEKGKKIFIMKCSQCHTVEKGGKHKTGPNLHGLFGRKTGQAPGYSYTAANKNKGIIWGEDTLMEYLENPKKYIPGTKMIFVGIKKKEERADLIAYLKKATNE

SEQ ID NO: 24025 - protein, 73 aa, Homo sapiens [sequence omitted]

SEQ ID NO: 24026 - protein, 402 aa, Homo sapiens
VRRCSSQSCFSSSGSSHYSARTSPVRVRPRRSLSSRSAAGNRAEATESAMEKTLETVPLERKKREKEQFRKLFIGGLSFETTEESLRNYYEQWGKLTDCVVMRDPASKRSRGFGFVTFSSMAEVDAAMAARPHSIDGRVVEPKRAVAREESGKPGAHVTVKKLFVGGIKEDTEEHHLRDYFEEYGKIDTIEIITDRQSGKKRGFGFVTFDDHDPVDKIVLQKYHTINGHNAEVRKALSRQEMQEVQSSRSGRGGNFGFGDSRGGGGNFGPGPGSNFRGGSDGYGSGRGFGDGYNGYGGGPGGGNFGGSPGYGGGRGGYGGGGPGYGNQGGGYGGGYDNYGGGNYGSGNYNDFGNYNQQPSNYGPMKSGNFGGSRNMGGPYGGGNYGPGGSGGSGGYGGRSRY

SEQ ID NO: 24027 - protein, 390 aa, Homo sapiens
VRRCSSQSCFSSSGSSHYSARTSPVRVRPRRSLSSRSAAGNRAEATESAMEREKEQFRKLFIGGLSFETTEESLRNYYEQWGKLTDCVVMRDPASKRSRGFGFVTFSSMAEVDAAMAARPHSIDGRVVEPKRAVAREESGKPGAHVTVKKLFVGGIKEDTEEHHLRDYFEEYGKIDTIEIITDRQSGKKRGFGFVTFDDHDPVDKIVLQKYHTINGHNAEVRKALSRQEMQEVQSSRSGRGGNFGFGDSRGGGGNFGPGPGSNFRGGSDGYGSGRGFGDGYNGYGGGPGGGNFGGSPGYGGGRGGYGGGGPGYGNQGGGYGGGYDNYGGGNYGSGNYNDFGNYNQQPSNYGPMKSGNFGGSRNMGGPYGGGNYGPGGSGGSGGYGGRSRY

SEQ ID NO: 24028 - protein, 310 aa, Homo sapiens
VRRCSSQSCFSSSGSSHYSARTSPVRVRPRRSLSSRSAAGNRAEATESAMEKTLETVPLERKKREKEQFRKLFIGGLSFETTEESLRNYYEQWGKLTDCVVMRDPASKRSRGFGFVTFSSMAEVDAAMAARPHSIDGRVVEPKRAVAREESGKPGAHVTVKKLFVGGIKEDTEEHHLRDYFEEYGKIDTIEIITDRQSGKKRGFGFVTFDDHDPVDKIVLQKYHTINGHNAEVRKALSRQEMQEDLEVAILEVAPVMEEEEEDMVVEDLDMATRVGATEVVMTTMEEEIMEVEITMILEIITSNLLTTVQ

SEQ ID NO: 24029 - protein, 50 aa, Homo sapiens
VTGVSSAVAFLLGSLSGWRQNRTPPTSSPLRCEGVESSRRWGRGSWELKN

SEQ ID NO: 24030 - protein, 8 aa, Homo sapiens
MLLLLLLV

SEQ ID NO: 24031 - protein, 276 aa, Homo sapiens
LLYLFSSGITPLGPLHLQLCVCLLLVSLSAESLEIADGSGGGSRRLRTAYTNTQLLELEKEFHFNKYLCRPRRVEIAALLDLTERQVKVWFQNRRMKHKRQTQCKENQNSEGKCKSLEDSEKVEEDEEEKTLFEQALSVSGALLEREGYTFQQNALSQQQAPNGHNGDSQSFPVSPLTSNEKNLKHFQHQSPTVPNCLSTMGQNCGAGLNNDSPEALEVPSLQDFSVFSTDSCLQLSDAVSPSLPGSLDSPVDISADSLDFFTDTLTTIDLQHLNY

SEQ ID NO: 24032 - protein, 145 aa, Homo sapiens
MMSPDERRKKTRCLRRPKGRGCQEPWRANSSQPPWCKVPRGEEFWSSAYLERCLNSEPGIVSNSRRSGNRLFRCPGALQTNKQQKQMVTEPAVSFLGVGDDGERGKNRPLAGPWLGEVLRSAGTLRALCVYRPIPAPTTPSLRPR

SEQ ID NO: 24033 - protein, 84 aa, Homo sapiens
LGGFVFWFIQLWQMVTEPAVSFLGVGDDGERGKNRPLAGPWLGEVLRSAGTLRALCVYRPIPAPTTPSLRPRKIRYAATHHSPA

SEQ ID NO: 24034 - protein, 104 aa, Homo sapiens
MRVLVPACHSGPKPRHRVDCSLRWEMWKSQEAAARPLAPEISAGNGCGVWQFGKLSTTRNETWICSVSGCRAVGLASRSPALAMRALSPPKHRVPAPHSALIGS

SEQ ID NO: 24035 - protein, 38 aa, Homo sapiens
MQILPLTKSSHMVTFEKRCAREGCMEIAPQEVVWDSLD

SEQ ID NO: 24036 - protein, 228 aa, Homo sapiens
MADFDTYDDQAYSSFGSGRGSRGSAGGHGSRSQKELPTEPPYTAYVGNLPFNTVRGDIDAIFKDLSIRSVRLVRDKDTDKFKGFCYVEFDEVDSLKEALTYDGALLGDRSLRVDIAEGRKQDKGGFGFRKGGPDDRGFRDDFLGGRGGSRPGDRRTGPPMGSRFGDGPPLGGSNMDFREPTEEESAQRPRLQLKPRTVATPLNQVANPNSAIFGGARPREEVVQKEQK

SEQ ID NO: 24037 - protein, 301 aa, Homo sapiens
LWALREAAEVTAGRGAGAAWQPPYGSSELPPVSGTGAGGCGRQPAALQRVVSSPADVAEKADRIITMLPTSINAIEAYSGANGILKKVKKGSLLIDSSTIDPAVSKELAKEVEKMGAVFMDAPVSGGVGAARSGNLTFMVGGVEDEFAAAQELLGCMGSNVVYCGAVGTGQAAKICNNMLLAISMIGTAEAMNLGIRLGLDPKLLAKILNMSSGRCWSSDTYNPVPGVMDGVPSANNYQGGFGTTLMAKDLGLAQDSATSTKSPILLGSLAHQIYRMMCAKGYSKKDFSSVFQFLREEETF

SEQ ID NO: 24038 - protein, 123 aa, Homo sapiens
MFPPNYDQSKFEEHVESHWKVCPMCSEQFPPDYDQQVFERNWAGKRLLFPSIHAHGAEDGFGADGTLCGPGLIAVRLLIVHLLLVILAACRTREVQGLSGALISPQVHPATSRTGDVAVAEQR

SEQ ID NO: 24039 - protein, 342 aa, Homo sapiens
LQSAPRRLTWPGEARLQRPGPASGQRTEEGLDGAAKSERGHLATLARLRGMQRRHRAGGPRGRSGRCTQGGRRWRLPAPCASCSWCAAASRSRRCRARVPGALRLPASPASPVHQQGAPRSAQDQLAAEPPRRAHLQPRRQLHNQHHGLRLPPSGAAQTAGPAVQPDPLSAPQDLREALAAGRAVPGEQPLAGARPGHAGPAAQAAHPLRQRERDQPPKPRLLRGPGESSQAAAGRERPGGAAGRGLRSLGQPALPTSGVQPDPLSGQERLRPARQAALPQPLCQRATALPAPRGHLRTAALPLLPHPLGQQPAAPRAAHLPAPATSRPALAQGQPAHAPRA

SEQ ID NO: 24040 - protein, 55 aa, Homo sapiens
LVPAAHRGAWTAEGLGGSRDPPVPAAPRPPSAPTYPLTPIEKRAKARSGTETTNK

SEQ ID NO: 24041 - protein, 13 aa, Homo sapiens
LSKMRKLICGLLF

SEQ ID NO: 24042 - protein, 126 aa, Homo sapiens
MRLFLWNAVLTLFVTSLIGALIPEPEVKIEVLQKPFICHRKTKGGDLMLVHYEGYLEKDGSLFHSTHKHNNGQPIWFTLGILEALKGWDQGLKGMCVGEKRKLIIPPALGYGKEGKGNSISVFFLL

SEQ ID NO: 24043 - protein, 17 aa, Homo sapiens
LNYVLKSMKSRDLSLLL

SEQ ID NO: 24044 - protein, 15 aa, Homo sapiens
MALLLVLLASWGLGQ

SEQ ID NO: 24045 - protein, 329 aa, Homo sapiens
VPAAGTPSSPRLLVSRARVRPSASPAAPRRARRAPTAPLDAGRRPWTCGGLSGPAAAPGPCPLAPALAPALPALGAQRAGPARGRADMGAKQSGPAAANGRTRAYSGSDLPSSSSGGANGTAGGGGGARAAAAGRFPAQVPSAHQPSASGGAAAAAAAPAAPAAPRSRSLGGAVGSVASGARAAQSPFSIPNSSSGPYGSQDSVHSSPEDGGGGRDRPVGGSPGGPRLVIGSLPAHLSPHMFGGFKCPVCSKFVSSDEMDLHLVMCLTKPRITYNEDVLSKDAGECAICLEELQQGDTIARLPCLCIYHKGCIDEWFEVNRSCPEHPSD

SEQ ID NO: 24046 - protein, 50 aa, Homo sapiens
LVKDRFVAHLMMVLVNCSALSEIFKNQLNESNLQTIDNNILKIGKMVYCF

SEQ ID NO: 24047 - protein, 794 aa, Homo sapiens
LCRICGGDPAPRHAVVNVRQHARRVVYAAISSCSEPGGARRFRRHPLWTAQGRRLMPSPRPVLLRGARAALLLLLPPRLLARPSLLLRRSLSAASCPPISLPAAASRSSMDGAGAEEVLAPLRLAVRQQGDLVRKLKEDKAPQVDVDKAVAELKARKRVLEAKELALQPKDDIVDRAKMEDTLKRRFFYDQAFAIYGGVSGLYDFGPVGCALKNNIIQTWRQHFIQEEQILEIDCTMLTPEPVLKTSGHVDKFADFMVKDVKNGECFRADHLLKAHLQKLMSDKKCSVEKKSEMESVLAQLDNYGQQELADLFVNYNVKSPITGNDLSPPVSFNLMFKTFIGPGGNMPGYLRPETAQGIFLNFKRLLEFNQGKLPFAAAQIGNSFRNEISPRSGLIRVREFTMAEIEHFVDPSEKDHPKFQNVADLHLYLYSAKAQVSGQSARKMRLGDAVEQGVINNTVLGYFIGRIYLYLTKVGISPDKLRFRQHMENEMAHYACDCWDAESKTSYGWIEIVGCADRSCYDLSCHARATKVPLVAEKPLKEPKTVNVVQFEPSKGAIGKAYKKDAKLVMEYLAICDECYITEMEMLLNEKGEFTIETEGKTFQLTKDMINVKRFQKTLYVEEVVPNVIEPSFGLGRIMYTVFEHTFHVREGDEQRTFFSFPAVVAPFKCSVLPLSQNQEFMPFVKELSEALTRHGVSHKVDDSSGSIGRRYARTDEIGVAFGVTIDFDTVNKTPHTATLRDRDSMRQIRAEISELPSIVQDLANGNITWADVEARYPLFEGQETGKKETIEE

SEQ ID NO: 24048 - protein, 138 aa, Homo sapiens
LVKIYETDGIKGLYQGFNVSVQGIIIYRAAYFGIYDTAKGMLPDPRNTHIIISWMITQTVTAIAGLTSHPFDTVRCRMMMQSGRKGIDVMYTGTLDCWRKIVGDEGGKDFFKGAWSSVLRGMDGAFVLVLYGEIKKYT

SEQ ID NO: 24049 - protein, 80 aa, Homo sapiens
LYLTLLLSYLLPSSVQNSERGKKIGNVMVTTSRNVVQTGKAVGQSVGGAFSSAKTAMSSWLSTFTTSTSQSLTEPPDEKP

SEQ ID NO: 24050 - protein, 43 aa, Homo sapiens
LESMRPRTPGQRTQDLPPSRKWPVTILEATCHHLGNLGSKDPQ

SEQ ID NO: 24051 - protein, 12 aa, Homo sapiens
LLATVFLLIKWG

SEQ ID NO: 24052 - protein, 57 aa, Homo sapiens
LDTPSVFLCLYGLLGFLPSQRALLQWCGLPGSLILADHGEHPGLPPLHPQGPLGPVP

SEQ ID NO: 24053 - protein, 58 aa, Homo sapiens
LNPAPSVFLCLYGLLGFLPSQRALLQWCGLPGSLILADHGEHPGLPPLHPQGPLGPVP

SEQ ID NO: 24054 - protein, 192 aa, Homo sapiens; identical to SEQ ID NO: 18848

SEQ ID NO: 24055 - protein, 548 aa, Homo sapiens
VHSSEMQSPWKILTVAPLFLLLSLQSSASPANDDQSRPSLSNGHTCVEKLFLKTTCYLVIDKFGSDIIKLLSADMNADVVCHTLEFCKQNTGQPLCHLYPLPKETWKFTLQKARQIVKKSPILKYSRSGSDICSLPVLAKICQKIKLAMEQSVPFKDVDSDKYSVFPTLRGYHWRGRDCNDSDESVYPGRRPNNWDVHQDSNCNGIWGVDPKDGVPYEKKFCEGSQPRGIILLGDSAGAHFHISPEWITASQMSLNSFINLPTALTNELDWPQLSGATGFLDSTVGIKEKSIYLRLWKRNHCNHRDYQNISRNGASSRNLKKFIESLSRNKVLDYPAIVIYAMIGNDVCSGKSDPVPAMTTPEKLYSNVMQTLKHLNSHLPNGSHVILYGLPDGTFLWDNLHNRYHPLGQLNKDMTYAQLYSFLNCLQVSPCHGWMSSNKTLRTLTSERAEQLSNTLKKIAASEKFTNFNLFYMDFAFHEIIQEWQKRGGQPWQLIEPVDGFHPNEVALLLLADHFWKKVQLQWPQILGKENPFNPQIKQVFGDQGGH

SEQ ID NO: 24056 - protein, 580 aa, Homo sapiens
VHSSEMQSPWKILTVAPLFLLLSLQSSASPANDDQSRPSLSNGHTCVGCVLVVSVIEQLAQVHNSTVQASMERLCSYLPEKLFLKTTCYLVIDKFGSDIIKLLSADMNADVVCHTLEFCKQNTGQPLCHLYPLPKETWKFTLQKARQIVKKSPILKYSRSGSDICSLPVLAKICQKIKLAMEQSVPFKDVDSDKYSVFPTLRGYHWRGRDCNDSDESVYPGRRPNNWDVHQDSNCNGIWGVDPKDGVPYEKKFCEGSQPRGIILLGDSAGAHFHISPEWITASQMSLNSFINLPTALTNELDWPQLSGATGFLDSTVGIKEKSIYLRLWKRNHCNHRDYQNISRNGASSRNLKKFIESLSRNKVLDYPAIVIYAMIGNDVCSGKSDPVPAMTTPEKLYSNVMQTLKHLNSHLPNGSHVILYGLPDGTFLWDNLHNRYHPLGQLNKDMTYAQLYSFLNCLQVSPCHGWMSSNKTLRTLTSERAEQLSNTLKKIAASEKFTNFNLFYMDFAFHEIIQEWQKRGGQPWQLIEPVDGFHPNEVALLLLADHFWKKVQLQWPQILGKENPFNPQIKQVFGDQGGH

SEQ ID NO: 24057 - protein, 57 aa, Homo sapiens
VHSSEMQSPWKILTVAPLFLLLSLQSSASPANDDQSRPSLSNGHTCVASSAEKPQLS

SEQ ID NO: 24058 - protein, 71 aa, Homo sapiens
VGIPLGKVQWAGTRQGAGARRTRRPRVSWRRCRGRRLQLRSVRSGGEFAADLRMPCRCKMCLWPAGGRKRK

SEQ ID NO: 24059 - protein, 141 aa, Homo sapiens
LFFSLVLLFEYILLYKDGVMFQIDQATKQCSKMTLTQPWDPLDIPQNSTFEDQYSIGGPQEQITVQEWSDRKSARSYETWIGIYTVKDCYPVQETFTINYSVILSTRFFDIQLGIKDPSVFTPPSTCQMAQLEKMSEDCSW

SEQ ID NO: 24060 - protein, 416 aa, Homo sapiens
LALLVPCVPDGGAPRPDPAAPLCCRLEFGGRNSPAPQRISSSAKGQRKMRVAGREGRFLSAGVAAREGSAMFLSILVALCLWLHLALGVRGAPCEAVRIPMCRHMPWNITRMPNHLHHSTQENAILAIEQYEELVDVNCSAVLRFFLCAMYAPICTLEFLHDPIKPCKSVCQRARDDCEPLMKMYNHSWPESLACDELPVYDRGVCISPEAIVTDLPEDVKWIDITPDMMVQERPLDVDCKRLSPDRCKCKKVKPTLATYLSKNYSYVIHAKIKAVQRSGCNEVTTVVDVKEIFKSSSPIPRTQVPLITNSSCQCPHILPHQDVLIMCYEWRSRMMLLENCLVEKWRDQLSKRSIQWEERLQEQRRTVQDKKKTAGRTSRSNPPKPKGKPPAPKPASPKKNIKTRSAQKRTNPKRV

SEQ ID NO: 24061 - protein, 344 aa, Homo sapiens
MPPRMLVAPLPLHFLLAAVSSENRSGRRQWQQAVAAGSGPGRNSSRAIHWSLPRALVPATGTRASGSQKRQRPPKGQEALWSRPHSRHSAERAGGSHSDPGRLSAPLGLGLPSGRGRLTAMPGRAPLRTVPGALGAWLLGGLWAWTLCGLCSLGAVGAPRPCQAPQQWEGRQVMYQQSSGRNSRALLSYDGLNQRVRVLDERKALIPCKRLFEYILLYKDGVMFQIDQATKQCSKMTLTQPWDPLDIPQNSTFEDQYSIGGPQEQITVQEWSDRKSARSYETWIGIYTVKDCYPVQETFTINYSVILSTRFFDIQLGIKDPSVFTPPSTCQMAQLEKMSEDCSW

SEQ ID NO: 24062 - protein, 18 aa, Homo sapiens
MFVFFGRDRVSLCWPVWS

SEQ ID NO: 24063 - protein, 66 aa, Homo sapiens
LYYYLFTYRWLMGISLHLQLHLGSWNNLKYLFPDQQIRVPTYLGRHPSKALAVKSYTGTGRNQTKA

SEQ ID NO: 24064 - protein, 754 aa, Homo sapiens
LVPPPRPALTPPRSAAPRRFSRSSLARPSPPPPAPPPAPPRRRQPRCALCSSQLPGPAAMADIKTGIFAKNVQKRLNRAQEKVLQKLGKADETKDEQFEEYVQNFKRQEAEGTRLQRELRGYLAAIKGMQEASMKLTESLHEVYEPDWYGREDVKMVGEKCDVLWEDFHQKLVDGSLLTLDTYLGQFPDIKNRIAKRSRKLVDYDSARHHLEALQSSKRKDESRISKAEEEFQKAQKVFEEFNVDLQEELPSLWSRRVGFYVNTFKNVSSLEAKFHKEIAVLCHKLYEVMTKLGDQHADKAFTIQGAPSDSGPLRIAKTPSPPEEPSPLPSPTASPNHTLAPASPAPARPRSPSQTRKGPPVPPLPKVTPTKELQQENIISFFEDNFVPEISVTTPSQNEVPEVKKEETLLDLDFDPFKPEVTPAGSAGVTHSPMSQTLPWDLWTTSTDLVQPASGGSFNGFTQPQDTSLFTMQTDQSMICNLAESEQAPPTEPKAEEPLAAVTPAVGLDLGMDTRAEEPVEEAVIIPGADADAAVGTLVSAAEGAPGEEAEAEKATVPAGEGVSLEEAKIGTETTEGAESAQPEAEELEATVPQEKVIPSVVIEPASNHEEEGENEITIGAEPKETTEDAAPPGPTSETPELATEQKPIQDPQPTPSAPAMGAADQLASAREASQELPPGFLYKVETLHDFEAANSDELTLQRGDVVLVVPSDSEADQDAGWLVGVKESDWLQYRDLATYKGLFPENFTRRLD

SEQ ID NO: 24065 - protein, 197 aa, Homo sapiens
MSIRVTQKSYKVSTSGLRAFSSCSHMSGPGAHLSSLSFSRVGSTSFRAGLGRGYGGASSMGGITAVMVNQNLLSPLNLEVDPNIQAMRTQEKEQIKTLNKKFPSFIDKIRFLEQQNKMLETKGSLLQQQKMAWSNVDMFESYINNFMQRLETLSQEKPKLEAELGNMQRLAENFKKKYEDEINKRTEMENEFLLRCG

SEQ ID NO: 24066 - protein, 36 aa, Homo sapiens
MDFLLPLPPLRRQDQALPFLLLLSLLSMKTTEMKHL

SEQ ID NO: 24067 - protein, 37 aa, Homo sapiens
LSARSLSKFKMCAIFWFLKIRFQSSLIAFNKLQVHFK

SEQ ID NO: 24068 - protein, 77 aa, Homo sapiens [sequence omitted]

SEQ ID NO: 24069 - protein, 81 aa, Homo sapiens
MGIAFWKMKNAWICKNCIQPRLDYLQRGPAVRYSKFKMSEARPPPLLGQHTTHILKEVLRYDDRAIGELLSAGVVDQHETH

SEQ ID NO: 24070 - protein, 532 aa, Homo sapiens
LALAPGILRAGLEQRPRSGVIPGSCQQVLLKCQYHEEELRQLLPHDTRAGWWKSGDQKENLLKRRRKKKTPKKKIKKSTHTKKPAREGGGKAGPFKKAITTTFAARMPLLWLRGFLLASCWIIVRSSPTPGSEGHSAAPDCPSCALAALPKDVPNSQPEMVEAVKKHILNMLHLKKRPDVTQPVPKAALLNAIRKLHVGKVGENGYVEIEDDIGRRAEMNELMEQTSEIITFAESGTARKTLHFEISKEGSDLSVVERAEVWLFLKVPKANRTRTKVTIRLFQQQKHPQGSLDTGEEAEEVGLKGERSELLLSEKVVDARKSTWHVFPVSSSIQRLLDQGKSSLDVRIACEQCQESGASLVLLGKKKKKEEEGEGKKKGGGEGGAGADEEKEQSHRPFLMLQARQSEDHPHRRRRRGLECDGKVNICCKKQFFVSFKDIGWNDWIIAPSGYHANYCEGECPSHIAGTSGSSLSFHSTVINHYRMRGHSPFANLKSCCVPTKLRPMSMLYYDDGQNIIKKDIQNMIVEECGCS

SEQ ID NO: 24071 - protein, 13 aa, Homo sapiens
LPPQGIFGRRELK

SEQ ID NO: 24072 - protein, 291 aa, Homo sapiens
LKLLEVEHPAAKVLCELADLQDKEVGDGTTSVVIIAAELLKNEDELVKQKIHPTSVISGYGLACKEAVRYINENLIVNTDKVGRDCLINAAKTSTSSKIIGINGDFFANMVVDAVFAIKYTDIRGQPCYPVNSVNILKAHGKSQTESMLISGYALNCVVGSQGIPKRIVNAKIACLDFGLQKTKMKLGIQVVITDPEKLDQIRQRESDITKERIQKILVTGASIILTTGGIDDMCLKYFVEAGATAVRRVFKRDLKRIPKASGATILSTLANLKGKETFEAAVLGQAEEVV

SEQ ID NO: 24073 - protein, 434 aa, Homo sapiens
VLIFFGERNNADSMSAHSMLCERIAIAKELIKRAESLSRSRKGGIEGGAKLCSKLKAELKFLQKVEAGKVAIKESHLQSTNLTHLRAIVESAENLEEVVSVLHVFGYTDTLGEKQTLVVDVVANGGHTWVKAIGRKAEALHNIWLGRGQYGDKSIIEQAEDFLQASHQQPVQYSNPHIIFAFYNSVSSPMAEKLKEMGISVRGDIVAVNALLDHPEELQPSESESDDEGPELLQVTRVDRENILASVAFPTEIKVDVCKRVNLDITTLITYVSALSYGGCHFIFKEKVLTEQAEQERKEQVLPQLEAFMKDKELFACESAVKDFQSILDTLGGPGERERATVLIKRINVVPDQPSERALRLVASSKINSRSLTIFGTGDTLKAITMTANSGFVRAANNQGVKFSVFIHQPRALTESKEALATPLPKDYTTDSEH

SEQ ID NO: 24074 - protein, 170 aa, Homo sapiens
LALRVKMAERGYSFSLTTFRVLVHRARKLAQQYYLVYQEPIPTAQLVQRVASVMQEYTQSGGVRPFGVSLLICGWNEGRPYLFQSDPSGAYFAWKATAMGKNYVNGKTFLEKRYNEDLELEDAIHTAILTLKESFEGQMTEDNIEVGICNEAGFRRLTPTEVKDYLAAIA

SEQ ID NO: 24075 - protein, 12 aa, Homo sapiens
VRMCAAVLWLFG

SEQ ID NO: 24076 - protein, 165 aa, Homo sapiens
LKFGREEVMVPSLCVQDRDTAHHGSENQPSGRDVKAAEQSECPGAGDGGATLFEPSDFAALSPPGNVGVAGSAPPAKNGPDAFPPPPRPGSSLPACLQVAIRSDLFGEDKKPTTQRMGFYISRHLLECLSGFLSLSETQFGTETLSTAKLHFPSSSSLNGSHDLF

SEQ ID NO: 24077 - protein, 420 aa, Homo sapiens
LPKKILFDVAVVLCLLLLESAVVQFSPCFPPFSLKRYQCYVQQKRIQQEQHSSKIEGGIFSLFLGFKRDLGGQMPYPKRPTVKDPGSVVVQGVSKQVARSAFLISRLTPAVAITNLYQNRFLGLAAMASPSRNSQSRRRCKEPLRYSYNPDQFHNMDLRGGPHDGVTIPRSTSDTDLVTSDSRSTLMVSSSYYSIGHSQDLVIHWDIKEEVDAGDWIGMYLIDEVLSENFLDYKNRGVNGSHRGQIIWKIDASSYFVEPETKICFKYYHGVSGALRATTPSVTVKNSAAPIFKSIGADETVQGQGSRRLISFSLSDFQAMGLKKGMFFNPDPYLKISIQPGKHSIFPALPHHGQERRSKIIGNTVNPIWQAEQFSFVSLPTDVLEIEVKDKFAKSRPIIKRFLGKLSMPVQRLLERHAIG

SEQ ID NO: 24078 - protein, 25 aa, Homo sapiens
LEELVMLFVAWCFCCSQRCLLPLLP

SEQ ID NO: 24079 - protein, 987 aa, Homo sapiens
LLREDPGPTLPHLTPPPPLERVPERAGGRRARPLPGAEPRPRGGSEGGGSGDLAALMASPGIEVELLGKGHSDLGEVAPEIKASERRTAVAIADLEWREMEGDDCEFRYGDGTNEAQDNDFPTVERSRLQEMLSLLGLETYQVQKLSLQDSLQISFDSMKNWAPQVPKDLPWNFLRKLQALNADARNTTMVLDVLPDARPVEKESQMEEEIIYWDPADDLAADIYSFSELPTPDTPVNPLDLLCALLLSSDSFLQQEIALKMALCQFALPLVLPDSENHYHTFLLWAMRGIVRTWWSQPPRGMGSFREDSVVLSRAPAFAFVRMDVSSNSKSQLLNAVLSPGHRQWDCFWHRDLNLGTNAREISDGLVEISWFFPSGREDLDIFPEPVAFLNLRGDIGSHWLQFKLLTEISSAVFILTDNISKKEYKLLYSMKESTTKYYFILSPYRGKRNTNLRFLNKLIPVLKIDHSHVLVKVSSTDSDSFVKRIRAIVGNVLRAPCRRVSVEDMAHAARKLGLKVDEDCEECQKAKDRMERITRKIKDSDAYRRDELRLQGDPWRKAAQVEKEFCQLQWAVDPPEKHRAELRRRLLELRMQQNGHDPSSGVQEFISGISSPSLSEKQYFLRWMEWGLARVAQPRLRQPPETLLTLRPKHGGTTDVGEPLWPEPLGVEHFLREMGQFYEAESCLVEAGRLPAGQRRFAHFPGLASELLLTGLPLELIDGSTLSMPVRWVTGLLKELHVRLERRSRLVVLSTVGVPGTGKSTLLNTMFGLRFATGKSCGPRGAFMQLITVAEGFSQDLGCDHILVIDSGGLIGGALTSAGDRFELEASLATLLMGLSNVTVISLAETKDIPAAILHAFLRLEKTGHMPNYQFVYQNLHDVSVPGPRPRDKRQLLDPPGDLSRAAAQMEKQGDGFRALAGLAFCDPEKQHIWHIPGLWHGAPPMAAVSLAYSEAIFELKRCLLENIRNGLSNQNKNIQQLIELVRRL

SEQ ID NO: 24080 - protein, 45 aa, Homo sapiens
MASPGSGITGQRAFRFGRSSPRNKSIRETNSCGHCRFGMERNGRR

SEQ ID NO: 24081 - protein, 167 aa, Homo sapiens
MVPASASGEASGSLQSWQKAKEKQACHLELTDLQRDPPAQCSAGPVGDDLFHWQATIMGPNDSPYQGGVFFLTIHFPTDYPFKPPKVAFTTKIYHPNINSNGSICLDILRSQWSPALTVSKVLLSICSLLCDPNPDDPLVPEIAHTYKADREKYNRLAREWTQKYAM

SEQ ID NO: 24082 - protein, 407 aa, Homo sapiens
LPQGALFTYEGNSNDIRVAGTGEGGLEEMVEELNSGKVMYAFCRVKDPNSGLPKFVLINWTGEGVNDVRKGACASHVSTMASFLKGAHVTINARAEEDVEPECIMEKVAKASGANYSFHKESGRFQDVGPQAPVGSVYQKTNAVSEIKRVGKDSFWAKAEKEEENRRLEEKRRAEEAQRQLEQERRERELREAARREQRYQEQGGEASPQSRTWEQQQEVVSRNRNEQESAVHPREIFKQKERAMSTTSISSPQPGKLRSPFLQKQLTQPETHFGREPAAAISRPRADLPAEEPAPSTPPCLVQAEEEAVYEEPPEQETFYEQPPLVQQQGAGSEHIDHHIQGQGLSGQGLCARALYDYQAADDTEISFDPENLITGIEVIDEGWWRGYGPDGHFGMFPANYVELIE

SEQ ID NO: 24083 - protein, 169 aa, Homo sapiens
LGQSRDGHTEARKEEENRRLEEKRRAEEAQRQLEQERRERELREAARREQRYQEQGGEASPQRTWEQQQEVVSRNRNEQVRWGCSTCLDLSWPHAEVPDLGLRAQPRPGQRLPCSQLGQVGIWAPQEVAVERKAKGGSVGLGPHLVLGEALGAPWLLCFTSFFNVTFYF

SEQ ID NO: 24084 - protein, 131 aa, Homo sapiens
MSTTSISSPQPDLPAEEPAPSTPPCLVQAEEEAVYEEPPEQETFYEQPPLVQQQGAGSEHIDHHIQGQGLSGQGLCARALYDYQAADDTEISFDPENLITGIEVIDEGWWRGYGPDGHFGMFPANYVELIE

SEQ ID NO: 24085 - protein, 53 aa, Homo sapiens
LLLPVLGGRFCLVEACEAPVMPLIEAPSAHHRQPHLVRAVQDGPEGADGPLQH

SEQ ID NO: 24086 - protein, 191 aa, Homo sapiens
MKLYSLSVLYKGEAKVVLLKAAYDVSSFSFFQRSSVQEFMTFTSQLIVERSSKGTRASVKEQDYLCHVYVRNDSLAGVVIADNEYPSRVAFTLLEKVLDEFSKQVDRIDWPVGSPATIHYPALDGHLSRYQNPREADPMTKVQAELDETKIILHNTMESLLERGEKLDDLVSKSEVLGTQSKAFYKTKIFN

SEQ ID NO: 24087 - protein, 567 aa, Homo sapiens
VPASGSRSRRRPSAAERTPSPSAAAMATTVTCTRFTDEYQLYEDIGKGAFSVVRRCVKLCTGHEYAAKIINTKKLSARDHQKLEREARICRLLKHSNIVRLHDSISEEGFHYLVFDLVTGGELFEDIVAREYYSEADASHCIQQILEAVLHCHQMGVVHRDLKPENLLLASKCKGAAVKLADFGLAIEVQGDQQAWFGFAGTPGYLSPEVLRKEAYGKPVDIWACGVILYILLVGYPPFWDEDQHKLYQQIKAGAYDFPSPEWDTVTPEAKNLINQMLTINPAKRITAHEALKHPWVCQRSTVASMMHRQETVECLKKFNARRKLKGAILTTMLATRNFSVGRQTTAPATMSTAASGTTMGLVEQAKSLLNKKADGVKPQTNSTKNSAAATSPKGTLPPAALEPQTTVIHNPVDGIKESSDSANTTIEDEDAKARKQEIIKTTEQLIEAVNNGDFEAYAKICDPGLTSFEPEALGNLVEGMDFHRFYFENLLAKNSKPIHTTILNPHVHVIGEDAACIAYIRLTQYIDGQGRPRTSQSEETRVWHRRDGKWQNVHFHCSGAPVAPLQ

SEQ ID NO: 24088 - protein, 543 aa, Homo sapiens
VPASGSRSRRRPSAAERTPSPSAAAMATTVTCTRFTDEYQLYEDIGKGAFSVVRRCVKLCTGHEYAAKIINTKKLSARDHQKLEREARICRLLKHSNIVRLHDSISEEGFHYLVFDLVTGGELFEDIVAREYYSEADASHCIQQILEAVLHCHQMGVVHRDLKPENLLLASKCKGAAVKLADFGLAIEVQGDQQAWFGFAGTPGYLSPEVLRKEAYGKPVDIWACGVILYILLVGYPPFWDEDQHKLYQQIKAGAYDFPSPEWDTVTPEAKNLINQMLTINPAKRITAHEALKHPWVCQRSTVASMMHRQETVECLKKFNARRKLKGAILTTMLATRNFSAAKSLLNKKADGVKPQTNSTKNSAAATSPKGTLPPAALEPQTTVIHNPVDGIKESSDSANTTIEDEDAKARKQEIIKTTEQLIEAVNNGDFEAYAKICDPGLTSFEPEALGNLVEGMDFHRFYFENLLAKNSKPIHTTILNPHVHVIGEDAACIAYIRLTQYIDGQGRPRTSQSEETRVWHRRDGKWQNVHFHCSGAPVAPLQ

SEQ ID NO: 24089 - protein, 691 aa, Homo sapiens
VPASGSRSRRRPSAAERTPSPSAAAMATTVTCTRFTDEYQLYEDIGKGAFSVVRRCVKLCTGHEYAAKIINTKKLSARDHQKLEREARICRLLKHSNIVRLHDSISEEGFHYLVFDLVTGGELFEDIVAREYYSEADASHCIQQILEAVLHCHQMGVVHRDLKPENLLLASKCKGAAVKLADFGLAIEVQGDQQAWFGFAGTPGYLSPEVLRKEAYGKPVDIWACGVILYILLVGYPPFWDEDQHKLYQQIKAGAYDFPSPEWDTVTPEAKNLINQMLTINPAKRITAHEALKHPWVCQRSTVASMMHRQETVECLKKFNARRKLKGAILTTMLATRNFSVGRQTTAPATMSTAASGTTMGLVEQAKSLLNKKADGVKPQTNSTKNSAAATSPKGTLPPAALEPQTTVIHNPVDGIKESSDSANTTIEDEDAKAPRVPDILSSVRRGSGAPEAEGPLPCPSPAPFSPLPAPSPRISDILNSVRRGSGTPEAEGPLSAGPPPCLSPALLGPLSSPSPRISDILNSVRRGSGTPEAEGPSPVGPPPCPSPTIPGPLPTPSRKQEIIKTTEQLIEAVNNGDFEAYAKICDPGLTSFEPEALGNLVEGMDFHRFYFENLLAKNSKPIHTTILNPHVHVIGEDAACIAYIRLTQYIDGQGRPRTSQSEETRVWHRRDGKWQNVHFHCSGAPVAPLQ

SEQ ID NO: 24090 - protein, 528 aa, Homo sapiens
VPASGSRSRRRPSAAERTPSPSAAAMATTVTCTRFTDEYQLYEDIGKGAFSVVRRCVKLCTGHEYAAKIINTKKLSARDHQKLEREARICRLLKHSNIVRLHDSISEEGFHYLVFDLVTGGELFEDIVAREYYSEADASHCIQQILEAVLHCHQMGVVHRDLKPENLLLASKCKGAAVKLADFGLAIEVQGDQQAWFGFAGTPGYLSPEVLRKEAYGKPVDIWACGVILYILLVGYPPFWDEDQHKLYQQIKAGAYDFPSPEWDTVTPEAKNLINQMLTINPAKRITAHEALKHPWVCQRSTVASMMHRQETVECLKKFNARRKLKGAILTTMLATRNFSAAKSLLNKKADGVKPQTNSTKNSAAATSPKGTLPPAALESSDSANTTIEDEDAKARKQEIIKTTEQLIEAVNNGDFEAYAKICDPGLTSFEPEALGNLVEGMDFHRFYFENLLAKNSKPIHTTILNPHVHVIGEDAACIAYIRLTQYIDGQGRPRTSQSEETRVWHRRDGKWQNVHFHCSGAPVAPLQ

SEQ ID NO: 24091 - protein, 158 aa, Homo sapiens
LPQTPKVLELQVSVALSSSSIRVAMLEENGERVLMEGKLTHKINTESSLWSLEPGKCVLVNLSKVGEYWWNAILEGEEPIDIDKINKERSMATVDEEEQAVLDRLTFDYHQKLQGKPQSHELKVHEMLKKGWDAEGSPFRGQRFDPAMFNISPGAVQF

SEQ ID NO: 24092 - protein, 1327 aa, Homo sapiens
LRGWLLWALLLRLAQSEPYTTIHQPGYCAFYDECGKNPELSGSLMTLSNVSCLSNTPARKITGDHLILLQKICPRLYTGPNTQACCSAKQLVSLEASLSITKALLTRCPACSDNFVNLHCHNTCSPNQSLFINVTRVAQLGAGQLPAVVAYEAFYQHSFAEQSYDSCSRVRVPAAATLAVGTMCGVYGSALCNAQRWLNFQGDTGNGLAPLDITFHLLEPGQAVGSGIQPLNEGVARCNESQGDDVATCSCQDCAASCPAIARPQALDSTFYLGQMPGSLVLIIILCSVFAVVTILLVGFRVAPARDKSKMVDPKKGTSLSDKLSFSTHTLLGQFFQGWGTWVASWPLTILVLSVIPVVALAAGLVFTELTTDPVELWSAPNSQARSEKAFHDQHFGPFFRTNQVILTAPNRSSYRYDSLLLGPKNFSGILDLDLLLELLELQERLRHLQVWSPEAQRNISLQDICYAPLNPDNTSLYDCCINSLLQYFQNNRTLLLLTANQTLMGQTSQVDWKDHFLYCANAPLTFKDGTALALSCMADYGAPVFPFLAIGGYKGKDYSEAEALIMTFSLNNYPAGDPRLAQAKLWEEAFLEEMRAFQRRMAGMFQVTFMAERSLEDEINRTTAEDLPIFATSYIVIFLYISLALGSYSSWSRVMVDSKATLGLGGVAVVLGAVMAAMGFFSYLGIRSSLVILQVVPFLVLSVGADNIFIFVLEYQRLPRRPGEPREVHIGRALGRVAPSMLLCSLSEAICFFLGALTPMPAVRTFALTSGLAVILDFLLQMSAFVALLSLDSKRQEASRLDVCCCVKPQELPPPGQGEGLLLGFFQKAYAPFLLHWITRGVVLLLFLALFGVSLYSMCHISVGLDQELALPKDSYLLDYFLFLNRYFEVGAPVYFVTTLGYNFSSEAGMNAICSSAGCNNFSFTQKIQYATEFPEQSYLAIPASSWVDDFIDWLTPSSCCRLYISGPNKDKFCPSTVNSLNCLKNCMSITMGSVRPSVEQFHKYLPWFLNDRPNIKCPKGGLAAYSTSVNLTSDGQVLASRFMAYHKPLKNSQDYTEALRAARELAANITADLRKVPGTDPAFEVFPYTITNVFYEQYLTILPEGLFMLSLCLVPTFAVSCLLLGLDLRSGLLNLLSIVMILVDTVGFMALWGISYNAVSLINLVSAVGMSVEFVSHITRSFAISTKPTWLERAKEATISMGSAVFAGVAMTNLPGILVLGLAKAQLIQIFFFRLNLLITLLGLLHGLVFLPVILSYVGPDVNPALALEQKRAEEAVAAVMVASCPNHPSRVSTADNIYVNHSFEGSIKGAGAISNFLPNNGRQF

SEQ ID NO: 24093 - protein, 573 aa, Homo sapiens
LVVALLPLASVAFFLQRVRAALLSSAMEDSEALGFEHMGLDPRLLQAVTDLGWSRPTLIQEKAIPLALEGKDLLARARTGSGKTAAYAIPMLQLLLHRKATGPVVEQAVRGLVLVPTKELARQAQSMIQQLATYCARDVRVANVSAAEDSVSQRAVLMEKPDVVVGTPSRILSHLQQDSLKLRDSLELLVVDEADLLFSFGFEEELKSLLCHLPRIYQAFLMSATFNEDVQALKELILHNPVTLKLQESQLPGPDQLQQFQVVCETEEDKFLLLYALLKLSLIRGKSLLFVNTLERSYRLRLFLEQFSIPTCVLNGELPLRSRCHIISQFNQGFYDCVIATDAEVLGAPVKGKRRGRGPKGDKASDPEAGVARGIDFHHVSAVLNFDLPPTPEAYIHRAGRTARANNPGIVLTFVLPTEQFHLGKIEELLSGENRGPILLPYQFRMEEIEGFRYRCRDAMRSVTKQAIREARLKEIKEELLHSEKLKTYFEDNPRDLQLLRHDLPLHPAVVKPHLGHVPDYLVPPALRGLVRPHKKRKKLSSSCRKAKRAKSQNPLRSFKHKGKKFRPTAKPS

SEQ ID NO: 24094 - protein, 401 aa, Homo sapiens
LVVALLPLASVAFFLQRVRAALLSSAMEDSEALGFEHMGLDPRLLQAVTDLGWSRPTLIQEKAIPLALEGKDLLARARTGSGKTAAYAIPMLQLLLHRKATGPVVEQAVRGLVLVPTKELARQAQSMIQQLATYCARDVRVANVSAAEDSVSQRAVLMEKPDVVVGTPSRILSHLQQDSLKLRDSLELLVVDEADLLFSFGFEEELKSLLCHLPRIYQAFLMSATFNEDVQALKELILHNPVTLKLQESQLPGPDQLQQFQVVCETEEDKFLLLYALLKLSLIRGKSLLFVNTLERSYRLRLFLEQFSIPTCVLNGELPLRSRCHIISQFNQGFYDCVIATDAEVLGAPVKGKRRGRGPKGDKASDPEAGVARGIDFHHVSAVLNFDLPPTPEAYIHRAGR

SEQ ID NO: 24095 - protein, 18 aa, Homo sapiens
MKTLSITFCFLFVHLRSR

SEQ ID NO: 24096 - protein, 57 aa, Homo sapiens
MAGVGAGPLRAMGRQALLLLALCATGAQGLYFHIGETEKRCFIEEIPDETMVIGQAG

SEQ ID NO: 24097 - protein, 72 aa, Homo sapiens
LVLFPHLLWDFLLLSSPSLHKMPQPPCGQLLSLLPVLYPVPPTSPPTHLPGLLVSSTLELLHEARCLAGSLW

SEQ ID NO: 24098 - protein, 112 aa, Homo sapiens
LSGSGGGGRCCESGGGGAGRQREGARPSGGGVGAENMAGGKAGKDSGKAKAKAVSRSQRAGLQVLELAGNASKDLKVKRITPRHLQLAIRGDEELDSLIKATIAGGEKRRCS

SEQ ID NO: 24099 - protein, 102 aa, Homo sapiens
LSGSGGGGRCCESGGGGAGRQREGARPSGGGVGAENMAGGKAGKDSGKAKAKAVSRSQRAGLQFPVGRIHRHLKTRTTSHGRVGATAAVYSAAILEYLTAEV

SEQ ID NO: 24100 - protein, 158 aa, Homo sapiens
LSGSGGGGRCCESGGGGAGRQREGARPSGGGVGAENMAGGKAGKDSGKAKAKAVSRSQRAGLQFPVGRIHRHLKTRTTSHGRVGATAAVYSAAILEYLTAEVLELAGNASKDLKVKRITPRHLQLAIRGDEELDSLIKATIAGGGMYYYLSLDSYWSF

SEQ ID NO: 24101 - protein, 13 aa, Homo sapiens
LHLFPSRWEPWLR

SEQ ID NO: 24102 - protein, 32 aa, Homo sapiens
LLAAGLPGRAGRAAGAARGDMEEEGKKGKKTF

SEQ ID NO: 24103 - protein, 291 aa, Homo sapiens
LLAAGLPGRAGRAAGAARGDMEEEGKKGKKPGIVSPFKRVFLKGEKSRDKKAHEKVTERRPLHTVVLSLPERVEPDRLLSDYIEKEVKYLGQLTSIPGYLNPSSRTEILHFIDNAKRAHQLPGHLTQEHDAVLSLSAYNVKLAWRDGEDIILRVPIHDIAAVSYVRDDAAHLVVLKTAQDPGISPSQSLCAESSRGLSAGSLSESAVGPVEACCLVILAAESKVAAEELCCLLGQVFQVVYTESTIDFLDRAIFDGASTPTHHLSLHSAASLNLWMWVVHHPTARPSVRAS

SEQ ID NO: 24104 - protein, 464 aa, Homo sapiens
LLAAGLPGRAGRAAGAARGDMEEEGKKGKKPGIVSPFKRVFLKGEKSRDKKAHEKVTERRPLHTVVLSLPERVEPDRLLSDYIEKEVKYLGQLTSIPGYLNPSSRTEILHFIDNAKRAHQLPGHLTQEHDAVLSLSAYNVKLAWRDGEDIILRVPIHDIAAVSYVRDDAAHLVVLKTAQDPGISPSQSLCAESSRGLSAGSLSESAVGPVEACCLVILAAESKVAAEELCCLLGQVFQVVYTESTIDFLDRAIFDGASTPTHHLSLHSDDSSTKVDIKETYEVEASTFCFPESVDVGGASPHSKTISESELSASATELLQDYMLTLRTKLSSQEIQQFAALLHEYRNGASIHEFCINLRQLYGDSRKFLLLGLRPFIPEKDSQHFENFLETIGVKDGRGIITDSFGRHRRALSTTSSSTTNGNRATGSSDDRSAPSEGDEWDRMISDISSDIEALGCSMDQDSA

SEQ ID NO: 24105 - protein, 373 aa, Homo sapiens
LLAAGLPGRAGRAAGAARGDMEEEGKKGKKPGIVSPFKRVFLKGEKSRDKKAHEKVTERRPLHTVVLSLPERVEPDRLLSDYIEKEVKYLGQLTSIPGYLNPSSRTEILHFIDNAKRAHQLPGHLTQEHDAVLSLSAYNVKLAWRDGEDIILRVPIHDIAAVSYVRDDAAHLVVLKTDDSSTKVDIKETYEVEASTFCFPESVDVGGASPHSKTISESELSASATELLQDYMLTLRTKLSSQEIQQFAALLHEYRNGASIHEFCINLRQLYGDSRKFLLLGLRPFIPEKDSQHFENFLETIGVKDGRGIITDSFGRHRRALSTTSSSTTNGNRATGSSDDRSAPSEGDEWDRMISDISSDIEALGCSMDQDSA

SEQ ID NO: 24106 - protein, 406 aa, Homo sapiens
LLAAGLPGRAGRAAGAARGDMEEEGKKGKKYLGQLTSIPGYLNPSSRTEILHFIDNAKRAHQLPGHLTQEHDAVLSLSAYNVKLAWRDGEDIILRVPIHDIAAVSYVRDDAAHLVVLKTAQDPGISPSQSLCAESSRGLSAGSLSESAVGPVEACCLVILAAESKVAAEELCCLLGQVFQVVYTESTIDFLDRAIFDGASTPTHHLSLHSDDSSTKVDIKETYEVEASTFCFPESVDVGGASPHSKTISESELSASATELLQDYMLTLRTKLSSQEIQQFAALLHEYRNGASIHEFCINLRQLYGDSRKFLLLGLRPFIPEKDSQHFENFLETIGVKDGRGIITDSFGRHRRALSTTSSSTTNGNRATGSSDDRSAPSEGDEWDRMISDISSDIEALGCSMDQDSA

SEQ ID NO: 24107 - protein, 1124 aa, Homo sapiens
LHGAEMAGAPRGGGGGGGGAGEPGGAERAAGTSRRRGLRACDEEFACPELEALFRGYTLRLEQAATLKALAVLSLLAGALALAELLGAPGPAPGLAKGSHPVHCVLFLALLVVTNVRSLQVPQLQQVGQLALLFSLTFALLCCPFALGGPARGSAGAAGGPATAEQGVWQLLLVTFVSYALLPVRSLLAIGFGLVVAASHLLVTATLVPAKRPRLWRTLGANALLFVGVNMYGVFVRILTERSQRKAFLQARSCIEDRLRLEDENEKQERLLMSLLPRNVAMEMKEDFLKPPERIFHKIYIQRHDNVSILFADIVGFTGLASQCTAQELVKLLNELFGKFDELATENHCRRIKILGDCYYCVSGLTQPKTDHAHCCVEMGLDMIDTITSVAEATEVDLNMRVGLHTGRVLCGVLGLRKWQYDVWSNDVTLANVMEAAGLPGKVHITKTTLACLNGDYEVEPGYGHERNSFLKTHNIETFFIVPSHRRKIFPGLILSDIKPAKRMKFKTVCYLLVQLMHCRKMFKAEIPFSNVMTCEDDDKRRALRTASEKLRNRSSFSTNVVYTTPGTRVNRYISRLLEARQTELEMADLNFFTLKYKHVEREQKYHQLQDEYFTSAVVLTLILAALFGLVYLLIFPQSVVVLLLLVFCICFLVACVLYLHITRVQCFPGCLTIQIRTVLCIFIVVLIYSVAQGCVVGCLPWAWSSKPNSSLVVLSSGGQRTALPTLPCESTHHALLCCLVGTLPLAIFFRVSSLPKMILLSGLTTSYILVLELSGYTRTGGGAVSGRSYEPIVAILLFSCALALHARQVDIRLRLDYLWAAQAEEEREDMEKVKLDNRRILFNLLPAHVAQHFLMSNPRNMDLYYQSYSQVGVMFASIPNFNDFYIELDGNNMGVECLRLLNEIIADFDELMEKDFYKDIEKIKTIGSTYMAAVGLAPTSGTKAKKSISSHLSTLADFAIEMFDVLDEINYQSYNDFVLRVGINVGPVVAGVIGARRPQYDIWGNTVNVASRMDSTGVQGRIQVTEEVHRLLRRCPYHFVCRGKVSVKGKGEMLTYFLEGRTDGNGSQIRSLGLDRKMCPFGRAGLQGRRPPVCPMPGVSVRAGLPPHSPGQYLPSAAAGKEA

SEQ ID NO: 24108 - protein, 333 aa, Homo sapiens
LVQVARPVPFIRCALCPASIGHRHPIQRASAAAPPPPSQRALATAPPSLAQSLGHRPPPPAQRASAPVCCSRLEMSEVPVARVWLVLLLLTVQVGVTAGAPWQCAPCSAEKLALCPPVSASCSEVTRSAGCGCCPMCALPLGAACGVATARCARGLSCRALPGEQQPLHALTRGQGACVQESDASAPHAAEAGSPESPESTEITEEELLDNFHLMAPSEEDHSILWDAISTYDGSKALHVTNIKKWKEPCRIELYRVVESLAKAQETSGEEISKFYLPNCNKNGFYHSRQCETSMDGEAGLCWCVYPWNGKRIPGSPEIRGDPNCQIYFNVQN

SEQ ID NO: 24109 - protein, 331 aa, Homo sapiens
LVQVARPVPFIRCALCPASIGHRHPIQRASAAAPPPPSQRALATAPPSLAQSLGHRPPPPAQRASAPVCCSRLEMSEVPVARVWLVLLLLTVQVGVTAGAPWQCAPCSAEKLALCPPVSASCSEVTRSAGCGCCPMCALPLGAACGVATARCARGLSCRALPGEQQPLHALTRGQGACVQESDASAPHAAEAGSPESPESTEITEEELLDNFHLMAPSEEDHSILWDAISTYDGSKALHVTNIKKWKEPCRIELYRVVESLAKAQETSGEEISKFYLPNCNKNGFYHSRQTSMDGEAGLCWCVYPWNGKRIPGSPEIRGDPNCQIYFNVQN

SEQ ID NO: 24110 - protein, 142 aa, Homo sapiens
LQALLDGRGLCVNASAVSRLRAYLLPAPPAPGNASESEEDRSAGSVESPSVSSTHRVSDPKFHPLHSKIIIIKKGHAKDSQRYKVDYESQSTDTQNFSSESKRETEYVRAFPLVKGGGQDLPSLGTQSLLRAILTQQTPAPG

SEQ ID NO: 24111 - protein, 41 aa, Homo sapiens
LDSTASRRVLSPHPCAPSLPSSVPRLQASCSGRDPRSGPLR

SEQ ID NO: 24112 - protein, 209 aa, Homo sapiens
LRVQMARYGRRDLPRSSQEEPSGRSWGGRYGRRSRSPRERHRSQSRGPSYSRSRSRSHYGGSRYSPSPYRRSRYSRSPYRRSHYRGSRYGPSPYSRSYSWHHYSRSPYRESHYRESRYRRSPYIRSSRNRSPYRRSHSKSGSRSRSPSISKSSSPRRSKSSSVSRSCSRSMSRSTSGSPPPTSKRESKSRSRSKSPPKSPEGEKGQVPS

SEQ ID NO: 24113 - protein, 122 aa, Homo sapiens
MGFHFCIWIIFLLPPPCKKCLSPPTMNLRPPKSCGNVFYWVLVLNSGLLYKFCQTIKCRANWRPARAPRGWNEATERHQERRTQMETEMGGISTTYWHRLCTCTDRRAEKLVMDGNNCWFHK

SEQ ID NO: 24114 - protein, 36 aa, Homo sapiens
VDMINIIFCFLVLFCLRRSHSVTQTGVQCHNHGSPH

SEQ ID NO: 24115 - protein, 36 aa, Homo sapiens
LFYTLHILMSAFFLRSGARHCGHNRAGSGYLLQGRV

SEQ ID NO: 24116 - protein, 142 aa, Homo sapiens
LRAPLPVPEQRSGRRPRDNLRTMDADEGQDMSQVSGKESPPVSDTPDEGDEPMPIPEDLSTTSGGQQSSKSDRVVGKWVTSGLCACETFISLYFSKTVMKGCKSFYPLCSLNWHIKEIWHKDQQDGGPLVCGRMDTHRPAWP

SEQ ID NO: 24117 - protein, 234 aa, Homo sapiens
LRQAPWVPARRIPAWAGRSAAARRASLAGQREPRLRGCSSHPRISLGPKARRTNPHNLRTMDADEGQDMSQVSGKESPPVSDTPDEGDEPMPIPEDLSTTSGGQQSSKSDRVVVTYGADDFRDFHAIIPKSFSRKYMPCFWKTKACLHLLSCKYRTCMFLHQPPRYIKYSLFYSLDTYHIIFGYLYHKVQNEGLGSCAVSWEHGSGVTVRVGVTVALMGLLLRRCCWTALRLLL

SEQ ID NO: 24118 - protein, 302 aa, Homo sapiens
LAGQREPRLRGCSSHPRISLGPKARRTNPHNLRTMDADEGQDMSQVSGKESPPVSDTPDEGDEPMPIPEDLSTTSGGQQSSKSDRVVVTYGADDFRDFHAIIPKSFSRERPFQCNQCGASFTQKGNLLRHIKLHKPLAEGTPRSNHSAQDSAVENLLLLSKAKLVPSEREASPSNSCQDSTDTESNNEEQRSGLIYLTNHIAPHARNGLSLKEEHRAYDLLRAASENSQDALRVVSTSGEQMKVYKCEHCRVLFLDHVMYTIHMGCHGFRDPFECNMCGYHSQDRYEFSSHITRGEHRFHMS

SEQ ID NO: 24119 - protein, 511 aa, Homo sapiens
LAGQREPRLRGCSSHPRISLGPKARRTNPHNLRTMDADEGQDMSQVSGKESPPVSDTPDEGDEPMPIPEDLSTTSGGQQSSKSDRVVASNVKVETQSDEENGRACEMNGEECAEDLRMLDASGEKMNGSHRDQGSSALSGVGGIRLPNGKLKCDICGIICIGPNVLMVHKRSHTGERPFQCNQCGASFTQKGNLLRHIKLHSGEKPFKCHLCNYACRRRDALTGHLRTHSVIKEETNHSEMAEDLCKIGSERSLVLDRLASNVAKRKSSMPQKFLGDKGLSDTPYDSSASYEKENEMMKSHVMDQAINNAINYLGAESLRPLVQTPPGGSEVVPVISPMYQLHKPLAEGTPRSNHSAQDSAVENLLLLSKAKLVPSEREASPSNSCQDSTDTESNNEEQRSGLIYLTNHIAPHARNGLSLKEEHRAYDLLRAASENSQDALRVVSTSGEQMKVYKCEHCRVLFLDHVMYTIHMGCHGFRDPFECNMCGYHSQDRYEFSSHITRGEHRFHMS

SEQ ID NO: 24120 - protein, 410 aa, Homo sapiens
LAGQREPRLRGCSSHPRISLGPKARRTNPHNLRTMDADEGQDMSQVSGKESPPVSDTPDEGDEPMPIPEDLSTTSGGQQSSKSDRVVASNVKVETQSDEENGRACEMNGEECAEDLRMLDASGEKMNGSHRDQGSSALSGVGGIRLPNGKLKCDICGIICIGPNVLMVHKRSHTGDKGLSDTPYDSSASYEKENEMMKSHVMDQAINNAINYLGAESLRPLVQTPPGGSEVVPVISPMYQLHKPLAEGTPRSNHSAQDSAVENLLLLSKAKLVPSEREASPSNSCQDSTDTESNNEEQRSGLIYLTNHIAPHARNGLSLKEEHRAYDLLRAASENSQDALRVVSTSGEQMKVYKCEHCRVLFLDHVMYTIHMGCHGFRDPFECNMCGYHSQDRYEFSSHITRGEHRFHMS

SEQ ID NO: 24121 - protein, 466 aa, Homo sapiens
LAGQREPRLRGCSSHPRISLGPKARRTNPHNLRTMDADEGQDMSQVSGKESPPVSDTPDEGDEPMPIPEDLSTTSGGQQSSKSDRVVGERPFQCNQCGASFTQKGNLLRHIKLHSGEKPFKCHLCNYACRRRDALTGHLRTHSVGKPHKCGYCGRSYKQRSSLEEHKERCHNYLESMGLPGTLYPVIKEETNHSEMAEDLCKIGSERSLVLDRLASNVAKRKSSMPQKFLGDKGLSDTPYDSSASYEKENEMMKSHVMDQAINNAINYLGAESLRPLVQTPPGGSEVVPVISPMYQLHKPLAEGTPRSNHSAQDSAVENLLLLSKAKLVPSEREASPSNSCQDSTDTESNNEEQRSGLIYLTNHIAPHARNGLSLKEEHRAYDLLRAASENSQDALRVVSTSGEQMKVYKCEHCRVLFLDHVMYTIHMGCHGFRDPFECNMCGYHSQDRYEFSSHITRGEHRFHMS

SEQ ID NO: 24122 - protein, 466 aa, Homo sapiens
LAGQREPRLRGCSSHPRISLGPKARRTNPHNLRTMDADEGQDMSQVSGKESPPVSDTPDEGDEPMPIPEDLSTTSGGQQSSKSDRVVASNVKVETQSDEENGRACEMNGEECAEDLRMLDASGEKMNGSHRDQGSSALSGVGGIRLPNGKLKCDICGIICIGPNVLMVHKRSHTGERPFQCNQCGASFTQKGNLLRHIKLHSGEKPFKCHLCNYACRRRDALTGHLRTHSGDKGLSDTPYDSSASYEKENEMMKSHVMDQAINNAINYLGAESLRPLVQTPPGGSEVVPVISPMYQLHKPLAEGTPRSNHSAQDSAVENLLLLSKAKLVPSEREASPSNSCQDSTDTESNNEEQRSGLIYLTNHIAPHARNGLSLKEEHRAYDLLRAASENSQDALRVVSTSGEQMKVYKCEHCRVLFLDHVMYTIHMGCHGFRDPFECNMCGYHSQDRYEFSSHITRGEHRFHMS

SEQ ID NO: 24123 - protein, 328 aa, Homo sapiens
LAGQREPRLRGCSSHPRISLGPKARRTNPHNLRTMDADEGQDMSQVSVIKEETNHSEMAEDLCKIGSERSLVLDRLASNVAKRKSSMPQKFLGDKGLSDTPYDSSASYEKENEMMKSHVMDQAINNAINYLGAESLRPLVQTPPGGSEVVPVISPMYQLHKPLAEGTPRSNHSAQDSAVENLLLLSKAKLVPSEREASPSNSCQDSTDTESNNEEQRSGLIYLTNHIAPHARNGLSLKEEHRAYDLLRAASENSQDALRVVSTSGEQMKVYKCEHCRVLFLDHVMYTIHMGCHGFRDPFECNMCGYHSQDRYEFSSHITRGEHRFHMS

SEQ ID NO: 24124 - protein, 283 aa, Homo sapiens
LAGQREPRLRGCSSHPRISLGPKARRTNPHNLRTMDADEGQDMSQVSGDKGLSDTPYDSSASYEKENEMMKSHVMDQAINNAINYLGAESLRPLVQTPPGGSEVVPVISPMYQLHKPLAEGTPRSNHSAQDSAVENLLLLSKAKLVPSEREASPSNSCQDSTDTESNNEEQRSGLIYLTNHIAPHARNGLSLKEEHRAYDLLRAASENSQDALRVVSTSGEQMKVYKCEHCRVLFLDHVMYTIHMGCHGFRDPFECNMCGYHSQDRYEFSSHITRGEHRFHMS

SEQ ID NO: 24125 - protein, 370 aa, Homo sapiens
LAGQREPRLRGCSSHPRISLGPKARRTNPHNLRTMDADEGQDMSQVSVGKPHKCGYCGRSYKQRSSLEEHKERCHNYLESMGLPGTLYPVIKEETNHSEMAEDLCKIGSERSLVLDRLASNVAKRKSSMPQKFLGDKGLSDTPYDSSASYEKENEMMKSHVMDQAINNAINYLGAESLRPLVQTPPGGSEVVPVISPMYQLHKPLAEGTPRSNHSAQDSAVENLLLLSKAKLVPSEREASPSNSCQDSTDTESNNEEQRSGLIYLTNHIAPHARNGLSLKEEHRAYDLLRAASENSQDALRVVSTSGEQMKVYKCEHCRVLFLDHVMYTIHMGCHGFRDPFECNMCGYHSQDRYEFSSHITRGEHRFHMS

SEQ ID NO: 24126 - protein, 553 aa, Homo sapiens
LAGQREPRLRGCSSHPRISLGPKARRTNPHNLRTMDADEGQDMSQVSGKESPPVSDTPDEGDEPMPIPEDLSTTSGGQQSSKSDRVVASNVKVETQSDEENGRACEMNGEECAEDLRMLDASGEKMNGSHRDQGSSALSGVGGIRLPNGKLKCDICGIICIGPNVLMVHKRSHTGERPFQCNQCGASFTQKGNLLRHIKLHSGEKPFKCHLCNYACRRRDALTGHLRTHSVGKPHKCGYCGRSYKQRSSLEEHKERCHNYLESMGLPGTLYPVIKEETNHSEMAEDLCKIGSERSLVLDRLASNVAKRKSSMPQKFLGDKGLSDTPYDSSASYEKENEMMKSHVMDQAINNAINYLGAESLRPLVQTPPGGSEVVPVISPMYQLHKPLAEGTPRSNHSAQDSAVENLLLLSKAKLVPSEREASPSNSCQDSTDTESNNEEQRSGLIYLTNHIAPHARNGLSLKEEHRAYDLLRAASENSQDALRVVSTSGEQMKVYKCEHCRVLFLDHVMYTIHMGCHGFRDPFECNMCGYHSQDRYEFSSHITRGEHRFHMS

SEQ ID NO: 24127 - protein, 43 aa, Homo sapiens
MVPHRPFLCFFLVLFCFDCTVSFVVSSSCQNKREMNWTYVDKS

SEQ ID NO: 24128 - protein, 62 aa, Homo sapiens [sequence omitted]

SEQ ID NO: 24129 - protein, 29 aa, Homo sapiens
LYSRIAASRSIVYMQKCTVPGVKLLVFDF

SEQ ID NO: 24130 - protein, 56 aa, Homo sapiens
MIEPGFESRQPGSRPCALNSRFASRTESYERIAASRSIVYMQKCTVPGVKLLVFDF

SEQ ID NO: 24131 - protein, 37 aa, Homo sapiens
LGPGVDGRLGARIAASRSIVYMQKCTVPGVKLLVFDF

SEQ ID NO: 24132 - protein, 34 aa, Homo sapiens
LPASHTSRRIAASRSIVYMQKCTVPGVKLLVFDF

SEQ ID NO: 24133 - protein, 105 aa, Homo sapiens
MTARDLCQLLVYKSHCVDDNSWTLVEHHPHLGLERCLEDHELVVQVESTMASESKFLFRKNYAKYEFFKNPMNFFPEQMVTWCQQSNGSQTQLLQVLGHNRSLLK

SEQ ID NO: 24134 - protein, 20 aa, Homo sapiens
LYVLWVFFFPFKMFSISKLK

SEQ ID NO: 24135 - protein, 1004 aa, Homo sapiens
MSSLTKIICAQQCSGRCRGKSPSDCCHNQCAAGCTGPRESDCLVCRKFRDEATCKDTCPPLMLYNPTTYQMDVNPEGKYSFGATCVKKCPRNYVVTDHGSCVRACGADSYEMEEDGVRKCKKCEGPCRKVCNGIGIGEFKDSLSINATNIKHFKNCTSISGDLHILPVAFRGDSFTHTPPLDPQELDILKTVKEITGFLLIQAWPENRTDLHAFENLEIIRGRTKQHGQFSLAVVSLNITSLGLRSLKEISDGDVIISGNKNLCYANTINWKKLFGTSGQKTKIISNRGENSCKATGQVCHALCSPEGCWGPEPRDCVSCRNVSRGRECVDKCNLLEGEPREFVENSECIQCHPECLPQAMNITCTGRGPDNCIQCAHYIDGPHCVKTCPAGVMGENNTLVWKYADAGHVCHLCHPNCTYGCTGPGLEGCPTNGPKIPSIATGMVGALLLLLVVALGIGLFMRRRHIVRKRTLRRLLQERELVEPLTPSGEAPNQALLRILKETEFKKIKVLGSGAFGTVYKGLWIPEGEKVKIPVAIKELREATSPKANKEILDEAYVMASVDNPHVCRLLGICLTSTVQLITQLMPFGCLLDYVREHKDNIGSQYLLNWCVQIAKGMNYLEDRRLVHRDLAARNVLVKTPQHVKITDFGLAKLLGAEEKEYHAEGGKVPIKWMALESILHRIYTHQSDVWSYGVTVWELMTFGSKPYDGIPASEISSILEKGERLPQPPICTIDVYMIMVKCWMIDADSRPKFRELIIEFSKMARDPQRYLVIQGDERMHLPSPTDSNFYRALMDEEDMDDVVDADEYLIPQQGFFSSPSTSRTPLLSSLSATSNNSTVACIDRNGLQSCPIKEDSFLQRYSSDPTGALTEDSIDDTFLPVPEYINQSVPKRPAGSVQNPVYHNQPLNPAPSRDPHYQDPHSTAVGNPEYLNTVQPTCVNSTFDSPAHWAQKGSHQISLDNPDYQQDFFPKEAKPNGIFKGSTAENAEYLRVAPQSSEFIGA

SEQ ID NO: 24136 - protein, 18 aa, Homo sapiens
LAILVSIVWMVGCAHFLE

SEQ ID NO: 24137 - protein, 50 aa, Homo sapiens
VGMLACLTCWRFVRASRWHLAPAPMPVCTHPPCPALPCPALWGWALPPGC

SEQ ID NO: 24138 - protein, 83 aa, Homo sapiens
LRRHCGEAVLRAGLARRWLDRPQEPSHRASLAQAAGPSAPSPSRVHRGGGGGGGGGGGGVRGRSLPKRPLSAEVNIPGLRRQD

SEQ ID NO: 24139 - protein, 92 aa, Homo sapiens
LPLSGLPFKQISRERSVEALGLHSSPPWELLARASEPALAPCSRKVAAAGAPEAQDTGLLLLQNPQVFLEEICRQNFVLRFYLGKEQKSVVS

SEQ ID NO: 24140 - protein, 105 aa, Homo sapiens [sequence omitted]

SEQ ID NO: 24141 - protein, 269 aa, Homo sapiens
VHEGACAAGPWVYAAQRGSPDGPAWVTAAAPAVAPGRRVAQARDFVREKKYRTEAEMFGWSFVFEDFVSDELRNKATQPMKSVLWWLPVEKAFWRQPAGPGSGIRERLEHPVLHVSWNDARAYCAWRGKRLPTEEEWEFAARGGLKGQVYPWGNWFQPNRTNLWQGKFPKGDKAEDGFHGVSPVNAFPAQNNYGLYDLLGNVWEWTASPYQAAEQDMRVLRGASWIDTADGSANHRARVTTRMGNTPDSASDNLGFRCAADAGRPPGEL

SEQ ID NO: 24142 - protein, 172 aa, Homo sapiens
LMARHGLPLLPLLSLLVGAWLKLGNGQATSMVQLQGGRFLMGTNSPDSRDGDGPVREATVKPFAIDIFPVTNKDFRDFVREKKYRTEAEMFGWSFVFEDFVSDELRNKATQPMKVREPGLAAEGIGVGPGQGILWDMGYLGHSGESDLRGGGRGEARETHHGASDQYTLPGS

SEQ ID NO: 24143 - protein, 142 aa, Homo sapiens
LMARHGLPLLPLLSLLVGAWLKLGNGQATSMVQLQGGRFLMGTNSPDSRDGDGPVREATVKPFAIDIFPVTNKDFRDFVREKKYRTEAEMFGWSFVFEDFVSDELRNKATQPMKSVLWWLPVEKAFWRQVRADSATSFSTPA

SEQ ID NO: 24144 - protein, 103 aa, Homo sapiens
LMARHGLPLLPLLSLLVGAWLKLGNGQATSMVQLQGGRFLMGTNSPDSRDGDGPVREATVKPFAIDIFPVTNKDFRSSLPMGELVPAKPHQPVAGKVPQGRQS

SEQ ID NO: 24145 - protein, 166 aa, Homo sapiens
LMARHGLPLLPLLSLLVGAWLKLGNGQATSMVQLQGGRFLMGTNSPDSRDGDGPVREATVKPFAIDIFPVTNKDFRDFVREKKYRTEAEMFGWSFVFEDFVSDELRNKATQPMKSVLWWLPVEKAFWRQVKFTHGGTGSSQTAPTCGRESSPRETKLRMASMESPQ

SEQ ID NO: 24146 - protein, 151 aa, Homo sapiens
LMARHGLPLLPLLSLLVGAWLKLGNGQATSMVQLQGGRFLMGTNSPDSRDGDGPVREATVKPFAIDIFPVTNKDFRDFVREKKYRTEAEMFGWSFVFEDFVSDELRNKATQPMKVKFTHGGTGSSQTAPTCGRESSPRETKLRMASMESPQ

SEQ ID NO: 24147 - protein, 233 aa, Homo sapiens
LMARHGLPLLPLLSLLVGAWLKLGNGQATSMVQLQGGRFLMGTNSPDSRDGDGPVREATVKPFAIDIFPVTNKDFRDFVREKKYRTEAEMFGWSFVFEDFVSDELRNKATQPMKSVLWWLPVEKAFWRQGKFPKGDKAEDGFHGVSPVNAFPAQNNYGLYDLLGNVWEWTASPYQAAEQDMRVLRGASWIDTADGSANHRARVTTRMGNTPDSASDNLGFRCAADAGRPPGEL

SEQ ID NO: 24148 - protein, 353 aa, Homo sapiens
LMARHGLPLLPLLSLLVGAWLKLGNGQATSMVQLQGGRFLMGTNSPDSRDGDGPVREATVKPFAIDIFPVTNKDFRDFVREKKYRTEAEMFGWSFVFEDFVSDELRNKATQPMKSVLWWLPVEKAFWRQPAGPGSGIRERLEHPVLHVSWNDARAYCAWRGKRLPTEEEWEFAARGGLKGQVYPWGNWFQPNRTNLWQGKFPKGDKAEDGFHGVSPVNAFPAQNNYGLYDLLGNVWEWTASPYQAAEQDMRVLRGASWIDTADGSANHRARVTTRVLLCCPGWSAVAQSQLTTASNCQALAILPPQLLKYLGLQDGQHSRFSLRQPRFPLCCRRRPAARGAVSSRVVTRRKAF

SEQ ID NO: 24149 - protein, 37 aa, Homo sapiens
LSSLPFSAGRMGNTPDSASDNLGFRCAADAGRPPGEL

SEQ ID NO: 24150 - protein, 150 aa, Homo sapiens
MPRGSRSRTSRMAPPASRAPQMRAAPRPAPVAQPPAAAPPSAVGSSAAAPRQPGLMAQMATTAAGVAVGSAVGHTLGHAITGGFSGGSNAEPARPDITYQEPQGTQPAQQQQPCLYEIKQFLECAQNQGDIKLCEGFNEVLKQCRLANGR

SEQ ID NO: 24151 - protein, 203 aa, Homo sapiens [sequence omitted]

SEQ ID NO: 24152 - protein, 33 aa, Homo sapiens
VKEAIMTLWTSGMQGDGEEQNKEALQDVEDENQ

SEQ ID NO: 24153 - protein, 256 aa, Homo sapiens [sequence omitted]

SEQ ID NO: 24154 - protein, 107 aa, Homo sapiens
LQRVLQVWPSLFCVLLLLEAQPLWRCDLVIGRFTAKTPGSPGSLEMGPLTFMDVAIEFSLEEWQCLDTAQRNVYRHVMLENYRNLVFLARPDYLSGTRKRALEYEET

SEQ ID NO: 24155 - protein, 145 aa, Homo sapiens
LQRVLQVWPSLFCVLLLLEAQPLWRCDLVIGRFTAKTPGSPGSLEMGPLTFMDVAIEFSLEEWQCLDTAQRNVYRHVMLENYRNLVFLAVAFTFDLSGLNILSFQSILPFVSALYVMGNRNQCLQKHLEARNKDLCVLVLPKTFG

SEQ ID NO: 24156 - protein, 364 aa, Homo sapiens
LQRVLQVWPSLFCVLLLLEAQPLWRCDLVIGRFTAKTPGSPGSLEMGPLTFMDVAIEFSLEEWQCLDTAQRNVYRHVMLENYRNLVFLDLITCLEQGKEPWNMKRHEMVVAKHSALCSRFAQDLWLEQNIKDSFQKVTLSRYGKYGHKNLQLRKGCKSVDECKGHQGGFNGLNQCLKITTSKIFQCNKYVKVMHKFSNSNRHKIRHTENKHFRCKECDKSLCMLSRLTQHKKIHTRENFYKCEECGKTFNWSTNLSKPKKIHTGEKPYKCEVCGKAFHQSSILTKHKIIRTGEKPYKCAHCGKAFKQSSHLTRHKIIHTEEKPYKCEQCGKVFKQSPTLTKHQIIYTGEEPYKCEECGKAFNLS

SEQ ID NO: 24157 - protein, 338 aa, Homo sapiens
LQRVLQVWPSLFCVLLLLEAQPLWRCDLVIGRFTAKTPGSPGSLEMGPLTFMDVAIEFSLEEWQCLDTAQRNVYRHVMLENYRNLVFLALCSRFAQDLWLEQNIKDSFQKVTLSRYGKYGHKNLQLRKGCKSVDECKGHQGGFNGLNQCLKITTSKIFQCNKYVKVMHKFSNSNRHKIRHTENKHFRCKECDKSLCMLSRLTQHKKIHTRENFYKCEECGKTFNWSTNLSKPKKIHTGEKPYKCEVCGKAFHQSSILTKHKIIRTGEKPYKCAHCGKAFKQSSHLTRHKIIHTEEKPYKCEQCGKVFKQSPTLTKHQIIYTGEEPYKCEECGKAFNLS

SEQ ID NO: 24158 - protein, 606 aa, Homo sapiens
LSMLGMNMLLITLFLLLPLSMLKGEPWEGCLHCTHTTWSGNIMTKTLLYHTYYECAGTCLGTCTHNQTTYSVCDPGRGQPYVCYDPKSSPGTWFEIHVGSKEGDLLNQTKVFPSGKDVVSLYFDVCQIVSMGSLFPVIFSSMEYYSSCHKNRYAHPACSTDSPVTTCWDCTTWSTNQQSLGPIMLTKIPLEPDCKTSTCNSVNLTILEPDQPIWTTGLKAPLGARVSGEEIGPGAYVYLYIIKKTRTRSTQQFRVFESFYEHVNQKLPEPPPLASNLFAQLAENIASSLHVASCYVCGGMNMGDQWPWEARELMPQDNFTLTASSLEPAPSSQSIWFLKTSIIGKFCIARWGKAFTDPVGELTCLGQQYYNETLGKTLWRGKSNNSESPHPSPFSRFPSLNHSWYQLEAPNTWQAPSGLYWICGPQAYRQLPAKWSGACVLGTIRPSFFLMPLKQGEALGYPIYDETKRKSKRGITIGDWKDNEWPPERIIQYYGPATWAEDGMWGYRTPVYMLNRIIRLQAVLEIITNETAGALNLLAQQATKMRNVIYQNRLALDYLLAQEEGVCGKFNLTNCCLELDDEGKVIKEITAKIQKLAHIPVQTWKG

SEQ ID NO: 24159 - protein, 493 aa, Homo sapiens
LASGGRDTIRAARRRPGGPKLPDDEEPPNMASESGKLWGGRFVGAVDPIMEKFNASIAYDRHLWEVDVQGSKAYSRGLEKAGLLTKAEMDQILHGLDKVAEEWAQGTFKLNSNDEDIHTANERRLKELIGATAGKLHTGRSRNDQVVTDLRLWMRQTCSTLSGLLWELIRTMVDRAEAERDVLFPGYTHLQRAQPIRWSHWILSHAVALTRDSERLLEVRKRINVLPLGSGAIAGNPLGVDRELLRAELNFGAITLNSMDATSERDFVAEFLFWASLCMTHLSRMAEDLILYCTKEFSFVQLSDAYSTGSSLMPQKKNPDSLELIRSKAGRVFGRCAGLLMTLKGLPSTYNKDLQEDKEAVFEVSDTMSAVLQVATGVISTLQIHQENMGQALSPDMLATDLAYYLVRKGMPFRQAHEASGKAVFMAETKGVALNQLSLQELQTISPLFSGDVICVWDYGHSVEQYGALGGTARSSVDWQIRQVRALLQAQQA

SEQ ID NO: 24160 - protein, 39 aa, Homo sapiens
LARGAGTLALLVAAETAVKCEVLCLLAARGDEAGRHGSS

SEQ ID NO: 24161 - protein, 14 aa, Homo sapiens
MCDPATSPDPGGCR

SEQ ID NO: 24162 - protein, 11 aa, Homo sapiens
LFQILVALLCL

SEQ ID NO: 24163 - protein, 35 aa, Homo sapiens
VIHLPPKVGLQIHEVMNLRCEDLQLDKPASGDMIL

SEQ ID NO: 24164 - protein, 217 aa, Homo sapiens
VPCPALTPKTTFWSRPRRRPRRRGTRCPCCHRRDVLNFLRSGDLPPRERVRAVYKEAQYYAIGPLLEQLENMQPLKGEKVRQAFLGLMPYYKDHLERIVEIARLRAVQRKARFAKLKVCVFKEEMPITPYECPLLNSLRFERSESDGQLFEHHCEVDVSFGPWEAVADVYDLLHCLVTDLSAQGLTVDHQCIGVCDKHLVNHYYCKRPIYEFKITWW

SEQ ID NO: 24165 - protein, 232 aa, Homo sapiens
VPCPALTPKTTFWSRPRRRPRRRGTRCPCCHRRDVLNFLRSGDLPPRERVRAVYKEAQYYAIGPLLEQLENMQPLKGEKVRQAFLGLMPYYKDHLERIVEIARLRAVQRKARFAKLKVCVFKEEMPITPYECPLLNSLRFERSESDGQLFEHHCEVDVSFGPWEAVADVYDLLHCLVTDLSAQGLTVDHQCIGVCDKHLVNHYYCKRPIYEFKITWWVIFSQGWNANFRGFF

SEQ ID NO: 24166 - protein, 22 aa, Homo sapiens
VKLKKIPKDLLLLHFLLALSTA

SEQ ID NO: 24167 - protein, 198 aa, Homo sapiens
MTSGQARASTQSPQALEDSGPVNISVSITLTLDPLKPFGGYSRNVTHLYSTILGHQIGLSGREAHEEINITFTLPTAWSSDDCALHGHCEQVVFTACMTLTASPGVFPVTVQPPHCVPDTYSNATLWYKIFTTARDANTKYAQDYNPFWCYKGAIGKVYHALNPKLTVIVPDVSEKNCVCVCACMHMHMCAHVLQPLV

SEQ ID NO: 24168 - protein, 19 aa, Homo sapiens
LDLAGHDDVFTKVTGALRR

SEQ ID NO: 24169 - protein, 17 aa, Homo sapiens
MAAHRSAGTRYAANAAR

SEQ ID NO: 24170 - protein, 8 aa, Homo sapiens
MLVPPILI

SEQ ID NO: 24171 - protein, 33 aa, Homo sapiens
MSAPSRSLGRFLSVGVWHAPPSLALVPPCRCTR

SEQ ID NO: 24172 - protein, 61 aa, Homo sapiens
MSIFTPTNQIRLTNVAVVRMKRARKRFEIACYKNKVVGWRSGLEKDLDEVLQTHSVFVNVS

SEQ ID NO: 24173 - protein, 31 aa, Homo sapiens
LYAAVAGVLAGVESRQGSIKGLVYSSNFQPR

SEQ ID NO: 24174 - protein, 75 aa, Homo sapiens
MGLYAAVAGVLAGVESRQGSIKGLVYSSNFQNVKQLYALVCETQRYSAVLDAVISSAGLLSAKKLQPHLAKGASV

SEQ ID NO: 24175 - protein, 1540 aa, Homo sapiens
LSRGRAGGEGAGVRAALSPLPSPTPPPGAWRSLRAAGPSAAPRGRPQQPPVPTAAAAMAPLLGRKPFPLVKPLPGEEPLFTIPHTQEAFRTREEYEARLERYSERIWTCKSTGSSQLTHKEAWEEEQEVAELLKEEFPAWYEKLVLEMVHHNTASLEKLVDTAWLEIMTKYAVGEECDFEVGKEKMLKVKIVKIHPLEKVDEEATEKKSDGACDSPSSDKENSSQIAQDHQKKETVVKEDEGRRESINDRARRSPRKLPTSLKKGERKWAPPKFLPHKYDVKLQNEDKIISNVPADSLIRTERPPNKEIVRYFIRHNALRAGTGENAPWVVEDELVKKYSLPSKFSDFLLDPYKYMTLNPSTKRKNTGSPDRKPSKKSKTDNSSLSSPLNPKLWCHVHLKKSLSGSPLKVKNSKNSKSPEEHLEEMMKMMSPNKLHTNFHIPKKGPPAKKPGKHSDKPLKAKGRSKGILNGQKSTGNSKSPKKGLKTPKTKMKQMTLLDMAKGTQKMTRAPRNSGGTPRTSSKPHKHLPPAALHLIAYYKENKDREDKRSALSCVISKTARLLSSEDRARLPEELRSLVQKRYELLEHKKRWASMSEEQRKEYLKKKREELKKKLKEKAKERREKEMLERLEKQKRYEDQELTGKNLPAFRLVDTPEGLPNTLFGDVAMVVEFLSCYSGLLLPDAQYPITAVSLMEALSADKGGFLYLNRVLVILLQTLLQDEIAEDYGELGMKLSEIPLTLHSVSELVRLCLRRSDVQEESEGSDTDDNKDSAAFEDNEVQDEFLEKLETSEFFELTSEEKLQILTALCHRILMTYSVQDHMETRQQMSAELWKERLAVLKEENDKKRAEKQKRKEMEAKNKENGKVENGLGKTDRKKEIVKFEPQVDTEAEDMISAVKSRRLLAIQAKKEREIQEREMKVKLERQAEEERIRKHKAAAEKAFQEGIAKAKLVMRRTPIGTDRNHNRYWLFSDEVPGLFIEKGWVHDSIDYRFNHHCKDHTVSGDEDYCPRSKKANLGKNASMNTQHGTATEVAVETTTPKQGQNLWFLCDSQKELDELLNCLHPQGIRESQLKERLEKRYQDIIHSIHLARKPNLGLKSCDGNQELLNFLRSDLIEVATRLQKGGLGYVEETSEFEARVISLEKLKDFGECVIALQASVIKKFLQGFMAPKQKRRKLQSEDSAKTEEVDEEKKMVEEAKVASALEKWKTAIREAQTFSRMHVLLGMLDACIKWDMSAENARCKVCRKKGEDDKLILCDECNKAFHLFCLRPALYEVPDGEWQCPACQPATARRNSRGRNYTEESASEDSEDDESDEEEEEEEEEEEEEDYEVAGLRLRPRKTIRGKHSVIPPAARSGRRPGKKPHSTRRSQPKAPPVDDAEVDELVLQTKRSSRRQSLELQKCEEILHKIVKYRFSWPFREPVTRDEAEDYYDVITHPMDFQTVQNKCSCGSYRSVQEFLTDMKQVFTNAEVYNCRGSHVLSCMVKTEQCLVALLHKHLPGHPYVRRKRKKFPDRLAEDEGDSEPEAVGQSRGRRQKK

SEQ ID NO: 24176 - protein, 116 aa, Homo sapiens
LELPGVGARARPSPGPALPSSWAVAPPAFPGFLLIIASSPGVVSARQAERSAYSGVEVGEKKWVTVGDTSLRIFKWVPVTDSKETKTATRVPCLTSISLRWTAAPTQAPAPSRVSP

SEQ ID NO: 24177 - protein, 107 aa, Homo sapiens
LYCFFASLFSVLVRGSRAVLQLYPENSEQLELITTQATKAGFSGGMVVDYPNSAKAKKFYLCLFSGPSTFIPEVPIKDVEAGNGEEESGMGAGEEGAAQAPGQGSQT

SEQ ID NO: 24178 - protein, 163 aa, Homo sapiens
MAGLTAAAPRPGVLLLLLSILHPSRPGGVPGAIPGGVPGGVFYPGAGLGALGGGALGPGGKPLKPVPGGLAGAGLGAGLGAFPAVTFPGALVPGGVADAAAAYKAAKAGAGLGGVPGVGGLGVSAGTMAIPELPGSKLQAWVEPTLMQPLLCQVRWFLSLEPE

SEQ ID NO: 24179 - protein, 153 aa, Homo sapiens
MAGLTAAAPRPGVLLLLLSILHPSRPGGVPGAIPGGVPGGVFYPALGPGGKPLKPVPGGLAGAGLGAGLGAFPAVTFPGALVPGGVADAAAAYKAAKAGAGLGGVPGVGGLGVSAGTMAIPELPGSKLQAWVEPTLMQPLLCQVRWFLSLEPE

SEQ ID NO: 24180 - protein, 65 aa, Homo sapiens
LTAAAPRPGVLLLLLSILHPSRPGGVPGAIPGGVPGGVFYPGNVHETSTHPGHADDADVHNRCTF

SEQ ID NO: 24181 - protein, 130 aa, Homo sapiens
VLGPELALFIPTGVGPFGGPQPGVPLGYPIKAPKLPGGYGLPYTTGKLPYGYGPGGVAGAAGKAGYPTGTGVGPQAAAAAAAKAAAKFGAGAAGVLPGVGGAGVPGVPGAIPGIGGIAGNICPSRGRVCP

SEQ ID NO: 24182 - protein, 13 aa, Homo sapiens
LSWQGCPLLLLLA

SEQ ID NO: 24183 - protein, 113 aa, Homo sapiens [sequence omitted]

SEQ ID NO: 24184 - protein, 40 aa, Homo sapiens
LERAESSRDGDFAMLPKLVWNSGAQAVRPPWPPKALELQA

SEQ ID NO: 24185 - protein, 43 aa, Homo sapiens [sequence omitted]

SEQ ID NO: 24186 - protein, 78 aa, Homo sapiens [sequence omitted]

SEQ ID NO: 24187 - protein, 68 aa, Homo sapiens
LPGYISLQESEERPRCWTVTDLDPKARRSFGALGSEKMRKDRASGSNSFQPHAPGSRCPVDRMRTEGT

SEQ ID NO: 24188 - protein, 30 aa, Homo sapiens
LPMSKPRYEEGWWGAGPLNREDQHPVLLTI

SEQ ID NO: 24189 - protein, 722 aa, Homo sapiens
MILFSLIVGLLTYWFLFRKKKEEVPEFTKIQTLTSSVRESSFVEKMKKTGRNIIVFYGSQTGTAEEFANRLSKDAHRYGMRGMSADPEEYDLADLSSLPEIDNALVVFCMATYGEGDPTDNAQDFYDWLQETDVDLSGVKFAVSHPETAMGSRWPAVPPWGLQIHVSERQPSRPPPCPQQPGQATCETLSSAPDPSTTRMSPPCPQPQSAPGGIGCWRLKVFGLGNKTYEHFNAMGKYVDKRLEQLGAQRIFELGLGDDDGNLEEDFITWREQFWPAVCEHFGVEATGEESSIRQYELVVHTDIDAAKVYMGEMGRLKSYENQKPPFDAKNPFLAAVTTNRKLNQGTERHLMHLELDISDSKIRYESGDHVAVYPANDSALVNQLGKILGADLDVVMSLNNLDEESNKKHPFPCPTSYRTALTYYLDITNPPRTNVLYELAQYASEPSEQELLRKMASSSGEGKELYLSWVVEARRHILAILQDCPSLRPPIDHLCELLPRLQARYYSIASSSKVHPNSVHICAVVVEYETKAGRINKGVATNWLRAKEPAGENGGRALVPMFVRKSQFRLPFKATTPVIMVGPGTGVAPFIGFIQERAWLRQQGKEVGETLLYYGCRRSDEDYLYREELAQFHRDGALTQLNVAFSREQSHKVYVQHLLKQDREHLWKLIEGGAHIYVCGTPSSCPGMHGTWPGMCRTPSTTSWLSSGPWSTRRRWTTSRN

SEQ ID NO: 24190 - protein, 491 aa, Homo sapiens
LGAARASLPSPRWKPAQPCPGFWASGPRQLHAASLLAPSPALLVHLQQGLPCFLSIRQYELVVHTDIDAAKVYMGEMGRLKSYENQKPPFDAKNPFLAAVTTNRKLNQGTERHLMHLELDISDSKIRYESGDHVAVYPANDSALVNQLGKILGADLDVVMSLNNLDEESNKKHPFPCPTSYRTALTYYLDITNPPRTNVLYELAQYASEPSEQELLRKMASSSGEGKELYLSWVVEARRHILAILQDCPSLRPPIDHLCELLPRLQARYYSIASSSKVHPNSVHICAVVVEYETKAGRINKGVATNWLRAKEPAGENGGRALVPMFVRKSQFRLPFKATTPVIMVGPGTGVAPFIGFIQERAWLRQQGKEVGETLLYYGCRRSDEDYLYREELAQFHRDGALTQLNVAFSREQSHKVYVQHLLKQDREHLWKLIEGGAHIYVCGDARNMARDVQNTFYDIVAELGAMEHAQAVDYIKKLMTKGRYSLDVWS

SEQ ID NO: 24191 - protein, 363 aa, Homo sapiens
VWRSLESLPRHQLLCLPVGAPPAPAMLSALARPASAALRRSFSTSAQNNAKVAVLGASGGIGQPLSLLLKNSPLVSRLTLYDIAHTPGVAADLSHIETKAAVKGYLGPEQLPDCLKGCDVVVIPAGVPRKPGMTRDDLFNTNATIVATLTAACAQHCPEAMICVIANPVNSTIPITAEVFKKHGVYNPNKIFGVTTLDIVRANTFVAELKGLDPARVNVPVIGGHAGKTIIPLISQCTPKVDFPQDQLTALTGRIQEAGTEVVKAKAGAGSATLSMAYAGARFVFSLVDAMNGKEGVVECSFVKSQETECTYFSTPLLLGKKGIEKNLGIGKVSSFEEKMISDAIPELKASIKKGEDFVKTLK

SEQ ID NO: 24192 - protein, 24 aa, Homo sapiens
LGQGYSHLARGLEFSASDLKTASS

SEQ ID NO: 24193 - protein, 281 aa, Homo sapiens
VLAAVMGLPWGQPHLGLQMLLLALNCLRPSLSLELVPYTPQITAWDLEGKVTATTFSLEQPRCVFDGLASASDTVWLVVAFSNASRGFQNPETLADIPASPQLLTDGHYMTLPLSPDQLPCGDPMAGSGGAPVLRVGHDHGCHQQPFCNAPLPGPGPYRVKFLLMDTRGSPRAETKWSDPITLHQGKTPGSIDTWPGRRSGSMIVITSILSSLAGLLLLAFLAASTMRFSSLWWPEEAPEQLRIGSFMGKRYMTHHIPPREAATLPVGCKPGLDPLPSLSP

SEQ ID NO: 24194 - protein, 325 aa, Homo sapiens
VLAAVMGLPWGQPHLGLQMLLLALNCLRPSLSLGEWGSWMDASSQTQGAGGPAGVIGPWAPAPLRLGEAAPGTPTPVSVAHLLSPVATELVPYTPQITAWDLEGKVTATTFSLEQPRCVFDGLASASDTVWLVVAFSNASRGFQNPETLADIPASPQLLTDGHYMTLPLSPDQLPCGDPMAGSGGAPVLRVGHDHGCHQQPFCNAPLPGPGPYREDPRIHRHLARAAKWQHDRHYLHPLFSGRPPTLGLLGSLYHALLQPVVAGGGPGAAADRLLHGQALHDPPHPTQRGRHTAGGLQAWPGPPPQPQPLAWPLCMGLGEMGRWE

SEQ ID NO: 24195 - protein, 270 aa, Homo sapiens
VLAAVMGLPWGQPHLGLQMLLLALNCLRPSLSLELVPYTPQITAWDLEGKVTATTFSLEQPRCVFDGLASASDTVWLVVAFSNASRGFQNPETLADIPASPQLLTDGHYMTLPLSPDQLPCGDPMAGSGGAPVLRVGHDHGCHQQPFCNAPLPGPGPYREDPRIHRHLARAAKWQHDRHYLHPLFSGRPPTLGLLGSLYHALLQPVVAGGGPGAAADRLLHGQALHDPPHPTQRGRHTAGGLQAWPGPPPQPQPLAWPLCMGLGEMGRWE

SEQ ID NO: 24196 - protein, 473 aa, Homo sapiens
LGKQRDSLGRWPWPQALPWCRCTPAPQLWLWQDGLGTWHPYSATICSFIEQQFVQQKGQRFGLGSLAHSIPLGQADPSLARYIIDLPSWTQFRQDTGTMRTVRRHLFPQHSAPGRGVVWEWLSDDGSWTAYEAGVCDDLEQQVARGNQLVDLAPLGYNYTVNYTTHTQTNKTSSFCCSVRRQAGPPYPVTTIIAPPGHTGVACSCHQCLSGSRTGPVSGRYRHSMTNLPAYPAPQHPPHRTASVFGTHQAFAPYNKPSLSGARSAPRLNTTNAWDAAPPSLGSQPLYRSSLSHLGPQHLPPGSSTSGAVSASLPSGPSSSPGSVPATVPMQMPKPSRVQQALAGATPKPEPEPEQVIKNYTEELKVPPDEDCIICMEKLSAASGYSDVTDSKAIGPLAVGCLTKCSHAFHLLCLLAMYCNGNKGPEHPNPGKPFTARGFPRQCYLPDNAQGRKPPGASRTRRHWLTFRPPHSC

SEQ ID NO: 24197 - protein, 487 aa, Homo sapiens
LWLWQDGLGTWHPYSATICSFIEQQFVQQKGQRFGLGSLAHSIPLGQADPSLARYIIDLPSWTQFRQDTGTMRTVRRHLFPQHSAPGRGVVWEWLSDDGSWTAYEAGVCDDLEQQVARGNQLVDLAPLGYNYTVNYTTHTQTNKTSSFCCSVRRQAGPPYPVTTIIAPPGHTGVACSCHQCLSGSRTGPVSGRYRHSMTNLPAYPAPQHPPHRTASVFGTHQAFAPYNKPSLSGARSAPRLNTTNAWDAAPPSLGSQPLYRSSLSHLGPQHLPPGSSTSGAVSASLPSGPSSSPGSVPATVPMQMPKPSRVQQALAGMTSVLMSAIGLPVCLSRAPQPTSPPASRLASKSHGSVKRLRKMSVKGATPKPEPEPEQVIKNYTEELKVPPDEDCIICMEKLSAASGYSDVTDSKAIGPLAVGCLTKCSHAFHLLCLLAMYCNGNKDGSLQCPSCKTIYERRRGPSPRERWRYYGSRCRSPATRTAGPSS

SEQ ID NO: 24198 - protein, 445 aa, Homo sapiens
VSSTVKMKLANWYWLSSAVLATYGFLVVANNETEEIKDERAKDVCPVRLESRGKCEEAGECPYQVSLPPLTIQLPKQFSRIEEVFKEVQNLKEIVNSLKKSCQDCKLQADDNGDPGRNGLLLPSTGAPGEVGDNRVRELESEVNKLSSELKNAKEEINVLHGRLEKLNLVNMNNIENYVDSKVANLTFVVNSLDGKCSKCPSQEQIQSRPVQHLIYKDCSDYYAIGKRSSETYRVTPDPKNSSFEVYCDMETMGGGWTVLQARLDGSTNFTRTWQDYKAGFGNLRREFWLGNDKIHLLTKSKEMILRIDLEDFNGVELYALYDQFYVANEFLKYRLHVGNYNGTAGDALRFNKHYNHDLKFFTTPDKDNDRYPSGNCGLYYSSGWWFDACLSANLNGKYYHQKYRGVRNGIFWGTWPGVSEAHPGGYKSSFKEAKMMIRPKHFKP

SEQ ID NO: 24199 - protein, 231 aa, Homo sapiens
VSSTVKMKLANWYWLSSAVLATYGFLVVANNETEEIKDERAKDVCPVRLESRGKCEEAGECPYQVSLPPLTIQLPKQFSRIEEVFKEVQNLKEIVNSLKKSCQDCKLQADDNGDPGRNGLLLPSTGAPGEVGDNRVRELESEVNKLSSELKNAKEEINVLHGRLEKLNLVNMNNIENYVDSKVANLTFVVNSLDGKCSKCPSQEQIQSRPGMYNNVFLSYVHKCYTAREYL

SEQ ID NO: 24200 - protein, 85 aa, Homo sapiens
LQDLSCLFFFFFFFLNTKKTQRVDKCTFIINKWKGKEKMSEVLSFKGYWEKLNSNLEYVKYAKPHFHYNNSVVRREWHNLISEEV

SEQ ID NO: 24201 - protein, 870 aa, Homo sapiens
LGVGVGASAAARLVLWESGGCSWKLWCREPSRCRRSRRLGRWGGGGSRGAWRGREGGTCWGNELGKTERALCRAGGRRGGQRPQPGGRGRMEQVEILRKFIQRVQAMKSPDHNGEDNFARDFMRLRRLSTKYRTEKIYPTATGEKEENVKKNRYKDILPFDHSRVKLTLKTPSQDSDYINANFIKGVYGPKAYVATQGPLANTVIDFWRMIWEYNVVIIVMACREFEMGRKKCERYWPLYGEDPITFAPFKISCEDEQARTDYFIRTLLLEFQNESRRLYQFHYVNWPDHDVPSSFDSILDMISLMRKYQEHEDVPICIHCSAGCGRTGAICAIDYTWNLLKAGKIPEEFNVFNLIQEMRTQRHSAVQTKEQYELVHRAIAQLFEKQLQLYEIHGAQKIADGVNEINTENMVSSIEPEKQDSPPPKPPRTRSCLVEGDAKEEILQPPEPHPVPPILTPSPPSAFPTVTTVWQDNDRYHPKPVLHMVSSEQHSADLNRNYSKSTELPGKNESTIEQIDKKLERNLSFEIKKVPLQEGPKSFDGNTLLNRGHAIKIKSASPCIADKISKPQELSSDLNVGDTSQNSCVDCSVTQSNKVSVTPPEESQNSDTPPRPDRLPLDEKGHVTWSFHGPENAIPIPDLSEGNSSDINYQTRKTVSLTPSPTTQVETPDLVDHDNTSPLFRTPLSFTNPLHSDDSDSDERNSDGAVTQNKTNISTASATVSAATSTESISTRKVLPMSIARHNIAGTTHSGAEKDVDVSEDSPPPLPERTPESFVLASEHNTPVRSEWSELQSQERSEQKKSEGLITSENEKCDHPAGGIHYEMCIECPPTFSDKREQISENPTEATDIGFGNRCGKPKGPRDPPSEWT

SEQ ID NO: 24202 - protein, 119 aa, Homo sapiens
LKIIAICIIIYLQCTLPWGTLSSLKLQSRKDSDDGPIMWVRPGEQMIPVADMPKSPFKRKRTTNEIKNLQYLPRTSEPREMLFEDRTRAHADHIGQGFERQTTAAVGVLKAVHCGEWYI

SEQ ID NO: 24203 - protein, 327 aa, Homo sapiens
LTEVIGPIWLMLLLGTVHCQIVSTRTPKPPLSTGGKRRRKLRKAAHLEVHREGDGSSTTDNTQEGAVQNHGTSTSHSVGTVFRDLWHAAFFLSGSKKAKNSIDKSTETDNGYVSLDGKKTVKSGEDGIQNHEPQCETIRPEETAWNTGTLRNGPSKDTQRTITNVSDEVSSEEGPETGYSLRRHVDRTSEGVLRNRKSHHYKKHYPNEDAPKSGTSCSSRCSSSRQDSESARPESETEDVLWEDLLHCAECHSSCTSETDVENHQINPCVKKEYRDDPFHQSHLPWLHSSHPGLEKISAIVWEGNDCKKADMSVLEISGMIMNRVSF

SEQ ID NO: 24204 - protein, 1138 aa, Homo sapiens
LLPLNRALGTTRPHKEGEVPGVDYIFITVEDFMELEKSGALLESGTYEDNYYGTPKPPAEPAPLLLNVTDQILPGATPSAEGKRKRNKSVSNMEKASIEPPEEEEEERPVVNGNGVVVTPESSEHEDKSAGASGEMPSQPYPAPVYSQPEELKEQMDDTKPTKPEDNEEPDPLPDNWEMAYTEKGEVYFIDHNTKTTSWLDPRLAKKAKPPEECKENELPYGWEKIDDPIYGTYYVDHINRRTQFENPVLEAKRKLQQHNMPHTELGTKPLQAPGFREKPLFTRDASQLKGTFLSTTLKKSNMGFGFTIIGGDEPDEFLQVKSVIPDGPAAQDGKMETGDVIVYINEVCVLGHTHADVVKLFQSVPIGQSVNLVLCRGYPLPFDPEDPANSMVPPLAIMERPPPVMVNGRHNYETYLEYISRTSQSVPDITDRPPHSLHSMPTDGQLDGTYPPPVHDDNVSMASSGATQAELMTLTIVKGAQGFGFTIADSPTGQRVKQILDIQGCPGLCEGDLIVEINQQNVQNLSHTEVVDILKDCPIGSETSLIIHRGGFFSPWKTPKPIMDRWENQGSPQTSLSAPAIPQNLPFPPALHRSSFPDSTEAFDPRKPDPYELYEKSRAIYESRRPDYKELDVHLRRMESGFGFRILGGDEPGQPILIGAVIAMGSADRDGRLHPGDELVYVDGIPVAGKTHRYVIDLMHHAARNGQVNLTVRRKVLCGGEPCPENGRSPGSVSTHHSSPRSDYATYTNSNHAAPSSNASPPEGFASHSLQTSDVVIHRKENEGFGFVIISSLNRPESGSTITVPHKIGRIIDGSPADRCAKLKVGDRILAVNGQSIINMPHADIVKLIKDAGLSVTLRIIPQEELNSPTSAPSSEKQSPMAQQSPLAQQSPLAQPSPATPNSPIAQPAPPQPLQLQGHENSYRSEVKARQDVKPDIRQPPFTDYRQPPLDYRQPPGGDYQQPPPLDYRQPPLLDYRQHSPDTRQYPLSDYRQPQDFDYFTVDMEKGAKGFGFSIRGGREYKMDLYVLRLAEDGPAIRNGRMRVGDQIIEINGESTRDMTHARAIELIKSGGRRVRLLLKRGTGQVPEYGMVPSSLSMCMKSDKHGSPYFYLLGHPKDTTNPPPGVLPLPPPQVCRK

SEQ ID NO: 24205 - protein, 1152 aa, Homo sapiens
LLPLNRALGTTRPHKEGEVPGVDYIFITVEDFMELEKSGALLESGTYEDNYYGTPKPPAEPAPLLLNVTDQILPGATPSAEGKRKRNKSVSNMEKASIEPPEEEEEERPVVNGNGVVVTPESSEHEDKSAGASGEMPSQPYPAPVYSQPEELKEQMDDTKPTKPEDNEEPDPLPDNWEMAYTEKGEVYFIDHNTKTTSWLDPRLAKKAKPPEECKENELPYGWEKIDDPIYGTYYVDHINRRTQFENPVLEAKRKLQQHNMPHTELGTKPLQAPGFREKPLFTRDASQLKGTFLSTTLKKSNMGFGFTIIGGDEPDEFLQVKSVIPDGPAAQDGKMETGDVIVYINEVCVLGHTHADVVKLFQSVPIGQSVNLVLCRGYPLPFDPEDPANSMVPPLAIMERPPPVMVNGRHNYETYLEYISRTSQSVPDITDRPPHSLHSMPTDGQLDGTYPPPVHDDNVSMASSGATQAELMTLTIVKGAQGFGFTIADSPTGQRVKQILDIQGCPGLCEGDLIVEINQQNVQNLSHTEVVDILKDCPIGSETSLIIHRGGFFSPWKTPKPIMDRWENQGSPQTSLSAPAIPQNLPFPPALHRSSFPDSTEAFDPRKPDPYELYEKSRAIYESRQQVPPRTSFRMDSSGPDYKELDVHLRRMESGFGFRILGGDEPGQPILIGAVIAMGSADRDGRLHPGDELVYVDGIPVAGKTHRYVIDLMHHAARNGQVNLTVRRKVLCGGEPCPENGRSPGSVSTHHSSPRSDYATYTNSNHAAPSSNASPPEGFASHSLQTSDVVIHRKENEGFGFVIISSLNRPESGSTITVPHKIGRIIDGSPADRCAKLKVGDRILAVNGQSIINMPHADIVKLIKDAGLSVTLRIIPQEELNSPTSAPSSEKQSPMAQQSPLAQQSPLAQPSPATPNSPIAQPAPPQPLQLQGHENSYRSEVKARQDVKPDIRQPPFTDYRQPPLDYRQPPGGDYQQPPPLDYRQPPLLDYRQHSPDTRQYPLSDYRQPQDFDYFTVDMEKGAKGFGFSIRGGREYKMDLYVLRLAEDGPAIRNGRMRVGDQIIEINGESTRDMTHARAIELIKSGGRRVRLLLKRGTGQVPEYGMVPSSLSMCMKSDKHGSPYFYLLGHPKDTTNPPPGVLPLPPPQVCRK

SEQ ID NO: 24206 - protein, 413 aa, Homo sapiens
LIPFSMCLFRVISFLFSHNTKTTSWLDPRLAKKAKPPEECKENELPYGWEKIDDPIYGTYYVDHINRRTQFENPVLEAKRKLQQHNMPHTELGTKPLQAPGFREKPLFTRDASQLKGTFLSTTLKKSNMGFGFTIIGGDEPDEFLQVKSVIPDGPAAQDGKMETGDVIVYINEVCVLGHTHADVVKLFQSVPIGQSVNLVLCRGYPLPFDPEDPANSMVPPLAIMERPPPVMVNGRHNYETYLEYISRTSQSVPDITDRPPHSLHSMPTDGQLDGTYPPPVHDDNVSMASSGATQAELMTLTIVKGAQGFGFTIADSPTGQRVKQILDIQGCPGLCEGDLIVEINQQNVQNLSHTEVVDILKDCPIGSETSLIIHRGGKTNTGSAIKYVGKIVGSFNNIVKMQISLELNEIIL

SEQ ID NO: 24207 - protein, 587 aa, Homo sapiens
LLPLNRALGTTRPHKEGEVPGVDYIFITVEDFMELEKSGALLESGTYEDNYYGTPKPPAEPAPLLLNVTDQILPGATPSAEGKRKRNKSVSNMEKASIEPPEEEEEERPVVNGNGVVVTPESSEHEDKSAGASGEMPSQPYPAPVYSQPEELKEQMDDTKPTKPEDNEEPDPLPDNWEMAYTEKGEVYFIDHNTKTTSWLDPRLAKKAKPPEECKENELPYGWEKIDDPIYGTYYVDHINRRTQFENPVLEAKRKLQQHNMPHTELGTKPLQAPGFREKPLFTRDASQLKGTFLSTTLKKSNMGFGFTIIGGDEPDEFLQVKSVIPDGPAAQDGKMETGDVIVYINEVCVLGHTHADVVKLFQSVPIGQSVNLVLCRGYPLPFDPEDPANSMVPPLAIMERPPPVMVNGRHNYETYLEYISRTSQSVPDITDRPPHSLHSMPTDGQLDGTYPPPVHDDNVSMASSGATQAELMTLTIVKGAQGFGFTIADSPTGQRVKQILDIQGCPGLCEGDLIVEINQQNVQNLSHTEVVDILKDCPIGSETSLIIHRGGKTNTGSAIKYVGKIVGSFNNIVKMQISLELNEIIL

SEQ ID NO: 24208 - protein, 471 aa, Homo sapiens
LLPLNRALGTTRPHKEGEVPGVDYIFITVEDFMELEKSGALLESGTYEDNYYGTPKPPAEPAPLLLNVTDQILPGATPSAEGKRKRNKSVSNMEKASIEPPEEEEEERPVVNGNGVVVTPESSEHEDKSAGASGEMPSQPYPAPVYSQPEELKEQMDDTKPTKPEDNEEPDPLPDNWEMAYTEKGEVYFIDHNTKTTSWLDPRLAKKAKPPEECKENELPYGWEKIDDPIYGTYYVDHINRRTQFENPVLEAKRKLQQHNMPHTELGTKPLQAPGFREKPLFTRDASQLKGTFLSTTLKKSNMGFGFTIIGGDEPDEFLQVKSVIPDGPAAQDGKMETGDVIVYINEVCVLGHTHADVVKLFQSVPIGQSVNLVLCRGYPLPFDPEDPANSMVPPLAIMERPPPVMVNGRHNYETYLEYISRTSQSVPDITDRPPHSLHSMPTDGQLDGTCPGLRLHYCRQSYRTAGETNT

SEQ ID NO: 24209 - protein, 145 aa, Homo sapiens
VNSAKTKTEKGPLDLQCGCLDNYYGTPKPPAEPAPLLLNVTDQILPGATPSAEGKRKRNKSVSNMEKASIEPPEEEEEERPVVNGNGVVVTPAQCLCPAFVFFTFFTFTRHQISKKTEKHVPSQVRRLMPVIPALWEIKAGRSLS

SEQ ID NO: 24210 - protein, 62 aa, Homo sapiens
LLPLNRALGTTRPHKEGEVPGVDYIFITVEDFMELEKSGALLESGTYEDGVSLCRPGWSAVA

SEQ ID NO: 24211 - protein, 64 aa, Homo sapiens
LLPLNRALGTTRPHKEGEVPGVDYIFITVEDFMELEKSGALLESGTYEAILEYAIHDDYSHHAE

SEQ ID NO: 24212 - protein, 31 aa, Homo sapiens [sequence omitted]

SEQ ID NO: 24213 - protein, 34 aa, Homo sapiens
LLLFDKQEDKSFPIKMMEQKNRRGLDSLPSHFLL

SEQ ID NO: 24214 - protein, 433 aa, Homo sapiens
LGALSRAGKQSLVVRNSRPLLSAPLRTASPSTPLRKWWGRRGPRREAFERPLGERKDSPVLGARTRARRERRQALAFGTMGCTLSAEDKAAVERSKMIDRNLREDGEKAAREVKLLLLGAGESGKSTIVKQMKIIHEAGYSEEECKQYKAVVYSNTIQSIIAIIRAMGRLKIDFGDSARADDARQLFVLAGAAEEGFMTAELAGVIKRLWKDSGVQACFNRSREYQLNDSAAYYLNDLDRIAQPNYIPTQQDVLRTRVKTTGIVETHFTFKDLHFKMFDVGGQRSERKKWIHCFEGVTAIIFCVALSDYDLVLAEDEEMNRMHESMKLFDSICNNKWFTDTSIILFLNKKDLFEEKIKKSPLTICYPEYAGSNTYEEAAAYIQCQFEDLNKRKDTKEIYTHFTCATDTKNVQFVFDAVTDVIIKNNLKDCGLF

SEQ ID NO: 24215 - protein, 317 aa, Homo sapiens
LPGAGESGKSTIVKQMKIIHEAGYSEEECKQYKAVVYSNTIQSIIAIIRAMGRLKIDFGDSARADDARQLFVLAGAAEEGFMTAELAGVIKRLWKDSGVQACFNRSREYQLNDSAAYYLNDLDRIAQPNYIPTQQDVLRTRVKTTGIVETHFTFKDLHFKMFDVGGQRSERKKWIHCFEGVTAIIFCVALSDYDLVLAEDEEMNRMHESMKLFDSICNNKWFTDTSIILFLNKKDLFEEKIKKSPLTICYPEYAGSNTYEEAAAYIQCQFEDLNKRKDTKEIYTHFTCATDTKNVQFVFDAVTDVIIKNNLKDCGLF

SEQ ID NO: 24216 - protein, 38 aa, Homo sapiens
MFNRTFPCFVFCFSKGVKARFVVTDGGITRVYPKDCWN

SEQ ID NO: 24217 - protein, 18 aa, Homo sapiens
VSVMFGSKAMLCVLFVCA

SEQ ID NO: 24218 - protein, 785 aa, Homo sapiens
LKENIVFIMNANKDERLKARSQDFHLFPALMMLSMTMLFLPVTGTLKQNIPRLKLTYKDLLLSNSCIPFLGSSEGLDFQTLLLDEERGRLLLGAKDHIFLLSLVDLNKNFKKIYWPAAKERVELCKLAGKDANTECANFIRVLQPYNKTHIYVCGTGAFHPICGYIDLGVYKEDIIFKLDTHNLESGRLKCPFDPQQPFASVMTDEYLYSGTASDFLGKDTAFTRSLGPTHDHHYIRTDISEHYWLNGAKFIGTFFIPDTYNPDDDKIYFFFRESSQEGSTSDKTILSRVGRVCKNDVGGQRSLINKWTTFLKARLICSIPGSDGADTYFDELQDIYLLPTRDERNPVVYGVFTTTSSIFKGSAVCVYSMADIRAVFNGPYAHKESADHRWVQYDGRIPYPRPGTCPSKTYDPLIKSTRDFPDDVISFIKRHSVMYKSVYPVAGGPTFKRINVDYRLTQIVVDHVIAEDGQYDVMFLGTDIGTVLKVVSISKEKWNMEEVVLEELQIFKHSSIILNMELSLKQQQLYIGSRDGLVQLSLHRCDTYGKACADCCLARDPYCAWDGNACSRYAPTSKRRARRQDVKYGDPITQCWDIEDSISHETADEKVIFGIEFNSTFLECIPKSQQATIKWYIQRSGDEHREELKPDERIIKTEYGLLIRSLQKKDSGMYYCKAQEHTFIHTIVKLTLNVIENEQMENTQRAEHEEGKVKDLLAESRLRYKDYIQILSSPNFSLDQYCEQMWHREKRRQRNKGGPKWKHMQEMKKKRNRRHHRDLDELPRAVAT

SEQ ID NO: 24219 - protein, 222 aa, Homo sapiens [sequence omitted]

SEQ ID NO: 24220 - protein, 302 aa, Homo sapiens
LKENIVFIMNANKDERLKARSQDFHLFPALMMLSMTMLFLPVTGTLKQNIPRLKLTYKDLLLSNSCIPFLGSSEGLDFQTLLLDEERGRLLLGAKDHIFLLSLVDLNKNFKKIYWPAAKERVELCKLAGKDANTECANFIRVLQPYNKTHIYVCGTGAFHPICGYIDLGVYKEDIIFKLDTHNLESGRLKCPFDPQQPFASVMTDEYLYSGTASDFLGKDTAFTRSLGPTHDHHYIRTDISEHYWLNGAKFIGTFFIPDTYNPDDDKIYFFFRESSQEGSTSDKTILSRVGRVCKENLCFED

SEQ ID NO: 24221 - protein, 19 aa, Homo sapiens
LYSLFGFIRRTGFSNSSLR

SEQ ID NO: 24222 - protein, 20 aa, Homo sapiens
MTQLWFLWFWGHLGLACRFS

SEQ ID NO: 24223 - protein, 38 aa, Homo sapiens
LQPLSPVAASSILVFFGASILVLPKCPDPKQEKAQKPA

SEQ ID NO: 24224 - protein, 52 aa, Homo sapiens
LQPLSPVAASSILVFFGASILVLPKCPDPKQELIGSPQNMLLGTDLAPAYSA

SEQ ID NO: 24225 - protein, 33 aa, Homo sapiens
LQPLSPVAASSILVFFGASILVLPKCPDPKQEI

SEQ ID NO: 24226 - protein, 20 aa, Homo sapiens
LVAVELMVEPKCYCPVFINI

SEQ ID NO: 24227 - protein, 45 aa, Homo sapiens
VSWKVLVGDGAKRHLRRREEKAAPLDKDKLPGRRMRRQETNCLES

SEQ ID NO: 24228 - protein, 42 aa, Homo sapiens
VGPDPVSSGRLGPRLYSGLRAWEGLAGCQMSCPNSAGLQLPA

SEQ ID NO: 24229 - protein, 231 aa, Homo sapiens
MAYPGHPGAGGGYYPGGYGGAPGGPAFPGQTQDPLYGYFAAVAGQDGQIDADELQRCLTQSGIAGGYKPFNLETCRLMVSMLDRDMSGTMGFNEFKELWAVLNGWRQHFISFDTDRSGTVDPQELQKALTTMGFRLSPQAVNSIAKRYSTNGKITFDDYIACCVKLRALTGEFYKVVSSPQAKTQFLLHFISQCFSTFILPKFFLALVVFFRLLLSISGKIIFWFFFQNLF

SEQ ID NO: 24230 - protein, 491 aa, Homo sapiens
LQARRNFPLPARPAARTVGAGRFLLGSASPSVMEKTCIDALPLTMNSSEKQETVCIFGTGDFGRSLGLKMLQCGYSVVFGSRNPQKTTLLPSGAEVLSYSEAAKKSGIIIIAIHREHYDFLTELTEVLNGKILVDISNNLKINQYPESNAEYLAHLVPGAHVVKAFNTISAWALQSGALDASRQVFVCGNDSKAKQRVMDIVRNLGLTPMDQGSLMAAKEIEKYPLQLFPMWRFPFYLSAVLCVFLFFYCVIRDVIYPYVYEKKDNTFRMAISIPNRIFPITALTLLALVYLPGVIAAILQLYRGTKYRRFPDWLDHWMLCRKQLGLVALGFAFLHVLYTLVIPIRYYVRWRLGNLTVTQAILKKENPFSTSSAWLSDSYVALGILGFFLFVLLGITSLPSVSNAVNWREFRFVQSKLGYLTLILCTAHTLVYGGKRFLSPSNLRWYLPAAYVLGLIIPCTVLVIKFVLIMPCVDNTLTRIRQGWERNSKH

SEQ ID NO: 24231 - protein, 315 aa, Homo sapiens
LQARRNFPLPARPAARTVGAGRFLLGSASPSVMEKTCIDALPLTMNSSEKQETVCIFGTGDFGRSLGLKMLQCGYSVVFGSRNPQKTTLLPSGAEVLSYSEAAKKSGIIIIAIHREHYDFLTELTEVLNGKILVDISNNLKINQYPESNAEYLAHLVPGAHVVKAFNTISAWALQSGALDASRQAILKKENPFSTSSAWLSDSYVALGILGFFLFVLLGITSLPSVSNAVNWREFRFVQSKLGYLTLILCTAHTLVYGGKRFLSPSNLRWYLPAAYVLGLIIPCTVLVIKFVLIMPCVDNTLTRIRQGWERNSKH

SEQ ID NO: 24232 - protein, 25 aa, Homo sapiens
VYLAGNALPGTLRGRRSKRLLSVGE

SEQ ID NO: 24233 - protein, 247 aa, Homo sapiens
LPAMGCRDVHAATVLSFLCGIASVAGLFAGTLLPNWRKLRLITFNRNEKNLTVYTGLWVKCARYDGSSDCLMYDTTWYSSVDQLDLRVLQFALPLSMLIAMGALLLCLIGMCNTAFRSSVPNIKLAKCLVNSAGCHLVAGLLFFLAGTVSLSPSIWVIFYNIHLNKKFEPVFSFDYAVYVTIASAGGLFMTSLILFIWYCTCKSLPSPFWQPLYSHPPSMHTYSQPYSARSRLSAIEIDIPVVSHTT

SEQ ID NO: 24234 - protein, 343 aa, Homo sapiens
LRTMLALTLRPPPLAKSHLKLGGTPAPARVNGKLVALKVIRLQEEEGTPFTAIREASLLKGLKHANIVLLHDIIHTKETLTLVFEYVHTDLCQYMDKHPGGLHPDNVKLFLFQLLRGLSYIHQRYILHRDLKPQNLLISDTGELKLADFGLARAKSVPSHTYSNEVVTLWYRPPDVLLGSTEYSTCLDMWGVGCIFVEMIQGVAAFPGMKDIQDQLERIFLVLGTPNEDTWPGVHSLPHFKPERFTLYSSKNLRQAWNKLSYVNHAEDLASKLLQCSPKNRLSAQAALSHEYFSDLPPRLWELTDMSSIFTVPNVRLQPEAGESMRAFGKNNSYGKSLSNSKH

SEQ ID NO: 24235 - protein, 23 aa, Homo sapiens
VETKMAAAAAVTALPVRLRTIRQ

SEQ ID NO: 24236 - protein, 803 aa, Homo sapiens
MSCLIMFQILIMFCVELLEYNIQQKQSQMLEMQVELSSMKDRATELQEQLSSEKMVVAELKSELAQTKLELETTLKAQHKHLKELEAFRLEVKDKTDEVHLLNDTLASEQKKSRELQWALEKEKAKLGRSEERDKEELEDLKFSLESQKQRNLQLNLLLEQQKQLLNESQQKIESQRMLYDAQLSEEQGRNLELQVLLESEKVRIREMSSTLDRERELHAQLQSSDGTGQSRPPLPSEDLLKELQKQLEEKHSRIVELLNETEKYKLDSLQTRQQMEKDRQVHRKTLQTEQEANTEGQKKMHELQSKVEDLQRQLEEKRQQVYKLDLEGQRLQGIMQEFQKQELEREEKRESRRILYQNLNEPTTWSLTSDRTRNWVLQQKIEGETKESNYAKLIEMNGGGTGCNHELEMIRQKLQCVASKLQVLPQKASERLQFETADDEDFIWVQENIDEIILQLQKLTGQQGEEPSLVSPSTSCGSLTERLLRQNAELTGHISQLTEEKNDLRNMVMKLEEQIRWYRQTGAGRDNSSRFSLNGGANIEAIIASEKEVWNREKLTLQKSLKRAEAEVYKLKAELRNDSLLQTLSPDSEHVTLKRIYGKYLRAESFRKALIYQKKYLLLLLGGFQECEDATLALLARMGGQPAFTDLEVITNRPKGFTRFRSAVRVSIAISRMKFLVRRWHRVTGSVSININRDGFGLNQGAEKTDSFYHSSGGLELYGEPRHTTYRSRSDLDYIRSPLPFQNRYPGTPADFNPGSLACSQLQNYDPDRALTDYITRLEALQRRLGTIQSGSTTQFHAGMRR

SEQ ID NO: 24237 - protein, 263 aa, Homo sapiens
MHELQSKVEDLQRQLEEKRQQVYKLDLEGQRLQGIMQEFQKQELEREEKRESRRILYQNLNEPTTWSLTSDRTRNWVLQQKIEGETKESNYAKLIEMNGGGTGCNHELEMIRQKLQCVASKLQVLPQKASERLQFETADDEDFIWVQENIDEIILQLQKLTGQQGEEPSLVSPSTSCGSLTERLLRQNAELTGHISQLTEEKNDLRNMVMKLEEQIRWYRQTGAGRDNVCPFLASPYMRISACLSFLLSSSSFNPVNVKLSHT

SEQ ID NO: 24238 - protein, 68 aa, Homo sapiens
LFPIMLQALLISLKYGCFMWQLGDTDTCFQIHSMENKMSFIVHTKQAGLVVKLLMKLNGQLMPTERNS

SEQ ID NO: 24239 - protein, 11 aa, Homo sapiens
LPPAPERLQVQ

SEQ ID NO: 24240 - protein, 93 aa, Homo sapiens
LDYHIFFYILNLTLRQFLFLLKEDESMNQPGPIKTRLAISQSHLMTALGHTRPSISEDDWKNFAELYESFQNPKRRKNQSGTMFRPGQKVTLA

SEQ ID NO: 24241 - protein, 52 aa, Homo sapiens
LYTLFLMVCLLFLFLQEIEDYTASCSFLQRFSSPQIYQTLSVFQECKTRISI

SEQ ID NO: 24242 - protein, 108 aa, Homo sapiens [sequence omitted]

SEQ ID NO: 24243 - protein, 60 aa, Homo sapiens
LEYSVLNQMSHPFFLPLKVSKCCEEVRDYVEERSGEDPLVKGIPEDKNPFKELKGGCVIS

SEQ ID NO: 24244 - protein, 39 aa, Homo sapiens
MLFKEGRMKLKGDFLKHHIDRVMYKSICATHLCSLCSLF

SEQ ID NO: 24245 - protein, 1369 aa, Homo sapiens
VLDMLSFVDTRTLLLLAVTLCLATCQSLQEETVRKGPAGDRGPRGERGPPGPPGRDGEDGPTGPPGPPGPPGPPGLGGNFAAQYDGKGVGLGPGPMGLMGPRGPPGAAGAPGPQGFQGPAGEPGEPGQTGPAGARGPAGPPGKAGEDGHPGKPGRPGERGVVGPQGARGFPGTPGLPGFKGIRGHNGLDGLKGQPGAPGVKGEPGAPGENGTPGQTGARGLPGERGRVGAPGPAGARGSDGSVGPVGPAGPIGSAGPPGFPGAPGPKGEIGAVGNAGPAGPAGPRGEVGLPGLSGPVGPPGNPGANGLTGAKGAAGLPGVAGAPGLPGPRGIPGPVGAAGATGARGLVGEPGPAGSKGESGNKGEPGSAGPQGPPGPSGEEGKRGPNGEAGSAGPPGPPGLRGSPGSRGLPGADGRAGVMGPPGSRGASGPAGVRGPNGDAGRPGEPGLMGPRGLPGSPGNIGPAGKEGPVGLPGIDGRPGPIGPAGARGEPGNIGFPGPKGPTGDPGKNGDKGHAGLAGARGAPGPDGNNGAQGPPGPQGVQGGKGEQGPPGPPGFQGLPGPSGPAGEVGKPGERGLHGEFGLPGPAGPRGERGPPGESGAAGPTGPIGSRGPSGPPGPDGNKGEPGVVGAVGTAGPSGPSGLPGERGAAGIPGGKGEKGEPGLRGEIGNPGRDGARGAPGAVGAPGPAGATGDRGEAGAAGPAGPAGPRGSPGERGEVGPAGPNGFAGPAGAAGQPGAKGERGAKGPKGENGVVGPTGPVGAAGPAGPNGPPGPAGSRGDGGPPGMTGFPGAAGRTGPPGPSGISGPPGPPGPAGKEGLRGPRGDQGPVGRTGEVGAVGPPGFAGEKGPSGEAGTAGPPGTPGPQGLLGAPGILGLPGSRGERGLPGVAGAVGEPGPLGIAGPPGARGPPGAVGSPGVNGAPGEAGRDGNPGNDGPPGRDGQPGHKGERGYPGNIGPVGAAGAPGPHGPVGPAGKHGNRGETGPSGPVGPAGAVGPRGPSGPQGIRGDKGEPGEKGPRGLPGLKGHNGLQGLPGIAGHHGDQGAPGSVGPAGPRGPAGPSGPAGKDGRTGHPGTVGPAGIRGPQGHQGPAGPPGPPGPPGPPGVSGGGYDFGYDGDFYRADQPRSAPSLRPKDYEVDATLKSLNNQIETLLTPEGSRKNPARTCRDLRLSHPEWSSGYYWIDPNQGCTMDAIKVYCDFSTGETCIRAQPENIPAKNWYRSSKDKKHVWLGETINAGSQFEYNVEGVTSKEMATQLAFMRLLANYASQNITYHCKNSIAYMDEETGNLKKAVILQGSNDVELVAEGNSRFTYTVLVDGCSKKTNEWGKTIIEYKTNKPSRLPFLDIAPLDIGGADQEFFVDIGPVCFK

SEQ ID NO: 24246 - protein, 1367 aa, Homo sapiens
VLDMLSFVDTRTLLLLAVTLCLATCQFFETVRKGPAGDRGPRGERGPPGPPGRDGEDGPTGPPGPPGPPGPPGLGGNFAAQYDGKGVGLGPGPMGLMGPRGPPGAAGAPGPQGFQGPAGEPGEPGQTGPAGARGPAGPPGKAGEDGHPGKPGRPGERGVVGPQGARGFPGTPGLPGFKGIRGHNGLDGLKGQPGAPGVKGEPGAPGENGTPGQTGARGLPGERGRVGAPGPAGARGSDGSVGPVGPAGPIGSAGPPGFPGAPGPKGEIGAVGNAGPAGPAGPRGEVGLPGLSGPVGPPGNPGANGLTGAKGAAGLPGVAGAPGLPGPRGIPGPVGAAGATGARGLVGEPGPAGSKGESGNKGEPGSAGPQGPPGPSGEEGKRGPNGEAGSAGPPGPPGLRGSPGSRGLPGADGRAGVMGPPGSRGASGPAGVRGPNGDAGRPGEPGLMGPRGLPGSPGNIGPAGKEGPVGLPGIDGRPGPIGPAGARGEPGNIGFPGPKGPTGDPGKNGDKGHAGLAGARGAPGPDGNNGAQGPPGPQGVQGGKGEQGPPGPPGFQGLPGPSGPAGEVGKPGERGLHGEFGLPGPAGPRGERGPPGESGAAGPTGPIGSRGPSGPPGPDGNKGEPGVVGAVGTAGPSGPSGLPGERGAAGIPGGKGEKGEPGLRGEIGNPGRDGARGAPGAVGAPGPAGATGDRGEAGAAGPAGPAGPRGSPGERGEVGPAGPNGFAGPAGAAGQPGAKGERGAKGPKGENGVVGPTGPVGAAGPAGPNGPPGPAGSRGDGGPPGMTGFPGAAGRTGPPGPSGISGPPGPPGPAGKEGLRGPRGDQGPVGRTGEVGAVGPPGFAGEKGPSGEAGTAGPPGTPGPQGLLGAPGILGLPGSRGERGLPGVAGAVGEPGPLGIAGPPGARGPPGAVGSPGVNGAPGEAGRDGNPGNDGPPGRDGQPGHKGERGYPGNIGPVGAAGAPGPHGPVGPAGKHGNRGETGPSGPVGPAGAVGPRGPSGPQGIRGDKGEPGEKGPRGLPGLKGHNGLQGLPGIAGHHGDQGAPGSVGPAGPRGPAGPSGPAGKDGRTGHPGTVGPAGIRGPQGHQGPAGPPGPPGPPGPPGVSGGGYDFGYDGDFYRADQPRSAPSLRPKDYEVDATLKSLNNQIETLLTPEGSRKNPARTCRDLRLSHPEWSSGYYWIDPNQGCTMDAIKVYCDFSTGETCIRAQPENIPAKNWYRSSKDKKHVWLGETINAGSQFEYNVEGVTSKEMATQLAFMRLLANYASQNITYHCKNSIAYMDEETGNLKKAVILQGSNDVELVAEGNSRFTYTVLVDGCSKKTNEWGKTIIEYKTNKPSRLPFLDIAPLDIGGADQEFFVDIGPVCFK

SEQ ID NO: 24247 - protein, 260 aa, Homo sapiens
LLPWMSLTVTKYKASPISLSPLQGPPGPPGPPGPPGVSGGGYDFGYDGDFYRADQPRSAPSLRPKDYEVDATLKSLNNQIETLLTPEGSRKNPARTCRDLRLSHPEWSSGYYWIDPNQGCTMDAIKVYCDFSTGETCIRAQPENIPAKNWYRSSKDKKHVWLGETINAGSQFEYNVEGVTSKEMATQLAFMRLLANYASQNITYHCKNSIAYMDEETGNLKKAVILQGSNDVELVAEGNSRFTYTVLVDGCSVSNSEIWE

SEQ ID NO: 24248 - protein, 401 aa, Homo sapiens
LSCQGLKVFAGGKLPGPAVEGPSATGPEIIRSPQDDASSPHLQVMLQIHLPGRHTLFVRAMIDSGASGNFIDHEYVAQNGIPLRIKDWPILVEAIDGRPIASGPVVHETHDLIVDLGDHREVLSFDVTQSPFFPVVLGVRWLSTHDPNITWSTRSIVFDSEYCRYHCRMYSPIPPSLPPPAPQPPLYYPVDGYRVYQPVRYYYVQNVYTPVDEHVYPDHRLVDPHIEMIPGAHSIPSGHVYSLSEPEMAALRDFVARNVKDGLITPTIAPNGAQVLQVKRGWKLQVSYDCRAPNNFTIQNQYPRLSIPNLEDQAHLATYTEFVPQIPGYQTYPTYAAYPTYPVGFAWYPVGRDGQGRSLYVPVMITWNPHWYRQPPVPQYPPPQPPPPPPPPPPPPSYSTL

SEQ ID NO: 24249 - protein, 49 aa, Homo sapiens
VPRNGPLSVALACAHGHLPPLQAKVWRSSPTTRTIRENMLLWVNNSESP

SEQ ID NO: 24250 - protein, 20 aa, Homo sapiens
LTVTKFLIHLLGRSLTPYTI

SEQ ID NO: 24251 - protein, 280 aa, Homo sapiens
MGKLVALVLLGVGLSLVGEMFLAFRERVNASREVEPVEPENCHLIEELESGSEDIDILPSGLAFISSLQVCWSLLEVHSRPCLPGYHQWRLQNGKYCCLIFLLEASSQRGIRLYEGLKYPGMPNFAPDEPGKIFLMDLNEQNPRAQALEISGGFDKELFNPHGISIFIDKDNTVYLYVVNHPHMKSTVEIFKFEEQQRSLVYLKTIKHELLKSVNDIVVLGPEQFYATRDHYFTNSLLSFFEMILDLRWTYVLFYSPREVKVVAKGFCSANGITVSADQK

SEQ ID NO: 24252 - protein, 363 aa, Homo sapiens
MAPPTELLARPERGSAPGSRAMGRLVAVGLLGIALALLGERLLALRNRLKASREVESVDLPHCHLIKGIEAGSEDIDILPNGLAFFSVGLKFPGLHSFAPDKPGGILMMDLKEEKPRARELRISRGFDLASFNPHGISTFIDNEFKNTVEIFKFEEAENSLLHLKTVKHELLPSVNDITAVGPAHFYATNDHYFSDPFLKYLETYLNLHWANVVYYSPNEVKVVAEGFDSANGINISPDDKYIYVADILAHEIHVLEKHTNMNLTQLKVLELDTLVDNLSIDPSSGDIWVGCHPNGQKLFVYDPNNPPSSEVLRIQNILSEKPTVTTVYANNGSVLQGSSVASVYDGKLLIGTLYHRALYCEL

SEQ ID NO: 24253 - protein, 97 aa, Homo sapiens
MGRLVAVGLLGIALALLGERLLALRNRLKASREVESVDLPHCHLIKGIEAGSEDIDILPNGLAFFSVRQSLAMLPRLVSNCWPQAVLPRQPPKVLEL

SEQ ID NO: 24254 - protein, 16 aa, Homo sapiens
MQQKQKKANEKKEEPK

SEQ ID NO: 24255 - protein, 54 aa, Homo sapiens
LLLMKYSFILDIMIAVYGSRSLVTIEKNYWNNSTCMKFSFGTKQQISRILLKMF

SEQ ID NO: 24256 - protein, 188 aa, Homo sapiens
VGLEAQGGWDKYRKALSRRKSALGPPSRRQLPRVRSDQRALGGTRETQHPAGLSVAKSNMKILVALAVFFLVSTQLFAEEIGANDDLNYWSDWYDSDQIKEELPEPFEHLLQRIARRPKPQQFFGLMGKRDADSSIEKQVALLKALYGHGQISHKRHKTDSFVGLMGKRALNSVAYERSAMQNYERRR

SEQ ID NO: 24257 - protein, 137 aa, Homo sapiens
VRSDQRALGGTRETQHPAGLSVAKSNMKILVALAVFFLVSTQLFAEEIGANDDLNYWSDWYDSDQIKEELPEPFEHLLQRIARRPKPQQFFGLMGKRDADSSIEKQVALLKALYGHGQISHKMAYERSAMQNYERRR

SEQ ID NO: 24258 - protein, 140 aa, Homo sapiens
VRSDQRALGGTRETQHPAGLSVAKSNMKILVALAVFFLVSTQLFAEEIGANDDLNYWSDWYDSDQIKEELPEPFEHLLQRIARRPKPQQFFGLMGKRDAGHGQISHKRHKTDSFVGLMGKRALNSVAYERSAMQNYERRR

SEQ ID NO: 24259 - protein, 75 aa, Homo sapiens
LSVAKSNMKILVALAVFFLVSTQLFAEEIGANDDLNYWSDWYDSDQIKVRPLPRTARTLLPGLGSCHLPTQQHPS

SEQ ID NO: 24260 - protein, 164 aa, Homo sapiens
LPQRGPSHPVRRVPAAAAASPAGADRAEPGRSGGRGRAAMDHKPLLQERPPAYNLEAGQGDYACGPHGYGAIPAAPPPPPYPYLVTGIPTHHPRVYNIHSRTVTRYPANSIVVVGGCPVCRVGVLEDCFTFLGIFLAIILFPFGFICCFALRKRRCPNCGATFA

SEQ ID NO: 24261 - protein, 137 aa, Homo sapiens
LPQRGPSHPVRRVPAAAAASPAGADRAEPGRSGGRGRAAMDHKPLLQERPPAYNLEAGQGDYACGPHGYGAIPAAPPPPPYPYLVTGIPTHHPRVYNIHSRTVTRYPANSIVVVGGCPVCRHQRSSWLYTYPLRVCT

SEQ ID NO: 24262 - protein, 484 aa, Homo sapiens
VGAAVRRQETSAPRCTRPSRRQRGYCQQRRRLPRSAPTAPARPCRAERGSGGGMLALLAASVALAVAAGAQDSPAPGSRFVCTALPPEAVHAGCPLPAMPMQGGAQSPEEELRAAVLQLRETVVQQKETLGAQREAIRELTGKLARCEGLAGGKARGAGATGKDTMGDLPRDPGHVVEQLSRSLQTLKDRLESLEHQLRANVSNAGLPGDFREVLQQRLGELERQLLRKVAELEDEKSLLHNETSAHRQKTESTLNALLQRVTELERGNSAFKSPDAFKVSLPLRTNYLYGKIKKTLPELYAFTICLWLRSSASPGIGTPFSYAVPGQANEIVLIEWGNNPIELLINDKVAQLPLFVSDGKWHHICVTWTTRDGMWEAFQDGEKLGTGENLAPWHPIKPGGVLILGQEQDTVGGRFDATQAFVGELSQFNIWDRVLRAQEIVNIANCSTNMPGNIIPWVDNNVDVFGGASKWPVETCEERLLDL

SEQ ID NO: 24263 - protein, 266 aa, Homo sapiens
VWVCRLVIGCVSVADLSRAPVHSFQTGLPVGGTALLEPSVSTMVCLVLLNHPKELNMAKQMVKASRLFYFGSARSPLTCDLCCPSRWSQAIQPCPLPLCPDASGARLFRLALTSGRQPTLRDVANTTPPVLSVGRAEAAWEARGDRKRALSSSEKRICHQIEFRPLSLFGRMVQIQIKVVTQPEMSGKAFCRENVPPPAICSQVCATRQPSRNIVWILKMCLFLFLNHFITYFLIYFVMSCFEVLLLSLLSFPLFLSLIYFVKVVH

SEQ ID NO: 24264 - protein, 389 aa, Homo sapiens
LELAQVKADIDRRIHEKEEEFEATRKNHQRAIESLQASLEAEAKGRAEALRLKKKMETDLNEMEIQLDHANKNNSELVKTLKRLQQQIKDLQVQMDEDARQHEELRKQYNLQERRLSLLQTELEEVRSALEGSERSRKLLEQEVVEITEWHNEINIQNQSLLVVKRKLESDVQRISNEHEELISEFRLTEERAKKAMMDAARMAEELRQEQDHCMHLEKIKKNYEVTIKDLQAKMEEAEQLALKGGKRTIMKLEARIKELETELDGEQKQHVETVKTLCKNERRLKELVFQTEEDHKTNQRMQALVEKLQNKLKVYKRQIEEAEDQANQTLARYRKTVHELDDAEDRAGMAETALNKLRTRHRVAGKGITSVEIIQVSKTGTSKTLSEE

SEQ ID NO: 24265 - protein, 403 aa, Homo sapiens
LFASTAQSPRILRSEPVRTPPIPAFSPLKTLRIMSLHQFLLEPITCHAWNRDRTQIALSPNNHEVHIYKKNGSQWVKAHELKEHNGHITGIDWAPKSDRIVTCGADRNAYVWSQKDGVWKPTLVILRINRAATFVKWSPLENKFAVGSGARLISVCYFESENDWWVSKHIKKPIRSTVLSLDWHPNNVLLAAGSCDFKCRVFSAYIKEVDEKPASTPWGSKMPFGQLMSEFGGSGTGGWVHGVSFSASGSRLAWVSHDSTVSVADASKSVQVSTLKTEFLPLLSVSFVSENSVVAAGHDCCPMLFNYDDRGCLTFVSKLDIPKQSIQRNMSAMERFRNMDKRATTEDRNTALETLHQNSITQVSIYEVDKQDCRKFCTTGIDGAMTIWDFKTLESSIQGLRIM

SEQ ID NO: 24266 - protein, 345 aa, Homo sapiens
MHERFIHCFCIDWAPKSDRIVTCGADRNAYVWSQKDGVWKPTLVILRINRAATFVKWSPLENKFAVGSGARLISVCYFESENDWWVSKHIKKPIRSTVLSLDWHPNNVLLAAGSCDFKCRVFSAYIKEVDEKPASTPWGSKMPFGQLMSEFGGSGTGGWVHGVSFSASGSRLAWVSHDSTVSVADASKSVQVSTLKTEFLPLLSVSFVSENSVVAAGHDCCPMLFNYDDRGCLTFVSKLDIPKQSIQRNMSAMERFRNMDKRATTEDRNTALETLHQNSITQVSIYEVDKQDCRKFCTTGIDGAMTIWDFKEPSRHGLPQLPGGAHQLPRLEQGPHPDCHLPQQP

SEQ ID NO: 24267 - protein, 225 aa, Homo sapiens
LLLRRGAQSRFGASTAQSPRPGRGRSQAAMAYHSFLVEPISCHAWNKDRTQIAICPNNHEVHIYEKSGAKWTKVHELKEHNGQVTGIDWAPESNRIVTCGTDRNAYVWTLKGRTWKPTLVILRINRAARCVRWAPNENKFAVGSGSRVISICYFEQENDWWVCKHIKKPIRSTVLSLDWHPNNVLLAAGSCDFKCRLHQGGGGTAGTHPVGLQDALWGTDVRIQQ

SEQ ID NO: 24268 - protein, 385 aa, Homo sapiens
VILLPQPLRSQAAMAYHSFLVEPISCHAWNKDRTQIAICPNNHEVHIYEKSGAKWTKVHELKEHNGQVTGIDWAPESNRIVTCGTDRNAYVWTLKGRTWKPTLVILRINRAARCVRWAPNENKFAVGSGSRVISICYFEQENDWWVCKHIKKPIRSTVLSLDWHPNNVLLAAGSCDFKCRIFSAYIKEVEERPAPTPWGSKMPFGELMFESSSSCGWVHGVCFSASGSRVAWVSHDSTVCLADADKKMAVATLASETLPLLALTFITDNSLVAAGHDCFPVLFTYDAAAGMLSFGGRLDVPKQSSQRGLTARERFQNLDKKASSEGGTAAGAGLDSLHKNSVSQISVLSGGKAKCSQFCTTGMDGGMSIWDVKSLESALKDLKIK

SEQ ID NO: 24269 - protein, 26 aa, Homo sapiens
MLSFIEKKKKCPQSTMLVMNCFKMWR

SEQ ID NO: 24270 - protein, 25 aa, Homo sapiens
LNKNPSLQLQRREIFLLSILLESTS

SEQ ID NO: 24271 - protein, 113 aa, Homo sapiens
LKARGLGCESSAPGPQSHNPFYPSIPDFSGRGQSWTCMAVSCNPLATTARDGVEAGPCPRSSRQPRRWQALSPSRGVPGYRIAKPDLIKPRSQRTALQNRPYLDQVSQFLEPE

SEQ ID NO: 24272 - protein, 136 aa, Homo sapiens
VDTLSMIFILWPWCYSVLIPQSSQDVLFQEFVTFEDVAVHLTREEWGYLDPVQRDLYREVMLENYGNVVSLGILLRLPTTRIHSVNSCPALSHTQASAFSGETLAVLTAGISKRWPKYRLPIDIARPCSETPFPRL

SEQ ID NO: 24273 - protein, 98 aa, Homo sapiens
VDFRSCVSEGKQLRREDEHKVGKSKNELEPKTRAGHSFTVSNFKDMSILARGADTFCHRTRHTHSSGIKKGEGRLREKLLPHPNKVNQLIGDKVDEPQ

SEQ ID NO: 24274 - protein, 95 aa, Homo sapiens
MDPPSVVVTSHQAPGEKKKLKCLAYDFYPGKIDVHWTRAGEVQEPELRGDVLHNGNGTYQSWVVVAVPPQDTAPYSCHVQHSSLAQPLVVPWEAS

SEQ ID NO: 24275 - protein, 310 aa, Homo sapiens
LCLLPRTLQADTMVRMVPVLLSLLLLLGPAVPQENQDGRYSLTYIYTGLSKHVEDVPAFQALGSLNDLQFFRYNSKDRKSQPMGLWRQVEGMEDWKQDSQLQKAREDIFMETLKDIVEYYNDSNGSHVLQGRFGCEIENNRSSGAFWKYYYDGKDYIEFNKEIPAWVPFDPAAQITKQKWEAEPVYVQRAKAYLEEECPATLRKYLKYSKNILDRQDPPSVVVTSHQAPGEKKKLKCLAYDFYPGKIDVHWTRAGEVQEPELRGDVLHNGNGTYQSWVVVAVPPQDTAPYSCHVQHSSLAQPLVVPWEAS

SEQ ID NO: 24276 - protein, 114 aa, Homo sapiens
MVRMVPVLLSLLLLLGPAVPQENQDGRYSLTYIYTGLSKHVEDVPAFQALGSLNDLQFFRYNSKDRKSQPMGLWRQVEGMEDWKQDSQLQKAREDIFMETLKDIVEYYNDSNGQ

SEQ ID NO: 24277 - protein, 8 aa, Homo sapiens
LMLFLFQI

SEQ ID NO: 24278 - protein, 71 aa, Homo sapiens
LSLYTRRMKLLLLKLDFFILLGSEESRCLVDVQYVIFFLIECVHLKSSLTFLERLLSINNGILEEKWFFKS

SEQ ID NO: 24279 - protein, 35 aa, Homo sapiens
LKGFRLLPRLLCSGTILAHCSLQLLSSSDPPASAS

SEQ ID NO: 24280 - protein, 114 aa, Homo sapiens
MTPRSPTSAFRSCTAVSSCLCPSSWPWLHLSVTSPFPVPHGPSLSCQDAAALGTSEPGGGSGSLHDHWLCTPALGRALPEEATWATAPTALGPIPTTSPSVLPTPAATGVPEDT

SEQ ID NO: 24281 - protein, 107 aa, Homo sapiens
LFLCVCVCVCVCLSLFLSPSPAPPFQSPPGALIRLESGMVGKSRDLGFISSHTSPPAPVIHGGLPRAETEKKEAREFITQWLLPIAMPLLEVQPPFLLPGFIHLCPV

SEQ ID NO: 24282 - protein, 583 aa, Homo sapiens
VAAVMSALRPLLLLLLPLCPGPGPGPGSEAKVTRSCAETRQVLGARGYSLNLIPPALISGEHLRVCPQEYTCCSSETEQRLIRETEATFRGLVEDSGSFLVHTLAARHRKFDEFFLEMLSVAQHSLTQLFSHSYGRLYAQHALIFNGLFSRLRDFYGESGEGLDDTLADFWAQLLERVFPLLHPQYSFPPDYLLCLSRLASSTDGSLQPFGDSPRRLRLQITRTLVAARAFVQGLETGRNVVSEALKVPVSEGCSQALMRLIGCPLCRGVPSLMPCQGFCLNVVRGCLSSRGLEPDWGNYLDGLLILADKLQGPFSFELTAESIGVKISEGLMYLQENSAKVSAQVFQECGPPDPVPARNRRAPPPREEAGRLWSMVTEEERPTTAAGTNLHRLVWELRERLARMRGFWARLSLTVCGDSRMAADASLEAAPCWTGAGRGRYLPPVVGGSPAEQVNNPELKVDASGPDVPTRRRRLQLRAATARMKTAALGHDLDGQDADEDASGSGGGQQYADDWMAGAVAPPARPPRPPYPPRRDGSGGKGGGGSARYNQGRSRSGGASIGFHTQTILILSLSALALLGPR

SEQ ID NO: 24283 - protein, 293 aa, Homo sapiens
VAAVMSALRPLLLLLLPLCPGPGPGPGSEAKVTRSCAETRQVLGARGYSLNLIPPALISGEHLRVCPQEYTCCSSETEQRLIRETEATFRGLVEDSGSFLVHTLAARHRKFDEFFLEMLSVAQHSLTQLFSHSYGRLYAQHALIFNGLFSRLRDFYGESGEGLDDTLADFWAQLLERVFPLLHPQYSFPPDYLLCLSRLASSTDGSLQPFGDSPRRLRLQITRTLVAARAFVQGLETGRNVVSEALKVGGCLSMGRAQGGRGGSERDPTRKKQPPASRTGLGLCLPPGPGVLG

SEQ ID NO: 24284 - protein, 138 aa, Homo sapiens
VAAVMSALRPLLLLLLPLCPGPGPGPGSEAKVTRSCAETRQVLGARGYSLNLIPPALISGEHLRVCPQEYTCCSSETEQRLIRETEATFRGLVEDSGSFLVHTLAARHRKFDDNPDPGGCPSLCAGPGDWKKCGQRSA

SEQ ID NO: 24285 - protein, 1249 aa, Homo sapiens
LWSGVTQTWRASARTLPNLAIATGPGRAVGIALAHSVSCTFPRFSGIFRPRKGSGGRLCGSWIAIPTLWSSSSWPHSSSSPSMSSPLQRAVGDTKRALSASSSSSASLPFDDRDSNHTSEGNGDSLLADEDTDFEDSLNRNVKKRAAKRPPKTTPVAKHPKKGSRVVHRHSRKQSEPPANDLFNAVKAAKSDMQDSGDYPLIAPGPSWKKFQGSFCEFVRTLVCQCQYSLLYDGFPMDDLISLLTGLSDSQVRAFRHTSTLAAMKLMTSLVKVALQLSVHQDNNQRQYEAERNKGPGQRAPERLESLLEKRKELQEHQEEIEGMMNALFRGVFVHRYRDVLPEIRAICIEEIGCWMQSYSTSFLTDSYLKYIGWTLHDKHREVRLKCVKALKGLYGNRDLTTRLELFTSRFKDRMVSMVMDREYDVAVEAVRLLILILKNMEGVLTDADCESVYPVVYASHRGLASAAGEFLYWKLFYPECEIRMMGGREQRQSPGAQRTFFQLLLSFFVESELHDHAAYLVDSLWDCAGARLKDWEGLTSLLLEKDQNLGDVQESTLIEILVSSARQASEGHPPVGRVTGRKGLTSKERKTQADDRVKLTEHLIPLLPQLLAKFSADAEKVTPLLQLLSCFDLHIYCTGRLEKHLELFLQQLQEVVVKHAEPAVLEAGAHALYLLCNPEFTFFSRADFARSQLVDLLTDRFQQELEELLQSSFLDEDEVYNLAATLKRLSAFYNTHDLTRWELYEPCCQLLQKAVDTGEVPHQVILPALTLVYFSILWTLTHISKSDASQKQLSSLRDRMVAFCELCQSCLSDVDTEIQEQAFVLLSDLLLIFSPQMIVGGRDFLRPLVFFPEATLQSELASFLMDHVFIQPGDLGSGDSQEDHLQIERLHQRRRLLAGFCKLLLYGVLEMDAASDVFKHYNKFYNDYGDIIKETLTRARQIDRSHCSRILLLSLKQLYTELLQEHGPQGLNELPAFIEMRDLARRFALSFGPQQLQNRDLVVMLHKEGIQFSLSELPPAGSSNQPPNLAFLELLSEFSPRLFHQDKQLLLSYLEKCLQHVSQAPGHPWGPVTTYCHSLSPVENTAETSPQVLPSSKRRRVEGPAKPNREDVSSSQEESLQLNSIPPTPTLTSTAVKSRQPLWGLKEMEEEDGSELDFAQGQPVAGTERSRFLGPQYFQTPHNPSGPGLGNQLMRLSLMEEDEEEELEIQDESNEERQDTDMQASSYSSTSERGLDLLDSTELDIEDF

SEQ ID NO: 24286 - protein, 1260 aa, Homo sapiens
LWSGVTQTWRASARTLPNLAIATGPGRAVGIALAHSVSCTFPRFSGIFRPRKGSGGRLCGRWGGQRHPRDLSWIAIPTLWSSSSWPHSSSSPSMSSPLQRAVGDTKRALSASSSSSASLPFDDRDSNHTSEGNGDSLLADEDTDFEDSLNRNVKKRAAKRPPKTTPVAKHPKKGSRVVHRHSRKQSEPPANDLFNAVKAAKSDMQDSGDYPLIAPGPSWKKFQGSFCEFVRTLVCQCQYSLLYDGFPMDDLISLLTGLSDSQVRAFRHTSTLAAMKLMTSLVKVALQLSVHQDNNQRQYEAERNKGPGQRAPERLESLLEKRKELQEHQEEIEGMMNALFRGVFVHRYRDVLPEIRAICIEEIGCWMQSYSTSFLTDSYLKYIGWTLHDKHREVRLKCVKALKGLYGNRDLTTRLELFTSRFKDRMVSMVMDREYDVAVEAVRLLILILKNMEGVLTDADCESVYPVVYASHRGLASAAGEFLYWKLFYPECEIRMMGGREQRQSPGAQRTFFQLLLSFFVESELHDHAAYLVDSLWDCAGARLKDWEGLTSLLLEKDQNLGDVQESTLIEILVSSARQASEGHPPVGRVTGRKGLTSKERKTQADDRVKLTEHLIPLLPQLLAKFSADAEKVTPLLQLLSCFDLHIYCTGRLEKHLELFLQQLQEVVVKHAEPAVLEAGAHALYLLCNPEFTFFSRADFARSQLVDLLTDRFQQELEELLQSSFLDEDEVYNLAATLKRLSAFYNTHDLTRWELYEPCCQLLQKAVDTGEVPHQVILPALTLVYFSILWTLTHISKSDASQKQLSSLRDRMVAFCELCQSCLSDVDTEIQEQAFVLLSDLLLIFSPQMIVGGRDFLRPLVFFPEATLQSELASFLMDHVFIQPGDLGSGDSQEDHLQIERLHQRRRLLAGFCKLLLYGVLEMDAASDVFKHYNKFYNDYGDIIKETLTRARQIDRSHCSRILLLSLKQLYTELLQEHGPQGLNELPAFIEMRDLARRFALSFGPQQLQNRDLVVMLHKEGIQFSLSELPPAGSSNQPPNLAFLELLSEFSPRLFHQDKQLLLSYLEKCLQHVSQAPGHPWGPVTTYCHSLSPVENTAETSPQVLPSSKRRRVEGPAKPNREDVSSSQEESLQLNSIPPTPTLTSTAVKSRQPLWGLKEMEEEDGSELDFAQGQPVAGTERSRFLGPQYFQTPHNPSGPGLGNQLMRLSLMEEDEEEELEIQDESNEERQDTDMQASSYSSTSERGLDLLDSTELDIEDF

SEQ ID NO: 24287 - protein, 1319 aa, Homo sapiens
LWSGVTQTWRASARTLPNLAIATGPGRAVGIALAHSVSCTFPRFSGIFRPRKGSGGRLCGRWGGQRHPRDLSWIAIPTLWSSSSWPHSSSSPSMSSPLQRAVGDTKRALSASSSSSASLPFDDRDSNHTSEGNGDSLLADEDTDFEDSLNRNVKKRAAKRPPKTTPVAKHPKKGSRVVHRHSRKQSEPPANDLFNAVKAAKSDMQSLVDEWLDSYKQDQDAGFLELVNFFIQSCGCKGIVTPEMFKKMSNSEIIQHLTEQFNEDSGDYPLIAPGPSWKKFQGSFCEFVRTLVCQCQYSLLYDGFPMDDLISLLTGLSDSQVRAFRHTSTLAAMKLMTSLVKVALQLSVHQDNNQRQYEAERNKGPGQRAPERLESLLEKRKELQEHQEEIEGMMNALFRGVFVHRYRDVLPEIRAICIEEIGCWMQSYSTSFLTDSYLKYIGWTLHDKHREVRLKCVKALKGLYGNRDLTTRLELFTSRFKDRMVSMVMDREYDVAVEAVRLLILILKNMEGVLTDADCESVYPVVYASHRGLASAAGEFLYWKLFYPECEIRMMGGREQRQSPGAQRTFFQLLLSFFVESELHDHAAYLVDSLWDCAGARLKDWEGLTSLLLEKDQNLGDVQESTLIEILVSSARQASEGHPPVGRVTGRKGLTSKERKTQADDRVKLTEHLIPLLPQLLAKFSADAEKVTPLLQLLSCFDLHIYCTGRLEKHLELFLQQLQEVVVKHAEPAVLEAGAHALYLLCNPEFTFFSRADFARSQLVDLLTDRFQQELEELLQSSFLDEDEVYNLAATLKRLSAFYNTHDLTRWELYEPCCQLLQKAVDTGEVPHQVILPALTLVYFSILWTLTHISKSDASQKQLSSLRDRMVAFCELCQSCLSDVDTEIQEQAFVLLSDLLLIFSPQMIVGGRDFLRPLVFFPEATLQSELASFLMDHVFIQPGDLGSGDSQEDHLQIERLHQRRRLLAGFCKLLLYGVLEMDAASDVFKHYNKFYNDYGDIIKETLTRARQIDRSHCSRILLLSLKQLYTELLQEHGPQGLNELPAFIEMRDLARRFALSFGPQQLQNRDLVVMLHKEGIQFSLSELPPAGSSNQPPNLAFLELLSEFSPRLFHQDKQLLLSYLEKCLQHVSQAPGHPWGPVTTYCHSLSPVENTAETSPQVLPSSKRRRVEGPAKPNREDVSSSQEESLQLNSIPPTPTLTSTAVKSRQPLWGLKEMEEEDGSELDFAQGSQPVAGTERSRFLGPQYFQTPHNPSGPGLGNQLMRLSLMEEDEEEELEIQDESNEERQDTDMQASSYSSTSERGLDLLDSTELDIEDF

SEQ ID NO: 24288 - protein, 11 aa, Homo sapiens
LTWALAVLLWG

SEQ ID NO: 24289 - protein, 163 aa, Homo sapiens
LRPPHPRTLKAPPKMMMGCGESELKSADGEEAAAVPGPPPEPQVPQLRAPVPEPGLDLSLSPRPDSPQPRHGSPGRRKGRAERRGAARQRRQVSGGGWPPARDGLAPTWSLPCPLLPGPLPPDAALPGAVRAAACGAAGAGDARAEEQPGLGPGAAGRSREPL

SEQ ID NO: 24290 - protein, 53 aa, Homo sapiens
LSLLSGSPKSSASQAGAAAGQGAPAPAPASQEPLPIAGPGGTGILGGGWGLCW

SEQ ID NO: 24291 - protein, 53 aa, Homo sapiens
LPSLPTPWRVLPRTQVCLKGKLHIFKYLSTEAGQRGSALGDLAPSRPPSFSPW

SEQ ID NO: 24292 - protein, 181 aa, Homo sapiens
MLPAATASLLGPLLTACALLPFAQGQTPNYTRPVFLCGGDVKGESGYVASEGFPNLYPPNKECIWTITVPEGQTVSLSFRVFDLELHPACRYDALEVFAGSGTSGQRLGRFCGTFRPAPLVAPGNQVTLRMTTDEGTGGRGFLLWYSGRATSGTGPPPGARRKWVTDPRVEWAAWGYWDGE

SEQ ID NO: 24293 - protein, 61 aa, Homo sapiens
VEWAAWGYWDEHQFCGGRLEKAQGTLTTPNWPESDYPPGISCSWHIIAPPDQVPTLLPGLP

SEQ ID NO: 24294 - protein, 212 aa, Homo sapiens
VATCSSISSEGNELLVQFVSDLSVTADGFSASYKTLPRGTAKEGQGPGPKRGTEPKVKLPPKSQPPEKTEESPSAPDAPTCPKQCRRTGTLQSNFCASSLVVTATVKSMVREPGEGLAVTVSLIGAYKTGGLDLPSPPTGASLKFYVPCKQCPPMKKGVSYLLMGQVEENRGPVLPPESFVVLHRPNQDQILTNLSKRKCPSQPVRAAASQD

SEQ ID NO: 24295 - protein, 288 aa, Homo sapiens
LFSRHPSALPTPFPTRLLVSASQDGKLIIWDSYTTNKVHAIPLRSSWVMTCAYAPSGNFVACGGLDNICSIYSLKTREGNVRVSRELPGHTGYLSCCRFLDDNQIITSSGDTTCALWDIETGQQTVGFAGHSGDVMSLSLAPDGRTFVSGACDASIKLWDVRDSMCRQTFIGHESDINAVAFFPNGYAFTTGSDDATCRLFDLRADQELLMYSHDNIICGITSVAFSRSGRLLLAGYDDFNCNIWDAMKGDRAGVLAGHDNRVSCLGVTDDGMAVATGSWDSFLKIWN

SEQ ID NO: 24296 - protein, 23 aa, Homo sapiens
LRFKVLLRVLFFMAPVPPQVFGQ

SEQ ID NO: 24297 - protein, 71 aa, Homo sapiens
VGFCLLACFCFIFALNVHPGLGCLPPRVLHYTSCLSLPERVARVLMPRDTIRRMDLSCHAGQGRAAGRAMS

SEQ ID NO: 24298 - protein, 974 aa, Homo sapiens
LSVSETLLNTKLETADLKWVTFPQVDGQWEELSGLDEEQHSVRTYEVCDVQRAPGQAHWLRTGWVPRRGAVHVYATLRFTMLECLSLPRAGRSCKETFTVFYYESDADTATALTPAWMENPYIKVDTVAAEHLTRKRPGAEATGKVNVKTLRLGPLSKAGFYLAFQDQGACMALLSLHLFYKKCAQLTVNLTRFPETVPRELVVPVAGSCVVDAVPAPGPSPSLYCREDGQWAEQPVTGCSCAPGFEAAEGNTKCRACAQGTFKPLSGEGSCQPCPANSHSNTIGSAVCQCRVGYFRARTDPRGAPCTTPPSAPRSVVSRLNGSSLHLEWSAPLESGGREDLTYALRCRECRPGGSCAPCGGDLTFDPGPRDLVEPWVVVRGLRPDFTYTFEVTALNGVSSLATGPVPFEPVNVTTDREVPPAVSDIRVTRSSPSSLSLAWAVPRAPSGAVLDYEVKYHEKGAEGPSSVRFLKTSENRAELRGLKRGASYLVQVRARSEAGYGPFGQEHHSQTQLDESEGWREQLALIAGTAVVGVVLVLVVIVVAVLCLRKQSNGREAEYSDKHGQYLIGHGTKVYIDPFTYEDPNEAVREFAKEIDVSYVKIEEVIGAGEFGEVCRGRLKAPGKKESCVAIKTLKGGYTERQRREFLSEASIMGQFEHPNIIRLEGVVTNSMPVMILTEFMENGALDSFLRLNDGQFTVIQLVGMLRGIASGMRYLAEMSYVHRDLAARNILVNSNLVCKVSDFGLSRFLEENSSDPTYTSSLGGKIPIRWTAPEAIAFRKFTSASDAWSYGIVMWEVMSFGERPYWDMSNQDVINAIEQDYRLPPPPDCPTSLHQLMLDCWQKDRNARPRFPQVVSALDKMIRNPASLKIVARENGGASHPLLDQRQPHYSAFGSVGEWLRAIKMGRYEESFAAAGFGSFELVSQISAEDLLRIGVTLAGHQKKILASVQHMKSQAKPGTPGGTGGPAPQY

SEQ ID NO: 24299 - protein, 516 aa, Homo sapiens
MELRVLLCWASLAAALEETLLNTKLETADLKWVTFPQVDGQWEELSGLDEEQHSVRTYEVCDVQRAPGQAHWLRTGWVPRRGAVHVYATLRFTMLECLSLPRAGRSCKETFTVFYYESDADTATALTPAWMENPYIKVDTVAAEHLTRKRPGAEATGKVNVKTLRLGPLSKAGFYLAFQDQGACMALLSLHLFYKKCAQLTVNLTRFPETVPRELVVPVAGSCVVDAVPAPGPSPSLYCREDGQWAEQPVTGCSCAPGFEAAEGNTKCRACAQGTFKPLSGEGSCQPCPANSHSNTIGSAVCQCRVGYFRARTDPRGAPCTTPPSAPRSVVSRLNGSSLHLEWSAPLESGGREDLTYALRCRECRPGGSCAPCGGDLTFDPGPRDLVEPWVVVRGLRPDFTYTFEVTALNGVSSLATGPVPFEPVNVTTDREVPPAVSDIRVTRSSPSSLSLAWAVPRAPSGAVLDYEVKYHEKGAEGPSSVRFLKTSENRAELRGLKRGASYLVQRARAGGSSWP

SEQ ID NO: 24300 - protein, 70 aa, Homo sapiens
LLPLSVMISRTLGPEVGGSIGLMFYLANVCGCAVSLLGLVESVLDVFGAGLCSVRSGQCCGFTGSGSVGS

SEQ ID NO: 24301 - protein, 41 aa, Homo sapiens
VMNFASVFAVLFNGCTGIMAGANMSGESPCLLPPGGLGLPP

SEQ ID NO: 24302 - protein, 21 aa, Homo sapiens
LEMHRERRNSEEKNFSVNDSF

SEQ ID NO: 24303 - protein, 110 aa, Homo sapiens
LPFPVPPPRAPAARARRRPPPCCPLPLGVCMRPGPAPWPCPCPRAASGPARPPSRVLSPNSQSSPAGDRGPAQEGGWFVRVPLPRGAPAPSSPSGDVPVGNRKKQFQLIV

SEQ ID NO: 24304 - protein, 86 aa, Homo sapiens
LLQGGARQRGPAPWPCPCPRAASGPARPPSRVLSPNSQSSPAGDRGPAQEGGWFVRVPLPRGAPAPSSPSGDVPVGNRKKQFQLIV

SEQ ID NO: 24305 - protein, 388 aa, Homo sapiens
VTPAVSGSLLVMKALRLSASALFCLLLINGLGAAPPGRPEAQPPPLSSEHKEPVAGDAVPGPKDGSAPEVRGARNSEPQDEGELFQGVDPRALAAVLLQALDRPASPPAPSGSQQGPEEEAAEALLTETVRSQTHSLPAPESPEPAAPPRPQTPENGPEASDPSEELEALASLLQELRDFSPSSAKRQQETAAAETETRTHTLTRVNLESPGPERVWRASWGEFQARVPERAPLPPPAPSQFQARMPDSGPLPETHKFGEGVSSPKTHLGEALAPLSKAYQGVAAPFPKARRPESALLGGSEAGERLLQQGLAQVEAGRRQAEATRQAAAQEERLADLASDLLLQFAAGRGPAARPCPLALPLSPGCVGTCQTPLPGPEPELPELTRG

SEQ ID NO: 24306 - protein, 630 aa, Homo sapiens
LLLNVPLLVSGSLLVMKALRLSASALFCLLLINGLGAAPPGRPEAQPPPLSSEHKEPVAGDAVPGPKDGSAPEVRGARNSEPQDEGELFQGVDPRALAAVLLQALDRPASPPAPSGSQQGPEEEAAEALLTETVRSQTHSLPAPESPEPAAPPRPQTPENGPEASDPSEELEALASLLQELRDFSPSSAKRQQETAAAETETRTHTLTRVNLESPGPERVWRASWGEFQARVPERAPLPPPAPSQFQARMPDSGPLPETHKFGEGVSSPKTHLGEALAPLSKAYQGVAAPFPKARRPESALLGGSEAGERLLQQGLAQVEAGRRQAEATRQAAAQEERLADLASDLLLQYLLQGGARQRGLGGRGLQEAAEERESAREEEEAEQERRGGEERVGEEDEEAAEAEAEAEEAERARQNALLFAEEEDGEAGAEDKRSQEETPGHRRKEAEGTEEGGEEEDDEEMDPQTIDSLIELSTKLHLPADDVVSIIEEVEEKRKRKKNAPPEPVPPPRAAPAPTHVRSPQPPPPAPAPARDELPDWNEVLPPWDREEDEVYPPGPYHPFPNYIRPRTLQPPSALRRRHYHHALPPSRHYPGREAQARRAQEEAEAEERRLQEQEELENYIEHVLLRRP

SEQ ID NO: 24307 - protein, 744 aa, Homo sapiens
LGPLPTMTSSGPGPRFLLLLPLLLPPAASASDRPRGRDPVNPEKLLVITVATAETEGYLRFLRSAEFFNYTVRTLGLGEEWRGGDVARTVGGGQKVRWLKKEMEKYADREDMIIMFVDSYDVILAGSPTELLKKFVQSGSRLLFSAESFCWPEWGLAEQYPEVGTGKRFLNSGGFIGFATTIHQIVRQWKYKDDDDDQLFYTRLYLDPGLREKLSLNLDHKSRIFQNLNGALDEVVLKFDRNRVRIRNVAYDTLPIVVHGNGPTKLQLNYLGNYVPNGWTPEGGCGFCNQDRRTLPGGQPPPRVFLAVFVEQPTPFLPRFLQRLLLLDYPPDRVTLFLHNNEVFHEPHIADSWPQLQDHFSAVKLVGPEEALSPGEARDMAMDLCRQDPECEFYFSLDADAVLTNLQTLRILIEENRKVIAPMLSRHGKLWSNFWGALSPDEYYARSEDYVELVQRKRVGVWNVPYISQAYVIRGDTLRMELPQRDVFSGSDTDPDMAFCKSFRDKGIFLHLSNQHEFGRLLATSRYDTEHLHPDLWQIFDNPVDWKEQYIHENYSRALEGEGIVEQPCPDVYWFPLLSEQMCDELVAEMEHYGQWSGGRHEDSRLAGGYENVPTVDIHMKQVGYEDQWLQLLRTYVGPMTESLFPGYHTKARAVMNFVVRYRPDEQPSLRPHHDSSTFTLNVALNHKGLDYEGGGCRFLRYDCVISSPRKGWALLHPGRLTHYHEGLPTTWGTRYIMVSFVDP

SEQ ID NO: 24308 - protein, 119 aa, Homo sapiens
LRMELPQRDVFSGSDTDPDMAFCKSFRDKGIFLHLSNQHEFGRLLATSRYDTEHLHPDLWQIFDNPVDWKEQYIHENYSRALEGEGIVEQVSPRSLPTHPLPSWPSPLGGPRLDSKFSH

SEQ ID NO: 24309 - protein, 333 aa, Homo sapiens
MGHFKDVVTVFLQEILFSFGPCEDAVITKAAPGASPGRRGEKLLVITVATAETEGYLRFLRSAEFFNYTVRTLGLGEEWRGGDVARTVGGGQKVRWLKKEMEKYADREDMIIMFVDSYDVILAGSPTELLKKFVQSGSRLLFSAESFCWPEWGLAEQYPEVGTGKRFLNSGGFIGFATTIHQIVRQWKYKDDDDDQLFYTRLYLDPGLREKLSLNLDHKSRIFQNLNGALDEVVLKFDRNRVRIRNVAYDTLPIVVHGNGPTKVPPVVSTPAPPCPNPQAPPTLLRSWPFPAPISEVPDPHLHPWRPQPLSLSLSPTAAAQLPGKLRPQWLDS

SEQ ID NO: 24310 - protein, 174 aa, Homo sapiens
LPLGHGDCGTVDCSVRLAGAVAMEAVLNELVSVEDLLKFEKKFQSEKAAGSVSKSTQFEYAWCLVRSKYNDDIRKGIVLLEELLPKGSKEEQRDYVFYLAVGNYRLKEYEKALKYVRGLLQTEPQNNQAKELERLIDKAMKKDGLVGMAIVGGMALGVAGLAGLIGLAVSKSKS

SEQ ID NO: 24311 - protein, 82 aa, Homo sapiens
LGSPRIPPCPVRGGRRFLPGQQALSPAPPACLCHQPHPAEYMRLDRVCPLPHCTPRERAPASGTVSITPSLPPDPCDFCFLL

SEQ ID NO: 24312 - protein, 261 aa, Homo sapiens
MTCLAPTMSAELNVPIDPSAPACPEPGHKGMDYRDWVRRSYLELVTSNHHSVQALSWRKLYLSRAKLKASSRTSALLSGFAMVAMVEVQLETQYQYPRPLLIAFSACTTVLVAVHLFALLISTCILPNVEAVSNIHNLNSISESPHERMHPYIELAWGFSTVLGILLFLAEVVLLCWIKFLPVDARRQPGPPPGPGSHTGWQAALVSTIIMVPVGLIFVVFTIHFYRSLVRHKTERHNREIEELHKLKVQLDGHERSLQVL

SEQ ID NO: 24313 - protein, 122 aa, Homo sapiens
MPVIPATQKAEAGESLEPGKWRLRITINKDTKVPNACLFTINKEDHTLGNIIKSQLLKDPQVLFAGYKVPHPLEHKIIIRVQTTPDYSPQEAFTNAITDLISELSLLEERFRTCLLPLRLLP

SEQ ID NO: 24314 - protein, 317 aa, Homo sapiens
LDVRMRVVTIVILLCFCKAAELRKASPGSVRSRVNHGRAGGGRRGSNPVKRYAPGLPCDVYTYLHEKYLDCQERKLVYVLPGWPQDLLHMLLARNKIRTLKNNMFSKFKKLKSLDLQQNEISKIESEAFFGLNKLTTLLLQHNQIKVLTEEVFIYTPLLSYLRLYDNPWHCTCEIETLISMLQIPRNRNLGNYAKCESPQEQKNKKLRQIKSEQLCNEEEKEQLDPKPQVSGRPPVIKPEVDSTFCHNYVFPIQTLDCKRKELKKVPNNIPPDIVKLDLSYNKINQLRPKEFEDVHELKKLNLSSNGIEFIDPGSLR

SEQ ID NO: 24315 - protein, 445 aa, Homo sapiens
LDVRMRVVTIVILLCFCKAAELRKASPGSVRSRVNHGRAGGGRRGSNPVKRYAPGLPCDVYTYLHEKYLDCQERKLVYVLPGWPQDLLHMLLARNKIRTLKNNMFSKFKKLKSLDLQQNEISKIESEAFFGLNKLTTLLLQHNQIKVLTEEVFIYTPLLSYLRLYDNPWHCTCEIETLISMLQIPRNRNLGNYAKCESPQEQKNKKLRQIKSEQLCNEEEKEQLDPKPQVSGRPPVIKPEVDSTFCHNYVFPIQTLDCKRKELKKVPNNIPPDIVKLDLSYNKINQLRPKEFEDVHELKKLNLSSNGIEFIDPAAFLGLTHLEELDLSNNSLQNFDYGVLEDLYFLKLLWLRDNPWRCDYNIHYLYYWLKHHYNVHFNGLECKTPEEYKGWSVGKYIRSYYEECPKDKLPAYPESFDQDTEDDEWEKKHRDHTAKKQSVIITIVG

SEQ ID NO: 24316 - protein, 18 aa, Homo sapiens
MKFKAVKDCEILLAFMLV

SEQ ID NO: 24317 - protein, 340 aa, Homo sapiens
MAAAAARVVLSSAARRRLWGFSESLLIRGAAGRSLYFGENRLRSTQAATQVVLNVPETRVTCLESGLRVASEDSGLSTCTVGLWIDAGSRYENEKNNGTAHFLEHMAFKGTKKRSQLDLELEIENMGAHLNAYTSREQTVYYAKAFSKDLPRAVEILADIIQNSTLGEAEIERERGVILREMQEVETNLQEVVFDYLHATAYQNTALGRTILGPTENIKSISRKDLVDYITTHYKGPRIVLAAAGGVSHDELLDLAKFHFGDSLCTHKGEIPALPPCKFTGSEIRVRDDKMPLAHLAIAVEAVGWAHPDTICLMVANTLIGNWDRSFGGGMVSDFKRNFP

SEQ ID NO: 24318 - protein, 13 aa, Homo sapiens
VKEFCCIILMIMG

SEQ ID NO: 24319 - protein, 331 aa, Homo sapiens
MAASAKKKNKKGKTISLTDFLAEDGGTGGGSTYVSKPVSWADETDDLEGDVSTTWHSNDDDVYRAPPIDRSILPTAPRAAREPNIDRSRLPKSPPYTAFLGNLPYDVTEESIKEFFRGLNISAVRLPREPSNPERLKGFGYAEFEDLDSLLSALSLNEESLSNRRIRVDVADQALDKDRDDPPFGRDRNRDSDKTDTDWRARPATDTFDDYPPRRGDDSFGDKYRDRYDSDRYRDGYRDGPRRDMDRYGGRDRYDDRGSRDYDRGYDSRIGSGRRAFGSGYRRDDDYREGRDCYEDQYDRRDDRSWSSRDDYSRDDYRRDDRGPPPPKDPN

SEQ ID NO: 24320 - protein, 47 aa, Homo sapiens
MKGINQGLLWGKSDDVSPCSHSKCPENLGAFPLPFPEAELLRKNPRG

SEQ ID NO: 24321 - protein, 145 aa, Homo sapiens
LRKCRYSVGLVLSPFPPVALKSGYSPVWPPALGEPGWGVTRRPLGAEEAPVRRLRAPDKSGAGESSAVSMEEQETEEVGGRSSRKNAATVNAASLPPCFGVKSCRCRRCSCRRCLLYFSWPRGRISPPVGQCAGRGVGIPLYGGD

SEQ ID NO: 24322 - protein, 48 aa, Homo sapiens [sequence omitted]

SEQ ID NO: 24323 - protein, 725 aa, Homo sapiens
VEAAAQLVSAPASPSRSPPPRFRRVGMSSRKVLAIQARKRRPKREKHPKKPEPQQKAPLVPPPPPPPPPPPPPLPDPTPPEPEEEILGSDDEEQEDPADYCKGGYHPVKIGDLFNGRYHVIRKLGWGHFSTVWLCWDMQGKRFVAMKVVKSAQHYTETALDEIKLLKCVRESDPSDPNKDMVVQLIDDFKISGMNGIHVCMVFEVLGHHLLKWIIKSNYQGLPVRCVKSIIRQVLQGLDYLHSKCKIIHTDIKPENILMCVDDAYVRRMAAEATEWQKAGAPPPSGSAVSTAPQQKPIGKISKNKKKKLKKKQKRQAELLEKRLQEIEELEREAERKIIEENITSAAPSNDQDGEYCPEVKLKTTGLEEAAEAETAKDNGEAEDQEEKEDAEKENIEKDEDDVDQELANIDPTWIESPKTNGHIENGPFSLEQQLDDEDDDEEDCPNPEEYNLDEPNAESDYTYSSSYEQFNGELPNGRHKIPESQFPEFSTSLFSGSLEPVACGSVLSEGSPLTEQEESSPSHDRSRTVSASSTGDLPKAKTRAADLLVNPLDPRNADKIRVKIADLGNACWVHKHFTEDIQTRQYRSIEVLIGAGYSTPADIWSTACMAFELATGDYLFEPHSGEDYSRDEDHIAHIIELLGSIPRHFALSGKYSREFFNRRGELRHITKLKPWSLFDVLVEKYGWPHEDAAQFTDFLIPMLEMVPEKRASAGECLRHPWLNS

SEQ ID NO: 24324 - protein, 80 aa, Homo sapiens
LWHSVLRPPRLGSECVAGLSQTPQATLAANGAEDSRGGEMLPAGEIGASPAAPCCSESGDERKNLEEKKMRSCSAVQAGM

SEQ ID NO: 24325 - protein, 93 aa, Homo sapiens
LWHSVLRPPRLGSECVAGLSQTPQATLAANGAEDSRGGEMLPAGEIGASPAAPCCSESGDERKNLEEKSDINVTVLIGSKQVSEGTYNFIRNS

SEQ ID NO: 24326 - protein, 831 aa, Homo sapiens
LWHSVLRPPRLGSECVAGLSQTPQATLAANGAEDSRGGEMLPAGEIGASPAAPCCSESGDERKNLEEKSDINVTVLIGSKQVSEGTDNGDLPSYVSAFIEKEVGNDLKSLKKLDKLIEQRTVSKMQLEEQVLTISSEIPKRIRSALKNAEESKQFLNQFLEQETHLFSAINSHLLTAQPWMDDLGTMISQIEEIERHLAYLKWISQIEELSDNIQQYLMTNNVPEAASTLVSMAELDIKLQESSCTHLLGFMRATVKFWHKILKDKLTSDFEEILAQLHWPFIAPPQSQTVGLSRPASAPEIYSYLETLFCQLLKLQTSDELLTEPKQLPEKYSLPASPSVILPIQVMLTPLQKRFRYHFRGNRQTNVLSKPEWYLAQVLMWIGNHTEFLDEKIQPILDKVGSLVNARLEFSRGLMMLVLEKLATDIPCLLYDDNLFCHLVDEVLLFERELHSVHGYPGTFASCMHILSEETCFQRWLTVERKFALQKMDSMLSSEAAWVSQYKDITDVDEMKVPDCAETFMTLLLVITDRYKNLPTASRKLQFLELQKDLVDDFRIRLTQVMKEETRASLGFRYCAILNAVNYISTVLADWADNVFFLQLQQAALEVFAENNTLSKLQLGQLASMESSVFDDMINLLERLKHDMLTRQVDHVFREVKDAAKLYKKERWLSLPSQSEQAVMSLSSSACPLLLTLRDHLLQLEQQLCFSLFKIFWQMLVEKLDVYIYQEIILANHFNEGGAAQLQFDMTRNLFPLFSHYCKRPENYFKHIKEACIVLNLNVGSALLLKDVLQSASGQLPATAALNEVGIYKLAQQDVEILLNLRTNWPNTGK

SEQ ID NO: 24327 - protein, 86 aa, Homo sapiens
LGSECVAGLSQTPQATLAANGAEDSRGGEMLPAGEIGASPAAPCCSESGDERKNLEEKSDINVTVLIGSKQVSEVSGAGNSSLQRH

SEQ ID NO: 24328 - protein, 43 aa, Homo sapiens
LPSIPTWTTAKAFQLFLLPLLLLYNSFCTQKSESKSKFIMSFS

SEQ ID NO: 24329 - protein, 15 aa, Homo sapiens
LRVNEVAILSLALIL

SEQ ID NO: 24330 - protein, 48 aa, Homo sapiens
LGLQIFGFLNMILWGGNAWFVYKETSLHSPSNTSAPHSQGGIPPPTGI

SEQ ID NO: 24331 - protein, 17 aa, Homo sapiens
LSLLILLTLSLRSQELR

SEQ ID NO: 24332 - protein, 32 aa, Homo sapiens
LGNRFQMNIYTWVKLLCASVVLLENVYGPTCI

SEQ ID NO: 24333 - protein, 279 aa, Homo sapiens
VGPWLPSPAQPRRLTSRASAAAEQRREPGGLPAGVKKKMTLQWAAVATFLYAEIGLILIFCLPFIPPQRWQKIFSFNVWGKIATFWNKAFLTIIILLIVLFLDAVREVRKYSSVHTIEKSSTSRPDAYEHTQMKLFRSQRNLYISGFSLFFWLVLRRLVTLITQLAKELSNKGVLKTQAENTNKAAKKFMEENEKLKRILKSHGKDEECVLEAENKKLVEDQEKLKTELRKTSDALSKAQNDVMEMKMQSERLSKEYDQLLKEHSELQDRLERGNKKRL

SEQ ID NO: 24334 - protein, 153 aa, Homo sapiens
MAHGKDFASRGIEMSEVRLNLDKMMEQKSTAVKALTGGIAHLFKQNKVVHVNGYGKITGKNQVTATKADGGTQVIDTKNILIATGSEVTPFPGITVFMLHNLQPLQLFFRNTFYKLFMLFVNFERFLTEILYFDGHSALGSYLSLFCSDSDQL

SEQ ID NO: 24335 - protein, 269 aa, Homo sapiens
MASKGLILCIYHGVKSISLTNETSKKDLCESLWVISGRLFFKEKNTESTFFMFSNNILSHYFLLSKSATDVKVTADMVKEALEEAEKAQVAAEKAIKQADEDIQGTQNLLTSIESETAASEETLFNASQRISELERNVEELKRKAAQNSGEAEYIEKVVYTVKQSAEDVKKTLDGELDEKYKKVENLIAKKTEESADARRKAEMLQNEAKTLLAQANSKLQLLKDLERKYEDNQRYLEDKAQELARLEGEVRSLLKDISQKVAVYSTCL

SEQ ID NO: 24336 - protein, 95 aa, Homo sapiens
LGTSLLFTEDSADLDSIEAVANEVLKMEMPSTPQQLQNLTEDIRERVESLSQVEVILQHSAADIARAEMLLEEAKRARYLKTWHLRGLFCVSIME

SEQ ID NO: 24337 - protein, 1101 aa, Homo sapiens
MQFQLTLFLHLGWLSYSKAQDDCNRGACHPTTGDLLVGRNTQLMASSTCGLSRAQKYCILSYLEGEQKCFICDSRFPYDPYDQPNSHTIENVIVSFEPDREKKWWQSENGLDHVSIRLDLEALFRFSHLILTFKTFRPAAMLVERSTDYGHNWKVFKYFAKDCATSFPNITSGQAQGVGDIVCDSKYSDIEPSTGGEVVLKVLDPSFEIENPYSPYIQDLVTLTNLRINFTKLHTLGDALLGRRQNDSLDKYYYALYEMIVRGSCFCNGHASECRPMQKMRGDVFSPPGMVHGQCVCQHNTDGPNCERCKDFFQDAPWRPAADLQDNACRSCSCNSHSSRCHFDMTTYLASGGLSGGVCEDCQHNTEGQHCDRCRPLFYRDPLKTISDPYACIPCECDPDGTISGGICVSHSDPALGSVAGQCLCKENVEGAKCDQCKPNHYGLSATDPLGCQPCDCNPLGSLPFLTCDVDTGQCLCLSYVTGAHCEECTVGYWGLGNHLHGCSPCDCDIGGAYSNVCSPKNGQCECRPHVTGRSCSEPAPGYFFAPLNFYLYEAEEATTLQGLAPLGSETFGQSPAVHVVLGEPVPGNPVTWTGPGFARVLPGAGLRFAVNNIPFPVDFTIAIHYETQSAADWTVQIVVNPPGGSEHCIPKTLQSKPQSFALPAATRIMLLPTPICLEPDVQYSIDVYFSQPLQGESHAHSHVLVDSLGLIPQINSLENFCSKQDLDEYQLHNCVEIASAMGPQVLPGACERLIISMSAKLHDGAVACKCHPQGSVGSSCSRLGGQCQCKPLVVGRCCDRCSTGSYDLGHHGCHPCHCHPQGSKDTVCDQVTGQCPCHGEVSGRRCDRCLAGYFGFPSCHPCPCNRFAELCDPETGSCFNCGGFTTGRNCERCIDGYYGNPSSGQPCRPCLCPDDPSSNQYFAHSCYQNLWSSDVICNCLQGYTGTQCGECSTGFYGNPRISGAPCQPCACNNNIDVTDPESCSRVTGECLRCLHNTQGANCQLCKPGHYGSALNQTCRRCSCHASGVSPMECPPGGGACLCDPVTGACPCLPNVTGLACDRCADGYWNLVPGRGCQSCDCDPRTSQSSHCDQARYFKAY

SEQ ID NO: 24338 - protein, 12 aa, Homo sapiens
MHLFIPGKNTTM

SEQ ID NO: 24339 - protein, 29 aa, Homo sapiens
MHDIFGQCNCGTGTYFSEEKLCGSMAFII

SEQ ID NO: 24340 - protein, 52 aa, Homo sapiens
MYRFRSQLFTGISAAATAHSYPRRFSTLLLAEDSPLSRPPHRRTSKKCSSIG

SEQ ID NO: 24341 - protein, 140 aa, Homo sapiens
MEDSMNMDMSPLRPQTYLFNCEPKADKDDHFKVNDDENKHQLSLRTVSLGAGAKDELHIVEAEAMNYKGSPIKVTLATLKMSVQATVSLGGFEIPLPVVLQSKCGLGPVHISGQHLVAVEEDAESEDEVGDVKLLGISGK

SEQ ID NO: 24342 - protein, 249 aa, Homo sapiens
LGAVSWQPTNGIFLSMFLIVLPLESMAHGLFHELGNCLGGTSVGYAIVIPTNFCSGHTHGTGEWALAGGDTLRLDTLIEWWREKNGSFCSRLIIVLDSENSTPWVKEVRKINDQYIAVQGAELIKTVDIEEADPPQLGDFTKDWVEYNCNSSNNICWTEKGRTVKAVYGVSKRWSDYTLHLPTGSDVAKHWMLHFPRITYPLVHLANWLCGLNLFWICKTCFRCLKRLKMSWFLPTVLDTGQGFKLVKS

SEQ ID NO: 24343 - protein, 49 aa, Homo sapiens
LSGYPTPTDILMAKQVEEKRKHDCRSDQFSLWIIFSVKCMDLSFPCSYI

SEQ ID NO: 24344 - protein, 25 aa, Homo sapiens
MRRSSQFPAPSTSQPFLRAPCRAAS

SEQ ID NO: 24345 - protein, 158 aa, Homo sapiens [sequence omitted]

SEQ ID NO: 24346 - protein, 11 aa, Homo sapiens
MGRGIIIWCCL

SEQ ID NO: 24347 - protein, 491 aa, Homo sapiens
LPGPLCSRVRAAGPLRRTGRRKFDGAGRVAVERRRGSSAGFPCSQRSRRPAEPGRGIPDRRRRGPIGRVNMDLENKVKKMGLGHEQGFGAPCLKCKEKCEGFELHFWRKICRNCKCGQEEHDVLLSNEEDRKVGKLFEDTKYTTLIAKLKSDGIPMYKRNVMILTNPVAAKKNVSINTVTYEWAPPVQNQALARQYMQMLPKEKQPVAGSEGAQYRKKQLAKQLPAHDQDPSKCHELSPREVKEMEQFVKKYKSEALGVGDVKLPCEMDAQGPKQMNIPGGDRSTPAAVGAMEDKSAEHKRTQYSCYCCKLSMKEGDPAIYAERAGYDKLWHPACFVCSTCHELLVDMIYFWKNEKLYCGRHYCDSEKPRCAGCDELIFSNEYTQAENQNWHLKHFCCFDCDSILAGEIYVMVNDKPVCKPCYVKNHAVVCQGCHNAIDPEVQRVTYNNFSWHASTECFLCSCCSKCLIGQKFMPVEGMVFCSVECKKRMS

SEQ ID NO: 24348 - protein, 69 aa, Homo sapiens
LRRTGRRKFDGAGRVAVERRRGSSAGFPCSQRSRRPAEPGRGIPDRRRRGPIGRVNMDLENKVKKKNMS

SEQ ID NO: 24349 - protein, 203 aa, Homo sapiens
LRRTGRRKFDGAGRVAVERRRGSSAGFPCSQRSRRPAEPGRGIPDRRRRGPIGRVNMDLENKVKKMGLGHEQGFGAPCLKCKEKCEGFELHFWRKICRNCKCGQEEHDVLLSNEEDRKVGKLFEDTKYTTLIAKLKSDGIPMYKRNVMILTNPVAAKKNVSINTVTYEWAPPVQNQALVNDMEQRVSLLKFLEYLFGAVSLMT

SEQ ID NO: 24350 - protein, 48 aa, Homo sapiens
LGGGSSTAPGEWLLSGAAGVPQVSRVRSGAGGQLNPAVGSRIGGGGDP

SEQ ID NO: 24351 - protein, 36 aa, Homo sapiens
LGRTLLSFIAFYSVTACAWGKTKVISEQNAADSRIG

SEQ ID NO: 24352 - protein, 299 aa, Homo sapiens
LPPPPPRFVARRKMADLEEQLSDEEKVRIAAKFIIHAPPGEFNEVFNDVRLLLNNDNLLREGAAHAFAQYNLDQFTPVKIEGYEDQVLITEHGDLGNGKFLDPKNRICFKFDHLRKEATDPRPCEVENAVESWRTSVETALRAYVKEHYPNGVCTVYGKKIDGQQTIIACIESHQFQAKNFWNGRWRSEWKFTITPSTTQVVGILKIQVHYYEDGNVQLVSHKDIQDSLTVSNEVQTAKEFIKIVEAAENEYQTAISENYQTMSDTTFKALRRQLPVTRTKIDWNKILSYKIGKEMQNA

SEQ ID NO: 24353 - protein, 20 aa, Homo sapiens
MADLEEQLSDEEKMVIIKLK

SEQ ID NO: 24354 - protein, 95 aa, Homo sapiens
MKNHTVHRYVQDQTMQDLSCSRKPVAASAMFQRSSLLPRLLVSAGMIHRPGGAARAAAAAAARAPPEPARRRGRGLGGKSRGPRARRLFLLQPYC

SEQ ID NO: 24355 - protein, 27 aa, Homo sapiens
LIILRMIYGVFMSVSLDFDSLLIHCNM

SEQ ID NO: 24356 - protein, 41 aa, Homo sapiens
LLLLAWYFGSLLVIFCVELACGVWTYEQELMSEESHLAIEQ

SEQ ID NO: 24357 - protein, 104 aa, Homo sapiens
LDPLVPSALRAAMLYLEDYLEMIEQLPMDLRDRFTEMREMDLQVQNAMDQLEQRVSEFFMNAKKNKPEWREEQMASIKKDYYKALEDADEKVQLANQIYDLQHF

SEQ ID NO: 24358 - protein, 23 aa, Homo sapiens
LAFSWPLAGEHINEKCHKLKNQT

SEQ ID NO: 24359 - protein, 948 aa, Homo sapiens
LPALLPFVALLFTLSLQSPGVKMLQVHRTGLGRLGVSLSKGLHHKAVLAVRREDVNAWERRAPLAPKHIKGITNLGYKVLIQPSNRRAIHDKDYVKAGGILQEDISEACLILGVKRPPEEKLMSRKTYAFFSHTIKAQEANMGLLDEILKQEIRLIDYEKMVDHRGVRVVAFGQWAGVAGMINILHGMGLRLLALGHHTPFMHIGMAHNYRNSSQAVQAVRDAGYEISLGLMPKSIGPLTFVFTGTGNVSKGAQAIFNELPCEYVEPHELKEVSQTGDLRKVYGTVLSRHHHLVRKTDAVYDPAEYDKHPERYISRFNTDIAPYTTCLINGIYWEQNTPRLLTRQDAQSLLAPGKFSPAGVEGCPALPHKLVAICDISADTGGSIEFMTECTTIEHPFCMYDADQHIIHDSVEGSGILMCSIDNLPAQLPIEATECFGDMLYPYVEEMILSDATQPLESQNFSPVVRDAVITSNGTLPDKYKYIQTLRESRERAQSLSMGTRRKVLVLGSGYISEPVLEYLSRDGNIEITVGSDMKNQIEQLGKKYNINPVSMDICKQEEKLGFLVAKQDLVISLLPYVLHPLVAKACITNKVNMVTASYITPALKELEKSVEDAGITIIGELGLDPGLDHMLAMETIDKAKEVGATIESYISYCGGLPAPEHSNNPLRYKFSWSPVGVLMNVMQSATYLLDGKVVNVAGGISFLDAVTSMDFFPGLNLEGYPNRDSTKYAEIYGISSAHTLLRGTLRYKGYMKALNGFVKLGLINREALPAFRPEANPLTWKQLLCDLVGISPSSEHDVLKEAVLKKLGGDNTQLEAAEWLGLLGDEQVPQAESILDALSKHLVMKLSYGPEEKDMIVMRDSFGIRHPSGHLEHKTIDLVAYGDINGFSAMAKTVGLPTAMAAKMLLDGEIGAKGLMGPFSKEIYGPILERIKAEGIIYTTQSTIKP

SEQ ID NO: 24360 - protein, 750 aa, Homo sapiens
LPFVALLFTLSLQSPGVKMLQVHRTGLGRLGVSLSKGLHHKAVLAVRREDVNAWERRAPLAPKHIKGITNLGYKVLIQPSNRRAIHDKDYVKAGGILQEDISEACLILGVKRPPEEKLMSRKTYAFFSHTIKAQEANMGLLDEILKQEIRLIDYEKMVDHRGVRVVAFGQWAGVAGMINILHGMGLRLLALGHHTPFMHIGMAHNYRNSSQAVQAVRDAGYEISLGLMPKSIGPLTFVFTGTGNVSKGAQAIFNELPCEYVEPHELKEVSQTGDLRKVYGTVLSRHHHLVRKTDAVYDPAEYDKHPERYISRFNTDIAPYTTCLINGIYWEQNTPRLLTRQDAQSLLAPGKFSPAGVEGCPALPHKLVAICDISADTGGSIEFMTECTTIEHPFCMYDADQHIIHDSVEGSGILMCSIDNLPAQLPIEATECFGDMLYPYVEEMILSDATQPLESQNFSPVVRDAVITSNGTLPDKYKYIQTLRESRERAQSLSMGTRRKVLVLGSGYISEPVLEYLSRDGNIEITVGSDMKNQIEQLGKKYNINPVSMDICKQEEKLGFLVAKQDLVISLLPYVLHPLVAKACITNKVNMVTASYITPALKELEKSVEDAGITIIGELGLDPGLDHMLAMETIDKAKEVGATIESYISYCGGLPAPEHSNNPLRYKFSWSPVGVLMNVMQSATYLLDGKVVNVAGGISFLDAVTSMDFFPGLNLEGYPNRDSTKYAEIYGISSAHTLLRGTLRYKGLEC

SEQ ID NO: 24361 - protein, 529 aa, Homo sapiens
LPFVALLFTLSLQSPGVKMLQVHRTGLGRLGVSLSKGLHHKAVLAVRREDVNAWERRAPLAPKHIKGITNLGYKVLIQPSNRRAIHDKDYVKAGGILQEDISEACLILGVKRPPEEKLMSRKTYAFFSHTIKAQEANMGLLDEILKQEIRLIDYEKMVDHRGVRVVAFGQWAGVAGMINILHGMGLRLLALGHHTPFMHIGMAHNYRNSSQAVQAVRDAGYEISLGLMPKSIGPLTFVFTGTGNVSKGAQAIFNELPCEYVEPHELKEVSQTGDLRKVYGTVLSRHHHLVRKTDAVYDPAEYDKHPERYISRFNTDIAPYTTCLINGIYWEQNTPRLLTRQDAQSLLAPGKFSPAGVEGCPALPHKLVAICDISADTGGSIEFMTECTTIEHPFCMYDADQHIIHDSVEGSGILMCSIDNLPAQLPIEATECFGDMLYPYVEEMILSDATQPLESQNFSPVVRDAVITSNGTLPDKYKYIQTLRESRERAQSLSMGTRRKVLVLGSGYISEPVLEYLSRDGNIEITDLT

SEQ ID NO: 24362 - protein, 25 aa, Homo sapiens
MAGVLKKTTGLVGLAVCNTPHEKFK

SEQ ID NO: 24363 - protein, 619 aa, Homo sapiens
VCPHQAMRAPGALLARMSRLLLLLLLKVSASSALGVAPASRNETCLGESCAPTVIQRRGRDAWGPGNSARDVLRARAPREEQGAAFLAGPSWDLPAAPGRDPAAGRGAEASAAGPPGPPTRPPGPWRWKGARGQEPSETLGRGNPTALQLFLQISEEEEKGPRGAGISGRSQEQSVKTVPGASDLFYWPRRAGKLQGSHHKPLSKTANGLAGHEGWTIALPGRALAQNGSLGEGIHEPGGPRRGNSTNRRVRLKNPFYPLTQESYGAYAVMCLSVVIFGTGIIGNLAVMCIVCHNYYMRSISNSLLANLAFWDFLIIFFCLPLVIFHELTKKWLLEDFSCKIVPYIEVASLGVTTFTLCALCIDRFRAATNVQMYYEMIENCSSTTAKLAVIWVGALLLALPEVVLRQLSKEDLGFSGRAPAERCIIKISPDLPDTIYVLALTYDSARLWWYFGCYFCLPTLFTITCSLVTARKIRKAEKACTRGNKRQIQLESQMNCTVVALTILYGFCIIPENICNIVTAYMATGVSQQTMDLLNIISQFLLFFKSCVTPVLLFCLCKPFSRAFMECCCCCCEECIQKSSTVTSDDNDNEYTTELELSPFSTIRREMSTFASVGTHC

SEQ ID NO: 24364 - protein, 74 aa, Homo sapiens
VDGASFLLKVWDGTRTPFPSWRVLIQDLVLEGDLSHIHRLQNLTIDILVYDNHVHVARSLKVMYSRKKCYFMFL

SEQ ID NO: 24365 - protein, 7 aa, Homo sapiens
MVNLAYF

SEQ ID NO: 24366 - protein, 51 aa, Homo sapiens
LVGPGLRRQPLPRRGKPQVLPAPVPAPSVVAAAAAAGRFLLSTASARAPPA

SEQ ID NO: 24367 - protein, 75 aa, Homo sapiens
LEFLCLFYVGKGRLWFLLPLLLHCHLFLHCVELGGVFNVGRDFLPNAINAALSLGPRDTESPGAVSSDGVHVRRR

SEQ ID NO: 24368 - protein, 105 aa, Homo sapiens
LLLLSSFLPAQGLIFVVDSNDRERVQESADELQKMLQEDELRDAVLLVFANKQDMPNAMPVSELTDKLGLQHLRSRTWYVQATCATQGTGLYDGLDWLSHELSKR

SEQ ID NO: 24369 - protein, 136 aa, Homo sapiens
VSRCCSCERPASPSRPPSAAGSQPAPRLDSLSPTPTPTLTPPVRPAAPLVAFASPHMASSAQSGGSSGGPAVPTVQRGIIKMVLSGCAIIVRGQPRGGPPPERQINLSNIRAGNLARRAAATQPDAKDTPDEVGVS

SEQ ID NO: 24370 - protein, 966 aa, Homo sapiens
VSRCCSCERPASPSRPPSAAGSQPAPRLDSLSPTPTPTLTPPVRPAAPLVAFASPHMASSAQSGGSSGGPAVPTVQRGIIKMVLSGCAIIVRGQPRGGPPPERQINLSNIRAGNLARRAAATQPDAKDTPDEPWAFPAREFLRKKLIGKEVCFTIENKTPQGREYGMIYLGKDTNGENIAESLVAEGLATRREGMRANNPEQNRLSECEEQAKAAKKGMWSEGNGSHTIRDLKYTIENPRHFVDSHHQKPVNAIIEHVRDGSVVRALLLPDYYLVTVMLSGIKCPTFRREADGSETPEPFAAEAKFFTESRLLQRDVQIILESCHNQNILGTILHPNGNITELLLKEGFARCVDWSIAVYTRGAEKLRAAERFAKERRLRIWRDYVAPTANLDQKDKQFVAKVMQVLNADAIVVKLNSGDYKTIHLSSIRPPRLEGENTQDKNKKLRPLYDIPYMFEAREFLRKKLIGKKVNVTVDYIRPASPATETVPAFSERTCATVTIGGINIAEALVSKGLATVIRYRQDDDQRSSHYDELLAAEARAIKNGKGLHSKKEVPIHRVADISGDTQKAKQFLPFLQRAGRSEAVVEYVFSGSRLKLYLPKETCLITFLLAGIECPRGARNLPGLVQEGEPFSEEATLFTKELVLQREVEVEVESMDKAGNFIGWLHIDGANLSVLLVEHALSKVHFTAERSSYYKSLLSAEEAAKQKKEKVWAHYEEQPVEEVMPVLEEKERSASYKPVFVTEITDDLHFYVQDVETGTQLEKLMENMRNDIASHPPVEGSYAPRRGEFCIAKFVDGEWYRARVEKVESPAKIHVFYIDYGNREVLPSTRLGTLSPAFSTRVLPAQATEYAFAFIQVPQDDDARTDAVDSVVRDIQNTQCLLNVEHLSAGCPHVTLQFADSKGDVGLGLVKEGLVMVEVRKEKQFQKVITEYLNAQESAKSARLNLWRYGDFRADDADEFGYSR

SEQ ID NO: 24371 - protein, 79 aa, Homo sapiens
LPKRHRMALCFLLVLQPSKPLGHMQALWKNSIKPRVILLQIPDCLGSWTCIFPKRTVLEGDRRAARGLGVEGRKRGQDG

SEQ ID NO: 24372 - protein, 37 aa, Homo sapiens
MCTLQLLCRFFVTFFSQVFQLCACSLESPVTTEILKV

SEQ ID NO: 24373 - protein, 50 aa, Homo sapiens
MCHTQTRTESDTTNTCLGGEVKAQPPHPTAPQGLEDLVCVRTVSLPGNVT

SEQ ID NO: 24374 - protein, 30 aa, Homo sapiens
LAGLSSGGALCCGCLCVRSPSNCTAGQIPS

SEQ ID NO: 24375 - protein, 34 aa, Homo sapiens
LCPTIRNLRCGRGAFTATRVSRQTGRDSSLLRPS

SEQ ID NO: 24376 - protein, 141 aa, Homo sapiens
VILNLWWVLLQFSCCGGISYKDWSQNMYFNCSEDNPSRERCSVPYSCCLPTPDQAVINTMCGQGMQAFDYLEASKVIYTNGCIDKLVNWIHSNLFLLGGVALGLAIPQLVGILLSQILVNQIKDQIKLQLYNQQHRADPWY

SEQ ID NO: 24377 - protein, 65 aa, Homo sapiens
LFSYILLLLFHFSSVSAVPTSLRFLFVDEDPELLHTLTSNPLPSLLGPISTGETGSALGPQSGVG

SEQ ID NO: 24378 - protein, 521 aa, Homo sapiens
LDHRGGSGAGNVTMLGSKKKYIVNGNSGIKAQIQFADQKQEFNKRPTKIGRRSLSRSISQSSTDSYSSAASYTDSSDDETSPRDKQQKNSKGSSDFCVKNIKQAEFGRREIEIAEQEMPALMALRKRAQGEKPLAGAKIVGCTHITAQTAVLMETLGALGAQCRWAACNIYSTLNEVAAALAESGFPVFAWKGESEDDFWWCIDRCVNVEGWQPNMILDDGGDLTHWIYKKYPNMFKKIKGIVEESVTGVHRLYQLSKAGKLCVPAMNVNDSVTKQKFDNLYCCRESILDGLKRTTDMMFGGKQVVVCGYGEVGKGCCAALKAMGSIVYVTEIDPICALQACMDGFRLVKLNEVIRQVDIVITCTGNKNVVTREHLDRMKNSCIVCNMGHSNTEIDVASLRTPELTWERVRSQVDHVIWPDGKRIVLLAEGRLLNLSCSTVPTFVLSITATTQALALIELYNAPEGRYKQDVYLLPKKMDEYVASLHLPTFDAHLTELTDEQAKYLGLNKNGPFKPNYYRY

SEQ ID NO: 24379 - protein, 85 aa, Homo sapiens
MLRRKPTRLELKLDDIEEFENIRKDLETRKKQKEDVEVVGGSDGEGAIGLSSDPKSREQMINDRIGYKPQPKPNNRSSQFGSLEF

SEQ ID NO: 24380 - protein, 32 aa, Homo sapiens
LFLSKALLSGAYYVLVLKEYILPCCSEETHSK

SEQ ID NO: 24381 - protein, 50 aa, Homo sapiens
LTFGFVVNFITLLEVTVQFQPAFYPSEVIIRSCHIISPVPNISHPLQKLF

SEQ ID NO: 24382 - protein, 35 aa, Homo sapiens
LVSDFFLILMVPAVVRVGLSKDLRVCRGRALCCCS

SEQ ID NO: 24383 - protein, 64 aa, Homo sapiens
MWSGSIHTCWHPLLSLLRAVFFEVDLGGLTSKTCVFYFHKSIYPWSKVSSFNITLVKMTWYDQH

SEQ ID NO: 24384 - protein, 95 aa, Homo sapiens
MRWILFIGALIGSSICGQEKFFGDQVLRINVRNGDEISKLSQLVNSNNLKLNFWKSPSSFNRPVDVLVPSVSLQAFKSFLRSQGLEYAVTIEDLQ

SEQ ID NO: 24385 - protein, 107 aa, Homo sapiens
MRWILFIGALIGSSICGQEKFFGDQVLRINVRNGDEISKLSQLVNSNNLKLNFWKSPSSFNRPVDVLVPSVSLQAFKSFLRSQGLEYAVTIEDLQVGRLCLLPPALA

SEQ ID NO: 24386 - protein, 25 aa, Homo sapiens
MRWILFIGALIGSSICGQEKFFGPF

SEQ ID NO: 24387 - protein, 164 aa, Homo sapiens
MRWILFIGALIGSSICGQEKFFGDQVLRINVRNGDEISKLSQLVNSNNLKLNFWKSPSSFNRPVDVLVPSVSLQAFKSFLRSQGLEYAVTIEDLQALLDNEDDEMQHNEGQERSSNNFNYGAYHSLEAIYHEMDNIAADFPDLARRVKIGHSFENRPISALGKA

SEQ ID NO: 24388 - protein, 298 aa, Homo sapiens
VRLEPRTWSVGENMSLRRHIGNPEYLMKRIPQNPRYQHIKSRLDTDYRYKKDELFKRLKVTTFAQLIIQVASLSDQTLEVTAEEIQRLEDNDSAASDPDAETTARTNGKGNPGEQSPSPEQFINNAGAGDSSRSTLQSVISGVGELDLDKGPVKKAEPHTKDKPYPDCPFLLLDVRDRDSYQQCHIVGAYSYPIATLSRTMNPYSNDILEYKNAHGKIIILYDDDERLASQAATTMCERGFENLFMLSGGRLNQANSSGRESKVPGARSAQNLPGGGPASHSNPRSLSSGHLQGKPWK

SEQ ID NO: 24389 - protein, 386 aa, Homo sapiens
VRLEPRTWSVGENMSLRRHIGNPEYLMKRIPQNPRYQHIKSRLDTGNSMTKYTEKLEEIKKNYRYKKDELFKRLKVTTFAQLIIQVASLSDQTLEVTAEEIQRLEDNDSAASDPDAETTARTNGKGNPGEQSPSPEQFINNAGAGDSSRSTLQSVISGVGELDLDKGPVKKAEPHTKDKPYPDCPFLLLDVRDRDSYQQCHIVGAYSYPIATLSRTMNPYSNDILEYKNAHGKIIILYDDDERLASQAATTMCERGFENLFMLSGGLKVLAQKFPEGLITGSLPASCQQALPPGSARKRSSPKGPPLPAENKWRFTPEDLKKIEYYLEEEQGPADHPSRLNQANSSGRESKVPGARSAQNLPGGGPASHSNPRSLSSGHLQGKPWK

SEQ ID NO: 24390 - protein, 138 aa, Homo sapiens
VRLEPRTWSVGENMSLRRHIGNPEYLMKRIPQNPRYQHIKSRLDTGNSMTKYTEKLEEIKKNYRYKKDELFKRLKVTTFAQLIIQVASLSDQTLEVTAEEIQRLEDNDSAASDPDAETTARTNGKGNPVSSVVLGNWI

SEQ ID NO: 24391 - protein, 109 aa, Homo sapiens
VRLEPRTWSVGENMSLRRHIGNPEYLMKRIPQNPRYQHIKSRLDTGNSMTKYTEKLEEIKKNYRYKKDELFKRLKVTTFAQLIIQVASLSDQTLEVTAEEIQRLEGNEN

SEQ ID NO: 24392 - protein, 67 aa, Homo sapiens
VRLEPRTWSVGENMSLRRHIGNPEYLMKRIPQNPRYQHIKSRLDTGACVYLTSSPALPDCAMNGLCF

SEQ ID NO: 24393 - protein, 82 aa, Homo sapiens
VRLEPRTWSVGENMSLRRHIGNPEYLMKRIPQNPRYQHIKSRLDTGRTVPVFPPSLVSSATKTLSSFISTHLTPNCNCDPPF

SEQ ID NO: 24394 - protein, 98 aa, Homo sapiens
LRTARALRGSATLHPERFGAGPRGIQPGTGGDPRTLRKLPPISLSSEPLAQHRPETPASKMKAIFCLWTEYPTKDLILKAMEHVYPHGSSGQTGGETV

SEQ ID NO: 24395 - protein, 12 aa, Homo sapiens
MAQILLTVWLSS

SEQ ID NO: 24396 - protein, 731 aa, Homo sapiens
MAAGGAVAAAPECRLLPYALHKWSSFSSTYLPENILVDKPNDQSSRWSSESNYPPQYLILKLERPAIVQNITFGKYEKTHVCNLKKFKVFGGMNEENMTELLSSGLKNDYNKETFTLKHKIDEQMFPCRFIKIVPLLSWGPSFNFSIWYVELSGIDDPDIVQPCLNWYSKYREQEAIRLCLKHFRQHNYTEAFESLQKKTKIALEHPMLTDIHDKLVLKGDFDACEELIEKAVNDGLFNQYISQQEYKPRWSQIIPKSTKGDGEDNRPGMRGGHQMVIDVQTETVYLFGGWDGTQDLADFWAYSVKENQWTCISRDTEKENGPSARSCHKMCIDIQRRQIYTLGRYLDSSVRNSKSLKSDFYRYDIDTNTWMLLSEDTAADGGPKLVFDHQMCMDSEKHMIYTFGGRILTCNGSVDDSRASEPQFSGLFAFNCQCQTWKLLREDSCNAGPEDIQSRIGHCMLFHSKNRCLYVFGGQRSKTYLNDFFSYDVDSDHVDIISDGTKKDSGMVPMTGFTQRATIDPELNEIHVLSGLSKDKEKREENVRNSFWIYDIVRNSWSCVYKNDQAAKDNPTKSLQEEEPCPRFAHQLVYDELHKVHYLFGGNPGKSCSPKMRLDDFWSLKLCRPSKDYLLRHCKYLIRKHRFEEKAQVDPLSALKYLQNDLYITVDHSDPEETKEFQLLASALFKSGSDFTALGKYCSIIYPARCPSIWKVGFWFLLRETSGEMFQSNR

SEQ ID NO: 24397 - protein, 74 aa, Homo sapiens [sequence omitted]

SEQ ID NO: 24398 - protein, 437 aa, Homo sapiens [sequence omitted]

SEQ ID NO: 24399 - protein, 35 aa, Homo sapiens
LLLGVVALLPLCGKRIQALPRACGCGGPEVLVVPR

SEQ ID NO: 24400 - protein, 88 aa, Homo sapiens [sequence omitted]

SEQ ID NO: 24401 - protein, 38 aa, Homo sapiens
MLHSKRVIPAGLSANVLSSQLFLLCTLPCFLSHVTCIS

SEQ ID NO: 24402 - protein, 351 aa, Homo sapiens
LHSSLGNSARLSQKQQQRAGRETSTCSLRIISAPTMATFVELSTKAKMPIVGLGTWKSPLGKVKEAVKVAIDAGYRHIDCAYVYQNEHEVGEAIQEKIQEKAVKREDLFIVSKLWPTFFERPLVRKAFEKTLKDLKLSYLDVYLIHWPQGFKSGDDLFPKDDKGNAIGGKATFLDAWEAMEELVDEGLVKALGVSNFSHFQIEKLLNKPGLKYKPVTNQVECHPYLTQEKLIQYCHSKGITVTAYSPLGSPDRPWAKPEDPSLLEDPKIKEIAAKHKKTAAQVLIRFHIQRNVIVIPKSVTPARIVENIQVFDFKLSDEEMATILSFNRNWRACNVLQSSHLEDYPFNAEY

SEQ ID NO: 24403 - protein, 45 aa, Homo sapiens
MPAAVMSPRRRWLFGGSEERLLLLLLLLVAPLQKSSKNSAVGSVR

SEQ ID NO: 24404 - protein, 38 aa, Homo sapiens [sequence omitted]

SEQ ID NO: 24405 - protein, 216 aa, Homo sapiens
VQDVESLLNMIQEILDFDQAQQIKCFNSNLFLCNICFCKKLGSECMYFLECRHVYCKDCLKDYFEIQIRDGQVQCLNCPEPKCPSVATTGQVKELVEAELFAYYDCLLLQSTLDLMADVVYCPHACCQLPVMQEPGYIMGICSSCNFAFCTLCRLTYHGVSPCKVTAEKLIDLLNEYLQADKANKRLLEQRYDKRVIQKALEEMESKEWLEKNFKN

SEQ ID NO: 24406 - protein, 74 aa, Homo sapiens
VIAVMGPDFQADLPNAKMKPSKELTATNEDIKRASTSVSLGTWLRSFHSAHHSEWAAISHHWNSNPRGPGVISE

SEQ ID NO: 24407 - protein, 16 aa, Homo sapiens
MSLPLFSVWLWTGIYE

SEQ ID NO: 24408 - protein, 15 aa, Homo sapiens
LITHGVPVLTSLFWF

SEQ ID NO: 24409 - protein, 365 aa, Homo sapiens
MAEAVERTDELVREYLLFRGFTHTLRQLDAEIKADKEKGFRVDKIVDQLQQLMQVYDLAALRDYWSYLERRLFSRLEDIYRPTIHKLKTSLFRFYLVYTIQTNRNDKAQEFFAKQATELQNQAEWKDWFVLPFLPSPDTNPTFATYFSRQWADTFIVSLHNFLSVLFQCMPVPVILNFDAECQRTNQVQEENEVLRQKLFALQAEIHRLKKEEQQPEEEEALVQHKLPPYVSNMDRLGDSELAMVCSQRNASLSQSPRVGFLSSLLPQSKKSPSRLSPAQGPPQPQSSAKKESFGGQGTKGKDPTSGAKDGKSLLSGLATGESGWSQHRQRRLQDHGKERKELFSTTTSQVWGCPEHPWGHSCSY

SEQ ID NO: 24410 - protein, 96 aa, Homo sapiens
LHNTLHFIANSFYYQVFFLFLWKVELNEIESRCEEYPLTRAFCQLISTLVESSFPSNLGAGLRPPGFDPYLQFLRDSVFLRFRTRAYRRAAEKMEA

SEQ ID NO: 24411 - protein, 110 aa, Homo sapiens
VFFMVLLLLFIVIRFLHCVVDRYLHSRYDSVFLSLDSFASETNLDFRSGLAIVSQHDLDQLQADAINAFGESLQKKLLDIEGLYSKVRSRYSFIQALVRRIRGLLRISRN

SEQ ID NO: 24412 - protein, 64 aa, Homo sapiens
LTFPSSVIMGKWLFFFFFFETESHSAAQAGVQWHSLGSLQLLPPGPSDSRAAASQVAGITTTPG

SEQ ID NO: 24413 - protein, 490 aa, Homo sapiens
LPSFKASSSGELDTRLGGAGLAEVPWCICSPWLLASGSHSAEAWGGPGMTRWSFSRHLAHHFLFLIVRWPLSQQNLNGVPSITNPIKTANQHQGKKQHPSQEKPQVLTPSPRKQKLNRKYRSHHDQMICKCLSLSISYSATIGGLTTIIGTSTSLIFLEHFNNQYPAAEVVNFGTWFLFSFPISLIMLVVSWFWMHWLFLGCNFKETCSLSKKKKTKREQLSEKRIQEEYEKLGDISYPEMVTGFFFILMTVLWFTREPGFVPGWDSFFEKKGYRTDATVSVFLGFLLFLIPAKKPCFGKKNDGENQEHSLGTEPIITWKDFQKTMPWEIVILVGGGYALASGSKSSGLSTWIGNQMLSLSSLPPWAVTLLACILVSIVTEFVSNPATITIFLPILCSLSETLHINPLYTLIPVTMCISFAVMLPVGNPPNAIVFSYGHCQIKDMVKAGLGVNVIGLVIVMVAINTWGVSLFHLDTYPAWARVSNITDQA

SEQ ID NO: 24414 - protein, 177 aa, Homo sapiens
LKDKMHWKMLLLLLLYYNAEASMCHRWSRAVLFPAAHRPKRSSSLPLNPVLQTSLEEVELLYEFLLAELEISPDLQISIKDEELASLRKASDFRTVCNNVIPKSIPDIRRLSASLSSHPGILKKEDFERTVLTLAYTAYRTALSHGHQKDIWAQSLVSLFQALRHDLMRSSQPGVPP

SEQ ID NO: 24415 - protein, 253 aa, Homo sapiens
LSQRQDQVPRLPVQKSRQESPRAEENPKWREGKKETSESSVQKAGRAAAAQAGAAASRVPGLSGSNLAPCNKGRLSAREDVSNSKMQAQQYQQQRRKFAAAFLAFIFILAAVDTAEAGKKEKPEKKVKKSDCGEWQWSVCVPTSGDCGLGTREGTRTGAECKQTMKTQRCKIPCNWKKQFGAECKYQFQAWGECDLNTALKTRTGSLKRALHNAECQKTVTISKPCGKLTKPKPQAESKKKKKEGKKQEKMLD

SEQ ID NO: 24416 - protein, 251 aa, Homo sapiens
LSQRQDQVPRLPVQKSRQESPRAEENPKWREGKKETSESSVQKAGRAAAAQAGAAASRVPGLSGSNLAPCNKGRLSAREDVSNSKMQAQQYQQQRRKFAAAFLAFIFILAAVDTAEAGKKEKPEKKVKKSDCGEWQWSVCVPTSGDCGLGTREGTRTGAECKQTMKTQRCKIPCNWKKQFGAECKYQFQAWGECDLNTALKTRTGSLKRALHNAECQKTVTISKPCGKLTKPKPQEKGKWRHRSGESLRRW

SEQ ID NO: 24417 - protein, 452 aa, Homo sapiens
MILSSQRRVCQWRWNLPRRPRRLSSRLSTATPCARSLGPSRPSPTLPPVTASMTMRWKVRNGTCLQTSLQHPSVTLTITAISTPLEKEEPPLEMNTGVDSSCQTIIPKIKLEPHEVDQFLNFSPKEAPVDHLHLPPTPPSSHGSDSEGSLSPNPRLHPFSLPQTHSPSRAAPRAPSALSSSPLLTAPHKLQGSGPLVLTEEEKRTLIAEGYPIPTKLPLSKSEEKALKKIRRKIKNKISAQESRRKKKEYMDSLEKKVESCSTENLELRKKVEVLENTNRTLLQQLQKLQTLVMGKVSRTCKLAGTQTGTCLMVVVLCFAVAFGSFFQGYGPYPSATKMALPSQHSLQEPYTASVVRSRNLLIYEEHSPPEESSSPGSAGELGGWDRGSSLLRVSGLESRPDVDLPHFIISNETSLEKSVLLELQQHLVSAKLEGNETLKVVELDRRVNTTF

SEQ ID NO: 24418 - protein, 45 aa, Homo sapiens
MVKHFTLWMVCLSLVFRKLLSLLPKKKEGQVNFFNQKKITHFIKP

SEQ ID NO: 24419 - protein, 55 aa, Homo sapiens
VFLLTFFSYSLLHASRKTFSNVKVSISEQWTPSAFNTSVELPVEVSRTECWDGSK

SEQ ID NO: 24420 - protein, 72 aa, Homo sapiens
LKWRAGRLGRGPREDGGALARLRQGLPVAPEVLRAQTGTQPPEALRVPSRCQALLASAGHFAQGRLPVRGRG

SEQ ID NO: 24421 - protein, 16 aa, Homo sapiens
MVWLASPGVSTLLGLC

SEQ ID NO: 24422 - protein, 234 aa, Homo sapiens
LLGQKEHILRRRGPCLPHQALGHQEDPHLQASLAFQGERGPCSSFIMNWHMIISGLIVVVLKVVGMTLFLLYFPQIFNKSNDGFTTTRSYGTVSQIFGSSSPSPNGFITTRSYGTVCPKDWEFYQARCFFLSTSESSWNESRDFCKGKGSTLAIVNTPEKLKFLQDITDAEKYFIGLIYHREEKRWRWINNSVFNGNVTNQNQNFNCATIGLTKTFDAASCDISYRRICEKNAK

SEQ ID NO: 24423 - protein, 211 aa, Homo sapiens
LLGQKEHILRRRGPCLPHQALGHQEDPHLQASLAFQGERGPCSSFIMNWHMIISGLIVVVLKVVGMTLFLLYFPQIFNKSNDGFTTTRSYGTVCPKDWEFYQARCFFLSTSESSWNESRDFCKGKGSTLAIVNTPEKLKFLQDITDAEKYFIGLIYHREEKRWRWINNSVFNGNVTNQNQNFNCATIGLTKTFDAASCDISYRRICEKNAK

SEQ ID NO: 24424 - protein, 201 aa, Homo sapiens
LLGQKEHILRRRGPCLPHQALGHQEDPHLQASLAFQGERGPCSSFIMNWHMIISGLIVVVLKVVGMTLFLLYFPQIFNKSNDGFTTTRSYGTVCPKDWEFYQARCFFLSTSESSWNESRDFCKGKGSTLAIVNTPEKLKFLQDITDAEKYFIGLIYHREEKRWRWINNSVFNGKYVNMPQFPGDLGLLQKTKPEIAGFTLE

SEQ ID NO: 24425 - protein, 99 aa, Homo sapiens
LLGQKEHILRRRGPCLPHQALGHQEDPHLQASLAFQGERGPCSSFIMNWHMIISGLIVVVLKVVGMTLFLLYFPQIFNKSNDGFTTTRSYGTEVSSGHN

SEQ ID NO: 24426 - protein, 243 aa, Homo sapiens
LILTFVAAALAAPFDDDDKIVGGYNCEENSVPYQVSLNSGYHFCGGSLINEQWVVSAGHCYKSRIQVRLGEHNIEVLEGNEQFINAAKIIRHPQYDRKTLNNDIMLIKLSSRAVINARVSTISLPTAPPATGTKCLISGWGNTASSGADYPDELQCLDAPVLSQAKCEASYPGKITSNMFCVGFLEGGKDSCQGDSGGPVVCNGQLQGVVSWGDGCAQKNKPGVYTKVYNYVKWIKNTIAANS

SEQ ID NO: 24427 - protein, 21 aa, Homo sapiens
LLQVPHPGETGRAQHRSPGGE
